United States Patent Application Publication US 2018/0126003 A1 - sequence listing, part 14

SEQ ID NO: 20799 - DNA, 945 bp, Artificial Sequence
  derived and/or modified sequence
atgcgaggtttcaacaaaaccactgtggttacacagttcatcctggtgggtttctccagcctgggggagctccagctgctgctttttgtcatctttcttctcctatacttgacaatcctggtggccaatgtgaccatcatggccgttattcgcttcagctggactctccacactcccatgtatggctttctattcatcctttcattttctgagtcctgctacacttttgtcatcatccctcagctgctggtccacctgctctcagacaccaagaccatctccttcatggcctgtgccacccagctgttctttttccttggctttgcttgcaccaactgcctcctcattgctgtgatgggatatgatcgctatgtagcaatttgtcaccctctgaggtacacactcatcataaacaaaaggctggggttggagttgatttctctctcaggagccacaggtttctttattgctttggtggccaccaacctcatttgtgacatgcgtttttgtggccccaacagggttaaccactatttctgtgacatggcacctgttatcaagttagcctgcactgacacccatgtgaaagagctggctttatttagcctcagcatcctggtaattatggtgccttttctgttaattctcatatcctatggcttcatagttaacaccatcctgaagatcccctcagctgagggcaagaaggcctttgtcacctgtgcctcacatctcactgtggtctttgtccactatggctgtgcctctatcatctatctgcggcccaagtccaagtctgcctcagacaaggatcagttggtggcagtgacctacacagtggttactcccttacttaatcctcttgtctacagtctgaggaacaaagaggtaaaaactgcattgaaaagagttcttggaatgcctgtggcaaccaagatgagctaa

SEQ ID NO: 20800 - DNA, 1020 bp, Artificial Sequence
  derived and/or modified sequence
atggagaagcgggagatcaacagcgccttcggcgtgaagagccggtatcgctacctgggccctctttacgttatttatacttattaccacatcagaatcatcctgctgtttacacaggctccagacctagacctgttcccagctgccaacgtcagtatcatgggcgcaataaagctgtctcacaaccttcatacccccatgtattttttcctctgtggcctgtccttctctgagacttgtaccacagtggtcgtgatccctagaatgctcgtggattttctgtccgagagtaagacaatttctctgcccgaatgtgcaacgcagatgtttttttttcttggctttgccagcaataattgtttcatcatggccgcaatgagctatgacaggtatacggcgattcataatcccctgcagtaccatactttaatgaccagaaagatctgccttcaaatgatgatggcctcctggatggtgggcttcctgttcagtttgtgtattatagtgactgtcttcaatctgagtctgtgcgatctgaataccatccagcactatttttgtgacataagccctgttgtaagcttagcttgcaattacactttttatcacgagatggcaatattcgtattaagtgcctttgtccttgtggggtcttgcattctaattatgatctcttatgtattcatcgttttcattgttatcaagatgccatccgctaagggacgcagcaaagcttttagcacgtgcagctcacacctgacagtggtcagcattcactatgggttcgcttgttttgtatatcttcgcccaaagaactcaaatagttttgacgaggatatgcttaccgccatgatttacacgatcctgatgccacttctgaaccccatagtgtactccctccggaacaaggaaatgcagatcgcactgagaaagacgttaggcagcgtgttcggggtctttccccaaaagaccaaaaaggagccagaacacttgaaaaaactgcattcaatcgataaatag

SEQ ID NO: 20801 - DNA, 945 bp, Artificial Sequence
  derived and/or modified sequence
atgcggggcttcaacaagaccaccgtggtgacccagttcatcctggtcggttttagtagtctcggtgagctgcagcttctattgttcgttatcttcctgctcctgtatctgaccatcctggtcgccaatgtgaccatcatggccgtgatccgcttctcatggaccttgcatacacctatgtacgggttcctgtttattctctcatttagtgagagttgctacacattcgtgattatccctcagctgctggtccaccttttgtctgatacaaaaaccattagctttatggcctgcgccacccagctcttcttcttcttgggctttgcctgcacgaactgcctgcttatcgcagtgatgggctatgatcggtacgtcgcgatctgccaccctctccgttacacactgataatcaacaaaaggctgggcctcgagcttatcagcctttctggggctaccggcttttttatcgcactcgtggccaccaaccttatctgcgacatgcgattttgcggcccaaaccgggtgaatcactacttttgcgacatggctccagtgattaaactggcatgcacggacacacacgtcaaggagctcgccctcttcagtctgtcaatattagtgatcatggtgcccttcctgctaatcctcattagttatggattcattgtcaatacaatactgaagatccccagtgccgaagggaagaaagcttttgtgacgtgtgctagccacttgaccgtggtgttcgttcattacggatgtgcaagcatcatctatctccgtcccaaatccaaatccgcgtctgataaggaccagctcgtagctgttacttatacagtggtaactccgctcttgaacccgctcgtgtacagcctgagaaataaggaagtgaagaccgccctcaagcgcgtcttgggaatgccagtggcaacgaaaatgtcttag

SEQ ID NO: 20802 - DNA, 1020 bp, Artificial Sequence
  derived and/or modified sequence
atggaaaaacgcgagatcaattcagcattcggggtgaaatcgaggtacagatatctcggcccactgtacgtcatctatacgtactaccatatcaggatcatcctgttattcacccaggccccagacctggacctgttcccagccgcaaatgttagtattatgggcgctattaaactgtcacataatcttcatacacctatgtactttttcctgtgtggcctttctttttctgaaacatgcactacagtcgtcgtgatcccgaggatgttggttgactttctcagcgaatctaaaaccattagtctaccggaatgcgccacacagatgttcttcttcctggggtttgcttctaacaattgcttcatcatggccgcaatgtcctacgatcggtacactgcaatccacaacccccttcagtaccataccctgatgacccggaaaatctgcctgcagatgatgatggcttcttggatggtagggttcctattttccctgtgcattatcgtaaccgtctttaatctgagtctatgcgatctgaatacgattcagcactatttctgcgacatctctcctgtcgtatccctagcctgcaattacaccttctatcatgagatggcaatcttcgtcctcagcgccttcgtgctggtgggctcctgcatcctcataatgatttcatacgtttttatagtgtttattgtaatcaagatgcccagtgccaaaggacgcagtaaagcattttctacctgcagctcacatctgaccgtcgtgagcattcactacggcttcgcttgctttgtctacctgcgaccaaaaaattcaaactcctttgacgaggacatgctgactgccatgatatatacaattctgatgcccctgctaaatcctatcgtctattctctgcgaaacaaggagatgcaaatcgcgctgagaaaaaccctgggcagcgtgttcggagtctttcctcagaaaactaagaaggagcctgaacatttgaaaaaactgcatagcatcgataagtag

SEQ ID NO: 20803 - DNA, 945 bp, Artificial Sequence
  derived and/or modified sequence
atgcgcggtttcaacaaaacgacagtagtgacccaatttatacttgtgggattcagttcattgggggaactgcaacttctgttgtttgtgatctttctgctgctctacctgacaatcctggtggccaacgttacgattatggcagtaataaggttcagttggacactccacacccctatgtacgggttcctttttatcttaagtttcagcgagagctgttacaccttcgtcatcattcctcagctgttggtccacctgttaagcgacaccaagacaatctccttcatggcatgtgctacccagctgtttttcttccttggttttgcatgcaccaattgccttctcatcgccgtgatgggctacgatcgatatgtggccatctgtcatcccctgagatacacgctcattattaacaaaaggcttgggctggaactgattagcctgtctggcgctacaggctttttcatcgcgctggtagccacaaatctgatatgcgatatgcgattttgcggcccaaaccgtgtgaaccactacttttgtgatatggcccctgtgatcaagttagcctgtacagatactcacgtcaaggaactcgccttgttttccctttctattctagtgattatggtgccatttctgctgattctaatttcctatggtttcatcgtgaatactattttaaaaatccctagtgctgagggtaagaaagcctttgtgacctgtgctagtcatctgactgtcgttttcgtgcactacggatgtgcttcaataatctacctgcgtcccaaatccaagtccgctagcgataaggaccagttggtagccgtcacttacacagtggtgacgcccctgttaaatcctctggtttactctttaaggaacaaagaggtgaagacggccctcaagagagttctcgggatgcctgttgctactaagatgtcctag

SEQ ID NO: 20804 - protein, 312 aa, Artificial Sequence
  derived and/or modified sequence
MERVNETVVREVIFLGFSSLARLQQLLFVIFLLLYLFTLGTNAIIISTIVLDRALHIPMYFFLAILSCSEICYTFIIVPKMLVDLLSQKKTISFLGCAIQMFSFLFLGCSHSFLLAVMGYDRYIAICNPLRYSVLMGHGVCMGLVAAACACGFTVAQIITSLVFHLPFYSSNQLHHFFCDIAPVLKLASHHNHFSQIVIFMLCTLVLAIPLLLILVSYVHILSAILQFPSTLGRCKAFSTCVSHLIIVTVHYGCASFIYLRPQSNYSSSQDALISVSYTIITPLFNPMIYSLRNKEFKSALCKIVRRTISLL

SEQ ID NO: 20805 - DNA, 939 bp, Artificial Sequence
  derived and/or modified sequence
atggagagagtgaacgagaccgtggtgagagaggtgatcttcctgggcttcagcagcctggccagactgcagcagctgctgttcgtgatcttcctgctgctgtacctgttcaccctgggcaccaacgccatcatcatcagcaccatcgtgctggacagagccctgcacatccccatgtacttcttcctggccatcctgagctgcagcgagatctgctacaccttcatcatcgtgcccaagatgctggtggacctgctgagccagaagaagaccatcagcttcctgggctgcgccatccagatgttcagcttcctgttcctgggctgcagccacagcttcctgctggccgtgatgggctacgacagatacatcgccatctgcaaccccctgagatacagcgtgctgatgggccacggcgtgtgcatgggcctggtggccgccgcctgcgcctgcggcttcaccgtggcccagatcatcaccagcctggtgttccacctgcccttctacagcagcaaccagctgcaccacttcttctgcgacatcgcccccgtgctgaagctggccagccaccacaaccacttcagccagatcgtgatcttcatgctgtgcaccctggtgctggccatccccctgctgctgatcctggtgagctacgtgcacatcctgagcgccatcctgcagttccccagcaccctgggcagatgcaaggccttcagcacctgcgtgagccacctgatcatcgtgaccgtgcactacggctgcgccagcttcatctacctgagaccccagagcaactacagcagcagccaggacgccctgatcagcgtgagctacaccatcatcacccccctgttcaaccccatgatctacagcctgagaaacaaggagttcaagagcgccctgtgcaagatcgtgagaagaaccatcagcctgctgtag

SEQ ID NO: 20806 - DNA, 939 bp, Artificial Sequence
  derived and/or modified sequence
atggaacgtgtgaacgagacagttgtcagagaggtgatcttcttgggattctcatccctggcacgcctgcagcaattgctttttgtcatcttcctcctgctctatctgtttactctcggcaccaatgccattattataagtactatcgtactggacagagccctgcatatacctatgtattttttcttggctatactgtcttgtagtgagatctgttacacttttattatcgtccccaaaatgctggtcgatctcttgtctcagaagaaaactatttcttttctgggatgcgctattcaaatgtttagttttctctttctgggatgctcacacagtttcttgctggcagtcatgggttatgaccggtacattgccatttgtaatcccttgcggtacagcgtgctgatgggccacggtgtgtgcatgggcttggtagcagcagcttgcgcctgtgggttcactgtggcacagatcattacatcactggtttttcacctccccttctactcgtctaatcagctgcatcacttcttctgcgacatagcccctgttctgaagctcgcctcccaccacaaccatttttctcaaatcgtgatcttcatgctctgtacactggtactggccatccccctgctcctgatcttagtgtcgtatgtccacatactcagtgctattctgcaattcccgtcaacactgggccgatgtaaggccttttcaacgtgtgtgagccatttaatcatcgtgactgtgcactacggttgcgccagctttatatatctgagacctcagtcgaattactcatcttctcaagatgcactgatttcagtgtcttatacaataataactccattgttcaatcccatgatctactcattaagaaacaaggaatttaagtccgccctttgcaagattgtccgacgcaccatttctctcctttag

SEQ ID NO: 20807 - DNA, 939 bp, Artificial Sequence
  derived and/or modified sequence
atggagcgggtgaatgaaacagtggtgcgggaggtgatcttcctgggcttcagcagcctggcccggctgcagcagctgctcttcgtcatcttcctgctgctgtacctgttcaccctgggcaccaatgccatcatcatcagcaccatcgtgctggaccgggccctgcacatccccatgtacttcttcctggccatcctgagctgcagcgagatctgctacaccttcatcatcgtgcccaagatgctggtggacctgctgagccagaagaagaccatctccttcctgggctgtgccatccagatgttctccttcctgttcctgggctgcagccacagcttcctgctggccgtgatgggctatgaccgctacatcgccatctgcaaccccctgcgctacagcgtgctgatgggccacggcgtgtgcatgggcctggtggccgccgcctgtgcctgtggcttcaccgtggcccagatcatcaccagcctggtgttccacctgcccttctacagcagcaaccagctgcaccacttcttctgtgacatcgcccctgtgctgaagctggccagccaccacaaccacttcagccagatcgtcatcttcatgctgtgcaccctggtgctggccatccccctgctgctgatcctggtgtcctatgtgcacatcctgagcgccatcctgcagttccccagcaccctgggccgctgcaaggccttcagcacctgtgtgagccacctgatcatcgtgacagtgcactacggctgtgccagcttcatctacctgcggccccagagcaactacagcagcagccaggatgccctgatctctgtgtcctacaccatcatcacccccctcttcaaccccatgatctacagcctgaggaacaaggagttcaagagcgccctgtgcaagatcgtgcggaggaccatcagcctgctgtag

SEQ ID NO: 20808 - DNA, 939 bp, Artificial Sequence
  derived and/or modified sequence
atggagcgggtcaatgagactgtggtgagagaggtcatcttcctcggcttctcatccctggccaggctgcagcagctgctctttgttatcttcctgctcctctacctgttcactctgggcaccaatgcaatcatcatttccaccattgtcctggacagggcccttcatatccccatgtacttcttccttgccatcctctcttgctctgagatttgctacaccttcatcattgtacccaagatgctggttgacctgctgtcccagaagaagaccatttctttcctgggctgtgccatccaaatgttttccttcctcttccttggctgctctcactcctttctgctggcagtcatgggttatgatcgttacatagccatctgtaacccactgcgctactcagtgctaatgggacatggggtgtgtatgggactagtggctgctgcctgtgcctgtggcttcactgttgcacagatcatcacatccttggtatttcacctgcctttttattcctccaatcaactacatcacttcttctgtgacattgctcctgtcctcaagctggcatctcaccataaccactttagtcagattgtcatcttcatgctctgtacattggtcctggctatccccttattgttgatcttggtgtcctatgttcacatcctctctgccatacttcagtttccttccacactgggtaggtgcaaagctttttctacctgtgtatctcacctcattattgtcactgtccactatggctgtgcctcctttatctacttaaggcctcagtccaactactcctcaagccaggatgctctaatatcagtatcctacactattataactccattgttcaacccaatgatttatagcttgagaaataaagagttcaaatcagctctttgtaaaattgtgagaagaacaatttccctgttgtaa

SEQ ID NO: 20809 - DNA, 939 bp, Artificial Sequence
  derived and/or modified sequence
atggagcgggtgaacgagaccgtggtgcgggaggtgatcttcctgggcttctcgagtttagcaagattgcagcagcttcttttcgtaatatttctgttgctgtatctgtttactttggggaccaacgcaatcatcatttcaaccattgtgctggatcgagccctgcacatcccgatgtattttttcctggcgatcctgtcatgctcagagatctgttataccttcattatcgtgcctaaaatgctggtggatcttttgtctcagaagaaaaccatttctttcctcggatgcgccatacagatgttctcctttctgtttctgggctgctctcattctttcttgcttgctgtgatgggctatgacagatatatcgcgatatgtaaccccctgaggtacagcgtacttatgggccacggggtatgcatgggcctggttgctgcagcctgcgcatgcggctttacagtggctcaaatcattacatctctggtcttccacttgcctttctatagttctaaccagctgcatcactttttttgtgatatcgcccctgtgctgaaactcgcttctcatcataaccacttctctcagatcgtgatcttcatgctgtgtacactagtgctagctatacccctgctgctcatcctggtgagctacgttcatattctgtccgccatcctgcagtttccctccactctcggacggtgcaaggccttcagtacctgtgtgtctcacctcattatcgtaacggtccattatggatgcgccagctttatatatctcagaccacagagtaactacagttcgagtcaggacgccctcatttcagtgtcttacacaattattactcccctgttcaatcctatgatctacagtctgcgtaacaaagagttcaaaagcgccctgtgcaagatcgtgcggcgtaccatctcactgctatag

SEQ ID NO: 20810 - DNA, 939 bp, Artificial Sequence
  derived and/or modified sequence
atggaacgggtcaacgaaacagttgtcagagaggtcatcttcctggggttctcctcattggcacggctgcagcaattacttttcgtcatcttcctgctcttatacttgttcaccctggggaccaatgctatcatcattagcaccattgtcctggacagggccctccacataccaatgtatttctttctggctatcctcagttgttcagagatttgttataccttcataatcgtgcccaagatgctcgtcgacctactttctcagaaaaagaccatctcctttctgggctgtgctattcagatgttttctttcctttttctcggctgtagccatagctttctgctcgctgtcatgggctacgatcggtacatcgcaatttgcaatcccctaaggtatagtgtgctgatgggccacggcgtgtgcatgggcctcgtggcggcagcctgcgcgtgtggctttaccgtggcccagatcatcacatcccttgtttttcacttgccattctatagctcaaatcaactgcatcactttttttgcgacatcgccccagtactcaaactcgcctcccaccacaatcacttttctcagatcgtcatctttatgttgtgcacactcgtgctagcgatacccttgctactgatccttgtgagttacgtccacatactgagcgctattctgcagttcccctccacactcgggagatgtaaggccttcagcacatgtgtgagtcacctgatcatcgtgaccgtgcactacgggtgtgccagctttatttatctgagaccacaatccaattactcttcatcccaggatgccttgatcagtgtttcatataccatcatcacaccattattcaaccccatgatttactcgctaaggaataaggagttcaagtctgccctatgtaaaatcgtgcgcaggactatctctcttttgtag

SEQ ID NO: 20811 - protein, 326 aa, Artificial Sequence
  derived and/or modified sequence
MVLNVYCCFFQISDIQTMKINQTILKEFILVGFSVYPHVQTFLFVVFFCLYLLTLAGNLIIMGLTWVDRSLHTPMYLFLSALSFSETCYTLTIVPKMLEDLLAKDRSISVTGCSLQMCFFLGLGGTNCIILTLMGYDRFLAICNPLRYPLLMTNIVCGQLVASACTAGFFISLTETALIFRDSFCRPNLVKHFFCHMLAVIRLSCIDSNHTEFIITLISVSGLLGTLLLIILTDVFIISTVLRIPSAEGKQKAFTTCASHLTVVIIHFGFASIVYLKPEASGDDTLIAVPYTVITPFLSPIIFSLRNKDMKNAFRRMMGNTVALKK

SEQ ID NO: 20812 - DNA, 981 bp, Artificial Sequence
  derived and/or modified sequence
atggtgctgaacgtgtactgctgcttcttccagatcagcgacatccagaccatgaagatcaaccagaccatcctgaaggagttcatcctggtgggcttcagcgtgtacccccacgtgcagaccttcctgttcgtggtgttcttctgcctgtacctgctgaccctggccggcaacctgatcatcatgggcctgacctgggtggacagaagcctgcacacccccatgtacctgttcctgagcgccctgagcttcagcgagacctgctacaccctgaccatcgtgcccaagatgctggaggacctgctggccaaggacagaagcatcagcgtgaccggctgcagcctgcagatgtgcttcttcctgggcctgggcggcaccaactgcatcatcctgaccctgatgggctacgacagattcctggccatctgcaaccccctgagataccccctgctgatgaccaacatcgtgtgcggccagctggtggccagcgcctgcaccgccggcttcttcatcagcctgaccgagaccgccctgatcttcagagacagcttctgcagacccaacctggtgaagcacttcttctgccacatgctggccgtgatcagactgagctgcatcgacagcaaccacaccgagttcatcatcaccctgatcagcgtgagcggcctgctgggcaccctgctgctgatcatcctgaccgacgtgttcatcatcagcaccgtgctgagaatccccagcgccgagggcaagcagaaggccttcaccacctgcgccagccacctgaccgtggtgatcatccacttcggcttcgccagcatcgtgtacctgaagcccgaggccagcggcgacgacaccctgatcgccgtgccctacaccgtgatcacccccttcctgagccccatcatcttcagcctgagaaacaaggacatgaagaacgccttcagaagaatgatgggcaacaccgtggccctgaagaagtag

SEQ ID NO: 20813 - DNA, 981 bp, Artificial Sequence
  derived and/or modified sequence
atggtgctgaatgtctactgctgcttctttcagatctcagatatccaaacaatgaagattaaccagaccatccttaaagagtttattctggttggcttttcagtctatccgcatgtgcaaacgtttctctttgtggtgttcttctgcctgtacctactcaccctggccggaaacttgatcatcatgggactgacatgggtcgataggagccttcacacccctatgtacttattcctcagcgctctgtcattctctgaaacctgttatacgctgaccatcgtgcccaagatgttagaggacctgttggcaaaggaccgatccatttcagtcaccgggtgcagcttgcaaatgtgtttctttctggggctgggcggtacgaattgcatcatcctgacacttatggggtatgataggtttttggctatttgcaatcctctgaggtatcctttgctgatgactaatatcgtgtgcgggcagctggttgctagcgcttgcacagctggatttttcatttctttgacggagaccgccttgatttttcgcgattcattctgtcggccaaatttggttaagcacttcttttgtcatatgctcgccgtcataagactgagttgcattgatagtaaccacacggagttcatcatcacgctgatctccgtgagtgggctgctggggaccctcttgctgataattctgaccgacgtgttcatcattagtactgtccttcgaatcccttctgcagagggtaagcagaaagcttttacaacatgtgcgtctcatctgacagtcgtcattatccatttcggatttgctagcatcgtgtatttgaagccagaggcctcgggagacgacacactgatcgccgtgccatataccgttattactcctttcctgtcccccataatcttctctctacgtaacaaagacatgaaaaatgcgttccggcggatgatggggaataccgttgctctgaaaaaatag

SEQ ID NO: 20814 - DNA, 981 bp, Artificial Sequence
  derived and/or modified sequence
atggtgctgaatgtgtactgctgcttcttccagatcagtgacatccagaccatgaagatcaaccagaccatcctgaaggagttcatcctggtgggcttctctgtgtacccccacgtgcagaccttcctgtttgtggtgttcttctgcctgtacctgctgaccctggccggcaacctgatcatcatgggcctgacctgggtggacaggagcctgcacacccccatgtacctgttcctgagcgccctgtccttcagcgagacctgctacaccctgaccatcgtgcccaagatgctggaggacctgctggccaaggacaggagcatctctgtgacaggctgcagcctgcagatgtgcttcttcctgggcctgggcggcaccaactgcatcatcctgaccctgatgggctatgaccgcttcctggccatctgcaaccccctgcgctaccccctgctgatgaccaacatcgtgtgtggccagctggtggccagcgcctgcacagctggcttcttcatcagcctgacagaaacagccctgatcttccgggacagcttctgccggcccaacctggtgaagcacttcttctgccacatgctggccgtcatccggctgagctgcatcgacagcaaccacacagagttcatcatcaccctcatctctgtgtctggcctgctgggcaccctgctgctgatcatcctgacagatgtgttcatcatcagcacagtgctgcgcatccccagcgctgagggcaagcagaaggccttcaccacctgtgccagccacctgactgtggtgatcatccacttcggctttgccagcatcgtgtacctgaagccagaggccagcggagatgacaccctgattgctgtgccctacaccgtcatcacccccttcctgagccccatcatcttcagcctgaggaacaaggacatgaagaatgccttccggaggatgatgggcaacacagtggccctgaagaagtag

SEQ ID NO: 20815 - DNA, 981 bp, Artificial Sequence
  derived and/or modified sequence
atggtgttgaatgtttattgttgtttctttcaaatttcagacattcaaacgatgaagatcaaccagacaatcctgaaggaattcattcttgttggcttttctgtgtacccacatgtacagacatttctttttgtggtcttcttttgtctctaccttctcacccttgcaggtaatctgatcatcatgggtctaacttgggtggacaggtccctccacacccctatgtatctcttccttagtgcactctccttctctgagacctgctatacgctgaccatcgtccccaagatgctggaagatctactggccaaggacagaagcatttcagtcacaggttgtagcttacagatgtgcttcttcttgggacttggtggcacaaactgtatcattctcactttgatgggatatgaccgcttcctggccatctgtaaccctctaagatatccactgcttatgaccaacattgtatgtggacaacttgtggcctctgcttgcactgcaggcttctttatctctcttacagagactgcactgatattcagggactctttctgcagacccaaccttgtcaaacacttcttctgccatatgctggcagttattaggctgtcttgtatagacagtaaccacacagaattcattataacactgatctcagtgtctggtttgctgggtacccttctgctcatcatcctgactgatgtcttcattatttctactgtcctcaggatcccttcagctgagggcaagcagaaggccttcaccacctgtgcctcccacctcaccgtggttataatccactttggttttgcatctattgtttatttgaagccagaagcctcaggagatgacacactcatagcagtcccttatactgtcattacccccttcctcagccccatcatattcagcctgaggaataaggacatgaaaaatgcttttagaagaatgatgggaaacacagttgccttgaaaaaataa

SEQ ID NO: 20816 - DNA, 981 bp, Artificial Sequence
  derived and/or modified sequence
atggtgctgaacgtgtactgctgcttcttccagatcagcgacatccagacaatgaaaattaaccagactatcctcaaagagtttatcttggtaggcttctccgtgtacccgcacgtgcaaacatttctgtttgtcgtctttttctgtctgtacctgctgacgctggccggcaatctcatcattatggggctgacctgggtggacagatctcttcatacgccgatgtacttattcctgagcgcactcagtttcagcgagacttgctacactttgacaattgttcctaagatgctggaagatctgcttgcaaaggaccgtagtatttccgtgacgggctgcagtttgcaaatgtgcttcttcctggggcttggaggcaccaattgcataatcctgacactgatgggatatgacaggtttcttgccatttgtaatcccctcaggtaccccttgctcatgactaacatcgtttgcgggcagttggtggctagcgcctgtaccgctggattcttcatcagtctaaccgagaccgctttaatcttcagagattcattctgcaggccaaacctcgtgaagcattttttctgccatatgttagctgtgatccggttgtcatgcattgactccaaccatactgagtttattattaccctgatcagcgtctccggcttgcttgggacactgcttctgatcatcttaactgatgttttcattatttcaactgtgctgcgtattccatccgcagaagggaaacagaaagcattcaccacttgcgcttctcacctcactgtggtgattatccactttggatttgccagcatcgtgtacctgaaaccggaagcatctggcgacgataccctgatcgccgtgccctacaccgttataaccccgtttctctctcctattattttctcgctgcggaacaaagacatgaagaacgcgtttcgtcggatgatgggaaacaccgtggccttaaagaagtag

SEQ ID NO: 20817 - DNA, 981 bp, Artificial Sequence
  derived and/or modified sequence
atggtacttaatgtctattgctgctttttccagatctccgacattcagactatgaagatcaatcagaccatcctcaaggagttcatcctggtgggcttctccgtttaccctcatgtacagaccttcctctttgtcgtcttcttctgtctgtatcttctgaccctcgcgggaaatcttattattatggggcttacctgggtggacagaagccttcacacgcctatgtacttgtttctctccgcactctccttttcagaaacgtgttataccttgactatcgtgccaaagatgctcgaggacttactggctaaggaccgctctattagtgtcacgggctgtagtttacagatgtgcttctttcttgggctcgggggaactaattgcatcatcctgacactgatggggtacgaccgttttctcgccatatgtaatcccctacgctaccccctcttgatgacgaatattgtttgtggccagcttgtggcctcagcctgtaccgcgggtttcttcatctcactgacagagactgcactcatcttcagggacagcttctgccgaccaaatctggtgaagcatttcttctgtcacatgcttgccgtcatcagactgtcatgcatcgactccaaccataccgaatttattattaccctaatcagtgtgtcgggcttgctaggaacgctgcttctgatcatcctgaccgacgtttttatcattagcacagttcttaggatcccctcagcagagggaaaacaaaaggcttttacgacttgtgcctcgcatctgactgtagtcattattcatttcgggtttgcaagtattgtgtacctgaaaccagaggcgtctggcgatgacaccctgatagctgtgccctataccgtgattacaccgttcctctcccccataatcttctcattgcgaaacaaggatatgaagaacgcctttaggcggatgatggggaacactgtggccttaaaaaagtag

SEQ ID NO: 20818 - DNA, 255 bp, Artificial Sequence
  derived and/or modified sequence
atggtgctggccagcttcacccagaacatgaacatcaagtgctgcgagttcgtgtgccaggtggtgcagaagtacatcatcaacaacctggtgaagaagagaaactgcgagcccagctggagcgtgtacagcatcctgtgcctgtacgtgatcttcagcagcaacagattcatcatcatcggcttcaccaagagaagcagaaagaagagcgagggcgagatcgccagcaccgccctgcaggccaccagcggctag

SEQ ID NO: 20819 - DNA, 255 bp, Artificial Sequence
  derived and/or modified sequence
atggttttagccagcttcacacagaacatgaacatcaagtgttgcgagtttgtatgccaggtggttcagaagtatattatcaacaatctggtgaagaagagaaattgcgaaccctcatggtcagtctattccatcctatgcctgtacgtcatctttagttctaataggtttataataatagggttcactaagcggtcacggaagaagtccgagggcgaaatcgcatctaccgccctccaagctaccagcggttag

SEQ ID NO: 20820 - DNA, 255 bp, Artificial Sequence
  derived and/or modified sequence
atggtgctggccagcttcacccagaacatgaacatcaagtgctgtgaatttgtgtgccaggtggtgcagaagtacatcatcaacaacctggtgaagaagaggaactgtgagcccagctggagcgtgtacagcatcctgtgcctgtatgtgatcttcagcagcaaccgcttcatcatcatcggcttcaccaagaggagcaggaagaagtctgagggggagatcgccagcacagccctgcaggccaccagcggctag

SEQ ID NO: 20821 - DNA, 255 bp, Artificial Sequence
  derived and/or modified sequence
atggtgctggccagcttcacccagaacatgaacatcaagtgctgcgagtttgtgtgtcaggtggtacagaagtacattattaataatctcgtgaagaaaaggaattgtgaaccttcatggtcagtgtacagtattttatgcctgtacgtgatcttttctagcaaccggtttattattatcggtttcacgaaacgatctaggaagaagtctgaaggtgagattgccagcaccgccttgcaggcaacttcaggatag

SEQ ID NO: 20822 - DNA, 255 bp, Artificial Sequence
  derived and/or modified sequence
atggtgctggcatcatttactcagaacatgaatatcaagtgttgcgaattcgtgtgccaggttgtgcagaagtatattatcaacaacttggtcaagaagaggaattgcgaaccatcatggagtgtgtacagtatcctctgtctgtacgtgattttcagctccaacaggtttatcataatcggattcacaaagagatctcgcaagaagtcagagggggagatcgcttccacggcgttacaagctacttcaggatag

SEQ ID NO: 20823 - protein, 313 aa, Artificial Sequence
  derived and/or modified sequence
MGQTNVTSWRDFVFLGFSSSGELQLLLFALFLSLYLVTLTSNVFIIIAIRLDSHLHTPMYLFLSFLSFSETCYTLGIIPRMLSGLAGGDQAISYVGCAAQMFFSASWACTNCFLLAAMGFDRYVAICAPLHYASHMNPTLCAQLVITSFLTGYLFGLGMTLVIFHLSFCSSHEIQHFFCDTPPVLSLACGDTGPSELRIFILSLLVLLVSFFFITISYAYILAAILRIPSAEGQKKAFSTCASHLTVVIIHYGCASFVYLRPKASYSLERDQLIAMTYTVVTPLLNPIVYSLRNRAIQTALRNAFRGRLLGKG

SEQ ID NO: 20824 - DNA, 942 bp, Artificial Sequence
  derived and/or modified sequence
atgggccagaccaacgtgaccagctggagagacttcgtgttcctgggcttcagcagcagcggcgagctgcagctgctgctgttcgccctgttcctgagcctgtacctggtgaccctgaccagcaacgtgttcatcatcatcgccatcagactggacagccacctgcacacccccatgtacctgttcctgagcttcctgagcttcagcgagacctgctacaccctgggcatcatccccagaatgctgagcggcctggccggcggcgaccaggccatcagctacgtgggctgcgccgcccagatgttcttcagcgccagctgggcctgcaccaactgcttcctgctggccgccatgggcttcgacagatacgtggccatctgcgcccccctgcactacgccagccacatgaaccccaccctgtgcgcccagctggtgatcaccagcttcctgaccggctacctgttcggcctgggcatgaccctggtgatcttccacctgagcttctgcagcagccacgagatccagcacttcttctgcgacaccccccccgtgctgagcctggcctgcggcgacaccggccccagcgagctgagaatcttcatcctgagcctgctggtgctgctggtgagcttcttcttcatcaccatcagctacgcctacatcctggccgccatcctgagaatccccagcgccgagggccagaagaaggccttcagcacctgcgccagccacctgaccgtggtgatcatccactacggctgcgccagcttcgtgtacctgagacccaaggccagctacagcctggagagagaccagctgatcgccatgacctacaccgtggtgacccccctgctgaaccccatcgtgtacagcctgagaaacagagccatccagaccgccctgagaaacgccttcagaggcagactgctgggcaagggctag

SEQ ID NO: 20825 - DNA, 942 bp, Artificial Sequence
  derived and/or modified sequence
atgggacaaaccaacgtaactagttggagggatttcgtctttcttggattcagcagctctggcgaactccaacttctgctgtttgcactcttcctttcattatacctggtgacactcacttctaacgtgttcataatcatcgcgattcgtctggacagccacctgcatacacccatgtacttgttcctgtccttcctgtcattcagtgaaacctgctacacactgggaattatccctagaatgctgagcggcctcgcaggaggcgatcaggcaatctcttacgtcggatgtgccgctcaaatgttcttcagcgcctcttgggcatgtaccaactgcttcctgctggctgcgatggggttcgaccggtatgttgcaatctgtgcccccctgcactatgcaagccacatgaatcctacactgtgcgctcagctcgtgatcacctcctttctcaccggatatctgttcggcctaggtatgaccctggtaatattccatctgtcattctgttcgtcacatgaaatacagcactttttctgtgataccccccctgttctcagtttagcttgtggggacacaggccctagtgaactgcgcattttcatcctgagcctcctggtgctactggtgtcgttctttttcattacaatttcttatgcttacatcctcgctgcaatcctacggataccatcagccgagggtcagaagaaagcattctctacttgtgccagtcacctgactgtggtgataattcactacggctgtgcttcgttcgtctatctgcggccaaaggcttcctacagcttggagcgagatcagctgatcgccatgacatacactgtggtcacccctcttctgaacccgatcgtctatagccttcgtaatagagccattcaaacagccttacgcaatgccttccgggggcgtctgctcggcaagggctag

SEQ ID NO: 20826 - DNA, 942 bp, Artificial Sequence
  derived and/or modified sequence
atgggccagaccaacgtgacctcctggagggactttgtgttcctgggcttcagcagcagcggggagctgcagctgctgctgtttgccctcttcctgagcctgtacctggtgaccctgaccagcaatgtgttcatcatcatcgccatccggctggacagccacctgcacacccccatgtacctgttcctgtccttcctgtccttcagcgagacctgctacaccctgggcatcatccccaggatgctgagcggcctggccggcggggaccaggccatctcctatgtgggctgtgccgcccagatgttcttcagcgcctcctgggcctgcaccaactgcttcctgctggccgccatgggctttgacagatatgtggccatctgtgcccccctgcactacgccagccacatgaaccccaccctgtgtgcccagctggtgatcaccagcttcctgaccggctacctgtttggcctgggcatgaccctggtgatcttccacctgtccttctgcagcagccatgagatccagcacttcttctgtgacaccccacctgtgctgagcctggcctgtggggacaccggccccagcgagctgcgcatcttcatcctgagcctgctggtgctgctggtgtccttcttcttcatcaccatctcctatgcctacatcctggccgccatcctgcgcatccccagcgctgagggccagaagaaggccttcagcacctgtgccagccacctgactgtggtgatcatccactacggctgtgccagctttgtgtacctgcggcccaaggccagctacagcctggagcgggaccagctgattgccatgacctacacagtggtgacccccctgctgaaccccatcgtgtacagcctgaggaacagagccatccagacagccctgagaaatgccttccggggccgcctgctgggcaagggctag

SEQ ID NO: 20827 - DNA, 942 bp, Artificial Sequence
  derived and/or modified sequence
atggggcagaccaacgtaacctcctggagggattttgtcttcctgggcttctccagttctggggagttgcagctccttctctttgccttgttcctctctctgtatctagtcactctgaccagcaatgtcttcattatcatagccatcaggctggatagccatctgcacacccccatgtacctcttcctttccttcctatccttctctgagacctgctacactttgggcatcatccctagaatgctctctggcctggctgggggggaccaggctatctcctatgtgggctgtgctgcccagatgttcttttctgcctcatgggcctgtactaactgcttccttctggctgccatgggctttgacagatatgtggccatctgtgctccactccactatgccagccacatgaatcctaccctctgtgcccagctggtcattacttccttcctgactggatacctctttggactgggaatgacactagttattttccacctctcattctgcagctcccatgaaatccagcactttttttgtgacacgccacctgtgctgagcctagcctgtggagatacaggcccgagtgagctgaggatctttatcctcagtcttttggtcctcttggtctccttcttcttcatcaccatctcctacgcctacatcttggcagcaatactgaggatcccctctgctgaggggcagaagaaggccttctccacttgtgcctcgcaccttacagtggtcattattcattatggctgtgcttccttcgtgtacctgaggcccaaagccagctactctcttgagagagatcagcttattgccatgacctatactgtagtgacccccctccttaatcccattgtttatagtctaaggaatagggctatacagacagctctgaggaatgctttcagagggagattgctgggtaaaggatga

SEQ ID NO: 20828 - DNA, 942 bp, Artificial Sequence
  derived and/or modified sequence
atgggccagaccaacgtgaccagctggcgggacttcgtgttcctgggattctccagcagcggggagctgcagctgctactcttcgccttgtttctcagcctttatcttgtcaccctgaccagcaacgtgtttattattattgccatcaggcttgacagtcacctgcatacgcccatgtacttattcctgtctttcttaagtttctccgagacatgctatacgcttgggatcatacctcgcatgctgagcggtctggccggtggcgaccaggcaatctcatacgtggggtgtgccgcacaaatgtttttcagtgcctcctgggcctgcacaaactgcttcctgcttgccgccatgggattcgacaggtacgttgcgatctgcgctccgctgcattatgcctcccatatgaaccctactctttgcgctcagctggtcattacatcttttctcacagggtacctgttcggtctaggaatgactctagtcatttttcacctgagtttttgttccagtcatgaaatccagcatttcttctgcgacacaccacccgtgctgtctctggcctgcggtgacaccggtcccagcgagttaagaatattcatcctgagcctgctcgtcttactggtatcttttttctttattacaatttcttacgcatatatcttggcggctatcttacgaataccatccgctgaaggacagaaaaaagctttttccacttgcgcctctcatctcacagtggttataatacactacggttgcgcctcttttgtttatctgaggcccaaagccagttatagcctggagcgagatcagttgatcgccatgacatacaccgttgtaacacccctgctgaacccaatcgtgtattctctgagaaaccgcgctatacagaccgccctgcggaatgcatttcgcgggcgcctcttgggcaagggatag

SEQ ID NO: 20829 - DNA, 942 bp, Artificial Sequence
  derived and/or modified sequence
atgggtcaaaccaatgtgacttcgtggagagactttgtttttctggggtttagctcgtcaggagaattgcaattactgctgttcgccctcttcttatcgctttacctcgtcaccttgacttccaatgtattcattattatcgccatacgactggactcgcatctccatacccccatgtacctattcttgtcgttcctgagtttcagtgagacctgctataccctggggattatccccaggatgctgtctggcctggccggaggggaccaggccatatcctatgtggggtgcgccgcacagatgttcttttctgccagttgggcctgcacaaactgtttcctcctcgcagctatggggtttgacaggtatgtcgctatttgtgctcccctgcattatgcttcccacatgaacccgacactgtgcgcacagcttgtgattacatcctttttgactggctacctatttggattagggatgacactggtgatttttcacctctcattttgttcttctcatgagattcaacattttttctgcgatacgccacctgtgcttagcctagcatgcggcgatacgggtccgtctgagctgaggattttcattttaagtttgcttgtgctactggttagctttttcttcattaccatcagctacgcttatattctcgcagcaatccttcgaatcccatctgcagagggccagaagaaagccttctctacgtgtgcctctcacttgactgttgtgattatccattacggatgtgctagtttcgtgtatctccgacccaaggcctcctatagtctcgaaagggatcagctgatcgctatgacgtacaccgtcgttaccccattgctaaatcccattgtgtatagtttgcgcaatagagctatacaaacagccttgagaaatgccttcaggggccgactgttaggaaagggctag

SEQ ID NO: 20830 - protein, 319 aa, Artificial Sequence
  derived and/or modified sequence
MFPANWTSVKVFFFLGFFHYPKVQVIIFAVCLLMYLITLLGNIFLISITILDSHLHTPMYLFLSNLSFLDIWYSSSALSPMLANFVSGRNTISFSGCATQMYLSLAMGSTECVLLPMMAYDRYVAICNPLRYPVIMNRRTCVQIAAGSWMTGCLTAMVEMMSVLPLSLCGNSIINHFTCEILAILKLVCVDTSLVQLIMLVISVLLLPMPMLLICISYAFILASILRISSVEGRSKAFSTCTAHLMVVVLFYGTALSMHLKPSAVDSQEIDKFMALVYAGQTPMLNPIIYSLRNKEVKVALKKLLIRNHFNTAFISILK

SEQ ID NO: 20831 - DNA, 960 bp, Artificial Sequence
  derived and/or modified sequence
atgttccccgccaactggaccagcgtgaaggtgttcttcttcctgggcttcttccactaccccaaggtgcaggtgatcatcttcgccgtgtgcctgctgatgtacctgatcaccctgctgggcaacatcttcctgatcagcatcaccatcctggacagccacctgcacacccccatgtacctgttcctgagcaacctgagcttcctggacatctggtacagcagcagcgccctgagccccatgctggccaacttcgtgagcggcagaaacaccatcagcttcagcggctgcgccacccagatgtacctgagcctggccatgggcagcaccgagtgcgtgctgctgcccatgatggcctacgacagatacgtggccatctgcaaccccctgagataccccgtgatcatgaacagaagaacctgcgtgcagatcgccgccggcagctggatgaccggctgcctgaccgccatggtggagatgatgagcgtgctgcccctgagcctgtgcggcaacagcatcatcaaccacttcacctgcgagatcctggccatcctgaagctggtgtgcgtggacaccagcctggtgcagctgatcatgctggtgatcagcgtgctgctgctgcccatgcccatgctgctgatctgcatcagctacgccttcatcctggccagcatcctgagaatcagcagcgtggagggcagaagcaaggccttcagcacctgcaccgcccacctgatggtggtggtgctgttctacggcaccgccctgagcatgcacctgaagcccagcgccgtggacagccaggagatcgacaagttcatggccctggtgtacgccggccagacccccatgctgaaccccatcatctacagcctgagaaacaaggaggtgaaggtggccctgaagaagctgctgatcagaaaccacttcaacaccgccttcatcagcatcctgaagtag

SEQ ID NO: 20832 - DNA, 960 bp, Artificial Sequence
  derived and/or modified sequence
atgttccccgcaaactggacgtccgtgaaggtgtttttctttttgggcttcttccactacccgaaagttcaagtaattatattcgccgtgtgtctcctaatgtacctgattactctcctcgggaacatatttcttatctcgatcacaatcctcgattctcacttgcatacccccatgtatctgtttttgtctaatctgtccttcctcgatatatggtacagctcaagcgcgctcagccctatgttggctaattttgtcagtgggcggaacaccatttcatttagcgggtgtgccacacagatgtatctgtccctggccatgggcagcacagagtgcgtgctactgcccatgatggcttatgaccgatatgttgctatatgcaatcctctccggtatccagtgatcatgaatcgccgcacatgcgttcagatcgcggcgggctcctggatgacagggtgcctcaccgccatggtcgagatgatgagcgttcttcctctttcactgtgcgggaacagcattattaaccactttacatgtgagatcctggctatcctgaagctggtatgtgttgacacttccctagttcagcttatcatgctggtgattagtgtgcttctcctccctatgcctatgttgctgatatgcataagctacgccttcattctcgccagcatcctccgcatttcctctgtggaggggcgaagtaaagcattcagcacctgtactgcccacctgatggttgtggtacttttttacgggaccgctcttagtatgcatttgaagccatccgccgttgattcacaggaaattgataaattcatggcactggtgtatgccgggcaaacgcctatgctcaacccaatcatttattcactgaggaataaagaggtaaaagtagccctgaaaaaactcctgatcagaaaccactttaacacagcgttcatctctatcctaaaatag

SEQ ID NO: 20833 - DNA, 960 bp, Artificial Sequence
  derived and/or modified sequence
atgtttcctgccaactggacctctgtgaaggtgttcttcttcctgggcttcttccactaccccaaggtgcaggtgatcatctttgctgtgtgcctgctgatgtacctgatcaccctgctgggcaacatcttcctgatcagcatcaccatcctggacagccacctgcacacccccatgtacctgttcctgagcaacctgtccttcctggacatctggtacagcagcagcgccctgagccccatgctggccaactttgtgtctggaagaaacaccatctccttcagcggctgtgccacccagatgtacctgagcctggccatgggcagcacagaatgtgtgctgctgcccatgatggcctatgacagatatgtggccatctgcaaccccctgcgctaccctgtgatcatgaacagaaggacctgtgtgcagattgctgctggctcctggatgacaggctgcctgacagccatggtggagatgatgtctgtgctgcccctgagcctgtgtggcaacagcatcatcaaccacttcacctgtgagatcctggccatcctgaagctggtgtgtgtggacaccagcctggtgcagctgatcatgctggtgatctctgtgctgctgctgcccatgcccatgctgctgatctgcatctcctatgccttcatcctggccagcatcctgcgcatcagctctgtggagggccgcagcaaggccttcagcacctgcacagcccacctgatggtggtggtgctcttctacggcacagccctgtccatgcacctgaagcccagcgctgtggacagccaggagattgacaagttcatggccctggtgtatgccggccagacccccatgctgaaccccatcatctacagcctgaggaacaaggaggtgaaggtggccctgaagaagctgctgatccggaaccacttcaacacagccttcatcagcatcctgaagtag

SEQ ID NO: 20834 - DNA, 1093 bp, Artificial Sequence
  derived and/or modified sequence
gccagatatgtgaaggagggggttatgttttatatatgtgtgacgttaatccttctatgcatacgtacaggtgaacataacataaaaaaatgttcccggcaaattggacatctgtaaaagtatttttcttcctgggattttttcactaccccaaagttcaggtcatcatatttgcggtgtgcttgctgatgtacctgatcaccttgctgggcaacatttttctgatctccatcaccattctagattcccacctgcacacccctatgtacctcttcctcagcaatctctcctttctggacatctggtactcctcttctgccctctctccaatgctggcaaactttgtttcagggagaaacactatttcattctcagggtgcgccactcagatgtacctctcccttgccatgggctccactgagtgtgtgctcctgcccatgatggcatatgaccggtatgtggccatctgcaaccccctgagataccctgtcatcatgaataggagaacctgtgtgcagattgcagctggctcctggatgacaggctgtctcactgccatggtggaaatgatgtctgtgctgccactgtctctctgtggtaatagcatcatcaatcatttcacttgtgaaattctggccatcttgaaattggtttgtgtggacacctccctggtgcagttaatcatgctggtgatcagtgtacttcttctccccatgccaatgctactcatttgtatctcttatgcatttatcctcgccagtatcctgagaatcagctcagtggaaggtcgaagtaaagccttttcaacgtgcacagcccacctgatggtggtagttttgttctatgggacggctctctccatgcacctgaagccctccgctgtagattcacaggaaatagacaaatttatggctttggtgtatgccggacaaacccccatgttgaatcctatcatctatagtctacggaacaaagaggtgaaagtggccttgaaaaaattgctgattagaaatcattttaatactgccttcatttccatcctcaaataacaatcacactcatatagataatcaacattacccagaaaactgca

SEQ ID NO: 20835 - DNA, 960 bp, Artificial Sequence
  derived and/or modified sequence
atgttccccgccaactggaccagcgtgaaggtgttcttcttcctgggattttttcattaccccaaagtgcaggttatcatcttcgccgtctgccttctgatgtacttgatcactctgttaggtaatatcttcctgatctctattactatcctggactcccatctgcatacaccaatgtacctgttcctcagcaacctgtccttcttagacatttggtatagctcatctgctctgtcaccaatgctcgctaacttcgtcagtggcaggaatacaatctccttcagcgggtgcgccacgcaaatgtatctgtctttggccatgggcagcacggagtgtgtactcctgcctatgatggcgtatgatagatatgtggcgatttgtaatccactcagatatcccgtcatcatgaaccggcggacatgcgttcagatagccgcgggctcttggatgaccggttgccttaccgctatggttgaaatgatgtctgtcctgcccctgagcctgtgtgggaactctatcatcaaccattttacgtgtgagatactggcaattctcaagcttgtttgcgtagacacatctttagtccagctgattatgctcgtgattagtgtccttctgctgcccatgccaatgctgttaatctgcatcagctacgcctttattttggccagtatccttcgcatctcttccgtcgagggcaggagcaaagctttctctacttgcaccgcacatctcatggtggtcgttctgttctatggtacagcactgagtatgcacctgaagccttctgccgtggacagccaagaaatcgataagtttatggctctcgtctacgcaggacaaactcccatgctgaatccaatcatttactctctaaggaacaaagaggtgaaggtagcactgaagaaactcttgatccgcaaccacttcaataccgcttttatatcaatcctcaaatag

SEQ ID NO: 20836 - DNA, 960 bp, Artificial Sequence
  derived and/or modified sequence
atgttccctgcgaattggaccagcgtgaaggtattcttttttctcggttttttccactaccctaaagtgcaagtgatcatatttgccgtctgcttgctgatgtacctgattacactccttggaaacatatttttaatatccataacaatcctggattcacacctccatactcccatgtacctgttcctgtccaacctgtcctttctcgacatatggtactccagctccgcactgtcgcctatgctcgctaatttcgtctctgggagaaacactattagctttagcgggtgcgctacacaaatgtacctgtccctggctatgggcagcacagaatgcgtcttgctgcctatgatggcctacgatcggtacgtggctatttgtaacccccttcgctatccagtgattatgaacaggaggacctgcgtccaaattgcagccggtagctggatgactggttgtctgaccgccatggtcgagatgatgtctgtccttcctttgtctttgtgtggtaactccattattaatcatttcacatgcgagatcttggcgatcctcaagttggtctgcgtagacactagcctggttcagctcatcatgctagtaatctcagtgctactgctgccgatgcccatgttgctgatatgcatcagttacgcttttatcctcgcctcaattctgcgaatctcttctgttgaggggagatctaaggcattctctacatgcacggcccacctgatggtagtggttctgttctatggtacagctctgtccatgcacctgaagcccagcgctgtggatagtcaggaaattgataagtttatggctttggtttacgctgggcaaactccaatgctgaacccaattatttactcactccgaaacaaagaggtgaaagtcgccctgaaaaaactgctcatccgcaaccactttaacacagccttcatctctatcctgaaatag

SEQ ID NO: 20837 - protein, 312 aa, Artificial Sequence
  derived and/or modified sequence
MEPLNRTEVSEFFLKGFSGYPALEHLLFPLCSAMYLVTLLGNTAIMAVSVLDIHLHTPVYFFLGNLSTLDICYTPTFVPLMLVHLLSSRKTISFAVCAIQMCLSLSTGSTECLLLAITAYDRYLAICQPLRYHVLMSHRLCVLLMGAAWVLCLLKSVTEMVISMRLPFCGHHVVSHFTCKILAVLKLACGNTSVSEDFLLAGSILLLPVPLAFICLSYLLILATILRVPSAARCCKAFSTCLAHLAVVLLFYGTIIFMYLKPKSKEAHISDEVFTVLYAMVTTMLNPTIYSLRNKEVKEAARKVWGRSRASR

SEQ ID NO: 20838 - DNA, 939 bp, Artificial Sequence
  derived and/or modified sequence
atggagcccctgaacagaaccgaggtgagcgagttcttcctgaagggcttcagcggctaccccgccctggagcacctgctgttccccctgtgcagcgccatgtacctggtgaccctgctgggcaacaccgccatcatggccgtgagcgtgctggacatccacctgcacacccccgtgtacttcttcctgggcaacctgagcaccctggacatctgctacacccccaccttcgtgcccctgatgctggtgcacctgctgagcagcagaaagaccatcagcttcgccgtgtgcgccatccagatgtgcctgagcctgagcaccggcagcaccgagtgcctgctgctggccatcaccgcctacgacagatacctggccatctgccagcccctgagataccacgtgctgatgagccacagactgtgcgtgctgctgatgggcgccgcctgggtgctgtgcctgctgaagagcgtgaccgagatggtgatcagcatgagactgcccttctgcggccaccacgtggtgagccacttcacctgcaagatcctggccgtgctgaagctggcctgcggcaacaccagcgtgagcgaggacttcctgctggccggcagcatcctgctgctgcccgtgcccctggccttcatctgcctgagctacctgctgatcctggccaccatcctgagagtgcccagcgccgccagatgctgcaaggccttcagcacctgcctggcccacctggccgtggtgctgctgttctacggcaccatcatcttcatgtacctgaagcccaagagcaaggaggcccacatcagcgacgaggtgttcaccgtgctgtacgccatggtgaccaccatgctgaaccccaccatctacagcctgagaaacaaggaggtgaaggaggccgccagaaaggtgtggggcagaagcagagccagcagatag

SEQ ID NO: 20839 - DNA, 939 bp, Artificial Sequence
  derived and/or modified sequence
atggagccactcaatcggaccgaggtatccgagtttttcctcaaaggattcagtggatatccggccttagagcacctgctgtttccactgtgcagcgccatgtatcttgtgactctcttaggaaacacagccattatggccgtatcagtgctggatatacacctgcatactccagtgtatttttttctcggaaacctgagtactctggatatttgttacacccccacatttgttcccctcatgcttgtgcatctcctgtcctcacggaagacaatcagctttgcagtgtgcgccatccagatgtgcttatctttgtctacagggagcactgagtgtctcctcctggctattaccgcctatgatcggtatctcgcaatttgtcagccactccgataccacgtcttaatgtcacaccggctgtgtgtgcttctcatgggtgccgcttgggtgctgtgccttctgaaatccgtgacggagatggtaatctctatgcgattaccattctgcggacaccatgtggtgtctcactttacctgtaaaattctcgctgtgctcaagttggcctgtggaaatacgagtgtgagcgaggacttccttttagcaggaagcatcctgctcctcccagtgcccctcgctttcatttgtcttagctatctgctcattctggcgaccatcttgagggtgccttctgctgctcggtgctgtaaagcttttagcacctgtctggcgcacctagcagttgtccttctcttctacgggacaatcatctttatgtacctcaaacccaagtccaaagaagctcacatcagcgacgaggtattcaccgtcctgtacgccatggtgactactatgctgaaccccaccatttattcactgcgcaataaggaagtgaaggaggctgcccggaaagtttggggacggagccgtgcttcaagatag

SEQ ID NO: 20840 - DNA, 939 bp, Artificial Sequence
  derived and/or modified sequence
atggagcccctgaacagaacagaggtgtctgagttcttcctgaagggcttcagcggctacccagccctggagcacctgctcttccccctgtgcagcgccatgtacctggtgaccctgctgggcaacacagccatcatggctgtgtctgtgctggacatccacctgcacacccctgtgtacttcttcctgggcaacctgagcaccctggacatctgctacacccccacctttgtgcccctgatgctggtgcacctgctgagcagcaggaagaccatcagctttgctgtgtgtgccatccagatgtgcctgagcctgagcacaggcagcacagaatgtctgctgctggccatcacagcctatgaccgctacctggccatctgccagcccctgcgctaccacgtgctgatgagccaccggctgtgtgtgctgctgatgggcgccgcctgggtgctgtgcctgctgaagtctgtgacagagatggtgatctccatgaggctgcccttctgtggccaccacgtggtgagccacttcacctgcaagatcctggccgtgctgaagctggcctgtggcaacacctctgtgtctgaggacttcctgctggccggcagcatcctgctgctgcctgtgcccctggccttcatctgcctgagctacctgctgatcctggccaccatcctgcgggtgcccagcgctgcccgctgctgcaaggccttcagcacctgcctggcccacctggccgtggtgctgctcttctacggcaccatcatcttcatgtacctgaagcccaagagcaaggaggcccacatcagtgatgaggtgttcaccgtgctgtatgccatggtgaccaccatgctgaaccccaccatctacagcctgaggaacaaggaggtgaaggaggccgccaggaaggtgtggggccgcagccgggccagcaggtag

SEQ ID NO: 20841 - DNA, 1087 bp, Artificial Sequence
  derived and/or modified sequence
ccgcaccctgtaccctctctccttccatcccagctgtggaccatctcttcagaactctgcagcatggagccgctcaacagaacagaggtgtccgagttctttctgaaaggattttctggctacccagccctggagcatctgctcttccctctgtgctcagccatgtacctggtgaccctcctggggaacacagccatcatggcggtgagcgtgctagatatccacctgcacacgcccgtgtacttcttcctgggcaacctctctaccctggacatctgctacacgcccacctttgtgcctctgatgctggtccacctcctgtcatcccggaagaccatctcctttgctgtctgtgccatccagatgtgtctgagcctgtccacgggctccacggagtgcctgctactggccatcacggcctatgaccgctacctggccatctgccagccactcaggtaccacgtgctcatgagccaccggctctgcgtgctgctgatgggagctgcctgggtcctctgcctcctcaagtcggtgactgagatggtcatctccatgaggctgcccttctgtggccaccacgtggtcagtcacttcacctgcaagatcctggcagtgctgaagctggcatgcggcaacacgtcggtcagcgaagacttcctgctggcgggctccatcctgctgctgcctgtacccctggcattcatctgcctgtcctacttgctcatcctggccaccatcctgagggtgccctcggccgccaggtgctgcaaagccttctccacctgcttggcacacctggctgtagtgctgcttttctacggcaccatcatcttcatgtacttgaagcccaagagtaaggaagcccacatctctgatgaggtcttcacagtcctctatgccatggtcacgaccatgctgaaccccaccatctacagcctgaggaacaaggaggtgaaggaggccgccaggaaggtgtggggcaggagtcgggcctccaggtgagggagggcggggctctgtacagacgcaggtctcaggttagtagctgaggccatcgtatgccaatgccagtgaagacatggcaggg

SEQ ID NO: 20842 - DNA, 939 bp, Artificial Sequence
  derived and/or modified sequence
atggagcccctgaaccggaccgaggtgagcgagttcttcctgaagggattttctggctatcctgctctcgagcatctgctgttccctctctgttcggcaatgtatctagtcaccctattgggcaacacagcaatcatggcagtatctgtgcttgatatccacttgcacactcctgtgtacttcttcctgggcaatttaagcacattagacatctgctacacccctacattcgtgccgttgatgcttgtacatctgctcagtagtcggaaaaccatctcgtttgctgtttgcgccattcagatgtgtctttctctgtctacaggttccacagaatgtttgctgctcgccataactgcgtatgataggtatctagctatctgccaacctctgcggtaccacgtgctgatgagccaccgtctatgtgttctactgatgggcgctgcctgggtgctgtgtctccttaagtctgtgacagaaatggtgatcagtatgcgactgcctttctgcgggcatcacgtagtctctcactttacctgtaagatcctagcagtcttaaagcttgcctgcgggaacactagcgtgtcagaggactttctgttggctggatcaatcctgttgctgcctgtgcctctggctttcatatgcctgtcttatctgttaatcctcgctactattctccgcgtgccatctgctgcccggtgctgtaaggctttttctacatgcctggcccaccttgctgtcgttctgcttttttacggaacaatcatcttcatgtatctcaagccgaagagtaaggaggcccatatctctgatgaggtcttcacggtgctgtacgccatggttacaacgatgctgaacccgactatatactccctccgcaataaagaagtcaaggaagcagctagaaaagtctggggaagatcaagagccagcaggtag

SEQ ID NO: 20843 - DNA, 939 bp, Artificial Sequence
  derived and/or modified sequence
atggaaccgttgaacaggacagaagtctctgaattcttcctgaaagggttctccgggtatccagcacttgaacatttgctgtttccactatgttccgctatgtacctcgtcactctgcttggaaataccgccattatggcggtgtcagtcttggacattcatctgcacacacctgtctatttttttctgggcaacctgtcaactctcgatatctgttacacccccacatttgtgccgcttatgcttgtgcacctgctgtcatcccgcaagacaatcagcttcgcagtgtgtgccattcagatgtgcctctcattgagcacagggtcaacagagtgtctgctattggctattacagcctatgaccggtacctggctatttgccaaccactcaggtaccacgtgttaatgtctcaccgcctttgcgttctgctcatgggtgccgcttgggtgctctgtctactcaaaagtgttaccgagatggtgatttctatgcgtctgccattctgtggacatcatgttgtgtctcacttcacctgcaaaatacttgccgtgctcaaattggcctgtggtaacaccagtgtgtctgaggactttctattagccggttctattctgctgctgcccgtgcccctggcattcatttgtctgtcatacttgcttatactggccactattctgcgagttccctccgcagcgagatgttgtaaggctttcagcacctgcttagcacatctggccgttgtgttgctcttctacgggactattatcttcatgtatctgaagcccaaatccaaggaggctcatatatctgatgaagttttcacagtgctgtacgctatggtgacaacgatgttgaatcctacgatttattccctgcggaacaaggaagttaaggaagcagcccgtaaagtctggggtcgcagcagagcaagcagatag

SEQ ID NO: 20844 - protein, 310 aa, Artificial Sequence
  derived and/or modified sequence
MGGNQTSITEFLLLGFPIGPRIQMLLFGLFSLFYIFILLGNGTILGLISLDSRLHTPMYFFLSHLAVVDIACACSTVPQMLVNLLHPAKPISFAGCMTQMFLFLSFAHTECLLLVVMSYDRYVAICHPLRYSTIMTWKVCITLALTSWILGVLLALVHLVLLLPLSFCGPQKLNHFFCEIMAVLKLACADTHINEVMVLAGAVSVLVGAFFSTVISYVHILCAILKIQSGEGCQKAFSICSSHLCVVGLFYGTAIIMYVEPQYESPKEQKKYLLLFHSLFNPMLNPLIYSLRNKEVQGTLKRMLEKKRTS

SEQ ID NO: 20845 - DNA, 933 bp, Artificial Sequence
  derived and/or modified sequence
atgggcggcaaccagaccagcatcaccgagttcctgctgctgggcttccccatcggccccagaatccagatgctgctgttcggcctgttcagcctgttctacatcttcatcctgctgggcaacggcaccatcctgggcctgatcagcctggacagcagactgcacacccccatgtacttcttcctgagccacctggccgtggtggacatcgcctgcgcctgcagcaccgtgccccagatgctggtgaacctgctgcaccccgccaagcccatcagcttcgccggctgcatgacccagatgttcctgttcctgagcttcgcccacaccgagtgcctgctgctggtggtgatgagctacgacagatacgtggccatctgccaccccctgagatacagcaccatcatgacctggaaggtgtgcatcaccctggccctgaccagctggatcctgggcgtgctgctggccctggtgcacctggtgctgctgctgcccctgagcttctgcggcccccagaagctgaaccacttcttctgcgagatcatggccgtgctgaagctggcctgcgccgacacccacatcaacgaggtgatggtgctggccggcgccgtgagcgtgctggtgggcgccttcttcagcaccgtgatcagctacgtgcacatcctgtgcgccatcctgaagatccagagcggcgagggctgccagaaggccttcagcatctgcagcagccacctgtgcgtggtgggcctgttctacggcaccgccatcatcatgtacgtggagccccagtacgagagccccaaggagcagaagaagtacctgctgctgttccacagcctgttcaaccccatgctgaaccccctgatctacagcctgagaaacaaggaggtgcagggcaccctgaagagaatgctggagaagaagagaaccagctag

SEQ ID NO: 20846 - DNA, 933 bp, Artificial Sequence
  derived and/or modified sequence
atgggagggaaccagacctctattacagagttcctgttacttggctttccaatcggaccgagaattcaaatgctcttattcgggttgttctcacttttctacatctttattctgcttggaaacggtactatactgggactgattagcctggattccaggctgcacacccccatgtactttttcctgtcgcatctcgccgtggtcgatatcgcttgtgcctgtagcactgttcctcagatgcttgtgaatttactccatccagccaagcctattagctttgccgggtgtatgacacaaatgttcttgttcctgtcattcgcacatactgaatgcctgttgctggtggtcatgagctatgatagatatgtggccatatgtcacccactgcgctactctaccatcatgacctggaaggtatgcatcacgctagccttgacaagttggatacttggtgtactcctagccctggtccatctggtcctcctccttccactgagcttctgtggcccacagaagctgaatcacttcttctgcgaaatcatggcggtgctgaaacttgcctgcgccgacacccacatcaatgaggtgatggtcctcgcgggggcggtctcagttctggttggggccttcttcagcaccgtcatcagctacgttcacatcctgtgtgcgatactgaagatacagtccggagaaggctgccaaaaggcattctctatctgcagtagtcatttgtgcgtggtaggtctgttctacgggacagccataattatgtatgtggaacctcaatatgaaagccctaaagaacaaaaaaaataccttttgctctttcactccctatttaatccaatgttaaatcctttgatctacagcctgcgcaataaagaggtacagggaactctcaagcggatgctggaaaagaagcgtacctcttag

SEQ ID NO: 20847 - DNA, 933 bp, Artificial Sequence
  derived and/or modified sequence
atgggcggcaaccagaccagcatcacagagttcctgctgctgggcttccccatcggcccccgcatccagatgctgctgtttggcctcttcagcctcttctacatcttcatcctgctgggcaatggcaccatcctgggcctcatcagcctggacagccggctgcacacccccatgtacttcttcctgagccacctggccgtggtggacatcgcctgtgcctgcagcacagtgccccagatgctggtgaacctgctgcacccagccaagcccatcagctttgctggctgcatgacccagatgttcctgttcctgagctttgcccacacagagtgcctgctgctggtggtgatgtcctatgaccgctacgtggccatctgccaccccctgcgctacagcaccatcatgacctggaaggtgtgcatcaccctggccctgacctcctggatcctgggcgtgctgctggccctggtgcacctggtgctgctgctgcccctgtccttctgtggcccccagaagctgaaccacttcttctgtgagatcatggctgtgctgaagctggcctgtgccgacacccacatcaatgaggtgatggtgctggccggggctgtgtctgtgctggtgggcgccttcttcagcaccgtcatctcctatgtgcacatcctgtgtgccatcctgaagatccagagcggggagggctgccagaaggccttcagcatctgcagcagccacctgtgtgtggtgggcctcttctatggaacagccatcatcatgtatgtggagccccagtatgagagccccaaggagcagaagaagtacctgctgctcttccacagcctcttcaaccccatgctgaaccccctcatctacagcctgaggaacaaggaggtgcagggcaccctgaagaggatgctggagaagaagaggaccagctag

SEQ ID NO: 20848 - DNA, 1014 bp, Artificial Sequence
  derived and/or modified sequence
ttcagacttggtgagctccttgtttcttctacagggaaatggggggaaatcagacttccatcacagagttcctcctactgggatttcccattggcccaaggattcagatgctcctctttgggctcttctccctgttctacatcttcattctgttggggaacgggacaatcctggggctcatctcactggactccagactccacacccccatgtacttcttcctctcacacctggcggtcgtcgacatcgcctgtgcttgcagcacggtgccccagatgctggtgaacctcctgcatccagccaagcccatctcctttgctggctgcatgacccagatgtttctgtttttgagttttgcacatacagaatgtctcctcctggtggtgatgtcctatgatcggtacgtggccatctgccaccctctccgatattctaccatcatgacctggaaagtctgcatcactttggcattgacttcctggattttaggagtcttattggcccttgtccatctagtgttactgctaccactgtccttctgtggaccccagaaacttaatcactttttctgtgaaattatggctgttctcaaacttgcctgtgcggatacccacattaatgaggtaatggttttggcaggggcagtgtctgtgctggtgggagccttcttttccactgtaatatcttatgttcatattctatgtgccattctaaagatccagtcaggagaggggtgccagaaagccttctccatctgctcctcccacctctgtgtggttggactcttttatggcacagccatcatcatgtatgttgagccccagtatgagagccccaaggagcagaagaaatatctcctgctgtttcacagcctcttcaatcccatgcttaatcccctaatttatagtcttaggaacaaggaagtccaaggtactctaaagaggatgcttgaaaagaagagaacttcatgaaagcctgaaagaatagtaaaatagctggcttcaaagggctttg

SEQ ID NO: 20849 - DNA, 933 bp, Artificial Sequence
  derived and/or modified sequence
atgggcggcaaccagaccagcatcaccgagttcctgctgctgggctttccgattggcccgcgcattcagatgttactgtttgggctcttctccctgttctacatctttatccttctgggaaatgggaccattctgggtctgatcagcttagattcccgactccacacacctatgtactttttcttaagtcatctggcagtcgtcgatatagcatgcgcttgttctacagtgccccagatgctggtgaatctgctccatcccgcaaagcctatcagcttcgccgggtgtatgacccagatgtttctgtttctcagtttcgcacatacggagtgtttgttactcgtggttatgtcctacgacaggtatgtggcgatttgccaccctctcaggtattctaccatcatgacgtggaaggtgtgtattacactggccttaacatcctggatcttgggggtgctgcttgcactagtccacctggtcctgctgctgccgctgtctttctgtggcccgcagaaactgaaccacttcttttgcgagatcatggcagtgttgaagctggcttgcgccgacactcatatcaatgaggtaatggtgttagcgggggccgtctcagtgctggtaggcgcttttttctctacagtcattagttatgtccacatcttatgcgctattctcaagatccagagcggtgagggctgccaaaaggcctttagtatctgcagcagccatctctgcgttgtcggtctgttttatgggacagcaattattatgtacgtcgagccgcagtacgagagcccaaaggagcaaaaaaagtacttacttttattccacagcctgttcaatcccatgctgaacccccttatttattccctacggaataaagaggtgcagggcaccctgaagcggatgctggagaaaaagcgaacgtcttag

SEQ ID NO: 20850 - DNA, 933 bp, Artificial Sequence
  derived and/or modified sequence
atgggcggaaatcaaacttctataacagagtttctccttcttgggttcccgatcggtcccagaattcagatgttgctgtttggactattcagtctgttttatatatttattctgcttggtaatgggactattctgggcctcataagtcttgacagccggctccacacacccatgtacttttttctatctcacttggccgtagtggacatcgcatgtgcgtgtagcactgtgccacagatgctcgtcaacctcctccaccctgccaagcctatttctttcgcaggttgcatgacccaaatgttcctgtttctgagtttcgcccatactgaatgcttgctgctggtggtcatgtcctatgacaggtatgtggcaatctgtcacccactccggtattcgactattatgacctggaaggtctgtattaccctagctctcactagttggatactgggagttctccttgccctagttcacttggtgctgctgcttcccctcagtttctgtggaccgcagaagttaaaccacttcttctgcgaaatcatggctgttctcaagctggcctgcgctgatacacacatcaatgaagtgatggtgctcgccggagcggtctctgtgctggtaggagcgttttttagtaccgtcatctcatatgtgcatattttgtgcgcaattctcaaaatccagtctggcgaaggctgtcagaaggcattttcgatttgttcttctcatctctgcgtggtggggctgttctacggtactgcaattatcatgtatgttgagccacagtacgagagtccaaaggaacagaaaaaatacttacttctgttccactcacttttcaaccctatgctgaatcccctaatctacagcctgagaaataaggaagtgcagggcaccttgaagagaatgttagaaaaaaaacgtacttcgtag

SEQ ID NO: 20851 - protein, 316 aa, Artificial Sequence
  derived and/or modified sequence
MELWNFTLGSGFILVGILNDSGSPELLCATITILYLLALISNGLLLLAITMEARLHMPMYLLLGQLSLMDLLFTSVVTPKALADFLRRENTISFGGCALQMFLALTMGGAEDLLLAFMAYDRYVAICHPLTYMTLMSSRACWLMVATSWILASLSALIYTVYTMHYPFCRAQEIRHLLCEIPHLLKVACADTSRYELMVYVMGVTFLIPSLAAILASYTQILLTVLHMPSNEGRKKALVTCSSHLTVVGMFYGAATFMYVLPSSFHSTRQDNIISVFYTIVTPALNPLIYSLRNKEVMRALRRVLGKYMLPAHSTL

SEQ ID NO: 20852 - DNA, 951 bp, Artificial Sequence
  derived and/or modified sequence
atggagctgtggaacttcaccctgggcagcggcttcatcctggtgggcatcctgaacgacagcggcagccccgagctgctgtgcgccaccatcaccatcctgtacctgctggccctgatcagcaacggcctgctgctgctggccatcaccatggaggccagactgcacatgcccatgtacctgctgctgggccagctgagcctgatggacctgctgttcaccagcgtggtgacccccaaggccctggccgacttcctgagaagagagaacaccatcagcttcggcggctgcgccctgcagatgttcctggccctgaccatgggcggcgccgaggacctgctgctggccttcatggcctacgacagatacgtggccatctgccaccccctgacctacatgaccctgatgagcagcagagcctgctggctgatggtggccaccagctggatcctggccagcctgagcgccctgatctacaccgtgtacaccatgcactaccccttctgcagagcccaggagatcagacacctgctgtgcgagatcccccacctgctgaaggtggcctgcgccgacaccagcagatacgagctgatggtgtacgtgatgggcgtgaccttcctgatccccagcctggccgccatcctggccagctacacccagatcctgctgaccgtgctgcacatgcccagcaacgagggcagaaagaaggccctggtgacctgcagcagccacctgaccgtggtgggcatgttctacggcgccgccaccttcatgtacgtgctgcccagcagcttccacagcaccagacaggacaacatcatcagcgtgttctacaccatcgtgacccccgccctgaaccccctgatctacagcctgagaaacaaggaggtgatgagagccctgagaagagtgctgggcaagtacatgctgcccgcccacagcaccctgtag

SEQ ID NO: 20853 - DNA, 951 bp, Artificial Sequence
  derived and/or modified sequence
atggagttgtggaatttcacgctggggagtggctttattttggttggaattctcaacgactctggcagtccggaattgctgtgtgccactattacgatcttgtacctcctagccctcatcagcaacgggcttcttctgctggccataaccatggaggccaggctccacatgcccatgtacctgctgctgggacaactctctttgatggacttgctgttcaccagtgttgtaactcctaaagccttagccgactttctccggagggaaaataccataagctttgggggttgtgcactccagatgtttttggccctgacgatggggggagccgaggatttacttctggccttcatggcttacgatcgatatgtggctatctgccaccccttaacctatatgacacttatgtcgtctagagcgtgctggttgatggtggcaacatcttggatcctggccagtctgtcggctttgatctacacagtgtacacaatgcattaccctttctgccgggctcaagagataagacacctactctgcgaaattcctcaccttctgaaagttgcatgcgcagacaccagtaggtacgaattaatggtctacgttatgggggtgacattcctcattccttccctggcggccattctcgccagctatactcagatccttctcacagtactgcatatgccgagtaatgaggggcgtaagaaggccttggttacctgttccagccacctgacagtagttggtatgttttacggggccgcaactttcatgtacgttcttccctctagtttccacagcacccggcaagataacatcatcagcgttttctataccatcgttactccagctctgaacccccttatatactctctgcgaaataaggaggtgatgagggcattgcgccgagtactgggaaaatacatgttacccgcccatagtaccttatag

SEQ ID NO: 20854 - DNA, 951 bp, Artificial Sequence
  derived and/or modified sequence
atggagctgtggaacttcaccctgggcagcggcttcatcctggtgggcatcctgaatgattctggcagccctgagctgctgtgtgccaccatcaccatcctgtacctgctggccctgatcagcaatggcctgctgctgctggccatcaccatggaggcccggctgcacatgcccatgtacctgctgctgggccagctgagcctgatggacctgctcttcacctctgtggtgacccccaaggccctggccgacttcctgcggcgggagaacaccatcagctttggaggctgtgccctgcagatgttcctggccctgaccatgggcggcgctgaggacctgctgctggccttcatggcctatgacagatatgtggccatctgccaccccctgacctacatgaccctgatgagcagccgggcctgctggctgatggtggccacctcctggatcctggccagcctgagcgccctgatctacacagtgtacaccatgcactaccccttctgccgggcccaggagatccgccacctgctgtgtgagatcccccacctgctgaaggtggcctgtgccgacaccagccgctatgagctgatggtgtatgtgatgggcgtgaccttcctgatccccagcctggccgccatcctggccagctacacccagatcctgctgactgtgctgcacatgcccagcaatgaaggaaggaagaaggccctggtgacctgcagcagccacctgactgtggtgggcatgttctacggggccgccaccttcatgtatgtgctgcccagcagcttccacagcacccggcaggacaacatcatctctgtgttctacaccatcgtgaccccagccctgaaccccctcatctacagcctgaggaacaaggaggtgatgagggccctgcggcgggtgctgggcaagtacatgctgcctgcccacagcaccctgtag

SEQ ID NO: 20855 - DNA, 998 bp, Artificial Sequence
  derived and/or modified sequence
ggtgatgaaagaaaccacagcatggagctctggaacttcaccttgggaagtggcttcattttggtggggattctgaatgacagtgggtctcctgaactgctctgtgctacaattacaatcctatacttgttggccctgatcagcaatggcctactgctcctggctatcaccatggaagcccggctccacatgcccatgtacctcctgcttgggcagctctctctcatggacctcctgttcacatctgttgtcactcccaaggcccttgcggactttctgcgcagagaaaacaccatctcctttggaggctgtgcccttcagatgttcctggcactgacaatgggtggtgctgaggacctcctactggccttcatggcctatgacaggtatgtggccatttgtcatcctctgacatacatgaccctcatgagctcaagagcctgctggctcatggtggccacgtcctggatcctggcatccctaagtgccctaatatataccgtgtataccatgcactatcccttctgcagggcccaggagatcaggcatcttctctgtgagatcccacacttgctgaaggtggcctgtgctgatacctccagatatgagctcatggtatatgtgatgggtgtgaccttcctgattccctctcttgctgctatactggcctcctatacacaaattctactcactgtgctccatatgccatcaaatgaggggaggaagaaagcccttgtcacctgctcttcccacctgactgtggttgggatgttctatggagctgccacattcatgtatgtcttgcccagttccttccacagcaccagacaagacaacatcatctctgttttctacacaattgtcactccagccctgaatccactcatctacagcctgaggaataaggaggtcatgcgggccttgaggagggtcctgggaaaatacatgctgccagcacactccacgctctagggaaggatcatggctagcttccagaa

SEQ ID NO: 20856 - DNA, 951 bp, Artificial Sequence
  derived and/or modified sequence
atggagctgtggaacttcaccctgggcagcggcttcatcctggtgggcatcctcaacgatagtggatctccagaactgttatgcgccacgatcacgatcctgtacttattagccctgatctccaacggactgttgctcctggcaattacaatggaagccaggctgcacatgcccatgtatctgttacttggccaattgtcccttatggacctgctttttaccagcgtcgtgaccccaaaggccctcgcagatttcctgcggcgcgaaaatacgatctcctttggtggctgcgccttgcagatgtttctcgccttaaccatgggcggggcagaggaccttctgctggctttcatggcatatgataggtacgtcgctatttgccacccgctgacatacatgacactgatgagcagcagggcatgttggctgatggtagccaccagctggatcctggcttctttaagcgccttgatttacactgtgtacacaatgcactaccctttctgtcgcgctcaagagattagacaccttctatgcgagattccccatctcctcaaggtcgcttgtgcagacactagtaggtatgaactaatggtctacgtcatgggagtgactttcctgattccctctctcgccgccattctggccagctatacgcaaatccttctgacagtgctccatatgcctagcaatgaggggagaaagaaggctctcgtgacttgctcttcacatctaacagtggtcggcatgttctatggcgcagctacattcatgtatgttctgccatcttcatttcactctacacgccaagataacatcataagcgtgttttatacgatagtcacgcccgccctgaacccgctgatctactccctgcgcaacaaagaagtgatgcgggctcttcgccgggtcctcggaaagtacatgttgcctgctcacagtacactgtag

SEQ ID NO: 20857 - DNA, 951 bp, Artificial Sequence
  derived and/or modified sequence
atggagctttggaactttacactaggatctggcttcatactcgtaggcattcttaacgatagtggctccccagaacttctatgcgccactattacaatcttatacctactcgcactgatctcaaatggcctccttctccttgctatcacaatggaggcacggcttcacatgccaatgtatctcctcttgggccagctcagcctgatggaccttctattcacatccgtcgttaccccaaaggcactagcagacttcctgaggcgcgagaacactatatctttcggcggttgtgccttgcagatgttcttggcactcacaatgggcggtgcagaagacttactgctcgcattcatggcctacgacagatatgtggcaatctgtcacccgctgacatacatgacgcttatgtcttctagggcatgttggctgatggtggcgacaagctggattctcgctagtctatcagcgctgatctacacagtgtatacaatgcactatccgttctgcagagctcaagaaattagacacttattatgtgaaatccctcatctccttaaggttgcctgcgctgataccagccgatatgagctgatggtgtatgtaatgggtgtgacgttccttatccccagtcttgccgcaatccttgcctcctacacccagatcctcctcactgtcttacacatgcccagtaacgaaggcagaaaaaaggctcttgtgacttgttcgtcccacctaactgtggtgggcatgttctatggcgcagctacttttatgtatgtcctccctagctccttccactcaacacggcaggataatatcatctccgtgttctacacaatcgtgaccccggcactcaaccctctcatttattcccttcgtaacaaggaggtcatgcgtgccctgcgtagagtgctcggcaagtatatgctgccagcacacagtactctgtag

SEQ ID NO: 20858 - protein, 335 aa, Artificial Sequence
  derived and/or modified sequence
MNISDVISFDILVSAMKTGNQSFGTDFLLVGLFQYGWINSLLFVVIATLFTVALTGNIMLIHLIRLNTRLHTPMYFLLSQLSIVDLMYISTTVPKMAVSFLSQSKTIRFLGCEIQTYVFLALGGTEALLLGFMSYDRYVAICHPLHYPMLMSKKICCLMVACAWASGSINAFIHTLYVFQLPFCRSRLINHFFCEVPALLSLVCQDTSQYEYTVLLSGLIILLLPFLAILASYARVLIVVFQMSSGKGQAKAVSTCSSHLIVASLFYATTLFTYTRPHSLRSPSRDKAVAVFYTIVTPLLNPFIYSLRNKEVTGAVRRLLGYWICCRKYDFRSLY

SEQ ID NO: 20859 - DNA, 1008 bp, Artificial Sequence
  derived and/or modified sequence
atgaacatcagcgacgtgatcagcttcgacatcctggtgagcgccatgaagaccggcaaccagagcttcggcaccgacttcctgctggtgggcctgttccagtacggctggatcaacagcctgctgttcgtggtgatcgccaccctgttcaccgtggccctgaccggcaacatcatgctgatccacctgatcagactgaacaccagactgcacacccccatgtacttcctgctgagccagctgagcatcgtggacctgatgtacatcagcaccaccgtgcccaagatggccgtgagcttcctgagccagagcaagaccatcagattcctgggctgcgagatccagacctacgtgttcctggccctgggcggcaccgaggccctgctgctgggcttcatgagctacgacagatacgtggccatctgccaccccctgcactaccccatgctgatgagcaagaagatctgctgcctgatggtggcctgcgcctgggccagcggcagcatcaacgccttcatccacaccctgtacgtgttccagctgcccttctgcagaagcagactgatcaaccacttcttctgcgaggtgcccgccctgctgagcctggtgtgccaggacaccagccagtacgagtacaccgtgctgctgagcggcctgatcatcctgctgctgcccttcctggccatcctggccagctacgccagagtgctgatcgtggtgttccagatgagcagcggcaagggccaggccaaggccgtgagcacctgcagcagccacctgatcgtggccagcctgttctacgccaccaccctgttcacctacaccagaccccacagcctgagaagccccagcagagacaaggccgtggccgtgttctacaccatcgtgacccccctgctgaaccccttcatctacagcctgagaaacaaggaggtgaccggcgccgtgagaagactgctgggctactggatctgctgcagaaagtacgacttcagaagcctgtactag

SEQ ID NO: 20860 - DNA, 1008 bp, Artificial Sequence
  derived and/or modified sequence
atgaacatctcagacgtgatatctttcgacattttggtcagtgcgatgaaaaccggtaaccagtcatttggaacagacttcctgctggtagggttatttcagtatggttggatcaatagcctattgttcgtggtgattgcgacacttttcacagtggcgttgaccgggaacataatgctaattcacctcatccgtctgaatacacgcttgcacacacctatgtatttccttttgtctcaactttcaatagtagatctgatgtatatttctacgaccgtgccaaagatggctgtgagctttctgtcacagtccaagaccatacggttccttggttgtgaaatccagacctacgtgttcttagcactggggggtaccgaggccttgctgcttggcttcatgagctatgatcggtacgtggctatctgccatcccctgcattatccaatgctgatgtccaaaaaaatctgttgtctgatggttgcctgcgcctgggcatctgggtcaataaacgccttcatacacaccctgtacgtctttcagcttcccttttgcagatcacgactgatcaaccactttttctgtgaggtgcccgccctgcttagcctcgtgtgccaggacacctcgcagtatgaatacactgtgctactgagcggccttatcatcctcctgctgcccttcttagcgatcctggctagttatgcgcgcgtgctgatcgtggtctttcagatgagttcaggtaaagggcaggctaaggctgtcagtacttgcagttctcacctcattgttgctagcctgttctatgcgacaactttgtttacgtatactaggcctcacagcctgagatccccatcaagagacaaggcggtggcagtgttctacaccatcgttacacctctgttgaatcccttcatatactcactgagaaataaggaggtgacaggtgcggttagacgcttactcgggtactggatttgctgtcgtaagtacgacttccggagtctctactag

SEQ ID NO: 20861 - DNA, 1008 bp, Artificial Sequence
  derived and/or modified sequence
atgaacatcagtgatgtgatcagctttgacatcctggtgtctgccatgaagacaggcaaccagagctttggaacagacttcctgctggtgggcctcttccagtatggctggatcaacagcctgctgtttgtggtgattgccaccctcttcaccgtggccctgactggaaacatcatgctgatccacctgatccggctgaacacccggctgcacacccccatgtacttcctgctgagccagctgagcatcgtggacctgatgtacatcagcaccaccgtgcccaagatggctgtgtccttcctgagccagagcaagaccatccgcttcctgggctgtgagatccagacctacgtgttcctggccctgggcggcacagaggccctgctgctgggcttcatgtcctatgaccgctacgtggccatctgccaccccctgcactaccccatgctgatgagcaagaagatctgctgcctgatggtggcctgtgcctgggccagcggcagcatcaatgccttcatccacaccctgtatgtgttccagctgcccttctgccgcagccgcctcatcaaccacttcttctgtgaggtgcctgccctgctgagcctggtgtgccaggacaccagccagtatgagtacacagtgctgctgagcggcctcatcatcctgctgctgcccttcctggccatcctggccagctatgcccgggtgctgattgtggtgttccagatgagcagcggcaagggccaggccaaggctgtgtccacctgcagcagccacctgattgtggccagcctcttctacgccaccaccctcttcacctacacccggccccacagcctgcggagccccagccgggacaaggctgtggccgtgttctacaccatcgtgacccccctgctgaaccccttcatctacagcctgaggaacaaggaggtgactggagctgtgcggcggctgctgggctactggatctgctgcaggaaatatgacttccgcagcctgtactag

SEQ ID NO: 20862 - DNA, 1107 bp, Artificial Sequence
  derived and/or modified sequence
tgctctaaacatgtagatagttgccaaacatgtaagtgaatatttatttctgaatgccatgtcattttactttctcttaagggaagtcaacattattacatgaacatttcagatgtcatctcctttgatattttggtttcagccatgaaaacaggaaatcaaagttttgggacagattttctacttgttggtcttttccaatatggctggataaactctcttctctttgtcgtcattgccaccctctttacagttgctctgacaggaaatatcatgctgatccacctcattcgactgaacaccagactccacactccaatgtactttctgctcagtcagctctccatcgttgacctcatgtacatctccaccacagtgcccaagatggcagtcagcttcctctcacagagtaagaccattagatttttgggctgtgagattcaaacgtatgtgttcttggcccttggtggaactgaagcccttctccttggttttatgtcttatgatcgctatgtagctatctgtcaccctttacattatcctatgcttatgagcaagaagatctgctgcctcatggttgcatgtgcatgggccagtggttctatcaatgctttcatacatacattgtatgtgtttcagcttccattctgtaggtctcggctcattaaccactttttctgtgaagttccagctctactatcattggtgtgtcaggacacctcccagtatgagtatacagtcctcctgagtggacttattatcttgctactaccattcctagccattctggcttcctatgctcgtgtgcttattgtggtattccagatgagctcaggaaaaggacaggcaaaagctgtttccacttgttcctcccacctgattgtggcaagcctgttctatgcaaccactctctttacctacacaaggccacactccttgcgttccccttcacgggataaggcggtggcagtattttacaccattgtcacacctctactgaacccatttatctacagcctgagaaataaggaagtgacgggggcagtgaggagactgttgggatattggatatgctgtagaaaatatgacttcagatctctgtattga

SEQ ID NO: 20863 - DNA, 1008 bp, Artificial Sequence
  derived and/or modified sequence
atgaacatcagcgacgtgatcagcttcgacatcctggtgagcgccatgaagaccggcaaccagtcgttcgggaccgacttcctgctggtcggactattccaatatggctggataaactctctgttgttcgtcgtgatcgccacactctttaccgtcgcgctgacgggaaacatcatgctgattcatttaattcggttgaacacacggctccacacccccatgtacttccttctctcccagctctcaatagtggatcttatgtatatcagtaccacggtgcccaagatggcggtaagcttcctctcccaaagtaaaactatacggtttctcgggtgcgagatacagacatatgtcttcctggcactcggcgggactgaggccttgctgttgggctttatgagttatgacaggtatgtagccatctgtcatccgctccattaccccatgctgatgtctaagaagatttgctgtctgatggtggcttgcgcttgggcctcaggttccatcaatgcatttattcatacgttgtatgtcttccaacttcccttttgtagatctaggttgatcaatcatttcttttgtgaagttccagcccttctgtctttggtgtgtcaggacacctctcaatatgaatacacggtcttactgtccggacttataattcttcttctcccatttctcgctatcctcgcatcttacgctagagttttgatcgtggtgttccagatgtcctccgggaaggggcaggccaaggcggtgagcacttgctctagccacctcatcgtagcctccctgttctatgccaccaccctgttcacctatacgcgacctcactccctgcggagtcctagccgtgataaggctgtggccgttttttatacaattgtcacgcctctgttaaacccattcatctattccttgagaaacaaggaggtgacgggtgcggtgaggcgcctgttaggttactggatctgttgcagaaaatatgatttcagaagcctgtactag

SEQ ID NO: 20864 - DNA, 1008 bp, Artificial Sequence
  derived and/or modified sequence
atgaacatttccgatgtgattagcttcgatatcttagtgagcgccatgaagaccggcaaccaatcatttggaaccgatttcttgctggtgggtttgttccagtatggatggataaatagtctgttgtttgtggtgattgctactttgtttactgtcgcccttactggcaacatcatgctgatccaccttatacggctcaacacacgactccacacgcccatgtactttctcctaagccagctgtcgatcgtggacctgatgtatatatccacaactgtccctaagatggcagtctcctttctctcacagtcaaaaacgatacgttttttgggctgtgaaatccagacttacgtttttctggcgctgggtggcacagaggccctgctcttaggctttatgtcgtacgatcggtatgtggcgatctgccacccattacactatcccatgctcatgtccaaaaaaatttgctgtctgatggtggcttgtgcgtgggctagtggctcaatcaacgcttttatccacactctatacgtgttccagctacccttttgccgtagcaggctgatcaaccactttttttgtgaggtgcctgctctgctgtccctggtttgccaggatacttcccagtacgagtacacagtcctgttgtccggcttgattatcttgctgctgcctttccttgctatccttgcctcttatgcccgtgtcctcatcgttgtctttcagatgagcagtggaaagggacaagcaaaggccgtcagcacatgctctagccacctgatagttgcctcattgttttatgcaaccactttattcacttatactaggccacatagcctgcgtagtccctcaagggacaaggccgtagctgtgttctatacaattgtgacgccactgctcaatccctttatatactcactgcgtaataaggaggtgacaggggctgtaaggcgtctattagggtattggatctgttgtcggaagtacgactttcgcagcctctattag

SEQ ID NO: 20865 - protein, 317 aa, Artificial Sequence
  derived and/or modified sequence
MEIDNQTWVREFILLGLSSDWCTQISLFSLFLVTYLMTVLGNCLIVLLIRLDSRLHTPMYFFLTNLSLVDVSYATSVVPQLLAHFLAEHKAIPFQSCAAQLFFSLALGGIEFVLLAVMAYDRHVAVSDRLRYSAIMHGGLCARLAITSWVSGSINSLVQTAITFQLPMCTNKFIDHISCELLAVVRLACVDTSSNEAAIMVSSIVLLMTPFCLVLLSYIRIISTILKIQSREGRKKAFHTCASHLTVVALCYGTTIFTYIQPHSGPSVLQEKLISVFYAIVMPLLNPVIYSLRNKEVKGAWHKLLEKFSGLTSKLGT

SEQ ID NO: 20866 - DNA, 954 bp, Artificial Sequence
  derived and/or modified sequence
atggagatcgacaaccagacctgggtgagagagttcatcctgctgggcctgagcagcgactggtgcacccagatcagcctgttcagcctgttcctggtgacctacctgatgaccgtgctgggcaactgcctgatcgtgctgctgatcagactggacagcagactgcacacccccatgtacttcttcctgaccaacctgagcctggtggacgtgagctacgccaccagcgtggtgccccagctgctggcccacttcctggccgagcacaaggccatccccttccagagctgcgccgcccagctgttcttcagcctggccctgggcggcatcgagttcgtgctgctggccgtgatggcctacgacagacacgtggccgtgagcgacagactgagatacagcgccatcatgcacggcggcctgtgcgccagactggccatcaccagctgggtgagcggcagcatcaacagcctggtgcagaccgccatcaccttccagctgcccatgtgcaccaacaagttcatcgaccacatcagctgcgagctgctggccgtggtgagactggcctgcgtggacaccagcagcaacgaggccgccatcatggtgagcagcatcgtgctgctgatgacccccttctgcctggtgctgctgagctacatcagaatcatcagcaccatcctgaagatccagagcagagagggcagaaagaaggccttccacacctgcgccagccacctgaccgtggtggccctgtgctacggcaccaccatcttcacctacatccagccccacagcggccccagcgtgctgcaggagaagctgatcagcgtgttctacgccatcgtgatgcccctgctgaaccccgtgatctacagcctgagaaacaaggaggtgaagggcgcctggcacaagctgctggagaagttcagcggcctgaccagcaagctgggcacctag

SEQ ID NO: 20867 - DNA, 954 bp, Artificial Sequence
  derived and/or modified sequence
atggagatcgacaaccaaacttgggtgcgagaattcatattgctggggctatcttcggattggtgtacacaaatttcacttttcagcctcttccttgtcacgtaccttatgaccgttctgggaaattgtcttatcgtgcttcttattcgcctggactcgaggctgcacacaccgatgtacttctttctgaccaatctctctctcgttgatgtctcctacgccacaagtgtagttccgcagctcctggcacactttttagctgagcataaggcaattcctttccaatcttgtgcagcacagctgtttttttcgttagcgctgggagggatcgagtttgtactgctggcagtgatggcgtacgatcggcatgtagcggtgtcggacaggctgaggtatagtgccattatgcatggaggtctctgcgccaggctagctataacctcctgggtgtccggaagtataaactctttagttcagacggcaatcacctttcagcttcctatgtgtaccaacaagttcatcgatcacatctcatgcgagttgctggccgtggtgcgtctggcatgcgtcgacacgagcagtaatgaggccgccattatggtgtcttctatcgttcttctaatgacaccgttctgtctggtccttttaagttatatcagaattatcagcacaatcttaaaaattcaatccagagagggtcgtaagaaagctttccacacatgcgcttctcacctgacagtggtcgctctttgctatggcacaaccatcttcacctacattcaaccccactccggacctagcgtgcttcaggagaaactcattagtgttttctacgctatcgtcatgccattgctcaatcctgtcatttactctttgaggaacaaggaggtaaaaggagcatggcataagctgctagagaaattttcaggcctaacaagtaagctgggcacctag

SEQ ID NO: 20868 - DNA, 954 bp, Artificial Sequence
  derived and/or modified sequence
atggagattgacaaccagacctgggtgcgggagttcatcctgctgggcctgagcagtgactggtgcacccagatcagcctcttcagcctcttcctggtgacctacctgatgacagtgctgggcaactgcctgattgtgctgctgatccggctggacagccggctgcacacccccatgtacttcttcctgaccaacctgagcctggtggatgtgtcctatgccacctctgtggtgccccagctgctggcccacttcctggccgagcacaaggccatccccttccagagctgtgccgcccagctgttcttcagcctggccctgggcggcatcgagtttgtgctgctggccgtgatggcctatgacagacatgtggccgtgtctgaccggctgcgctacagcgccatcatgcatggaggcctgtgtgcccggctggccatcacctcctgggtgtctggcagcatcaacagcctggtgcagacagccatcaccttccagctgcccatgtgcaccaacaagttcatcgaccacatcagctgtgagctgctggccgtggtgcggctggcctgtgtggacaccagcagcaatgaagctgccatcatggtgagcagcatcgtgctgctgatgacccccttctgcctggtgctgctgagctacatccgcatcatcagcaccatcctgaagatccagagccgggagggcaggaagaaggccttccacacctgtgccagccacctgactgtggtggccctgtgctacggcaccaccatcttcacctacatccagccccacagcggccccagcgtgctgcaggagaagctgatctctgtgttctacgccatcgtgatgcccctgctgaaccctgtgatctacagcctgaggaacaaggaggtgaagggggcctggcacaagctgctggagaagttcagcggcctgaccagcaagctgggcacctag

SEQ ID NO: 20869 - DNA, 1114 bp, Artificial Sequence
  derived and/or modified sequence
tctttgattcaacagcttctgtttttttctgactctttctacagattaatattcctcacatttttaaatggaaatagataaccagacgtgggtgagagaatttattctccttggcttatccagtgactggtgcactcagatatccctgttttccctgttcttggtcacatacctcatgacagtgctggggaactgtctcattgtccttctgatcagactggacagccgactccacactcccatgtatttctttctcaccaacctctcccttgtcgatgtctcctatgccacaagcgtagtcccccagctgctggcacattttcttgcagaacataaagccatcccattccagagctgtgcagcccagttatttttctccctggccttgggtgggattgagtttgttctcctggcagtgatggcctatgaccgccatgtggctgtgtctgaccgcctgcgatactcggccatcatgcatggagggctgtgtgctaggttggccatcacatcctgggtcagtggctccatcaactctcttgtgcagactgctatcacctttcagctgcccatgtgcactaacaagtttattgatcacatatcctgtgaactcctagctgtggtcaggctggcttgtgtggacacctcctccaatgaggctgccatcatggtgtctagcattgttcttctgatgacacctttctgcctggttctgttgtcctacatccggatcatctccaccatcctaaagatccagtccagagaaggaagaaagaaagccttccacacgtgtgcctctcacctcacggtggttgccctgtgctacggcacaacgattttcacttacatccagccccactctggtccctcagtccttcaagagaagctgatctctgtcttctatgccattgttatgcctctgctgaaccctgtgatttatagtctaaggaataaagaggtgaagggggcctggcataaactattagagaaattctctgggttaacatccaagctgggaacttgactcatgaacattactttaagaagaagctttgcctcatttttctccacccagctcagatatggcagggataaactatgttgctctggcaaccgg

SEQ ID NO: 20870 - DNA, 954 bp, Artificial Sequence
  derived and/or modified sequence
atggagatcgacaaccagacctgggtgcgggagttcatcctgctgggattatcatccgactggtgcacccagattagtctgttctctctcttcctggtgacgtacctcatgaccgtgcttggtaattgtctcatcgtgcttctgatccgcttggattcaaggttgcacactccaatgtatttttttctgactaacctgagtctggtcgatgtcagctatgccacgtccgtggttccacaactcttggcgcatttcctggccgagcacaaggccattccgttccagtcctgcgcggcccagctcttcttcagcctggcactggggggaatcgaatttgtgctcttagcagtgatggcttacgatagacacgtcgcagttagcgataggctgcggtattccgctattatgcacggcggcttatgtgcccgtctggctattacctcgtgggtttcgggatccataaacagtctggtccagactgcgatcacgttccagctgccgatgtgcaccaataaattcatcgaccatatctcctgtgagcttctggctgtggtgcgcttagcttgcgttgacacaagtagcaacgaggccgcaatcatggtctcatctatagtgctgctgatgacacccttctgcctggtgctgctctcctacatacggatcatttccactatcttaaaaatacagtctagggaaggacgcaaaaaggccttccacacctgcgcatcacatcttactgtagtggccctgtgctatgggacaactatctttacttacatacagccccatagtgggccttccgtgttacaagaaaaactgattagcgttttttacgctatcgtgatgccgctgttgaaccctgtgatctactctctgcgcaataaggaggtcaaaggcgcctggcacaagttgctcgaaaaattttcggggcttacatctaagctggggacatag

SEQ ID NO: 20871 - DNA, 954 bp, Artificial Sequence
  derived and/or modified sequence
atggagattgataaccagacctgggtgcgcgaattcatactactcggcttatcatccgattggtgtactcagatcagcctattttcattgttcctggtcacatacctcatgactgtgctaggaaactgtttaatcgtcctcctgattagactggactctagattgcatacccctatgtacttctttctgacaaacctgtcattggtcgatgtatcctacgcaacaagtgtcgtgccacagctgctggcccattttctggcagagcacaaagcaatcccattccagtcgtgtgcagcccaactgttcttttcgttagctctgggtggcattgaatttgtccttttggccgtcatggcctacgataggcatgtggcagtatctgatcggctgagatattctgctataatgcacggcggactttgcgcaagacttgctatcacaagctgggtgagcggttccattaattctctggtgcagactgccatcacatttcaactgccaatgtgcaccaataaatttatcgaccacataagctgcgagctgcttgctgtggtgcgcctggcgtgcgtcgatacatccagtaacgaggctgctattatggtcagcagcattgtgctgcttatgacacccttctgcctagtgctgctgagctacattaggattatctctacgatcctgaagattcagtcaagagagggcaggaagaaagctttccacacttgtgcaagtcatctgacggtcgtggctctgtgttatgggaccacaatcttcacgtatattcagcctcactctggtccaagcgtgctccaagagaaacttatctcagtcttctacgccattgtgatgcctcttctgaatccagtgatttattccttacgcaataaggaagtaaagggagcctggcacaaattgcttgaaaagttttccggactcactagcaaactaggcacctag

SEQ ID NO: 20872 - protein, 328 aa, Artificial Sequence
  derived and/or modified sequence
MGHQNHTFSSDFILLGLFSSSPTSVVFFLVLFVIFIMSVTENTLMILLIRSDSRLHTPMYFLLSHLSLMDILHVSNIVPKMVTNFLSGSRTISFAGCGFQVFLSLTLLGGECLLLAAMSCDRYVAICHPLRYPILMKEYASALMAGGSWLIGVFNSTVHTAYALQFPFCGSRAIDHFFCEVPAMLKLSCADTTRYERGVCVSAVIFLLIPFSLISASYGQIILTVLQMKSSEARKKSFSTCSFHMIVVTMYYGPFIFTYMRPKSYHTPGQDKFLAIFYTILTPTLNPFIYSFRNKDVLAVMKNMLKSNFLHKKMNRKIPECVFCLFLC

SEQ ID NO: 20873 - protein, 312 aa, Artificial Sequence
  derived and/or modified sequence
MENYNQTSTDFILLGLFPQSRIGLFVFTLIFLIFLMALIGNLSMILLIFLDIHLHTPMYFLLSQLSLIDLNYISTIVPKMVYDFLYGNKSISFTGCGIQSFFFLTLAVAEGLLLTSMAYDRYVAICFPLHYPIRISKRVCVMMITGSWMISSINSCAHTVYALCIPYCKSRAINHFFCDVPAMLTLACTDTWVYESTVFLSSTIFLVLPFTGIACSYGRVLLAVYRMHSAEGRKKAYSTCSTHLTVVSFYYAPFAYTYVRPRSLRSPTEDKILAVFYTILTPMLNPIIYSLRNKEVMGALTQVIQKIFSVKM

SEQ ID NO: 20874 - DNA, 939 bp, Artificial Sequence
  derived and/or modified sequence
atggagaactacaaccagaccagcaccgacttcatcctgctgggcctgttcccccagagcagaatcggcctgttcgtgttcaccctgatcttcctgatcttcctgatggccctgatcggcaacctgagcatgatcctgctgatcttcctggacatccacctgcacacccccatgtacttcctgctgagccagctgagcctgatcgacctgaactacatcagcaccatcgtgcccaagatggtgtacgacttcctgtacggcaacaagagcatcagcttcaccggctgcggcatccagagcttcttcttcctgaccctggccgtggccgagggcctgctgctgaccagcatggcctacgacagatacgtggccatctgcttccccctgcactaccccatcagaatcagcaagagagtgtgcgtgatgatgatcaccggcagctggatgatcagcagcatcaacagctgcgcccacaccgtgtacgccctgtgcatcccctactgcaagagcagagccatcaaccacttcttctgcgacgtgcccgccatgctgaccctggcctgcaccgacacctgggtgtacgagagcaccgtgttcctgagcagcaccatcttcctggtgctgcccttcaccggcatcgcctgcagctacggcagagtgctgctggccgtgtacagaatgcacagcgccgagggcagaaagaaggcctacagcacctgcagcacccacctgaccgtggtgagcttctactacgcccccttcgcctacacctacgtgagacccagaagcctgagaagccccaccgaggacaagatcctggccgtgttctacaccatcctgacccccatgctgaaccccatcatctacagcctgagaaacaaggaggtgatgggcgccctgacccaggtgatccagaagatcttcagcgtgaagatgtag

SEQ ID NO: 20875 - DNA, 939 bp, Artificial Sequence
  derived and/or modified sequence
atggaaaattacaatcagaccagtactgacttcattttactcggcctattccctcagagtaggattgggctgttcgtgttcaccctcatttttcttattttccttatggccctgatcggtaacctgagcatgatattgttgatcttcctggacatccacctacacacgcccatgtacttcctgctgtcacagctctcgctgatagacctgaactacatttctaccatcgtacccaaaatggtgtacgatttcctctatggcaacaaaagcatcagcttcaccggctgcggaatccagagtttctttttcctgaccctggccgttgcggagggattactgctgacgagcatggcttatgacagatacgttgctatctgcttccctctacactacccaattaggatcagtaagagagtgtgcgttatgatgatcacaggctcatggatgatatcatccataaacagctgcgcacacacggtttacgcgctctgcatcccttactgtaaaagtcgtgcgatcaatcacttcttctgtgatgtaccagcaatgttgaccctggcatgtacagatacgtgggtgtatgagagcacagtttttctaagctccacaattttcttggtgctgccattcacaggaattgcctgctcctatggaagagtgctgctggcggtttaccggatgcattcagcggaaggccgaaagaaagcgtactcgacatgttctacgcacttgacagtggtctcattttactacgctcctttcgcttacacatacgtgaggccaaggtcgctgagaagtcctactgaggacaagattttggcagtgttctacactatattgactcccatgctcaaccccataatttacagcctccgcaataaggaggtgatgggagcgcttacccaggtgatacaaaaaatcttctctgtgaagatgtag

SEQ ID NO: 20876 - DNA, 939 bp, Artificial Sequence
  derived and/or modified sequence
atggagaactacaaccagaccagcacagacttcatcctgctgggcctcttcccccagagccgcatcggcctgtttgtgttcaccctcatcttcctgatcttcctgatggccctgattggcaacctgtccatgatcctgctgatcttcctggacatccacctgcacacccccatgtacttcctgctgagccagctgagcctgattgacctgaactacatcagcaccatcgtgcccaagatggtgtatgacttcctgtatggcaacaagagcatctccttcaccggctgcggcatccagagcttcttcttcctgaccctggccgtggccgagggcctgctgctgacctccatggcctatgaccgctacgtggccatctgcttccccctgcactaccccatccgcatcagcaagagggtgtgtgtgatgatgatcaccggctcctggatgatcagcagcatcaacagctgtgcccacacagtgtatgccctgtgcatcccctactgcaagagccgggccatcaaccacttcttctgtgatgtgcctgccatgctgaccctggcctgcacagacacctgggtgtatgagagcacagtgttcctgagcagcaccatcttcctggtgctgcccttcaccggcatcgcctgcagctatggccgggtgctgctggccgtgtacaggatgcacagcgctgagggcaggaagaaggcctacagcacctgcagcacccacctgactgtggtgtccttctactatgccccctttgcctacacctacgtgcggcccaggagcctgcggagccccacagaggacaagatcctggccgtgttctacaccatcctgacccccatgctgaaccccatcatctacagcctgaggaacaaggaggtgatgggcgccctgacccaggtgatccagaagatcttctctgtgaagatgtag

SEQ ID NO: 20877 - DNA, 1134 bp, Artificial Sequence
  derived and/or modified sequence
tgggagtcttgtaatgcagccactgtggataaaagtgaattactgttcttaatttacccttttgtctcccttcaggatggattgtaggaattccccatggaaaattacaatcaaacatcaactgatttcatcttattggggctgttcccacaatcaagaattggccttttcgtattcaccctcatttttctcattttcctaatggctctaattggaaatctatccatgattcttctcatctttttggacatccatctccacacacctatgtatttcctacttagtcagctctccctcattgacctaaattacatctccaccattgttccaaagatggtttatgattttctgtatggaaacaagtctatctccttcactggatgtgggattcagagtttcttcttcttgactttagcagttgcagaagggctgctcctgacatcaatggcctatgatcgttatgtggccatttgctttcctctccactatcccatccgtataagcaaaagagtgtgtgtgatgatgataacaggatcttggatgataagctctatcaactcttgtgctcacacagtatatgcactctgtatcccatattgcaagtccagagccatcaatcattttttctgtgatgttccagctatgttgacgctagcctgcacagacacttgggtctatgagagcacagtgtttttgagcagcaccatctttcttgtgcttcctttcactggtattgcatgttcctatggccgggttctccttgctgtctaccgcatgcactctgcagaagggaggaagaaggcctattcaacctgtagcacccacctcactgtagtgtccttctactatgcaccctttgcttatacctatgtacgtccaagatccctgcgatctccaacagaggacaagattctggctgttttctacaccatcctcaccccaatgctcaaccccatcatctacagcctgagaaacaaggaggtgatgggggccctgacacaagtgattcagaaaatcttctcagtgaaaatgtagacatacgttctgtgttagagtcaaagcgctaggttcatatcaacttagtagtgtacagcagtgaagaaaaacattattacatgcccagtgtgtcaaaca

SEQ ID NO: 20878 - DNA, 939 bp, Artificial Sequence
  derived and/or modified sequence
atggagaactacaaccagaccagcaccgacttcatcctgctgggccttttcccccaaagccgcataggtctatttgttttcacactgatattcctgattttcttaatggcactgattggcaatctcagcatgattctgctcatattccttgacatccatctccacaccccaatgtacttcctgcttagtcaactgtctttgattgatttgaactacattagcacaatcgtgccaaagatggtatacgactttttgtatggcaataaaagcatatcttttacaggatgtgggattcagtccttctttttcttgaccctagcagtagcggagggactgctgctgacctctatggcatacgatcgctacgtagcaatttgctttcctctccattacccgattaggatcagcaagcgcgtgtgcgtaatgatgattacggggtcgtggatgattagtagtatcaattcatgcgctcacaccgtgtacgcgctttgtattccctattgtaagtccagagcgatcaatcactttttttgtgacgttcctgccatgcttacactggcctgcacagatacttgggtgtacgaatcgaccgtgtttctgagttcaacaatttttcttgtcctaccattcactgggatcgcctgctcatacggacgggtgctgctggctgtatatagaatgcatagtgccgaggggcgcaagaaagcttacagcacgtgcagtactcatctgaccgtcgtgtcgttttactacgcccctttcgcctacacatatgtgagaccgaggagccttcgctcccctactgaagataagattctggctgtgttctatactatcctgacacccatgttaaatcccatcatatatagtctgagaaacaaggaggtcatgggagccctgacccaggttatccagaaaatcttttccgtcaaaatgtag

SEQ ID NO: 20879 - DNA, 939 bp, Artificial Sequence
  derived and/or modified sequence
atggagaattacaatcaaacgagtactgattttatcctactaggcctatttccacagtcccgcatcggactttttgtctttaccctgattttcctgatctttttgatggcactgattggcaacctgtcgatgattctcctgatctttttagacattcacctgcatactcccatgtatttcttgctctcccaacttagcttaattgatctcaactatatctccacaattgtgccgaagatggtctatgattttctgtacggcaataagtccatctcttttacagggtgcggcatacagtcctttttcttcctcacattggccgtcgccgagggtcttcttctgacaagtatggcatacgatcgatacgtggcaatctgcttccctttacactatccaattcgcatcagtaagcgcgtgtgtgtaatgatgattactggttcgtggatgatttcttccataaattcttgtgcgcacaccgtgtacgctctgtgcatcccctactgtaagtctcgggcaatcaaccatttcttctgtgatgtacctgccatgcttaccctggcttgcacagatacctgggtgtatgagagcacagtctttctctcttctactattttcctggtgctcccctttaccggcattgcatgctcctacggccgagtgttattagcggtgtacagaatgcactctgcagagggaagaaaaaaggcttactctacttgctctacccatctgaccgtcgtttccttttattacgccccattcgcctacacttatgtaagacctcgaagccttcggtcaccaacagaagataagatcctagctgtgttctacacaatcctcaccccaatgctgaacccaattatttactcactgaggaacaaggaagtcatgggcgctctgacccaagtaattcagaagatcttctcagtgaagatgtag

SEQ ID NO: 20880 - protein, 312 aa, Artificial Sequence
  derived and/or modified sequence
MARENSTFNSDFILLGIFNHSPTHTFLFFLVLAIFSVAFMGNSVMVLLIYLDTQLHTPMYLLLSQLSLMDLMLICTTVPKMAFNYLSGSKSISMAGCATQIFFYTSLLGSECFLLAVMAYDRYTAICHPLRYTNLMSPKICGLMTAFSWILGSTDGIIDVVATFSFSYCGSREIAHFFCDFPSLLILSCSDTSIFEKILFICCIVMIVFPVAIIIASYARVILAVIHMGSGEGRRKAFTTCSSHLLVVGMYYGAALFMYIRPTSDRSPTQDKMVSVFYTILTPMLNPLIYSLRNKEVTRAFMKILGKGKSGE

SEQ ID NO: 20881 - DNA, 939 bp, Artificial Sequence
  derived and/or modified sequence
atggccagagagaacagcaccttcaacagcgacttcatcctgctgggcatcttcaaccacagccccacccacaccttcctgttcttcctggtgctggccatcttcagcgtggccttcatgggcaacagcgtgatggtgctgctgatctacctggacacccagctgcacacccccatgtacctgctgctgagccagctgagcctgatggacctgatgctgatctgcaccaccgtgcccaagatggccttcaactacctgagcggcagcaagagcatcagcatggccggctgcgccacccagatcttcttctacaccagcctgctgggcagcgagtgcttcctgctggccgtgatggcctacgacagatacaccgccatctgccaccccctgagatacaccaacctgatgagccccaagatctgcggcctgatgaccgccttcagctggatcctgggcagcaccgacggcatcatcgacgtggtggccaccttcagcttcagctactgcggcagcagagagatcgcccacttcttctgcgacttccccagcctgctgatcctgagctgcagcgacaccagcatcttcgagaagatcctgttcatctgctgcatcgtgatgatcgtgttccccgtggccatcatcatcgccagctacgccagagtgatcctggccgtgatccacatgggcagcggcgagggcagaagaaaggccttcaccacctgcagcagccacctgctggtggtgggcatgtactacggcgccgccctgttcatgtacatcagacccaccagcgacagaagccccacccaggacaagatggtgagcgtgttctacaccatcctgacccccatgctgaaccccctgatctacagcctgagaaacaaggaggtgaccagagccttcatgaagatcctgggcaagggcaagagcggcgagtag

SEQ ID NO: 20882 - DNA, 939 bp, Artificial Sequence
  derived and/or modified sequence
atggccagggaaaactcaacatttaattcagattttatcctactggggattttcaatcatagtcctactcacacttttctcttttttcttgtcctggctatcttctcagtcgccttcatggggaactccgtgatggtgctgctgatctatttggacacgcagctgcatacacctatgtatcttctattgtcacagcttagtctcatggaccttatgctgatatgcactaccgtacccaagatggcttttaattatctgtctgggtcaaagtccatcagtatggcaggctgcgcaacccagatttttttctatacttcactgctgggctcagaatgctttttgctggcagtgatggcttatgatcgctatacagccatatgccatcccctgaggtacactaatctaatgagcccaaagatctgtggtctcatgacggccttttcatggattctaggctcaactgatggcatcatcgatgtcgtggctacgttcagtttctcttactgtggcagcagggagatcgcacactttttctgtgacttcccaagcttacttatcctgagctgctccgacacgtccatttttgagaagatattgtttatctgttgcatcgtgatgatcgttttccccgtggctataatcattgcaagttatgcgcgtgttatcttagccgttatccacatgggtagtggcgagggaaggcggaaagcctttactacctgcagctcccacctgttagtggtgggcatgtactacggcgcagccttatttatgtacatacgcccaacaagcgatcgttccccaacccaggataagatggtaagcgtattttacactatcttaacgcccatgctgaatccactgatatactcgttacgtaataaagaggtgaccagagccttcatgaaaattctcgggaagggcaagtctggggagtag

SEQ ID NO: 20883 - DNA, 939 bp, Artificial Sequence
  derived and/or modified sequence
atggcccgggagaacagcaccttcaacagcgacttcatcctgctgggcatcttcaaccacagccccacccacaccttcctgttcttcctggtgctggccatcttctctgtggccttcatgggcaacagcgtgatggtgctgctgatctacctggacacccagctgcacacccccatgtacctgctgctgagccagctgagcctgatggacctgatgctgatctgcaccaccgtgcccaagatggccttcaactacctgagcggcagcaagagcatctccatggccggctgtgccacccagatcttcttctacaccagcctgctgggcagcgagtgcttcctgctggccgtgatggcctatgaccgctacacagccatctgccaccccctgcgctacaccaacctgatgagccccaagatctgtggcctgatgacagccttctcctggatcctgggcagcacagatggcatcattgatgtggtggccaccttctccttctcctactgcggcagccgggagatcgcccacttcttctgtgacttccccagcctgctgatcctgagctgcagcgacaccagcatctttgagaagatcctcttcatctgctgcatcgtgatgattgtgtttcctgtggccatcatcatcgccagctatgcccgggtcatcctggccgtcatccacatgggcagcggggagggccgcaggaaggccttcaccacctgcagcagccacctgctggtggtgggcatgtactacggggccgccctcttcatgtacatccggcccaccagtgacaggagccccacccaggacaagatggtgtctgtgttctacaccatcctgacccccatgctgaaccccctcatctacagcctgaggaacaaggaggtgacccgggccttcatgaagatcctgggcaagggcaagagcggggagtag

SEQ ID NO: 20884 - DNA, 1061 bp, Artificial Sequence
  derived and/or modified sequence
cgctggttttgtggtactaggtaaaaagcatacacatcatggcaagggagaattcgaccttcaactccgacttcatcctcctgggaatcttcaatcacagccccacccacaccttcctcttctttctggtcctggccatcttttcagtggccttcatgggaaactctgtcatggttctcctcatctacctggacacccagctccacacccccatgtacctcctcctcagccaactgtccctcatggacctcatgctcatctgcaccaccgtacccaagatggccttcaactacctgtctggcagcaagtccatttctatggctggttgtgccacacaaattttcttctatacatcactgcttggctctgagtgctttcttttggctgttatggcttatgaccgctacactgccatttgccaccctctaagatacaccaatctcatgagccctaaaatttgtggacttatgactgccttttcctggatcctgggctctacggatggaattattgatgttgtagcaacattttccttctcctactgtgggtctcgggaaatagcccacttcttctgtgacttcccctccctactaatcctctcatgcagtgacacatcaatatttgaaaagattcttttcatctgctgtatagtaatgattgttttccctgttgcaatcatcattgcttcctatgctcgagttatcctggctgtcattcacatgggatctggagagggtcgtcgcaaagcttttactacttgttcctctcacctcttggtggtgggaatgtactatggagcagctttgttcatgtacatacggcccacatctgatcgctccccaacacaggacaagatggtgtctgtattctacaccatcctcactcccatgttgaatcccctcatctacagcctccgcaacaaggaggtgaccagagcattcatgaagatcttaggaaagggcaagtctggagagtgagttacctaataaacttcatgttttgctgtgtgctaaatcctttttttaaatggtcctatttttccattaagccttgaaaatggg

SEQ ID NO: 20885 - DNA, 939 bp, Artificial Sequence
  derived and/or modified sequence
atggcccgggagaacagcaccttcaacagcgacttcatcctgctgggaattttcaaccacagtcctacacataccttcttgttttttcttgtgctcgccattttctctgttgcatttatgggtaactccgtgatggtcctcctgatttatttggatactcagttgcacacaccaatgtacttgttgttgagccagctgtcactgatggacctgatgttgatctgcactactgtgcccaagatggcttttaattatctcagcggaagcaaatccatctcaatggcgggctgcgcgacgcaaatctttttttacacatcactgctgggcagtgaatgcttccttctggcggtcatggcctacgataggtacacagctatctgccacccccttcggtacaccaacctgatgagccccaagatttgtggtctgatgactgcctttagttggattctcggatccaccgacgggatcatcgacgtagtggccacatttagtttcagctactgtgggtcacgtgagattgcacactttttctgcgatttcccctcactcctgatcctaagctgtagcgacactagcatcttcgagaagatcttattcatttgttgcattgtgatgattgtatttcctgttgccattataattgcatcatatgcgagggtgattctggcagtcattcacatgggtagcggcgaaggtagacggaaagcgtttacgacgtgttcttcacacctgcttgttgtaggtatgtactacggagcagccctgttcatgtatatcagaccaacctctgacaggagccctactcaggataagatggttagcgtattctatactattctaacccccatgttaaaccccctcatttactccttaaggaataaagaagtcactcgagccttcatgaaaatcctgggcaaagggaagtcaggtgaatag

SEQ ID NO: 20886 - DNA, 939 bp, Artificial Sequence
  derived and/or modified sequence
atggctcgggaaaacagtacatttaacagcgattttatcctgttagggatctttaatcacagtcctactcatacatttcttttctttctggtgttagccattttcagtgtcgcatttatgggaaattcagttatggtgctacttatttacctggacactcaactgcacacacccatgtacttactcctgtcccagctcagtctgatggacctgatgttgatctgcacaaccgttccaaagatggctttcaattacctgagcgggagcaagagcatcagtatggctggatgcgccacccagatattcttttacacctctctgctcgggtctgagtgtttccttctggccgtaatggcctacgatcgctatacagccatctgtcaccctctgcgttacaccaatctcatgagtcccaaaatctgtgggctgatgacggcattttcatggattttggggtctaccgatgggatcatagacgtcgttgctacgttctctttttcttattgcggctctcgcgagattgctcatttcttctgcgatttccctagcctgttgatccttagctgcagtgacacctccatattcgaaaaaattctctttatctgttgcatagtgatgatagtcttccctgtggctatcatcatagcttcttatgctcgcgtgattttggctgttattcacatggggtctggcgaaggccgaagaaaagcatttactacttgttccagtcacctgctggttgtcggaatgtactacggcgcagcactgtttatgtatataagaccaacttctgatcgctccccgacacaggataaaatggtctctgtgttttacactatactgacccctatgctgaatcctctcatctacagcctccgaaataaagaagtgactcgcgctttcatgaagattctgggaaaaggtaaatctggggaatag

SEQ ID NO: 20887 - protein, 312 aa, Artificial Sequence
  derived and/or modified sequence
MAWENQTFNSDFLLLGIFNHSPTHTFLFFLVLAIFSVAFMGNSIMVLLIYLDTQLHTPMYFLLSQLSLMDLMLICTTVPKMAFNYLSGSKSISMAGCATQIFFYISLLGSECFLLAVMSYDRYTAICHPLRYTNLMRPKICGLMTAFSWILGSTDGIIDAVATFSFSYCGSREIAHFCCDFPSLLILSCNDTSIFEEVIFICCIVMLVFPVAIIITSYARVILAVIHMGSGEGRRKAFTTCSSHLMVVGMYYGAGLFMCIQPTSHHSPMQDKMVSVFYTIVTPMLNPLIYSLRNKEVTRALMKILGKGKSGD

SEQ ID NO: 20888 - DNA, 939 bp, Artificial Sequence
  derived and/or modified sequence
atggcctgggagaaccagaccttcaacagcgacttcctgctgctgggcatcttcaaccacagccccacccacaccttcctgttcttcctggtgctggccatcttcagcgtggccttcatgggcaacagcatcatggtgctgctgatctacctggacacccagctgcacacccccatgtacttcctgctgagccagctgagcctgatggacctgatgctgatctgcaccaccgtgcccaagatggccttcaactacctgagcggcagcaagagcatcagcatggccggctgcgccacccagatcttcttctacatcagcctgctgggcagcgagtgcttcctgctggccgtgatgagctacgacagatacaccgccatctgccaccccctgagatacaccaacctgatgagacccaagatctgcggcctgatgaccgccttcagctggatcctgggcagcaccgacggcatcatcgacgccgtggccaccttcagcttcagctactgcggcagcagagagatcgcccacttctgctgcgacttccccagcctgctgatcctgagctgcaacgacaccagcatcttcgaggaggtgatcttcatctgctgcatcgtgatgctggtgttccccgtggccatcatcatcaccagctacgccagagtgatcctggccgtgatccacatgggcagcggcgagggcagaagaaaggccttcaccacctgcagcagccacctgatggtggtgggcatgtactacggcgccggcctgttcatgtgcatccagcccaccagccaccacagccccatgcaggacaagatggtgagcgtgttctacaccatcgtgacccccatgctgaaccccctgatctacagcctgagaaacaaggaggtgaccagagccctgatgaagatcctgggcaagggcaagagcggcgactag

SEQ ID NO: 20889 - DNA, 939 bp, Artificial Sequence
  derived and/or modified sequence
atggcatgggagaatcagaccttcaactcagatttcctgctactcggcatctttaaccacagccccacccacaccttcctcttctttctggtgctcgccattttcagcgtggcatttatgggtaacagcattatggtcctgctgatctatctggacacccaactgcatacaccaatgtattttttgctttctcaactgagccttatggatctgatgctgatctgcacgacggtgccgaaaatggcctttaattatttgtctggctcgaagtccattagcatggctgggtgcgcaactcaaatctttttttatatatcccttctgggttctgagtgcttcctgctggccgtcatgagttacgaccggtacaccgcgatttgtcatcccctgaggtacaccaacctaatgcgacctaaaatttgtggattgatgaccgccttctcttggattcttggaagcaccgacggcattatcgacgcggtcgcaacatttagtttctcctactgcggctccagagagatcgcccatttttgctgtgactttcctagcctccttatattgtcatgcaacgatactagtatatttgaggaagttatcttcatctgttgcattgtgatgctggtcttcccagttgctatcattatcacatcttacgcgagggttatcctggcagttatacacatgggctcaggcgaggggcggagaaaggccttcaccacctgtagcagtcaccttatggtagtgggaatgtattatggggccggcttgtttatgtgtatccagcccactagccatcactctccgatgcaggataagatggtatccgttttctataccattgtgactcctatgctgaaccctttgatatattctcttcgtaataaagaggtcacaagggcccttatgaaaattctgggcaaaggaaagtctggcgattag

SEQ ID NO: 20890 - DNA, 939 bp, Artificial Sequence
  derived and/or modified sequence
atggcctgggagaaccagaccttcaacagcgacttcctgctgctgggcatcttcaaccacagccccacccacaccttcctgttcttcctggtgctggccatcttctctgtggccttcatgggcaacagcatcatggtgctgctgatctacctggacacccagctgcacacccccatgtacttcctgctgagccagctgagcctgatggacctgatgctgatctgcaccaccgtgcccaagatggccttcaactacctgagcggcagcaagagcatctccatggccggctgtgccacccagatcttcttctacatcagcctgctgggcagcgagtgcttcctgctggccgtgatgtcctatgaccgctacacagccatctgccaccccctgcgctacaccaacctgatgaggcccaagatctgtggcctgatgacagccttctcctggatcctgggcagcacagatggcatcattgatgctgtggccaccttctccttctcctactgcggcagccgggagatcgcccacttctgctgtgacttccccagcctgctgatcctgagctgcaatgacaccagcatctttgaggaggtgatcttcatctgctgcatcgtgatgctggtgtttcctgtggccatcatcatcaccagctatgcccgggtcatcctggccgtcatccacatgggcagcggggagggccgcaggaaggccttcaccacctgcagcagccacctgatggtggtgggcatgtactacggggccggcctcttcatgtgcatccagcccaccagccaccacagccccatgcaggacaagatggtgtctgtgttctacaccatcgtgacccccatgctgaaccccctcatctacagcctgaggaacaaggaggtgacccgggccctgatgaagatcctgggcaagggcaagagcggggactag

SEQ ID NO: 20891 - DNA, 1006 bp, Artificial Sequence
  derived and/or modified sequence
tgcggtgctaggtaacaggcatattcatcatggcatgggagaatcagaccttcaactctgacttcctcctcctgggaatcttcaatcatagccccacccacaccttcctcttctttctggtcctggccatcttttcagtggccttcatgggaaactccatcatggttctcctcatctacctggatacccagctccacacccccatgtacttcctcctcagccaactgtccctcatggacctcatgctcatctgcaccactgtacccaagatggccttcaactacttgtctggcagcaagtccatttctatggctggctgtgccacacaaattttcttctatatatcattgcttggctccgaatgctttctgttggctgttatgtcttatgaccgctacactgccatttgccaccctctaagatacaccaatctcatgagacccaaaatttgtggacttatgactgccttctcctggatcctgggctctacagatggaatcattgatgctgtagcgacattttccttctcctactgtgggtctcgggaaatagcccacttctgctgtgacttcccttccctactaatcctctcatgcaatgacacatcaatatttgaagaggttattttcatctgctgtatagtaatgcttgttttccctgttgcaatcatcatcacttcctatgctcgagttattctggctgtcattcacatgggatctggagagggacgtcgcaaagcttttactacttgttcctctcacctcatggtggtgggaatgtactatggagcaggtttgttcatgtgcattcagcccacatctcatcattctcctatgcaggacaagatggtgtctgtattctacaccatcgtcactcccatgctgaatcctctcatttatagcctccgcaacaaggaagtgaccagagcattaatgaaaatcttaggaaagggcaagtctggagattgagttacctcataaatttcatgttttgctgtctgctaacg

SEQ ID NO: 20892 - DNA, 939 bp, Artificial Sequence
  derived and/or modified sequence
atggcctgggagaaccagaccttcaacagcgacttcctgctgctgggtatattcaaccacagccccactcacaccttcctcttctttctggtcctcgccatcttttcagtggcgtttatggggaactcaattatggtgctgttaatatatttagatacacaattacacacaccaatgtatttcctgttgagccagctttcattgatggatctcatgttaatctgcactaccgttcccaagatggctttcaactatttgtctggatcgaagagcattagcatggcaggctgtgcgacgcagatcttcttctacatctctttgctcggatctgaatgcttcctactggctgtaatgtcttacgatcgctacaccgccatatgccatcccttacgatatacgaacctgatgagacccaagatctgcggactcatgactgctttcagctggatcctgggttctaccgacggaataatcgacgcagtcgctacttttagttttagctactgtgggagccgagaaatcgcccacttttgttgtgactttccatctctcctaatcctgtcttgcaacgatacctccatcttcgaagaggtcatatttatctgttgcattgtgatgctcgtgtttcccgtagcgattataattacctcctatgcccgggtcatactggccgtaatacatatgggcagcggcgagggaaggcggaaggcctttacaacttgctcctctcacctgatggtggtgggaatgtattatggagccgggctgttcatgtgcattcaaccaacctctcaccacagcccgatgcaagataagatggtgtccgtcttctataccattgttacccctatgctaaaccctctgatctattcattgcgcaataaagaggtaaccagagcactcatgaagattctgggaaagggcaagagcggggactag

SEQ ID NO: 20893 - DNA, 939 bp, Artificial Sequence
  derived and/or modified sequence
atggcctgggagaatcaaactttcaacagtgattttctgcttctcggaatctttaaccatagcccaacgcatacctttctgtttttcctggtcctcgccatcttttccgtggctttcatgggcaattccattatggtactgcttatctatctcgatacacagctgcatacgccaatgtacttcttgctctctcaactctcactgatggacctcatgctgatctgcacaaccgtgcccaagatggcattcaattacctgagcgggtcaaagagtatctctatggctggctgtgccacccaaatctttttttacatcagcctacttggctcggaatgttttctcttggccgtcatgagctatgatcgttacacagcaatttgtcacccactgagatacactaatctgatgcggcctaaaatttgcggactcatgactgcattcagttggattctgggaagtactgacgggattatcgacgcagttgccaccttcagtttttcatactgcggcagccgagaaatcgcccacttctgttgtgactttcccagccttctcatcctctcctgcaatgataccagcatattcgaggaagtgattttcatttgctgcattgtgatgctcgtgttccccgtagcgatcattatcacttcgtacgccagggtcatcttggccgtgattcacatgggatccggtgagggcaggaggaaagctttcaccacgtgcagctcacacctgatggtggtgggcatgtattatggcgctggcctcttcatgtgcatccaaccaacctctcaccacagccccatgcaggacaagatggtttccgtgttttataccatagttacccctatgctgaatccgttgatttacagccttaggaacaaggaggtgacccgggcactgatgaagatcctgggcaagggcaagagcggggactag

SEQ ID NO: 20894 - protein, 320 aa, Artificial Sequence
  derived and/or modified sequence
MEMRNTTPDFILLGLFNHTRAHQVLFMMLLATVLTSLFSNALMILLIHWDHRLHRPMYFLLSQLSLMDMMLVSTTVPKMAADYLTGNKAISRAGCGVQIFFLPTLGGGECFLLAAMAYDRYAAVCHPLRYPTLMSWQLCLRMTMSSWLLGAADGLLQAVATLSFPYCGAHEIDHFFCEAPVLVRLACADTSVFENAMYICCVLMLLVPFSLILSSYGLILAAVLLMRSTEARKKAFATCSSHVAVVGLFYGAGIFTYMRPKSHRSTNHDKVVSAFYTMFTPLLNPLIYSVRNSEVKEALKRWLGTCVNLKHQQNEAHRSR

SEQ ID NO: 20895 - DNA, 963 bp, Artificial Sequence
  derived and/or modified sequence
atggagatgagaaacaccacccccgacttcatcctgctgggcctgttcaaccacaccagagcccaccaggtgctgttcatgatgctgctggccaccgtgctgaccagcctgttcagcaacgccctgatgatcctgctgatccactgggaccacagactgcacagacccatgtacttcctgctgagccagctgagcctgatggacatgatgctggtgagcaccaccgtgcccaagatggccgccgactacctgaccggcaacaaggccatcagcagagccggctgcggcgtgcagatcttcttcctgcccaccctgggcggcggcgagtgcttcctgctggccgccatggcctacgacagatacgccgccgtgtgccaccccctgagataccccaccctgatgagctggcagctgtgcctgagaatgaccatgagcagctggctgctgggcgccgccgacggcctgctgcaggccgtggccaccctgagcttcccctactgcggcgcccacgagatcgaccacttcttctgcgaggcccccgtgctggtgagactggcctgcgccgacaccagcgtgttcgagaacgccatgtacatctgctgcgtgctgatgctgctggtgcccttcagcctgatcctgagcagctacggcctgatcctggccgccgtgctgctgatgagaagcaccgaggccagaaagaaggccttcgccacctgcagcagccacgtggccgtggtgggcctgttctacggcgccggcatcttcacctacatgagacccaagagccacagaagcaccaaccacgacaaggtggtgagcgccttctacaccatgttcacccccctgctgaaccccctgatctacagcgtgagaaacagcgaggtgaaggaggccctgaagagatggctgggcacctgcgtgaacctgaagcaccagcagaacgaggcccacagaagcagatag

SEQ ID NO: 20896 - DNA, 963 bp, Artificial Sequence
  derived and/or modified sequence
atggagatgagaaacacaacgccggactttattctgttggggctcttcaaccatacgagagcccaccaagtgctttttatgatgctgttagctaccgtgttaacatctctgttctcaaacgccttaatgatcctgctgatccactgggatcataggcttcacagaccaatgtattttttactgtcacagctgagccttatggacatgatgctggtgtctactaccgtccctaagatggccgcggattatttaaccgggaacaaggccatttctcgcgctggatgcggcgtgcagattttttttttaccgactctcggaggtggcgaatgttttctgctggccgccatggcttatgatcgatacgcagctgtttgccaccctctgagataccccactttgatgtcctggcagttgtgtttaaggatgaccatgtcctcttggctgctgggagctgccgacgggttgttacaggccgtggctacactttcatttccctattgtggcgcccacgaaattgaccactttttttgcgaggcacccgtgctggtgagactagcttgtgctgataccagcgtgtttgaaaatgccatgtatatctgctgcgtcctgatgctcctggttccgttttccttgatcctttcatcttatggcctgatccttgcagctgtgctcctaatgcgatccactgaagcccggaagaaagccttcgcgacctgctcctctcatgtggctgtcgtcggcttgttttatggcgccgggattttcacatatatgaggcctaagtcacatcgatctaccaatcacgacaaggtggtaagtgcattctacaccatgttcacacctctgttaaaccccctaatttatagtgtgaggaattcagaggtaaaggaggctttgaaaaggtggttgggaacctgtgtgaatcttaagcatcaacagaatgaagcccatcgatctcgctag

SEQ ID NO: 20897 - DNA, 963 bp, Artificial Sequence
  derived and/or modified sequence
atggagatgaggaacaccaccccagacttcatcctgctgggcctcttcaaccacacccgggcccaccaggtgctcttcatgatgctgctggccaccgtgctgaccagcctcttcagcaatgccctgatgatcctgctgatccactgggaccaccggctgcaccggcccatgtacttcctgctgagccagctgagcctgatggacatgatgctggtgtccaccaccgtgcccaagatggctgctgactacctgactggaaacaaggccatcagcagagctggctgcggcgtgcagatcttcttcctgcccaccctgggcggcggggagtgcttcctgctggccgccatggcctatgacagatatgctgctgtgtgccaccccctgcgctaccccaccctgatgtcctggcagctgtgcctgaggatgaccatgagctcctggctgctgggcgctgctgatggcctgctgcaggccgtggccaccctgtccttcccctactgtggggcccacgagattgaccacttcttctgtgaggcccctgtgctggtgcggctggcctgtgccgacacctctgtgtttgaaaatgccatgtacatctgctgcgtgctgatgctgctggtgcccttcagcctcatcctgagcagctatggcctcatcctggccgctgtgctgctgatgaggagcacagaggccaggaagaaggcctttgccacctgcagcagccacgtggccgtggtgggcctcttctacggggccggcatcttcacctacatgaggcccaagagccacaggagcaccaaccacgacaaggtggtgtctgccttctacaccatgttcacccccctgctgaaccccctcatctacagcgtgagaaattctgaggtgaaggaggccctgaagcgctggctgggcacctgtgtgaacctgaagcaccagcagaatgaggcccacaggagcaggtag

SEQ ID NO: 20898 - DNA, 963 bp, Artificial Sequence
  derived and/or modified sequence
atggagatgcggaacaccacccccgacttcatcctgctgggcctgttcaaccacactagggcccatcaggtgctcttcatgatgctgctagctactgtcctgacatccctgttctctaacgccctcatgatcctgttaatccactgggatcatcgactgcaccgacccatgtactttttgctcagtcagctgtctctgatggatatgatgctcgtcagtacgactgttccaaaaatggccgcagactatctgacaggtaacaaggccatcagccgagcggggtgcggcgtgcagattttctttctgccaactctcggggggggagaatgctttttgctggcagcgatggcatacgacagatacgcggctgtgtgccacccccttcggtatccaaccttgatgtcgtggcagctgtgtttaagaatgacaatgagcagttggctgctcggtgcggctgacggcctgttgcaggcagtagccaccttgagttttccttactgtggagctcatgagatagatcactttttctgtgaagcgcctgtgctcgtgaggctggcttgcgctgatacctctgtgttcgaaaacgcaatgtacatttgttgcgttcttatgctgctggtgccgttctctcttattttgagtagctacggactcattctcgctgctgttctacttatgagatctactgaggccaggaagaaggcttttgctacatgctcatcccatgtggccgttgttggcctgttctacggggcgggcattttcacatatatgcggcctaagtctcaccggtctacaaatcacgacaaagtggtctccgccttctatactatgtttacacccctgttaaatcctttgatttattcggtgcgcaacagtgaggtaaaggaggcactcaagcgctggctgggtacctgcgtgaacctcaaacatcaacaaaacgaggctcaccggtcacgttag

SEQ ID NO: 20899 - DNA, 963 bp, Artificial Sequence
  derived and/or modified sequence
atggagatgagaaatactaccccagattttattctcctaggactctttaaccacaccagagcccaccaagtcctcttcatgatgcttctggccaccgttttgacctccctgtttagcaatgccctcatgattctcctgattcactgggaccaccggctccacaggcccatgtacttcctcctgagccaactttccctcatggacatgatgctggtttccaccactgtgcccaaaatggcggctgactacttgaccggaaataaggccatctcccgcgctggctgtggtgtgcagatcttcttcctccccacactgggtggtggagagtgcttcctcttagcagccatggcctatgaccgctatgcggctgtctgccacccactccgatatcccactctcatgagctggcagctgtgcctgaggatgaccatgtcgtcctggctcctgggtgcagctgacggcctcctgcaggctgttgctaccctgagcttcccatattgcggtgcacacgagatcgatcacttcttctgcgaggcccccgtgttggtgcgtttggcttgtgctgacacttcagtcttcgaaaacgccatgtacatctgctgtgtgttaatgctcctggtccccttttccctcatcctgtcctcctatggtctcatcctcgctgctgttctgctcatgcgctctacagaagcccgcaagaaggcctttgccacctgctcttcacatgtggctgtggtgggactcttttatggagctggcatttttacctatatgagacccaaatcccacaggtccactaaccacgataaggttgtgtcagccttctatactatgttcacccctttactaaatcccctcatctacagtgtgaggaacagtgaggtcaaggaagccctgaaacggtggctggggacgtgtgtaaacctaaaacaccagcaaaatgaggcccacaggtcaagatga

SEQ ID NO: 20900 - DNA, 963 bp, Artificial Sequence
  derived and/or modified sequence
atggagatgcggaacacaacgcccgattttattctgctcggtttgtttaaccatacgcgtgctcaccaggtcttattcatgatgctgttggcgaccgtgcttacatcgctattcagcaacgccctgatgatcctgctgattcattgggaccatcgcttacaccgccctatgtactttcttttgtcgcagcttagccttatggacatgatgctggtaagcacgaccgtgcccaagatggcagctgattacttgacaggtaacaaagcaatctcacgagctggatgtggtgtgcagatcttctttcttcctacacttggtgggggagagtgttttctcctcgctgctatggcgtacgacagatacgccgctgtctgtcacccactgcgatatccaacactcatgtcgtggcagctgtgtctgcgtatgacaatgagctcatggctcttgggagccgctgacggtctactgcaagcagtcgctaccttgagcttcccatactgcggggctcacgagatagatcacttcttctgtgaggctcctgtcctggtccgccttgcatgcgctgatacgagcgtgttcgaaaatgccatgtatatctgctgtgtactgatgcttcttgtacctttttctctcatactgagttcttatggactcatcctggctgctgtcctgctcatgcggtccaccgaagcgcgtaaaaaagcctttgcaacatgtagcagccatgtggcagtagttgggctcttctacggcgctggtatatttacatatatgcgcccaaaatcccatcggtctacgaatcacgacaaagttgtgagcgcattctatacaatgtttacaccattgcttaaccccctcatttattccgtacgcaattccgaagtgaaagaagcactgaaacgatggttaggaacctgtgtgaacctgaagcaccaacagaatgaagcccaccggagcaggtag

SEQ ID NO: 20901 - protein, 312 aa, Artificial Sequence
  derived and/or modified sequence
MRLANQTLGGDFFLLGIFSQISHPGRLCLLIFSIFLMAVSWNITLILLIHIDSSLHTPMYFFINQLSLIDLTYISVTVPKMLVNQLAKDKTISVLGCGTQMYFYLQLGGAECCLLAAMAYDRYVAICHPLRYSVLMSHRVCLLLASGCWFVGSVDGFMLTPIAMSFPFCRSHEIQHFFCEVPAVLKLSCSDTSLYKIFMYLCCVIMLLIPVTVISVSYYYIILTIHKMNSVEGRKKAFTTCSSHITVVSLFYGAAIYNYMLPSSYQTPEKDMMSSFFYTILTPVLNPIIYSFRNKDVTRALKKMLSVQKPPY

SEQ ID NO: 20902 - DNA, 939 bp, Artificial Sequence
  derived and/or modified sequence
atgagactggccaaccagaccctgggcggcgacttcttcctgctgggcatcttcagccagatcagccaccccggcagactgtgcctgctgatcttcagcatcttcctgatggccgtgagctggaacatcaccctgatcctgctgatccacatcgacagcagcctgcacacccccatgtacttcttcatcaaccagctgagcctgatcgacctgacctacatcagcgtgaccgtgcccaagatgctggtgaaccagctggccaaggacaagaccatcagcgtgctgggctgcggcacccagatgtacttctacctgcagctgggcggcgccgagtgctgcctgctggccgccatggcctacgacagatacgtggccatctgccaccccctgagatacagcgtgctgatgagccacagagtgtgcctgctgctggccagcggctgctggttcgtgggcagcgtggacggcttcatgctgacccccatcgccatgagcttccccttctgcagaagccacgagatccagcacttcttctgcgaggtgcccgccgtgctgaagctgagctgcagcgacaccagcctgtacaagatcttcatgtacctgtgctgcgtgatcatgctgctgatccccgtgaccgtgatcagcgtgagctactactacatcatcctgaccatccacaagatgaacagcgtggagggcagaaagaaggccttcaccacctgcagcagccacatcaccgtggtgagcctgttctacggcgccgccatctacaactacatgctgcccagcagctaccagacccccgagaaggacatgatgagcagcttcttctacaccatcctgacccccgtgctgaaccccatcatctacagcttcagaaacaaggacgtgaccagagccctgaagaagatgctgagcgtgcagaagcccccctactag

SEQ ID NO: 20903 - DNA, 939 bp, Artificial Sequence
  derived and/or modified sequence
atgaggttggcaaaccaaacactgggcggtgatttctttctgttgggaatctttagccagatctcccatcctggccgactgtgcctgcttattttttctatcttcttgatggccgtcagctggaacattacactgattcttttgattcacattgatagttcccttcacactcctatgtatttcttcatcaaccagctgtcactcatagatctcacgtacatatctgttacagtccccaagatgctcgtgaaccagctcgctaaagacaaaaccatctctgtgctcggctgcggcacacaaatgtatttttatctgcaattgggcggggcggaatgctgcctccttgctgccatggcctatgaccggtatgtagcgatctgtcaccctcttcggtactccgtgttaatgtcccaccgggtctgcctgctgctggcgtcagggtgttggttcgtgggatcagtcgatggctttatgctcacccctatagccatgtcattcccattttgtcggagccacgaaatacaacacttcttttgcgaagtgcctgcggtgttgaaattgtcatgttctgacacgagcctgtacaagattttcatgtatctctgttgtgtcattatgctcttaatccccgtcaccgtaatctccgtgtcctactattacatcatcctgacaatccacaagatgaatagtgtcgagggccggaagaaagcttttaccacctgctcttcacacattactgtggtgtccctcttctatggagcagcaatctacaactacatgctcccatccagttaccaaacccctgagaaggatatgatgagctcgtttttctacacaatactgacaccggtgcttaaccccattatatattcattccgcaataaggacgtcaccagagccctcaagaagatgctttctgtccaaaagcccccatactag

SEQ ID NO: 20904 - DNA, 939 bp, Artificial Sequence
  derived and/or modified sequence
atgaggctggccaaccagaccctgggcggggacttcttcctgctgggcatcttcagccagatcagccaccctggccgcctgtgcctgctgatcttcagcatcttcctgatggctgtgtcctggaacatcaccctcatcctgctgatccacatcgacagcagcctgcacacccccatgtacttcttcatcaaccagctgagcctgattgacctgacctacatctctgtgacagtgcccaagatgctggtgaaccagctggccaaggacaagaccatctctgtgctgggctgcggcacccagatgtacttctacctgcagctgggcggcgctgagtgctgcctgctggccgccatggcctatgacagatatgtggccatctgccaccccctgcgctacagcgtgctgatgagccaccgggtgtgcctgctgctggccagcggctgctggtttgtgggctctgtggatggcttcatgctgacccccatcgccatgtccttccccttctgccgcagccatgagatccagcacttcttctgtgaggtgcctgctgtgctgaagctgagctgcagcgacaccagcctgtacaagatcttcatgtacctgtgctgcgtcatcatgctgctgatccctgtgaccgtcatctctgtgtcctactactacatcatcctgaccatccacaagatgaacagcgtggagggcaggaagaaggccttcaccacctgcagcagccacatcaccgtggtgtccctcttctacggggccgccatctacaactacatgctgcccagcagctaccagaccccagagaaggacatgatgagcagcttcttctacaccatcctgacccctgtgctgaaccccatcatctacagcttcaggaacaaggatgtgacccgggccctgaagaagatgctgtctgtgcagaagccaccctactag

SEQ ID NO: 20905 - DNA, 1049 bp, Artificial Sequence
  derived and/or modified sequence
caggtaaagccacttcagccgatcatacagcatgcggctggccaaccagaccctgggtggtgactttttcctgttgggaatcttcagccagatctcacaccctggccgcctctgcttgcttatcttcagtatatttttgatggctgtgtcttggaatattacattgatacttctgatccacattgactcctctctgcatactcccatgtacttctttataaaccagctctcactcatagacttgacatatatttctgtcactgtccccaaaatgctggtgaaccagctggccaaagacaagaccatctcggtccttgggtgtggcacccagatgtacttctacctgcagttgggaggtgcagagtgctgccttctagccgccatggcctatgaccgctatgtggctatctgccatcctctccgttactctgtgctcatgagccatagggtatgtctcctcctggcatcaggctgctggtttgtgggctcagtggatggcttcatgctcactcccatcgccatgagcttccccttctgcagatcccatgagattcagcacttcttctgtgaggtccctgctgttttgaagctctcttgctcagacacctcactttacaagattttcatgtacttgtgctgtgtcatcatgctcctgatacctgtgacggtcatttcagtgtcttactactatatcatcctcaccatccataagatgaactcagttgagggtcggaaaaaggccttcaccacctgctcctcccacattacagtggtcagcctcttctatggagctgctatttacaactacatgctccccagctcctaccaaactcctgagaaagatatgatgtcatcctttttctacactatccttacacctgtcttgaatcctatcatttacagtttcaggaataaggatgtcacaagggctttgaaaaaaatgctgagcgtgcagaaacctccatattaaagtgtgaaagaacttaagttggtcctctcttcttagagtctctcttcactttaggtgtccttccaccaaacaatcagca

SEQ ID NO: 20906 - DNA, 939 bp, Artificial Sequence
  derived and/or modified sequence
atgcggctggccaaccagaccctgggcggcgacttcttcctgctgggcatctttagtcagataagtcacccaggtcgcctgtgcttgctgatcttttcgatctttctcatggccgtgagttggaacataaccttgattctgctgatccatatcgattcttctctgcatacacctatgtacttttttatcaaccagttgagtcttattgatctaacttacatttccgtgactgtccccaagatgctcgtcaaccagctggccaaggacaagactatatccgtgttgggatgtgggactcaaatgtatttctacctgcaactcggtggggccgagtgctgcctcctggccgcaatggcctatgatcggtacgtcgccatttgtcatccattgaggtattctgtgttgatgtcccatcgcgtgtgcctgctactcgctagtggctgctggtttgtcggctctgtagatgggtttatgttaacccctatcgcaatgagctttcccttttgtaggtcacatgaaattcagcattttttctgcgaagtacccgcagttctcaagctgtcttgcagcgacacatctctatataaaatctttatgtacctgtgctgtgttattatgctccttatacctgtgaccgtgatctccgtttcctattattatattattcttacgatccacaagatgaacagtgtcgagggacggaaaaaggccttcacaacctgtagtagtcacattacagtggtgagtctcttttatggagcagctatctataattatatgctgccctcaagctatcaaacaccggaaaaggatatgatgtcttctttcttctatactatcctgacccccgtgctgaatccaatcatttactctttccgaaacaaggatgtgacaagggccctcaaaaagatgctgagcgtgcagaaacctccttactag

SEQ ID NO: 20907 - DNA, 939 bp, Artificial Sequence
  derived and/or modified sequence
atgcggctggctaaccagaccctagggggagacttctttctgctgggcattttttcacaaatttcgcaccccggacggttatgcctcctcatcttttccatctttttaatggccgtcagttggaacataacactcatccttctgatccacattgacagctccctccacacgcccatgtattttttcatcaatcaactgagtctgatcgatctgacttatatttccgttactgtcccgaagatgctagtcaaccagttagctaaggataaaacaatatctgtcctcgggtgcgggacacaaatgtatttctatcttcagttgggtggcgctgagtgctgcctattggctgccatggcttatgatcgctacgtggctatttgtcatccactcagatactctgtgttaatgagccaccgagtttgtctcctcctggcgtccggctgctggttcgtaggtagcgtcgatgggttcatgttaacacctatcgcaatgagttttccattctgtagatcgcacgaaatacaacatttcttctgtgaagttcccgcagttttaaagctctcatgtagcgacacttcgctttacaaaatttttatgtacctctgctgcgtgatcatgttgttaatccccgtcacggtgattagcgtcagttactattatattattctgacaattcacaaaatgaactccgtagaggggcgaaagaaagccttcaccacgtgtagctcacatattacagtagtgagtctattctacggggcagctatttataactatatgctcccttcttcataccagacaccggaaaaagacatgatgagcagctttttttacaccatccttacgcctgtgctgaacccaatcatttatagtttccggaataaggatgtgacccgagctctcaagaagatgttgtccgtgcagaagcctccttactag

SEQ ID NO: 20908 - protein, 320 aa, Artificial Sequence
  derived and/or modified sequence
MEMRNTTPDFILLGLFNHTRAHQVLFMMVLSIVLTSLFGNSLMILLIHWDHRLHTPMYFLLSQLSLMDMMLVSTTVPKMAADYLTGSKAISRAGCGVQIFFLPTLGGGECFLLAAMAYDRYAAVCHPLRYPTLMSWQLCLRMTMSCWLLGAADGLLQAVVTLSFPYCGAHEIDHFFCETPVLVRLACADTSVFENAMYICCVLMLLVPFSLILSSYGLILAAVLHMRSTEARKKAFATCSSHVAVVGLFYGAAIFTYMRPKSHRSTNHDKVVSAFYTMFTPLLNPLIYSVKNSEVKGALKRWLGTCVNIKHQQNEAHRSR

SEQ ID NO: 20909 - DNA, 963 bp, Artificial Sequence
  derived and/or modified sequence
atggagatgagaaacaccacccccgacttcatcctgctgggcctgttcaaccacaccagagcccaccaggtgctgttcatgatggtgctgagcatcgtgctgaccagcctgttcggcaacagcctgatgatcctgctgatccactgggaccacagactgcacacccccatgtacttcctgctgagccagctgagcctgatggacatgatgctggtgagcaccaccgtgcccaagatggccgccgactacctgaccggcagcaaggccatcagcagagccggctgcggcgtgcagatcttcttcctgcccaccctgggcggcggcgagtgcttcctgctggccgccatggcctacgacagatacgccgccgtgtgccaccccctgagataccccaccctgatgagctggcagctgtgcctgagaatgaccatgagctgctggctgctgggcgccgccgacggcctgctgcaggccgtggtgaccctgagcttcccctactgcggcgcccacgagatcgaccacttcttctgcgagacccccgtgctggtgagactggcctgcgccgacaccagcgtgttcgagaacgccatgtacatctgctgcgtgctgatgctgctggtgcccttcagcctgatcctgagcagctacggcctgatcctggccgccgtgctgcacatgagaagcaccgaggccagaaagaaggccttcgccacctgcagcagccacgtggccgtggtgggcctgttctacggcgccgccatcttcacctacatgagacccaagagccacagaagcaccaaccacgacaaggtggtgagcgccttctacaccatgttcacccccctgctgaaccccctgatctacagcgtgaagaacagcgaggtgaagggcgccctgaagagatggctgggcacctgcgtgaacatcaagcaccagcagaacgaggcccacagaagcagatag

SEQ ID NO: 20910 - DNA, 963 bp, Artificial Sequence
  derived and/or modified sequence
atggaaatgaggaacactacccctgacttcattcttctcggtctatttaaccacacaagagcccaccaggttttatttatgatggtgctgtcaattgtccttacatctctgtttgggaatagcttgatgatcctgctgatccattgggatcacagactacacacccctatgtatttcttgctgagtcagttgagcctaatggatatgatgctggtgagcactaccgtacccaagatggccgccgactacttgacaggcagtaaagccatatcccgagcagggtgtggtgtgcagatctttttcctgccaacccttgggggaggcgaatgcttcctgttagccgcaatggcatatgaccgctatgccgccgtttgtcacccgctgcgctacccgacactgatgtcttggcaactctgtctgcgtatgaccatgagctgttggctgttgggagccgccgatgggttgctgcaagccgtggtaactctcagtttcccatattgcggggcccatgaaattgatcactttttttgcgagacccccgtgctagtgcgcttggcctgcgcagacacatctgtctttgagaatgcgatgtatatttgctgtgtgcttatgctcttagtccccttctctctgattctgtcaagttacggccttatcttggccgcagtcttgcacatgcgatctacggaggcccgcaagaaagcctttgcgacctgcagctctcatgtggctgtagttggcttgttctacggtgccgctatattcacatacatgcgccctaagagtcataggagtaccaaccatgacaaggtcgtgtctgctttctacacgatgttcacacctctactgaaccccctcatctactccgtcaagaatagcgaggtcaagggcgcactcaaacgctggcttggaacctgtgtgaacatcaagcaccagcagaacgaggcacaccgctcgcggtag

SEQ ID NO: 20911 - DNA, 963 bp, Artificial Sequence
  derived and/or modified sequence
atggagatgaggaacaccaccccagacttcatcctgctgggcctcttcaaccacacccgggcccaccaggtgctcttcatgatggtgctgagcatcgtgctgaccagcctgtttggaaacagcctgatgatcctgctgatccactgggaccaccggctgcacacccccatgtacttcctgctgagccagctgagcctgatggacatgatgctggtgtccaccaccgtgcccaagatggctgctgactacctgaccggcagcaaggccatcagcagagctggctgcggcgtgcagatcttcttcctgcccaccctgggcggcggggagtgcttcctgctggccgccatggcctatgacagatatgctgctgtgtgccaccccctgcgctaccccaccctgatgtcctggcagctgtgcctgaggatgaccatgagctgctggctgctgggcgctgctgatggcctgctgcaggccgtggtgaccctgtccttcccctactgtggggcccacgagattgaccacttcttctgtgagacccctgtgctggtgcggctggcctgtgccgacacctctgtgtttgaaaatgccatgtacatctgctgcgtgctgatgctgctggtgcccttcagcctcatcctgagcagctatggcctcatcctggccgctgtgctgcacatgaggagcacagaggccaggaagaaggcctttgccacctgcagcagccacgtggccgtggtgggcctcttctacggggccgccatcttcacctacatgaggcccaagagccacaggagcaccaaccacgacaaggtggtgtctgccttctacaccatgttcacccccctgctgaaccccctcatctacagcgtgaagaacagcgaggtgaagggggccctgaagcgctggctgggcacctgtgtgaacatcaagcaccagcagaatgaggcccacaggagcaggtag

SEQ ID NO: 20912 - DNA, 963 bp, Artificial Sequence
  derived and/or modified sequence
atggagatgcggaacaccacccccgacttcatcctgctgggcctgtttaaccatacacgagctcaccaggtgcttttcatgatggtcctatcaatcgttctgacttctctgtttggaaatagtctgatgatcctcctgattcactgggaccatcgtctgcacaccccaatgtactttctgctttcccagttgagcctgatggacatgatgttggtttcgaccacggttccgaagatggccgccgactacctcaccggcagcaaagccattagtcgggccggatgcggcgtccaaatcttttttctccccactctcggtgggggagagtgtttcctcctcgccgctatggcttacgataggtatgccgctgtgtgccatcccctgaggtacccgacactgatgtcttggcagttatgtctcaggatgactatgtcttgctggctcttgggtgccgctgacggcctcttgcaggccgtggtgactttatcctttccgtattgtggagctcacgagattgatcacttcttttgcgagacccccgtcctggtaagattggcctgtgcagacaccagcgtatttgagaatgccatgtatatctgttgtgttctgatgttactggtgcccttctccctgatcttgtccagctatgggttaatactagccgccgttttgcacatgcgaagcacagaagcccggaaaaaggcctttgccacctgctcttcccatgtggcggtggtgggcctattttatggggcggctatctttacatatatgaggcccaaaagccatcgatccacgaaccatgacaaagtggtgagcgcattttacacaatgtttacgccccttctgaatccccttatttatagcgtgaaaaattccgaagtgaagggagcccttaagcgctggctgggcacctgtgtgaacattaaacatcagcagaacgaggctcatcggtctcgatag

SEQ ID NO: 20913 - DNA, 1066 bp, Artificial Sequence
  derived and/or modified sequence
caccatcacaccaggggaaattatggagatgagaaatactaccccagattttattctcctaggactctttaaccacaccagagcccaccaagtcctcttcatgatggttctgagtatcgttttgacctccctgtttggcaattccctcatgattctcctgattcactgggaccaccggctccacacgcccatgtacttcctcctgagccaactttccctcatggacatgatgctggtttccaccactgtgcccaaaatggcggctgactacttgaccggaagtaaggccatctcccgcgctggctgtggtgtgcagatcttcttcctccccacactgggtggtggagagtgcttcctcttagcagccatggcctatgaccgctatgcggctgtctgccacccactccgatatcccactctcatgagctggcagctgtgcctgaggatgaccatgtcgtgttggctcctgggtgcagctgacgggctcctgcaggctgttgttaccctgagcttcccatattgtggtgcacacgagatcgatcacttcttctgcgagacccccgtgctggtgcgtttggcttgtgctgacacttcagtcttcgaaaacgccatgtacatctgctgtgtgttaatgctcctggtccccttttccctcatcctgtcctcctatggtctcatcctcgctgctgttctgcacatgcgctctacagaagcccgcaagaaggcctttgccacctgctcttcacatgtggctgtggtgggactcttttatggagctgccatttttacctatatgagacccaaatcccataggtccactaaccatgacaaggttgtgtcagccttctatactatgttcacccctttactaaaccccctcatctacagtgtgaagaacagtgaggtgaagggagccctgaaacggtggctggggacgtgtgtaaacataaaacaccagcaaaatgaggcccacaggtcaagatgatctaatgtcaaatgagtctaagttcctgaatttattaatattttaacacattgttattctctccctttagcaattcatgca

SEQ ID NO: 20914 - DNA, 963 bp, Artificial Sequence
  derived and/or modified sequence
atggagatgaggaataccacccctgactttatccttctcggcctgtttaatcacacaagggcccaccaagtgctcttcatgatggtcctgagtatcgtgctgacatcactctttgggaactctctcatgattttattaatccactgggatcatcggctgcacacccccatgtacttcctgctgtctcagctctccctcatggacatgatgttagtttccacaactgtgcctaagatggccgctgactatttgacaggctcaaaggccatttcgcgcgcagggtgcggcgttcagatattctttctgcctacacttggcggaggtgaatgcttcctactagccgcaatggcttacgaccggtacgccgcagtgtgccacccacttcggtacccaacattgatgtcatggcagctgtgcctccgcatgacaatgtcttgttggcttttaggagcagcagatggcttactgcaggccgtggtgacactatcgttcccttattgtggtgcacatgaaatcgatcactttttttgtgaaaccccggtgcttgtgagacttgcctgcgcagacacttccgtgttcgagaatgctatgtacatatgttgtgtgctcatgttgctggtgcccttttcactcattctctctagttacggcctcatcctagcagccgtgttgcacatgaggtctactgaagcgcgaaaaaaggctttcgcgacctgttcctctcacgtcgccgttgtgggattattctacggcgcagctatcttcacttatatgcggccaaagtctcacaggagcacgaaccacgacaaggtagtgtccgcattctacacgatgtttacaccactgctcaaccccctgatatactcagtcaaaaactcagaggtgaagggcgctctgaaacgatggcttggaacctgcgtgaatataaagcaccagcagaatgaagcacaccggagtcggtag

SEQ ID NO: 20915 - protein, 348 aa, Artificial Sequence
  derived and/or modified sequence
MDNITWMASHTGWSDFILMGLFRQSKHPMANITWMANHTGWSDFILLGLFRQSKHPALLCVVIFVVFLMALSGNAVLILLIHCDAHLHTPMYFFISQLSLMDMAYISVTVPKMLLDQVMGVNKISAPECGMQMFFYVTLAGSEFFLLATMAYDRYVAICHPLRYPVLMNHRVCLFLSSGCWFLGSVDGFTFTPITMTFPFRGSREIHHFFCEVPAVLNLSCSDTSLYEIFMYLCCVLMLLIPVVIISSSYLLILLTIHGMNSAEGRKKAFATCSSHLTVVILFYGAAIYTYMLPSSYHTPEKDMMVSVFYTILTPVVNPLIYSLRNKDVMGALKKMLTVEPAFQKAME

SEQ ID NO: 20916 - DNA, 1047 bp, Artificial Sequence
  derived and/or modified sequence
atggacaacatcacctggatggccagccacaccggctggagcgacttcatcctgatgggcctgttcagacagagcaagcaccccatggccaacatcacctggatggccaaccacaccggctggagcgacttcatcctgctgggcctgttcagacagagcaagcaccccgccctgctgtgcgtggtgatcttcgtggtgttcctgatggccctgagcggcaacgccgtgctgatcctgctgatccactgcgacgcccacctgcacacccccatgtacttcttcatcagccagctgagcctgatggacatggcctacatcagcgtgaccgtgcccaagatgctgctggaccaggtgatgggcgtgaacaagatcagcgcccccgagtgcggcatgcagatgttcttctacgtgaccctggccggcagcgagttcttcctgctggccaccatggcctacgacagatacgtggccatctgccaccccctgagataccccgtgctgatgaaccacagagtgtgcctgttcctgagcagcggctgctggttcctgggcagcgtggacggcttcaccttcacccccatcaccatgaccttccccttcagaggcagcagagagatccaccacttcttctgcgaggtgcccgccgtgctgaacctgagctgcagcgacaccagcctgtacgagatcttcatgtacctgtgctgcgtgctgatgctgctgatccccgtggtgatcatcagcagcagctacctgctgatcctgctgaccatccacggcatgaacagcgccgagggcagaaagaaggccttcgccacctgcagcagccacctgaccgtggtgatcctgttctacggcgccgccatctacacctacatgctgcccagcagctaccacacccccgagaaggacatgatggtgagcgtgttctacaccatcctgacccccgtggtgaaccccctgatctacagcctgagaaacaaggacgtgatgggcgccctgaagaagatgctgaccgtggagcccgccttccagaaggccatggagtag

SEQ ID NO: 20917 - DNA, 1047 bp, Artificial Sequence
  derived and/or modified sequence
atggataatattacctggatggccagccatacaggttggagtgattttattttaatgggcctatttagacagagtaagcaccctatggcaaacatcacctggatggctaatcacaccggctggtcggactttatcctgctgggcctgtttcgtcagtccaaacaccccgctcttctgtgtgtcgtgatttttgtcgtgttcctcatggcactgtcgggcaacgccgtcctgatcctgctgatacactgcgatgcccacctgcacacccccatgtacttctttatcagccagctctctctgatggatatggcatacatttcagtaactgttccaaagatgctgttggaccaggtcatgggtgtaaataaaatcagtgctcccgaatgcggcatgcagatgttcttctacgtcactctggcagggtctgagtttttcctgctggccaccatggcgtacgaccgatacgttgctatatgccatcccctgcggtatccagtgcttatgaatcaccgagtctgtttattcctatccagcggctgctggtttttgggcagtgttgacgggttcaccttcactcccatcacaatgacttttccgtttagaggctcccgagagatccaccatttcttttgtgaggtgcctgcggtcttaaacctctcttgttcagacacatcactgtatgagattttcatgtatctatgttgcgttctcatgctcctcattcctgtggtgatcatctcctcttcctatctcctgattcttctgaccatccacgggatgaacagtgctgaaggacgcaaaaaggcttttgccacttgtagttcccacttgacagtggttattctgttttatggggctgccatctacacttatatgctaccatctagctaccacactccagagaaggatatgatggttagcgtgttttacaccatcctgacccccgtggtgaatcccctcatatacagcctgaggaataaagatgtcatgggcgcccttaagaagatgctgaccgtggagcccgcctttcagaaagccatggagtag

SEQ ID NO: 20918 - DNA, 1047 bp, Artificial Sequence
  derived and/or modified sequence
atggacaacatcacctggatggccagccacacaggctggagcgacttcatcctgatgggcctcttccggcagagcaagcaccccatggccaacatcacctggatggccaaccacacaggctggagcgacttcatcctgctgggcctcttccggcagagcaagcacccagccctgctgtgtgtggtgatctttgtggtgttcctgatggccctgtctggaaatgctgtgctgatcctgctgatccactgtgatgcccacctgcacacccccatgtacttcttcatcagccagctgagcctgatggacatggcctacatctctgtgacagtgcccaagatgctgctggaccaggtgatgggcgtgaacaagatcagcgccccagaatgtggcatgcagatgttcttctacgtgaccctggccggcagcgagttcttcctgctggccaccatggcctatgacagatatgtggccatctgccaccccctgcgctaccctgtgctgatgaaccaccgggtgtgcctcttcctgagcagcggctgctggttcctgggctctgtggatggcttcaccttcacccccatcaccatgaccttccccttccggggcagccgggagatccaccacttcttctgtgaggtgcctgctgtgctgaacctgagctgcagcgacaccagcctgtatgagatcttcatgtacctgtgctgcgtgctgatgctgctgatccctgtggtgatcatcagcagcagctacctgctgatcctgctgaccatccacggcatgaacagcgctgagggcaggaagaaggcctttgccacctgcagcagccacctgactgtggtgatcctcttctacggggccgccatctacacctacatgctgcccagcagctaccacaccccagagaaggacatgatggtgtctgtgttctacaccatcctgacccctgtggtgaaccccctcatctacagcctgaggaacaaggatgtgatgggcgccctgaagaagatgctgactgtggagcccgccttccagaaggccatggagtag

SEQ ID NO: 20919 - DNA, 1047 bp, Artificial Sequence
  derived and/or modified sequence
atggacaacatcacctggatggccagccacaccggctggagcgactttatactgatgggcctgttcagacagagcaaacatcctatggccaacataacctggatggcaaaccatacgggctggtcagactttatcctcctgggcctgttccggcagtcaaagcaccctgctctgctgtgcgtggtcattttcgtggtcttccttatggccctgagcggcaatgccgtgctcattctcctcattcattgcgacgcccacctgcatacgccaatgtatttctttattagtcaactgtctctgatggatatggcttacatttctgtgaccgttcccaaaatgctgctcgaccaagttatgggcgtgaataaaatcagcgccccagaatgcggaatgcagatgtttttttacgtcacactcgccgggtctgaattctttctgctcgctaccatggcttacgaccgctacgttgcaatctgccacccactcagatatccagtgctaatgaaccatcgcgtctgcttgttcctgagctcagggtgctggtttctggggtctgtagacgggttcacatttacaccaattacaatgaccttcccgttccgcgggtccagggaaatccaccattttttctgcgaagtgccagcagtgttgaacctgtcgtgtagcgacacatctctctatgagatcttcatgtatctgtgttgtgtgctcatgctgctgatccccgtggtgatcatctccagttcttacctactaatcctgttgacgatacacggaatgaattctgctgaggggcggaagaaggctttcgctacatgcagttcacatctcactgttgtcatccttttctatggtgccgccatttacacttacatgcttccttcctcctaccacacacctgaaaaggacatgatggtttcggtcttttacaccattctgacaccagtggtgaatcctttaatctactcacttcgcaataaggacgtcatgggtgcactgaagaaaatgctgacagttgagcccgcattccagaaagcaatggaatag

SEQ ID NO: 20920 - DNA, 1047 bp, Artificial Sequence
  derived and/or modified sequence
atggacaacatcacctggatggccagccacactggatggtcggatttcatcctgatgggactcttcagacaatccaaacatccaatggccaatatcacctggatggccaaccacactggatggtcggatttcatcctgttgggactcttcagacaatccaaacatccagcactactttgtgtggtcatttttgtggttttcctgatggcgttgtctggaaatgctgtcctgatccttctgatacactgtgacgcccacctccacacccccatgtactttttcatcagtcaattgtctctcatggacatggcgtacatttctgtcactgtgcccaagatgctcctggaccaggtcatgggtgtgaataagatctcagcccctgagtgtgggatgcagatgttcttctacgtgacactagcaggttcagaatttttccttctagccaccatggcctatgaccgctacgtggccatctgccatcctctccgttaccctgtcctcatgaaccatagggtgtgtctcttcctgtcatcaggctgctggttcctgggctcagtggatggcttcacattcactcccatcaccatgaccttccccttccgtggatcccgggagattcatcatttcttctgtgaagttcctgctgtattgaatctctcctgctcagacacctcactctatgagattttcatgtacttgtgctgtgtcctcatgctcctcatccctgtggtgatcatttcaagctcctatttactcatcctcctcaccatccacgggatgaactcagcagagggccggaaaaaggcctttgccacctgctcctcccacctgactgtggtcatcctcttctatggggctgccatctacacctacatgctccccagctcctaccacacccctgagaaggacatgatggtatctgtcttctataccatcctcactccagtggtgaaccctttaatctatagtcttaggaataaggatgtcatgggggctctgaagaaaatgttaacagtggaacctgcctttcaaaaagctatggagtag

SEQ ID NO: 20921 - DNA, 1047 bp, Artificial Sequence
  derived and/or modified sequence
atggataatatcacctggatggccagccacactgggtggagcgacttcatcctgatgggtctgtttaggcagtctaagcaccctatggccaatatcacctggatggctaatcacactggatggtccgacttcattctcttaggactgtttcgtcagtccaagcaccctgctcttctctgcgtggttattttcgtcgttttcttgatggccctgagtggcaacgcggtattgatcctcctgatccattgtgacgcacacctccatacacctatgtacttttttatctcgcagttatctttaatggatatggcctacattagcgtgacggttcctaaaatgctgctggatcaggtaatgggcgttaacaagatctccgccccagagtgcgggatgcagatgttcttctatgtgacgttggcaggctccgagttctttctcctggctaccatggcctacgataggtatgtcgccatctgtcaccctctccggtaccccgtcttaatgaaccaccgggtttgcctgttcctatcatccgggtgctggttcttgggaagcgtagatggatttacattcacacctatcacaatgacctttcccttccggggttcaagggagattcatcactttttttgcgaggtacctgctgtcttgaatctctcttgctccgacactagcttgtacgagatctttatgtatctgtgttgtgttctgatgttactcatcccagtggtcatcattagctccagctacctgctgatcctgctgacaattcatgggatgaattcagcagaagggcgaaaaaaagccttcgccacatgctcctctcatctgaccgtggtgattctgttctacggagctgctatctacacttatatgctgccatccagttaccataccccggagaaagatatgatggtatcagtgttctacactatcctcaccccagtcgttaatcctctgatctatagcctgcgcaacaaagatgtgatgggcgcactgaagaagatgctgacggtcgaacccgcttttcaaaaggcgatggaatag

SEQ ID NO: 20922 - protein, 315 aa, Artificial Sequence
  derived and/or modified sequence
MANITRMANHTGKLDFILMGLFRRSKHPALLSVVIFVVFLKALSGNAVLILLIHCDAHLHSPMYFFISQLSLMDMAYISVTVPKMLLDQVMGVNKVSAPECGMQMFLYLTLAGSEFFLLATMAYDRYVAICHPLRYPVLMNHRVCLFLASGCWFLGSVDGFMLTPITMSFPFCRSWEIHHFFCEVPAVTILSCSDTSLYETLMYLCCVLMLLIPVTIISSSYLLILLTVHRMNSAEGRKKAFATCSSHLTVVILFYGAAVYTYMLPSSYHTPEKDMMVSVFYTILTPVLNPLIYSLRNKDVMGALKKMLTVRFVL

SEQ ID NO: 20923 - DNA, 948 bp, Artificial Sequence
  derived and/or modified sequence
atggccaacatcaccagaatggccaaccacaccggcaagctggacttcatcctgatgggcctgttcagaagaagcaagcaccccgccctgctgagcgtggtgatcttcgtggtgttcctgaaggccctgagcggcaacgccgtgctgatcctgctgatccactgcgacgcccacctgcacagccccatgtacttcttcatcagccagctgagcctgatggacatggcctacatcagcgtgaccgtgcccaagatgctgctggaccaggtgatgggcgtgaacaaggtgagcgcccccgagtgcggcatgcagatgttcctgtacctgaccctggccggcagcgagttcttcctgctggccaccatggcctacgacagatacgtggccatctgccaccccctgagataccccgtgctgatgaaccacagagtgtgcctgttcctggccagcggctgctggttcctgggcagcgtggacggcttcatgctgacccccatcaccatgagcttccccttctgcagaagctgggagatccaccacttcttctgcgaggtgcccgccgtgaccatcctgagctgcagcgacaccagcctgtacgagaccctgatgtacctgtgctgcgtgctgatgctgctgatccccgtgaccatcatcagcagcagctacctgctgatcctgctgaccgtgcacagaatgaacagcgccgagggcagaaagaaggccttcgccacctgcagcagccacctgaccgtggtgatcctgttctacggcgccgccgtgtacacctacatgctgcccagcagctaccacacccccgagaaggacatgatggtgagcgtgttctacaccatcctgacccccgtgctgaaccccctgatctacagcctgagaaacaaggacgtgatgggcgccctgaagaagatgctgaccgtgagattcgtgctgtag

SEQ ID NO: 20924 - DNA, 948 bp, Artificial Sequence
  derived and/or modified sequence
atggccaacattacccgtatggcaaaccataccggtaagcttgatttcatcctgatgggcctgttcaggcggtcaaagcacccggcactgctgtctgtggtgatcttcgtggtattcttgaaagccctgtctgggaacgccgtgcttatcctcctcattcattgcgacgctcaccttcacagtccgatgtattttttcatttcccaactttccctcatggacatggcctatatctccgttacagtgcccaaaatgctgctcgatcaggtgatgggcgtgaataaagtgtctgccccagagtgtgggatgcagatgttcctgtatctcactctcgctggatctgaattctttttgcttgcaacaatggcctatgaccggtacgtcgccatctgccaccctctcagataccccgtgctgatgaatcacagggtgtgcctgtttcttgcctctggatgttggtttctgggtagcgtggatggctttatgctgacgcctatcactatgtcattccccttttgtcgctcttgggaaatccaccatttcttttgtgaggtaccagccgtgactatcctgtcatgtagtgatactagcctttatgagaccctcatgtacttatgctgcgtcttgatgctccttataccagtcacaatcattagctcttcatatctgcttatactcttaactgttcaccgcatgaatagtgctgaggggcggaaaaaagccttcgctacgtgtagctcgcatttaacggttgtgattctcttttacggtgcggcagtatatacctatatgctgccatcatcctaccacactcccgagaaggacatgatggtgagtgtgttttatacaatcctgacccccgttttgaaccctttgatctactcactgaggaataaggatgtcatgggagccctgaagaaaatgcttacggtcagatttgtgctatag

SEQ ID NO: 20925 - DNA, 948 bp, Artificial Sequence
  derived and/or modified sequence
atggccaacatcaccaggatggccaaccacacaggcaagctggacttcatcctgatgggcctcttcagaagaagcaagcacccagccctgctgtctgtggtgatctttgtggtgttcctgaaggccctgtctggaaatgctgtgctgatcctgctgatccactgtgatgcccacctgcacagccccatgtacttcttcatcagccagctgagcctgatggacatggcctacatctctgtgacagtgcccaagatgctgctggaccaggtgatgggcgtgaacaaggtgtctgccccagaatgtggcatgcagatgttcctgtacctgaccctggccggcagcgagttcttcctgctggccaccatggcctatgacagatatgtggccatctgccaccccctgcgctaccctgtgctgatgaaccaccgggtgtgcctcttcctggccagcggctgctggttcctgggctctgtggatggcttcatgctgacccccatcaccatgtccttccccttctgccgctcctgggagatccaccacttcttctgtgaggtgcctgctgtgaccatcctgagctgcagcgacaccagcctgtatgagaccctgatgtacctgtgctgcgtgctgatgctgctgatccctgtgaccatcatcagcagcagctacctgctgatcctgctgactgtgcacaggatgaacagcgctgagggcaggaagaaggcctttgccacctgcagcagccacctgactgtggtgatcctcttctacggggctgctgtgtacacctacatgctgcccagcagctaccacaccccagagaaggacatgatggtgtctgtgttctacaccatcctgacccctgtgctgaaccccctcatctacagcctgaggaacaaggatgtgatgggcgccctgaagaagatgctgactgtgcgctttgtgctgtag

SEQ ID NO: 20926 - DNA, 948 bp, Artificial Sequence
  derived and/or modified sequence
atggccaacatcacccggatggccaaccacaccggcaagctggacttcatcctgatgggcttatttcggcggtccaaacatcccgcactgctgtcggttgtgatcttcgtcgtcttcctgaaagctttgagtggcaatgctgtcctgatcctgctcattcattgcgatgcccatttgcatagtccaatgtacttcttcatctctcagcttagtcttatggatatggcctatatatctgtcacagtgcctaagatgcttctcgatcaggtgatgggcgtcaacaaagtctcagctccggagtgtggaatgcaaatgttcctgtaccttactcttgcgggaagtgagtttttccttctggctaccatggcctacgacagatacgtcgctatctgccatccactgcgctatcccgttctgatgaaccacagagtctgcctctttctggcatccgggtgttggtttttgggctccgttgatggattcatgctaacaccaataactatgtcctttccattttgcagatcttgggagatccatcacttcttttgcgaagtccctgccgtaacaattctaagctgttctgacacaagcctctacgaaactcttatgtacttgtgctgcgtgctcatgttactcatcccagtgactataatttcatctagctatttgctgatactcctcacagtacacaggatgaactctgccgaggggcgcaaaaaagctttcgcgacatgcagctctcacttgaccgttgtcatcctgttctacggcgccgcggtctatacctatatgcttccaagcagctaccacacaccagaaaaagacatgatggtgtctgtcttctacactatcctgacgccagtgctgaatcccctcatatacagtctgaggaataaggacgttatgggagctttaaagaaaatgctcacggtgcggtttgttctttag

SEQ ID NO: 20927 - DNA, 1014 bp, Artificial Sequence
  derived and/or modified sequence
acctcatggccaacatcaccaggatggccaaccacactggaaagttggatttcatcctcatgggactcttcagacgatccaaacatccagctctacttagtgtggtcatctttgtggttttcctgaaggcgttgtctggaaatgctgtcctgatccttctgatacactgtgacgcccacctccacagccccatgtactttttcatcagtcaattgtctctcatggacatggcgtacatttctgtcactgtgcccaagatgctcctggaccaggtcatgggtgtgaataaggtctcagcccctgagtgtgggatgcagatgttcctctatctgacactagcaggttcggaatttttccttctagccaccatggcctatgaccgctacgtggccatctgccatcctctccgttaccctgtcctcatgaaccatagggtctgtcttttcctggcatcgggctgctggttcctgggctcagtggatggcttcatgctcactcccatcaccatgagcttccccttctgcagatcctgggagattcatcatttcttctgtgaagtccctgctgtaacgatcctgtcctgctcagacacctcactctatgagaccctcatgtacctatgctgtgtcctcatgctcctcatccctgtgacgatcatttcaagctcctatttactcatcctcctcaccgtccacaggatgaactcagcagagggccggaaaaaggcctttgccacctgctcctcccacctgactgtggtcatcctcttctatggggctgccgtctacacctacatgctccccagctcctaccacacccctgagaaggacatgatggtatctgtcttctataccatcctcactccggtgctgaaccctttaatctatagtcttaggaataaggatgtcatgggggctctgaagaaaatgttaactgtgagattcgtcctttaggaaattataaagtaggaaatttggatataaagatttattttccttttctctacccatcaga

SEQ ID NO: 20928 - DNA, 948 bp, Artificial Sequence
  derived and/or modified sequence
atggctaacattaccaggatggccaaccatacaggaaaattggactttatcctcatgggcctgttcaggagatccaagcatcccgctctgctctccgtcgtaatctttgtggttttcctgaaggcacttagcggcaatgcagtgctgatcctcctgatccactgtgacgcacatcttcactccccaatgtacttttttatttctcagctcagtttgatggacatggcctacatctctgtcacggtgcccaaaatgttattagaccaagtcatgggcgtgaataaagtgtctgcccctgagtgtggaatgcagatgttcctgtatttgaccctagcgggaagtgagttcttcctgctggcaactatggcatatgatcgttacgtcgccatatgccaccccttaaggtatcctgttctaatgaatcaccgcgtgtgcctgtttctagctagtggctgctggttcctcggttcagttgacggcttcatgctgacaccaattacaatgagctttcctttctgccggtcttgggagattcaccacttcttctgtgaggttccagccgtgaccatccttagctgtagcgataccagtctgtatgagaccttgatgtacctttgctgcgtgctcatgttgctcatcccagttacaatcatttcctcatcctacctactcattctgctcacggtgcacaggatgaactccgctgagggtcggaagaaagcatttgccacatgctcctcccacctgacagtcgtaattcttttctatggcgcagcagtgtatacgtatatgctgccatcatcgtatcacactcctgagaaagacatgatggttagtgtattttataccattcttacaccagtgttgaaccctctgatatatagtcttaggaataaagatgtgatgggagcactcaagaaaatgctgacagtgcggttcgtgctgtag

SEQ ID NO: 20929 - protein, 314 aa, Artificial Sequence
  derived and/or modified sequence
MGDVNQSVASDFILVGLFSHSGSRQLLFSLVAVMFVIGLLGNTVLLFLIRVDSRLHTPMYFLLSQLSLFDIGCPMVTIPKMASDFLRGEGATSYGGGAAQIFFLTLMGVAEGVLLVLMSYDRYVAVCQPLQYPVLMRRQVCLLMMGSSWVVGVLNASIQTSITLHFPYCASRIVDHFFCEVPALLKLSCADTCAYEMALSTSGVLILMLPLSLIATSYGHVLQAVLSMRSEEARHKAVTTCSSHITVVGLFYGAAVFMYMVPCAYHSPQQDNVVSLFYSLVTPTLNPLIYSLRNPEVWMALVKVLSRAGLRQMC

SEQ ID NO: 20930 - DNA, 945 bp, Artificial Sequence
  derived and/or modified sequence
atgggcgacgtgaaccagagcgtggccagcgacttcatcctggtgggcctgttcagccacagcggcagcagacagctgctgttcagcctggtggccgtgatgttcgtgatcggcctgctgggcaacaccgtgctgctgttcctgatcagagtggacagcagactgcacacccccatgtacttcctgctgagccagctgagcctgttcgacatcggctgccccatggtgaccatccccaagatggccagcgacttcctgagaggcgagggcgccaccagctacggcggcggcgccgcccagatcttcttcctgaccctgatgggcgtggccgagggcgtgctgctggtgctgatgagctacgacagatacgtggccgtgtgccagcccctgcagtaccccgtgctgatgagaagacaggtgtgcctgctgatgatgggcagcagctgggtggtgggcgtgctgaacgccagcatccagaccagcatcaccctgcacttcccctactgcgccagcagaatcgtggaccacttcttctgcgaggtgcccgccctgctgaagctgagctgcgccgacacctgcgcctacgagatggccctgagcaccagcggcgtgctgatcctgatgctgcccctgagcctgatcgccaccagctacggccacgtgctgcaggccgtgctgagcatgagaagcgaggaggccagacacaaggccgtgaccacctgcagcagccacatcaccgtggtgggcctgttctacggcgccgccgtgttcatgtacatggtgccctgcgcctaccacagcccccagcaggacaacgtggtgagcctgttctacagcctggtgacccccaccctgaaccccctgatctacagcctgagaaaccccgaggtgtggatggccctggtgaaggtgctgagcagagccggcctgagacagatgtgctag

SEQ ID NO: 20931 - DNA, 945 bp, Artificial Sequence
  derived and/or modified sequence
atgggtgatgtaaatcagtccgttgcctcggacttcatattggtcggattattttcccactctggtagccggcagctcctattctctctggtcgctgtgatgtttgtgatcggtctgctggggaatactgtgctgctttttttgattcgcgttgactcacgcttgcacacacccatgtacttcctcttgtcccagctgagcctcttcgatataggctgtcccatggtcaccatccccaaaatggcttctgactttttacgaggggaaggggctacatcttacggcggaggagccgcacagatttttttcttaacactgatgggcgtcgccgagggggtgttattggttctgatgagttacgaccgctacgtcgcagtatgtcagcccctgcagtacccggtcctgatgcgccgccaagtatgtctcctaatgatgggctctagctgggttgttggagtgctcaacgcctcaatccagacatccatcacgctccacttcccatactgcgcctcgaggatcgtcgaccacttcttttgcgaagtgcccgctctgctgaaacttagctgcgcggatacctgcgcatacgagatggccctgagcacctcaggagtgctgatactgatgttacccctgtctctgatcgctacgagttacggacacgtgctgcaggccgttctgagcatgaggagcgaggaagcccgtcacaaggcagtaacgacatgctcttcccatatcacggtagtggggcttttttacggagccgctgttttcatgtatatggtcccttgcgcgtaccattcgccacagcaggacaatgtggtgtctctcttctacagcctggtaactcccacacttaaccccctaatttactctcttaggaacccagaggtatggatggctttggtgaaagtgttgtccagggccgggctgcgccagatgtgctag

SEQ ID NO: 20932 - DNA, 945 bp, Artificial Sequence
  derived and/or modified sequence
atgggagatgtgaaccagagcgtggccagtgacttcatcctggtgggcctcttcagccacagcggcagccggcagctgctcttcagcctggtggccgtgatgtttgtgattggcctgctgggcaacacagtgctgctcttcctgatccgggtggacagccggctgcacacccccatgtacttcctgctgagccagctgagcctgtttgatattggctgccccatggtgaccatccccaagatggccagtgacttcctgcggggggagggcgccaccagctatggaggaggagctgcccagatcttcttcctgaccctgatgggcgtggccgagggcgtgctgctggtgctgatgtcctatgacagatatgtggccgtgtgccagcccctgcagtaccctgtgctgatgaggcggcaggtgtgcctgctgatgatgggcagctcctgggtggtgggcgtgctgaatgccagcatccagaccagcatcaccctgcacttcccctactgtgccagcagaattgtggaccacttcttctgtgaggtgcctgccctgctgaagctgagctgtgccgacacctgtgcctatgagatggccctgagcaccagcggcgtgctgatcctgatgctgcccctgagcctcatcgccaccagctatggccacgtgctgcaggccgtgctgtccatgaggtctgaggaggcccggcacaaggctgtgaccacctgcagcagccacatcaccgtggtgggcctcttctacggggctgctgtgttcatgtacatggtgccctgtgcctaccacagcccccagcaggacaacgtggtgtccctcttctacagcctggtgacccccaccctgaaccccctcatctacagcctgagaaatcctgaggtgtggatggccctggtgaaggtgctgagccgggccggcctgcggcagatgtgctag

SEQ ID NO: 20933 - DNA, 945 bp, Artificial Sequence
  derived and/or modified sequence
atgggcgacgtgaaccagagcgtggccagcgacttcatcctggtgggactcttttcccactcgggatctagacaactacttttcagtttggtggctgtaatgtttgtgataggcctccttggcaacaccgtgctgctgtttctgataagggtggattctagactccacacgcctatgtacttcttgttgtctcagctttccctttttgatatcggatgcccaatggtcaccattccaaagatggcctccgatttcctgagaggtgagggggcaacttcttatgggggcggggcggcgcagatcttcttcctgacacttatgggcgtggcggagggggttttgctcgtgttgatgtcttatgaccgatacgttgccgtctgtcaaccactacagtatccagtgctgatgagacggcaagtgtgcttactgatgatgggaagcagctgggtagtcggtgtccttaacgcctccatccagacctccataaccctccacttcccttactgcgccagcaggatcgttgatcatttcttttgtgaagtgcctgcgctgctcaagctctcttgcgcagacacgtgcgcatatgaaatggccctgtctacaagtggggtgctgattctcatgctgcccctgagtctgatcgccacctcctatggtcacgttttgcaggcagttctcagtatgcgctccgaagaggcccgacataaagctgtaactacgtgtagctctcatatcactgtggtgggcctgttttatggcgctgcagtgttcatgtatatggtcccctgtgcctaccatagtccgcagcaggataacgtggtgtcactgttttattccttggttacacctacactcaacccccttatttattccctgcgcaatcccgaggtttggatggccctggtcaaagtgctcagccgtgccggcctgagacaaatgtgctag

SEQ ID NO: 20934 - DNA, 1056 bp, Artificial Sequence
  derived and/or modified sequence
ttatttgccaccccatgcaggcttcttgccatagttcagctgttcttcctgcagctaaagtgcattgtgtaaaacatgggggatgtgaatcagtcggtggcctcagacttcattctggtgggcctcttcagtcactcaggatcacgccagctcctcttctccctggtggctgtcatgtttgtcataggccttctgggcaacaccgttcttctcttcttgatccgtgtggactcccggctccatacacccatgtacttcctgctcagccagctctccctgtttgacattggctgtcccatggtcaccatccccaagatggcatcagactttctgcggggagaaggtgccacctcctatggaggtggtgcagctcaaatattcttcctcacactgatgggtgtggctgagggcgtcctgttggtcctcatgtcttatgaccgttatgttgctgtgtgccagcccctgcagtatcctgtacttatgagacgccaggtatgtctgctgatgatgggctcctcctgggtggtaggtgtgctcaacgcctccatccagacctccatcaccctgcattttccctactgtgcctcccgtattgtggatcacttcttctgtgaggtgccagccctactgaagctctcctgtgcagatacctgtgcctacgagatggcgctgtccacctcaggggtgctgatcctaatgctccctctttccctcatcgccacctcctacggccacgtgttgcaggctgttctaagcatgcgctcagaggaggccagacacaaggctgtcaccacctgctcctcgcacatcacggtagtggggctcttttatggtgccgccgtgttcatgtacatggtgccttgcgcctaccacagtccacagcaggataacgtggtttccctcttctatagccttgtcacccctacactcaacccccttatctacagtctgaggaatccggaggtgtggatggctttggtcaaagtgcttagcagagctggactcaggcaaatgtgctgactacatagaaactgctggtgagattccagcggtcct

SEQ ID NO: 20935 - DNA, 945 bp, Artificial Sequence
  derived and/or modified sequence
atgggcgacgtgaaccagagcgtggcttcagattttatcttagtcggactgttttcacactcaggatcacggcaattgcttttctctctggtggcagtcatgttcgtaatcgggctgctgggtaacacagtgctcctcttccttattcgggtggatagtaggctccacacccctatgtactttcttctttcacagctctctctcttcgacatcggttgtcctatggtgaccattccaaaaatggccagtgattttcttcggggtgaaggcgctaccagctatggaggtggagcagcacagattttctttctaaccctcatgggcgtggctgaaggcgttctgctggtgttaatgtcttacgacagatatgttgctgtgtgtcagcccctccaatatccagttcttatgagaaggcaagtctgcctgcttatgatgggtagttcctgggtcgtcggagtgcttaatgcaagcattcagacttccatcaccctgcactttccctactgcgcgtcaagaatcgtggaccattttttctgcgaggttcctgccctcttgaagctgagctgtgctgacacatgcgcatacgagatggccttgtctaccagcggggtgctgatccttatgctgccactttcccttatcgcgaccagttacggacacgttcttcaggcggtgctttccatgaggtccgaagaagcccgacacaaggccgttacaacatgctcatcccatatcacagtcgtgggactgttttatggtgccgcagttttcatgtatatggtaccctgtgcttatcactctcctcagcaggacaatgtcgtgagtctgttttattctctcgtgactcctacattgaacccactgatctatagcctccgtaatcccgaagtgtggatggcactcgtaaaagtgctgtctcgagcaggactgagacaaatgtgctag

SEQ ID NO: 20936 - protein, 326 aa, Artificial Sequence
  derived and/or modified sequence
MYVSNCNPCAIHRKINYPNTKLDFEQVNNITEFILLGLTQNAEAQKLLFAVFTLIYFLTMVDNLIIVVTITTSPALDSPVYFFLSFFSFIDGCSSSTMAPKMIFDLLTEKKTISFSGCMTQLFVEHFFGGVEIILLVVMAYDCYVAICKPLYYLITMNRQVCGLLVAMAWVGGFLHALIQMLLIVWLPFCGPNVIDHFICDLFPLLKLSCTDTHVFGLFVAANSGLMCMLIFSILITSYVLILCSQRKALSTCAFHITVVVLFFVPCILVYLRPMITFPIDKAVSVFYTVVTPMLNPLIYTLRNTEVKNAMKQLWSQIIWGNNLCD

SEQ ID NO: 20937 - protein, 309 aa, Artificial Sequence
  derived and/or modified sequence
MENQNNVTEFILLGLTENLELWKIFSAVFLVMYVATVLENLLIVVTIITSQSLRSPMYFFLTFLSLLDVMFSSVVAPKVIVDTLSKSTTISLKGCLTQLFVEHFFGGVGIILLTVMAYDRYVAICKPLHYTIIMSPRVCCLMVGGAWVGGFMHAMIQLLFMYQIPFCGPNIIDHFICDLFQLLTLACTDTHILGLLVTLNSGMMCVAIFLILIASYTVILCSLKSYSSKGRHKALSTCSSHLTVVVLFFVPCIFLYMRPVVTHPIDKAMAVSDSIITPMLNPLIYTLRNAEVKSAMKKLWMKWEALAGK

SEQ ID NO: 20938 - DNA, 981 bp, Artificial Sequence
  derived and/or modified sequence
atgtacgtgagcaactgcaacccctgcgccatccacagaaagatcaactaccccaacaccaagctggacttcgagcaggtgaacaacatcaccgagttcatcctgctgggcctgacccagaacgccgaggcccagaagctgctgttcgccgtgttcaccctgatctacttcctgaccatggtggacaacctgatcatcgtggtgaccatcaccaccagccccgccctggacagccccgtgtacttcttcctgagcttcttcagcttcatcgacggctgcagcagcagcaccatggcccccaagatgatcttcgacctgctgaccgagaagaagaccatcagcttcagcggctgcatgacccagctgttcgtggagcacttcttcggcggcgtggagatcatcctgctggtggtgatggcctacgactgctacgtggccatctgcaagcccctgtactacctgatcaccatgaacagacaggtgtgcggcctgctggtggccatggcctgggtgggcggcttcctgcacgccctgatccagatgctgctgatcgtgtggctgcccttctgcggccccaacgtgatcgaccacttcatctgcgacctgttccccctgctgaagctgagctgcaccgacacccacgtgttcggcctgttcgtggccgccaacagcggcctgatgtgcatgctgatcttcagcatcctgatcaccagctacgtgctgatcctgtgcagccagagaaaggccctgagcacctgcgccttccacatcaccgtggtggtgctgttcttcgtgccctgcatcctggtgtacctgagacccatgatcaccttccccatcgacaaggccgtgagcgtgttctacaccgtggtgacccccatgctgaaccccctgatctacaccctgagaaacaccgaggtgaagaacgccatgaagcagctgtggagccagatcatctggggcaacaacctgtgcgactag

SEQ ID NO: 20939 - DNA, 930 bp, Artificial Sequence
  derived and/or modified sequence
atggagaaccagaacaacgtgaccgagttcatcctgctgggcctgaccgagaacctggagctgtggaagatcttcagcgccgtgttcctggtgatgtacgtggccaccgtgctggagaacctgctgatcgtggtgaccatcatcaccagccagagcctgagaagccccatgtacttcttcctgaccttcctgagcctgctggacgtgatgttcagcagcgtggtggcccccaaggtgatcgtggacaccctgagcaagagcaccaccatcagcctgaagggctgcctgacccagctgttcgtggagcacttcttcggcggcgtgggcatcatcctgctgaccgtgatggcctacgacagatacgtggccatctgcaagcccctgcactacaccatcatcatgagccccagagtgtgctgcctgatggtgggcggcgcctgggtgggcggcttcatgcacgccatgatccagctgctgttcatgtaccagatccccttctgcggccccaacatcatcgaccacttcatctgcgacctgttccagctgctgaccctggcctgcaccgacacccacatcctgggcctgctggtgaccctgaacagcggcatgatgtgcgtggccatcttcctgatcctgatcgccagctacaccgtgatcctgtgcagcctgaagagctacagcagcaagggcagacacaaggccctgagcacctgcagcagccacctgaccgtggtggtgctgttcttcgtgccctgcatcttcctgtacatgagacccgtggtgacccaccccatcgacaaggccatggccgtgagcgacagcatcatcacccccatgctgaaccccctgatctacaccctgagaaacgccgaggtgaagagcgccatgaagaagctgtggatgaagtgggaggccctggccggcaagtag

SEQ ID NO: 20940 - DNA, 981 bp, Artificial Sequence
  derived and/or modified sequence
atgtacgtttccaattgcaacccatgtgcgattcataggaaaatcaactatcctaataccaagctcgacttcgaacaagtaaataacatcacagagttcattctgttggggttgacacagaacgccgaggcacagaagctgcttttcgccgtattcacgctcatatatttcctaaccatggtcgacaacctaataatcgtggtaactattactacgtctcctgcattagattcccctgtctacttctttctgagcttcttctccttcattgacggctgcagcagttcaacaatggcaccaaagatgatctttgatcttctgaccgaaaagaaaacaatctcctttagtggatgcatgacacagctcttcgtggagcacttcttcggaggagtggaaatcattctactggtcgtgatggcatacgattgctacgtcgcaatttgtaaacccctctactacttaatcacaatgaatcggcaggtgtgtggcctgctagtggctatggcctgggtcggcggtttcctgcacgccttgatacagatgctccttatcgtgtggctacccttttgcggccccaacgtcattgatcattttatttgtgacctttttcccctgctgaaactgtcatgtaccgatacccatgtgttcgggctctttgtggccgcaaacagtggactgatgtgcatgctaatcttttcaattctgataacgagctatgttcttatcctgtgttcacaaagaaaagcactttctacatgtgccttccacattaccgtcgtcgtgctgttcttcgtcccatgtatcctggtttaccttaggcccatgatcactttccctattgataaagccgtgtccgtgttctacacagtcgtaacccctatgctgaacccactgatctacacacttcgcaacactgaggtcaagaacgccatgaaacagctctggtcacagatcatctggggaaataatctgtgcgattag

SEQ ID NO: 20941 - DNA, 930 bp, Artificial Sequence
  derived and/or modified sequence
atggagaatcagaacaacgtaaccgagtttatcctccttgggctcaccgaaaacctcgaactttggaaaatattctcggctgtgttccttgtcatgtacgtggcaacagtgttggagaatctccttatcgtggtgactattataactagccagagcctgcggagccctatgtacttcttcttaacatttttgtctctactcgatgttatgttctcatccgttgtcgccccgaaagtcatcgttgacacgctgagcaagtcgactactattagcttgaaagggtgtttaacacagctttttgtggaacattttttcggtggtgtcggcataatccttttaaccgtcatggcgtacgaccggtatgtcgccatttgcaaaccccttcactacacaatcatcatgtccccccgtgtctgttgcctaatggtggggggagcatgggtgggaggtttcatgcacgcgatgattcagctcctatttatgtaccagattcccttctgtggacccaacataattgaccatttcatttgcgacctattccaactgttaaccctagcatgcaccgatacccatatcttgggacttctcgtaaccttgaattctgggatgatgtgtgtagccattttcttgattctcattgcaagctacacggttatactgtgctccctgaaaagctactcttccaaaggcagacacaaggccctttcgacatgctcgtcacacctgaccgtggtggtattatttttcgttccttgtattttcctgtatatgcggcctgtcgtcactcacccaatcgacaaagccatggccgtttcagactcgattattacacccatgttaaacccactcatttatacattgcgcaatgcagaagtgaagtcagccatgaaaaaactttggatgaaatgggaagctctggctggaaagtag

SEQ ID NO: 20942 - DNA, 981 bp, Artificial Sequence
  derived and/or modified sequence
atgtatgtgagcaactgcaacccctgtgccatccacaggaagatcaactaccccaacaccaagctggactttgagcaggtgaacaacatcacagagttcatcctgctgggcctgacccagaatgctgaggcccagaagctgctgtttgctgtgttcaccctcatctacttcctgaccatggtggacaacctgatcatcgtggtgaccatcaccaccagccctgccctggacagccctgtgtacttcttcctgtccttcttctccttcattgatggctgcagcagcagcaccatggcccccaagatgatctttgacctgctgacagagaagaagaccatctccttcagcggctgcatgacccagctgtttgtggagcacttcttcggcggcgtggagatcatcctgctggtggtgatggcctatgactgctacgtggccatctgcaagcccctgtactacctgatcaccatgaaccggcaggtgtgtggcctgctggtggccatggcctgggtgggcggcttcctgcacgccctgatccagatgctgctgattgtgtggctgcccttctgtggccccaacgtgattgaccacttcatctgtgacctcttccccctgctgaagctgagctgcacagacacccacgtgtttggcctgtttgtggccgccaacagcggcctgatgtgcatgctgatcttcagcatcctgatcaccagctatgtgctgatcctgtgcagccagaggaaggccctgagcacctgtgccttccacatcaccgtggtggtgctcttctttgtgccctgcatcctggtgtacctgcggcccatgatcaccttccccatcgacaaggctgtgtctgtgttctacacagtggtgacccccatgctgaaccccctcatctacaccctgaggaacacagaggtgaagaatgccatgaagcagctgtggagccagatcatctggggcaacaacctgtgtgactag

SEQ ID NO: 20943 - DNA, 930 bp, Artificial Sequence
  derived and/or modified sequence
atggagaaccagaacaacgtgacagagttcatcctgctgggcctgacagagaacctggagctgtggaagatcttctctgctgtgttcctggtgatgtatgtggccaccgtgctggagaacctgctgattgtggtgaccatcatcaccagccagagcctgcggagccccatgtacttcttcctgaccttcctgagcctgctggatgtgatgttcagctctgtggtggcccccaaggtgattgtggacaccctgagcaagagcaccaccatcagcctgaagggctgcctgacccagctgtttgtggagcacttctttggaggagtgggcatcatcctgctgactgtgatggcctatgacagatatgtggccatctgcaagcccctgcactacaccatcatcatgagcccccgggtgtgctgcctgatggtgggcggggcctgggtgggcggcttcatgcacgccatgatccagctgctcttcatgtaccagatccccttctgtggccccaacatcatcgaccacttcatctgtgacctcttccagctgctgaccctggcctgcacagacacccacatcctgggcctgctggtgaccctgaacagcggcatgatgtgtgtggccatcttcctgatcctgattgccagctacaccgtcatcctgtgcagcctgaagagctacagcagcaagggccgccacaaggccctgagcacctgcagcagccacctgactgtggtggtgctcttctttgtgccctgcatcttcctgtacatgaggcctgtggtgacccaccccatcgacaaggccatggctgtgtctgacagcatcatcacccccatgctgaaccccctcatctacaccctgagaaatgctgaggtgaagagcgccatgaagaagctgtggatgaagtgggaggccctggccggcaagtag

SEQ ID NO: 20944 - DNA, 981 bp, Artificial Sequence
  derived and/or modified sequence
atgtacgtgagcaactgcaacccctgcgccatccaccggaagatcaactacccaaacaccaaacttgactttgagcaagtgaacaatatcactgaattcattttgctgggactgactcagaatgccgaggcacagaagctccttttcgccgtctttactcttatctatttcctgacaatggtagacaacctcatcatcgtggttacaatcacgacctcacctgccctagattctccagtgtacttttttttatccttcttttcatttatcgacggctgttccagtagcaccatggcacctaaaatgattttcgacctcctcaccgaaaaaaaaaccatcagttttagcggatgcatgacccagctcttcgttgagcacttctttggtggagtggagatcatcctattggtcgtcatggcatacgactgttacgttgccatttgcaaaccactttactatctgatcacaatgaacagacaggtgtgcggattactggtcgccatggcttgggtcggaggattcctgcacgctctgattcagatgttgctcattgtctggctacccttctgtgggccaaacgtgatcgaccattttatttgtgatttatttccattactgaaactgtcttgtacagacacacatgtattcggcttgttcgttgcagctaactctggcctgatgtgcatgcttatcttcagcatattgattacaagttatgtcctgattctatgctcccagagaaaggctctgagcacctgtgcattccatatcacagtggtcgtgctctttttcgtgccgtgcatcctagtctatctgagacccatgattacatttcccatcgacaaagctgtttccgtgttctatactgtagtgacacccatgctaaatcctctgatctatacactacgcaatacagaagtaaagaatgccatgaagcaactgtggtcacagatcatttggggaaacaatctatgcgattag

SEQ ID NO: 20945 - DNA, 930 bp, Artificial Sequence
  derived and/or modified sequence
atggagaaccagaacaacgtgaccgagttcatcctgctgggcctgactgagaacctggaactgtggaaaatatttagtgcggtatttctggttatgtatgtggccacagtgctggagaacttgttgatcgtcgtgaccatcataacctcccaaagcctaaggtcaccgatgtacttttttctgacatttctcagcctgctggacgtgatgttttcttctgtggttgcccctaaggtgattgtcgacacactgtccaaatcgaccactatttctcttaagggttgccttacacagttgttcgttgaacatttcttcggcggggttggcatcatactgttgacagttatggcctatgaccgctacgtggctatctgcaaacccctgcattatacaatcatcatgtcccccagggtctgctgcctcatggtggggggggcctgggtgggcgggttcatgcatgcaatgattcagttattgtttatgtatcagatcccgttttgtggacctaatatcatcgaccactttatttgcgatctcttccagcttttaacgctcgcctgcaccgatacacacatactggggctcctggtgacactgaattctggaatgatgtgtgtcgccattttcctgatcctgattgcttcatacacggtaatattgtgttcattgaaaagttatagcagcaaggggagacataaagccctctccacctgctcttcacacctgaccgtggtggtcctgtttttcgtgccgtgtatctttctgtatatgaggccagtggtaacacatcccattgataaggcaatggccgtgtctgattccattatcacacccatgctgaatccacttatctatacattgcgaaacgccgaggtaaaatccgctatgaagaaactgtggatgaagtgggaggcactagctgggaaatag

SEQ ID NO: 20946 - DNA, 981 bp, Artificial Sequence
  derived and/or modified sequence
atgtatgtgtcaaattgcaatccttgtgctattcacagaaaaatcaattatccaaataccaaactggatttcgagcaagtgaacaacataacggaattcatcttgcttggcctgacacagaacgcagaggcacagaaactcttgtttgctgtgtttacactcatctactttctcaccatggtagacaacctaatcattgtggtgacaatcaccaccagcccagccctggactcccccgtgtatttttttctgtctttcttttccttcatagatggctgctcctcttctaccatggcccccaaaatgatatttgacttactcactgaaaagaaaactatttccttcagtgggtgcatgacccagctctttgtagaacatttctttgggggagttgagatcattctgctcgtggtgatggcctatgactgctatgtggccatctgcaagcccctgtactacctgatcacaatgaacaggcaggtatgtggcctcctggtggccatggcatgggtcgggggatttcttcacgctctgattcaaatgcttttaatagtctggctgcccttctgtggccccaatgtcattgaccatttcatctgtgaccttttccctctgctaaaactctcctgcactgacactcacgtctttggactctttgttgccgccaacagtgggctgatgtgtatgctcattttttctattcttattacctcttacgtcctaatcctctgctcacagcggaaggctctctctacctgcgccttccatatcactgtagtcgtcctattctttgttccctgtatattggtgtaccttcgacccatgatcaccttccctattgataaagctgtgtctgtgttttatactgtggtaacacccatgttaaaccctttaatctacaccctcagaaacacagaggtgaaaaatgccatgaagcagctctggagccaaataatctggggtaacaatttgtgtgattag

SEQ ID NO: 20947 - DNA, 1058 bp, Artificial Sequence
  derived and/or modified sequence
cagctggaactcatatcaacacctgagaaatggaaaatcaaaacaatgtgactgaattcattcttctgggtctcacagagaacctggagctgtggaaaatattttctgctgtgtttcttgtcatgtatgtagccacagtgctggaaaatctacttattgtggtaactattatcacaagtcagagtctgaggtcacctatgtatttttttcttaccttcttgtcccttttggatgtcatgttctcatctgtcgttgcccccaaggtgattgtagacaccctctccaagagcactaccatctctctcaaaggctgcctcacccagctgtttgtggagcatttctttggtggtgtggggatcatcctcctcactgtgatggcctatgaccgctacgtggccatctgtaagcccctgcactacacgatcatcatgagtccacgggtgtgctgcctaatggtaggaggggcttgggtggggggatttatgcacgcaatgatacaacttctcttcatgtatcaaatacccttctgtggtcctaatatcatagatcactttatatgtgatttgtttcagttgttgacacttgcctgcacggacacccacatcctgggcctcttagttaccctcaacagtgggatgatgtgtgtggccatctttcttatcttaattgcgtcctacacggtcatcctatgctccctgaagtcttacagctctaaagggcggcacaaagccctctctacctgcagctcccacctcacggtggttgtattgttctttgtcccctgtattttcttgtacatgaggcctgtggtcactcaccccatagacaaggcaatggctgtgtcagactcaatcatcacacccatgttaaatcccttgatctatacactgaggaatgcagaggtgaaaagtgccatgaagaaactctggatgaaatgggaggctttggctgggaaataactgcaatgctgagaacatcatgtatttcccaaaaggagaagtcattctttcagaaatgtgtaagagctaaaactgtccattcctcggtggctgtcaaag

SEQ ID NO: 20948 - DNA, 981 bp, Artificial Sequence
  derived and/or modified sequence
atgtacgtgtctaattgtaacccctgcgcaatacatcggaaaatcaactatccaaacaccaaattggactttgagcaggtgaacaatatcaccgaattcatcttactggggttgacacaaaacgctgaggcgcagaaactactctttgctgtgttcaccctgatatactttttgaccatggtagataaccttatcattgtagtgaccatcacgacttcgcccgcacttgacagtcctgtctattttttcctctcattcttcagctttattgatggatgctcatcctccaccatggctcctaaaatgatatttgacctgcttaccgagaaaaagaccatatctttcagcggatgcatgacccagttattcgtagaacatttctttgggggagtcgagatcatcttactggttgtgatggcgtatgattgctacgtcgctatctgcaaacctttgtattacttgatcaccatgaaccgacaagtatgcggactgctcgtggctatggcctgggttggcggttttctgcacgcgctgattcagatgttattgattgtgtggctccccttctgcggtcctaatgttattgaccatttcatttgcgatctgttccccctattgaagttgtcgtgtaccgatacccatgtgttcgggctcttcgttgccgcaaattctggtctcatgtgcatgcttattttttcaattttgataacatcatatgtgctaattctatgttcacagcggaaagcgctaagcacttgcgctttccacatcactgttgtggtgctattcttcgttccttgcatactcgtgtacctgagaccaatgataacttttccaatcgataaagcagtgtcggtattctacacagtcgtgacccctatgcttaacccactgatatataccttacggaataccgaggtaaagaatgcaatgaaacagctttggagccagataatttgggggaataatttgtgtgattag

SEQ ID NO: 20949 - DNA, 930 bp, Artificial Sequence
  derived and/or modified sequence
atggaaaatcaaaataatgtgacggagttcatcttactagggctgaccgaaaacctagagctgtggaagatcttctctgccgttttccttgtgatgtacgtggcaaccgtccttgagaatctgctgatcgtcgtgactataatcaccagtcaatccctacgctcccctatgtatttttttctgacctttctgagtttacttgacgtgatgttttccagcgtcgtggcccctaaagtgatcgtggacactctgtctaagtcgacaactataagcctgaagggatgcctgacacagctatttgtagagcactttttcgggggagtcggaatcatactgttaacagtgatggcatatgataggtatgtagccatttgtaaaccactccactacactattatcatgagccctagggtttgctgtctgatggtgggtggtgcctgggtcgggggattcatgcacgccatgatccagttactgtttatgtaccaaattcctttttgtggacctaacatcattgatcactttatctgtgatctgttccagttactcaccttggcctgcacagatacccatattctaggcctgttagtgacattaaactccggaatgatgtgcgtggcgatcttcctgattctgatcgcaagctacacggttatactgtgctccctgaagagctattccagtaaggggagacataaggctttgtctacatgtagtagtcaccttacggtcgtggtcctcttttttgttccctgcatatttctgtatatgcggccagtggtcacacatcccatcgataaggctatggccgtaagcgatagcatcataacaccgatgttgaaccccctgatctacacgttgcgtaatgccgaagtgaagtctgccatgaaaaagctttggatgaaatgggaggcgctggctggcaaatag

SEQ ID NO: 20950 - protein, 311 aa, Artificial Sequence
  derived and/or modified sequence
MEMENCTRVKEFIFLGLTQNREVSLVLFLFLLLVYVTTLLGNLLIMVTVTCESRLHTPMYFLLHNLSIADICFSSITVPKVLVDLLSERKTISFNHCFTQMFLFHLIGGVDVFSLSVMALDRYVAISKPLHYATIMSRDHCIGLTVAAWLGGFVHSIVQISLLLPLPFCGPNVLDTFYCDVHRVLKLAHTDIFILELLMISNNGLLTTLWFFLLLVSYIVILSLPKSQAGEGRRKAISTCTSHITVVTLHFVPCIYVYARPFTALPMDKAISVTFTVISPLLNPLIYTLRNHEMKSAMRRLKRRLVPSDRK

SEQ ID NO: 20951 - DNA, 936 bp, Artificial Sequence
  derived and/or modified sequence
atggagatggagaactgcaccagagtgaaggagttcatcttcctgggcctgacccagaacagagaggtgagcctggtgctgttcctgttcctgctgctggtgtacgtgaccaccctgctgggcaacctgctgatcatggtgaccgtgacctgcgagagcagactgcacacccccatgtacttcctgctgcacaacctgagcatcgccgacatctgcttcagcagcatcaccgtgcccaaggtgctggtggacctgctgagcgagagaaagaccatcagcttcaaccactgcttcacccagatgttcctgttccacctgatcggcggcgtggacgtgttcagcctgagcgtgatggccctggacagatacgtggccatcagcaagcccctgcactacgccaccatcatgagcagagaccactgcatcggcctgaccgtggccgcctggctgggcggcttcgtgcacagcatcgtgcagatcagcctgctgctgcccctgcccttctgcggccccaacgtgctggacaccttctactgcgacgtgcacagagtgctgaagctggcccacaccgacatcttcatcctggagctgctgatgatcagcaacaacggcctgctgaccaccctgtggttcttcctgctgctggtgagctacatcgtgatcctgagcctgcccaagagccaggccggcgagggcagaagaaaggccatcagcacctgcaccagccacatcaccgtggtgaccctgcacttcgtgccctgcatctacgtgtacgccagacccttcaccgccctgcccatggacaaggccatcagcgtgaccttcaccgtgatcagccccctgctgaaccccctgatctacaccctgagaaaccacgagatgaagagcgccatgagaagactgaagagaagactggtgcccagcgacagaaagtag

SEQ ID NO: 20952 - DNA, 936 bp, Artificial Sequence
  derived and/or modified sequence
atggaaatggagaattgcactagagtgaaagagtttatttttttgggcctcactcaaaatagggaggtcagcctggttctgtttctgttcctgttgcttgtctacgtgacaactctgctgggtaacctactgattatggtcaccgtgacatgtgaaagccgtcttcatactcccatgtatttcctgctgcacaatttgagcattgcagacatttgtttctctagtatcactgtgccaaaggtactggtcgacttgctaagcgaacgtaaaacaatctcttttaaccactgcttcacccagatgttcctgttccatctgattggcggagtcgacgtgttcagcctgagtgtaatggctctggaccgttatgtggctatctcaaaacctctacactacgccaccatcatgtcaagagaccattgtatcgggctgacagtcgccgcctggctaggtggtttcgtgcattctattgtccagatatctctcctgctccccctacccttttgtggcccaaatgtcctcgacacattctattgcgacgtacatcgggtgctgaagctggcccacactgatatcttcatcctcgaacttctgatgatctcgaacaatgggctgctgaccacactttggtttttcttgttactggttagttacatcgttatcctgagcctccccaagtcccaggctggtgagggccgccgcaaagcaatttccacctgtacctcccacatcacagtggtaactcttcacttcgtcccttgtatttacgtgtacgccaggccttttactgctttacccatggataaggctatctctgtcacattcaccgttattagcccgttgctgaacccacttatttataccctgagaaaccatgagatgaagagcgccatgcgccgtttgaagcgccgactggtcccttccgaccggaagtag

SEQ ID NO: 20953 - DNA, 936 bp, Artificial Sequence
  derived and/or modified sequence
atggagatggagaactgcaccagggtgaaggagttcatcttcctgggcctgacccagaaccgggaggtgtccctggtgctcttcctgttcctgctgctggtgtatgtgaccaccctgctgggcaacctgctgatcatggtgacagtgacctgtgagagccggctgcacacccccatgtacttcctgctgcacaacctgagcattgctgacatctgcttcagcagcatcaccgtgcccaaggtgctggtggacctgctgtctgagaggaagaccatctccttcaaccactgcttcacccagatgttcctgttccacctgattggaggagtggatgtgttcagcctgtctgtgatggccctggacagatatgtggccatcagcaagcccctgcactacgccaccatcatgagccgggaccactgcatcggcctgactgtggccgcctggctgggcggctttgtgcacagcatcgtgcagatcagcctgctgctgcccctgcccttctgtggccccaacgtgctggacaccttctactgtgatgtgcaccgggtgctgaagctggcccacacagacatcttcatcctggagctgctgatgatcagcaacaacggcctgctgaccaccctgtggttcttcctgctgctggtgtcctacatcgtcatcctgagcctgcccaagagccaggccggggagggccgcaggaaggccatcagcacctgcaccagccacatcaccgtggtgaccctgcactttgtgccctgcatctacgtgtatgcccggcccttcaccgccctgcccatggacaaggccatctctgtgaccttcaccgtcatcagccccctgctgaaccccctcatctacaccctgaggaaccacgagatgaagagcgccatgaggcggctgaagaggcggctggtgcccagcgacaggaagtag

SEQ ID NO: 20954 - DNA, 936 bp, Artificial Sequence
  derived and/or modified sequence
atggagatggagaactgcacccgggtgaaggagttcatcttcctgggcctcactcagaacagggaagtgtcgctggtcctgtttctcttcctgctgctggtttatgtaaccactctgttgggcaacctgttgattatggtgactgttacttgtgagtcaagacttcacacaccgatgtactttttactgcataacctgagtatagctgacatctgtttcagctcaattactgtacctaaggtgttagtcgatctcctttcagagcgtaagaccatctcttttaaccattgtttcacccagatgtttcttttccatctgatcggcggagtcgatgtcttttccctgtccgttatggcattggacagatatgtcgcaatttcaaagcccctgcactacgccactattatgtcacgggatcactgcatcgggttaactgtggccgcatggctcggcggattcgtgcattctatagtgcagatctctcttctgctccccctgcccttctgcggccccaacgttctcgatacattttattgtgatgtacacagggtgctcaaactggctcacactgatattttcatcttggagcttctgatgatctccaacaatggtctcctgaccacactgtggttctttcttcttctcgtctcttacatcgtgattctgagtctccccaagagccaggctggggagggccgtcggaaagccattagtacatgcacctctcacattacagtggtcactctacactttgtaccttgtatttacgtgtatgccaggcctttcacggcgctacctatggataaggcaataagcgtgacctttaccgtcatctctccactgttaaatcccctgatttacacactgcgaaatcacgagatgaagagcgcgatgcgacggcttaaaaggcgattagtgccctctgatcggaaatag

SEQ ID NO: 20955 - DNA, 1024 bp, Artificial Sequence
  derived and/or modified sequence
tcccagtgctttcacatgacatggtttaaaaccaaagagaataaagaggatgattgaatggagatggaaaactgcaccagggtaaaagaatttattttccttggcctgacccagaatcgggaagtgagcttagtcttatttcttttcctactcttggtgtatgtgacaactttgctgggaaacctcctcatcatggtcactgttacctgtgaatctcgccttcacacgcccatgtattttttgctccataatttatctattgccgatatctgcttctcttccatcacagtgcccaaggttctggtggaccttctgtctgaaagaaagaccatctccttcaatcattgcttcactcagatgtttctattccaccttattggaggggtggatgtattttctctttcggtgatggcattggatcgatatgtggccatctccaagcccctgcactatgcgactatcatgagtagagaccattgcattgggctcacagtggctgcctggttggggggctttgtccactccatcgtgcagatttccctgttgctcccactccctttctgcggacccaatgttcttgacactttctactgtgatgtccaccgggtcctcaaactggcccatacagacattttcatacttgaactactaatgatttccaacaatggactgctcaccacactgtggtttttcctgctcctggtgtcctacatagtcatattatcattacccaagtctcaggcaggagagggcaggaggaaagccatctccacctgcacctcccacatcactgtggtgaccctgcatttcgtgccctgcatctatgtctatgcccggcccttcactgccctccccatggataaggccatctctgtcaccttcactgtcatctcccctctgctcaaccccttgatctacactctgaggaaccatgagatgaagtcagccatgaggagactgaagagaagacttgtgccttctgatagaaaatagaaaaaaaaatcctcagctcttcatcaccaaa

SEQ ID NO: 20956 - DNA, 936 bp, Artificial Sequence
  derived and/or modified sequence
atggagatggagaactgtacgcgtgtgaaagagtttatttttctgggtcttacccagaaccgggaggtaagtctggtgctctttctcttcctgttgctggtctacgtcactactctgctggggaatctccttattatggtcacagtgacctgcgagtccaggttgcatacaccaatgtactttctcttgcacaatttgagtatagcagacatctgtttcagttcaatcactgtgccaaaggtgctggtcgacctcctgagcgagagaaaaactattagcttcaaccactgcttcacccagatgttcttgttccatctgataggtggggtggatgtgttcagtttgtccgtgatggcactagatcgatacgtagctatcagcaaacccctgcactacgcgactattatgagccgggatcattgcattggactaaccgtcgccgcatggctcggtggattcgtccacagtattgtccagatctctttactgctccctctgccattctgcgggccaaatgttctggacaccttctattgcgacgtccatcgtgtgctcaagcttgcccatacggatattttcatcctggaattgctgatgatctccaataatggcttacttaccacactatggttctttcttttgcttgtctcctatattgtcatcctgtcactaccaaaatcacaggccggagaaggcaggagaaaggctatcagcacatgcacctcacacatcacggtggtgaccttgcatttcgtgccatgcatctacgtttacgctcgcccttttactgctttaccaatggataaagcaatctcagtcacattcactgtcattagcccactgttaaatcctttgatctacacacttcgtaaccatgagatgaaatcagcaatgcggcgactcaagcgtcggttagtgcccagtgaccgaaagtag

SEQ ID NO: 20957 - protein, 304 aa, Artificial Sequence
  derived and/or modified sequence
MERANHSVVSEFILLGLSKSQNLQILFFLGFSVVFVGIVLGNLLILVTVTFDSLLHTPMYFLLSNLSCIDMILASFATPKMIVDFLRERKTISWWGCYSQMFFMHLLGGSEMMLLVAMAIDRYVAICKPLHYMTIMSPRVLTGLLLSSYAVGFVHSSSQMAFMLTLPFCGPNVIDSFFCDLPLVIKLACKDTYILQLLVIADSGLLSLVCFLLLLVSYGVIIFSVRYRAASRSSKAFSTLSAHITVVTLFFAPCVFIYVWPFSRYSVDKILSVFYTIFTPLLNPIIYTLRNQEVKAAIKKRLCI

SEQ ID NO: 20958 - DNA, 915 bp, Artificial Sequence
  derived and/or modified sequence
atggagagagccaaccacagcgtggtgagcgagttcatcctgctgggcctgagcaagagccagaacctgcagatcctgttcttcctgggcttcagcgtggtgttcgtgggcatcgtgctgggcaacctgctgatcctggtgaccgtgaccttcgacagcctgctgcacacccccatgtacttcctgctgagcaacctgagctgcatcgacatgatcctggccagcttcgccacccccaagatgatcgtggacttcctgagagagagaaagaccatcagctggtggggctgctacagccagatgttcttcatgcacctgctgggcggcagcgagatgatgctgctggtggccatggccatcgacagatacgtggccatctgcaagcccctgcactacatgaccatcatgagccccagagtgctgaccggcctgctgctgagcagctacgccgtgggcttcgtgcacagcagcagccagatggccttcatgctgaccctgcccttctgcggccccaacgtgatcgacagcttcttctgcgacctgcccctggtgatcaagctggcctgcaaggacacctacatcctgcagctgctggtgatcgccgacagcggcctgctgagcctggtgtgcttcctgctgctgctggtgagctacggcgtgatcatcttcagcgtgagatacagagccgccagcagaagcagcaaggccttcagcaccctgagcgcccacatcaccgtggtgaccctgttcttcgccccctgcgtgttcatctacgtgtggcccttcagcagatacagcgtggacaagatcctgagcgtgttctacaccatcttcacccccctgctgaaccccatcatctacaccctgagaaaccaggaggtgaaggccgccatcaagaagagactgtgcatctag

SEQ ID NO: 20959 - DNA, 915 bp, Artificial Sequence
  derived and/or modified sequence
atggaaagagcaaatcattctgtggtctccgaattcatcctgctgggcctgtctaagtcccagaatctccagatcctctttttcctcggattcagcgtcgtgtttgtgggtatcgtgctgggtaaccttctgatccttgtcactgtcactttcgatagcctgctgcatacccctatgtatttcctgctgtctaacctttcgtgcattgatatgattctggcatccttcgctaccccaaagatgatcgtggattttttgagggagagaaaaacaatctcctggtggggctgttattcacaaatgttctttatgcatctgctgggcggctcagaaatgatgctgctggtggctatggctatcgatcgctatgtcgccatttgcaagccgctacattatatgactattatgtcgccccgagtgctcactggattgcttttgtcgtcctacgcagttggattcgtccactcgagtagtcagatggcgttcatgcttaccctcccattctgcggacctaacgtcatcgatagcttcttctgtgacctacctttagtgataaagttggcttgcaaagacacttacatcttgcagcttctggtaatcgcagacagtggtcttctaagcctcgtctgctttctgcttttactcgtatcatacggcgtcatcattttctctgtgcgatatagagccgctagcagatccagtaaagcgttctcaacgctgtcagcacacatcaccgtggtgacactgttttttgcgccatgtgtgttcatctacgtgtggccgttttctagatattccgttgacaagatcctcagtgtgttttatacaattttcacccccctgctgaatcccattatttataccctgcgcaaccaggaggtgaaggccgcaataaagaaaaggctttgtatctag

SEQ ID NO: 20960 - DNA, 915 bp, Artificial Sequence
  derived and/or modified sequence
atggagcgggccaaccacagcgtggtgtctgagttcatcctgctgggcctgagcaagagccagaacctgcagatcctcttcttcctgggcttctctgtggtgtttgtgggcatcgtgctgggcaacctgctgatcctggtgacagtgacctttgacagcctgctgcacacccccatgtacttcctgctgagcaacctgagctgcatcgacatgatcctggccagctttgccacccccaagatgattgtggacttcctgcgggagaggaagaccatctcctggtggggctgctacagccagatgttcttcatgcacctgctgggcggcagcgagatgatgctgctggtggccatggccatcgacagatatgtggccatctgcaagcccctgcactacatgaccatcatgagcccccgggtgctgaccggcctgctgctgagcagctatgctgtgggctttgtgcacagcagcagccagatggccttcatgctgaccctgcccttctgtggccccaacgtcatcgacagcttcttctgtgacctgcccctggtgatcaagctggcctgcaaggacacctacatcctgcagctgctggtgattgctgacagcggcctgctgagcctggtgtgcttcctgctgctgctggtgtcctatggagtcatcatcttctctgtgcgctacagagctgccagccgcagcagcaaggccttcagcaccctgagcgcccacatcaccgtggtgaccctcttctttgccccctgtgtgttcatctacgtgtggcccttcagccgctacagcgtggacaagatcctgagcgtcttctacaccatcttcacccccctgctgaaccccatcatctacaccctgaggaaccaggaggtgaaggccgccatcaagaagaggctgtgcatctag

SEQ ID NO: 20961 - DNA, 915 bp, Artificial Sequence
  derived and/or modified sequence
atggagcgggccaaccacagcgtggtgagcgagttcatcctgctgggtctctcgaaatcccaaaacctgcagatactgttttttttggggttttccgtcgtttttgtgggaattgtcctcgggaacctgctcattcttgtgaccgttaccttcgactccttgctgcacaccccgatgtactttctcttgagcaatctgtcctgcattgatatgatcctggcaagcttcgctacaccgaagatgatcgtcgacttcctccgcgaaagaaagacgatctcttggtggggttgctactcccagatgttttttatgcatcttttgggaggatctgaaatgatgctgctcgtggcaatggcaattgacagatacgtggccatctgcaaacccttgcactacatgaccatcatgtctcccagggttctgaccggattgcttttatccagttacgctgtgggcttcgtgcacagttcctcccagatggccttcatgctcacactgccattctgcggtcctaatgttatcgacagcttcttctgtgaccttcctctcgtgatcaagctggcatgcaaagacacttatatactgcagctgttagtcatcgctgatagcggactgttatcactggtgtgttttctgcttctcttagtcagctatggagttattatcttctctgtgcgataccgggctgccagtagatcaagtaaagcattttctaccctgtcagcccatatcactgtggttaccctcttctttgcaccatgtgtctttatctacgtgtggcccttttcccgttatagcgtcgacaagatactctcagttttctacaccatctttacccctctcttgaacccgatcatctacactcttcggaatcaggaggttaaagctgcgatcaaaaagcggctgtgcatctag

SEQ ID NO: 20962 - DNA, 917 bp, Artificial Sequence
  derived and/or modified sequence
atatggaaagagcaaaccattcagtggtatcggaatttattttgttgggactttccaaatctcaaaatcttcagattttattcttcttgggattctctgtggtcttcgtggggattgtgttaggaaacctgctcatcttggtgactgtgacctttgattcgctccttcacacaccaatgtattttctgcttagcaacctctcctgcattgatatgatcctggcttcttttgctacccctaagatgattgtagatttcctccgagaacgtaagaccatctcatggtggggatgttattcccagatgttctttatgcacctcctgggtgggagtgagatgatgttgcttgtagccatggcaatagacaggtatgttgccatatgcaaacccctccattacatgaccatcatgagcccacgggtgctcactgggctactgttatcctcctatgcagttggatttgtgcactcatctagtcaaatggctttcatgttgactttgcccttctgtggtcccaatgttatagacagctttttctgtgaccttccccttgtgattaaacttgcctgcaaggacacctacatcctacagctcctggtcattgctgacagtgggctcctgtcactggtctgcttcctcctcttgcttgtctcctatggagtcataatattctcagttaggtaccgtgctgctagtcgatcctctaaggctttctccactctctcagctcacatcacagttgtgactctgttctttgctccgtgtgtctttatctacgtctggcccttcagcagatactcggtagataaaattctttctgtgttttacacaattttcacacctctcttaaatcctattatttatacattaagaaatcaagaggtaaaagcagccattaaaaaaagactctgcatataa

SEQ ID NO: 20963 - DNA, 915 bp, Artificial Sequence
  derived and/or modified sequence
atggaacgcgcaaatcattcagtagttagcgagttcattttacttggactctccaagtcccagaatctgcagatcctattttttctgggtttttccgtggtgtttgttggcattgtgctcggcaatttactgattttggtgaccgttacattcgactctttattacatacacctatgtactttctcctctctaatcttagctgcatcgacatgatcctcgcctcgttcgccaccccaaaaatgattgtggactttcttagggaaagaaagactatctcatggtgggggtgttatagccagatgttctttatgcacctcctcggaggttccgaaatgatgctgctggtagccatggcaattgacaggtacgtcgctatatgtaagccactgcactatatgacaattatgtccccgcgagttctgaccgggcttctgttaagctcttacgctgtaggttttgtccattcttcttctcagatggcttttatgctcaccctgcctttctgtggccctaatgtgattgacagcttcttctgcgacctccctctggtgataaaactggcctgcaaggatacctatatcttacagctgttggttatcgctgactccggactgctgtctctagtgtgtttcctcttactgctcgtgtcatatggggtcattatcttttctgtccggtatcgggctgctagccgatcctctaaagcgttctctacactgtcagctcatattaccgtcgtgaccctgttctttgctccatgtgtgtttatctacgtttggcccttctcccgctacagcgtggataaaatcctgagtgtattctatactatctttacccccctgttgaatcccattatctacaccttgcggaaccaggaagttaaagcagctatcaagaaacgcttgtgtatctag

SEQ ID NO: 20964 - protein, 83 aa, Artificial Sequence
  derived and/or modified sequence
MTEEVIVIAKWDYTAQQDQELDIKKNERLWLLDDSKTWWRVRNAANRTGYVPSNYVERKNSLKKGSLVKNLKDTLAQRLLRVP

SEQ ID NO: 20965 - DNA, 252 bp, Artificial Sequence
  derived and/or modified sequence
atgactgaggaagtgattgtgatcgctaaatgggactacaccgcacagcaggaccaggagctggacatcaagaagaacgagcgcttatggctgcttgatgattctaagacctggtggcgcgttcgcaatgccgcaaatcgaactggctatgttccctcgaactacgtggaaagaaaaaactccttgaaaaaaggaagcttggtcaagaacctgaaagacaccctcgctcaacgcctgttgcgggtgccatag

SEQ ID NO: 20966 - DNA, 252 bp, Artificial Sequence
  derived and/or modified sequence
atgactgaggaggtgatcgttatagccaagtgggactacacagctcagcaggaccaggagcttgatataaagaaaaacgagagattatggctgcttgatgactccaaaacatggtggcgcgtccgaaacgccgccaatcgaacaggttacgttccatctaactacgtagagcggaagaattctttaaaaaaaggctcactcgtaaagaatctgaaggataccctggctcagcggttgctacgagtgccatag

SEQ ID NO: 20967 - DNA, 252 bp, Artificial Sequence
  derived and/or modified sequence
atgacagaggaggtgattgtcatcgccaagtgggactacacagcccagcaggaccaggagctggacatcaagaagaatgaaaggctgtggctgctggatgacagcaagacctggtggagggtgagaaatgctgccaacagaacaggctacgtgcccagcaactacgtggagaggaagaacagcctgaagaagggcagcctggtgaagaacctgaaggacaccctggcccagaggctgctgcgggtgccctag

SEQ ID NO: 20968 - DNA, 252 bp, Artificial Sequence
  derived and/or modified sequence
atgaccgaggaggtgatcgtgatcgccaagtgggactacaccgcccagcaggatcaggaactggatatcaagaagaacgaaaggctatggcttttggatgatagtaagacatggtggagggttagaaatgccgccaacaggactggctatgttcccagcaactacgtggagagaaagaatagcctgaaaaaaggctccctggtaaagaaccttaaagacacacttgcccaacgtttgctccgggtcccatag

SEQ ID NO: 20969 - DNA, 252 bp, Artificial Sequence
  derived and/or modified sequence
atgaccgaggaggtgatcgtgatcgccaagtgggactacaccgcccagcaggaccaagaactcgatataaagaagaatgagcgattgtggctgctcgacgactcaaagacctggtggagggttagaaacgcggctaatcgcacaggatacgtccccagcaactacgtcgaacggaaaaactccctgaaaaagggctcactcgtaaagaacctgaaagataccctggctcagaggctgctgcgagtgccctag

SEQ ID NO: 20970 - DNA, 252 bp, Artificial Sequence
  derived and/or modified sequence
atgacagaggaagtcattgttattgctaagtgggattatacagcgcagcaggaccaagagctcgatattaagaagaatgaaagactctggctgttggacgattctaagacttggtggcgggtccggaacgccgcaaaccgcaccggctatgtgccgagtaattacgtagagaggaaaaatagtctcaaaaaagggtccctggtgaagaatctgaaggatactcttgcccagaggctcctgcgggtgccatag

SEQ ID NO: 20971 - DNA, 252 bp, Artificial Sequence
  derived and/or modified sequence
atgaccgaggaagtgattgtgattgccaaatgggactacaccgctcaacaagaccaggagctcgacatcaaaaagaatgagcgactttggctactggacgatagcaaaacttggtggagagtgcggaacgccgctaaccgaacggggtacgtccccagtaactacgtggaaagaaaaaattctttgaaaaaaggttctctggtgaaaaacctgaaggataccttggctcaaagattgctaagagtgccttag

SEQ ID NO: 20972 - DNA, 252 bp, Artificial Sequence
  derived and/or modified sequence
atgaccgaggaggtgatcgtgatcgccaagtgggactacaccgcccagcaggaccaggagctggacatcaagaagaacgagagactgtggctgctggacgacagcaagacctggtggagagtgagaaacgccgccaacagaaccggctacgtgcccagcaactacgtggagagaaagaacagcctgaagaagggcagcctggtgaagaacctgaaggacaccctggcccagagactgctgagagtgccctag

SEQ ID NO: 20973 - protein, 308 aa, Artificial Sequence
  derived and/or modified sequence
MAEENHTMKNEFILTGFTDHPELKTLLFVVFFAIYLITVVGNISLVALIFTHRRLHTPMYIFLGNLALVDSCCACAITPKMLENFFSENKRISLYECAVQFYFLCTVETADCFLLAAMAYDRYVAICNPLQYHIMMSKKLCIQMTTGAFIAGNLHSMIHVGLVFRLVFCGSNHINHFYCDILPLYRLSCVDPYINELVLFIFSGSVQVFTIGSVLISYLYILLTIFKMKSKEGRAKAFSTCASHFLSVSLFYGSLFFMYVRPNLLEEGDKDIPAAILFTIVVPLLNPFIYSLRNREVISVLRKILMKK

SEQ ID NO: 20974 - DNA, 927 bp, Artificial Sequence
  derived and/or modified sequence
atggccgaggagaaccacaccatgaagaacgagttcatcctgaccggcttcaccgaccaccccgagctgaagaccctgctgttcgtggtgttcttcgccatctacctgatcaccgtggtgggcaacatcagcctggtggccctgatcttcacccacagaagactgcacacccccatgtacatcttcctgggcaacctggccctggtggacagctgctgcgcctgcgccatcacccccaagatgctggagaacttcttcagcgagaacaagagaatcagcctgtacgagtgcgccgtgcagttctacttcctgtgcaccgtggagaccgccgactgcttcctgctggccgccatggcctacgacagatacgtggccatctgcaaccccctgcagtaccacatcatgatgagcaagaagctgtgcatccagatgaccaccggcgccttcatcgccggcaacctgcacagcatgatccacgtgggcctggtgttcagactggtgttctgcggcagcaaccacatcaaccacttctactgcgacatcctgcccctgtacagactgagctgcgtggacccctacatcaacgagctggtgctgttcatcttcagcggcagcgtgcaggtgttcaccatcggcagcgtgctgatcagctacctgtacatcctgctgaccatcttcaagatgaagagcaaggagggcagagccaaggccttcagcacctgcgccagccacttcctgagcgtgagcctgttctacggcagcctgttcttcatgtacgtgagacccaacctgctggaggagggcgacaaggacatccccgccgccatcctgttcaccatcgtggtgcccctgctgaaccccttcatctacagcctgagaaacagagaggtgatcagcgtgctgagaaagatcctgatgaagaagtag

SEQ ID NO: 20975 - DNA, 927 bp, Artificial Sequence
  derived and/or modified sequence
atggcagaagagaatcatacaatgaagaatgaatttatacttaccggctttaccgatcacccagagctgaaaacattgctgtttgtggtattctttgccatttatctgataacagtagtaggtaacatttctctggtcgctctgatcttcacacatcggaggcttcacactccaatgtatattttcctgggtaatcttgctctcgtggactcttgttgtgcctgcgcaattacacctaagatgttggagaacttcttttcagagaataagagaatctctctgtacgagtgtgccgtgcagttttacttcctttgcactgtggagaccgctgactgcttcctcctcgccgctatggcatatgaccgctatgtggcaatctgcaatccgctgcagtaccatattatgatgagcaagaagttatgtatccagatgactacaggtgccttcatagcaggtaacctccatagtatgatccacgtgggacttgtctttaggctggtgttttgcggctccaaccacatcaatcacttctattgcgatattcttcccctttaccggctttcttgcgtggatccctatatcaacgagcttgtcctttttattttttcggggagtgtgcaggtgttcaccattgggtctgtgctcatatcttacttatacatcctgctgacgattttcaaaatgaaatctaaagaagggagagccaaggccttctccacgtgcgcctcacatttcctttcagtgtccctgttctatggctccctgttctttatgtatgtgaggccaaacttgctggaagaaggggacaaagatattccggccgccatcctgtttaccattgtcgttccactgttgaatcccttcatatattccctgaggaacagggaggtcattagtgtcctgaggaaaatcttgatgaagaagtag

SEQ ID NO: 20976 - DNA, 927 bp, Artificial Sequence
  derived and/or modified sequence
atggccgaggagaaccacaccatgaagaatgagttcatcctgaccggcttcacagaccaccctgagctgaagaccctgctgtttgtggtgttctttgccatctacctgatcaccgtggtgggcaacatcagcctggtggccctgatcttcacccaccggcggctgcacacccccatgtacatcttcctgggcaacctggccctggtggacagctgctgtgcctgtgccatcacccccaagatgctggagaacttcttcagcgagaacaagaggatcagcctgtatgaatgtgctgtgcagttctacttcctgtgcaccgtggagacagctgactgcttcctgctggccgccatggcctatgacagatatgtggccatctgcaaccccctgcagtaccacatcatgatgagcaagaagctgtgcatccagatgaccaccggggccttcatcgccggcaacctgcacagcatgattcatgtgggcctggtgttccggctggtgttctgtggcagcaaccacatcaaccacttctactgtgacatcctgcccctgtaccgcctgagctgtgtggacccctacatcaatgagctggtgctcttcatcttcagcggctctgtgcaggtgttcaccatcggctctgtgctgatctcctacctgtacatcctgctgaccatcttcaagatgaagagcaaggagggccgggccaaggccttcagcacctgtgccagccacttcctgtctgtgtccctcttctacggcagcctcttcttcatgtatgtgcggcccaacctgctggaggagggggacaaggacatcccagctgccatcctcttcaccatcgtggtgcccctgctgaaccccttcatctacagcctgaggaaccgggaggtgatctctgtgctgaggaagatcctgatgaagaagtag

SEQ ID NO: 20977 - DNA, 927 bp, Artificial Sequence
  derived and/or modified sequence
atggccgaggagaaccacaccatgaagaacgagttcatcctgaccgggtttacggatcacccggagttaaagactctcctgttcgttgtgttctttgcaatttatctgattacagtggtcgggaacatcagtctcgtcgccctaatatttactcaccgccgccttcatacccccatgtacatttttctcggtaatttggccctggtagacagctgttgcgcatgtgccatcacccccaaaatgctggagaatttctttagcgagaataaacgcataagtttatacgagtgtgcagtgcagttttatttcctatgtacggtggagaccgctgactgtttcctcctcgctgctatggcttatgatcggtacgttgccatctgtaatcccctacagtaccacataatgatgtcaaaaaagctgtgtatccagatgacaactggcgcctttattgccgggaaccttcactcaatgatccatgtgggcttagttttcaggctggtcttctgtggttccaatcacatcaaccatttctattgtgacatactgccgctgtacagactttcctgcgtagatccctatatcaacgagttggtgctgtttatctttagcggcagcgtccaggtgttcacaatagggagtgtcctcatctcttacctctacatactgttgacaatttttaagatgaaatcaaaggaggggagggctaaggcttttagtacttgcgcatctcattttctgagtgtttctttgttctatggttcgctgttcttcatgtacgttcggccaaatctcctggaggaaggagacaaagacatccctgcagcgatactgttcacaatcgtggtgcccctccttaatcctttcatttattccctgagaaatcgggaagtgatcagcgtgctgaggaaaattctcatgaaaaaatag

SEQ ID NO: 20978 - DNA, 1097 bp, Artificial Sequence
  derived and/or modified sequence
tgctctccttcctttaagccaaagagacctaaataactgtggcatattataaattagtgccttctttctccacaattttttttcagacaagtcaggaatggctgaagaaaatcataccatgaaaaatgagtttatcctcacaggatttacagatcaccctgagctgaagactctgctgtttgtggtgttctttgccatctatctgatcaccgtggtggggaatattagtttggtggcactgatatttacacaccgtcggcttcacacaccaatgtacatctttctgggaaatctggctcttgtggattcttgctgtgcctgtgctattacccccaaaatgttagagaacttcttttctgagaacaaaaggatttccctctatgaatgtgcagtacagttttattttctttgcactgtggaaactgcagactgctttcttctggcagcaatggcctatgaccgctatgtggccatatgcaacccactgcagtaccacatcatgatgtccaagaaactctgcattcagatgaccacaggggccttcatagctggaaacctgcattccatgattcatgtagggcttgtatttaggttagttttctgtggatcgaatcacatcaaccacttttactgtgatattcttcccttgtatagactctcttgtgttgatccttatatcaatgaactggttctattcatcttctcaggttcagttcaagtctttaccataggtagtgtcttaatatcttatctctatattcttcttactattttcaaaatgaaatccaaagagggaagggccaaagctttttctacctgtgcatcccactttttgtcagtttcattattctatggatctcttttcttcatgtacgttagaccaaatttgcttgaagaaggggataaagatataccagctgcaattttatttacaatagtagttcccttactaaatcctttcatttatagcctgagaaatagggaagtaataagtgtcttaagaaaaattctgatgaagaaataatctcaagaaagatggaaacaagtgacatctactatagcttaatgatttaaatgcagcaaaaacttccatgtga

SEQ ID NO: 20979 - DNA, 927 bp, Artificial Sequence
  derived and/or modified sequence
atggccgaggaaaatcacaccatgaaaaacgagtttatcctcaccggttttaccgaccatcctgagctgaagactcttctgttcgtagtttttttcgcaatctatcttatcacagtggttgggaacatttctctggtggccctaatttttacccacaggagacttcatactccaatgtacatctttttagggaacttagccctcgtcgatagttgctgtgcctgcgcaatcactcctaagatgctggagaacttttttagcgagaacaagcggatcagcctgtacgagtgtgctgtccagttctactttctgtgtacagtcgagaccgcagattgcttcctgcttgccgcaatggcctatgacaggtacgtcgccatctgtaatccgctccaatatcacatcatgatgtctaagaaactgtgtatacagatgaccaccggcgcatttatcgcaggcaacctccactctatgattcatgtgggccttgtttttaggctcgtgttttgtgggtctaatcatatcaaccatttctattgcgatattctccccctgtaccgtctgtcttgtgtggacccatacatcaacgagctagtgttgtttattttcagcggctctgtgcaggttttcaccatcgggtccgtacttatctcatatttgtacatcctcctgacaatatttaaaatgaagtcaaaggaaggtagggctaaggcattttctacatgcgcctctcattttttatcggtatcgctcttttatgggagcctgttcttcatgtacgttaggcccaatctgctcgaggagggcgacaaagatattcccgcagccatactgtttactatagtcgtcccactgctcaaccctttcatctacagccttcggaatagggaggttatctctgtgctccggaaaatcttgatgaagaagtag

SEQ ID NO: 20980 - protein, 316 aa, Artificial Sequence
  derived and/or modified sequence
MVEENHTMKNEFILTGFTDHPELKTLLFVVFFAIYLITVVGNISLVALIFTHCRLHTPMYIFLGNLALVDSCCACAITPKMLENFFSEGKRISLYECAVQFYFLCTVETADCFLLAAVAYDRYVAICNPLQYHIMMSKKLCIQMTTGAFIAGNLHSMIHVGLVFRLVFCGLNHINHFYCDTLPLYRLSCVDPFINELVLFIFSGSVQVFTIGSVLISYLYILLTIFRMKSKEGRAKAFSTCASHFSSVSLFYGSIFFLYIRPNLLEEGGNDIPAAILFTIVVPLLNPFIYSLRNKEVISVLRKILLKIKSQGSVNK

SEQ ID NO: 20981 - DNA, 951 bp, Artificial Sequence
  derived and/or modified sequence
atggtggaggagaaccacaccatgaagaacgagttcatcctgaccggcttcaccgaccaccccgagctgaagaccctgctgttcgtggtgttcttcgccatctacctgatcaccgtggtgggcaacatcagcctggtggccctgatcttcacccactgcagactgcacacccccatgtacatcttcctgggcaacctggccctggtggacagctgctgcgcctgcgccatcacccccaagatgctggagaacttcttcagcgagggcaagagaatcagcctgtacgagtgcgccgtgcagttctacttcctgtgcaccgtggagaccgccgactgcttcctgctggccgccgtggcctacgacagatacgtggccatctgcaaccccctgcagtaccacatcatgatgagcaagaagctgtgcatccagatgaccaccggcgccttcatcgccggcaacctgcacagcatgatccacgtgggcctggtgttcagactggtgttctgcggcctgaaccacatcaaccacttctactgcgacaccctgcccctgtacagactgagctgcgtggaccccttcatcaacgagctggtgctgttcatcttcagcggcagcgtgcaggtgttcaccatcggcagcgtgctgatcagctacctgtacatcctgctgaccatcttcagaatgaagagcaaggagggcagagccaaggccttcagcacctgcgccagccacttcagcagcgtgagcctgttctacggcagcatcttcttcctgtacatcagacccaacctgctggaggagggcggcaacgacatccccgccgccatcctgttcaccatcgtggtgcccctgctgaaccccttcatctacagcctgagaaacaaggaggtgatcagcgtgctgagaaagatcctgctgaagatcaagagccagggcagcgtgaacaagtag

SEQ ID NO: 20982 - DNA, 951 bp, Artificial Sequence
  derived and/or modified sequence
atggtggaggagaaccatacgatgaaaaacgagtttatccttactgggtttactgatcatccagaactgaaaaccctgctgttcgtcgtgttcttcgctatttacctgatcacagttgtagggaatataagtctggtggctctaatatttacccattgcagactgcatactcccatgtatatctttctcgggaatctggccctggtcgactcttgctgtgcatgtgctataacgcccaagatgcttgagaactttttcagtgagggcaagcggatcagcttgtatgagtgcgcagtccagttctacttcttgtgcactgtagagaccgcagattgctttctcctggcagctgttgcctacgacagatacgtggccatctgcaaccccttgcagtaccacatcatgatgtctaagaagctctgtatccagatgactaccggggccttcatcgctgggaacctgcattccatgatccacgttggtctggtctttcgtctggtattttgtggcttaaaccacattaatcacttctattgtgacacactcccattgtatcgcctctcatgcgtcgaccccttcatcaatgaacttgtcctttttatctttagcgggtccgttcaagtttttaccatcggcagcgtcttaatttcgtacctctatatactgctgacaatctttagaatgaagtccaaagagggccgggcgaaggcgttttccacctgcgcctcacacttcagctccgtaagcctgttctatggctctatcttttttctgtatattcgacccaacctgctcgaggaaggcggcaatgacatccctgctgcgatactgttcaccatcgtggtccctctgttaaatcctttcatatattccctaagaaataaggaagtgatttcagtactacggaagatcctgctcaagatcaagagccaaggttccgtcaacaagtag

SEQ ID NO: 20983 - DNA, 951 bp, Artificial Sequence
  derived and/or modified sequence
atggtggaggagaaccacaccatgaagaatgagttcatcctgaccggcttcacagaccaccctgagctgaagaccctgctgtttgtggtgttctttgccatctacctgatcaccgtggtgggcaacatcagcctggtggccctgatcttcacccactgccgcctgcacacccccatgtacatcttcctgggcaacctggccctggtggacagctgctgtgcctgtgccatcacccccaagatgctggagaacttcttcagcgagggcaagaggatcagcctgtatgaatgtgctgtgcagttctacttcctgtgcaccgtggagacagctgactgcttcctgctggccgctgtggcctatgacagatatgtggccatctgcaaccccctgcagtaccacatcatgatgagcaagaagctgtgcatccagatgaccaccggggccttcatcgccggcaacctgcacagcatgattcatgtgggcctggtgttccggctggtgttctgtggcctgaaccacatcaaccacttctactgtgacaccctgcccctgtaccgcctgagctgtgtggaccccttcatcaatgagctggtgctcttcatcttcagcggctctgtgcaggtgttcaccatcggctctgtgctgatctcctacctgtacatcctgctgaccatcttcaggatgaagagcaaggagggccgggccaaggccttcagcacctgtgccagccacttcagctctgtgtccctcttctacggcagcatcttcttcctgtacatccggcccaacctgctggaggagggcggcaatgacatcccagctgccatcctcttcaccatcgtggtgcccctgctgaaccccttcatctacagcctgaggaacaaggaggtgatctctgtgctgaggaagatcctgctgaagatcaagagccagggctctgtgaacaagtag

SEQ ID NO: 20984 - DNA, 951 bp, Artificial Sequence
  derived and/or modified sequence
atggtggaggagaaccacaccatgaagaacgagttcatcctgaccggttttaccgaccatccagaactgaaaacactcctctttgtagtcttcttcgccatctacctcatcactgtcgtgggcaatatttccttggtggccctcatttttacccactgcaggctccacacccctatgtacatctttctcggtaatttagcactagtcgattcgtgttgcgcttgcgcaatcacgccaaagatgctggaaaacttcttttccgaaggcaaaaggatctccctgtacgaatgtgccgtgcagttctattttctgtgtactgtcgaaaccgctgactgcttcttactagccgctgtggcgtatgatagatacgtcgctatatgtaaccccctccagtaccacatcatgatgagtaagaagttatgcatccagatgacaactggggcgtttatcgctggtaatcttcattctatgatacatgtgggattagtctttagactcgtcttctgcggcctcaatcacataaatcacttctactgcgatacccttcccctgtatagactctcttgtgttgatccctttattaacgaactggtactgtttatctttagcggtagcgtccaggtgttcacaataggatccgttctgatttcgtatctgtacatcctactgacaatctttaggatgaaaagcaaagagggacgcgccaaggccttcagtacatgtgcaagccacttttctagcgtatcattattttatgggtcgatattcttcttgtacatccggcctaacctcttggaggagggtggaaacgatattccagccgcaatcctgttcaccattgtagtgccactgctgaatcccttcatttactccttaaggaataaagaggtcattagtgtgcttcgtaagatacttctcaaaatcaagagccaggggtctgtgaataagtag

SEQ ID NO: 20985 - DNA, 1049 bp, Artificial Sequence
  derived and/or modified sequence
caaagagacgtcaataattgtggcatattattaattagtgccttattcctctacaatttttttcagagaggtcaggaatggttgaagaaaatcataccatgaaaaatgagtttatcctcacaggatttacagatcaccctgagctgaagactctgctgtttgtggtgttctttgccatctatctgatcaccgtggtggggaatattagtttggtggcactgatatttacacactgtcggcttcacacaccaatgtacatctttctgggaaatctggctcttgtggattcttgctgtgcctgtgctattacccccaaaatgttagagaacttcttttctgagggcaaaaggatttccctctatgaatgtgcagtacagttttattttctttgcactgtggaaactgcagactgctttcttctggcagcagtggcctatgaccgctatgtggccatctgcaacccactgcagtaccacatcatgatgtccaagaaactctgcattcagatgaccacaggcgccttcatagctggaaatctgcattccatgattcatgtagggcttgtatttaggttagttttctgtggattgaatcacatcaaccacttttactgtgatactcttcccttgtatagactctcctgtgttgaccctttcatcaatgaactggttctattcatcttctcaggttcagttcaagtctttaccataggtagtgtcttaatatcttatctctatattcttcttactattttcagaatgaaatccaaggagggaagggccaaagccttttctacttgtgcatcccacttttcatcagtttcattattctatggatctatttttttcctatacattagaccaaatttgcttgaagaaggaggtaatgatataccagctgctattttatttacaatagtagttcccttactaaatcctttcatttatagtctgagaaacaaggaagtaataagtgtcttaagaaaaattctgctgaaaataaaatctcaaggaagtgtgaacaaatgacatctatcctagcttaatggt

SEQ ID NO: 20986 - DNA, 951 bp, Artificial Sequence
  derived and/or modified sequence
atggtcgaggagaatcatacaatgaagaacgaatttatactgaccgggttcaccgatcatccagagttgaagacccttttgttcgtggtatttttcgcgatctatctgattactgtggtggggaatatttccttggtcgcactgatttttactcactgtaggcttcatacaccgatgtatatctttctcggcaacctggctctagttgacagctgctgtgcttgcgccatcacacctaagatgctggaaaactttttcagtgagggcaagagaatttctctgtacgagtgcgccgtacagttctactttttgtgcaccgtggagactgccgactgtttcctgttggctgctgtggcttatgacagatatgtggccatctgcaaccccctccagtatcatataatgatgtctaagaagctttgcatccagatgactacaggtgcatttatagcaggcaatctacactcaatgatccacgtcggcctcgtgtttcgtcttgtgttctgtggcctgaatcacatcaaccatttctactgcgatactcttcctttgtacaggctcagctgcgtagatccttttatcaatgagttagtactcttcatcttttcgggatcagtgcaggtcttcaccataggatctgtgctcatttcttatctgtacattttgctgactatctttaggatgaaatccaaggaggggcgtgcaaaagccttttctacctgtgcaagtcatttttccagtgtgtctttattttacggctcaatattttttctgtatatccgaccaaaccttctagaggagggcggaaacgacatacctgcggcaatcctcttcactattgttgtacccttactcaatccattcatctattccctgaggaataaagaggtgatcagtgtcttgagaaagatcctcctgaagattaagtcgcagggcagtgtgaataaatag

SEQ ID NO: 20987 - protein, 313 aa, Artificial Sequence
  derived and/or modified sequence
MSIINTSYVEITTFFLVGMPGLEYAHIWISIPICSMYLIAILGNGTILFIIKTEPSLHGPMYYFLSMLAMSDLGLSLSSLPTVLSIFLFNAPETSSSACFAQEFFIHGFSVLESSVLLIMSFDRFLAIHNPLRYTSILTTVRVAQIGIVFSFKSMLLVLPFPFTLRSLRYCKKNQLSHSYCLHQDVMKLACSDNRIDVIYGFFGALCLMVDFILIAVSYTLILKTVPGIASKKEELKALNTCVSHICAVIIFYLPIINLAVVHRFAGHVSPLINVLMANVLLLVPPLMKPIVYCVKTKQIRVRVVAKLCQWKI

SEQ ID NO: 20988 - DNA, 942 bp, Artificial Sequence
  derived and/or modified sequence
atgagcatcatcaacaccagctacgtggagatcaccaccttcttcctggtgggcatgcccggcctggagtacgcccacatctggatcagcatccccatctgcagcatgtacctgatcgccatcctgggcaacggcaccatcctgttcatcatcaagaccgagcccagcctgcacggccccatgtactacttcctgagcatgctggccatgagcgacctgggcctgagcctgagcagcctgcccaccgtgctgagcatcttcctgttcaacgcccccgagaccagcagcagcgcctgcttcgcccaggagttcttcatccacggcttcagcgtgctggagagcagcgtgctgctgatcatgagcttcgacagattcctggccatccacaaccccctgagatacaccagcatcctgaccaccgtgagagtggcccagatcggcatcgtgttcagcttcaagagcatgctgctggtgctgcccttccccttcaccctgagaagcctgagatactgcaagaagaaccagctgagccacagctactgcctgcaccaggacgtgatgaagctggcctgcagcgacaacagaatcgacgtgatctacggcttcttcggcgccctgtgcctgatggtggacttcatcctgatcgccgtgagctacaccctgatcctgaagaccgtgcccggcatcgccagcaagaaggaggagctgaaggccctgaacacctgcgtgagccacatctgcgccgtgatcatcttctacctgcccatcatcaacctggccgtggtgcacagattcgccggccacgtgagccccctgatcaacgtgctgatggccaacgtgctgctgctggtgccccccctgatgaagcccatcgtgtactgcgtgaagaccaagcagatcagagtgagagtggtggccaagctgtgccagtggaagatctag

SEQ ID NO: 20989 - DNA, 942 bp, Artificial Sequence
  derived and/or modified sequence
atgtcaataattaacacatcatacgtcgaaattaccacgttcttcctagtggggatgccaggtctagaatacgctcatatctggatcagtatcccaatctgctccatgtacttaatcgctattctggggaatggaactatcttatttatcattaaaaccgagccatcactgcacgggcccatgtattatttcctttccatgttagctatgtctgacctaggcctttccctctcttcattgcctaccgtgctgagtatcttcctgttcaatgccccggaaactagtagctccgcctgttttgcgcaggagttttttatacatggtttctccgttctggagtcctctgttcttctaatcatgtctttcgacagattcctggccatccataatcccttacggtacacttctatcctgactaccgtacgcgttgcacagatcgggatcgtgttttccttcaagtcaatgttgctggtgctcccatttcccttcaccctgcgctctctcagatattgtaaaaagaaccaactctcacattcatactgcctgcaccaggacgtgatgaaattggcttgctcagacaatagaatagatgttatctacggtttctttggagccttatgcctcatggtggactttattctcatagccgtctcctataccttgattctgaagactgtccccggcattgcttccaagaaagaagaacttaaggccctgaacacatgcgtaagccatatatgcgccgtaatcatcttttacctccctattatcaaccttgcggtggttcaccgctttgccggccatgtcagcccccttatcaatgtcctgatggcaaacgtcctcctgcttgtgcctcccctcatgaaacccatcgtttactgcgtgaaaaccaagcagataagagtgcgagtggtggctaaactgtgtcagtggaagatatag

SEQ ID NO: 20990 - DNA, 942 bp, Artificial Sequence
  derived and/or modified sequence
atgagcatcatcaacaccagctatgtggagatcaccaccttcttcctggtgggcatgcctggcctggagtatgcccacatctggatcagcatccccatctgcagcatgtacctgattgccatcctgggcaatggcaccatcctcttcatcatcaagacagagcccagcctgcacggccccatgtactacttcctgtccatgctggccatgtctgacctgggcctgagcctgagcagcctgcccaccgtgctgagcatcttcctgttcaatgcccctgagaccagcagcagcgcctgctttgcccaggagttcttcatccacggcttctctgtgctggagagctctgtgctgctgatcatgagctttgaccgcttcctggccatccacaaccccctgcgctacaccagcatcctgaccaccgtgcgggtggcccagatcggcatcgtgttctccttcaagtccatgctgctggtgctgcccttccccttcaccctgcggagcctgcgctactgcaagaagaaccagctgagccacagctactgcctgcaccaggatgtgatgaagctggcctgcagcgacaacagaattgatgtgatctacggcttctttggagccctgtgcctgatggtggacttcatcctgattgctgtgtcctacaccctcatcctgaagacagtgcccggcatcgccagcaagaaggaggagctgaaggccctgaacacctgtgtgagccacatctgtgccgtcatcatcttctacctgcccatcatcaacctggccgtggtgcacagatttgctggccacgtgagccccctcatcaacgtgctgatggccaacgtgctgctgctggtgccccccctgatgaagcccatcgtgtactgtgtgaagaccaagcagatccgggtgcgggtggtggccaagctgtgccagtggaagatctag

SEQ ID NO: 20991 - DNA, 942 bp, Artificial Sequence
  derived and/or modified sequence
atgagcatcatcaacaccagctacgtggagatcaccaccttcttcctcgtgggtatgcccgggttagagtacgctcacatttggatatcaattccaatctgctctatgtacctcattgctatccttggtaacggtacaatcttgttcattatcaagactgagccatccctgcatggccccatgtactattttctatcgatgttggcaatgagtgacctgggcctctcgcttagcagcctccctaccgttttaagcatcttcctgtttaatgcaccagagacctcctcttctgcctgctttgcgcaggagttttttatacacgggtttagtgttttggaaagctcagtgctgctcattatgtcgttcgatagatttctcgctattcataaccctctgcgatatactagcatattaactaccgtgcgggtcgctcaaatcggaatcgtgttttcgttcaaatcaatgcttttggtcctacccttcccttttactctccgcagtcttaggtattgcaagaagaatcaactgtctcatagctactgtcttcaccaggatgtgatgaaactggcctgtagcgacaaccgcatcgacgtcatctacgggttcttcggcgcgctctgtctgatggtcgatttcatcctcatcgctgtaagttatacactaatcctaaagactgtgccgggcattgccagtaaaaaggaagagctcaaggcattgaacacgtgcgtgagccacatctgcgctgtgattatcttttacctcccgatcattaacctggccgtggtacatcgcttcgccgggcatgtctctccattgatcaacgtgctgatggccaatgtcttgttactcgtgccacccctgatgaaacctattgtgtactgtgtgaaaacgaagcagatccgcgtgagggtcgtggcaaagctctgtcagtggaagatctag

SEQ ID NO: 20992 - DNA, 942 bp, Artificial Sequence
  derived and/or modified sequence
atgtccattatcaacacatcatatgttgaaatcaccaccttcttcttggttgggatgccagggctagaatatgcacacatctggatctctatccccatctgcagcatgtatcttattgctattctaggaaatggcaccattctttttatcatcaagacagagccctccttgcatgggcccatgtactattttctttccatgttggctatgtcagacttgggtttgtctttatcatctctgcccactgtgttaagcatcttcctgttcaatgcccctgaaacttcttctagtgcctgctttgcccaggaattcttcattcatggattctcagtactggagtcctcagtcctcctgatcatgtcatttgatagattcctagccatccacaatcctctgagatacacctcaatcctgacaactgtcagagttgcccaaatagggatagtattctcctttaagagcatgctcctggttcttcccttccctttcactttaagaagcttgagatattgcaagaaaaaccaattatcccattcctactgtctccaccaggatgtcatgaagttggcctgttctgacaacagaattgatgttatctatggcttttttggagcactctgccttatggtagactttattctcattgctgtgtcttacaccctgatcctcaagactgtaccgggaattgcatccaaaaaggaggagcttaaggctctcaatacttgtgtttcacacatctgtgcagtgatcatcttctacctgcccatcatcaacctggccgttgtccaccgctttgccgggcatgtctctcccctcattaatgttctcatggcaaatgttctcctacttgtacctccgctgatgaaaccaattgtttattgtgtaaaaactaaacagattagagtgagagttgtagcaaaattgtgtcaatggaagatttaa

SEQ ID NO: 20993 - DNA, 942 bp, Artificial Sequence
  derived and/or modified sequence
atgagtattatcaatactagctatgtggagattactactttcttcctggttggtatgccagggctggaatatgcccatatttggatcagcatccctatctgtagcatgtacctcattgccattcttggcaatggaacaatcctgtttataatcaagacagagccatcgcttcacggcccaatgtactactttctgtcaatgctggcaatgtctgacctcggcctaagcttgagttctctgccgactgttttgagcatctttctgtttaatgcccctgaaacttccagttcagcttgctttgcccaagaatttttcatccacgggttcagcgttcttgagtcatcggtcctccttatcatgtcctttgatcgttttctcgcgatccataaccctctcagatacacctcaatacttacgaccgtccgggtagcgcaaatcggaattgttttctcattcaagtctatgctgttggtccttccctttccttttacgttacggagcttgagatactgcaagaagaatcagttgtcacattcttattgtctgcatcaggacgtgatgaagttggcttgctctgacaacaggattgacgtaatttatggcttcttcggcgctctttgcctgatggtggacttcattttgatcgcagtatcgtatacactcatattgaagactgtgccgggaatcgcctccaaaaaggaagaactgaaggccttgaacacctgcgttagtcacatctgtgccgtgatcattttctaccttcctataattaatctggcggttgtccacagattcgccggacatgtgagtcccttgattaacgtcctgatggcaaatgtcctgctactcgtccctccactgatgaaaccaattgtttactgcgtgaaaacaaaacaaattagagtaagggtggttgctaagctgtgtcagtggaaaatctag

SEQ ID NO: 20994 - protein, 312 aa, Artificial Sequence
  derived and/or modified sequence
MSVLNNSEVKLFLLIGIPGLEHAHIWFSIPICLMYLLAIMGNCTILFIIKTEPSLHEPMYYFLAMLAVSDMGLSLSSLPTMLRVFLFNAMGISPNACFAQEFFIHGFTVMESSVLLIMSLDRFLAIHNPLRYSSILTSNRVAKMGLILAIRSILLVIPFPFTLRRLKYCQKNLLSHSYCLHQDTMKLACSDNKTNVIYGFFIALCTMLDLALIVLSYVLILKTILSIASLAERLKALNTCVSHICAVLTFYVPIITLAAMHHFAKHKSPLVVILIADMFLLVPPLMNPIVYCVKTRQIWEKILGKLLNVCGR

SEQ ID NO: 20995 - protein, 297 aa, Artificial Sequence
  derived and/or modified sequence
FLLIGIPGLEHAHIWFSIPICLMYLLAIMGNCTILFIIKTEPSLHEPMYYFLAMLAVSDMGLSLSSLPTMLRVFLFNAMGISPNACFAQEFFIHGFTVMESSVLLIMSLDRFLAIHNPLRYSSILTSNRVAKMGLILAIRSILLVIPFPFTLRRLKYCQKNLLSHSYCLHQDTMKLACSDNKTNVIYGFFIALCTMLDLALIVLSYVLILKTILSIASLAERLKALNTCVSHICAVLTFYVPIITLAAMHHFAKHKSPLVVILIADMFLLVPPLMNPIVYCVKTRQIWEKILGIYCH

SEQ ID NO: 20996 - protein, 318 aa, Artificial Sequence
  derived and/or modified sequence
MSVLNNSEVKLFLLIGIPGLEHAHIWFSIPICLMYLLAIMGNCTILFIIKTEPSLHEPMYYFLAMLAVSDMGLSLSSLPTMLRVFLFNAMGISPNACFAQEFFIHGFTVMESSVLLIMSLDRFLAIHNPLRYSSILTSNRVAKMGLILAIRSILLVIPFPFTLRRLKYCQKNLLSHSYCLHQDTMKLACSDNKTNVIYGFFIALCTMLDLALIVLSYVLILKTILSIASLAERLKALNTCVSHICAVLTFYVPIITLAAMHHFAKHKSPLVVILIADMFLLVPPLMNPIVYCVKTRQIWEKILVTFRFIKTVKKFWKR

SEQ ID NO: 20997 - DNA, 939 bp, Artificial Sequence
  derived and/or modified sequence
atgagcgtgctgaacaacagcgaggtgaagctgttcctgctgatcggcatccccggcctggagcacgcccacatctggttcagcatccccatctgcctgatgtacctgctggccatcatgggcaactgcaccatcctgttcatcatcaagaccgagcccagcctgcacgagcccatgtactacttcctggccatgctggccgtgagcgacatgggcctgagcctgagcagcctgcccaccatgctgagagtgttcctgttcaacgccatgggcatcagccccaacgcctgcttcgcccaggagttcttcatccacggcttcaccgtgatggagagcagcgtgctgctgatcatgagcctggacagattcctggccatccacaaccccctgagatacagcagcatcctgaccagcaacagagtggccaagatgggcctgatcctggccatcagaagcatcctgctggtgatccccttccccttcaccctgagaagactgaagtactgccagaagaacctgctgagccacagctactgcctgcaccaggacaccatgaagctggcctgcagcgacaacaagaccaacgtgatctacggcttcttcatcgccctgtgcaccatgctggacctggccctgatcgtgctgagctacgtgctgatcctgaagaccatcctgagcatcgccagcctggccgagagactgaaggccctgaacacctgcgtgagccacatctgcgccgtgctgaccttctacgtgcccatcatcaccctggccgccatgcaccacttcgccaagcacaagagccccctggtggtgatcctgatcgccgacatgttcctgctggtgccccccctgatgaaccccatcgtgtactgcgtgaagaccagacagatctgggagaagatcctgggcaagctgctgaacgtgtgcggcagatag

SEQ ID NO: 20998 - DNA, 894 bp, Artificial Sequence
  derived and/or modified sequence
ttcctgctgatcggcatccccggcctggagcacgcccacatctggttcagcatccccatctgcctgatgtacctgctggccatcatgggcaactgcaccatcctgttcatcatcaagaccgagcccagcctgcacgagcccatgtactacttcctggccatgctggccgtgagcgacatgggcctgagcctgagcagcctgcccaccatgctgagagtgttcctgttcaacgccatgggcatcagccccaacgcctgcttcgcccaggagttcttcatccacggcttcaccgtgatggagagcagcgtgctgctgatcatgagcctggacagattcctggccatccacaaccccctgagatacagcagcatcctgaccagcaacagagtggccaagatgggcctgatcctggccatcagaagcatcctgctggtgatccccttccccttcaccctgagaagactgaagtactgccagaagaacctgctgagccacagctactgcctgcaccaggacaccatgaagctggcctgcagcgacaacaagaccaacgtgatctacggcttcttcatcgccctgtgcaccatgctggacctggccctgatcgtgctgagctacgtgctgatcctgaagaccatcctgagcatcgccagcctggccgagagactgaaggccctgaacacctgcgtgagccacatctgcgccgtgctgaccttctacgtgcccatcatcaccctggccgccatgcaccacttcgccaagcacaagagccccctggtggtgatcctgatcgccgacatgttcctgctggtgccccccctgatgaaccccatcgtgtactgcgtgaagaccagacagatctgggagaagatcctgggcatctactgccactag

SEQ ID NO: 20999 - DNA, 957 bp, Artificial Sequence
  derived and/or modified sequence
atgagcgtgctgaacaacagcgaggtgaagctgttcctgctgatcggcatccccggcctggagcacgcccacatctggttcagcatccccatctgcctgatgtacctgctggccatcatgggcaactgcaccatcctgttcatcatcaagaccgagcccagcctgcacgagcccatgtactacttcctggccatgctggccgtgagcgacatgggcctgagcctgagcagcctgcccaccatgctgagagtgttcctgttcaacgccatgggcatcagccccaacgcctgcttcgcccaggagttcttcatccacggcttcaccgtgatggagagcagcgtgctgctgatcatgagcctggacagattcctggccatccacaaccccctgagatacagcagcatcctgaccagcaacagagtggccaagatgggcctgatcctggccatcagaagcatcctgctggtgatccccttccccttcaccctgagaagactgaagtactgccagaagaacctgctgagccacagctactgcctgcaccaggacaccatgaagctggcctgcagcgacaacaagaccaacgtgatctacggcttcttcatcgccctgtgcaccatgctggacctggccctgatcgtgctgagctacgtgctgatcctgaagaccatcctgagcatcgccagcctggccgagagactgaaggccctgaacacctgcgtgagccacatctgcgccgtgctgaccttctacgtgcccatcatcaccctggccgccatgcaccacttcgccaagcacaagagccccctggtggtgatcctgatcgccgacatgttcctgctggtgccccccctgatgaaccccatcgtgtactgcgtgaagaccagacagatctgggagaagatcctggtgaccttcagattcatcaagaccgtgaagaagttctggaagagatag

SEQ ID NO: 21000 - DNA, 939 bp, Artificial Sequence
  derived and/or modified sequence
atgtctgttcttaataatagcgaggttaaattgttcctcctgatcggcattcctggcctcgagcacgcccatatctggttctcaatccctatctgcctcatgtacttgttagccattatgggcaattgtacgatactctttataatcaaaactgagccctcgcttcacgagccaatgtactattttcttgcaatgctggctgtgtccgacatgggactctctctatcttctcttcctacgatgctgagggtgttcctgttcaacgccatgggaatttctcccaatgcttgtttcgcccaagagtttttcatacacgggtttaccgtaatggaatcctcggtccttctgatcatgagtctcgataggttcctcgctattcataaccccctcaggtactcctctatcttgactagcaacagagtggctaaaatggggttaattctcgcaattaggtcaatcctcctggtgattccctttcccttcacattgagaaggctgaaatactgccagaagaatttgctgagccactcctactgtctccaccaggacaccatgaaactggcatgctcagataacaagactaacgttatttacgggttctttatagccctgtgcactatgctggacctcgctctaatcgttctgagttatgtacttatcctaaaaacaatcctgagcatagcctcccttgcagagcggctgaaggctctgaatacgtgtgtgtcacatatttgtgccgtcctgaccttttatgtgccgatcatcaccctcgctgccatgcatcatttcgccaaacacaagtctcctttagtggtcattctgatagccgacatgtttctgctcgtcccccctctaatgaatccgattgtgtactgtgtgaaaacacgacagatttgggagaagattttggggaagcttctcaatgtctgcggccggtag

SEQ ID NO: 21001 - DNA, 894 bp, Artificial Sequence
  derived and/or modified sequence
ttccttcttatcggaattcccggactcgaacatgcgcacatctggttcagcatcccaatttgtctgatgtacctgctggctattatgggcaactgtaccattttgttcataatcaaaactgagccctccttgcacgaaccgatgtactatttcctggctatgcttgccgttagtgacatgggactgagtctgtcctcacttccgaccatgctgcgagtgttcctgtttaacgcgatgggcatcagccccaatgcctgttttgcgcaggagtttttcatccatggtttcacagtcatggagagcagcgtgctcctcatcatgagcctcgatcgcttcttagctatccataaccctttacgatattcctcaatcctgactagcaaccgtgtagcaaagatggggctgatcctggcaattaggtctatcctgctggtgatccccttcccttttaccctcagacggttgaaatattgtcagaaaaatctcttgagtcattcatattgtcttcaccaggatacaatgaaactagcgtgctcagacaacaagaccaacgtgatatatgggttttttatcgctctttgtaccatgttggacctcgcactgatagtgctgtcctacgtcttgattcttaagaccatcctgtcaattgccagcctggcggaaagactcaaagcattgaatacatgcgttagtcacatttgcgcagtgctaacgttctacgtgccaatcatcacactggcggctatgcaccacttcgcgaagcacaaaagtcccttggtcgtaatccttatcgctgacatgtttttgctggtcccaccattaatgaatccgattgtctattgtgtgaagacacggcaaatctgggagaaaatcctcggaatctactgtcactag

SEQ ID NO: 21002 - DNA, 957 bp, Artificial Sequence
  derived and/or modified sequence
atgagcgtgctcaacaatagcgaggtgaaactgttcctgttgattggaatcccaggactcgaacacgcgcacatttggttcagtattcctatctgcttgatgtacctgctggctataatggggaattgtacaatacttttcattatcaagacggagcccagcctgcacgaacccatgtattatttcctcgcaatgttagctgtgagtgatatgggcctgtcactatcctcccttccgacaatgctacgagtgttcctctttaatgcgatgggcattagtcccaacgcctgttttgcccaggaattcttcattcacgggtttacagtcatggaaagtagcgttttgttgatcatgagtcttgacaggttcctggctattcataatcccctgaggtactctagtatcttaacgtctaatagggtcgcaaagatgggcctgattctggccatcaggtccatcttactggtgattcctttcccttttaccctacgcagactgaaatactgccaaaagaacctgcttagtcactcttactgtctgcatcaggatactatgaagctcgcgtgttcagataataaaacaaatgtaatctacggatttttcatcgcactgtgcaccatgctcgaccttgcgctcatagtgctttcttatgtgctgatcctgaagactatcctttccatcgcctccttagctgagaggctgaaagccttgaacacctgcgtgtcacacatatgtgcagtgctcacgttctacgtgccaattataacactggctgccatgcaccattttgcaaaacataagtcaccacttgtcgttatactgatcgcagatatgttccttctggtgcctcctctgatgaaccctatcgtatattgcgtgaagactcgacaaatttgggagaaaatcctcgttacctttagattcataaaaactgtgaagaaattctggaagagatag

SEQ ID NO: 21003 - DNA, 939 bp, Artificial Sequence
  derived and/or modified sequence
atgtctgtgctgaacaacagcgaggtgaagctgttcctgctgattggcatccctggcctggagcacgcccacatctggttcagcatccccatctgcctgatgtacctgctggccatcatgggcaactgcaccatcctcttcatcatcaagacagagcccagcctgcacgagcccatgtactacttcctggccatgctggccgtgtctgacatgggcctgagcctgagcagcctgcccaccatgctgcgggtcttcctgttcaatgccatgggcatcagccccaatgcctgctttgcccaggagttcttcatccacggcttcaccgtgatggagagctctgtgctgctgatcatgagcctggaccgcttcctggccatccacaaccccctgcgctacagcagcatcctgaccagcaacagagtggccaagatgggcctcatcctggccatccgcagcatcctgctggtgatccccttccccttcaccctgcggcggctgaagtactgccagaagaacctgctgagccacagctactgcctgcaccaggacaccatgaagctggcctgcagcgacaacaagaccaacgtcatctacggcttcttcatcgccctgtgcaccatgctggacctggccctgattgtgctgtcctatgtgctgatcctgaagaccatcctgagcatcgccagcctggccgagcggctgaaggccctgaacacctgtgtgagccacatctgtgctgtgctgaccttctacgtgcccatcatcaccctggccgccatgcaccactttgccaagcacaagagccccctggtggtgatcctgattgctgacatgttcctgctggtgccccccctgatgaaccccatcgtgtactgtgtgaagacccggcagatctgggagaagatcctgggcaagctgctgaatgtgtgtggccgctag

SEQ ID NO: 21004 - DNA, 894 bp, Artificial Sequence
  derived and/or modified sequence
ttcctgctgattggcatccctggcctggagcacgcccacatctggttcagcatccccatctgcctgatgtacctgctggccatcatgggcaactgcaccatcctcttcatcatcaagacagagcccagcctgcacgagcccatgtactacttcctggccatgctggccgtgtctgacatgggcctgagcctgagcagcctgcccaccatgctgcgggtcttcctgttcaatgccatgggcatcagccccaatgcctgctttgcccaggagttcttcatccacggcttcaccgtgatggagagctctgtgctgctgatcatgagcctggaccgcttcctggccatccacaaccccctgcgctacagcagcatcctgaccagcaacagagtggccaagatgggcctcatcctggccatccgcagcatcctgctggtgatccccttccccttcaccctgcggcggctgaagtactgccagaagaacctgctgagccacagctactgcctgcaccaggacaccatgaagctggcctgcagcgacaacaagaccaacgtcatctacggcttcttcatcgccctgtgcaccatgctggacctggccctgattgtgctgtcctatgtgctgatcctgaagaccatcctgagcatcgccagcctggccgagcggctgaaggccctgaacacctgtgtgagccacatctgtgctgtgctgaccttctacgtgcccatcatcaccctggccgccatgcaccactttgccaagcacaagagccccctggtggtgatcctgattgctgacatgttcctgctggtgccccccctgatgaaccccatcgtgtactgtgtgaagacccggcagatctgggagaagatcctgggcatctactgccactag

SEQ ID NO: 21005 - DNA, 957 bp, Artificial Sequence
  derived and/or modified sequence
atgtctgtgctgaacaacagcgaggtgaagctgttcctgctgattggcatccctggcctggagcacgcccacatctggttcagcatccccatctgcctgatgtacctgctggccatcatgggcaactgcaccatcctcttcatcatcaagacagagcccagcctgcacgagcccatgtactacttcctggccatgctggccgtgtctgacatgggcctgagcctgagcagcctgcccaccatgctgcgggtcttcctgttcaatgccatgggcatcagccccaatgcctgctttgcccaggagttcttcatccacggcttcaccgtgatggagagctctgtgctgctgatcatgagcctggaccgcttcctggccatccacaaccccctgcgctacagcagcatcctgaccagcaacagagtggccaagatgggcctcatcctggccatccgcagcatcctgctggtgatccccttccccttcaccctgcggcggctgaagtactgccagaagaacctgctgagccacagctactgcctgcaccaggacaccatgaagctggcctgcagcgacaacaagaccaacgtcatctacggcttcttcatcgccctgtgcaccatgctggacctggccctgattgtgctgtcctatgtgctgatcctgaagaccatcctgagcatcgccagcctggccgagcggctgaaggccctgaacacctgtgtgagccacatctgtgctgtgctgaccttctacgtgcccatcatcaccctggccgccatgcaccactttgccaagcacaagagccccctggtggtgatcctgattgctgacatgttcctgctggtgccccccctgatgaaccccatcgtgtactgtgtgaagacccggcagatctgggagaagatcctggtgaccttccgcttcatcaagacagtgaagaagttctggaagaggtag

SEQ ID NO: 21006 - DNA, 939 bp, Artificial Sequence
  derived and/or modified sequence
atgagcgtgctgaacaacagcgaggtgaagctgttcctgctgatcggaatccccggacttgagcacgcccacatttggttctccatcccaatctgcctgatgtaccttctggcgatcatggggaattgcacgatccttttcatcattaagacagagccgtccctgcacgaacccatgtattattttctcgcaatgcttgctgtcagcgacatgggcctgagtctgtcttccctgcccaccatgctcagagtatttcttttcaacgccatgggcataagtcccaacgcatgcttcgcacaggaatttttcatacacgggtttaccgtgatggaatcaagcgtcttgctgatcatgtctttagatcgcttcctcgccatccataaccccctcaggtactcaagcatcctgacaagcaatagagtggccaaaatggggttgattttagcaattagatctatcttattagtcatccccttcccatttacgctcagacgactaaagtactgtcaaaagaatttgctctctcatagttactgtcttcatcaggatacaatgaaactcgcttgttcagataacaaaacgaatgtgatctatgggttttttatagcactttgcaccatgttggatctagccctgatcgtcctcagctacgtgttgattctaaaaacaatcttgtctatcgcttctctagcagaacgactgaaggcgcttaacacctgcgtcagccacatctgcgccgtactcacgttctacgtccctattattactcttgccgcaatgcatcatttcgccaagcataaatccccccttgttgtgatcctgattgcagatatgttcctgctagtgcccccactgatgaacccaatcgtgtattgtgttaaaacccgacagatatgggaaaaaattctgggaaaactcttaaatgtgtgcggcaggtag

SEQ ID NO: 21007 - DNA, 894 bp, Artificial Sequence
  derived and/or modified sequence
ttcctgctgatcggcatccccggcctggagcacgcccacatctggttttctatccccatctgcctcatgtacttgctcgctatcatgggtaactgcaccatactgttcatcattaaaactgagccaagccttcacgagcctatgtattactttcttgccatgttagcagtgagcgacatgggactgagcctctccagcctcccgaccatgctgcgggtgttcctgtttaatgcgatggggatcagccccaacgcatgcttcgcccaggagttttttattcacggcttcaccgtgatggaaagttccgtgctgttgatcatgagtctggacaggttcctggccatccacaatccattgagatatagcagcatcttaacatccaatagggtggcaaaaatgggattgatcttggcgatccggagtatactgctagtcatcccattcccattcactctgcgccgtctgaaatactgtcagaagaatttactatcccactcctactgcctgcaccaggacaccatgaaactggcttgttccgacaacaaaacgaatgtgatttatggattcttcatagccctgtgcaccatgcttgacctggccctaatagtactctcatacgtactgatcctgaaaaccattctgtcaatagcttccttggcagagcggctgaaggccttaaacacttgcgtgtcacacatttgcgccgttttgacattttacgtgcctatcatcaccctggccgcaatgcatcattttgccaagcacaagtcaccattggtggtaattctaatcgctgacatgttcctcttagtacccccacttatgaatcccatcgtctactgtgttaaaacccggcagatttgggagaaaatcctggggatttattgtcactag

SEQ ID NO: 21008 - DNA, 957 bp, Artificial Sequence
  derived and/or modified sequence
atgagcgtgctgaacaacagcgaggtgaagctgttcctgctgatcggtattccaggtctggagcacgcccacatctggtttagcattcctatctgcctcatgtaccttctagccatcatgggtaactgcactatcctgtttattattaagactgaaccctccctacacgagccaatgtattattttctggcaatgttagcagtgtcggatatgggtctgtccctttctagcttacccacgatgctgcgtgtgtttctgttcaacgccatgggcatttcgcctaacgcatgcttcgcgcaggagtttttcatccacggatttaccgtaatggagtccagcgtgctgctcattatgagccttgatcgattcctggccatacataatcccttacgctactcatccatactgacctctaacagagtggctaagatggggttgattctggccattaggtcaatcctcctcgtaattccatttccatttaccctccggagattgaaatattgtcagaaaaatctgctatctcatagttactgtcttcaccaagatacgatgaaactagcctgctcagataacaagactaacgtgatttatggctttttcatcgctctttgcaccatgctggacctggcactaatcgtcttatcgtatgttctgatcctgaagactattttgagcattgcttctctggccgagagactgaaagcgctgaatacttgcgtatcacatatctgtgccgtacttactttttatgtgcctataatcaccctggccgcgatgcatcactttgccaaacacaagtcaccgctggtagtgattttaattgctgacatgttcttgctggtgccgccactgatgaatcctattgtctattgcgtgaaaactagacagatctgggagaaaatccttgtcacctttcggtttatcaaaactgtgaagaagttttggaagcgctag

SEQ ID NO: 21009 - DNA, 939 bp, Artificial Sequence
  derived and/or modified sequence
atgtctgttctcaataactccgaagtcaagcttttccttctgattgggatcccaggactggaacatgcccacatttggttctccatccccatttgcctcatgtacctgcttgccatcatgggcaactgcaccattctctttattataaagacagagccctcgcttcatgagcccatgtattatttccttgccatgttggctgtctctgacatgggcctgtccctctcctcccttcctaccatgttgagggtcttcttgttcaatgccatgggaatttcacctaatgcctgctttgctcaagaattcttcattcatggattcactgtcatggaatcctcagtacttctaattatgtctttggaccgctttcttgccattcacaatcccttaagatacagttctatcctcactagcaacagggttgctaaaatgggacttattttagccattaggagcattctcttagtgattccatttcccttcaccttaaggagattaaaatattgtcaaaagaatcttctttctcactcatactgtcttcatcaggataccatgaagctggcctgctctgacaacaagaccaatgtcatctatggcttcttcattgctctctgtactatgctggacttggcactgattgttttgtcttatgtgctgatcttgaagactatactcagcattgcatctttggcagagaggcttaaggccctaaatacctgtgtctcccacatctgtgctgtgctcaccttctatgtgcccatcatcaccctggctgccatgcatcactttgccaagcacaaaagccctcttgttgtgatccttattgcagatatgttcttgttggtgccgccccttatgaaccccattgtgtactgtgtaaagactcgacaaatctgggagaagatcttggggaagttgcttaatgtatgtgggagataa

SEQ ID NO: 21010 - DNA, 891 bp, Artificial Sequence
  derived and/or modified sequence
ttccttctgattgggatcccaggactggaacatgcccacatttggttctccatccccatttgcctcatgtacctgcttgccatcatgggcaactgcaccattctctttattataaagacagagccctcgcttcatgagcccatgtattatttccttgccatgttggctgtctctgacatgggcctgtccctctcctcccttcctaccatgttgagggtcttcttgttcaatgccatgggaatttcacctaatgcctgctttgctcaagaattcttcattcatggattcactgtcatggaatcctcagtacttctaattatgtctttggaccgctttcttgccattcacaatcccttaagatacagttctatcctcactagcaacagggttgctaaaatgggacttattttagccattaggagcattctcttagtgattccatttcccttcaccttaaggagattaaaatattgtcaaaagaatcttctttctcactcatactgtcttcatcaggataccatgaagctggcctgctctgacaacaagaccaatgtcatctatggcttcttcattgctctctgtactatgctggacttggcactgattgttttgtcttatgtgctgatcttgaagactatactcagcattgcatctttggcagagaggcttaaggccctaaatacctgtgtctcccacatctgtgctgtgctcaccttctatgtgcccatcatcaccctggctgccatgcatcactttgccaagcacaaaagccctcttgttgtgatccttattgcagatatgttcttgttggtgccgccccttatgaaccccattgtgtactgtgtaaagactcgacaaatctgggagaagatcttgggcatttactgtcat

SEQ ID NO: 21011 - DNA, 957 bp, Artificial Sequence
  derived and/or modified sequence
atgtctgttctcaataactccgaagtcaagcttttccttctgattgggatcccaggactggaacatgcccacatttggttctccatccccatttgcctcatgtacctgcttgccatcatgggcaactgcaccattctctttattataaagacagagccctcgcttcatgagcccatgtattatttccttgccatgttggctgtctctgacatgggcctgtccctctcctcccttcctaccatgttgagggtcttcttgttcaatgccatgggaatttcacctaatgcctgctttgctcaagaattcttcattcatggattcactgtcatggaatcctcagtacttctaattatgtctttggaccgctttcttgccattcacaatcccttaagatacagttctatcctcactagcaacagggttgctaaaatgggacttattttagccattaggagcattctcttagtgattccatttcccttcaccttaaggagattaaaatattgtcaaaagaatcttctttctcactcatactgtcttcatcaggataccatgaagctggcctgctctgacaacaagaccaatgtcatctatggcttcttcattgctctctgtactatgctggacttggcactgattgttttgtcttatgtgctgatcttgaagactatactcagcattgcatctttggcagagaggcttaaggccctaaatacctgtgtctcccacatctgtgctgtgctcaccttctatgtgcccatcatcaccctggctgccatgcatcactttgccaagcacaaaagccctcttgttgtgatccttattgcagatatgttcttgttggtgccgccccttatgaaccccattgtgtactgtgtaaagactcgacaaatctgggagaagatcttggttacatttagatttattaagactgtcaaaaagttttggaaaaggtag

SEQ ID NO: 21012 - DNA, 939 bp, Artificial Sequence
  derived and/or modified sequence
atgtccgtcctcaacaattctgaggtcaagttgtttctgctgataggaattcctgggctggaacatgcacacatttggttttcaatccctatctgtctgatgtatctacttgctataatgggcaattgcacaatcctgtttattatcaagactgaaccctcactccacgagccaatgtactactttttagccatgctggctgtgagcgatatgggtctgagtttgagttccctgcctacaatgttgagggtctttctgtttaatgcgatgggaatcagtcctaacgcgtgctttgcccaggagttttttatccatggcttcacggtcatggagagctcagttcttttaatcatgtctcttgatcgttttctcgcaatccacaatcccttacgctatagctcaatcctcacttccaaccgggtggccaaaatggggctgatcctcgccattcgttccattctactggtgattcctttcccctttacccttcggaggctgaaatactgccaaaagaatctgctgtcgcactcttattgcttacaccaggacacgatgaagttagcttgtagcgacaacaaaacgaacgttatctacggcttcttcatcgccctgtgtactatgctcgatcttgccctcatcgtcctcagctatgtgctgatcttgaaaaccattctgtctatcgcgtcactcgccgagcgactgaaggccctgaatacttgcgtctcacacatctgtgccgtgctgaccttctacgtcccgattatcaccctcgcagccatgcatcacttcgctaagcacaaatcaccattagtggtgattttaattgcggacatgtttctccttgtaccccctttgatgaatccaatcgtgtactgcgttaaaaccaggcagatctgggagaaaattctcggcaaattgttaaatgtgtgcgggcgatag

SEQ ID NO: 21013 - DNA, 894 bp, Artificial Sequence
  derived and/or modified sequence
tttctgctgatcggtattccagggttggagcatgctcacatttggttctctatcccaatttgcctcatgtatctgctggccatcatgggtaactgcacaattcttttcatcatcaaaacggagccctctctccacgagcccatgtactattttttagctatgctggccgttagcgacatgggcctgtcactaagctcacttcccacaatgctgagggtgttcttgttcaacgccatgggtataagcccaaacgcctgcttcgctcaggagttctttattcatgggttcaccgtgatggaatcttctgtgcttttgatcatgagccttgaccggttcttggccatccataatccactgaggtactccagcattctcaccagcaatcgcgtggctaagatgggtctcatattggccatccgatctattctgcttgtaatcccattcccatttaccctgaggaggcttaagtactgtcagaaaaacttgctatcccactcctattgtcttcaccaggacaccatgaagctggcatgcagcgataataagaccaatgtcatctatggattctttatcgcgctgtgcacaatgctggatttggctctgatcgtactgtcttatgttctgatcttgaagactattctgtccatcgcatctctcgcagagcggctgaaggctttgaatacttgtgtgtcacacatttgcgccgtccttacattctacgtcccgatcatcaccctggccgcaatgcaccattttgctaagcacaagagtccactggtggtgatcctaatagcagacatgtttctcctggtaccccctttaatgaatcccattgtgtattgcgtgaagacacgccagatttgggagaaaattctcggcatttactgccactag

SEQ ID NO: 21014 - DNA, 957 bp, Artificial Sequence
  derived and/or modified sequence
atgtccgtgctcaacaacagcgaggtgaaattattcctgttaatcggcatcccagggctcgaacatgctcatatttggttttccattccaatctgcctgatgtatctcctggcgatcatgggtaactgcaccatcttattcattattaaaacggagccttctctccacgagccgatgtattatttcctcgcgatgttggccgtctctgacatggggctgtccctttcttcactcccgacgatgctgagggtgttcttgtttaacgccatggggatctctcccaatgcatgctttgcccaggaattttttattcacgggtttacggtcatggagtcctctgtcctcctgattatgtcccttgataggttcttagctattcataacccacttaggtattcctctattcttacttccaacagggtggccaagatgggcttgatcctggccatcaggtcaatactcctggtgatcccatttccatttacattaagacgccttaaatactgtcagaagaacttgttatctcactcatactgcctgcatcaggatacgatgaagcttgcttgtagtgataacaaaactaatgtgatctatggcttcttcatcgccttatgcacaatgctggacttggctttgatcgtgttgtcctatgtccttatccttaaaactatcctgtcaattgcatccctcgctgagcgccttaaagctctgaatacatgtgtgagccatatttgcgctgtgctcactttttacgtcccaattattaccctggccgctatgcatcattttgctaagcacaaatctccactggttgtaatacttatagctgatatgtttcttttagtgccccctctaatgaaccccattgtatactgcgtcaagacacgccaaatttgggaaaaaatcctagtcaccttccgattcatcaagaccgtaaagaaattctggaagagatag

SEQ ID NO: 21015 - protein, 312 aa, Artificial Sequence [sequence omitted]

SEQ ID NO: 21016 - protein, 342 aa, Artificial Sequence
  derived and/or modified sequence
MTETSLSSQCFPMSVLNNTIAEPLIFLLMGIPGLKATQYWISIPFCLLYVVAVSGNSMILFVVLCERSLHKPMYYFLSMLSATDLSLSLCTLSTTLGVFWFEAREINLNACIAQMFFLHGFTFMESGVLLAMAFDRFVAICYPLRYTTILTNARIAKIGMSMLIRNVAVMLPVMLFVKRLSFCSSMVLSHSYCYHVDLIQLSCTDNRINSILGLFALLSTTGFDCPCILLSYILIIRSVLSIASSEERRKAFNTCTSHISAVSIFYLPLISLSLVHRYGHSAPPFVHIIMANVFLLIPPVLNPIIYSVKIKQIQKAIIKVLIQKHSKSNHQLFLIRDKAIYE

SEQ ID NO: 21017 - protein, 287 aa, Artificial Sequence
  derived and/or modified sequence
VFFLTGIPGLETRQIWTSIPFCCLYVIAISGNGMILFVIITESSLHEPMYHFLSMLSFMDLGLCLSTLTTMLGIFWFNAREISFDACIGQMFFIHGFTFMESSVLLAMAFDRFIAVCNPLRYATILTNSRIIKVGFAIVLRGTTALVPLLLLLKRLSFCRSHVLHHSYCFHPDAMKLSCTDTWINSAFGLAIVISTAGLDSVLILISYVLIVRSVLCIASPEEQKKAFGTCVSHISAVAIFYIPMISLSPVHRFGKHAPPLVHMLIANVYLLIPPVMNPIIYSVKTK

SEQ ID NO: 21018 - DNA, 939 bp, Artificial Sequence
  derived and/or modified sequence
atgaccaacaacatcaccagcaccagcatcatcttcctgctgaccggcgtgcccggcctggaggccttccacacctggatcagcatccccttctgcttcctgagcgtgaccgccctgctgggcaacagcctgatcctgttcgccaccatcacccagcccagcctgcacgagcccatgtactacttcctgagcatgctgagcgccaccgacctgggcctgagcatcagcaccctggtgaccatgctgagcatcttctggttcaacgtgagagagatcagcttcaacgcctgcctgagccacatgttcttcatcaagttcttcaccgtgatggagagcagcgtgctgctggccatggccttcgacagattcgtggccgtgagcaaccccctgagatacgccatgatcctgaccgacagcagaatcgcccagatcggcgtggccagcgtgatcagaggcctgctgatgctgacccccatggtggccctgctgatcagactgagctactgccacagccaggtgctgcaccacagctactgctaccaccccgacgtgatgaagctgagctgcaccgacaccagaatcaacagcgccgtgggcctgaccgccatgttcagcaccgtgggcgtggacctgctgctgatcctgctgagctacgtgctgatcatcagaaccgtgctgagcgtggccagccccgaggagagaaaggagaccttcagcacctgcgtgagccacatcgtggccttcgccatctactacatccccctgatcagcctgagcatcgtgcacagattcggcaagcaggcccccgcctacgtgcacaccatgatcgccaacacctacctgctgatcagccccctgatgaaccccgtgatctacagcgtgaagaccaagcagatcagaagagccgtgatcaagatcctgcacagcaaggagacctag

SEQ ID NO: 21019 - DNA, 1029 bp, Artificial Sequence
  derived and/or modified sequence
atgaccgagaccagcctgagcagccagtgcttccccatgagcgtgctgaacaacaccatcgccgagcccctgatcttcctgctgatgggcatccccggcctgaaggccacccagtactggatcagcatccccttctgcctgctgtacgtggtggccgtgagcggcaacagcatgatcctgttcgtggtgctgtgcgagagaagcctgcacaagcccatgtactacttcctgagcatgctgagcgccaccgacctgagcctgagcctgtgcaccctgagcaccaccctgggcgtgttctggttcgaggccagagagatcaacctgaacgcctgcatcgcccagatgttcttcctgcacggcttcaccttcatggagagcggcgtgctgctggccatggccttcgacagattcgtggccatctgctaccccctgagatacaccaccatcctgaccaacgccagaatcgccaagatcggcatgagcatgctgatcagaaacgtggccgtgatgctgcccgtgatgctgttcgtgaagagactgagcttctgcagcagcatggtgctgagccacagctactgctaccacgtggacctgatccagctgagctgcaccgacaacagaatcaacagcatcctgggcctgttcgccctgctgagcaccaccggcttcgactgcccctgcatcctgctgagctacatcctgatcatcagaagcgtgctgagcatcgccagcagcgaggagagaagaaaggccttcaacacctgcaccagccacatcagcgccgtgagcatcttctacctgcccctgatcagcctgagcctggtgcacagatacggccacagcgccccccccttcgtgcacatcatcatggccaacgtgttcctgctgatcccccccgtgctgaaccccatcatctacagcgtgaagatcaagcagatccagaaggccatcatcaaggtgctgatccagaagcacagcaagagcaaccaccagctgttcctgatcagagacaaggccatctacgagtag

SEQ ID NO: 21020 - DNA, 939 bp, Artificial Sequence
  derived and/or modified sequence
atgaccaataacatcacatctaccagcatcattttcctcttaaccggggtcccaggactagaagcgtttcatacttggatctccattccattctgttttctgagcgttacagctctgctggggaattctctgattctattcgcaaccataacacagccgtccctccacgagcccatgtattattttctgagcatgttgtcggcaacggacctcggtctgtcaatctcgacccttgtgacaatgcttagtatattttggttcaacgtgcgagaaatttcctttaacgcttgccttagccacatgttttttatcaagttctttacggtgatggaatctagtgtgctcctagccatggctttcgataggtttgtcgccgtttccaaccccttgaggtatgcgatgatcctgactgattcccggattgcccagattggcgtagcctctgtcatccgtggcctactgatgctaactcccatggtagcgctattgatacggttaagctactgccattcccaggtcctgcaccactcctattgttaccacccggacgttatgaagctttcctgtaccgacacccgcattaattcagcagtgggcctgactgctatgttctctaccgtgggtgtggacctgttactgatcttgctgtcctacgttcttattattcgaaccgttctgtccgtcgcctctcccgaagagcgcaaggagaccttctcgacatgcgtctcacacattgtggcttttgccatatactatattcccttaatttccctttccatagttcaccggtttggcaaacaggcccccgcctacgtgcacacgatgatcgcaaacacgtatctgcttatcagccccctgatgaatcctgtcatttatagcgtaaagaccaaacagatacgccgggccgtgataaagatactccactctaaagagacatag

SEQ ID NO: 21021 - DNA, 1029 bp, Artificial Sequence
  derived and/or modified sequence
atgacggagacgagcctcagctctcagtgcttccctatgagcgttctaaacaacaccattgccgagcctctgatatttttgttaatggggatccctggcctaaaagcaacgcaatactggattagtatcccgttttgcctgctgtatgtggtcgccgtcagtggaaatagcatgatactgttcgtcgtcctctgcgagagaagcttacacaaacctatgtactactttctgagtatgttaagtgctaccgatctgagcctttctttgtgcaccctgagcaccacactgggagtgttttggtttgaggccagagagatcaatttgaatgcttgcattgcgcagatgttttttctgcacgggttcacctttatggaaagtggtgtcctgctcgcgatggccttcgatcgttttgtggctatctgttaccctctgcggtacactaccatactaactaatgctcgcatagctaaaatcggcatgagtatgctgatccgaaatgttgccgtgatgctgcccgtaatgctgttcgttaagcgactgagcttttgttcttcaatggttctgagccattcctactgctaccatgtcgacctgatccagctgagttgcaccgacaaccgaatcaactctatactcgggttatttgcgttgctgtcaaccaccggtttcgactgcccttgcatcttgctgagctatattttgatcatccgctccgtgctctcaatagccagtagcgaagaacggcgaaaggctttcaacacctgtaccagtcacatatccgccgttagtattttctacctaccattgatttccctctctctagtgcaccgctatggccatagcgcccccccgtttgtacatatcataatggccaacgttttcctgctgatcccccctgtgctgaacccaattatctactctgtaaaaataaaacagatacaaaaagctatcatcaaagtactaattcaaaagcactccaaatcaaatcatcaactgttcctgattagggacaaagctatttatgaatag

SEQ ID NO: 21022 - DNA, 939 bp, Artificial Sequence
  derived and/or modified sequence
atgaccaacaacatcaccagcaccagcatcatcttcctgctgactggagtgcccggcctggaggccttccacacctggatcagcatccccttctgcttcctgtctgtgacagccctgctgggcaacagcctcatcctgtttgccaccatcacccagcccagcctgcacgagcccatgtactacttcctgtccatgctgagcgccacagacctgggcctgagcatcagcaccctggtgaccatgctgagcatcttctggttcaacgtgcgggagatctccttcaatgcctgcctgagccacatgttcttcatcaagttcttcaccgtgatggagagctctgtgctgctggccatggcctttgacagatttgtggccgtgagcaaccccctgcgctatgccatgatcctgacagacagcagaattgcccagatcggcgtggccagcgtcatccggggcctgctgatgctgacccccatggtggccctgctgatccggctgagctactgccacagccaggtgctgcaccacagctactgctaccacccagatgtgatgaagctgagctgcacagacacccgcatcaacagcgctgtgggcctgacagccatgttcagcacagtgggcgtggacctgctgctgatcctgctgtcctatgtgctgatcatcagaacagtgctgtctgtggccagccctgaggagaggaaggagaccttcagcacctgtgtgagccacatcgtggcctttgccatctactacatccccctcatcagcctgagcatcgtgcacagatttgggaagcaggccccagcctacgtgcacaccatgattgccaacacctacctgctgatcagccccctgatgaaccctgtgatctacagcgtgaagaccaagcagatccggcgggccgtcatcaagatcctgcacagcaaggagacctag

SEQ ID NO: 21023 - DNA, 1029 bp, Artificial Sequence
  derived and/or modified sequence
atgacagagaccagcctgagcagccagtgcttccccatgtctgtgctgaacaacaccatcgccgagcccctcatcttcctgctgatgggcatccctggcctgaaggccacccagtactggatcagcatccccttctgcctgctgtatgtggtggccgtgtctggcaacagcatgatcctgtttgtggtgctgtgtgagaggagcctgcacaagcccatgtactacttcctgtccatgctgagcgccacagacctgagcctgagcctgtgcaccctgagcaccaccctgggcgtcttctggtttgaggcccgggagatcaacctgaatgcctgcatcgcccagatgttcttcctgcacggcttcaccttcatggagagcggcgtgctgctggccatggcctttgacagatttgtggccatctgctaccccctgcgctacaccaccatcctgaccaatgccagaattgccaagattggcatgtccatgctgatcagaaatgtggccgtgatgctgcctgtgatgctgtttgtgaagaggctgtccttctgcagctccatggtgctgagccacagctactgctaccacgtggacctgatccagctgagctgcacagacaaccgcatcaacagcatcctgggcctgtttgccctgctgagcaccactggatttgactgcccctgcatcctgctgagctacatcctgatcatccgctctgtgctgagcatcgccagcagcgaggagaggaggaaggccttcaacacctgcaccagccacatctctgctgtgtccatcttctacctgcccctcatcagcctgagcctggtgcacagatatggccacagcgcccccccatttgtgcacatcatcatggccaacgtgttcctgctgatcccccctgtgctgaaccccatcatctacagcgtgaagatcaagcagatccagaaggccatcatcaaggtgctgatccagaagcacagcaagagcaaccaccagctgttcctgatccgggacaaggccatctatgaatag

SEQ ID NO: 21024 - DNA, 939 bp, Artificial Sequence
  derived and/or modified sequence
atgaccaacaacatcaccagcaccagcatcatcttcctgctgaccggggtgcccggtctagaagcgttccacacctggatctctataccattttgtttcctgagtgtgacggccttactaggaaactctctcatcttattcgcgacaattacccagccttcacttcatgaacctatgtattacttcttatcgatgctgagcgcgacagacttgggactgtcaatatctactttagtcacaatgctgtctatcttttggttcaacgttagagagatctcatttaacgcttgtttatcacacatgttcttcattaaattctttaccgtcatggagtctagcgtcctgctggcaatggcttttgacaggttcgtcgccgtgtctaatcccctcagatatgccatgatcctgaccgacagccggatcgcccagatcggtgtggcatctgttattagaggtctgctcatgttgacccctatggtcgcactgctgatccgactgtcttattgtcactcacaggttcttcaccactcctactgttatcaccccgatgttatgaagttgtcttgtactgatacccggatcaactccgcagtgggcctcaccgcaatgttttctacggtgggagtggacctgttactcatcctcctgtcctacgttctaatcattaggacagtactgagcgttgcttctcctgaagaaagaaaggagaccttcagtacttgtgtgtcccacatcgtggcgtttgcaatctactatatacccttgatatcactctccatcgtgcatagatttggtaagcaggccccagcctatgtgcatacaatgatcgcaaacacatacctactgatcagtccattgatgaatcccgtgatatacagcgtcaagactaaacagatacgaagagccgtcatcaaaatcctacattctaaggagacctag

SEQ ID NO: 21025 - DNA, 1029 bp, Artificial Sequence
  derived and/or modified sequence
atgaccgagaccagcctgagcagccagtgcttccccatgagcgtgttgaacaatactatcgctgaaccccttatctttctcttgatggggatccccggtctgaaggctactcagtattggatctcaattcctttctgcctcctctatgttgtggccgtctctggcaacagcatgatcctcttcgtagtgctctgcgaaagatctctgcacaagcctatgtattatttcctgtcaatgttgtcagcaaccgacctgtcgctctccctgtgcacgctcagcactacactgggagtgttttggtttgaggcccgggagatcaacctgaacgcatgcatcgcacagatgttcttcctgcacggcttcacattcatggagagcggggtgttgctggcaatggcttttgataggttcgtggccatttgctatccattgcgttacactacaatcctgactaatgcacggatagcaaagatcggcatgtctatgctgattcgcaatgtggccgtgatgttgcccgttatgctgttcgtcaaaaggctgtctttttgctcttctatggttctttcccattcctattgttaccacgtcgatttgatccagctttcctgtacagacaacagaatcaacagtattttgggacttttcgctttgctgtcgacaactggttttgactgcccttgcatcctgctgagctacatcctgataatccgatctgttctgtccattgcaagcagtgaggagagaagaaaggcctttaatacctgcaccagtcacatttctgctgtctcgatcttctatcttcccttgatcagcctctctctggtccatcggtacggccacagcgccccaccttttgtgcacattataatggctaacgtctttttactgatcccgcctgtcctcaaccccataatttattccgtaaagataaaacagatccagaaggcaatcatcaaggttctgattcaaaaacactctaaatccaaccatcagttgttcctgatccgggataaggcgatttacgagtag

SEQ ID NO: 21026 - DNA, 939 bp, Artificial Sequence
  derived and/or modified sequence
atgaccaataatatcacctccacttccatcattttcctgctcactggtgttcctgggctggaagccttccacacctggatctccattcccttctgcttcctctctgtaactgctctcttgggaaacagcctgatcctcttcgctaccatcactcagcccagcctccacgaaccaatgtactatttcctctccatgctgtccgccactgacctcggcctgtccatatccactctggtcaccatgctgagtatattctggttcaatgtgagggaaatcagctttaatgcctgcttgtcccacatgttctttattaaattcttcactgtcatggaatcctcagtgctgttggccatggcttttgatcgttttgtggccgtctctaatccccttaggtatgccatgattttaactgactccagaatagctcaaattggagtggcaagtgtcatcagggggctcctaatgctgacaccaatggtagcacttcttataagactttcctactgccacagccaagtactccaccactcctactgctaccaccctgatgtgatgaagctctcatgcacagacaccagaatcaacagtgcagttgggctgactgccatgttctctactgttggtgtagacttacttctcatcctcctttcttatgttttgatcattaggactgtccttagcgttgcttccccagaagagaggaaggaaaccttcagtacatgtgtctcccacattgtggcttttgctatatattacattccattgatcagtctgtccattgttcacagatttgggaaacaagccccagcctatgtacatactatgattgctaacacctacctgctgatctcccctttgatgaaccctgtcatctacagtgtgaaaaccaaacagatacgtagagctgtgataaaaattctccattccaaagaaacataa

SEQ ID NO: 21027 - DNA, 1136 bp, Artificial Sequence
  derived and/or modified sequence
cagtgaatcttgaagtgccagagagatgttacaagtgataaactatgtattatgtgttatgttaaatgactgaaacatccctgtcttctcagtgcttccctatgtcggtcctcaataataccattgctgagcctctgatcttcctcctgatgggcattccaggcctgaaagccacccagtactggatctccatccctttttgtctcctatatgttgttgccgtctctggaaatagcatgatcctgtttgtggtcctctgtgaacggagcctccataagcctatgtactatttcctctctatgctttcagccacagacctgagcttgtccctgtgtacactttctactacccttggtgtcttctggtttgaagcccgagaaatcaacctaaatgcctgcattgcccagatgttctttctacacggatttactttcatggagtctggggttctactggccatggcctttgatcgttttgtggccatctgttacccactgagatacactaccatccttaccaatgcccgaattgccaagattgggatgagcatgttgataagaaatgttgccgtcatgttgccagtcatgctctttgtcaagaggttgtccttctgcagttctatggtcctttcacattcttactgctaccatgttgatctcatccaactctcctgcacagacaataggatcaacagcatccttggtctgtttgcgcttttgtccactacagggtttgactgcccttgcatcctgctctcctatatcctgatcattcgatctgtcctcagcattgcttcctcagaagagaggcggaaagccttcaacacctgcacatcccacatcagtgctgtttccatcttctacctccctctcatcagtttgtctcttgtccatcgctatggccattcagcacctccatttgtccacatcatcatggccaatgtctttctgctaatccctcctgtgctcaaccctattatttacagtgtaaagattaagcagattcaaaaggccattatcaaggtcttaattcagaagcactccaaatctaatcatcagctatttctgattagagataaagccatttatgaataagtgctttgctacaatggagtaattgtcccaaagtgcccacac

SEQ ID NO: 21028 - DNA, 939 bp, Artificial Sequence
  derived and/or modified sequence
atgaccaacaatatcactagcacgtctatcatttttctcctaaccggcgttccaggattggaagccttccacacgtggatttctattcctttctgtttcctatctgtcactgctctcctggggaacagtttgattctgttcgctacaatcacgcaaccgagtctccatgaaccaatgtactatttcctttcaatgctcagcgccacagatctcgggctctccatttctaccttagtaaccatgctttctatattctggttcaatgtgcgggaaatctcttttaatgcctgtttatcccacatgtttttcataaagtttttcacagttatggagtctagtgttctgctcgccatggccttcgaccgcttcgtcgcagtgtccaatcccctcagatacgccatgatactcacagactcaagaatcgcccagattggtgttgccagtgtaataaggggtctcctgatgctgacacctatggtggcactgctgatccggttaagttattgccattcccaggtgctgcaccatagttactgttaccacccagacgtgatgaaactcagttgcacggacactagaatcaactccgcggtcggtctaactgctatgttttccacagtgggcgtggatctgcttttgatattgctgtcttatgtgctgatcattcgcacagtcctgtccgtggccagccctgaggagcgaaaagaaacattctccacttgcgtatctcatatagtagcctttgccatctactacatcccgctgatctctttgtctattgtacatcgatttgggaagcaggcgcctgcgtatgtccatacgatgatcgctaacacctacctcctgatctctccactgatgaacccagtcatctatagtgtgaaaaccaaacaaattcgtagggctgtgattaaaatcctgcatagcaaggagacatag

SEQ ID NO: 21029 - DNA, 1029 bp, Artificial Sequence
  derived and/or modified sequence
atgacagaaacgagtctgtcttcacagtgcttcccaatgagcgtgcttaataatactatagcagagcccttgatcttccttctcatggggatccctgggttgaaagcaacccaatactggatatccattccattttgcttgctgtatgtggttgccgtttcgggcaattcgatgatcctgtttgtggtcctgtgcgagcgcagtctgcacaaaccaatgtattatttcctgtccatgctctctgctacggacctctctctgagtctgtgcaccctgtcgactacactgggggttttttggttcgaagctcgggagattaatcttaacgcatgcatcgctcagatgttcttcctgcacggcttcaccttcatggagtccggggtgctattggcgatggccttcgaccggtttgtcgccatctgttacccgctccggtacaccaccattctgacaaatgctcgcattgcaaaaatcggcatgagcatgctgattcggaacgtggcagtgatgcttcccgtgatgctttttgtgaagaggctgagtttctgcagctctatggtcttatcccacagctactgctaccacgttgacttgatacaactgagctgtacagacaaccgcatcaacagtatattgggcctgttcgccctgctgagcaccaccggcttcgattgtccttgtatcctcctgtcttacatcttgataattcggtcagtgctctccattgcttcttccgaggagcgaagaaaggcattcaacacctgcacctcacacatatcagccgtgtctattttttatctgcctctgatcagtctttcattggtgcaccggtacggtcattctgcaccaccttttgtccacattatcatggctaacgtgttcttgttgatcccccctgtgcttaacccaatcatttactcagtaaaaattaaacaaattcagaaggccattattaaggtactgatccagaaacacagcaagagcaatcaccagctgtttctcattcgcgataaagccatctatgagtag

SEQ ID NO: 21030 - DNA, 864 bp, Artificial Sequence
  derived and/or modified sequence
gtgttcttcctgaccggcatccccggcctggagaccagacagatctggaccagcatccccttctgctgcctgtacgtgatcgccatcagcggcaacggcatgatcctgttcgtgatcatcaccgagagcagcctgcacgagcccatgtaccacttcctgagcatgctgagcttcatggacctgggcctgtgcctgagcaccctgaccaccatgctgggcatcttctggttcaacgccagagagatcagcttcgacgcctgcatcggccagatgttcttcatccacggcttcaccttcatggagagcagcgtgctgctggccatggccttcgacagattcatcgccgtgtgcaaccccctgagatacgccaccatcctgaccaacagcagaatcatcaaggtgggcttcgccatcgtgctgagaggcaccaccgccctggtgcccctgctgctgctgctgaagagactgagcttctgcagaagccacgtgctgcaccacagctactgcttccaccccgacgccatgaagctgagctgcaccgacacctggatcaacagcgccttcggcctggccatcgtgatcagcaccgccggcctggacagcgtgctgatcctgatcagctacgtgctgatcgtgagaagcgtgctgtgcatcgccagccccgaggagcagaagaaggccttcggcacctgcgtgagccacatcagcgccgtggccatcttctacatccccatgatcagcctgagccccgtgcacagattcggcaagcacgccccccccctggtgcacatgctgatcgccaacgtgtacctgctgatcccccccgtgatgaaccccatcatctacagcgtgaagaccaagtag

SEQ ID NO: 21031 - DNA, 864 bp, Artificial Sequence
  derived and/or modified sequence
gtcttcttcctgaccggaattcctgggctggaaactcggcaaatttggacttccattcccttctgctgcctgtatgtgattgccatctctggcaacgggatgattctgttcgtcatcatcacggagtcgtccctccacgagccaatgtatcactttctgtctatgctgtcatttatggacctggggctgtgtctgtccacactcacaacgatgctaggcattttctggtttaacgcgcgtgaaatctccttcgatgcctgcatcggtcagatgttctttattcacggctttacattcatggaatcatccgtgctgctcgccatggcttttgatcggtttatcgcagtatgtaacccactcagatatgccaccattctgacaaacagcagaattataaaagtgggattcgccatcgtgctccgagggactactgcccttgtccctctgctcctccttctgaaacgactgagcttctgtagatcgcacgtgttgcaccacagctattgttttcatccagatgcgatgaaactgagctgcactgatacctggataaacagtgcgttcgggcttgcaatcgtaatatctactgcaggcttggactctgtgctgatcttgatctcatacgtcttgatcgtacgctctgtcctgtgtattgcaagtcccgaagaacagaagaaagctttcggaacgtgtgtgtcccatatttcagctgtcgctattttctacatccctatgatatcgctgtctcctgtgcatcgtttcgggaagcatgcaccacccctggtgcacatgctcattgctaacgtgtacttgctgatccctcccgtaatgaaccctatcatttatagtgttaagacgaagtag

SEQ ID NO: 21032 - DNA, 864 bp, Artificial Sequence
  derived and/or modified sequence
gtcttcttcctgaccggcatccctggcctggagacccggcagatctggaccagcatccccttctgctgcctgtatgtgattgccatctctggaaatggcatgatcctgtttgtgatcatcacagagagcagcctgcacgagcccatgtaccacttcctgtccatgctgtccttcatggacctgggcctgtgcctgagcaccctgaccaccatgctgggcatcttctggttcaatgcccgggagatcagctttgatgcctgcatcggccagatgttcttcatccacggcttcaccttcatggagagctctgtgctgctggccatggcctttgaccgcttcatcgctgtgtgcaaccccctgcgctatgccaccatcctgaccaacagccgcatcatcaaggtgggctttgccatcgtgctgcggggcaccacagccctggtgcccctgctgctgctgctgaagaggctgtccttctgccgcagccacgtgctgcaccacagctactgcttccacccagatgccatgaagctgagctgcacagacacctggatcaacagcgccttcggcctggccatcgtcatcagcacagctggcctggacagcgtgctgatcctgatctcctatgtgctgattgtgcgctctgtgctgtgcatcgccagccctgaggagcagaagaaggccttcggcacctgtgtgagccacatctctgctgtggccatcttctacatccccatgatcagcctgagccctgtgcacagatttgggaagcacgccccacccctggtgcacatgctgattgccaacgtgtacctgctgatcccccctgtgatgaaccccatcatctacagcgtgaagaccaagtag

SEQ ID NO: 21033 - DNA, 864 bp, Artificial Sequence
  derived and/or modified sequence
gtgttcttcctgaccggcatccccggcctggagacccggcagatctggacttccatcccattttgttgtctctacgtaattgccatttcaggcaacgggatgatcctcttcgtaatcatcacggagtcttcattgcacgaacccatgtatcactttttgagcatgctatcttttatggatctcggcctttgcttgagcactttaacaacaatgcttggcatcttctggtttaacgcccgcgagatttctttcgatgcgtgtattggacagatgttcttcatccatggattcacatttatggagagcagcgtcttactggccatggcttttgaccgcttcatcgctgtctgtaatcccctgagatatgccactattttaactaatagcaggatcatcaaagtgggattcgcaatcgtcctgagaggtacaactgccctggtcccgttgctgcttctgctaaagcgcttgtccttctgtcgctctcacgtgctccaccactcttattgctttcatcccgacgccatgaagctaagctgcaccgacacctggataaactcggccttcgggctggctatcgtgattagcacggccggcctggacagcgtcctgattctgatctcctacgtcctcatcgtaagaagcgtcttgtgcatcgctagtcccgaagagcagaagaaagcattcgggacttgtgtgagtcacatttccgctgttgccatcttctacatcccaatgatctccttgagcccagttcatcgcttcgggaagcacgccccaccgctggtgcacatgctcattgcaaacgtgtatttgcttataccacctgtgatgaatccaattatctactctgtcaagactaagtag

SEQ ID NO: 21034 - DNA, 864 bp, Artificial Sequence
  derived and/or modified sequence
gtgtttttcctgacaggtatccccggactggagacccgtcagatctggacatctatccctttttgttgcttatacgtgatagccattagcggaaatggaatgattctgtttgtgatcatcactgagtcaagcctccacgagcccatgtatcattttctgtccatgctgtctttcatggacctcggcttgtgcctatcaacactgacaaccatgctgggtatcttctggttcaatgcccgagagatttcattcgatgcctgtatcggccagatgttcttcatacatggattcactttcatggaaagctctgtgctattggcaatggctttcgaccgctttatcgccgtgtgtaacccactgcggtacgctacgattctaactaacagtcgaattataaaggtgggctttgcgattgttctcaggggcaccaccgctctcgtgccactgctgctgctcctgaaaaggttgagcttctgccggtcgcacgtactccaccacagctattgtttccatccagacgcaatgaaactgtcttgtactgatacgtggattaatagtgcttttggcctggccatcgtgatcagcacagcgggactcgacagtgtgctgatcctcatttcctacgtgttgattgtgcgatcagtgctgtgcatcgcatccccggaggagcagaagaaggctttcggcacctgcgtgagccacatcagcgccgtggccatcttctatattccaatgattagtctcagccctgttcataggttcggtaaacacgctcccccactggttcatatgctgatcgcgaacgtgtacctcctcattccacctgtcatgaaccccattatctacagcgtgaaaaccaagtag

SEQ ID NO: 21035 - DNA, 864 bp, Artificial Sequence
  derived and/or modified sequence
gtcttcttccttactggcatccctggccttgaaacccgtcagatctggacctccatcccattctgttgtctctatgtcattgctatctctgggaatggcatgatcctgtttgtcatcatcactgagtcaagcctccatgaacccatgtatcattttctctccatgctatccttcatggacctaggtctgtgtctttctacattgaccaccatgctgggtattttctggttcaatgctcgagaaatcagttttgatgcctgcattggccaaatgttctttatccatggcttcacattcatggagtcctcagtacttttggcaatggcctttgaccgctttattgccgtctgtaacccactgagatatgccacaatcttaaccaattcacggattattaaagtgggctttgcaattgttcttaggggaacaacagctctagtgcctctactcctgctccttaagcgcctctccttctgccgtagtcatgtgctccaccattcctactgcttccaccctgatgcgatgaagctctcatgcacagacacatggatcaacagtgcatttggcctggccattgttatctctactgctggcttagactctgtcttgatcctcatctcctatgttctgatcgtccgctctgtgctctgcattgcctccccagaggagcagaaaaaggcttttggtacctgtgtctctcacatcagtgcagttgccatcttctacatccccatgatcagtttgtcaccagtgcacagatttggaaagcatgcccctccccttgtgcacatgctcattgccaatgtttatctgcttatccctcctgtaatgaatcccataatctacagtgtaaagaccaagtaa

SEQ ID NO: 21036 - protein, 321 aa, Artificial Sequence
  derived and/or modified sequence
MFLSSRMITSVSPSTSTNSSFLLTGFSGMEQQYPWLSIPFSSIYAMVLLGNCMVLHVIWTEPSLHQPMFYFLSMLALTDLCMGLSTVYTVLGILWGIIREISLDSCIAQSYFIHGLSFMESSVLLTMAFDRYIAICNPLRYSSILTNSRIIKIGLTIIGRSFFFITPPIICLKFFNYCHFHILSHSFCLHQDLLRLACSDIRFNSYYALMLVICILLLDAILILFSYILILKSVLAVASQEERHKLFQTCISHICAVLVFYIPIISLTMVHRFGKHLSPVAHVLIGNIYILFPPLMNPIIYSVKTQQIHTRMLRLFSLKRY

SEQ ID NO: 21037 - DNA, 966 bp, Artificial Sequence
  derived and/or modified sequence
atgttcctgagcagcagaatgatcaccagcgtgagccccagcaccagcaccaacagcagcttcctgctgaccggcttcagcggcatggagcagcagtacccctggctgagcatccccttcagcagcatctacgccatggtgctgctgggcaactgcatggtgctgcacgtgatctggaccgagcccagcctgcaccagcccatgttctacttcctgagcatgctggccctgaccgacctgtgcatgggcctgagcaccgtgtacaccgtgctgggcatcctgtggggcatcatcagagagatcagcctggacagctgcatcgcccagagctacttcatccacggcctgagcttcatggagagcagcgtgctgctgaccatggccttcgacagatacatcgccatctgcaaccccctgagatacagcagcatcctgaccaacagcagaatcatcaagatcggcctgaccatcatcggcagaagcttcttcttcatcaccccccccatcatctgcctgaagttcttcaactactgccacttccacatcctgagccacagcttctgcctgcaccaggacctgctgagactggcctgcagcgacatcagattcaacagctactacgccctgatgctggtgatctgcatcctgctgctggacgccatcctgatcctgttcagctacatcctgatcctgaagagcgtgctggccgtggccagccaggaggagagacacaagctgttccagacctgcatcagccacatctgcgccgtgctggtgttctacatccccatcatcagcctgaccatggtgcacagattcggcaagcacctgagccccgtggcccacgtgctgatcggcaacatctacatcctgttcccccccctgatgaaccccatcatctacagcgtgaagacccagcagatccacaccagaatgctgagactgttcagcctgaagagatactag

SEQ ID NO: 21038 - DNA, 966 bp, Artificial Sequence
  derived and/or modified sequence
atgtttctgtcctctcgcatgattacaagtgttagtccttccacctctactaattcaagctttctgctgactggtttctcggggatggagcagcagtatccatggctgtccattcctttctcctccatctacgccatggtgctgctcgggaattgcatggtgctccacgtaatatggacagaacccagccttcatcagcctatgttctacttcttatctatgctcgccctgactgacctctgcatgggcctgagcacggtatacacagttcttggcatcctgtggggcattataagagagatctctttggacagctgtattgctcagtcatacttcatccacggactgagcttcatggagtctagcgtgctccttactatggcttttgaccgttatattgcaatctgtaaccctctgagatatagcagtatcctgaccaattcaaggatcattaaaatcggccttactattatcggacggtcattcttcttcatcacgccacctatcatctgcttgaagttcttcaattattgtcacttccacatactgagccactcattctgcctgcatcaagatcttttgcgacttgcttgctcggatattaggtttaatagctactatgcactcatgttggtgatatgtatcctccttctggatgcgatactgatactattttcctacattttaatcttaaagagtgtcctcgccgtcgcctcccaggaagaaagacacaaactattccagacctgcatttcacacatatgtgccgtgcttgtcttttatatccctatcattagcctgacaatggtgcatagatttgggaaacatctgagtcctgtagcacatgtactcatagggaatatctacattttatttcccccccttatgaaccccataatttacagcgtcaaaacacagcagatccacacccgaatgttgcgcttgttctccctgaaacgttactag

SEQ ID NO: 21039 - DNA, 966 bp, Artificial Sequence
  derived and/or modified sequence
atgttcctgagcagcaggatgatcacctctgtgagccccagcaccagcaccaacagcagcttcctgctgaccggcttcagcggcatggagcagcagtacccctggctgagcatccccttcagcagcatctatgccatggtgctgctgggcaactgcatggtgctgcacgtgatctggacagagcccagcctgcaccagcccatgttctacttcctgtccatgctggccctgacagacctgtgcatgggcctgagcacagtgtacacagtgctgggcatcctgtggggcatcatccgggagatcagcctggacagctgcatcgcccagagctacttcatccacggcctgtccttcatggagagctctgtgctgctgaccatggcctttgaccgctacatcgccatctgcaaccccctgcgctacagcagcatcctgaccaacagccgcatcatcaagattggcctgaccatcatcggccgctccttcttcttcatcaccccacccatcatctgcctgaagttcttcaactactgccacttccacatcctgagccacagcttctgcctgcaccaggacctgctgcggctggcctgcagcgacatccgcttcaacagctactatgccctgatgctggtgatctgcatcctgctgctggatgccatcctgatcctcttctcctacatcctgatcctgaagtctgtgctggccgtggccagccaggaggagcggcacaagctgttccagacctgcatcagccacatctgtgctgtgctggtgttctacatccccatcatcagcctgaccatggtgcacagatttgggaagcacctgagccctgtggcccacgtgctgattggcaacatctacatcctcttcccccccctgatgaaccccatcatctacagcgtgaagacccagcagatccacaccaggatgctgcggctcttcagcctgaagcgctactag

SEQ ID NO: 21040 - DNA, 966 bp, Artificial Sequence
  derived and/or modified sequence
atgttcctgagcagccggatgatcaccagcgtgagccccagcacctctacgaattcatcattcctgctgactgggtttagcggcatggaacaacagtatccttggctgagtatcccattcagctccatatacgcgatggtcctcctaggcaattgcatggtcttgcacgtgatctggaccgagccatccttgcaccaacccatgttctattttctctccatgttagcgttaacagacctgtgtatgggactcagcaccgtttacaccgtactgggtatcctgtggggcataatccgtgagatctctctggacagttgtatagctcaatcctattttatccacggcttgagcttcatggagtcaagcgtgttgttgactatggcattcgatcggtacatcgcgatttgcaatcctctccggtactcctctatcctgacaaactcgcgtataatcaaaattgggcttaccattattggaaggtctttcttcttcataacacctcccattatttgcctgaagttttttaactactgccacttccacattctgagtcacagcttttgtcttcaccaggatctcctgaggttagcatgctccgacatcagattcaactcctattacgccctgatgctggtcatctgcatactgctcctggacgccattctcatattgtttagttatatcctgattttgaaatcggtgttagccgtggcctcccaggaggaaagacacaagctgtttcaaacttgtattagccacatctgtgctgtgctggtcttttatatcccaattatttcgctgactatggttcataggtttggcaaacatctgtcacctgtcgctcatgtacttatcggaaatatctacattctcttcccaccactgatgaacccgatcatctacagcgtcaagacccaacagatccatacaaggatgttgaggctgttcagcctcaagagatactag

SEQ ID NO: 21041 - DNA, 966 bp, Artificial Sequence
  derived and/or modified sequence
atgtttctcagttccagaatgattacttcagtaagccctagcaccagcacgaattcttcctttcttctcactggattttctggcatggagcagcaatacccctggctttccatccccttctcctcaatctatgccatggtgcttttgggcaattgcatggttctccatgtgatatggactgagccaagcctgcaccagcctatgttttacttcctgtccatgctggccctcactgacctgtgcatggggctgtccactgtgtacacagtgctggggatcctgtgggggatcattcgagagatcagcttggattcctgcattgcccagtcctatttcatccatggtctgtccttcatggagtcctctgtcctcctcactatggcctttgaccggtacattgcaatttgcaatccactacgttattcctccatcctgactaattccagaattatcaaaattgggctcactataataggtaggagttttttctttattacaccccccatcatctgtctgaaattttttaattactgtcatttccacatcctttctcactctttctgcctgcaccaggatcttctccgcttagcctgttcagacatccgattcaatagttactatgccctgatgctggttatttgcatactgttgttggatgctatactcatccttttctcctacatcctgattcttaagtcagtcctggcagttgcctctcaggaagagaggcataaattatttcagacctgcatctcccacatctgtgctgtccttgtgttctacatccctatcattagcctcacaatggtgcaccgttttggcaagcacctttcccccgtggcccacgttctcattggcaacatctacatccttttcccacctttaatgaatcccatcatctacagtgtcaagacccaacagattcataccagaatgcttagactcttttctctgaaaagatattga

SEQ ID NO: 21042 - DNA, 966 bp, Artificial Sequence
  derived and/or modified sequence
atgtttctgtcctctcgaatgataacttcggtgtctccatccaccagcactaacagttctttcctcttgactggattctcaggtatggagcagcagtatccctggctgagcattcccttttcctctatctacgccatggtgcttctggggaattgcatggtactccacgtgatctggactgagccaagcttgcaccagccaatgttttactttttaagtatgctggccttgacggatctgtgtatgggactctcaaccgtgtacactgttctcggtatcctctggggcattatacgtgagatcagccttgacagctgcatcgctcaaagctacttcatccacggtctgtccttcatggaatcgtccgtcctgctgacgatggccttcgatagatacattgccatctgtaaccctcttaggtactcctcgattctaacaaacagcaggataatcaaaattggactgaccatcatcggcagatcatttttctttattactcctcctataatatgtcttaaattttttaattattgccacttccatattttatctcacagtttctgccttcaccaggatttgcttagactggcctgttccgatatacgctttaacagctattacgccctcatgctggtgatatgcatattgctgctggacgcaatcctgattttgttctcgtatattctaatcctgaagagcgtgctggccgtggcctctcaggaagagagacacaaacttttccaaacctgcatttcgcacatatgcgctgttctggtattctatattcccataatatccctaaccatggtacaccgttttggaaaacacctgagcccagtggctcacgtgctcatcgggaatatctacatcctgttcccacctttgatgaaccccatcatttattctgtgaaaacgcaacaaatccatacgcgtatgctgcgactgttttctctgaagaggtactag

SEQ ID NO: 21043 - protein, 314 aa, Artificial Sequence
  derived and/or modified sequence
MPTVNHSGTSHTVFHLLGIPGLQDQHMWISIPFFISYVTALLGNSLLIFIILTKRSLHEPMYLFLCMLAGADIVLSTCTIPQALAIFWFRAGDISLDRCITQLFFIHSTFISESGILLVMAFDHYIAICYPLRYTTILTNALIKKICVTVSLRSYGTIFPIIFLLKRLTFCQNNIIPHTFCEHIGLAKYACNDIRINIWYGFSILMSTVVLDVVLIFISYMLILHAVFHMPSPDACHKALNTFGSHVCIIILFYGSGIFTILTQRFGRHIPPCIHIPLANVCILAPPMLNPIIYGIKTKQIQEQVVQFLFIKQK

SEQ ID NO: 21044 - DNA, 945 bp, Artificial Sequence
  derived and/or modified sequence
atgcccaccgtgaaccacagcggcaccagccacaccgtgttccacctgctgggcatccccggcctgcaggaccagcacatgtggatcagcatccccttcttcatcagctacgtgaccgccctgctgggcaacagcctgctgatcttcatcatcctgaccaagagaagcctgcacgagcccatgtacctgttcctgtgcatgctggccggcgccgacatcgtgctgagcacctgcaccatcccccaggccctggccatcttctggttcagagccggcgacatcagcctggacagatgcatcacccagctgttcttcatccacagcaccttcatcagcgagagcggcatcctgctggtgatggccttcgaccactacatcgccatctgctaccccctgagatacaccaccatcctgaccaacgccctgatcaagaagatctgcgtgaccgtgagcctgagaagctacggcaccatcttccccatcatcttcctgctgaagagactgaccttctgccagaacaacatcatcccccacaccttctgcgagcacatcggcctggccaagtacgcctgcaacgacatcagaatcaacatctggtacggcttcagcatcctgatgagcaccgtggtgctggacgtggtgctgatcttcatcagctacatgctgatcctgcacgccgtgttccacatgcccagccccgacgcctgccacaaggccctgaacaccttcggcagccacgtgtgcatcatcatcctgttctacggcagcggcatcttcaccatcctgacccagagattcggcagacacatccccccctgcatccacatccccctggccaacgtgtgcatcctggccccccccatgctgaaccccatcatctacggcatcaagaccaagcagatccaggagcaggtggtgcagttcctgttcatcaagcagaagtag

SEQ ID NO: 21045 - DNA, 945 bp, Artificial Sequence
  derived and/or modified sequence
atgccaaccgtcaatcattccgggacatctcatactgtgttccacttgttaggtataccaggcctgcaggatcaacacatgtggatctctattccattctttatcagctacgtcacagctctcctagggaattcgctgttgatctttatcatccttactaagagatccctgcatgagcccatgtatttattcctgtgtatgctggcaggagccgacatcgttctctccacttgtaccattccccaggcgctggcaattttttggtttagggccggcgatatttctctggatcgctgtatcacccagcttttttttatccatagtacatttatttctgaatcgggtatattgctggtgatggccttcgatcactatattgccatctgctaccctttaaggtataccacaattcttacaaacgcccttatcaaaaagatctgtgtaactgtgtcgctgaggtcttatggcaccatttttcccattatctttctcttgaaacggttgaccttttgtcaaaacaatatcattccccacacattctgcgagcacatcgggcttgctaaatacgcctgcaatgatattcgtattaacatttggtacgggttttctatcttaatgtctactgtggtgctggatgtggtgttgatatttatctcgtacatgctgatcttgcatgctgtgtttcacatgccttcaccagatgcttgccataaggctctcaatacctttggaagtcacgtgtgcatcataatccttttctacggctccggtatattcaccatcttgacccaaaggttcggacgacacataccaccctgcatccatattcctctcgcaaacgtatgcattcttgcaccacctatgctgaaccctatcatttatggaataaagacaaagcaaattcaagagcaggtggtacaattcttatttatcaagcagaagtag

SEQ ID NO: 21046 - DNA, 945 bp, Artificial Sequence
  derived and/or modified sequence
atgcccaccgtgaaccacagcggcaccagccacacagtgttccacctgctgggcatccctggcctgcaggaccagcacatgtggatcagcatccccttcttcatctcctatgtgacagccctgctgggcaacagcctgctgatcttcatcatcctgaccaagaggagcctgcacgagcccatgtacctgttcctgtgcatgctggccggggctgacatcgtgctgagcacctgcaccatcccccaggccctggccatcttctggttccgggccggggacatcagcctggaccgctgcatcacccagctgttcttcatccacagcaccttcatcagcgagagcggcatcctgctggtgatggcctttgaccactacatcgccatctgctaccccctgcgctacaccaccatcctgaccaatgccctgatcaagaagatctgtgtgacagtgtccctgcggagctatggcaccatcttccccatcatcttcctgctgaagaggctgaccttctgccagaacaacatcatcccccacaccttctgtgagcacatcggcctggccaagtatgcctgcaatgacatccgcatcaacatctggtacggcttcagcatcctgatgagcacagtggtgctggatgtggtgctgatcttcatctcctacatgctgatcctgcatgctgtgttccacatgcccagcccagatgcctgccacaaggccctgaacaccttcggcagccacgtgtgcatcatcatcctcttctacggcagcggcatcttcaccatcctgacccagcgcttcggccgccacatccccccctgcatccacatccccctggccaacgtgtgcatcctggccccacccatgctgaaccccatcatctacggcatcaagaccaagcagatccaggagcaggtggtgcagttcctgttcatcaagcagaagtag

SEQ ID NO: 21047 - DNA, 945 bp, Artificial Sequence
  derived and/or modified sequence
atgcccaccgtgaaccacagcggcaccagccacaccgtgttccacctcttgggcattccaggcttgcaggatcagcacatgtggatttctatcccctttttcatctcctacgtgaccgccctcttgggtaactccctgctcattttcatcattttaacaaaaagatctttgcatgagcccatgtacctgttcctctgcatgctggctggtgccgacattgtcctgtctacttgtaccattccacaagcgcttgcaatattttggttccgagccggtgacatctcactggatcgatgcatcacccagttgttcttcatacattccactttcatctctgaaagtggtatcttactagtcatggctttcgatcactatattgctatttgctacccattgcggtacacaaccatcctcaccaatgcccttattaaaaaaatctgtgtgactgttagtctgagaagctatggaaccatctttcccataatcttccttctgaaacggctgaccttctgtcagaataatatcataccacacacattctgtgagcatattgggctggcgaaatatgcctgtaacgacattaggatcaacatatggtacggtttctcaattctcatgtccaccgtggtccttgacgtggtactgatctttattagttatatgctgattttgcacgctgtttttcacatgccctcccccgatgcttgccacaaagccctaaacacctttggatcacacgtgtgtatcatcatcttattttatggaagcggcatttttaccattttaacccagcgtttcgggagacatattcccccatgtatacatattcccctggccaatgtttgtattctcgcgcctcctatgctgaaccccattatctacggtataaaaaccaaacaaattcaagagcaggttgtgcaattcctcttcattaagcaaaaatag

SEQ ID NO: 21048 - DNA, 1124 bp, Artificial Sequence
  derived and/or modified sequence
agctcctggtgacatcgcaaagaatgttgcagattttatcttcttctacctctgtgagtaggaggtgaggttctgaaagttctccccagctatgcctactgtaaaccacagtggcactagccacacagtcttccacttgctgggcatccctggcctacaggaccagcacatgtggatttctatcccattcttcatttcctatgtcaccgcccttcttgggaacagcctgctcatcttcattatcctcacaaagcgcagcctccatgaacccatgtacctcttcctctgcatgctggctggagcagacattgtcctctccacgtgcaccattcctcaggccttagctatcttctggttccgtgctggggacatctccctggatcgttgcatcactcagctcttcttcatccattccaccttcatctctgagtcagggatcttgctggtgatggcctttgaccactatattgccatatgctacccactgaggtacaccaccattcttacaaatgctctgatcaagaaaatttgtgtgactgtctctctgagaagttatggtacaattttccctatcatatttcttttaaaaagattgactttctgccagaataatattattccacacaccttttgtgaacacattggcctagccaaatatgcatgtaatgacattcgaataaacatttggtatgggttttccattctaatgtcgacggtggtcttagatgttgtactaatttttatttcctatatgctgattctccatgctgtcttccacatgccttctccagatgcttgccacaaagctctcaacacatttggctcccatgtctgcatcatcatcctcttttatgggtctggcatcttcacaatccttacccagaggtttggacgccacattccaccttgtatccacatcccgttggctaatgtctgcattctggctccacctatgctgaatcccattatttatgggatcaaaaccaagcaaatccaggaacaggtggttcagtttttgtttataaaacagaaataactttggtttaagaactgagttttcagaatctctagctatctggtaagtgggtatgaaagtggtagatgggagaggtcagctgataccg

SEQ ID NO: 21049 - DNA, 945 bp, Artificial Sequence
  derived and/or modified sequence
atgccaacagtcaaccacagcggaaccagccatacggtgttccaccttctcgggattcccggactgcaggatcaacacatgtggatatccatcccttttttcatctcttatgtgaccgctcttttgggtaattcacttcttatattcattatcctgaccaaacgctcacttcatgagcccatgtacctgtttctgtgtatgctggctggtgcggacattgtgctctcgacatgtaccattccacaggcactagccatcttttggttccgtgcgggtgatatatcactggatcggtgtatcacacagttattcttcattcatagcaccttcatttcagagtctggaatcttgttggtaatggcctttgaccattacatcgccatatgctatccactcagatacactacgatcttaaccaacgcccttatcaaaaagatctgtgtcacagtgtctcttcgcagttacggcacaattttcccaatcatctttctgctcaagcgcctgacattttgccagaacaacatcatccctcacacattttgcgagcatattgggttggcgaagtacgcatgtaatgacattcggattaacatttggtatggattcagcattcttatgtcgacagtggttcttgacgtcgttctgatttttatatcatacatgctcatcctccacgctgttttccacatgccatcgcctgacgcctgtcacaaggctctgaacacattcggttctcacgtctgcatcataattcttttctatggttctgggatattcaccattctgacgcagcggttcgggagacacataccgccatgcatccatatcccattggcaaatgtctgtattctggcgccacccatgctcaatcccatcatctatggcatcaagaccaaacaaattcaggagcaggtagttcagttcctctttatcaagcagaagtag

SEQ ID NO: 21050 - protein, 318 aa, Artificial Sequence
  derived and/or modified sequence
MSDSNLSDNHLPDTFFLTGIPGLEAAHFWIAIPFCAMYLVALVGNAALILVIAMDNALHAPMYLFLCLLSLTDLALSSTTVPKMLAILWLHAGEISFGGCLAQMFCVHSIYALESSILLAMAFDRYVAICNPLRYTTILNHAVIGRIGFVGLFRSVAIVSPFIFLLRRLPYCGHRVMTHTYCEHMGIARLACANITVNIVYGLTVALLAMGLDSILIAISYGFILHAVFHLPSHDAQHKALSTCGSHIGIILVFYIPAFFSFLTHRFGHHEVPKHVHIFLANLYVLVPPVLNPILYGARTKEIRSRLLKLLHLGKTSI

SEQ ID NO: 21051 - DNA, 957 bp, Artificial Sequence
  derived and/or modified sequence
atgagcgacagcaacctgagcgacaaccacctgcccgacaccttcttcctgaccggcatccccggcctggaggccgcccacttctggatcgccatccccttctgcgccatgtacctggtggccctggtgggcaacgccgccctgatcctggtgatcgccatggacaacgccctgcacgcccccatgtacctgttcctgtgcctgctgagcctgaccgacctggccctgagcagcaccaccgtgcccaagatgctggccatcctgtggctgcacgccggcgagatcagcttcggcggctgcctggcccagatgttctgcgtgcacagcatctacgccctggagagcagcatcctgctggccatggccttcgacagatacgtggccatctgcaaccccctgagatacaccaccatcctgaaccacgccgtgatcggcagaatcggcttcgtgggcctgttcagaagcgtggccatcgtgagccccttcatcttcctgctgagaagactgccctactgcggccacagagtgatgacccacacctactgcgagcacatgggcatcgccagactggcctgcgccaacatcaccgtgaacatcgtgtacggcctgaccgtggccctgctggccatgggcctggacagcatcctgatcgccatcagctacggcttcatcctgcacgccgtgttccacctgcccagccacgacgcccagcacaaggccctgagcacctgcggcagccacatcggcatcatcctggtgttctacatccccgccttcttcagcttcctgacccacagattcggccaccacgaggtgcccaagcacgtgcacatcttcctggccaacctgtacgtgctggtgccccccgtgctgaaccccatcctgtacggcgccagaaccaaggagatcagaagcagactgctgaagctgctgcacctgggcaagaccagcatctag

SEQ ID NO: 21052 - DNA, 957 bp, Artificial Sequence
  derived and/or modified sequence
atgagtgattccaatctgtcagacaatcatctacccgacactttctttttgactggaatccctggtctcgaagctgctcacttttggatcgcaattcccttctgcgcaatgtacctggtggcccttgtcggaaacgctgcgctgatcctggtaatagccatggataacgcactccatgctcccatgtacctcttcctatgccttctgtcattgaccgacttggccctcagctcgaccacagtgcctaagatgctggctatcttgtggctgcacgcaggagaaattagttttggaggttgcttggctcaaatgttctgcgtccactcaatctacgccctggagtccagcatcttgctggctatggcattcgaccgctatgtggcgatctgcaaccccctccgctacaccaccattctcaatcatgccgtcataggcagaatcggatttgtaggtctgttcagatccgttgccatcgtgtcacccttcatttttttactaagacgcttgccatactgtggtcaccgcgtaatgactcatacttactgtgaacacatggggatagcacgtttggcttgtgcaaacataactgtgaatattgtctatggtctgactgtcgcattattggctatgggcctggacagtattctgattgcgataagctatggcttcatcctgcatgccgtgttccatttgccctcacatgatgcccagcataaggccctctcgacttgtggctcgcacattggcattatcctggtgttctacattcccgcattttttagctttctcacccacaggttcggccaccatgaggtaccaaaacacgtgcatatcttcttggccaatctctatgtgctcgtgccaccagtcctcaaccctatcctgtatggagcacgaaccaaggagatccggtctcgattgctcaaactcctacacctgggtaaaactagcatctag

SEQ ID NO: 21053 - DNA, 957 bp, Artificial Sequence
  derived and/or modified sequence
atgtctgacagcaacctgagtgacaaccacctgcctgacaccttcttcctgaccggcatccctggcctggaggccgcccacttctggatcgccatccccttctgtgccatgtacctggtggccctggtgggcaatgctgccctgatcctggtgattgccatggacaatgccctgcacgcccccatgtacctgttcctgtgcctgctgagcctgacagacctggccctgagcagcaccaccgtgcccaagatgctggccatcctgtggctgcacgccggggagatcagctttggaggctgcctggcccagatgttctgtgtgcacagcatctatgccctggagagcagcatcctgctggccatggcctttgaccgctacgtggccatctgcaaccccctgcgctacaccaccatcctgaaccacgccgtcatcggcagaattggatttgtgggcctcttccgctctgtggccatcgtgagccccttcatcttcctgctgcggcggctgccctactgcggccaccgggtgatgacccacacctactgtgagcacatgggcatcgcccggctggcctgtgccaacatcaccgtgaacatcgtgtatggcctgactgtggccctgctggccatgggcctggacagcatcctgattgccatctcctatggcttcatcctgcatgctgtgttccacctgcccagccatgatgcccagcacaaggccctgagcacctgtggcagccacatcggcatcatcctggtgttctacatcccagccttcttctccttcctgacccacagatttggccaccacgaggtgcccaagcacgtgcacatcttcctggccaacctgtatgtgctggtgccccctgtgctgaaccccatcctgtatggagcccggaccaaggagatccgcagccggctgctgaagctgctgcacctgggcaagaccagcatctag

SEQ ID NO: 21054 - DNA, 957 bp, Artificial Sequence
  derived and/or modified sequence
atgagcgacagcaacctgagcgacaaccacctgcccgacaccttcttcctcacaggtatacccgggttagaggctgctcatttctggatagccattccgttttgcgccatgtatttagttgcacttgtgggcaacgccgctctgattctggtgattgccatggacaacgcgcttcacgcgccaatgtacctcttcctatgcctccttagtctgacagatttagctctgtcatctacaacagtcccaaagatgttggccatactgtggcttcacgccggtgagatcagttttgggggctgtctggctcaaatgttctgcgtgcatagcatctacgcactagaatccagtatcctgttggctatggctttcgatcgttatgttgccatctgtaaccctctgcggtacaccacgattctgaatcacgccgtgatcggtcggatcggattcgttggcttgtttcgcagcgttgcaattgtgagcccattcattttcctgctgagacgcctgccctattgtggtcacagggtgatgacacatacttactgcgagcacatgggaattgcccgattggcatgcgcaaatatcaccgtgaacatagtttacgggttgaccgtcgcccttctcgcaatgggcctcgattcaattttgatcgctatttcatacgggttcatcctgcacgcggtttttcacttgccctctcacgatgcacagcacaaggcgctaagcacgtgtgggagccatatcggtatcatcctggttttttacattcctgcgtttttttctttcctaactcaccgatttggacaccacgaggtgcccaaacatgtacatatcttcctggcaaacctgtatgtactcgtgccgccagttttgaaccccatcctgtatggggctcgcacaaaggagatccgaagccgcctgcttaaactgctgcacttaggaaaaacctcaatatag

SEQ ID NO: 21055 - DNA, 1065 bp, Artificial Sequence
  derived and/or modified sequence
agcccttcatttgccaggaagaatgtcagattccaacctcagtgataaccatcttccagacaccttcttcttaacagggatcccagggctggaggctgcccacttctggattgccatccctttctgtgccatgtatcttgtagcactggttggaaatgctgccctcatcctggtcattgccatggacaatgctcttcatgcacctatgtacctcttcctctgccttctctcactcacagacctggctctcagttctaccactgtgcccaagatgctggccattttgtggctccatgctggtgagatttcctttggtggatgcctggcccagatgttttgtgtccattctatctatgctctggagtcctcaattctacttgccatggcctttgataggtatgtggctatctgtaacccattaaggtacacaaccattctcaaccatgctgtcataggcagaattggctttgttgggctattccgtagtgtggctattgtctcccccttcatcttcttgctgaggcgactcccctactgtggtcaccgtgtcatgacacacacatactgtgagcatatgggcattgcccgactggcctgtgccaacatcactgtcaatattgtctatgggctaactgtggctctgctggccatgggactggattccattctcattgccatttcctatggctttatcctccatgcagtctttcatcttccatctcatgatgcccagcacaaagctctgagtacctgtggctcccacattggcatcatcctggttttctacatccctgccttcttctccttcctcacccaccgctttggtcaccacgaagtccccaagcatgtgcacatctttctggctaatctctatgtgctggtgcctcctgtactcaatcctattctctatggagctagaaccaaggagattcggagtcgacttctaaaactgcttcacctggggaagacttcaatatgaatgctgagcagaagttggagatttaaaaaaaagtgtaggatggctgtctagatacatttacatggacacacagtgatgatgtgaaa

SEQ ID NO: 21056 - DNA, 957 bp, Artificial Sequence
  derived and/or modified sequence
atgagcgatagtaatctgtccgacaaccacctgccagacaccttcttccttaccggcatcccagggctggaggcagctcatttttggatcgccatacccttctgcgctatgtacctggtggcactggtgggcaatgccgctctaatactcgttatcgcaatggataacgcattgcacgctcccatgtacttgttcctttgccttttatctctgaccgacctggctctcagctccacaactgtgcctaagatgctcgctatcctgtggctgcacgctggtgagatatcttttggtggttgcttggcccagatgttctgtgtgcacagtatatatgcgttggaaagttctattcttctggcgatggctttcgatcgctacgtcgccatctgcaacccgctacggtacacgactatactgaaccatgctgtaataggcagaatcggtttcgtgggccttttccggtctgttgcaatcgtgagcccctttatcttcctgctgcgccgactgccctactgtggtcacagggtaatgactcatacctattgtgaacacatgggaattgcgaggctggcctgcgcaaatattaccgtgaacatagtctacggactcactgtggctctgctggcgatgggtttagacagcatactcatcgccatcagctacggatttatccttcatgccgtgttccacctgccttcccacgatgcccagcacaaggcactgagtacatgtggctctcatattgggatcattttagtattctatattccagccttcttcagtttcctaacacatcggttcgggcaccacgaggtgccaaagcatgtgcatatctttcttgctaacctatatgttctcgtccctccggtgctgaatcccatcctttatggtgccaggaccaaggagattagatcccgcctcctcaagctcttgcatctcgggaagactagtatctag

SEQ ID NO: 21057 - protein, 313 aa, Artificial Sequence
  derived and/or modified sequence
MPIANDTQFHTSSFLLLGIPGLEDVHIWIGFPFFSVYLIALLGNAAIFFVIQTEQSLHEPMYYCLAMLDSIDLSLSTATIPKMLGIFWFNIKEISFGGYLSQMFFIHFFTVMESIVLVAMAFDRYIAICKPLWYTMILTSKIISLIAGIAVLRSLYMVIPLVFLLLRLPFCGHRIIPHTYCEHMGIARLACASIKVNIMFGLGSISLLLLDVLLIILSHIRILYAVFCLPSWEARLKALNTCGSHIGVILAFSTPAFFSFFTHCFGHDIPQYIHIFLANLYVVVPPTLNPVIYGVRTKHIRETVLRIFFKTDH

SEQ ID NO: 21058 - protein, 317 aa, Artificial Sequence
  derived and/or modified sequence
MEKRMPIANDTQFHTSSFLLLGIPGLEDVHIWIGFPFFSVYLIALLGNAAIFFVIQTEQSLHEPMYYCLAMLDSIDLSLSTATIPKMLGIFWFNIKEISFGGYLSQMFFIHFFTVMESIVLVAMAFDRYIAICKPLWYTMILTSKIISLIAGIAVLRSLYMVIPLVFLLLRLPFCGHRIIPHTYCEHMGIARLACASIKVNIMFGLGSISLLLLDVLLIILSHIRILYAVFCLPSWEARLKALNTCGSHIGVILAFSTPAFFSFFTHCFGHDIPQYIHIFLANLYVVVPPTLNPVIYGVRTKHIRETVLRIFFKTDH

SEQ ID NO: 21059 - DNA, 942 bp, Artificial Sequence
  derived and/or modified sequence
atgcccatcgccaacgacacccagttccacaccagcagcttcctgctgctgggcatccccggcctggaggacgtgcacatctggatcggcttccccttcttcagcgtgtacctgatcgccctgctgggcaacgccgccatcttcttcgtgatccagaccgagcagagcctgcacgagcccatgtactactgcctggccatgctggacagcatcgacctgagcctgagcaccgccaccatccccaagatgctgggcatcttctggttcaacatcaaggagatcagcttcggcggctacctgagccagatgttcttcatccacttcttcaccgtgatggagagcatcgtgctggtggccatggccttcgacagatacatcgccatctgcaagcccctgtggtacaccatgatcctgaccagcaagatcatcagcctgatcgccggcatcgccgtgctgagaagcctgtacatggtgatccccctggtgttcctgctgctgagactgcccttctgcggccacagaatcatcccccacacctactgcgagcacatgggcatcgccagactggcctgcgccagcatcaaggtgaacatcatgttcggcctgggcagcatcagcctgctgctgctggacgtgctgctgatcatcctgagccacatcagaatcctgtacgccgtgttctgcctgcccagctgggaggccagactgaaggccctgaacacctgcggcagccacatcggcgtgatcctggccttcagcacccccgccttcttcagcttcttcacccactgcttcggccacgacatcccccagtacatccacatcttcctggccaacctgtacgtggtggtgccccccaccctgaaccccgtgatctacggcgtgagaaccaagcacatcagagagaccgtgctgagaatcttcttcaagaccgaccactag

SEQ ID NO: 21060 - DNA, 954 bp, Artificial Sequence
  derived and/or modified sequence
atggagaagagaatgcccatcgccaacgacacccagttccacaccagcagcttcctgctgctgggcatccccggcctggaggacgtgcacatctggatcggcttccccttcttcagcgtgtacctgatcgccctgctgggcaacgccgccatcttcttcgtgatccagaccgagcagagcctgcacgagcccatgtactactgcctggccatgctggacagcatcgacctgagcctgagcaccgccaccatccccaagatgctgggcatcttctggttcaacatcaaggagatcagcttcggcggctacctgagccagatgttcttcatccacttcttcaccgtgatggagagcatcgtgctggtggccatggccttcgacagatacatcgccatctgcaagcccctgtggtacaccatgatcctgaccagcaagatcatcagcctgatcgccggcatcgccgtgctgagaagcctgtacatggtgatccccctggtgttcctgctgctgagactgcccttctgcggccacagaatcatcccccacacctactgcgagcacatgggcatcgccagactggcctgcgccagcatcaaggtgaacatcatgttcggcctgggcagcatcagcctgctgctgctggacgtgctgctgatcatcctgagccacatcagaatcctgtacgccgtgttctgcctgcccagctgggaggccagactgaaggccctgaacacctgcggcagccacatcggcgtgatcctggccttcagcacccccgccttcttcagcttcttcacccactgcttcggccacgacatcccccagtacatccacatcttcctggccaacctgtacgtggtggtgccccccaccctgaaccccgtgatctacggcgtgagaaccaagcacatcagagagaccgtgctgagaatcttcttcaagaccgaccactag

SEQ ID NO: 21061 - DNA, 942 bp, Artificial Sequence
  derived and/or modified sequence
atgcccatagctaatgacactcagttccacacctcctcttttctcttactcggaataccaggtctcgaagatgtgcacatttggattgggttcccattctttagcgtgtatcttatcgcactcctcggcaatgccgctatcttttttgtgatccagaccgagcagtccctacatgaaccgatgtattactgcctggccatgctggactccatcgaccttagcctgagcactgcaacgattcccaagatgctcggcattttctggttcaatatcaaggaaatctcttttggtggttacctttctcaaatgttctttattcacttttttaccgtgatggagtcgattgtcctcgtggccatggccttcgataggtatattgcgatttgtaaacctctgtggtataccatgatcctgacctcaaagataatcagcctcattgccgggattgctgttctccgatccctctacatggtcatacccctggtgttcctcctcttaagacttccattctgtgggcaccgcattatcccacacacctattgtgagcacatgggtatagccagactggcttgtgcatccattaaggtgaacattatgttcgggctggggagcataagcctacttcttttggacgtgcttctgattattctgagccacattaggatcctctacgccgtcttctgcctgccgtcctgggaagcgagactgaaggcacttaacacttgcggttcccacattggagtgattctggccttttcaaccccagcatttttctctttcttcacccactgtttcggacacgacattccgcagtatatccacatttttttggccaatctgtatgtggtggtgccacccaccttgaaccccgtgatttatggagtgcggaccaaacatatccgggaaacagtccttcgcatcttcttcaagaccgatcactag

SEQ ID NO: 21062 - DNA, 954 bp, Artificial Sequence
  derived and/or modified sequence
atggagaaacggatgcctatcgcaaacgatactcagttccatacatctagcttccttctgctcggcattcccggcctcgaggatgtgcacatttggatcggcttcccttttttctcagtctatctgatagctctactaggtaacgccgccattttcttcgttattcagacagagcagtcattgcatgaaccaatgtattactgtctcgccatgctcgactctatcgatcttagcctctcaacagcgaccattccaaagatgctcggcatcttctggttcaacattaaggaaatttccttcggtggatatctttcccagatgttcttcattcatttctttactgtgatggaaagtatcgtgctggtagctatggctttcgaccgatatatcgcaatttgcaaacccctgtggtatactatgattctcacttccaagataatttctctcatcgcaggcattgcagttttacgctcactgtatatggtaatcccactggtgttcctattgctgcggcttccgttctgtgggcacaggatcatcccacatacttattgcgaacatatgggaattgccaggttggcatgtgcttccatcaaggtgaacattatgtttggcctagggtcaattagcctgttgttattagatgtgctcctaatcatactcagtcacattcgtattctgtacgctgtcttctgtttgccaagctgggaggcaaggcttaaagcccttaacacctgtggcagtcatatcggtgtaatcctcgctttttcaacgcccgccttcttcagtttttttacccactgcttcggtcacgacatcccacagtacatccacatcttcctagctaacctctatgtcgttgttcctccaacgttgaaccccgtcatctatggagttcggacgaaacacatcagagagacagtcctccgcattttctttaagactgatcattag

SEQ ID NO: 21063 - DNA, 942 bp, Artificial Sequence
  derived and/or modified sequence
atgcccatcgccaatgacacccagttccacaccagcagcttcctgctgctgggcatccctggcctggaggatgtgcacatctggattggcttccccttcttctctgtgtacctgattgccctgctgggcaatgctgccatcttctttgtgatccagacagagcagagcctgcacgagcccatgtactactgcctggccatgctggacagcattgacctgagcctgagcacagccaccatccccaagatgctgggcatcttctggttcaacatcaaggagatcagctttggaggctacctgagccagatgttcttcatccacttcttcaccgtgatggagagcatcgtgctggtggccatggcctttgaccgctacatcgccatctgcaagcccctgtggtacaccatgatcctgaccagcaagatcatcagcctgattgctggcattgctgtgctgcggagcctgtacatggtgatccccctggtgttcctgctgctgcggctgcccttctgtggccaccgcatcatcccccacacctactgtgagcacatgggcatcgcccggctggcctgtgccagcatcaaggtgaacatcatgtttggcctgggcagcatcagcctgctgctgctggatgtgctgctgatcatcctgagccacatccgcatcctgtatgctgtgttctgcctgcccagctgggaggcccggctgaaggccctgaacacctgtggcagccacatcggggtcatcctggccttcagcaccccagccttcttctccttcttcacccactgctttggacatgacatcccccagtacatccacatcttcctggccaacctgtatgtggtggtgccccccaccctgaaccctgtgatctatggagtgaggaccaagcacatccgggagaccgtgctgcgcatcttcttcaagacagaccactag

SEQ ID NO: 21064 - DNA, 954 bp, Artificial Sequence
  derived and/or modified sequence
atggagaagaggatgcccatcgccaatgacacccagttccacaccagcagcttcctgctgctgggcatccctggcctggaggatgtgcacatctggattggcttccccttcttctctgtgtacctgattgccctgctgggcaatgctgccatcttctttgtgatccagacagagcagagcctgcacgagcccatgtactactgcctggccatgctggacagcattgacctgagcctgagcacagccaccatccccaagatgctgggcatcttctggttcaacatcaaggagatcagctttggaggctacctgagccagatgttcttcatccacttcttcaccgtgatggagagcatcgtgctggtggccatggcctttgaccgctacatcgccatctgcaagcccctgtggtacaccatgatcctgaccagcaagatcatcagcctgattgctggcattgctgtgctgcggagcctgtacatggtgatccccctggtgttcctgctgctgcggctgcccttctgtggccaccgcatcatcccccacacctactgtgagcacatgggcatcgcccggctggcctgtgccagcatcaaggtgaacatcatgtttggcctgggcagcatcagcctgctgctgctggatgtgctgctgatcatcctgagccacatccgcatcctgtatgctgtgttctgcctgcccagctgggaggcccggctgaaggccctgaacacctgtggcagccacatcggggtcatcctggccttcagcaccccagccttcttctccttcttcacccactgctttggacatgacatcccccagtacatccacatcttcctggccaacctgtatgtggtggtgccccccaccctgaaccctgtgatctatggagtgaggaccaagcacatccgggagaccgtgctgcgcatcttcttcaagacagaccactag

SEQ ID NO: 21065 - DNA, 942 bp, Artificial Sequence
  derived and/or modified sequence
atgcccatcgccaacgacacccagttccacaccagcagcttcctgctgctggggattccgggacttgaagacgtgcatatatggattggatttcctttctttagcgtgtatctgatagctctgctcggaaacgcggcgatttttttcgtcattcagaccgagcagagtctgcacgagcctatgtattattgcctagccatgcttgactccatcgatctaagtctgtcaacagccacaataccaaagatgttgggtatcttctggttcaacattaaagagatatcattcggcggatacctgtcccagatgttttttatccattttttcacagtcatggaaagtatcgtcctagttgccatggctttcgacagatacattgctatctgcaagcccctttggtatacaatgatcctgaccagcaaaataatctccttaatcgcaggtatcgcggtgttgaggtctctgtacatggtgattcctcttgtgttcctcttgctcagactccccttttgtggtcacaggatcatcccccatacctattgtgaacacatgggtatcgccagacttgcatgtgcttccatcaaggtcaacattatgtttggactcggttcgatatctttacttttgttagacgtgctgctgataatcttatcccatattaggatcctatacgcggtcttctgcctgccttcatgggaagccagattgaaggccttaaatacatgcggatcgcatatcggtgtcatactggcattttctaccccagcctttttttctttctttacgcattgctttggtcacgatattccacagtatattcacatttttctcgctaatctttatgttgtagtcccaccaaccttgaatcctgttatttacggtgtgagaaccaaacatatcagggagaccgtcctgaggattttctttaagacggatcattag

SEQ ID NO: 21066 - DNA, 954 bp, Artificial Sequence
  derived and/or modified sequence
atggagaagcggatgcccatcgccaacgacacccagttccacacctcatcattcttgcttctgggcatcccagggctggaggacgtacatatctggattggttttcccttcttctctgtgtacctgattgctctgttgggaaatgcggccatctttttcgtgatccagacagagcagtccttacatgagcccatgtattactgtcttgccatgctggattcgatcgacctgagcctgtcaaccgcaactatcccgaagatgctagggatattttggtttaacatcaaagagatctcattcggagggtatctgtcgcaaatgttctttatccactttttcaccgtgatggaatctattgtgctcgtggcaatggcatttgatagatacattgctatatgcaagcccctttggtatactatgattctgacaagtaaaattatcagcctcatcgctggcattgctgttttaaggtctctgtatatggttatccctctggtcttcctgcttctgagattgcctttctgcggccacagaattattccccatacctattgcgaacacatgggtatcgctagattagcctgcgcaagcatcaaggtgaatatcatgtttggcctgggcagtatcagcttactactgctcgatgtcttattgattattctctctcatatccggatcctgtacgcggttttctgcctacctagttgggaggccagactaaaagctttgaacacatgcggctcacatataggggtcatattggcgttctcaacgccagcattcttcagtttttttacacactgcttcggacatgatatccctcaatacatccatatatttcttgcaaatctctacgtagtcgtaccccccactctgaatcccgtcatctatggggtgcgtacgaagcacatcagggagacggtcctccgcatatttttcaaaacagatcactag

SEQ ID NO: 21067 - DNA, 970 bp, Artificial Sequence
  derived and/or modified sequence
atgcctatagctaacgacacccagttccatacttcttcattcctactgctgggtatcccagggctagaagatgtgcacatctggattggattcccttttttctctgtgtatcttattgcactcctgggaaatgctgctatcttctttgtgatccaaactgagcagagtctccatgagcccatgtactactgcctggccatgttggattccattgacctgagcttgtctacggccaccattcccaaaatgctgggcatcttctggttcaatatcaaggaaatatcttttggaggctacctttctcagatgttcttcatccatttcttcactgtcatggagagcatcgtattggtggccatggcctttgaccgctacattgccatttgcaaacctctttggtacaccatgatcctcaccagcaaaatcatcagcctcattgcaggcattgctgtcctgaggagcttgtacatggtcattccactggtgtttctcctcttaaggttgcccttctgtggacatcgtatcatccctcatacttactgtgagcacatgggcattgcccgtctggcctgtgccagcatcaaagtcaacattatgtttggtcttggcagtatttctctcttgttattggatgtgctccttattattctctcccatatcaggatcctctatgctgtcttctgcctgccctcctgggaagctcgactcaaagctctcaacacctgtggctctcacattggtgttatcttagccttttctacaccagcatttttctctttctttacacactgctttggccatgatattccccaatatatccacattttcttggctaatctatatgtggttgttcctcccaccctcaatcctgtaatctatggggtcagaaccaaacatattagggagacagtgctgaggattttcttcaagacagatcactaaccagttggagtttggagggtctctctta

SEQ ID NO: 21068 - DNA, 954 bp, Artificial Sequence
  derived and/or modified sequence
atggaaaaaagaatgcctatagctaacgacacccagttccatacttcttcattcctactgctgggtatcccagggctagaagatgtgcacatctggattggattcccttttttctctgtgtatcttattgcactcctgggaaatgctgctatcttctttgtgatccaaactgagcagagtctccatgagcccatgtactactgcctggccatgttggattccattgacctgagcttgtctacggccaccattcccaaaatgctgggcatcttctggttcaatatcaaggaaatatcttttggaggctacctttctcagatgttcttcatccatttcttcactgtcatggagagcatcgtattggtggccatggcctttgaccgctacattgccatttgcaaacctctttggtacaccatgatcctcaccagcaaaatcatcagcctcattgcaggcattgctgtcctgaggagcttgtacatggtcattccactggtgtttctcctcttaaggttgcccttctgtggacatcgtatcatccctcatacttactgtgagcacatgggcattgcccgtctggcctgtgccagcatcaaagtcaacattatgtttggtcttggcagtatttctctcttgttattggatgtgctccttattattctctcccatatcaggatcctctatgctgtcttctgcctgccctcctgggaagctcgactcaaagctctcaacacctgtggctctcacattggtgttatcttagccttttctacaccagcatttttctctttctttacacactgctttggccatgatattccccaatatatccacattttcttggctaatctatatgtggttgttcctcccaccctcaatcctgtaatctatggggtcagaaccaaacatattagggagacagtgctgaggattttcttcaagacagatcactaa

SEQ ID NO: 21069 - DNA, 942 bp, Artificial Sequence
  derived and/or modified sequence
atgcccattgccaacgatactcagttccacacgagctcttttcttctcctgggcatccctgggttagaggatgtgcacatttggattggctttccctttttcagcgtatacttgattgctcttctcgggaatgctgccatattcttcgtgattcagaccgaacagagcctgcacgaaccaatgtactattgtctggcaatgctggattccatcgaccttagcctttccactgctaccatcccaaagatgctgggaattttttggttcaacatcaaggagataagcttcgggggatacctttcccagatgttcttcattcactttttcacggtcatggaatccatagtccttgtggctatggcatttgatcggtacattgcaatctgtaaacccctgtggtatacaatgatccttaccagtaagattatttccctgatcgccggaatcgccgtcctccgctcactgtatatggtcattcctcttgtttttttactgttgcggttgcctttttgcggccatagaatcattccacatacctactgtgaacacatgggaatcgccagactggcctgcgctagcattaaagtgaacatcatgttcggattaggaagcatcagcctcttgctcctggatgtgctactcattatactgagccacattcgcatcctttacgccgttttttgtctccctagttgggaagccaggttgaaagcccttaatacatgcggcagccatattggcgtgattctggcatttagcacccccgcatttttctccttcttcacgcactgttttggacacgacataccccagtacatacacatcttcctggcaaatctatatgtggtagtgcctccgacattgaatcccgtcatttatggggtccgtactaagcatatacgagagacagtgctccgtatctttttcaagaccgatcattag

SEQ ID NO: 21070 - DNA, 954 bp, Artificial Sequence
  derived and/or modified sequence
atggaaaaaaggatgccaattgctaacgatactcaattccatacctcgtccttcctgttacttggaattcctggcctcgaagatgtgcacatctggatagggtttcctttcttctccgtctatctgatagccctgttgggaaatgccgcaatcttcttcgttatccagacagaacaatctctccacgaacctatgtactactgcttggcaatgttggactcaattgatctgagtctgtcaaccgccaccattcctaagatgctgggtattttctggttcaatataaaggagataagctttggcggatacttgagtcagatgttctttatacatttcttcacagtcatggagagcattgtgctggtcgccatggccttcgataggtacatcgctatctgcaagcccctttggtacacgatgatattgacttccaaaattatatcattgatcgctgggattgcagtacttaggtccttgtacatggttattcctcttgtatttcttctcctaagactccctttttgtggacaccgtattatcccacatacatactgcgaacatatgggcatcgctcggttagcctgtgccagcattaaagtgaacattatgtttggcctcggaagcataagcctgctgttgctggatgtcctgctgatcattctgagtcacattagaattttatacgctgtgttctgcctgccttcctgggaagcccgtctgaaggccctcaatacctgcggtagccacatcggtgtaatcctggcctttagtacgcccgcttttttttcatttttcacacattgctttggtcacgatataccccagtacatccatatctttctggccaatttatacgtagtagttccccctaccctgaatccggtgatctacggggtccgcaccaaacacatacgcgaaacagtcctgaggattttcttcaagaccgatcactag

SEQ ID NO: 21071 - protein, 348 aa, Artificial Sequence
  derived and/or modified sequence
TQVPKDCTILLHHLYINRQEVSPVMLGPAYNHTMETPASFLLVGIPGLQSSHLWLAISLSAMYITALLGNTLIVTAIWMDSTRHEPMYCFLCVLAAVDIVMASSVVPKMVSIFCSGDSSISFSACFTQMFFVHLATAVETGLLLTMAFDRYVAICKPLHYKRILTPQVMLGMSMAVTIRAVTFMTPLSWMMNHLPFCGSNVVVHSYCKHIALARLACADPVPSSLYSLIGSSLMVGSDVAFIAASYILILRAVFDLSSKTAQLKALSTCGSHVGVMALYYLPGMASIYAAWLGQDIVPLHTQVLLADLYVIIPATLNPIIYGMRTKQLLEGIWSYLMHFLFDHSNLGS

SEQ ID NO: 21072 - protein, 324 aa, Artificial Sequence
  derived and/or modified sequence
MLGPAYNHTMETPASFLLVGIPGLQSSHLWLAISLSAMYITALLGNTLIVTAIWMDSTRHEPMYCFLCVLAAVDIVMASSVVPKMVSIFCSGDSSISFSACFTQMFFVHLATAVETGLLLTMAFDRYVAICKPLHYKRILTPQVMLGMSMAVTIRAVTFMTPLSWMMNHLPFCGSNVVVHSYCKHIALARLACADPVPSSLYSLIGSSLMVGSDVAFIAASYILILRAVFDLSSKTAQLKALSTCGSHVGVMALYYLPGMASIYAAWLGQDIVPLHTQVLLADLYVIIPATLNPIIYGMRTKQLLEGIWSYLMHFLFDHSNLGS

SEQ ID NO: 21073 - DNA, 1047 bp, Artificial Sequence
  derived and/or modified sequence
acccaggtgcccaaggactgcaccatcctgctgcaccacctgtacatcaacagacaggaggtgagccccgtgatgctgggccccgcctacaaccacaccatggagacccccgccagcttcctgctggtgggcatccccggcctgcagagcagccacctgtggctggccatcagcctgagcgccatgtacatcaccgccctgctgggcaacaccctgatcgtgaccgccatctggatggacagcaccagacacgagcccatgtactgcttcctgtgcgtgctggccgccgtggacatcgtgatggccagcagcgtggtgcccaagatggtgagcatcttctgcagcggcgacagcagcatcagcttcagcgcctgcttcacccagatgttcttcgtgcacctggccaccgccgtggagaccggcctgctgctgaccatggccttcgacagatacgtggccatctgcaagcccctgcactacaagagaatcctgaccccccaggtgatgctgggcatgagcatggccgtgaccatcagagccgtgaccttcatgacccccctgagctggatgatgaaccacctgcccttctgcggcagcaacgtggtggtgcacagctactgcaagcacatcgccctggccagactggcctgcgccgaccccgtgcccagcagcctgtacagcctgatcggcagcagcctgatggtgggcagcgacgtggccttcatcgccgccagctacatcctgatcctgagagccgtgttcgacctgagcagcaagaccgcccagctgaaggccctgagcacctgcggcagccacgtgggcgtgatggccctgtactacctgcccggcatggccagcatctacgccgcctggctgggccaggacatcgtgcccctgcacacccaggtgctgctggccgacctgtacgtgatcatccccgccaccctgaaccccatcatctacggcatgagaaccaagcagctgctggagggcatctggagctacctgatgcacttcctgttcgaccacagcaacctgggcagctag

SEQ ID NO: 21074 - DNA, 975 bp, Artificial Sequence
  derived and/or modified sequence
atgctgggccccgcctacaaccacaccatggagacccccgccagcttcctgctggtgggcatccccggcctgcagagcagccacctgtggctggccatcagcctgagcgccatgtacatcaccgccctgctgggcaacaccctgatcgtgaccgccatctggatggacagcaccagacacgagcccatgtactgcttcctgtgcgtgctggccgccgtggacatcgtgatggccagcagcgtggtgcccaagatggtgagcatcttctgcagcggcgacagcagcatcagcttcagcgcctgcttcacccagatgttcttcgtgcacctggccaccgccgtggagaccggcctgctgctgaccatggccttcgacagatacgtggccatctgcaagcccctgcactacaagagaatcctgaccccccaggtgatgctgggcatgagcatggccgtgaccatcagagccgtgaccttcatgacccccctgagctggatgatgaaccacctgcccttctgcggcagcaacgtggtggtgcacagctactgcaagcacatcgccctggccagactggcctgcgccgaccccgtgcccagcagcctgtacagcctgatcggcagcagcctgatggtgggcagcgacgtggccttcatcgccgccagctacatcctgatcctgagagccgtgttcgacctgagcagcaagaccgcccagctgaaggccctgagcacctgcggcagccacgtgggcgtgatggccctgtactacctgcccggcatggccagcatctacgccgcctggctgggccaggacatcgtgcccctgcacacccaggtgctgctggccgacctgtacgtgatcatccccgccaccctgaaccccatcatctacggcatgagaaccaagcagctgctggagggcatctggagctacctgatgcacttcctgttcgaccacagcaacctgggcagctag

SEQ ID NO: 21075 - DNA, 1047 bp, Artificial Sequence
  derived and/or modified sequence
acgcaagtacccaaagactgtacaatcctgctccaccacctctacattaatcggcaggaggtcagtccggtgatgctgggcccagcgtacaaccatactatggaaactcccgcatccttcttgcttgtgggaattcccggcctgcagtcaagtcacttgtggcttgccattagtctgagcgccatgtatatcactgctctgttaggcaacaccctaatcgtgaccgccatctggatggatagcacgagacatgaacctatgtattgctttctgtgtgtgctcgccgcagtagatatcgtcatggcgtcttctgtggttccaaagatggtgagcatcttttgctccggcgatagttctatcagctttagcgcatgttttacccagatgttcttcgtacacctggcaactgccgtagaaactggactcttgttgaccatggcattcgatagatacgtggcaatatgcaaacctttgcattacaagcggatactcactccccaagtgatgctcgggatgagtatggccgtgacgatccgtgccgtcacgttcatgacacccctgagctggatgatgaaccatctccccttttgtgggagtaacgttgttgttcattcatattgtaaacacatagctctggcccgcctcgcttgtgctgacccagtccctagttctttatactcattgattggttcctccttaatggtaggttcagatgtcgctttcatcgctgctagttatatcctgattctgcgagctgtcttcgatttaagttctaaaaccgcacagctgaaggccctgagtacttgtgggtcccatgttggcgtgatggccttgtattatctgcctggcatggcatctatctatgctgcatggctcggtcaggacattgtacctttgcatacccaggttctcctcgcagacctgtacgtgattattccagcaaccctcaaccccatcatatacgggatgcgaaccaagcagctgctggaaggcatttggagctatctcatgcattttctgttcgatcattccaatcttggctcctag

SEQ ID NO: 21076 - DNA, 975 bp, Artificial Sequence
  derived and/or modified sequence
atgctcggccccgcgtacaaccatacgatggagaccccagctagctttttgctggtggggattccagggttgcagtcttcccacctttggcttgccatcagcctgagtgctatgtacatcactgccctactgggtaacaccctcattgttaccgcgatatggatggattccactcggcacgaacccatgtattgcttcctgtgcgtgttagccgccgtggacattgtaatggcgtcttctgtcgtgcctaagatggtctctatcttctgcagcggagatagcagcattagctttagcgcttgtttcacacagatgttctttgtgcatctcgcaacggccgtggaaacaggcctactactgactatggcgtttgatcggtacgtcgcaatctgtaaaccgctgcattacaagcgcatattgactcctcaggtcatgcttgggatgtctatggccgtaactattagggctgtcacattcatgaccccacttagctggatgatgaaccaccttcctttctgcgggagcaacgtcgtcgtgcattcctactgcaaacacatcgctttagctcgcctggcatgcgcagacccagttccgtcaagtctttactccctaattggctcaagcttgatggtaggcagcgacgtagcattcatcgccgccagctatatcctgattctgagagcggtgtttgatctgagttcaaagacggcacagttaaaggctctaagcacatgcgggtcccatgtaggagtaatggcattgtactaccttcctgggatggcttccatctacgctgcttggttaggccaggacatagttccccttcacacacaggttctgctggctgacctgtacgtgattattccggccacgctcaaccccattatttatggtatgcgcaccaaacagttattagaggggatctggtcctatctcatgcactttctgtttgaccactccaaccttgggagttag

SEQ ID NO: 21077 - DNA, 1047 bp, Artificial Sequence
  derived and/or modified sequence
acccaggtgcccaaggactgcaccatcctgctgcaccacctgtacatcaaccggcaggaggtgtcccctgtgatgctgggccctgcctacaaccacaccatggagaccccagccagcttcctgctggtgggcatccctggcctgcagagcagccacctgtggctggccatcagcctgagcgccatgtacatcacagccctgctgggcaacaccctgattgtgacagccatctggatggacagcaccaggcatgagcccatgtactgcttcctgtgtgtgctggccgctgtggacatcgtgatggccagctctgtggtgcccaagatggtgtccatcttctgcagcggggacagcagcatctccttcagcgcctgcttcacccagatgttctttgtgcacctggccacagctgtggagaccggcctgctgctgaccatggcctttgacagatatgtggccatctgcaagcccctgcactacaagaggatcctgaccccccaggtgatgctgggcatgtccatggctgtgaccatccgggctgtgaccttcatgacccccctgtcctggatgatgaaccacctgcccttctgtggcagcaatgtggtggtgcacagctactgcaagcacatcgccctggcccggctggcctgtgccgaccctgtgcccagcagcctgtacagcctgattggcagcagcctgatggtgggcagtgatgtggccttcatcgccgccagctacatcctgatcctgcgggctgtgtttgacctgagcagcaagacagcccagctgaaggccctgagcacctgtggcagccacgtgggcgtgatggccctgtactacctgcccggcatggccagcatctatgctgcctggctgggccaggacatcgtgcccctgcacacccaggtgctgctggccgacctgtatgtgatcatcccagccaccctgaaccccatcatctacggcatgaggaccaagcagctgctggagggcatctggagctacctgatgcacttcctgtttgaccacagcaacctgggcagctag

SEQ ID NO: 21078 - DNA, 975 bp, Artificial Sequence
  derived and/or modified sequence
atgctgggccctgcctacaaccacaccatggagaccccagccagcttcctgctggtgggcatccctggcctgcagagcagccacctgtggctggccatcagcctgagcgccatgtacatcacagccctgctgggcaacaccctgattgtgacagccatctggatggacagcaccaggcatgagcccatgtactgcttcctgtgtgtgctggccgctgtggacatcgtgatggccagctctgtggtgcccaagatggtgtccatcttctgcagcggggacagcagcatctccttcagcgcctgcttcacccagatgttctttgtgcacctggccacagctgtggagaccggcctgctgctgaccatggcctttgacagatatgtggccatctgcaagcccctgcactacaagaggatcctgaccccccaggtgatgctgggcatgtccatggctgtgaccatccgggctgtgaccttcatgacccccctgtcctggatgatgaaccacctgcccttctgtggcagcaatgtggtggtgcacagctactgcaagcacatcgccctggcccggctggcctgtgccgaccctgtgcccagcagcctgtacagcctgattggcagcagcctgatggtgggcagtgatgtggccttcatcgccgccagctacatcctgatcctgcgggctgtgtttgacctgagcagcaagacagcccagctgaaggccctgagcacctgtggcagccacgtgggcgtgatggccctgtactacctgcccggcatggccagcatctatgctgcctggctgggccaggacatcgtgcccctgcacacccaggtgctgctggccgacctgtatgtgatcatcccagccaccctgaaccccatcatctacggcatgaggaccaagcagctgctggagggcatctggagctacctgatgcacttcctgtttgaccacagcaacctgggcagctag

SEQ ID NO: 21079 - DNA, 1047 bp, Artificial Sequence
  derived and/or modified sequence
acccaggtgcccaaggactgcaccatcctgctgcaccacctgtacatcaatcggcaggaagtgtctcctgtgatgttgggaccggcctataaccacaccatggagactcctgcatccttccttctggttggcatcccagggctccaatctagtcatctttggctcgccattagtttgtcagcgatgtatattaccgctcttctggggaataccctgattgtaaccgctatctggatggacagcacccgccatgaaccgatgtactgttttctgtgtgttctggctgccgtagatatcgtgatggcatcttctgtggtgccaaaaatggtgtccattttctgctccggagactcctccataagcttttctgcatgctttacacagatgtttttcgtccacttggccacggccgtcgagaccggactattgctgaccatggcgttcgatcgctatgttgcaatctgtaaaccacttcactataagaggatcctaaccccacaggtgatgctgggcatgtcaatggctgtgactatacgggccgtaacttttatgacccctttatcctggatgatgaaccatctccccttctgtggcagcaacgtagttgtacattcatactgtaagcacatcgcgcttgctcggctcgcctgtgccgaccctgtgcccagcagcttgtactcccttattggctcttccctgatggtgggatcagatgtggccttcatcgcagcttcatatattctcatcctgagagccgtcttcgatctatcatcaaagactgcccaacttaaggccttgagcacctgtgggtcgcatgtgggggtgatggcgttgtactacctgccaggcatggcctccatttacgccgcatggcttggccaggatatagttcctctgcacactcaagtgcttttagcagacctttatgtaattatcccagctactcttaaccctatcatctatgggatgaggaccaaacagctgttggagggaatctggtcctacctgatgcactttctcttcgatcactctaacctcgggagctag

SEQ ID NO: 21080 - DNA, 975 bp, Artificial Sequence
  derived and/or modified sequence
atgctgggccccgcctacaaccacaccatggagacccccgccagctttcttctggtgggcatccccggcttacagtcaagccacctgtggctggccatttccctgagcgctatgtacattaccgcgttgttagggaacaccctgatcgtgaccgccatctggatggatagcacgcgtcacgagccaatgtattgtttcctgtgtgtgctggcagccgttgacattgtgatggctagcagcgtggtacccaagatggtgtctatcttttgtagcggggattcctctatctcattcagtgcatgttttactcagatgttcttcgttcacttggccaccgctgtcgaaactggcttacttttgactatggctttcgaccgatacgttgccatctgcaaaccacttcattacaagcggatcttaacccctcaggtgatgctgggaatgagcatggcagtaacaattcgtgcagtaacctttatgacgcccttgagctggatgatgaaccatctccctttttgtggcagcaacgttgtggtgcactcctattgcaagcacattgcactggctagactggcctgtgcagatccagtcccatcctccttgtattcactgattggaagctcgctcatggtgggatctgacgtggcttttattgctgcctcctacattctgatcctgcgcgcagtgttcgacctttcatccaagacagctcagctgaaggctctgtctacctgtggcagtcatgtcggcgtgatggctttgtactacctaccgggtatggccagcatctatgctgcctggcttggtcaggatatagtacccctacatacccaggtcctgctcgccgatctttacgttattatcccagccactctgaatccaatcatctacggtatgcggaccaaacaactgctagagggaatttggagttacctgatgcacttcctctttgaccattcaaaccttggtagctag

SEQ ID NO: 21081 - DNA, 1047 bp, Artificial Sequence
  derived and/or modified sequence
acacaagtccctaaggactgcaccattctcttacatcatctatacattaataggcaagaagtctcacctgtgatgctgggtccagcttacaaccacacaatggaaacccctgcctccttcctccttgtgggtatcccaggactgcaatcttcacatctttggctggctatctcactgagtgccatgtacatcacagccctgttaggaaacaccctcatcgtgactgcaatctggatggattccactcggcatgagcccatgtattgctttctgtgtgttctggctgctgtggacattgttatggcctcctccgtggtacccaagatggtgagcatcttctgctcgggagacagctccatcagctttagtgcttgtttcactcagatgttttttgtccacttagccacagctgtggagacggggctgctgctgaccatggcttttgaccgctatgtagccatctgcaagcctctacactacaagagaattctcacgcctcaagtgatgctgggaatgagtatggccgtcaccatcagagctgtcacattcatgactccactgagttggatgatgaatcatctacctttctgtggctccaatgtggttgtccactcctactgtaagcacatagctttggccaggttagcatgtgctgaccccgtgcccagcagtctctacagtctgattggttcctctcttatggtgggctctgatgtggccttcattgctgcctcctatatcttaattctcagggcagtatttgatctctcctcaaagactgctcagttgaaagcattaagcacatgtggctcccatgtgggggttatggctttgtactatctacctgggatggcatccatctatgcggcctggttggggcaggatatagtgcccttgcacacccaagtgctgctagctgacctgtacgtgatcatcccagccactttaaatcccatcatctatggcatgaggaccaaacaattgctggagggaatatggagttatctgatgcacttcctctttgaccactccaacctgggttcatga

SEQ ID NO: 21082 - DNA, 972 bp, Artificial Sequence
  derived and/or modified sequence
atgctgggtccagcttacaaccacacaatggaaacccctgcctccttcctccttgtgggtatcccaggactgcaatcttcacatctttggctggctatctcactgagtgccatgtacatcacagccctgttaggaaacaccctcatcgtgactgcaatctggatggattccactcggcatgagcccatgtattgctttctgtgtgttctggctgctgtggacattgttatggcctcctccgtggtacccaagatggtgagcatcttctgctcgggagacagctccatcagctttagtgcttgtttcactcagatgttttttgtccacttagccacagctgtggagacggggctgctgctgaccatggcttttgaccgctatgtagccatctgcaagcctctacactacaagagaattctcacgcctcaagtgatgctgggaatgagtatggccgtcaccatcagagctgtcacattcatgactccactgagttggatgatgaatcatctacctttctgtggctccaatgtggttgtccactcctactgtaagcacatagctttggccaggttagcatgtgctgaccccgtgcccagcagtctctacagtctgattggttcctctcttatggtgggctctgatgtggccttcattgctgcctcctatatcttaattctcagggcagtatttgatctctcctcaaagactgctcagttgaaagcattaagcacatgtggctcccatgtgggggttatggctttgtactatctacctgggatggcatccatctatgcggcctggttggggcaggatatagtgcccttgcacacccaagtgctgctagctgacctgtacgtgatcatcccagccactttaaatcccatcatctatggcatgaggaccaaacaattgctggagggaatatggagttatctgatgcacttcctctttgaccactccaacctgggttca

SEQ ID NO: 21083 - DNA, 1047 bp, Artificial Sequence
  derived and/or modified sequence
acacaggtcccgaaggactgcaccatcctgcttcatcatctctacatcaaccggcaggaagtgtccccagtcatgttggggcctgcatataaccataccatggagactccggcaagcttcttactcgtaggtattcccggtttgcagtcctctcacctctggttggctattagtttgtccgccatgtatatcactgctttgcttggcaatacgctgatcgtcaccgctatttggatggattccacaaggcacgagcccatgtattgcttcctctgcgtgctagcagcggtcgatattgtcatggcctcctctgtggtgcccaaaatggtgtctatcttttgctcaggcgacagcagcattagtttttcagcctgtttcacccaaatgttctttgtccacttggcgactgctgtggaaacaggattgctcctgactatggcttttgatcgatatgtggccatttgcaaacccctgcattacaagcgaattttaaccccacaggttatgctcgggatgtccatggcagttaccatccgcgctgtcacgtttatgacccccctgtcatggatgatgaatcacttacccttctgtggaagtaacgtcgtggtgcacagctactgcaagcacattgccctagccagattggcatgcgccgacccagtaccaagctctttgtattctctgatcggatctagcctgatggtaggcagcgatgtcgcctttatcgctgcctcatacatcctaattctaagggccgtatttgatctaagcagcaaaacagctcagcttaaggccttgtcaacctgtgggagtcatgtcggtgttatggccctgtactatctccctggaatggccagtatttacgccgcatggctggggcaggatattgttcctctgcatacccaggttctgctggcggatctgtatgttattataccagccacattgaaccctattatctacggaatgcggacgaaacagctgctggaaggcatttggagctacctgatgcattttctatttgatcattctaacttgggttcatag

SEQ ID NO: 21084 - DNA, 975 bp, Artificial Sequence
  derived and/or modified sequence
atgcttggcccagcctacaatcacactatggaaacgcctgcgtctttcctgttggtcgggataccgggtttacagagcagtcacctgtggctggccatcagtctgtctgcgatgtacataactgctctgctaggaaataccctgatcgtgacagccatctggatggatagtactcggcatgagcctatgtattgtttcctctgcgtactcgctgccgtggacattgttatggcatccagcgtcgtccccaagatggtgagcatattctgcagcggtgactcaagtataagcttctccgcatgtttcacacagatgtttttcgtgcacctggcaacagccgtcgaaaccggtctcctgctgaccatggctttcgataggtacgttgcgatttgtaagcctctgcattacaagcgcatcttaaccccacaagtgatgctggggatgagcatggcagtgacgattcgggctgtaacctttatgaccccgctgtcgtggatgatgaaccacctcccattctgtgggtcaaatgtggtagtacatagctactgtaagcacatcgcactcgccaggctcgcttgcgccgatccagtgcccagcagtctctatagtctaatcggctccagtctcatggtgggaagcgacgtggccttcattgccgcatcttatatcttaattctgcgcgctgtgtttgacctgtcttccaagaccgcacagctgaaagccctgagcacttgtggatcccatgtgggcgtgatggcgctgtattacctccccggtatggccagcatttatgctgcctggttaggccaagatattgtccctctccacacacaggttcttctggccgacctctatgtcattattccagctaccctgaacccaattatatacgggatgagaacaaagcagctgttagaggggatttggtcttatctaatgcatttcctgtttgaccactcaaacctgggtagctag

SEQ ID NO: 21085 - protein, 350 aa, Artificial Sequence
  derived and/or modified sequence
MCQQILRDCILLIHHLCINRKKVSLVMLGPAYNHTMETPASFLLVGIPGLQSSHLWLAISLSAMYIIALLGNTIIVTAIWMDSTRHEPMYCFLCVLAAVDIVMASSVVPKMVSIFCSGDSSISFSACFTQMFFVHLATAVETGLLLTMAFDRYVAICKPLHYKRILTPQVMLGMSMAITIRAIIAITPLSWMVSHLPFCGSNVVVHSYCEHIALARLACADPVPSSLYSLIGSSLMVGSDVAFIAASYILILKAVFGLSSKTAQLKALSTCGSHVGVMALYYLPGMASIYAAWLGQDVVPLHTQVLLADLYVIIPATLNPIIYGMRTKQLRERIWSYLMHVLFDHSNLGS

SEQ ID NO: 21086 - DNA, 1053 bp, Artificial Sequence
  derived and/or modified sequence
atgtgccagcagatcctgagagactgcatcctgctgatccaccacctgtgcatcaacagaaagaaggtgagcctggtgatgctgggccccgcctacaaccacaccatggagacccccgccagcttcctgctggtgggcatccccggcctgcagagcagccacctgtggctggccatcagcctgagcgccatgtacatcatcgccctgctgggcaacaccatcatcgtgaccgccatctggatggacagcaccagacacgagcccatgtactgcttcctgtgcgtgctggccgccgtggacatcgtgatggccagcagcgtggtgcccaagatggtgagcatcttctgcagcggcgacagcagcatcagcttcagcgcctgcttcacccagatgttcttcgtgcacctggccaccgccgtggagaccggcctgctgctgaccatggccttcgacagatacgtggccatctgcaagcccctgcactacaagagaatcctgaccccccaggtgatgctgggcatgagcatggccatcaccatcagagccatcatcgccatcacccccctgagctggatggtgagccacctgcccttctgcggcagcaacgtggtggtgcacagctactgcgagcacatcgccctggccagactggcctgcgccgaccccgtgcccagcagcctgtacagcctgatcggcagcagcctgatggtgggcagcgacgtggccttcatcgccgccagctacatcctgatcctgaaggccgtgttcggcctgagcagcaagaccgcccagctgaaggccctgagcacctgcggcagccacgtgggcgtgatggccctgtactacctgcccggcatggccagcatctacgccgcctggctgggccaggacgtggtgcccctgcacacccaggtgctgctggccgacctgtacgtgatcatccccgccaccctgaaccccatcatctacggcatgagaaccaagcagctgagagagagaatctggagctacctgatgcacgtgctgttcgaccacagcaacctgggcagctag

SEQ ID NO: 21087 - DNA, 1053 bp, Artificial Sequence
  derived and/or modified sequence
atgtgccaacagattctgcgggactgtattctactgatccatcacctgtgcatcaatcgtaaaaaagtgagtctagtcatgctggggcccgcctacaatcatacaatggagaccccagcttctttcttgttggtcggcatccccggactgcagtcttcccacctatggctagcaataagcctctccgctatgtatatcattgccctgctaggcaacacaatcatcgtcactgccatatggatggactcaactagacatgaaccaatgtactgcttcttgtgtgtgctcgccgctgtggatattgtgatggcttcttcggtggtaccaaaaatggtctctattttctgttccggtgattcctcgatctctttctccgcctgtttcactcagatgttctttgtccatctggccacagctgtggagacaggactgttactcactatggcgttcgataggtacgtcgctatttgcaagcccttgcactacaagcgaatactcactccccaagttatgcttgggatgagtatggcaatcacaattagagctataatagcgattactcccttaagttggatggtgtcacacttgcccttctgcggttccaatgtggtcgtacactcttattgtgaacacatcgccctcgcgagattggcctgtgccgacccggtgccttccagcctatattcactcatcggctcgtctttaatggttgggtccgatgtagccttcatagcagcatcctatatcctgatccttaaagccgtgttcgggttgtctagtaaaactgcccagcttaaggctcttagtacgtgcggcagtcatgtgggtgtaatggcgctgtactacttgcccggcatggccagcatttacgctgcatggctgggacaagatgttgtcccacttcatacccaagtgttactggcagatctttatgtgattatcccagctacgctgaatcctattatctacggaatgcggactaagcagttgagagaaaggatctggagctacctcatgcacgtcctcttcgaccactcgaacttaggcagttag

SEQ ID NO: 21088 - DNA, 1053 bp, Artificial Sequence
  derived and/or modified sequence
atgtgccagcagatcctgcgggactgcatcctgctgatccaccacctgtgcatcaacaggaagaaggtgtccctggtgatgctgggccctgcctacaaccacaccatggagaccccagccagcttcctgctggtgggcatccctggcctgcagagcagccacctgtggctggccatcagcctgagcgccatgtacatcatcgccctgctgggcaacaccatcatcgtgacagccatctggatggacagcaccaggcatgagcccatgtactgcttcctgtgtgtgctggccgctgtggacatcgtgatggccagctctgtggtgcccaagatggtgtccatcttctgcagcggggacagcagcatctccttcagcgcctgcttcacccagatgttctttgtgcacctggccacagctgtggagaccggcctgctgctgaccatggcctttgacagatatgtggccatctgcaagcccctgcactacaagaggatcctgaccccccaggtgatgctgggcatgtccatggccatcaccatccgggccatcatcgccatcacccccctgtcctggatggtgagccacctgcccttctgtggcagcaatgtggtggtgcacagctactgtgagcacatcgccctggcccggctggcctgtgccgaccctgtgcccagcagcctgtacagcctgattggcagcagcctgatggtgggcagtgatgtggccttcatcgccgccagctacatcctgatcctgaaggctgtgtttggcctgagcagcaagacagcccagctgaaggccctgagcacctgtggcagccacgtgggcgtgatggccctgtactacctgcccggcatggccagcatctatgctgcctggctgggccaggatgtggtgcccctgcacacccaggtgctgctggccgacctgtatgtgatcatcccagccaccctgaaccccatcatctacggcatgaggaccaagcagctgcgggagcgcatctggagctacctgatgcacgtgctgtttgaccacagcaacctgggcagctag

SEQ ID NO: 21089 - DNA, 1053 bp, Artificial Sequence
  derived and/or modified sequence
atgtgccagcagatcctgcgggactgcatcctgctgatccaccacctctgtatcaatcgcaagaaggtatctctggttatgttgggacccgcgtacaatcacacaatggagacaccggctagtttcctgctcgttggcattccaggactgcagtcgtctcacctgtggctcgcaatatctctgagtgctatgtatatcatcgctctgctcggaaacaccatcatcgtaactgctatctggatggattcaactaggcacgaacccatgtattgttttttgtgtgtgctggccgctgtagacattgttatggcgtcaagcgtggtgccgaagatggtttccatcttttgctctggggactcaagcataagcttttccgcctgtttcacgcagatgttcttcgtgcacctcgccacagctgtggagacgggcctactgctgacaatggcatttgaccggtatgtagctatttgtaagcctctccattacaagcgcatacttacaccgcaggtgatgctggggatgagtatggcaattaccatccgggctattatcgccatcactcctctttcttggatggtgtctcacctgcctttctgtgggtccaacgtagtcgtgcacagctactgcgaacatatcgcactcgccaggctggcttgtgccgatcctgttccaagctctttgtactctctgatcggatcctccctcatggtcgggagcgatgttgcgtttatcgcggcttcttatatcctgatcctgaaggctgtattcggcctttcctcaaagactgctcagcttaaggcattaagcacgtgtgggagccatgtgggagtgatggccttgtactatctgccaggcatggccagcatctacgccgcatggctcggacaagatgtggtgcctctacacacccaggttctgctggccgatctgtacgtgatcatacctgcaacactcaatcccataatctatggcatgcgcactaaacaacttagagagcgcatctggtcatatctaatgcacgtgctgttcgatcattcaaatcttggatcctag

SEQ ID NO: 21090 - DNA, 1115 bp, Artificial Sequence
  derived and/or modified sequence
ccttaggttttcccagcaccacatgtgtcaacaaatcttacgggattgcattcttctcatacatcatttgtgcattaacaggaaaaaagtctcacttgtgatgctgggtccagcttataaccacacaatggaaacccctgcctccttcctccttgtgggtatcccaggactgcaatcttcacatctttggctggctatctcactgagtgccatgtacatcatagccctgttaggaaacaccatcatcgtgactgcaatctggatggattccactcggcatgagcccatgtattgctttctgtgtgttctggctgctgtggacattgttatggcctcctcggtggtacccaagatggtgagcatcttctgctcaggagacagctcaatcagctttagtgcttgtttcactcagatgttttttgtccacttagccacagctgtggagacggggctgctgctgaccatggcttttgaccgctatgtagccatctgcaagcctctacactacaagagaattctcacgcctcaagtgatgctgggaatgagtatggccatcaccatcagagctatcatagccataactccactgagttggatggtgagtcatctacctttctgtggctccaatgtggttgtccactcctactgtgagcacatagctttggccaggttagcatgtgctgaccccgtgcccagcagtctctacagtctgattggttcctctcttatggtgggctctgatgtggccttcattgctgcctcctatatcttaattctcaaggcagtatttggtctctcctcaaagactgctcagttgaaagcattaagcacatgtggctcccatgtgggggttatggctttgtactatctacctgggatggcatccatctatgcggcctggttggggcaggatgtagtgcccttgcacacccaagtcctgctagctgacctgtacgtgatcatcccagccaccttaaatcccatcatctatggcatgaggaccaaacaactgcgggagagaatatggagttatctgatgcatgtcctctttgaccattccaacctgggttcatgaacacaatatctgttcagatccagccaatttcaaagatgcc

SEQ ID NO: 21091 - DNA, 1053 bp, Artificial Sequence
  derived and/or modified sequence
atgtgtcagcagatcctccgcgattgcatcctcctgatccaccacctgtgtatcaatcggaagaaagtttccttggtaatgctaggacccgcttataatcatacaatggaaactcccgcatcgtttctgcttgtggggatcccaggactgcaatcttcacacttatggctcgccatttcactcagcgctatgtatattatagccctcctgggtaacacaatcattgtaactgctatctggatggattccaccaggcatgagccaatgtattgcttcttgtgcgtgcttgccgctgttgacatagtcatggcgagctctgtggtccccaaaatggtcagcatcttctgtagcggtgacagctctatatctttttcagcttgcttcacacagatgtttttcgttcatctagcaacagcggttgagacggggcttctcttaactatggccttcgatcgatacgtggctatttgcaagccattacactataagcggattcttacgcctcaagtaatgctggggatgtctatggctattacgatccgggctatcattgctatcacaccattgtcctggatggtcagccatctacccttttgcggcagtaacgtcgtagtccattcttactgtgagcacattgctctcgctaggctcgcctgcgccgatccagtccctagttcactgtatagtctgatcggcagctctcttatggttggctctgacgtcgcgtttatcgcagcttcttacatcttgatactgaaagccgtcttcgggcttagctcgaagactgcccagctcaaggccctgtccacttgtggttctcatgtgggagtcatggccctgtactacctcccgggaatggcttcaatttacgctgcctggctcggccaggacgtggtccctctccacacccaggtccttctagccgacctgtacgttataattccagctacattgaatcccataatctacggcatgcggactaaacagctgcgtgaaaggatctggagctacctcatgcacgtcctttttgaccacagtaacttggggtcgtag

SEQ ID NO: 21092 - protein, 314 aa, Artificial Sequence
  derived and/or modified sequence
MLPSNITSTHPAVFLLVGIPGLEHLHAWISIPFCFAYTLALLGNCTLLFIIQADAALHEPMYLFLAMLATIDLVLSSTTLPKMLAIFWFRDQEINFFACLVQMFFLHSFSIMESAVLLAMAFDRYVAICKPLHYTTVLTGSLITKIGMAAVARAVTLMTPLPFLLRRFHYCRGPVIAHCYCEHMAVVRLACGDTSFNNIYGIAVAMFIVVLDLLFVILSYVFILQAVLQLASQEARYKAFGTCVSHIGAILSTYTPVVISSVMHRVARHAAPRVHILLAIFYLLFPPMVNPIIYGVKTKQIREYVLSLFQRKNM

SEQ ID NO: 21093 - DNA, 945 bp, Artificial Sequence
  derived and/or modified sequence
atgctgcccagcaacatcaccagcacccaccccgccgtgttcctgctggtgggcatccccggcctggagcacctgcacgcctggatcagcatccccttctgcttcgcctacaccctggccctgctgggcaactgcaccctgctgttcatcatccaggccgacgccgccctgcacgagcccatgtacctgttcctggccatgctggccaccatcgacctggtgctgagcagcaccaccctgcccaagatgctggccatcttctggttcagagaccaggagatcaacttcttcgcctgcctggtgcagatgttcttcctgcacagcttcagcatcatggagagcgccgtgctgctggccatggccttcgacagatacgtggccatctgcaagcccctgcactacaccaccgtgctgaccggcagcctgatcaccaagatcggcatggccgccgtggccagagccgtgaccctgatgacccccctgcccttcctgctgagaagattccactactgcagaggccccgtgatcgcccactgctactgcgagcacatggccgtggtgagactggcctgcggcgacaccagcttcaacaacatctacggcatcgccgtggccatgttcatcgtggtgctggacctgctgttcgtgatcctgagctacgtgttcatcctgcaggccgtgctgcagctggccagccaggaggccagatacaaggccttcggcacctgcgtgagccacatcggcgccatcctgagcacctacacccccgtggtgatcagcagcgtgatgcacagagtggccagacacgccgcccccagagtgcacatcctgctggccatcttctacctgctgttcccccccatggtgaaccccatcatctacggcgtgaagaccaagcagatcagagagtacgtgctgagcctgttccagagaaagaacatgtag

SEQ ID NO: 21094 - DNA, 945 bp, Artificial Sequence
  derived and/or modified sequence
atgctgccttccaacattacaagcactcaccccgccgtctttctcctggtgggcatccccggtctggaacacctccatgcttggatcagcatcccgttttgttttgcatatacgttggctctcctcgggaactgtaccctcttgttcatcattcaggcagatgccgcactacatgaacctatgtatttgttcctggctatgcttgctacaatagacctggtactttcaagcactacattacccaagatgcttgccatcttctggttcagagatcaggaaataaatttcttcgcttgcctggtccagatgttctttctgcactccttcagcattatggaatcggctgttctgttggcgatggccttcgacaggtacgtcgccatttgtaagcccttacattacactaccgtgctgacaggatcactcatcaccaagatcgggatggccgctgtcgcacgagctgttactctgatgacaccactccctttcttactgagaagatttcactactgcaggggccctgtaattgcacactgctattgtgagcatatggccgtcgtcaggttagcatgcggagacacaagcttcaataatatttacggcattgccgtggccatgttcattgtggtccttgacctgctgtttgtgattctgtcatacgtctttattctgcaagctgtcctgcaattagcttctcaggaagccaggtataaagcttttggtacctgcgtctcccatatcggggcaatcttgagcacctacacacctgtcgtgatttcatctgtgatgcatagggtagctaggcatgcggcccctcgagtgcatattctcctcgctatcttttatttgctgtttcccccgatggtgaacccgatcatctacggcgtaaaaaccaaacaaataagggaatatgtgctgagtctgtttcagcgtaagaacatgtag

SEQ ID NO: 21095 - DNA, 945 bp, Artificial Sequence
  derived and/or modified sequence
atgctgcccagcaacatcaccagcacccaccctgctgtgttcctgctggtgggcatccctggcctggagcacctgcacgcctggatcagcatccccttctgctttgcctacaccctggccctgctgggcaactgcaccctgctcttcatcatccaggctgatgctgccctgcacgagcccatgtacctgttcctggccatgctggccaccatcgacctggtgctgagcagcaccaccctgcccaagatgctggccatcttctggttccgggaccaggagatcaacttctttgcctgcctggtgcagatgttcttcctgcacagcttcagcatcatggagagcgctgtgctgctggccatggcctttgacagatatgtggccatctgcaagcccctgcactacaccaccgtgctgaccggcagcctcatcaccaagattggcatggctgctgtggcccgggctgtgaccctgatgacccccctgcccttcctgctgcggcgcttccactactgccggggccctgtgattgcccactgctactgtgagcacatggctgtggtgcggctggcctgtggggacaccagcttcaacaacatctacggcattgctgtggccatgttcatcgtggtgctggacctgctgtttgtgatcctgtcctatgtgttcatcctgcaggccgtgctgcagctggccagccaggaggcccgctacaaggccttcggcacctgtgtgagccacatcggggccatcctgagcacctacacccctgtggtgatcagctctgtgatgcaccgggtggcccggcatgctgccccccgggtgcacatcctgctggccatcttctacctgctcttcccccccatggtgaaccccatcatctacggcgtgaagaccaagcagatccgggagtatgtgctgagcctcttccagaggaagaacatgtag

SEQ ID NO: 21096 - DNA, 945 bp, Artificial Sequence
  derived and/or modified sequence
atgctgcccagcaacatcaccagcacccaccccgccgtgttcctgctggtgggcataccaggtttagagcatttacacgcctggatttccatccccttttgctttgcctacacccttgctctgctcgggaactgcacgctgctgttcataattcaggcagatgctgccctccacgagcccatgtatctttttttagctatgctcgccaccatcgacttggttttgtccagtaccaccctccctaagatgctggccatcttctggttccgggaccaggagatcaatttcttcgcctgtctggtgcagatgttttttctccattcttttagcatcatggaatcggcggtgcttctggccatggcgtttgatcgatacgtggctatctgcaaacctttgcactatacaacggtcctaactggatccctgattactaagattgggatggcggctgttgccagagccgtgacactgatgacaccactccccttcttattgcgccggttccattactgtaggggccccgtgatcgctcactgctactgtgagcacatggcagtggtgcggctcgcttgcggcgacaccagcttcaacaatatttacggcatagccgtggcaatgttcatcgtggtgctggatctgctgtttgtgattctgtcatatgttttcatcctacaggcagtgctgcagctggcatcccaggaagctaggtataaggcattcggcacctgcgtgtctcatatcggcgctatcttgagtacatacacacccgtggtcatcagttcagtcatgcacagggtggcccggcatgcagctccccgcgttcacatcctgctggctatattctacctactcttccctcctatggtgaatccgatcatttacggtgttaagactaagcagattagggaatacgttctatctctcttccagagaaagaatatgtag

SEQ ID NO: 21097 - DNA, 1030 bp, Artificial Sequence
  derived and/or modified sequence
gacaaggagatttccaggagccatgcttccctctaatatcacctcaacacatccagctgtctttttgttggtaggaattcctggtttggaacacctgcatgcctggatctccatccccttctgctttgcttatactctggccctgctaggcaactgtacccttctcttcattatccaggctgatgcagccctccatgaacccatgtacctctttctggccatgttggcaaccattgacttggttctttcttctacaacgctgcccaaaatgcttgccatattctggttcagggatcaggagatcaacttctttgcctgtctggtccagatgttcttccttcactccttctccatcatggagtcagcagtgctgctggccatggcctttgaccgctatgtggccatctgcaagccattgcactacacgacggtcctgactgggtccctcatcaccaagattggcatggctgctgtggcccgggctgtgacactaatgactccactccccttcctgctcagacgcttccactactgccgaggcccagtgattgcccattgctactgtgaacacatggctgtggtaaggctggcgtgtggggacactagcttcaacaatatctatggcattgctgtggccatgtttattgtggtgttggacctgctctttgttatcctgtcttatgtcttcatccttcaggcagttctccagcttgcctctcaggaggcccgctacaaggcatttgggacatgtgtgtctcacataggtgccatcctgtccacctacactccagtagtcatctcttcagtcatgcaccgtgtagcccgccatgctgcccctcgtgtccacatactccttgctattttctatctccttttcccacccatggtcaatcctatcatatatggagtcaagaccaagcagattcgtgagtatgtgctcagtctattccagagaaagaacatgtagatggatagttctctttttttatcccacttgccaagtaatgagaatgctggattggggttgagg

SEQ ID NO: 21098 - DNA, 945 bp, Artificial Sequence
  derived and/or modified sequence
atgctgccaagcaacattacctcgacacaccccgctgtgttcctgctggtcggtattccaggcctggagcatttgcacgcttggataagcattcccttctgctttgcatataccttagcactgctcggaaattgtaccctacttttcatcatccaggccgacgcagccctccacgagcccatgtacctcttccttgcgatgctagcaaccattgacctggttctgagtagcacgaccctcccgaaaatgttggccattttttggtttcgggatcaggagattaattttttcgcatgtctcgtacagatgttttttttacactcgtttagtataatggaaagtgccgtactactcgccatggcgtttgatcggtatgttgcgatctgcaagcctctccattacaccacggtccttaccgggtcgcttatcactaagattggaatggctgcggtggcgcgagctgtgacccttatgactcctctccctttcctcctgcgtagatttcattactgtaggggacccgtgatcgcacactgctactgtgagcacatggccgtggttcggctggcttgcggagacacaagtttcaacaatatctacgggattgctgtcgcgatgttcatagttgtcctcgacctgcttttcgtcattctttcttatgtgttcattctgcaagcggttttacaactggcgtcccaagaggcacggtataaggccttcggcacttgcgtctcgcacatcggcgcaatactctcgacgtatacacctgtggtgattagctcagtcatgcaccgcgtggcaagacatgccgctccgcgtgtgcacatactccttgccatcttctacctgctatttccccctatggtcaacccgattatatatggcgtcaagaccaagcagatcagggagtacgtgctaagcctgttccaacgtaaaaatatgtag

SEQ ID NO: 21099 - protein, 314 aa, Artificial Sequence
  derived and/or modified sequence
MSASNITLTHPTAFLLVGIPGLEHLHIWISIPFCLAYTLALLGNCTLLLIIQADAALHEPMYLFLAMLAAIDLVLSSSALPKMLAIFWFRDREINFFACLAQMFFLHSFSIMESAVLLAMAFDRYVAICKPLHYTKVLTGSLITKIGMAAVARAVTLMTPLPFLLRCFHYCRGPVIAHCYCEHMAVVRLACGDTSFNNIYGIAVAMFIVVLDLLLVILSYIFILQAVLLLASQEARYKAFGTCVSHIGAILAFYTTVVISSVMHRVARHAAPHVHILLANFYLLFPPMVNPIIYGVKTKQIRESILGVFPRKDM

SEQ ID NO: 21100 - DNA, 945 bp, Artificial Sequence
  derived and/or modified sequence
atgagcgccagcaacatcaccctgacccaccccaccgccttcctgctggtgggcatccccggcctggagcacctgcacatctggatcagcatccccttctgcctggcctacaccctggccctgctgggcaactgcaccctgctgctgatcatccaggccgacgccgccctgcacgagcccatgtacctgttcctggccatgctggccgccatcgacctggtgctgagcagcagcgccctgcccaagatgctggccatcttctggttcagagacagagagatcaacttcttcgcctgcctggcccagatgttcttcctgcacagcttcagcatcatggagagcgccgtgctgctggccatggccttcgacagatacgtggccatctgcaagcccctgcactacaccaaggtgctgaccggcagcctgatcaccaagatcggcatggccgccgtggccagagccgtgaccctgatgacccccctgcccttcctgctgagatgcttccactactgcagaggccccgtgatcgcccactgctactgcgagcacatggccgtggtgagactggcctgcggcgacaccagcttcaacaacatctacggcatcgccgtggccatgttcatcgtggtgctggacctgctgctggtgatcctgagctacatcttcatcctgcaggccgtgctgctgctggccagccaggaggccagatacaaggccttcggcacctgcgtgagccacatcggcgccatcctggccttctacaccaccgtggtgatcagcagcgtgatgcacagagtggccagacacgccgccccccacgtgcacatcctgctggccaacttctacctgctgttcccccccatggtgaaccccatcatctacggcgtgaagaccaagcagatcagagagagcatcctgggcgtgttccccagaaaggacatgtag

SEQ ID NO: 21101 - DNA, 945 bp, Artificial Sequence
  derived and/or modified sequence
atgtcagcttctaacattacgctgacccatcccacagcattccttttagtgggcattcccggacttgagcaccttcacatctggatcagcatacctttctgcctggcgtatacactggcgttgttgggcaattgtaccctgttactcatcatccaagctgatgccgcattacatgaacccatgtatctattcctggctatgctggccgctattgatttggtcctcagttccagcgctcttcccaaaatgttggcaattttctggttcagagatcgcgaaattaacttttttgcctgccttgcacaaatgttcttcctgcacagcttcagtatcatggagagtgccgtgctcctggctatggccttcgaccgctatgtcgctatctgcaagcctctgcactacacaaaggtgctgacagggagcctaataaccaagatcggaatggcagctgttgcacgcgcagtgaccctcatgactcccctgcctttcctgctgagatgcttccactactgcagggggccagtgatcgcccattgttattgcgaacatatggccgtggtgcgactcgcctgtggagacacatccttcaacaatatctatgggatcgctgtggcgatgttcatcgtggtgctggacctgctgttggtgatcctttcctatatctttatcctccaagctgtccttctcctcgcaagtcaggaggccagatacaaggcttttggcacctgcgtcagccatatcggagccattctcgctttctacacaacagtcgtcatcagtagtgtgatgcaccgcgtcgcgcgccacgctgcgccacatgtccatatccttctggcaaacttttatctactgtttccccccatggtcaaccccatcatctatggggttaagacaaagcagatcagggaatcaatcttaggtgtgtttccccgcaaggatatgtag

SEQ ID NO: 21102 - DNA, 945 bp, Artificial Sequence
  derived and/or modified sequence
atgtctgccagcaacatcaccctgacccaccccacagccttcctgctggtgggcatccctggcctggagcacctgcacatctggatcagcatccccttctgcctggcctacaccctggccctgctgggcaactgcaccctgctgctgatcatccaggctgatgctgccctgcacgagcccatgtacctgttcctggccatgctggccgccatcgacctggtgctgagcagcagcgccctgcccaagatgctggccatcttctggttccgggaccgggagatcaacttctttgcctgcctggcccagatgttcttcctgcacagcttcagcatcatggagagcgctgtgctgctggccatggcctttgacagatatgtggccatctgcaagcccctgcactacaccaaggtgctgaccggcagcctcatcaccaagattggcatggctgctgtggcccgggctgtgaccctgatgacccccctgcccttcctgctgcgctgcttccactactgccggggccctgtgattgcccactgctactgtgagcacatggctgtggtgcggctggcctgtggggacaccagcttcaacaacatctacggcattgctgtggccatgttcatcgtggtgctggacctgctgctggtgatcctgagctacatcttcatcctgcaggccgtgctgctgctggccagccaggaggcccgctacaaggccttcggcacctgtgtgagccacatcggggccatcctggccttctacaccaccgtggtgatcagctctgtgatgcaccgggtggcccggcatgctgcccctcatgtgcacatcctgctggccaacttctacctgctcttcccccccatggtgaaccccatcatctacggcgtgaagaccaagcagatccgggagagcatcctgggcgtcttccccaggaaggacatgtag

SEQ ID NO: 21103 - DNA, 945 bp, Artificial Sequence
  derived and/or modified sequence
atgagcgccagcaacatcaccctgacccaccccaccgccttcctgctggtgggcattcccggtctcgagcacctgcatatatggattagtattccattttgtctggcctatacgttagcattactgggcaattgcaccttattgcttatcattcaggccgatgccgctttacatgaacctatgtatctgttcttagcaatgctagcagcaatagatctggtgttgtcgtcttcagcactccccaaaatgctcgccatattctggttcagagaccgggagataaatttcttcgcttgtctggctcagatgttctttctgcattctttctcaattatggaaagcgccgtcttgttggctatggcattcgacagatacgtcgctatctgcaagcctttgcattacacaaaggtgctcaccggctcgctgatcaccaagatcggcatggccgctgtggctcgcgctgtcactttaatgacaccgctcccattccttttgagatgtttccactattgtcgggggccagtgattgcccactgctactgcgagcatatggctgtagtgcggctggcctgtggtgacacctcgttcaataacatttacggaatcgctgtggccatgtttatcgtcgtcctcgatcttctactcgtgattctctcatatatatttatcctgcaggccgtgctgctcctggctagccaggaagcaaggtataaagcatttggtacttgcgtctcccacataggtgccatactggccttctacacgaccgtggtaattagcagtgttatgcacagggtggcccggcacgctgccccccatgtgcacatcttactggcaaatttttaccttctgtttccaccaatggttaaccccatcatttatggagtaaagaccaaacaaatacgggagtctatcctgggcgttttcccacggaaggatatgtag

SEQ ID NO: 21104 - DNA, 1067 bp, Artificial Sequence
  derived and/or modified sequence
gggccctgtggaagcagataaggaggaagagaattcccaggagccatgtcagcctccaatatcaccttaacacatccaactgccttcttgttggtggggattccaggcctggaacacctgcacatctggatctccatccctttctgcttagcatatacactggccctgcttggaaactgcactctccttctcatcatccaggctgatgcagccctccatgaacccatgtacctctttctggccatgttggcagccatcgacctggtcctttcctcctcagcactgcccaaaatgcttgccatattctggttcagggatcgggagataaacttctttgcctgtctggcccagatgttcttccttcactccttctccatcatggagtcagcagtgctgctggccatggcctttgaccgctatgtggctatctgcaagccactgcactacaccaaggtcctgactgggtccctcatcaccaagattggcatggctgctgtggcccgggctgtgacactaatgactccactccccttcctgctgagatgtttccactactgccgaggcccagtgatcgctcactgctactgtgaacacatggctgtggtgaggctggcgtgtggggacactagcttcaacaatatctatggcatcgctgtggccatgtttattgtggtgttggacctgctccttgttatcctgtcttatatctttattcttcaggcagttctactgcttgcctctcaggaggcccgctacaaggcatttgggacatgtgtctctcatataggtgccatcttagccttctacacaactgtggtcatctcttcagtcatgcaccgtgtagcccgccatgctgcccctcatgtccacatcctccttgccaatttctatctgctcttcccacccatggtcaatcccataatctatggtgtcaagaccaagcaaatccgtgagagcatcttgggagtattcccaagaaaggatatgtagagggtgaggtggagaaagaatgggttggcttgtctgctggagttggagacaggctatggtagaatgtgcacggctgc

SEQ ID NO: 21105 - DNA, 945 bp, Artificial Sequence
  derived and/or modified sequence
atgtctgccagcaacattaccctgacgcacccaacagcgttcctcttagtggggattcccggtttggagcacttgcacatctggattagcattccattttgcctggcatataccctggcactcctggggaactgcacactcctcctcataatccaggctgacgcggcactgcacgagccaatgtatctcttcctcgccatgctagctgcgattgatttagtcttgtctagttcagcactccctaagatgttagccatattctggttccgagatagagagatcaatttttttgcttgcctcgctcagatgttttttctgcacagcttctccatcatggaatctgctgtattgctcgcgatggcattcgacagatatgtggccatatgcaagcccctgcactacactaaggtcctgaccggcagtctgatcacgaagattggtatggcggcagtcgctcgtgccgttaccctgatgactcctctgccatttttgctgcggtgctttcattactgtcgtggaccagtcatagctcactgctattgtgagcacatggcggttgtgcgcttggcctgcggcgacacctccttcaacaacatatatggtattgcggtggcaatgttcatagtcgttctagacttgctgctggtgatcctgtcttatatctttattctgcaggcagtactactccttgcttcacaagaagcccgttacaaggccttcggaacctgcgtctctcacatcggagccatactggccttttacactactgtggtgattagtagcgtaatgcacagagtggccagacatgccgctccacacgttcacatcctgctcgccaacttctacttactgtttccccctatggtgaaccccattatctatggcgttaaaaccaaacagatccgggaaagcattctgggggtatttccacgaaaagatatgtag

SEQ ID NO: 21106 - protein, 172 aa, Artificial Sequence
  derived and/or modified sequence
MAQQGQQGQMASGDSNLNFRMVAEIQNVEGQNLQEQVCPEPIFRFFRENKVEIASAITRPFPFLMGLRDRSFISEQMYEHFQEAFRNLVPVTRVMYCVLSELEKTFGWSHLEALFSRINLMAYPDLNEIYRSFQNENLSSSAVLCQLVSPNKDWRSHEESLAHTGTLRRSCM

SEQ ID NO: 21107 - DNA, 519 bp, Artificial Sequence
  derived and/or modified sequence
atggctcaacagggccagcagggccagatggcctctggagacagcaacctgaactttcggatggtcgctgagattcaaaatgtagaaggccagaatttgcaggagcaagtgtgccccgagccaatattcagattcttcagagaaaataaggtagagattgccagcgccattactcgcccctttccctttttgatgggcctgagggaccgttcttttattagcgaacagatgtatgagcattttcaagaggcttttaggaatctggtgcctgttaccagagtcatgtattgcgtactgtccgaacttgagaaaaccttcggctggagtcacttagaggcgctgttctcccgcatcaaccttatggcttacccggacctgaatgaaatttatcgctcattccagaacgaaaacttatcctcgtctgccgtgctgtgtcagcttgtgtcaccgaacaaggattggaggagtcacgaagaaagcctggcacacacaggcaccctgcgacgtagttgcatgtag

SEQ ID NO: 21108 - DNA, 519 bp, Artificial Sequence
  derived and/or modified sequence
atggcccagcagggccagcagggccagatggccagcggggacagcaacctgaacttcaggatggtggccgagatccagaatgtggagggccagaacctgcaggagcaggtgtgcccagagcccatcttccgcttcttccgggagaacaaggtggagatcgccagcgccatcacccggcccttccccttcctgatgggcctgcgggaccgctccttcatcagcgagcagatgtatgagcacttccaggaggccttcaggaacctggtgcctgtgaccagggtgatgtactgtgtgctgtctgagctggagaagaccttcggctggagccacctggaggccctcttcagccgcatcaacctgatggcctacccagacctgaatgagatctaccgctccttccagaatgaaaacctgagcagcagcgctgtgctgtgccagctggtgagccccaacaaggactggaggagccatgaggagagcctggcccacacaggcaccctgcggcgcagctgcatgtag

SEQ ID NO: 21109 - DNA, 519 bp, Artificial Sequence
  derived and/or modified sequence
atggcccagcagggccagcagggccagatggccagcggcgacagcaaccttaatttccgtatggtcgccgagatccagaatgtggaaggccagaacctacaagagcaagtgtgccctgagccaatctttaggtttttccgggagaacaaggtcgagatagcctcggctataacccgcccattcccctttttgatgggtctgagggaccggtcctttatttccgagcaaatgtacgaacacttccaggaagcgtttcgcaatctggtgcctgtgacacgggtcatgtattgcgtcctgagtgaacttgagaaaacctttggctggtcacaccttgaagcactgttcagcagaattaacctgatggcctacccagacctgaacgagatttatcgatcatttcaaaacgagaacttaagttctagcgctgttctctgccagcttgttagccctaacaaagattggcgaagccatgaggagagtctggcccatacagggacgttgaggcggagctgtatgtag

SEQ ID NO: 21110 - DNA, 814 bp, Artificial Sequence
  derived and/or modified sequence
gcagttggcagcttcacctcagagctgcaggaaggaacggggcagtgaaaatcgaatcgggtgtgatcctaggccaagctcatggcccagcagggccagcaggggcagatggcaagtggagacagcaatctcaacttcaggatggtcgcagagatccagaacgtagagggtcagaacctgcaggagcaggtttgccctgagcccattttcaggttcttcagagaaaacaaggtggagattgcaagtgcaataacaaggccatttcctttccttatgggcctccgagaccgctccttcatctccgagcagatgtatgaacattttcaagaagcttttagaaacctggtcccagtgacaagagtgatgtattgtgtactcagtgaactggagaagacatttggctggtcacatctggaagcattgttcagcaggattaacctgatggcctatcctgatttaaacgagatttacagaagcttccagaatgaaaatttatcatccagtgcagtcctgtgtcaacttgtttctccaaacaaagactggagaagtcacgaagagagcctagcacatactggtacactgaggaggagctgcatgtgaaagctatgaagacagaaaagggggttggtgggggcctttccgaaccatgtggttgaattgcagactgtgggaggcagggtgtgagagctgactctggagaaagaagttgaagtggattctggaaggcttgacaccctgtgctaaggaatctggagtttaatttttggaaaataaagaaggaataaagggcatttaaacgggaaaagtaaaagaa

SEQ ID NO: 21111 - DNA, 519 bp, Artificial Sequence
  derived and/or modified sequence
atggcccaacagggacagcagggacaaatggcctccggcgacagcaacctgaactttcgcatggtagcagagattcagaatgtcgagggacagaacctgcaagagcaggtctgcccggagcctattttccgcttcttcagagaaaacaaagtagagattgccagtgccattacccggccatttccatttctcatgggcctgcgcgaccgttcattcatctccgagcaaatgtacgagcactttcaggaggccttccgtaatctcgtgccagttactcgtgtgatgtactgtgtgttgtccgaactcgagaaaacattcgggtggtcacacttagaagcgcttttttcccgaataaatctaatggcttaccccgatttaaacgagatttaccgctcgtttcagaacgagaacttgtcctcgagcgccgtgctctgccagcttgtaagcccaaataaagactggaggagccatgaggaatctcttgctcacaccggaacccttcggcgatcttgtatgtag

SEQ ID NO: 21112 - DNA, 519 bp, Artificial Sequence
  derived and/or modified sequence
atggcccagcagggccagcagggccagatggccagcggcgacagcaacctgaacttcagaatggtggccgagatccagaacgtggagggccagaacctgcaggagcaggtgtgccccgagcccatcttcagattcttcagagagaacaaggtggagatcgccagcgccatcaccagacccttccccttcctgatgggcctgagagacagaagcttcatcagcgagcagatgtacgagcacttccaggaggccttcagaaacctggtgcccgtgaccagagtgatgtactgcgtgctgagcgagctggagaagaccttcggctggagccacctggaggccctgttcagcagaatcaacctgatggcctaccccgacctgaacgagatctacagaagcttccagaacgagaacctgagcagcagcgccgtgctgtgccagctggtgagccccaacaaggactggagaagccacgaggagagcctggcccacaccggcaccctgagaagaagctgcatgtag

SEQ ID NO: 21113 - protein, 312 aa, Artificial Sequence
  derived and/or modified sequence
MRNHTEITEFILLGLTDDPNFQVVIFVFLLITYMLSITGNLTLITITLLDSHLQTPMYFFLRNFSILEISFTTVSIPKFLGNIISGDKTISFNNCIVQLFFFILLGVTEFYLLAAMSYDRYVAICKPLHCLSIMNRRVCTLLVFTSWLVSFLIIFPALMLLLKLHYCRSNIIDHFTCDYFPLLQLACSDTKFLEVMGFSCAAFTLMFTLALIFLSYIYIIRTILRIPSTSQRTKAFSTCSSHMVVVSISYGSCIFMYIKPSAKDRVSLSKGVAILNTSVAPMMNPFIYSLRNQQVKQAFINMARKTVFFTST

SEQ ID NO: 21114 - DNA, 939 bp, Artificial Sequence
  derived and/or modified sequence
atgagaaaccacaccgagatcaccgagttcatcctgctgggcctgaccgacgaccccaacttccaggtggtgatcttcgtgttcctgctgatcacctacatgctgagcatcaccggcaacctgaccctgatcaccatcaccctgctggacagccacctgcagacccccatgtacttcttcctgagaaacttcagcatcctggagatcagcttcaccaccgtgagcatccccaagttcctgggcaacatcatcagcggcgacaagaccatcagcttcaacaactgcatcgtgcagctgttcttcttcatcctgctgggcgtgaccgagttctacctgctggccgccatgagctacgacagatacgtggccatctgcaagcccctgcactgcctgagcatcatgaacagaagagtgtgcaccctgctggtgttcaccagctggctggtgagcttcctgatcatcttccccgccctgatgctgctgctgaagctgcactactgcagaagcaacatcatcgaccacttcacctgcgactacttccccctgctgcagctggcctgcagcgacaccaagttcctggaggtgatgggcttcagctgcgccgccttcaccctgatgttcaccctggccctgatcttcctgagctacatctacatcatcagaaccatcctgagaatccccagcaccagccagagaaccaaggccttcagcacctgcagcagccacatggtggtggtgagcatcagctacggcagctgcatcttcatgtacatcaagcccagcgccaaggacagagtgagcctgagcaagggcgtggccatcctgaacaccagcgtggcccccatgatgaaccccttcatctacagcctgagaaaccagcaggtgaagcaggccttcatcaacatggccagaaagaccgtgttcttcaccagcacctag

SEQ ID NO: 21115 - DNA, 939 bp, Artificial Sequence
  derived and/or modified sequence
atgaggaatcacacagagatcacggagtttatactgctgggtcttacagatgacccaaacttccaggtggttatcttcgtgttccttctcataacttacatgctgtcgataacaggtaacctgacccttattactattacactcctggatagtcacctgcagactcctatgtacttcttccttagaaatttctctatcctcgagatttcatttacaacagtgtccattcctaagttcctggggaacatcatctcaggtgataaaacgattagcttcaataattgcattgtgcagctattcttttttattcttctcggcgtgacagagttctacctcctggctgccatgtcgtacgatcgctatgtcgcaatctgcaaacccctgcactgtctgagtattatgaatcgccgtgtctgcacccttctcgtttttaccagttggttggtgagtttccttattattttcccagctttgatgcttctgctgaagctgcactattgccgttcaaacattattgaccacttcacatgcgactatttccccctcctgcagctcgcttgctctgacactaagttcctggaggtgatgggcttctcatgcgctgccttcaccctcatgttcaccctcgccctgatattcctgtcatatatctacatcatccgtaccatcttaaggatcccctccacatcccagaggaccaaagcatttagcacttgtagtagccatatggtggtggtgtcaatctcttacggttcctgcatcttcatgtatattaaaccctccgctaaagaccgagtgtccctgtcaaagggcgtcgcaattctcaacacctccgtggcgcctatgatgaaccccttcatctacagtctgcgcaatcaacaggtgaaacaggctttcatcaacatggcccggaaaactgtcttcttcacgtccacttag

SEQ ID NO: 21116 - DNA, 939 bp, Artificial Sequence
  derived and/or modified sequence
atgaggaaccacacagagatcacagagttcatcctgctgggcctgacagatgaccccaacttccaggtggtgatctttgtgttcctgctgatcacctacatgctgagcatcaccggcaacctgaccctcatcaccatcaccctgctggacagccacctgcagacccccatgtacttcttcctgaggaacttcagcatcctggagatctccttcaccaccgtgtccatccccaagttcctgggcaacatcatcagcggggacaagaccatctccttcaacaactgcatcgtgcagctgttcttcttcatcctgctgggcgtgacagagttctacctgctggccgccatgtcctatgacagatatgtggccatctgcaagcccctgcactgcctgagcatcatgaacagaagagtgtgcaccctgctggtgttcacctcctggctggtgtccttcctgatcatcttccctgccctgatgctgctgctgaagctgcactactgccgcagcaacatcatcgaccacttcacctgtgactacttccccctgctgcagctggcctgcagcgacaccaagttcctggaggtgatgggcttcagctgtgccgccttcaccctgatgttcaccctggccctgatcttcctgagctacatctacatcatccgcaccatcctgcgcatccccagcaccagccagaggaccaaggccttcagcacctgcagcagccacatggtggtggtgtccatctcctatggcagctgcatcttcatgtacatcaagcccagcgccaaggacagagtgtccctgagcaagggcgtggccatcctgaacacctctgtggcccccatgatgaaccccttcatctacagcctgaggaaccagcaggtgaagcaggccttcatcaacatggccaggaagacagtgttcttcaccagcacctag

SEQ ID NO: 21117 - DNA, 939 bp, Artificial Sequence
  derived and/or modified sequence
atgcggaaccacaccgagatcaccgagttcatcctgctgggcctgacagatgaccccaactttcaagtggttatattcgtatttctgcttatcacctacatgctgtcaattactgggaacttgacccttatcacaattactctgctggatagccatctgcagaccccgatgtacttctttctgaggaattttagtatcctggaaatctcattcacaacagtgtcgattccaaaattcctagggaacattataagtggggataaaacgatcagctttaacaactgtatcgtgcagctttttttcttcattctgctgggcgtaacagaattctaccttttggccgccatgagctatgaccggtacgtggctatctgtaagcccttgcactgcttatctatcatgaatcgaagggtgtgcacgctcctcgtgttcaccagttggctagtttctttcctgatcatctttcccgcccttatgctcttactcaagctccattactgccgctccaacatcatcgatcactttacgtgcgactactttcccctactccagctggcctgcagcgatactaaatttctggaagtgatgggctttagctgcgccgccttcacactaatgtttactctcgctctaatcttcctttcctacatttacatcatccggaccatcctgcgcatcccaagcacctcacagcgaactaaagcattctcgacttgcagctcacacatggtggttgtcagcataagttatggaagttgtatattcatgtacatcaagccatctgccaaagaccgtgtgtcgctgtccaaaggcgtggctatcctgaacacctctgtcgctcccatgatgaatcctttcatttactcgctgcggaaccaacaagttaagcaggcctttatcaacatggcgcgtaagaccgtatttttcactagcacctag

SEQ ID NO: 21118 - DNA, 1063 bp, Artificial Sequence
  derived and/or modified sequence
tgtaggtctggcaggggaaaaaagaaagcaactgaagaatgagaaaccatacagaaataacagagtttattcttctgggattaacagatgacccaaattttcaggttgtaatctttgtcttcctgctcatcacctacatgctcagcatcactgggaacctgacccttatcacaattaccctgctggattcccacctgcagacccccatgtatttcttcctcagaaatttctccatattagaaatttcgttcacaaccgtcagtatacccaagtttctgggtaacattatttcaggagataaaaccatttcctttaataattgcatagttcagttatttttcttcattctcttgggagtcacagagttttaccttctggctgccatgtcctatgaccgctatgtggccatctgcaagcctctgcattgcttgagtatcatgaatcgaagagtctgcacactgcttgtttttacttcttggctggtttcattcttaatcatattcccagcactcatgttgcttttaaagcttcattactgtaggtctaatattattgaccattttacctgtgattattttccactgctgcaacttgcttgttcagacacaaaattcttagaggtgatgggattttcttgtgctgcgtttactctaatgttcactttggcattaatatttctgtcctacatatacattatcagaacaattttgagaattccttctactagtcagaggacaaaggccttttccacatgttcttcccacatggttgttgtctccatctcttatggcagctgcatttttatgtacattaaaccctcagcaaaagatagagtgtccttgagcaagggagtggcaatactaaacacctcagtagcccccatgatgaacccctttatttacagcctaagaaatcagcaagtcaagcaagctttcattaacatggcaaggaagactgtatttttcacaagcacatgaaatggtatggtgtgatgaattagaggcacaggaaaggacaatatgaattttcagtagcttcttcaatcaaaatggcctccttgcag

SEQ ID NO: 21119 - DNA, 939 bp, Artificial Sequence
  derived and/or modified sequence
atgagaaaccacaccgagattactgaatttattctgctcggcttgactgatgatccgaacttccaagttgtgattttcgtatttctgctgattacatatatgctcagcatcactggcaatttgacactcatcaccatcactctgttggacagccatcttcagacgcctatgtactttttcttgcggaatttttccatcctagaaatctccttcaccacagtgtctattcccaaattcctgggaaacatcatcagcggcgacaagaccatctctttcaataactgtatcgtgcagctcttttttttcattctgttaggggtgaccgagttctaccttctcgcagctatgtcatacgatcggtacgttgccatctgcaagcctctccactgcctgagtatcatgaatcgccgagtgtgcacattacttgttttcacaagctggctggtctcttttctcataatttttccggctcttatgcttctgctgaagctccattactgtcgctccaacatcatcgatcactttacatgtgactacttcccactgctgcaactcgcatgttctgatactaagtttttggaggtgatgggtttctcttgcgcggctttcactcttatgtttaccctggccttaatttttctatcctacatatacattatccggactatccttcgcattccatcgacatctcagcgcacgaaggccttttctacgtgctcaagtcacatggttgtggtttccattagctacggatcctgtattttcatgtatattaaaccctccgctaaagatcgggtgtccctgtccaagggcgtggctatcctgaacaccagtgtggcgcctatgatgaatcccttcatttactcattgcgcaatcagcaggtcaagcaggcttttatcaacatggcgaggaagactgtgtttttcacctcaacttag

SEQ ID NO: 21120 - protein, 343 aa, Artificial Sequence
  derived and/or modified sequence
MKQYSVGNQHSNYRSLLFPFLCSQMTQLTASGNQTMVTEFLFSMFPHAHRGGLLFFIPLLLIYGFILTGNLIMFIVIQVGMALHTPLYFFISVLSFLEICYTTTTIPKMLSCLISEQKSISVAGCLLQMYFFHSLGITESCVLTAMAIDRYIAICNPLRYPTIMIPKLCIQLTVGSCFCGFLLVLPEIAWISTLPFCGSNQIHQIFCDFTPVLSLACTDTFLVVIVDAIHAAEIVASFLVIALSYIRIIIVILGMHSAEGHHKAFSTCAAHLAVFLLFFGSVAVMYLRFSATYSVFWDTAIAVTFVILAPFFNPIIYSLKNKDMKEAIGRLFHYQKRAGWAGK

SEQ ID NO: 21121 - DNA, 1032 bp, Artificial Sequence
  derived and/or modified sequence
atgaagcagtacagcgtgggcaaccagcacagcaactacagaagcctgctgttccccttcctgtgcagccagatgacccagctgaccgccagcggcaaccagaccatggtgaccgagttcctgttcagcatgttcccccacgcccacagaggcggcctgctgttcttcatccccctgctgctgatctacggcttcatcctgaccggcaacctgatcatgttcatcgtgatccaggtgggcatggccctgcacacccccctgtacttcttcatcagcgtgctgagcttcctggagatctgctacaccaccaccaccatccccaagatgctgagctgcctgatcagcgagcagaagagcatcagcgtggccggctgcctgctgcagatgtacttcttccacagcctgggcatcaccgagagctgcgtgctgaccgccatggccatcgacagatacatcgccatctgcaaccccctgagataccccaccatcatgatccccaagctgtgcatccagctgaccgtgggcagctgcttctgcggcttcctgctggtgctgcccgagatcgcctggatcagcaccctgcccttctgcggcagcaaccagatccaccagatcttctgcgacttcacccccgtgctgagcctggcctgcaccgacaccttcctggtggtgatcgtggacgccatccacgccgccgagatcgtggccagcttcctggtgatcgccctgagctacatcagaatcatcatcgtgatcctgggcatgcacagcgccgagggccaccacaaggccttcagcacctgcgccgcccacctggccgtgttcctgctgttcttcggcagcgtggccgtgatgtacctgagattcagcgccacctacagcgtgttctgggacaccgccatcgccgtgaccttcgtgatcctggcccccttcttcaaccccatcatctacagcctgaagaacaaggacatgaaggaggccatcggcagactgttccactaccagaagagagccggctgggccggcaagtag

SEQ ID NO: 21122 - DNA, 1032 bp, Artificial Sequence
  derived and/or modified sequence
atgaagcagtatagtgtgggaaaccagcatagcaactacagaagccttttatttccctttttgtgctcacagatgacacagctgaccgcctcagggaatcaaaccatggtcacagaattcctctttagcatgttccctcacgctcatcgcgggggattactgttcttcatcccactgctactgatctacggattcatattgacggggaacctgatcatgtttatcgtgattcaagttggcatggcactacacaccccactctacttcttcatctctgtcctctctttcctcgaaatttgttacacaactactacaatacctaagatgctaagctgtctgatttcagagcagaagagcattagcgtggccgggtgtctgctccagatgtacttcttccattccctgggtattaccgagagttgcgtactcaccgcgatggctatcgatcgctacatcgcaatctgcaaccctcttcgttatccaacaatcatgattcctaaattgtgcattcagttaacagtgggatcatgcttttgtggtttcctgctggtgttgcccgaaatcgcttggatttcgaccttgccattctgtggatcgaatcagattcatcagatattctgtgatttcacccccgtccttagcctggcttgtacggacacatttctggtggtgatagtggacgctatccacgcagctgagattgtcgctagcttcctcgtgatcgccctgtcctatatacggatcattatcgtgatactgggaatgcatagtgccgaaggccaccacaaggcattttcaacctgtgccgctcacctcgccgtctttcttctgttttttggaagcgtggcagttatgtatctccgcttcagtgctacatactcggttttctgggataccgcaattgccgtaactttcgtgatcttagctccatttttcaaccccatcatttactcgctaaaaaacaaagacatgaaagaggccatagggcgcctgttccactaccaaaagagggccggttgggccgggaaatag

SEQ ID NO: 21123 - DNA, 1032 bp, Artificial Sequence
  derived and/or modified sequence
atgaagcagtacagcgtgggcaaccagcacagcaactaccgcagcctgctcttccccttcctgtgcagccagatgacccagctgacagccagcggcaaccagaccatggtgacagagttcctgttctccatgttcccccacgcccacagaggaggcctgctcttcttcatccccctgctgctgatctacggcttcatcctgaccggcaacctgatcatgtttattgtcatccaggtgggcatggccctgcacacccccctgtacttcttcatctctgtgctgtccttcctggagatctgctacaccaccaccaccatccccaagatgctgagctgcctgatcagcgagcagaagagcatctctgtggccggctgcctgctgcagatgtacttcttccacagcctgggcatcacagagagctgtgtgctgacagccatggccatcgaccgctacatcgccatctgcaaccccctgcgctaccccaccatcatgatccccaagctgtgcatccagctgactgtgggcagctgcttctgtggcttcctgctggtgctgcctgagatcgcctggatcagcaccctgcccttctgtggcagcaaccagatccaccagatcttctgtgacttcacccctgtgctgagcctggcctgcacagacaccttcctggtggtgattgtggatgccatccatgctgctgagatcgtggccagcttcctggtgattgccctgagctacatccgcatcatcatcgtcatcctgggcatgcacagcgctgagggccaccacaaggccttcagcacctgtgccgcccacctggccgtgttcctgctcttctttggatctgtggccgtgatgtacctgcgcttcagcgccacctacagcgtcttctgggacacagccatcgctgtgacctttgtgatcctggcccccttcttcaaccccatcatctacagcctgaagaacaaggacatgaaggaggccatcggccgcctcttccactaccagaagagagctggctgggccggcaagtag

SEQ ID NO: 21124 - DNA, 1032 bp, Artificial Sequence
  derived and/or modified sequence
atgaagcagtacagcgtgggcaaccagcacagcaactaccggagcttactgtttccgttcctctgctctcaaatgacccagctcaccgccagcggcaaccagaccatggtgaccgaattcctattcagtatgttcccccatgctcatcgcggcggcttgctgttttttatccctcttctgttgatctatgggtttatcctgacaggtaaccttataatgttcatcgtgatacaggtcggaatggcgctgcacacgccactctactttttcatcagtgtgctgagcttcctggaaatttgctacacaaccacaaccatccctaagatgctcagttgcctgatttccgagcagaaatctatcagtgtggcaggttgcttgctccagatgtattttttccatagcctcggcattaccgagagttgtgtcttaactgccatggcaattgatcgatacattgccatctgtaatccgctgcgctaccccacaattatgataccaaagctctgtatccaactcacagtaggcagttgcttctgtggatttctgctagtgttgccggagatcgcctggatttccacactgccattttgtggatcaaatcagattcatcaaattttctgtgacttcacccccgtgttgagcttggcttgcaccgataccttcctggtcgtgatcgttgacgctatccatgcggctgagatcgttgcttcttttcttgttatcgcactctcctatatacgaatcataattgtcattctggggatgcatagcgcagaaggacaccacaaggctttttcaacctgcgccgcacacctggccgtattcctactattctttggttccgtggctgtgatgtacctaaggttctccgccacatactccgtgttctgggacaccgctattgcagttacatttgtgattcttgcccctttctttaaccccatcatatactcgcttaaaaataaagatatgaaagaagcgattggcagactattccactatcaaaagagggccggctgggccggcaaatag

SEQ ID NO: 21125 - DNA, 1172 bp, Artificial Sequence
  derived and/or modified sequence
cagatgattttggcatggaggtaaagcttaagagatatttctaactggtttcttcaggattccagaatcagcttgagtaactcattacagaaaggaatgaagcaatattcagtgggtaatcaacattccaattataggagtctcttgtttccttttctgtgttcacagatgacacagttgacggccagtgggaatcagacaatggtgactgagttcctcttctctatgttcccgcatgcgcacagaggtggcctcttattctttattcccttgcttctcatctacggatttatcctaactggaaacctaataatgttcattgtcatccaggtgggcatggccctgcacacccctttgtatttctttatcagtgtcctctccttcctggagatctgctataccacaaccaccatccccaagatgctgtcctgcctaatcagtgagcagaagagcatttccgtggctggctgcctcctgcagatgtactttttccactcacttggtatcacagaaagctgtgtcctgacagcaatggccattgacaggtacatagctatctgcaatccactccgttacccaaccatcatgattcccaaactttgtatccagctgacagttggatcctgcttttgtggcttcctccttgtgcttcctgagattgcatggatttccaccttgcctttctgtggctccaaccagatccaccagatattctgtgatttcacacctgtgctgagcttggcctgcacagatacattcctagtggtcattgtggatgccatccatgcagcggaaattgtagcctccttcctggtcattgctctatcctacatccggattattatagtgattctgggaatgcactcagctgaaggtcatcacaaggccttttccacctgtgctgctcaccttgctgtgttcttgctattttttggcagtgtggctgtcatgtatttgagattctcagccacctactcagtgttttgggacacagcaattgctgtcacttttgttatccttgctccctttttcaaccccatcatctatagcctgaaaaacaaggacatgaaagaggctattggaaggcttttccactatcagaagagggctggttgggctgggaaatagatacagatcctggagactctaaaaagcctcttggaagagcaaaa

SEQ ID NO: 21126 - DNA, 1032 bp, Artificial Sequence
  derived and/or modified sequence
atgaaacaatacagcgtgggcaaccagcactccaactaccgtagtctcctgttccccttcctttgcagccagatgactcaactgacagcatctggaaaccagacaatggtgacagaatttctgttctccatgttcccgcatgcgcaccgaggcggattgctcttttttattcccctgcttcttatctatggcttcatcctaactggaaatctcattatgttcatcgtgatccaggttggcatggctcttcacacccctctctatttctttattagcgtgctgtccttcctggaaatttgctataccaccactaccattcctaaaatgttgagctgtttgatctctgagcaaaagtcgatttcggttgccggatgtctactacagatgtacttttttcacagtcttggaatcacagaaagctgcgtcctcacagccatggccattgatcgctacatcgcgatatgcaacccattgaggtacccaacaattatgatccctaaactgtgcatccagcttaccgttgggagttgtttttgcggattcttgttagtgcttccggagattgcttggatcagcacactgcctttctgcggttctaaccaaattcatcagattttctgtgactttacccctgtcctgtccttggcctgcacagatacattcctggtggtaatcgtagatgcaatccacgcggctgagattgtggccagctttctagtcatcgccctgtcttacattcggatcataatcgttattctaggtatgcacagcgcagagggccatcataaggcgttcagtacatgcgcagcccatctcgccgtttttctgctattcttcggctcagttgctgtgatgtatctcaggttcagcgccacatactcagtattctgggatacagccatcgccgtcacctttgttatactggcaccattcttcaatcccatcatttactccttaaagaacaaggacatgaaagaagctatcgggagactctttcattatcagaagcgtgcaggatgggcagggaagtag

SEQ ID NO: 21127 - protein, 312 aa, Artificial Sequence
  derived and/or modified sequence
MDTGNWSQVAEFIILGFPHLQGVQIYLFLLLLLIYLMTVLGNLLIFLVVCLDSRLHTPMYHFVSILSFSELGYTAATIPKMLANLLSEKKTISFSGCLLQIYFFHSLGATECYLLTAMAYDRYLAICRPLHYPTLMTPTLCAEIAIGCWLGGLAGPVVEISLISRLPFCGPNRIQHVFCDFPPVLSLACTDTSINVLVDFVINSCKILATFLLILCSYVQIICTVLRIPSAAGKRKAISTCASHFTVVLIFYGSILSMYVQLKKSYSLDYDQALAVVYSVLTPFLNPFIYSLRNKEIKEAVRRQLKRIGILA

SEQ ID NO: 21128 - DNA, 939 bp, Artificial Sequence
  derived and/or modified sequence
atggacaccggcaactggagccaggtggccgagttcatcatcctgggcttcccccacctgcagggcgtgcagatctacctgttcctgctgctgctgctgatctacctgatgaccgtgctgggcaacctgctgatcttcctggtggtgtgcctggacagcagactgcacacccccatgtaccacttcgtgagcatcctgagcttcagcgagctgggctacaccgccgccaccatccccaagatgctggccaacctgctgagcgagaagaagaccatcagcttcagcggctgcctgctgcagatctacttcttccacagcctgggcgccaccgagtgctacctgctgaccgccatggcctacgacagatacctggccatctgcagacccctgcactaccccaccctgatgacccccaccctgtgcgccgagatcgccatcggctgctggctgggcggcctggccggccccgtggtggagatcagcctgatcagcagactgcccttctgcggccccaacagaatccagcacgtgttctgcgacttcccccccgtgctgagcctggcctgcaccgacaccagcatcaacgtgctggtggacttcgtgatcaacagctgcaagatcctggccaccttcctgctgatcctgtgcagctacgtgcagatcatctgcaccgtgctgagaatccccagcgccgccggcaagagaaaggccatcagcacctgcgccagccacttcaccgtggtgctgatcttctacggcagcatcctgagcatgtacgtgcagctgaagaagagctacagcctggactacgaccaggccctggccgtggtgtacagcgtgctgacccccttcctgaaccccttcatctacagcctgagaaacaaggagatcaaggaggccgtgagaagacagctgaagagaatcggcatcctggcctag

SEQ ID NO: 21129 - DNA, 939 bp, Artificial Sequence
  derived and/or modified sequence
atggacaccggtaattggtcacaggtagctgagttcattattctcggatttccacatctgcagggtgtacagatctatttattcctgctgcttctgctcatatatctcatgacagttctgggtaacctcttgatctttttggtcgtttgtctcgattcacggctccacacacctatgtaccacttcgtgagtatcctgtcctttagtgaactcgggtacaccgccgccaccattccaaaaatgctggccaacctcctatccgaaaagaagacaatttcattctcaggctgcttactccaaatttatttttttcattcccttggcgccaccgaatgctacctgctgaccgcgatggcttacgatcggtatcttgcaatttgtagaccattgcactatcccacccttatgacccctacattgtgtgcagagatcgccattggatgttggctcggtgggctggccgggcctgtcgtcgaaatttcacttatctcccgattacccttttgtggacccaacagaattcaacatgtcttttgtgactttccccccgtattatcactcgcatgcactgacacctccataaacgtactggtggacttcgtgatcaattcatgcaaaattctggccacctttctcctcattctgtgtagttacgtgcagatcatctgcacagtactgcgcataccctcagccgcgggcaaaaggaaagcgatatcaacatgcgctagccactttaccgtcgttctgattttctacggctccattctgtccatgtatgtgcagttaaaaaagtcctactcactcgattacgaccaggctctggcagtagtgtattcagtgttgactccctttctgaatcccttcatctactccctgaggaataaggagatcaaggaggcagtcaggaggcaactgaagagaatagggatcctcgcctag

SEQ ID NO: 21130 - DNA, 939 bp, Artificial Sequence
  derived and/or modified sequence
atggacaccggcaactggagccaggtggccgagttcatcatcctgggcttcccccacctgcagggcgtgcagatctacctgttcctgctgctgctgctgatctacctgatgacagtgctgggcaacctgctgatcttcctggtggtgtgcctggacagccggctgcacacccccatgtaccactttgtgtccatcctgtccttcagcgagctgggctacacagctgccaccatccccaagatgctggccaacctgctgtctgagaagaagaccatctccttcagcggctgcctgctgcagatctacttcttccacagcctgggcgccacagagtgctacctgctgacagccatggcctatgaccgctacctggccatctgccggcccctgcactaccccaccctgatgacccccaccctgtgtgccgagatcgccatcggctgctggctgggcggcctggccggccctgtggtggagatcagcctcatcagccggctgcccttctgtggccccaaccgcatccagcacgtgttctgtgacttcccccctgtgctgagcctggcctgcacagacaccagcatcaacgtgctggtggactttgtgatcaacagctgcaagatcctggccaccttcctgctgatcctgtgcagctatgtgcagatcatctgcaccgtgctgcgcatccccagcgctgctgggaagaggaaggccatcagcacctgtgccagccacttcaccgtggtgctgatcttctacggcagcatcctgtccatgtatgtgcagctgaagaagagctacagcctggactatgaccaggccctggccgtggtgtacagcgtgctgacccccttcctgaaccccttcatctacagcctgaggaacaaggagatcaaggaggccgtgcggcggcagctgaagagaattggcatcctggcctag

SEQ ID NO: 21131 - DNA, 939 bp, Artificial Sequence
  derived and/or modified sequence
atggacaccggcaactggagccaggtggccgagttcatcatcctggggtttccccatttacaaggagttcagatctacctgttcctgctcttgctgctgatctacctgatgactgtcttaggcaacctactcattttcttggtggtgtgcctggacagccgattacatactccgatgtaccacttcgtgtctattctgtccttctctgagttggggtacacagcagctacaattccaaaaatgttagcaaacctcctctcagagaaaaaaacgatctctttttcaggatgcctgctccagatatacttttttcactcgctcggcgcaacagaatgttatttactcacagccatggcgtacgatcgttacttagccatctgtcgccccctccactaccctacactgatgacccctacactgtgtgccgaaattgctatagggtgttggttggggggcctggccggccctgtcgttgaaatttcactgatcagtaggctgcccttttgcgggccaaaccggatccaacacgtgttctgcgacttccccccagtcctgtctctcgcctgcacagatacaagtatcaatgtactagtggacttcgttatcaactcatgcaaaatcctggcgacttttctgcttattctctgcagctacgtccaaattatatgcacggtactgaggatcccctccgccgcaggtaagaggaaggcgatctccacttgcgcaagccactttacagtggtactgatcttttacggcagtattctttcaatgtacgttcagctgaaaaaaagctacagcctggattatgaccaagctctcgcggtcgtgtactcagttttaacaccattcttgaaccccttcatttactctctgcgtaataaagaaatcaaggaagcagtgagaaggcagttgaaacggatcggcatccttgcttag

SEQ ID NO: 21132 - DNA, 1027 bp, Artificial Sequence
  derived and/or modified sequence
agggacatgaatggtgagcaatggacacagggaactggagccaggtagcagaattcatcatcttgggcttcccccatctccagggtgtccagatttatctcttcctcttgttgcttctcatttacctcatgactgtgttgggaaacctgctgatattcctggtggtctgcctggactcccggcttcacacacccatgtaccactttgtcagcattctctccttctcagagcttggctatacagctgccaccatccctaagatgctggcaaacttgctcagtgagaaaaagaccatttcattctctgggtgtctcctgcagatctatttctttcactcccttggagcgactgagtgctatctcctgacagctatggcctacgataggtatttagccatctgccggcccctccactacccaaccctcatgaccccaacactttgtgcagagattgccattggctgttggttgggaggcttggctgggccagtagttgaaatttccttgatttcacgcctcccattctgtggccccaatcgcattcagcacgtcttttgtgacttccctcctgtgctgagtttggcttgcactgatacgtctataaatgtcctagtagattttgttataaattcctgcaagatcctagccaccttcctgctgatcctctgctcctatgtgcagatcatctgcacagtgctcagaattccctcagctgccggcaagaggaaggccatctccacgtgtgcctcccacttcactgtggttctcatcttctatgggagcatcctttccatgtatgtgcagctgaagaagagctactcactggactatgaccaggccctggcagtggtctactcagtgctcacacccttcctcaaccccttcatctacagcttgcgcaacaaggagatcaaggaggctgtgaggaggcagctaaagagaattgggatattggcatgagttggggctgagagtaggccaaggccgggcctgaggatatggtggccccagggatcaacagtggccag

SEQ ID NO: 21133 - DNA, 939 bp, Artificial Sequence
  derived and/or modified sequence
atggacacgggaaattggagtcaggtggccgaattcatcattttgggcttcccccacctacagggggtgcaaatttatcttttcctgctactgttattgatttatctcatgaccgtcctcgggaatctcctaattttccttgttgtatgcttggactcccgactgcacacacccatgtaccatttcgtgagcattctgtctttttcggagctcgggtacaccgcggcaaccataccaaaaatgctcgctaaccttctgagtgagaagaaaaccatcagctttagcggctgcctcctccagatctacttctttcactctcttggcgcaaccgagtgttacctgcttacagccatggcatatgatagatacttagcgatttgcagaccactccattacccaacactcatgactcccaccttatgtgctgagatagctataggatgctggttgggagggcttgctgggcctgttgtggaaatttcacttataagtcgactgcccttctgtggacctaaccgtatccaacacgtcttttgtgacttccctcctgtcttatctttggcctgtaccgatactagcattaacgtcctggtggattttgtgattaattcctgcaagatactggctacattcctgctgattttgtgttcctatgttcagataatctgcactgtgctgagaatcccaagcgccgctggaaagcgaaaagctatatctacttgcgccagccatttcacggttgtactcatcttttatgggagcatactatccatgtatgtacagctgaagaagtcgtacagcttagactacgaccaggccctggctgtcgtgtactcagtcctgacaccatttctcaacccatttatttactctctgaggaataaggagatcaaggaagccgtgcgcagacagcttaagcgtataggaatcctcgcctag

SEQ ID NO: 21134 - protein, 312 aa, Artificial Sequence
  derived and/or modified sequence
MRNGTVITEFILLGFPVIQGLQTPLFIAIFLTYILTLAGNGLIIATVWAEPRLQIPMYFFLCNLSFLEIWYTTTVIPKLLGTFVVARTVICMSCCLLQAFFHFFVGTTEFLILTIMSFDRYLTICNPLHHPTIMTSKLCLQLALSSWVVGFTIVFCQTMLLIQLPFCGNNVISHFYCDVGPSLKAACIDTSILELLGVIATILVIPGSLLFNMISYIYILSAILRIPSATGHQKTFSTCASHLTVVSLLYGAVLFMYLRPTAHSSFKINKVVSVLNTILTPLLNPFIYTIRNKEVKGALRKAMTCPKTGHAK

SEQ ID NO: 21135 - DNA, 939 bp, Artificial Sequence
  derived and/or modified sequence
atgagaaacggcaccgtgatcaccgagttcatcctgctgggcttccccgtgatccagggcctgcagacccccctgttcatcgccatcttcctgacctacatcctgaccctggccggcaacggcctgatcatcgccaccgtgtgggccgagcccagactgcagatccccatgtacttcttcctgtgcaacctgagcttcctggagatctggtacaccaccaccgtgatccccaagctgctgggcaccttcgtggtggccagaaccgtgatctgcatgagctgctgcctgctgcaggccttcttccacttcttcgtgggcaccaccgagttcctgatcctgaccatcatgagcttcgacagatacctgaccatctgcaaccccctgcaccaccccaccatcatgaccagcaagctgtgcctgcagctggccctgagcagctgggtggtgggcttcaccatcgtgttctgccagaccatgctgctgatccagctgcccttctgcggcaacaacgtgatcagccacttctactgcgacgtgggccccagcctgaaggccgcctgcatcgacaccagcatcctggagctgctgggcgtgatcgccaccatcctggtgatccccggcagcctgctgttcaacatgatcagctacatctacatcctgagcgccatcctgagaatccccagcgccaccggccaccagaagaccttcagcacctgcgccagccacctgaccgtggtgagcctgctgtacggcgccgtgctgttcatgtacctgagacccaccgcccacagcagcttcaagatcaacaaggtggtgagcgtgctgaacaccatcctgacccccctgctgaaccccttcatctacaccatcagaaacaaggaggtgaagggcgccctgagaaaggccatgacctgccccaagaccggccacgccaagtag

SEQ ID NO: 21136 - DNA, 939 bp, Artificial Sequence
  derived and/or modified sequence
atgcgcaatggcaccgtgataactgagttcatcctcttaggctttcctgtgatccagggtctgcagacacccctctttatcgctatcttcttaacctatatattgaccctagcaggcaacggattgattattgcaaccgtgtgggccgaacccaggcttcaaattccgatgtacttttttttgtgtaatctcagcttccttgagatatggtacactacaaccgtgattccaaagcttttgggtacatttgtcgtggcacggacagtcatctgcatgagctgctgtctactccaggcctttttccacttctttgtagggactacggaattcctcattctgaccattatgtcgttcgatcgttaccttacaatctgtaaccccttgcaccatcctacaattatgaccagcaagttatgcctgcagctggcgctaagctcttgggtcgtcggcttcaccattgttttctgtcagaccatgctgctgatccagctgcccttctgtggcaacaatgtgatctcccatttctattgcgatgtagggccgtcccttaaagccgcatgcatagacacttctattctagaattactcggagtgattgcgactatcctcgttatccctggctccttattgttcaacatgatctcatacatctacattctctccgcgattctcaggattccatctgccactggacaccagaaaacttttagcacttgtgcttctcacctcaccgtcgtgtcacttctctacggagccgtcctgtttatgtacttgagaccaacagcacactcgagctttaaaataaacaaagtggtgagtgttctaaatacaatcttgacgcctcttctgaacccattcatttataccatcagaaacaaggaggtgaagggagcacttaggaaagcgatgacatgccctaagaccggacacgccaaatag

SEQ ID NO: 21137 - DNA, 939 bp, Artificial Sequence
  derived and/or modified sequence
atgagaaatggaacagtcatcacagagttcatcctgctgggcttccctgtgatccagggcctgcagacccccctcttcatcgccatcttcctgacctacatcctgaccctggccggaaatggcctcatcatcgccaccgtgtgggccgagccccggctgcagatccccatgtacttcttcctgtgcaacctgtccttcctggagatctggtacaccaccaccgtcatccccaagctgctgggcacctttgtggtggccaggacagtcatctgcatgagctgctgcctgctgcaggccttcttccacttctttgtgggcaccacagagttcctgatcctgaccatcatgagctttgaccgctacctgaccatctgcaaccccctgcaccaccccaccatcatgaccagcaagctgtgcctgcagctggccctgagctcctgggtggtgggcttcaccatcgtgttctgccagaccatgctgctgatccagctgcccttctgtggcaacaacgtcatcagccacttctactgtgatgtgggccccagcctgaaggccgcctgcatcgacaccagcatcctggagctgctgggcgtgattgccaccatcctggtgattcctggcagcctgctcttcaacatgatctcctacatctacatcctgagcgccatcctgcgcatccccagcgccaccggccaccagaagaccttcagcacctgtgccagccacctgactgtggtgtccctgctgtatggagctgtgctcttcatgtacctgcggcccacagcccacagcagcttcaagatcaacaaggtggtgtctgtgctgaacaccatcctgacccccctgctgaaccccttcatctacaccatccggaacaaggaggtgaagggggccctgaggaaggccatgacctgccccaagacaggccacgccaagtag

SEQ ID NO: 21138 - DNA, 939 bp, Artificial Sequence
  derived and/or modified sequence
atgcggaacggcaccgtgatcaccgagttcatcctgctgggcttcccagttattcaggggctgcagacaccactgttcatcgctatatttctaacctatatactgacactcgccggaaacgggcttattatagcaacagtgtgggccgagcccagactgcagatacccatgtacttcttcctctgcaatcttagtttccttgaaatttggtacactaccacagttattccaaagcttctggggactttcgtggtggcaaggactgttatctgtatgagctgctgcttacttcaggccttttttcacttctttgtggggacaacagaatttctcatcctgaccattatgagtttcgaccgctatttgaccatctgcaatcccctccatcacccgacaataatgaccagtaagctgtgcctgcagctggctctgtccagttgggtggtgggattcacgatcgtgttctgtcagactatgctgctgattcagctgccattctgcggcaacaacgtgatcagtcacttttactgtgacgtcgggccaagtctgaaggccgcgtgtatagatacctccatcctcgaattgctaggagtcatagccacaatcttggtgatccccggatcactactgttcaatatgatctcatacatctacatcctgagcgcaatcctgcgcattccgagcgccaccggacatcagaaaactttctcgacctgcgcatcacatcttaccgtcgtgagcctactatacggcgccgtgctgtttatgtatctcagacccacagcacactccagctttaaaatcaataaagtggttagcgtcctgaataccatcttaaccccgctgctgaacccttttatttataccatccgcaacaaggaagtgaaaggtgccttgcgcaaagccatgacgtgtccgaagactggtcacgccaagtag

SEQ ID NO: 21139 - DNA, 1058 bp, Artificial Sequence
  derived and/or modified sequence
gcttgtctttctagggtatcaagggacatgagaaatggcacagtaatcacagaattcatcctgctaggctttcctgttatccaaggcctacaaacacctctctttattgcaatctttctcacctacatattaacccttgcaggcaatgggcttattattgccactgtgtgggctgagcccaggctacaaattccaatgtacttcttcctttgtaacttgtctttcttagaaatctggtacaccaccacagtcatccccaaactgctaggaacctttgtagtggcaagaacagtaatctgcatgtcctgctgcctgctgcaggccttcttccacttcttcgtgggcaccaccgagttcttgatcctcactatcatgtcttttgaccgctacctcaccatctgcaatccccttcaccaccccaccatcatgaccagcaaactctgcctgcagctggccctgagctcctgggtggtgggcttcaccattgtcttttgtcagacgatgctgctcatccagttgccattctgtggcaataatgttatcagtcatttctactgtgatgttgggcccagtttgaaagccgcctgcatagacaccagcattttggaactcctgggcgtcatagcaaccatccttgtgatcccagggtcacttctctttaatatgatttcttatatctacattctgtccgcaatcctacgaattccttcagccactggccaccaaaagactttctctacctgtgcctcgcacctgacagttgtctccctgctctacggggctgttctgttcatgtacctaagacccacagcacactcctcctttaagattaataaggtggtgtctgtgctaaatactatcctcaccccccttctgaatccctttatttatactattagaaacaaggaggtgaagggagccttaagaaaggcaatgacttgcccaaagactggtcatgcaaagtaaaacatgcaacacatcaaagtgagcttaatgcagataaaaacaatgaaagttgagagaggattttggagaagtttggtaaaacaggctccccc

SEQ ID NO: 21140 - DNA, 939 bp, Artificial Sequence
  derived and/or modified sequence
atgcggaatggaaccgtgattacggaattcatcctcctcggatttcctgtgatacagggtctgcagacaccactgttcattgcaatctttctgacctatattttgacccttgccggtaacgggctgattattgcaacagtgtgggctgagccacgcctacagattccaatgtatttcttcttatgcaatctgtcatttctggaaatctggtacacaacaactgtgattcccaagttgctgggaaccttcgtcgtagcccgtacggtgatatgcatgtcttgctgcctcctacaagcgttctttcatttttttgttggtacaacggagtttttaatccttactatcatgagctttgatcgctacttgactatttgcaaccctctacatcatccaaccattatgacgtccaagctctgcctccagttggccctttccagctgggtcgtgggcttcacaattgtcttctgtcagaccatgctgctgatccaactgcctttttgcgggaataatgtgatctcccatttttattgtgatgtgggccctagtttaaaggccgcatgtatcgataccagcatcctcgaactgctaggggttattgctaccatcctggtgatcccaggcagcctgctcttcaatatgatcagttatatatacattctgtccgccatcctcagaattcctagcgccaccggccaccagaaaacctttagtacatgcgccagccatctcacggtggtgtctctgttgtacggcgcagtgctctttatgtacctgaggccaactgctcattcgagtttcaagatcaataaggtcgtatccgtgcttaacacaatcctcacccctctactcaatcccttcatctataccatacgaaacaaagaagtaaaaggagctctgcgcaaagccatgacctgcccaaagaccgggcatgctaaatag

SEQ ID NO: 21141 - protein, 325 aa, Artificial Sequence
  derived and/or modified sequence
MTTIILEVDNHTVTTRFILLGFPTRPAFQLLFFSIFLATYLLTLLENLLIILAIHSDGQLHKPMYFFLSHLSFLEMWYVTVISPKMLVDFLSHDKSISFNGCMTQLYFFVTFVCTEYILLAIMAFDRYVAICNPLRYPVIMTNQLCGTLAGGCWFCGLMTAMIKMVFIAQLHYCGMPQINHYFCDISPLLNVSCEDASQAEMVDFFLALMVIAIPLCVVVASYAAILATILRIPSAQGRQKAFSTCASHLTVVILFYSMTLFTYARPKLMYAYNSNKVVSVLYTVIVPLLNPIIYCLRNHEVKAALRKTIHCRGSGPQGNGAFSS

SEQ ID NO: 21142 - DNA, 978 bp, Artificial Sequence
  derived and/or modified sequence
atgaccaccatcatcctggaggtggacaaccacaccgtgaccaccagattcatcctgctgggcttccccaccagacccgccttccagctgctgttcttcagcatcttcctggccacctacctgctgaccctgctggagaacctgctgatcatcctggccatccacagcgacggccagctgcacaagcccatgtacttcttcctgagccacctgagcttcctggagatgtggtacgtgaccgtgatcagccccaagatgctggtggacttcctgagccacgacaagagcatcagcttcaacggctgcatgacccagctgtacttcttcgtgaccttcgtgtgcaccgagtacatcctgctggccatcatggccttcgacagatacgtggccatctgcaaccccctgagataccccgtgatcatgaccaaccagctgtgcggcaccctggccggcggctgctggttctgcggcctgatgaccgccatgatcaagatggtgttcatcgcccagctgcactactgcggcatgccccagatcaaccactacttctgcgacatcagccccctgctgaacgtgagctgcgaggacgccagccaggccgagatggtggacttcttcctggccctgatggtgatcgccatccccctgtgcgtggtggtggccagctacgccgccatcctggccaccatcctgagaatccccagcgcccagggcagacagaaggccttcagcacctgcgccagccacctgaccgtggtgatcctgttctacagcatgaccctgttcacctacgccagacccaagctgatgtacgcctacaacagcaacaaggtggtgagcgtgctgtacaccgtgatcgtgcccctgctgaaccccatcatctactgcctgagaaaccacgaggtgaaggccgccctgagaaagaccatccactgcagaggcagcggcccccagggcaacggcgccttcagcagctag

SEQ ID NO: 21143 - DNA, 978 bp, Artificial Sequence
  derived and/or modified sequence
atgacaactattattctagaagtggacaatcataccgtgacaacccggtttattttgctgggattcccaacgcggcctgcatttcagctgctcttcttttccatcttcttagctacatatctcctgaccctcctggaaaacctgttgattatcctggccatacatagcgacggacagttacacaagcctatgtatttcttcctgagtcacctgtcgttcctcgaaatgtggtacgttacagtgatcagccccaaaatgctggtcgactttctcagccacgataaaagcatctccttcaacggctgcatgacacaactgtacttctttgtgacattcgtgtgtactgagtatatacttctggctatcatggcctttgatagatatgtcgccatctgcaaccccctgcggtaccctgtcatcatgaccaaccaactctgcggtacattagccggcggatgctggttctgcggcctaatgacggcaatgatcaaaatggtgtttatcgcacagctacactattgcggaatgccacagattaaccactacttctgtgatatctcacctctgcttaacgtgagctgtgaagatgcatcccaggcggagatggtcgatttttttctcgctctaatggtcattgccataccactgtgtgtcgtggtggctagctacgcagcaatcttggccacgatattgcgcattccaagcgcacagggtcgccagaaagcattttcaacgtgcgcctcccacttgaccgtcgttattttgttctacagtatgaccctgttcacttacgcccgcccgaaactgatgtatgcttacaatagcaacaaggtggtatcagtcctttacaccgtaatagtgcctttgctaaacccaataatttactgccttcgtaatcatgaggtaaaggccgccctcaggaagaccattcactgcaggggcagtggcccacaaggaaacggggcttttagctcatag

SEQ ID NO: 21144 - DNA, 978 bp, Artificial Sequence
  derived and/or modified sequence
atgaccaccatcatcctggaggtggacaaccacacagtgaccacccgcttcatcctgctgggcttccccaccaggcctgccttccagctgctcttcttcagcatcttcctggccacctacctgctgaccctgctggagaacctgctgatcatcctggccatccacagtgatggccagctgcacaagcccatgtacttcttcctgagccacctgtccttcctggagatgtggtacgtgaccgtcatcagccccaagatgctggtggacttcctgagccatgacaagagcatctccttcaacggctgcatgacccagctgtacttctttgtgacctttgtgtgcacagagtacatcctgctggccatcatggcctttgaccgctacgtggccatctgcaaccccctgcgctaccctgtgatcatgaccaaccagctgtgtggcaccctggccggcggctgctggttctgtggcctgatgacagccatgatcaagatggtgttcatcgcccagctgcactactgcggcatgccccagatcaaccactacttctgtgacatcagccccctgctgaatgtgtcctgtgaagatgccagccaggccgagatggtggacttcttcctggccctgatggtgattgccatccccctgtgtgtggtggtggccagctatgctgccatcctggccaccatcctgcgcatccccagcgcccagggccggcagaaggccttcagcacctgtgccagccacctgactgtggtgatcctcttctacagcatgaccctcttcacctacgcccggcccaagctgatgtatgcctacaacagcaacaaggtggtgtctgtgctgtacaccgtcatcgtgcccctgctgaaccccatcatctactgcctgaggaaccacgaggtgaaggccgccctgaggaagaccatccactgccggggcagcggcccccagggcaatggagccttcagcagctag

SEQ ID NO: 21145 - DNA, 978 bp, Artificial Sequence
  derived and/or modified sequence
atgaccaccatcatcctggaggtggacaaccacaccgtgaccacccggtttatcctgctaggctttcctacacgccctgcttttcagcttctctttttttcaattttcttggcaacatacctcctcaccctgttggagaacctgttgattatcctggccattcattctgatggtcagttacataaaccaatgtacttcttcctgtcgcacttgtccttccttgagatgtggtacgtcacagttatctctcctaaaatgctggtggatttcctgtcacatgacaaatccatttcttttaatggttgcatgactcaactgtatttcttcgttacttttgtctgtaccgaatatatcttgttggcgattatggcctttgaccgatatgtggcgatctgtaatccactgcgttatccagttattatgacgaaccagttatgcggtactctggcaggagggtgctggttttgcggcctcatgactgccatgatcaaaatggtgtttatcgcccagttacactactgcggcatgccacagattaaccattacttttgcgatatttcccctctccttaacgtgtcctgcgaggacgcaagtcaagccgaaatggtagattttttcttggccctgatggtgatcgctatcccgttgtgtgttgtggtggcgagctacgctgccattctcgcgacaattttgcgcattccgagtgcccagggcagacaaaaggctttttccacctgcgcgagtcacttaaccgtcgtgatcttgttctattccatgactctttttacctatgcaagaccaaagctcatgtatgcctacaattccaacaaagttgttagcgtgctttatacggtcatcgtccccctcctgaatccgattatctactgccttcggaatcacgaggtcaaggccgctctccgaaagacgattcactgcagaggttctggccctcagggtaatggcgctttctcgtcctag

SEQ ID NO: 21146 - DNA, 978 bp, Artificial Sequence
  derived and/or modified sequence
atgaccaccataattctggaagtagataatcatacagtgacaacacgtttcattcttctggggtttccaacacgaccagccttccagcttctctttttctccattttcctggcaacctatctgctgacactgctggagaatcttcttatcatcttagctatccacagtgatgggcagctgcataagcccatgtacttcttcttgagccacctctccttcctggagatgtggtatgtcacagtcatcagccccaagatgcttgttgacttcctcagtcatgacaagagtatttccttcaatggctgcatgactcaactttacttttttgtgacctttgtctgcactgagtacatccttcttgctatcatggcctttgaccgctatgtagccatttgtaatccactacgctacccagtcatcatgaccaaccagctctgtggcacactggctggaggatgctggttctgtggactcatgactgccatgattaagatggtttttatagcacaacttcactactgtggcatgcctcagatcaatcactacttttgtgatatctctccactccttaacgtctcctgtgaggatgcctcacaggctgagatggtggacttcttcttggccctcatggtcattgctattcctctttgtgttgtggtggcatcctacgctgctatccttgccaccatcctcaggatcccttctgctcagggccgccaaaaggcattctccacctgtgcctcccacctgaccgtcgtaattctcttctattccatgacacttttcacctatgcccgtcccaaactcatgtatgcctacaattccaacaaagtggtatctgttctctacactgtcattgttccactcctcaaccccatcatttactgtctgaggaaccatgaagtaaaggcagccctcagaaagaccatacattgcagaggaagtgggccccagggaaatggggctttcagtagttaa

SEQ ID NO: 21147 - DNA, 978 bp, Artificial Sequence
  derived and/or modified sequence
atgactacaatcatcttagaggtggataaccacacagtgacaacacggtttatcctcctgggtttcccaaccagacccgcattccagcttctctttttctctatcttcctggccacctatttgttgactctcctggaaaatctgctgattattctcgcaatccactccgatgggcaactgcacaagccaatgtatttttttctgtctcacttaagcttcctggaaatgtggtacgtgaccgtgatctctccaaagatgctggttgatttcctttcccacgacaaaagcatcagcttcaatggctgcatgacccagctgtacttctttgtcacctttgtctgtaccgagtatatactcctggccattatggccttcgacagatacgtggcgatctgcaatcccctgcgatacccagttattatgacgaatcaactgtgcggaactctagctggtggctgctggttttgcggactcatgacagccatgatcaagatggtctttatagcgcaactgcactattgcggcatgccccaaatcaaccactacttttgtgatatcagtccccttctaaatgtgagctgcgaggacgcatctcaggccgagatggtcgatttcttcctggctctgatggtgattgccatacctctttgcgtggtcgtggccagttacgccgcaatcctggccacaatattacgcattcctagcgcgcaggggagacagaaggcattctctacctgcgcaagccacttgacagtggtgattctgttctattccatgactctattcacatacgccagaccgaaactgatgtacgcctataacagtaacaaggttgtgtctgtgttatacacagtgatcgtaccgttgctgaatccgattatttattgcttgagaaaccacgaggtgaaagctgcactgcgaaagaccatccactgtaggggaagcggaccacagggtaatggagccttttcgtcttag

SEQ ID NO: 21148 - protein, 359 aa, Artificial Sequence
  derived and/or modified sequence
MALGNHSTITEFLLLGLSADPNIRALLFVLFLGIYLLTIMENLMLLLMIRADSCLHKPMYFFLSHLSFVDLCFSSVIVPKMLENLLSQRKTISVEGCLAQVFFVFVTAGTEACLLSGMAYDRHAAICRPLLYGQIMGKQLYMHLVWGSWGLGFLDALINVLLAVNMVFCEAKIIHHYSYEMPSLLPLSCSDISRSLIALLCSTLLHGLGNFLLVFLSYTRIISTILSISSTSGRSKAFSTCSAHLTAVTLYYGSGLLRHLMPNSGSPIELIFSVQYTVVTPMLNSLIYSLKNKEVKGERSLRDSSHLPQLHKGQARWKRPAFTEGRREPGHPELSIPVTPQPQGACACSALRAAPTALP

SEQ ID NO: 21149 - DNA, 1080 bp, Artificial Sequence
  derived and/or modified sequence
atggccctgggcaaccacagcaccatcaccgagttcctgctgctgggcctgagcgccgaccccaacatcagagccctgctgttcgtgctgttcctgggcatctacctgctgaccatcatggagaacctgatgctgctgctgatgatcagagccgacagctgcctgcacaagcccatgtacttcttcctgagccacctgagcttcgtggacctgtgcttcagcagcgtgatcgtgcccaagatgctggagaacctgctgagccagagaaagaccatcagcgtggagggctgcctggcccaggtgttcttcgtgttcgtgaccgccggcaccgaggcctgcctgctgagcggcatggcctacgacagacacgccgccatctgcagacccctgctgtacggccagatcatgggcaagcagctgtacatgcacctggtgtggggcagctggggcctgggcttcctggacgccctgatcaacgtgctgctggccgtgaacatggtgttctgcgaggccaagatcatccaccactacagctacgagatgcccagcctgctgcccctgagctgcagcgacatcagcagaagcctgatcgccctgctgtgcagcaccctgctgcacggcctgggcaacttcctgctggtgttcctgagctacaccagaatcatcagcaccatcctgagcatcagcagcaccagcggcagaagcaaggccttcagcacctgcagcgcccacctgaccgccgtgaccctgtactacggcagcggcctgctgagacacctgatgcccaacagcggcagccccatcgagctgatcttcagcgtgcagtacaccgtggtgacccccatgctgaacagcctgatctacagcctgaagaacaaggaggtgaagggcgagagaagcctgagagacagcagccacctgccccagctgcacaagggccaggccagatggaagagacccgccttcaccgagggcagaagagagcccggccaccccgagctgagcatccccgtgaccccccagccccagggcgcctgcgcctgcagcgccctgagagccgcccccaccgccctgccctag

SEQ ID NO: 21150 - DNA, 1080 bp, Artificial Sequence
  derived and/or modified sequence
atggccctgggcaatcactcaacaattacagagttccttcttctgggtctgagcgccgatcctaatattcgtgccctcctgtttgtgttattcctcggaatttacctgctgaccatcatggaaaatttgatgctactgcttatgattcgcgctgatagctgtctgcacaagcccatgtattttttcctgtctcacttgtcttttgtagacttatgcttttccagtgtcatcgtgccgaagatgctcgaaaatctcctgtcgcagagaaaaactatctccgtggagggatgcctggcacaggtctttttcgtttttgtgacagccggaacagaagcctgtctgctctctggcatggcctacgacagacacgcggccatttgcaggcctctcctgtacgggcagattatgggaaaacaattgtacatgcatctcgtctggggatcttggggcctgggatttctagacgccctgattaatgttcttttagcggtgaatatggtgttctgcgaggccaagattatccaccactatagttacgagatgcccagtctgcttccactgtcctgctctgacatctccagaagcctgattgctctgctttgcagcacgttgttacacggactcgggaacttcctcctagtgttcctctcatataccaggatcatcagcaccatcctgtccatatcatcgaccagcgggaggtccaaagctttctctacatgttccgcccatttgaccgccgtgacgctgtactacggctcaggtctgctgaggcacctcatgcccaacagcggcagccccattgagcttatattttccgtccagtacactgtagttaccccaatgctgaacagcttgatttacagcctgaaaaataaggaggtcaagggggaaagaagtctgcgggacagctcccacctgccgcagctgcataaaggtcaggcgcggtggaaaagacctgcttttaccgagggcaggcgggaacctggacaccctgagttatcaattcccgtcaccccgcagccgcagggggcgtgcgcatgcagtgccctgagagcagctcccacagccttgccctag

SEQ ID NO: 21151 - DNA, 1080 bp, Artificial Sequence
  derived and/or modified sequence
atggccctgggcaaccacagcaccatcacagagttcctgctgctgggcctgtctgctgaccccaacatccgggccctgctgtttgtgctcttcctgggcatctacctgctgaccatcatggagaacctgatgctgctgctgatgatccgggctgacagctgcctgcacaagcccatgtacttcttcctgagccacctgagctttgtggacctgtgcttcagctctgtgattgtgcccaagatgctggagaacctgctgagccagaggaagaccatctctgtggagggctgcctggcccaggtgttctttgtgtttgtgacagctggaacagaggcctgcctgctgagcggcatggcctatgacagacatgctgccatctgccggcccctgctgtatggccagatcatgggcaagcagctgtacatgcacctggtgtggggctcctggggcctgggcttcctggatgccctgatcaacgtgctgctggccgtgaacatggtgttctgtgaggccaagatcatccaccactacagctatgagatgcccagcctgctgcccctgagctgcagcgacatcagccgcagcctgattgccctgctgtgcagcaccctgctgcacggcctgggcaacttcctgctggtgttcctgagctacacccgcatcatcagcaccatcctgagcatcagcagcaccagcggccgcagcaaggccttcagcacctgcagcgcccacctgacagctgtgaccctgtactacggcagcggcctgctgcggcacctgatgcccaacagcggcagccccatcgagctgatcttctctgtgcagtacacagtggtgacccccatgctgaacagcctcatctacagcctgaagaacaaggaggtgaagggggagaggagcctgcgggacagcagccacctgccccagctgcacaagggccaggcccgctggaagaggcctgccttcacagagggccggcgggagcccggccaccctgagctgagcatccctgtgaccccccagccccagggcgcctgtgcctgcagcgccctgcgggccgcccccacagccctgccctag

SEQ ID NO: 21152 - DNA, 1080 bp, Artificial Sequence
  derived and/or modified sequence
atggccctgggcaaccacagcaccatcaccgagttcctgctgctgggactgagcgctgacccaaacatcagggccctgctgtttgttctgttccttggcatctacctgctgactattatggagaatctgatgcttctcctgatgataagggccgacagttgccttcataaaccaatgtatttcttcttgtctcatctttcatttgtggacctttgtttctcaagtgtcatcgtcccgaaaatgctggagaaccttctaagccagcgaaagactatttcggttgaggggtgcttagcccaggttttttttgtcttcgtaactgcgggaacagaggcttgtctgctgtcaggaatggcttatgacaggcacgccgccatctgcaggcctctgctgtacggccagattatgggcaagcagctctatatgcacttagtttggggaagctggggacttggttttctggacgccctgattaatgttctgctggcagtgaatatggttttttgtgaggcaaagatcatccatcactattcctacgaaatgccctcactgctgccactgagctgcagtgatatctcgcggagcctgatagcattgctatgctctaccctcctccatggcctgggcaactttctgctggtcttcctatcgtatacgcgaatcataagtacaatcctcagcatctctagtacatccggccggagcaaagcattctcgacttgttctgcacacctgaccgctgtcacactgtactacggaagcggcctcctccgccacctcatgcccaatagcggttcccctattgagttgattttttccgtccagtatacagtagtaaccccgatgctcaatagcttgatttatagtctcaagaataaggaagtcaagggtgagcggagtttaagagattctagtcacctgccacaactgcacaaaggccaggccaggtggaagaggccagccttcactgaaggcagaagggagcccggccatcccgagttgtcgattccagtcaccccccagccccagggagcctgtgcctgttccgctctaagagctgccccaaccgcactcccatag

SEQ ID NO: 21153 - DNA, 1080 bp, Artificial Sequence
  derived and/or modified sequence
atggccttggggaatcacagcaccatcaccgagttcctcctccttgggctgtctgccgaccccaacatccgggctctgctctttgtgctgttcctggggatttacctcctgaccataatggaaaacctgatgctgctgctcatgatcagggctgattcttgtctccataagcccatgtatttcttcctgagtcacctctcttttgttgatctctgcttctcttcagtcattgtgcccaagatgctggagaacctcctgtcacagaggaaaaccatttcagtagagggctgcctggctcaggtcttctttgtgtttgtcactgcagggactgaagcctgccttctctcagggatggcctatgaccgccatgctgccatctgccgcccactactttatggacagatcatgggtaaacagctgtatatgcaccttgtgtggggctcatggggactgggctttctggacgcactcatcaatgtcctcctagctgtaaacatggtcttttgtgaagccaaaatcattcaccactacagctatgagatgccatccctcctccctctgtcctgctctgatatctccagaagcctcatcgccttgctctgctccactctcctacatgggctgggaaacttccttttggtcttcttatcctacacccgtataatctctaccatcctaagcatcagctctacctcgggcagaagcaaggccttctccacctgctctgcccacctcactgcagtgacactttactatggctcaggtttgctccgccatctcatgccaaactcaggttcccccatagagttgatcttctctgtgcagtatactgtagtcactcccatgctgaattccctcatctatagcctgaaaaataaggaagtgaagggggaaagaagcctccgggacagcagtcatttgcctcagctgcacaaaggccaggccagatggaagagaccagccttcaccgaaggccgcagggagcccggacacccggagctgagcattccggtcacgcctcaaccccaaggggcctgcgcatgctccgcgctgcgcgcggcgcccacggccctgccctga

SEQ ID NO: 21154 - DNA, 1080 bp, Artificial Sequence
  derived and/or modified sequence
atggctctggggaaccatagcaccattacagagttcctgctcctgggcctcagcgccgatcctaatattagggctctgttattcgtccttttcctaggcatttatttgctgacaatcatggagaacctcatgctcctgctcatgatccgcgctgacagctgcttacacaagccaatgtacttcttcctctcccacctctcctttgtggatctctgtttctcctctgtcatcgtgcccaagatgttggaaaatcttctgtcccagaggaagaccatatcagtagaggggtgcctcgcgcaggtgttttttgttttcgttacggcaggtacagaagcttgcctgctaagcggcatggcttatgatcgacatgcagcaatctgccgccctctcttgtatggccagattatgggaaaacaattgtatatgcacctggtgtggggcagctggggcctgggatttcttgacgcactgattaatgtgctgttagcagtgaacatggtgttctgtgaagcaaaaatcattcaccattacagttacgagatgccaagccttctccctttgagttgttctgacatatccagatccctgattgcccttctttgctctaccctcttgcatggcctaggaaatttccttttagtctttctgagttatacacggatcataagtactatactttctatcagcagtactagcgggagatccaaagccttttccacgtgttccgcacacctcaccgctgtgaccctctactatgggagcggtctactgaggcatctgatgcctaactccggatccccgatcgaattgatcttctctgtgcagtacaccgtcgtgacgcccatgctgaactcactgatctactccttaaaaaataaggaagtgaaaggagagcggtccctcagggacagttctcatttgccccaattgcataaagggcaggctcggtggaagcgaccagcctttactgagggtcggagagaacctgggcacccagagctctctatacccgtgacgcctcagccccagggcgcatgcgcctgctcggcccttcgcgcagcaccgaccgcattgccatag

SEQ ID NO: 21155 - protein, 313 aa, Artificial Sequence
  derived and/or modified sequence
MSLASGPGPGWLLFSFGMGLVSGSKCPNNCLCQAQEVICTGKQLTEYPLDIPLNTRRLFLNENRITSLPAMHLGLLSDLVYLDCQNNRIREVMDYTFIGVFKLIYLDLSSNNLTSISPFTFSVLSNLVQLNIANNPHLLSLHKFTFANTTSLRYLDLRNTGLQTLDSAALYHLTTLETLFLSGNPWKCNCSFLDFAIFLIVFHMDPSDDLNATCVEPTELTGWPITRVGNPLRYMCITHLDHKDYIFLLLIGFCIFAAGTVAAWLTGVCAVLYQNTRHKSSEEDEDEAGTRVEVSRRIFQTQTSSVQEFPQLI

SEQ ID NO: 21156 - DNA, 942 bp, Artificial Sequence
  derived and/or modified sequence
atgagcctggccagcggccccggccccggctggctgctgttcagcttcggcatgggcctggtgagcggcagcaagtgccccaacaactgcctgtgccaggcccaggaggtgatctgcaccggcaagcagctgaccgagtaccccctggacatccccctgaacaccagaagactgttcctgaacgagaacagaatcaccagcctgcccgccatgcacctgggcctgctgagcgacctggtgtacctggactgccagaacaacagaatcagagaggtgatggactacaccttcatcggcgtgttcaagctgatctacctggacctgagcagcaacaacctgaccagcatcagccccttcaccttcagcgtgctgagcaacctggtgcagctgaacatcgccaacaacccccacctgctgagcctgcacaagttcaccttcgccaacaccaccagcctgagatacctggacctgagaaacaccggcctgcagaccctggacagcgccgccctgtaccacctgaccaccctggagaccctgttcctgagcggcaacccctggaagtgcaactgcagcttcctggacttcgccatcttcctgatcgtgttccacatggaccccagcgacgacctgaacgccacctgcgtggagcccaccgagctgaccggctggcccatcaccagagtgggcaaccccctgagatacatgtgcatcacccacctggaccacaaggactacatcttcctgctgctgatcggcttctgcatcttcgccgccggcaccgtggccgcctggctgaccggcgtgtgcgccgtgctgtaccagaacaccagacacaagagcagcgaggaggacgaggacgaggccggcaccagagtggaggtgagcagaagaatcttccagacccagaccagcagcgtgcaggagttcccccagctgatctag

SEQ ID NO: 21157 - DNA, 942 bp, Artificial Sequence
  derived and/or modified sequence
atgagccttgctagcggacccggcccaggctggttactattcagcttcggtatgggcctcgtcagtggatctaagtgcccgaataattgcctgtgtcaggcccaggaggtaatttgcaccggcaaacagcttacagagtatcccctggatatccccctgaatactagaaggctgtttctcaacgagaacaggatcacctctctgcccgctatgcatctggggctcttgagcgacctggtgtatttagactgccagaacaatcgcatccgcgaggttatggactatacattcatcggggtgttcaaactgatttacctagatctttccagtaacaatcttacatccatctcccctttcaccttctctgtgcttagcaacttagtacagctcaatattgccaacaatccacatctactcagtctccataaatttaccttcgctaacacgaccagcctgcggtatctggatctccgaaataccggccttcaaaccctggactccgcggccctttaccatctaacgaccttggagactctcttcctcagcggcaatccctggaaatgtaactgttcttttttggattttgctatttttctgattgtatttcacatggatccctcagacgatctgaacgccacctgcgtggagcctaccgaactcacaggctggcctatcaccagagtcgggaaccccctgcgatacatgtgcatcacccacctggatcacaaagactacatcttcttgctgctcatcggcttttgtatctttgctgccggtaccgtggcagcgtggctgactggggtgtgcgctgttttgtaccagaatacacggcacaagtcttcagaagaggatgaggacgaagcagggactcgcgtggaagtcagcagacgtatttttcagacccaaacttcatccgttcaggagttccctcagttaatttag

SEQ ID NO: 21158 - DNA, 1369 bp, Artificial Sequence
  derived and/or modified sequence
acttgcaaacgcagggaaagggtgagacctttcaaagctgccaagtgggcaagcttccagcagcagtctgggagcgagcgacagagccaccaagctgggcggcagggcattgagcctcgcgtttcaatttctgttcagttctcctgtaatggaaaattgctttgcacaaagctaaagtgttacagttctttccagagcccctcccccgccccacccccccaccggcagccttcggatcagaggacagagcccgcaggaaggtgaaaggagggtggttgtggcttcttactatgtcccttgcttcaggccctggccctgggtggttactcttttcctttggaatggggctggtatcagggtcaaagtgtccaaataattgtctgtgtcaagcccaagaagtaatctgcacagggaagcagttaaccgaatacccccttgacatacccctgaacacccggaggctgttcctgaacgagaacagaatcactagtttgccagcaatgcatctaggactcctcagtgaccttgtttatttggactgtcagaacaaccggattcgagaggtgatggattataccttcatcggggtcttcaaactcatctaccttgacctcagctccaacaacctaacctcgatctccccattcactttctcggtgctcagcaacctggtgcagctgaacattgccaacaaccctcacctgttatcgcttcacaagttcacctttgccaacaccacctctttgaggtacctggacctcagaaataccggcttgcagaccctggacagtgctgccttataccacctcactactctggagaccctgtttctgagtggaaacccctggaagtgcaactgctctttcctggacttcgccatcttcttaatagtgttccatatggacccctcagatgatctaaatgccacatgtgtggagcccacagagctgacagggtggcccatcacccgggtggggaacccactccgatacatgtgcatcacgcacctggaccacaaagactacatcttcctgctgctcatcggcttctgcatcttcgccgcgggaactgtggctgcctggctcacaggtgtgtgtgctgtgctctaccagaacacccgccacaagtcgagtgaagaagatgaggacgaggccgggactagggtggaagtcagccggcggatttttcaaacccagacgagctcggtccaggagttccctcagcttatttagttgccagagaccactatcttatgtgcctcccccaggctccctgctttctctcttgccctccccatcccaccaccttggagctgtcatagagattgaaaccttctagtaaaataaataaaatctctgatggccatttc

SEQ ID NO: 21159 - DNA, 942 bp, Artificial Sequence
  derived and/or modified sequence
atgagcctggccagcggccctggccctggctggctgctcttctcctttggcatgggcctggtgtctggcagcaaatgtcccaacaactgcctgtgccaggcccaggaggtgatctgcaccgggaagcagctgacagagtaccccctggacatccccctgaacacccggcggctcttcctgaatgaaaatcgcatcaccagcctgcctgccatgcacctgggcctgctgagtgacctggtgtacctggactgccagaacaaccgcatccgggaggtgatggactacaccttcatcggggtcttcaagctgatctacctggacctgagcagcaacaacctgaccagcatcagccccttcaccttctctgtgctgagcaacctggtgcagctgaacatcgccaacaacccccacctgctgagcctgcacaagttcacctttgccaacaccaccagcctgcgctacctggacctgaggaacacaggcctgcagaccctggacagcgctgccctgtaccacctgaccaccctggagaccctcttcctgagcggcaacccctggaagtgcaactgcagcttcctggactttgccatcttcctgattgtgttccacatggaccccagtgatgacctgaatgccacctgtgtggagcccacagagctgaccggctggcccatcaccagggtgggcaaccccctgcgctacatgtgcatcacccacctggaccacaaggactacatcttcctgctgctgattggcttctgcatctttgctgctggcaccgtggccgcctggctgactggagtgtgtgctgtgctgtaccagaacaccaggcacaagagcagtgaagaagatgaagatgaggccggcaccagggtggaggtgagccgccgcatcttccagacccagaccagctctgtgcaggagttcccccagctgatctag

SEQ ID NO: 21160 - DNA, 942 bp, Artificial Sequence
  derived and/or modified sequence
atgagcctggccagcggccccggccccggctggctgctgttcagcttcgggatgggcctcgtgagtggatccaagtgtccaaataattgcttatgccaggcccaggaggtcatatgcactgggaagcagctgacagaatatcctctggacatacctctgaatactcgccgactctttctcaacgaaaatagaattacaagcctacccgccatgcatctcggtcttttaagcgacctggtatatctggattgccagaataacaggattcgcgaggttatggattacacgttcatcggcgtctttaaactaatctatctggatctcagctccaacaatctgacctcaatcagccctttcacctttagtgtcctctcgaatttagttcagctcaatatcgctaacaatccacacctcttgtctcttcacaagttcacatttgccaacaccaccagtctgaggtacctcgatctgagaaacacgggcctgcagacattggactcagcagcactgtaccacctgactacattagaaacactattcctgtcaggcaatccgtggaaatgcaattgcagcttccttgacttcgcaattttcctgatcgtatttcacatggacccctccgacgacctgaatgccacttgcgtggaacctaccgagttgacaggttggccaataacgagagtcggaaatcctctgaggtacatgtgtattacccatttagaccacaaggattatatttttttgcttctcattggattttgcatattcgccgctggcactgtcgcggcctggctgacaggagtgtgcgcggtgctgtaccagaacactcggcataagtcctccgaagaggatgaagatgaagctggtactcgagtagaggtgtccaggcggatattccagactcagacatcctctgtccaagagttcccacagctgatttag

SEQ ID NO: 21161 - DNA, 942 bp, Artificial Sequence
  derived and/or modified sequence
atgagtctggcatccggtccgggaccaggttggctactgttcagcttcgggatgggtctggtctccggcagcaaatgtccgaataattgtctgtgccaggcgcaggaggtgatttgtaccggtaagcagctaaccgagtaccccctggatatcccactgaacactcgccgtctgttcctgaatgagaaccgtatcactagtcttcccgctatgcacctcggtctgctgagtgacttagtctacttggactgccagaacaaccgtatcagagaggtgatggactacaccttcatcggagtttttaagctgatctacctggatctcagttccaataacctgacttccatctccccattcacattctccgtgctgtcaaacctagtacagctcaacatcgctaataatccccatctactctccctgcataaatttaccttcgccaataccacttctcttcggtacctggacctgcgcaatacgggtctgcaaaccctcgatagcgccgcactctatcatcttaccacactggagaccctgtttctgtccggcaatccatggaagtgcaactgtagcttcctagacttcgccatcttcctgatagtctttcacatggatcccagcgacgacctcaatgcaacctgcgttgagccaacagaactgactggatggccaatcactcgcgtgggaaatccactgagatacatgtgtattacccatttagaccataaggactacattttcctcctcttgatcggattttgtattttcgcggctggtaccgtggcagcgtggctgacgggtgtgtgtgccgtactgtatcaaaataccagacacaagagttcagaggaagatgaagatgaagcgggtacaagggtggaagtcagcaggcgaatattccagacacagacatcctctgtgcaggaatttccacaactgatttag

SEQ ID NO: 21162 - protein, 311 aa, Artificial Sequence
  derived and/or modified sequence
MNDDGKVNASSEGYFILVGFSNWPHLEVVIFVVVLIFYLMTLIGNLFIIILSYLDSHLHTPMYFFLSNLSFLDLCYTTSSIPQLLVNLWGPEKTISYAGCMIQLYFVLALGTTECVLLVVMSYDRYAAVCRPLHYTVLMHPRFCHLLAVASWVSGFTNSALHSSFTFWVPLCGHRQVDHFFCEVPALLRLSCVDTHVNELTLMITSSIFVLIPLILILTSYGAIVRAVLRMQSTTGLQKVFGTCGAHLMAVSLFFIPAMCIYLQPPSGNSQDQGKFIALFYTVVTPSLNPLIYTLRNKVVRGAVKRLMGWE

SEQ ID NO: 21163 - protein, 258 aa, Artificial Sequence
  derived and/or modified sequence
MNDDGKVNASSEGYFILVGFSNWPHLEVVIFVVVLIFYLMTLIGNLFIIILSYLDSHLHTPMYFFLSNLSFLDLCYTTSSIPQLLVNLWGPEKTISYAGCMIQLYFVLALGTTECVLLVVMSYDRYAAVCRPLHYTVLMHPRFCHLLAVASWVSGFTNSALHSSFTFWVPLCGHRQVDHFFCEVPALLRLSCVDTHVNELTLMITSSIFVLIPLILILTSYGAIVQAVLRMQSTTGLQKVFGTCGAHLMAVSLFFIPA

SEQ ID NO: 21164 - protein, 311 aa, Artificial Sequence
  derived and/or modified sequence
MNDDGKVNASSEGYFILVGFSNWPHLEVVIFVVVLIFYLMTLIGNLFIIILSYLDSHLHTPMYFFLSNLSFLDLCYTTSSIPQLLVNLWGPEKTISYAGCMIQLYFVLALGTTECVLLVVMSYDRYAAVCRPLHYTVLMHPRFCHLLAVASWVSGFTNSALHSSFTFWVPLCGHRQVDHFFCEVPALLRLSCVDTHVNELTLMITSSIFVLIPLILILTSYGAIVRAILRMQSTTGLQKVFGTCGAHLMAVSLFFIPAMCMYLQPPSGNSQDQGKFIALFYTVVTPSLNPLIYTLRNKVVRGAVKRLMGWE

SEQ ID NO: 21165 - DNA, 936 bp, Artificial Sequence
  derived and/or modified sequence
atgaacgacgacggcaaggtgaacgccagcagcgagggctacttcatcctggtgggcttcagcaactggccccacctggaggtggtgatcttcgtggtggtgctgatcttctacctgatgaccctgatcggcaacctgttcatcatcatcctgagctacctggacagccacctgcacacccccatgtacttcttcctgagcaacctgagcttcctggacctgtgctacaccaccagcagcatcccccagctgctggtgaacctgtggggccccgagaagaccatcagctacgccggctgcatgatccagctgtacttcgtgctggccctgggcaccaccgagtgcgtgctgctggtggtgatgagctacgacagatacgccgccgtgtgcagacccctgcactacaccgtgctgatgcaccccagattctgccacctgctggccgtggccagctgggtgagcggcttcaccaacagcgccctgcacagcagcttcaccttctgggtgcccctgtgcggccacagacaggtggaccacttcttctgcgaggtgcccgccctgctgagactgagctgcgtggacacccacgtgaacgagctgaccctgatgatcaccagcagcatcttcgtgctgatccccctgatcctgatcctgaccagctacggcgccatcgtgagagccgtgctgagaatgcagagcaccaccggcctgcagaaggtgttcggcacctgcggcgcccacctgatggccgtgagcctgttcttcatccccgccatgtgcatctacctgcagccccccagcggcaacagccaggaccagggcaagttcatcgccctgttctacaccgtggtgacccccagcctgaaccccctgatctacaccctgagaaacaaggtggtgagaggcgccgtgaagagactgatgggctgggagtag

SEQ ID NO: 21166 - DNA, 777 bp, Artificial Sequence
  derived and/or modified sequence
atgaacgacgacggcaaggtgaacgccagcagcgagggctacttcatcctggtgggcttcagcaactggccccacctggaggtggtgatcttcgtggtggtgctgatcttctacctgatgaccctgatcggcaacctgttcatcatcatcctgagctacctggacagccacctgcacacccccatgtacttcttcctgagcaacctgagcttcctggacctgtgctacaccaccagcagcatcccccagctgctggtgaacctgtggggccccgagaagaccatcagctacgccggctgcatgatccagctgtacttcgtgctggccctgggcaccaccgagtgcgtgctgctggtggtgatgagctacgacagatacgccgccgtgtgcagacccctgcactacaccgtgctgatgcaccccagattctgccacctgctggccgtggccagctgggtgagcggcttcaccaacagcgccctgcacagcagcttcaccttctgggtgcccctgtgcggccacagacaggtggaccacttcttctgcgaggtgcccgccctgctgagactgagctgcgtggacacccacgtgaacgagctgaccctgatgatcaccagcagcatcttcgtgctgatccccctgatcctgatcctgaccagctacggcgccatcgtgcaggccgtgctgagaatgcagagcaccaccggcctgcagaaggtgttcggcacctgcggcgcccacctgatggccgtgagcctgttcttcatccccgcctag

SEQ ID NO: 21167 - DNA, 936 bp, Artificial Sequence
  derived and/or modified sequence
atgaatgacgacggtaaggtgaatgccagttcggaaggctacttcatcctggtgggattctccaactggcctcacctcgaggttgtgattttcgttgtggtcctgatcttctacttgatgacactgataggtaatctgttcattattatcttgtcgtatcttgatagtcacctgcacactccgatgtacttcttcctgagcaatttgtcgttcctagacttgtgttatactacctcctcaatcccacagctacttgttaatctgtggggccccgaaaaaacgatatcctacgccgggtgcatgattcaactgtacttcgttttagcactgggaacgaccgagtgtgtactgttggttgttatgtcttatgatcgttatgctgcagtgtgtaggccactgcactacaccgtcttaatgcatcctcgtttctgtcatctgttggccgtggcaagctgggtcagcggattcaccaattcagccctccactcgtcttttactttctgggtccccctctgcgggcaccggcaggtggaccacttcttctgtgaagtgcccgccctcctgcggctcagttgcgtcgatactcacgtcaacgagctaactctcatgattacgtccagcatctttgtcttaatccccctgattctcattctcacctcatatggggccattgtgcgagcagtgctgcgcatgcagagcactaccgggttacaaaaagtgtttgggacatgtggcgctcatctgatggcagtctccctcttcttcatccccgcaatgtgtatttatcttcaaccaccttcaggcaatagtcaagatcaaggcaaattcatagcactcttttatactgtcgtaactccgtctttgaacccactgatctatactctgcgcaataaagtagtgcgcggggcagtgaaacggttgatggggtgggagtag

SEQ ID NO: 21168 - DNA, 936 bp, Artificial Sequence
  derived and/or modified sequence
atgaatgatgacggcaaggtgaacgccagttccgaagggtatttcatcctggtgggcttctccaactggccccatctcgaagtcgttattttcgtggtggtgctaattttctatcttatgactctgattggaaatctttttatcatcatcctctcctacctagactctcacttacacactccaatgtacttcttcttgtctaatctgtcattcctagacttgtgctacacaacctcttcaatcccccaacttttggtgaacttgtgggggccagagaaaactatcagctatgccggatgcatgatccaactttacttcgttctggccctgggtactacagaatgtgttctgcttgtcgttatgtcttatgaccggtacgctgccgtctgtcgacccctgcattataccgtgctgatgcatccccggttttgtcaccttcttgcggtcgctagttgggtctcgggctttacgaatagtgccctccattccagcttcactttctgggtgcctttatgcggccatagacaggtggaccattttttctgcgaggtgccggcacttttacgattaagctgcgtggacactcatgtcaatgagctgacactcatgatcacatcgtctatctttgtactcattcccctgatacttatcctgacgtcatatggagcgatcgtacgggcagtgttgagaatgcaatcaaccacaggcctgcagaaggtcttcggaacttgtggcgcccatcttatggctgtgagcctgtttttcataccagcgatgtgcatctatcttcagcctcccagcgggaattcccaggatcagggcaagttcattgcgctcttttatactgttgtgactcccagcctaaaccctcttatctatactttaagaaataaagtagtccggggcgctgttaaaagactcatggggtgggaatag

SEQ ID NO: 21169 - DNA, 936 bp, Artificial Sequence
  derived and/or modified sequence
atgaacgatgacggcaaggtgaatgcgagctccgagggctacttcattcttgttggcttctccaattggccccatttagaagttgtcatcttcgtggttgtgctaatcttctacctgatgaccctgataggcaacctgttcattattattctgtcctacctggacagccacctgcatacccctatgtacttcttcctgtcgaacttgtcttttctggatctgtgctacaccactagcagcattcctcagctgctggtgaacctgtggggtcccgaaaagacaatttcttatgccggctgcatgatccagctttactttgtcttggccctgggaactactgagtgcgtgctgctcgtggtaatgagctatgaccggtacgccgctgtgtgcaggccattgcactacactgtgcttatgcaccctagattctgccaccttctcgccgtggcctcctgggtgtccggctttaccaactcagctctgcattcctcattcacattctgggtaccgctctgcggccacaggcaggtggaccattttttttgcgaggtaccagccctcctgaggctctcctgcgtggacacccatgtaaacgagctaactcttatgattacttcaagcattttcgtgttgatccccctaattctgattctaacttcctatggcgccatagtcagggcagttcttcgaatgcaaagtacgaccggcctgcagaaagtgttcggaacctgcggggcccacctcatggcagtatctctattcttcatcccagcaatgtgcatctacttgcagccaccctccggcaactctcaagatcagggaaagttcattgcattgttctacactgtggtcacccctagcttgaatccactgatctacaccttaagaaataaagttgttcggggcgccgtcaaacgcctcatggggtgggaatag

SEQ ID NO: 21170 - DNA, 936 bp, Artificial Sequence
  derived and/or modified sequence
atgaatgacgatgggaaagtaaacgctagctccgaggggtatttcatcctggttggcttcagcaattggccgcacctcgaagtggtgattttcgtggtggtgctgatcttttacctgatgaccttgattggaaatctgttcatcatcattttaagctatctcgacagccatttacacacacctatgtacttttttctgtccaacctgtcgtttctagatctctgctacaccacgagctccattccacaactgctggttaacttatgggggcccgaaaagaccatttcctatgctgggtgcatgattcaactgtacttcgtactggcccttggcaccactgagtgtgtcttactcgtggtgatgagttatgatcgctacgccgccgtgtgcaggcccctacattacaccgtgctgatgcacccaaggttctgccatcttctggccgtggctagctgggtgtctggattcaccaactcagcattacattcttcatttactttctgggtaccactgtgcggccaccgacaagtggatcactttttttgtgaggtgcccgctttgctccggctcagttgtgtggacacccacgtgaatgaactcacacttatgattacatccagtattttcgtccttattcccctgattctgattttgacaagctacggcgccatcgtcagagcagttctgcgcatgcagagcaccactggcctgcaaaaggtttttggaacgtgtggagcccatctcatggctgtatctctcttttttatccctgccatgtgcatctatcttcagcctccttccgggaactcccaggatcagggaaaattcattgccctcttttatacagtggtgacgcccagcctgaacccactcatctacaccctgaggaataaagttgtccggggagccgtgaaacgcctgatgggatgggagtag

SEQ ID NO: 21171 - DNA, 777 bp, Artificial Sequence
  derived and/or modified sequence
atgaatgacgatggaaaggtgaatgcatcttctgaaggatactttatcctggtcggattcagcaactggcctcatctcgaggtggtgatcttcgtcgtggtgctaattttctacctgatgactctgatagggaatctctttatcatcattctgagctatcttgattcccacctacacacaccgatgtacttctttttgtcaaacctgagctttttggacctgtgctacaccacctccagtattccgcagctattggtcaacctgtggggacctgaaaagactataagctatgccgggtgtatgatccagctgtactttgtccttgctctaggtacgacagagtgcgtgctccttgtggtcatgagttacgatcgctacgctgcggtttgcagacccctgcattacactgtgctaatgcacccaagattctgtcatctcctggccgtggcaagctgggttagtggatttacaaactccgctctgcattcctctttcacattttgggtccctctgtgcggacatcgccaagttgaccactttttttgcgaagttcccgcactgctacgtctgtcatgcgttgatactcacgtgaatgagcttaccctcatgattacatcatcgatatttgtactgatcccacttatactcatcctgacatcatatggggcgatagtccaagccgtgctaaggatgcagtctacaaccggcctgcagaaggtgttcggaacgtgtggtgctcacttaatggcagtctctctgttttttataccagcttag

SEQ ID NO: 21172 - DNA, 936 bp, Artificial Sequence
  derived and/or modified sequence
atgaatgatgatggaaaggtgaatgcctcctctgaggggtacttcatacttgtcggcttctctaattggccccatttagaggttgtgatttttgtcgtcgtgttaatcttctatctgatgaccctgatcggcaaccttttcattatcattctctcgtatttggactctcatctgcatactcccatgtactttttcctgtcaaacctgagcttcctcgatctttgttacacgacctcaagcattcctcagctcctcgtgaacctgtgggggcccgaaaaaacgatttcatatgccggctgtatgatccagttgtactttgtgctggccttgggaacaactgagtgcgtacttctcgtggtgatgtcctacgatagatacgcagccgtttgccgccccctgcattatactgttctgatgcatcccagattttgtcacttactggcggtcgcctcctgggtgagtggctttaccaattcagccctccactcttcattcaccttctgggtgcccctctgtggccatcgacaggtagatcactttttttgcgaagtccctgctttactccggctgtcttgcgtcgacacgcacgtaaacgagctgacattgatgattaccagttcaattttcgttctgatcccactgattctgatccttacctcatatggagctattgtgcgagctgtgctcagaatgcaatctactactggactgcaaaaagttttcgggacatgtggagcacacttgatggcagtctccctcttctttattcctgcaatgtgcatctacttgcaaccaccttcagggaactcacaagaccagggtaaatttatcgccctgttctatactgtggtgacaccttccctgaatccactcatttacacgctccgtaataaagtcgtgaggggcgccgttaaacggctgatgggctgggagtag

SEQ ID NO: 21173 - DNA, 936 bp, Artificial Sequence
  derived and/or modified sequence
atgaacgacgatgggaaagtcaacgcttctagtgaggggtacttcatcctggtgggtttttcaaactggccccatttagaagtcgtgatctttgtggtggtcctcatcttttaccttatgactctgataggcaatctgttcattattatcctttcctacttagattctcacctgcacacacccatgtacttctttctctcaaatctctctttcctggacctatgctataccactagcagcatccctcagctgttggtaaacctgtggggccccgagaagaccatctcgtatgccgggtgcatgattcaactctattttgtgttggctttgggaaccacagaatgcgttttgctcgtagtcatgtcctacgatcgctacgctgccgtgtgtagaccgcttcattataccgtcctgatgcacccacggttttgccaccttctggccgtcgcctcttgggtgtcggggtttaccaactcagctctccactcctcctttacattctgggttcccctgtgcggacacaggcaggtcgaccattttttctgcgaggtccccgcactcctgcgtctttcttgtgtggatactcatgtcaatgaactgacactcatgatcaccagctcaattttcgtcttaatcccgctgatcctgatccttaccagctacggagcgatcgtgagagccgtactgaggatgcagtcgacgaccggcctacagaaggtgttcggtacttgtggagcccatttaatggctgtatccttattttttatacctgctatgtgcatttatctccagcccccatcaggcaactctcaggaccagggtaaatttattgcacttttctataccgtagtgacgccatctctgaacccactgatttacacgttgagaaacaaggtggtccggggcgcagttaagcggctgatgggctgggagtag

SEQ ID NO: 21174 - DNA, 936 bp, Artificial Sequence
  derived and/or modified sequence
atgaatgatgatggcaaggtgaatgccagcagcgagggctacttcatcctggtgggcttcagcaactggccccacctggaggtggtgatctttgtggtggtgctgatcttctacctgatgaccctgattggcaacctcttcatcatcatcctgagctacctggacagccacctgcacacccccatgtacttcttcctgagcaacctgtccttcctggacctgtgctacaccaccagcagcatcccccagctgctggtgaacctgtggggccctgagaagaccatctcctatgccggctgcatgatccagctgtactttgtgctggccctgggcaccacagaatgtgtgctgctggtggtgatgtcctatgacagatatgctgctgtgtgccggcccctgcactacacagtgctgatgcacccccgcttctgccacctgctggccgtggcctcctgggtgtctggcttcaccaacagcgccctgcacagcagcttcaccttctgggtgcccctgtgtggccaccggcaggtggaccacttcttctgtgaggtgcctgccctgctgcggctgagctgtgtggacacccacgtgaatgagctgaccctgatgatcaccagcagcatctttgtgctgatccccctcatcctgatcctgaccagctatggagccatcgtgcgggctgtgctgaggatgcagagcaccaccggcctgcagaaggtgtttggcacctgtggggcccacctgatggctgtgtccctcttcttcatcccagccatgtgcatctacctgcagcccccatctggcaacagccaggaccagggcaagttcatcgccctcttctacacagtggtgacccccagcctgaaccccctcatctacaccctgaggaacaaggtggtgagaggagctgtgaagaggctgatgggctgggagtag

SEQ ID NO: 21175 - DNA, 777 bp, Artificial Sequence
  derived and/or modified sequence
atgaatgatgatggcaaggtgaatgccagcagcgagggctacttcatcctggtgggcttcagcaactggccccacctggaggtggtgatctttgtggtggtgctgatcttctacctgatgaccctgattggcaacctcttcatcatcatcctgagctacctggacagccacctgcacacccccatgtacttcttcctgagcaacctgtccttcctggacctgtgctacaccaccagcagcatcccccagctgctggtgaacctgtggggccctgagaagaccatctcctatgccggctgcatgatccagctgtactttgtgctggccctgggcaccacagaatgtgtgctgctggtggtgatgtcctatgacagatatgctgctgtgtgccggcccctgcactacacagtgctgatgcacccccgcttctgccacctgctggccgtggcctcctgggtgtctggcttcaccaacagcgccctgcacagcagcttcaccttctgggtgcccctgtgtggccaccggcaggtggaccacttcttctgtgaggtgcctgccctgctgcggctgagctgtgtggacacccacgtgaatgagctgaccctgatgatcaccagcagcatctttgtgctgatccccctcatcctgatcctgaccagctatggagccatcgtgcaggccgtgctgaggatgcagagcaccaccggcctgcagaaggtgtttggcacctgtggggcccacctgatggctgtgtccctcttcttcatcccagcctag

SEQ ID NO: 21176 - DNA, 936 bp, Artificial Sequence
  derived and/or modified sequence
atgaatgatgatggaaaagtcaatgctagctctgaggggtactttattttagttggattttctaattggcctcatctggaagtagttatctttgtggttgtcttgatcttctacttgatgacactgataggaaacctgttcatcatcatcctgtcatacctggactcccatctgcacacaccaatgtacttcttcctttcaaacctctcatttctggatctctgctacaccaccagctctatccctcagttgctggtcaatctctggggcccggaaaagaccatctcttatgctggttgcatgattcaactttactttgttctcgcactgggaaccacagagtgtgtcctactggtggtgatgtcctatgaccgttatgcagctgtgtgtagacctttgcattacactgtcctcatgcaccctcgtttctgccacctgctggctgtggcttcttgggtaagtggttttaccaactcagcacttcattcctccttcaccttctgggtacctctgtgtggacaccgccaagtagatcactttttctgtgaagttccagcacttctgcgattatcgtgtgttgatacccatgtcaatgagctgaccctcatgatcacaagctccatatttgttctcatacctctcatcctcattctcacttcttatggtgccatcgtccgagctgtactgaggatgcagtcaaccactgggcttcagaaagtgtttggaacatgtggagctcatcttatggctgtatctctctttttcattccggccatgtgcatatatctccagccaccatcaggaaattctcaagatcaaggcaagttcattgccctcttttatactgttgtcacacctagtcttaaccctctaatctacaccctcagaaacaaagttgtaagaggggcagtgaagagactaatggggtgggaatga

SEQ ID NO: 21177 - DNA, 774 bp, Artificial Sequence
  derived and/or modified sequence
atgaatgatgatggaaaagtcaatgctagctctgaggggtactttattttagttggattttctaattggcctcatctggaagtagttatctttgtggttgtcttgatcttctacttgatgacactgataggaaacctgttcatcatcatcctgtcatacctggactcccatctgcacacaccaatgtacttcttcctttcaaacctctcatttctggatctctgctacaccaccagctctatccctcagttgctggtcaatctctggggcccggaaaagaccatctcttatgctggttgcatgattcaactttactttgttctcgcactgggaaccacagagtgtgtcctactggtggtgatgtcctatgaccgttatgcagctgtgtgtagacctttgcattacactgtcctcatgcaccctcgtttctgccacctgctggctgtggcttcttgggtaagtggttttaccaactcagcacttcattcctccttcaccttctgggtacctctgtgtggacaccgccaagtagatcactttttctgtgaagttccagcacttctgcgattatcgtgtgttgatacccatgtcaatgagctgaccctcatgatcacaagctccatatttgttctcatacctctcatcctcattctcacttcttatggtgccatcgtccaagctgtactgaggatgcagtcaaccactgggcttcagaaagtgtttggaacatgtggagctcatcttatggctgtatctctctttttcattccggcc

SEQ ID NO: 21178 - DNA, 936 bp, Artificial Sequence
  derived and/or modified sequence
atgaacgacgacggcaaggtgaacgccagcagcgagggctacttcatcctcgtcggtttctctaactggcctcatcttgaggttgtgatatttgtggtggtcctgattttctacctaatgactctgatcggcaatctcttcatcatcattctgtcttacttggactcgcatctacatacgcctatgtatttcttcctctcaaatctgtctttcctcgatctgtgctatactacctcttccatcccccagcttctggtgaatttgtggggccccgagaaaacaatatcttacgctgggtgcatgattcaactttacttcgtcttggcattgggaaccacagaatgcgtacttctggtggtgatgtcctatgacaggtatgccgctgtttgtcggccacttcactacaccgtgctgatgcatccccgattctgccatctgctcgctgtggcctcatgggtcagcggcttcactaattcagcattgcacagcagcttcaccttctgggtgcccctctgcggccatcgacaagtagatcacttcttttgtgaggtgcctgcacttttgcgcttgtcatgtgtggatacacacgtcaacgaattgacccttatgatcacctcctcaatcttcgtgctcatacccctgattttgatcctaaccagttatggcgcgattgtacgcgctgtgttgcgcatgcaaagcaccacaggacttcaaaaggtctttggtacctgcggtgctcatctgatggccgtctccctatttttcattcccgccatgtgcatctatcttcagccacccagtggcaatagccaggaccaggggaagtttattgctctgttttatacagtggtgactccctccctaaacccactcatctacacgctgcggaacaaggtggtcagaggggctgttaagcgcctgatgggatgggaatag

SEQ ID NO: 21179 - DNA, 936 bp, Artificial Sequence
  derived and/or modified sequence
atgaacgacgacggcaaggtgaacgccagcagcgagggctacttcatccttgtcggcttttccaactggcctcacctagaggtggtaatcttcgtcgttgttctgattttctacctgatgactcttatcggaaacctgttcatcattatattgtcttatctggactcccacctgcacaccccaatgtacttctttctgagcaacctctccttcctggatctgtgttacacgacctccagcataccccagctgttggtcaacctttgggggcccgagaagaccatcagctacgccggatgtatgattcagctttattttgtgctggcccttggaaccaccgaatgcgtgctattggtagtgatgtcctacgatagatatgctgcagtgtgccggcccctccactatactgtgctcatgcatccaaggttttgtcacttactagcagttgcgagctgggtgagcgggttcactaactcagctcttcactcttcctttacgttttgggtgcccctatgtgggcaccgacaagtggaccactttttttgcgaggtgcctgctcttctgcggctctcttgtgtggacacacacgtaaatgaactaacactgatgattacgtcctccatcttcgttttgattccactgatccttatcctgacatcatatggagctatcgtgagggctgttctgaggatgcaaagcaccactggcctgcaaaaggtgttcggtacgtgtggcgcccacctaatggcggtgtcactgtttttcattcccgctatgtgcatttatctccaaccaccttcaggcaattctcaggaccagggcaaattcatcgctcttttttataccgtggtcaccccaagcttaaatcccctgatttataccctcaggaataaggttgtacgaggagccgtgaagagactgatgggctgggagtag

SEQ ID NO: 21180 - DNA, 936 bp, Artificial Sequence
  derived and/or modified sequence
atgaacgacgacggcaaggtgaacgccagcagcgagggctacttcatcttagttggtttctctaactggccccatctggaagttgtgatttttgtggtggtactcatcttctacctgatgaccctgatcggcaatttgtttattataattctttcatacttggatagccatctccatacacccatgtacttcttcttatctaatctaagttttttggacttgtgttacaccacttctagcatcccccagttgctcgttaacctctggggacctgagaagacaattagctatgccgggtgtatgatccaactctacttcgtgctcgctttgggaacaaccgagtgcgttctactagtggtcatgtcatacgataggtatgcagctgtttgtagacctctgcattacaccgtcctgatgcatcccagattctgccatctgttagccgtggcatcctgggtcagcggattcaccaattcagcccttcatagctcttttacgttttgggtcccactgtgcggacaccgccaagtagatcactttttctgtgaggtccccgccttgctcaggttatcctgcgtcgatactcacgtgaatgagttgacactaatgataacatcgagtatcttcgttttgatccccctcatcttgatactcacttcctacggggcgatagtaagagccgtcctccgtatgcagtcaacaactggactgcagaaggtgttcgggacctgtggagcccatctgatggccgttagcctattttttatacctgccatgtgcatttacttacagccacctagcggtaactcccaggatcagggcaaattcattgcactgttctacactgttgtcaccccatccctaaacccattaatctacactcttcggaataaggtggtgaggggagcagttaagcgacttatggggtgggaatag

SEQ ID NO: 21181 - DNA, 936 bp, Artificial Sequence
  derived and/or modified sequence
atgaacgacgacggcaaggtgaacgccagcagcgagggctacttcattctcgtgggcttttccaattggccgcacctggaagttgtaattttcgttgttgtccttattttttatcttatgacactcattggaaatttgtttatcatcattttgtcatacctagattctcacttacacacacctatgtacttcttccttagtaatttgtccttcttagatttatgctacacaactagctcaatcccccagttgcttgtcaatctgtggggcccagagaaaacaatttcgtatgccgggtgtatgatacaactctattttgtactcgcactggggaccaccgagtgtgttctgctggtggtcatgtcatatgatcgatacgccgcagtttgcagacctctccactacaccgtcttaatgcatcctcggttctgccatctcctggctgtagcgtcctgggtctcaggattcacgaacagcgcactgcactcttcttttacattttgggtccccctgtgtggccatcggcaggtggaccacttcttctgtgaagtgccggcactgctgaggttgtcctgtgtggacacccatgtcaatgaattgaccctgatgattacgagctctatcttcgtcctgatcccattgatcctgattctgacatcgtacggtgcaatagtgcgggcagtgctccggatgcaaagtacaactggcctgcaaaaagtgtttgggacctgtggcgctcatctgatggccgtgagcctgttcttcatccctgcgatgtgtatttatctgcagcctccgagcggcaacagtcaggatcaaggcaaatttattgcacttttctacacggtggtgacaccttccctgaatcctctcatttataccctacgcaataaggtggttcgcggcgcggtgaagcggttaatgggatgggaatag

SEQ ID NO: 21182 - DNA, 777 bp, Artificial Sequence
  derived and/or modified sequence
atgaacgacgacggcaaggtgaacgccagcagcgagggctacttcattcttgtcggtttttccaactggccgcatcttgaagtggtgatcttcgtggttgttctcatcttttatcttatgacactgatcggcaatctctttatcatcattctctcttatcttgactcccacctgcacacccctatgtatttcttcctcagtaacctgtctttcctcgacttgtgttacacaacaagttccatcccccagttgctagtcaatctctggggacctgaaaagacaatcagctacgcaggctgcatgattcagctctacttcgtgctcgccttgggcactactgaatgtgtcctgctggtggtaatgtcttacgaccgatacgccgcagtgtgccggcctcttcattatacggtgctgatgcatcccaggttctgtcacttattagctgtggccagctgggtttctgggtttacaaacagcgcccttcactcctcatttacattctgggtgccattatgtggtcataggcaagtggatcacttcttctgtgaagtgcctgcactgcttcggttaagctgcgtcgatacacacgtcaatgagttgactctgatgattacatcgtccatcttcgtcctcatcccattgatcctcattctcacttcctacggcgccatcgtacaggccgtactgcgcatgcaatctaccacgggcttgcaaaaagtgttcgggacctgtggcgcacacctgatggccgtttccttgttctttatcccggcgtag

SEQ ID NO: 21183 - DNA, 936 bp, Artificial Sequence
  derived and/or modified sequence
atgaacgacgacggcaaggtgaacgccagcagcgagggctacttcattctcgtcgggtttagcaattggccccacctggaggtggtgatcttcgttgtggtactgatcttttaccttatgactcttattggtaacctgttcatcattatccttagttacctcgatagtcatctccatacccctatgtacttcttcttgagcaatctttcctttttagacctgtgttatacaacctcaagcatacctcagctactagtaaacctgtgggggccagaaaaaacaatatcatacgctgggtgcatgatacagctctattttgtgctcgctcttggcaccacagagtgtgtcctcctcgtggtgatgtcgtatgatcgatacgcggccgtctgtaggcccttgcattacacggtgctgatgcatccacgcttctgtcacttgctggctgtggcatcttgggtgtcaggcttcacaaatagtgccctacactctagtttcactttctgggtgccactgtgtggtcatagacaggtggatcactttttctgcgaggtgccagccctcctccggctatcatgcgtcgatacccatgtgaatgagctgaccctgatgattacctcatcaatcttcgttctcatccctctgatactgatcctcacatcatatggggccatcgtacgtgctgtgttgcgaatgcagagcaccaccgggctgcagaaggttttcgggacctgcggtgcccacctgatggcagtcagtctcttcttcatcccagctatgtgcatctatttgcagcctcctagcggaaacagccaggatcagggtaagttcatcgctctgttttacacagtcgtgaccccgagcctaaatccactgatatacacccttagaaataaggtggtccgaggcgccgtaaagcggctgatgggctgggaatag

SEQ ID NO: 21184 - DNA, 936 bp, Artificial Sequence
  derived and/or modified sequence
atgaacgacgacggcaaggtgaacgccagcagcgagggctacttcatcctggtggggttcagcaactggccccacctggaagtggtcatattcgtggttgtgctcatcttttacttaatgaccctaatcggaaacctcttcatcattattctctcctatctggactcccacttgcacaccccaatgtatttcttcctgagtaatctgagttttctggacctctgttacacaacttcgtctatcccacaattgctggtcaatctctggggccctgagaagacaatttcctacgctggatgcatgatacagctttacttcgttctggccttggggaccaccgagtgcgtgctgctggtagtgatgtcatatgatcggtacgcagccgtgtgcagacctcttcattatacagtgctgatgcatccaagattttgtcatctcctggccgtggcctcttgggtctctggatttaccaacagtgctctgcacagttcgtttaccttctgggtgcctctctgtggtcatcggcaggtggaccacttcttttgtgaggtgccagctctgcttagattgagttgcgtggacacacacgtaaatgagctcacactgatgataaccagcagcattttcgtgctgattcctctgattctgatcctgacttcgtatggagcaattgttcgtgcagtgcttagaatgcaatccacgactggactacagaaagtgtttggcacctgtggcgcccacctgatggccgtgtcgcttttttttatacctgccatgtgcatctacctgcagcccccatccggcaactctcaggatcaaggtaaatttatcgcactcttttatacagtggttaccccttcactgaaccctcttatatacaccctcaggaacaaagtcgttaggggtgccgtgaaacggctgatggggtgggagtag

SEQ ID NO: 21185 - DNA, 936 bp, Artificial Sequence
  derived and/or modified sequence
atgaatgacgacggcaaggtcaacgctagcagtgaagggtactttatcctggtggggttttccaactggcctcacctggaagtagtgattttcgtggtggtgctgatattctacctgatgacgctcataggaaacctcttcattatcatcctcagctatctggactctcatctgcacacccctatgtatttttttttgtcaaatctgtccttcctggacctgtgctatacgacttccagtattccgcagctgttggttaatctctggggaccagaaaagactattagctatgctgggtgcatgattcaactgtactttgtgttggctctcggaacgacagagtgcgtgctcctcgtggtgatgtcctatgatcgatatgctgccgtgtgcagaccactgcactacaccgtcctgatgcatcctcggttctgtcacctgcttgccgtggcatcctgggtcagcgggtttactaactccgcactccactcttccttcactttctgggtgcctctttgtggacatcgccaggtcgaccacttcttctgcgaagtccctgcactgctgagactgtcctgcgttgatacacacgtgaacgagttgacgttgatgatcacaagctctatattcgtactgatacccctgattctgatcttgactagctacggggcaatcgtccgcgctgtgctccgcatgcagtccaccactggcttacagaaagtatttggtacttgtggcgctcatctgatggctgttagccttttttttataccagcaatgtgcatctatttgcagcctccctccggtaatagtcaggaccagggaaaattcatagctctcttctataccgtcgtgaccccttcccttaatccactgatatacactttacgcaataaggtcgtgaggggggcagtgaaaaggttaatggggtgggaatag

SEQ ID NO: 21186 - DNA, 936 bp, Artificial Sequence
  derived and/or modified sequence
atgaacgatgatggaaaagtgaatgcaagttctgagggctatttcattcttgtggggtttagcaactggccacatttagaagtggtgatttttgtcgtggtactgattttctacttaatgactcttatcggcaatttatttattatcatactaagctacctggactctcacctccacactccaatgtacttttttttgagtaacttatctttcctcgacctatgctacactaccagttccatacctcagctgttggttaacctgtggggcccagagaaaacaatatcctacgcaggttgtatgatccaactctatttcgtgcttgccctcggcactaccgagtgcgtgctgttggtggtgatgagctacgacaggtacgcagccgtgtgtcggccactgcattataccgtcctcatgcatccccgattctgccatcttctcgccgtggctagctgggtgtccggatttacgaattcagccctacactcctcattcactttctgggtccccctctgcggccataggcaggtggatcatttcttctgtgaggtgccggctctgctcagactttcatgcgtggacacccatgtgaatgaactgacccttatgatcacctcctctatctttgttctgatcccccttatcctcatcttgacgagctacggcgctatcgtgcgggcagtcttgcggatgcagtcaacaaccggattgcagaaggtctttggcacctgcggcgctcatctgatggccgtctccctcttttttatacccgcaatgtgcatttacctgcaacccccttccggtaactcacaggaccaaggaaaattcatcgctcttttttatacggtagtgaccccaagcctgaaccccctgatatacaccctcaggaacaaagtagtgcgcggtgcagttaagcgtcttatggggtgggagtag

SEQ ID NO: 21187 - DNA, 936 bp, Artificial Sequence
  derived and/or modified sequence
atgaacgatgatggtaaagttaacgcatccagcgaagggtatttcattcttgtaggattttcgaactggccccacctggaggtggtgatttttgtggtagtgctgatcttctacctgatgactctgattggcaacttgttcattatcattcttagctatttggactctcacctgcacacaccgatgtattttttcttaagcaatctgtcattccttgacctttgctatacaacaagctctatcccccagctgctagtgaacttgtggggtcccgagaagacaatttcctacgccggttgtatgatccagctctatttcgtcctggccctggggactaccgagtgtgtactcctggtggttatgtcttatgaccgatacgccgctgtctgtcgacccctccattacaccgtcctcatgcatcctcgcttttgccatttactggcagtggcctcctgggtatccggcttcacaaactcagccctgcacagcagctttacattttgggtgcctctctgtggccaccggcaggttgaccattttttctgtgaagtacccgctctcctgcggctgtcctgcgtagacacccatgtcaacgaactgacgctaatgatcacttcctccatcttcgtgctgatcccactcatcctcatcttgacatcgtacggcgcaatcgtcagagccgtgctgcgcatgcaatccacaaccgggctccagaaagtgttcggaacatgcggagcccacttgatggccgtctcactgttttttatccctgcaatgtgcatatacctgcaaccacccagcggtaactcacaggatcaagggaaatttatcgcactcttctatacggttgtcactccttcccttaaccccctgatttatactctccgcaacaaagtagtaaggggcgcagttaaaaggctgatgggttgggagtag

SEQ ID NO: 21188 - DNA, 936 bp, Artificial Sequence
  derived and/or modified sequence
atgaatgatgacggtaaggtcaatgcctcaagcgagggctatttcattctggttgggtttagcaactggccgcacctcgaggtagttatattcgtggtcgtgcttatcttttatctaatgaccctgatagggaacctgttcatcattatactcagttatttggactctcacttgcacacgcccatgtactttttcttgagcaatctgtcttttctggacctctgttacacgacgtctagcatacctcagctgctggtgaacttgtggggtcccgagaaaacaatctcctatgccggttgcatgattcaactgtacttcgtattggcgctgggaaccaccgaatgcgtgctgttagtggttatgtcatacgaccgctacgccgcagtctgccgaccacttcattatacagtgctgatgcacccacggttttgccatctcctggcagtggccagctgggtttctggttttactaacagcgcacttcacagtagcttcaccttttgggtcccactgtgtgggcaccgacaagtagaccacttcttctgtgaggtaccagccctgctgcgtcttagctgtgttgacactcatgtcaatgaactgacactcatgatcactagctcaatctttgtgcttatcccgctgatcttaattctcacttcctacggagccattgttcgcgctgtgcttaggatgcagtcgacaacaggcctccaaaaagtcttcgggacctgcggggcacacctcatggccgtgagccttttctttatacccgcaatgtgcatttatctccagccacccagcggaaactcacaggatcagggcaaattcattgccctgttttacactgtggtgaccccatctttgaaccccctcatttatactctgcgtaataaggtcgtacgcggagcagttaaaaggctcatgggctgggaatag

SEQ ID NO: 21189 - DNA, 777 bp, Artificial Sequence
  derived and/or modified sequence
atgaatgatgatggaaaagttaacgcatcctccgagggttattttattcttgtcgggttttccaactggcctcacctggaagtcgtgatctttgtcgtcgttctaattttttatttgatgactttgatcgggaatctctttataattattttgagctacctggacagtcaccttcacacgcccatgtatttttttttgagcaacttgtcatttctggatctctgttacacaaccagctctatcccccagctgctcgtcaacctgtgggggcctgagaaaactatctcgtatgcaggctgcatgatacagctgtactttgttcttgcactcgggaccactgagtgtgttctgctcgtggtcatgtcctatgataggtatgcggcagtctgcagacctctgcattataccgtcctcatgcatcctaggttctgccacctcctcgccgtggcatcatgggtttctggattcacgaacagcgctttacacagcagcttcaccttctgggtgccactgtgtggccataggcaggttgaccacttcttttgcgaggttccagcattgctgagactgagctgcgtggacacgcatgttaacgagttaacgctgatgattacttcctcaatatttgttctcattcctctgatcttaatcctgacttcttacggcgcaatcgttcaagcggtgcttcgaatgcagagcaccacagggttacagaaggtctttggcacctgcggcgctcacctgatggcagtgtccctattttttatccccgcatag

SEQ ID NO: 21190 - DNA, 936 bp, Artificial Sequence
  derived and/or modified sequence
atgaatgacgatgggaaggttaatgcttcaagcgaaggatatttcatccttgtgggcttctcgaactggccccacttagaagtggtcatatttgtggttgtcctgattttctatctgatgaccctcatcggcaacctctttatcataatcctgtcctacctggactctcacctccatacacccatgtacttcttcttatcaaacttgagtttcctagacctgtgttacacaacctcaagtatcccgcagctcctggtgaacttgtggggacccgaaaaaactatcagctatgccggatgcatgatccagctgtacttcgtgttggcactaggcaccaccgaatgcgttcttctggtcgtcatgtcatacgatcgctacgccgctgtgtgtaggccgttacactacacggtgcttatgcaccccagattctgccatttgctcgcagttgccagttgggtgtcaggcttcaccaattctgctttacacagcagctttaccttctgggtcccactgtgcggtcacagacaggtggaccattttttttgcgaggtcccagctttgctgcggctctcctgtgtagacacacacgttaacgagcttaccctaatgattaccagcagcatctttgtcctgattcccctgatccttatcctgacatcttacggcgctattgtgcgcgctgtcttgaggatgcagagcaccacaggactccaaaaggtgttcggaacatgtggtgcacatctcatggccgtgagcctgtttttcattcctgcaatgtgtatctacctccagcccccatccggcaacagtcaggatcaggggaagtttattgctctgttctacaccgttgtgactccgtcactcaatcctttaatctacactctgaggaataaagtggtccgtggggctgtgaaacggttgatgggctgggaatag

SEQ ID NO: 21191 - DNA, 936 bp, Artificial Sequence
  derived and/or modified sequence
atgaatgacgacgggaaagtcaacgcctcatccgaaggatatttcatacttgtaggtttcagcaattggccacacctcgaagttgtgatctttgtcgtcgttttaattttttaccttatgacacttattggaaacttgttcattataattctgtcttatctggattcccatctgcatacccctatgtacttcttcctttcaaatctgtctttccttgatctgtgttatacaacttcttctatccctcagcttctggttaacctgtggggtccggagaagaccatctcgtacgccggatgtatgattcagttgtatttcgtcttggcactgggtactaccgagtgtgtgctgttggtagtgatgtcctacgatcgctacgctgcagtgtgtaggccactccattacaccgtgctgatgcacccccgtttctgccacctgctggctgtggcatcttgggtgagcgggttcacaaacagtgcactgcatagctccttcactttctgggtgcccttatgtggccaccgtcaggtcgatcactttttctgcgaggtacccgcactcctccgactttcctgcgtcgacactcatgtgaatgagctgactctgatgataacatcctccatttttgtcctcattccgttgattctgatattgacctcatacggggcaatagtgagggcggtccttagaatgcagtctacaacaggcctgcagaaggtgtttggaacatgcggagcccacctcatggccgtgtcactcttcttcattccggctatgtgtatatacctgcagccccctagcggcaattctcaggatcaaggcaagttcatcgccttattctataccgtggtgacgcctagcctaaaccccctcatctataccctgcgaaataaggtggtccgcggagccgtcaagagactaatgggatgggagtag

SEQ ID NO: 21192 - DNA, 936 bp, Artificial Sequence
  derived and/or modified sequence
atgaacgacgacggcaaggtgaacgccagcagcgagggctacttcatcctggtgggcttcagcaactggccccacctggaggtggtgatcttcgtggtggtgctgatcttctacctgatgaccctgatcggcaacctgttcatcatcatcctgagctacctggacagccacctgcacacccccatgtacttcttcctgagcaacctgagcttcctggacctgtgctacaccaccagcagcatcccccagctgctggtgaacctgtggggccccgagaagaccatcagctacgccggctgcatgatccagctgtacttcgtgctggccctgggcaccaccgagtgcgtgctgctggtggtgatgagctacgacagatacgccgccgtgtgcagacccctgcactacaccgtgctgatgcaccccagattctgccacctgctggccgtggccagctgggtgagcggcttcaccaacagcgccctgcacagcagcttcaccttctgggtgcccctgtgcggccacagacaggtggaccacttcttctgcgaggtgcccgccctgctgagactgagctgcgtggacacccacgtgaacgagctgaccctgatgatcaccagcagcatcttcgtgctgatccccctgatcctgatcctgaccagctacggcgccatcgtgagagccatcctgagaatgcagagcaccaccggcctgcagaaggtgttcggcacctgcggcgcccacctgatggccgtgagcctgttcttcatccccgccatgtgcatgtacctgcagccccccagcggcaacagccaggaccagggcaagttcatcgccctgttctacaccgtggtgacccccagcctgaaccccctgatctacaccctgagaaacaaggtggtgagaggcgccgtgaagagactgatgggctgggagtag

SEQ ID NO: 21193 - DNA, 936 bp, Artificial Sequence
  derived and/or modified sequence
atgaatgatgatgggaaagtgaacgcctcgtcagaaggctatttcatccttgtgggtttcagtaactggccccaccttgaggtagtcattttcgtagtggtgctgatcttctatcttatgacattgattggcaacctatttattattatcctcagctatctcgactcacatctgcacactcccatgtattttttcctgtcaaatcttagctttctggatctgtgctataccacaagcagcattccccaactgctggtgaatctgtggggcccggaaaaaaccatttcttacgcagggtgcatgatacagctctactttgttcttgcccttggcaccacagagtgcgtcctgctcgtggtgatgtcatatgaccgctacgctgccgtctgccggcctctgcactacaccgtcttaatgcatccacgtttctgtcatctgctcgccgtggcctcctgggtgtcaggctttacaaattcggctctgcacagcagtttcacgttttgggtgccactctgcgggcaccgccaagtagatcacttcttttgcgaagtgcccgccctgctgagactgtcctgcgttgatacgcacgtaaatgaacttactctgatgatcacctctagcatcttcgtactcatccccctgatcctgatcctgacttcatacggcgcaatcgtccgcgcgatccttaggatgcagtccacaaccgggctgcagaaagtctttggcacatgtggcgcccacttgatggcggtgagtttgttctttattcctgccatgtgcatgtatctgcagccaccttcaggaaattctcaggatcagggtaagtttattgccctcttttataccgtcgtgacgccctcccttaaccctcttatttatacactgcgtaacaaggtggttcgcggagcagtgaagcgactgatgggttgggaatag

SEQ ID NO: 21194 - DNA, 936 bp, Artificial Sequence
  derived and/or modified sequence
atgaatgatgatggcaaggtgaatgccagcagcgagggctacttcatcctggtgggcttcagcaactggccccacctggaggtggtgatctttgtggtggtgctgatcttctacctgatgaccctgattggcaacctcttcatcatcatcctgagctacctggacagccacctgcacacccccatgtacttcttcctgagcaacctgtccttcctggacctgtgctacaccaccagcagcatcccccagctgctggtgaacctgtggggccctgagaagaccatctcctatgccggctgcatgatccagctgtactttgtgctggccctgggcaccacagaatgtgtgctgctggtggtgatgtcctatgacagatatgctgctgtgtgccggcccctgcactacacagtgctgatgcacccccgcttctgccacctgctggccgtggcctcctgggtgtctggcttcaccaacagcgccctgcacagcagcttcaccttctgggtgcccctgtgtggccaccggcaggtggaccacttcttctgtgaggtgcctgccctgctgcggctgagctgtgtggacacccacgtgaatgagctgaccctgatgatcaccagcagcatctttgtgctgatccccctcatcctgatcctgaccagctatggagccatcgtgcgggccatcctgaggatgcagagcaccaccggcctgcagaaggtgtttggcacctgtggggcccacctgatggctgtgtccctcttcttcatcccagccatgtgcatgtacctgcagcccccatctggcaacagccaggaccagggcaagttcatcgccctcttctacacagtggtgacccccagcctgaaccccctcatctacaccctgaggaacaaggtggtgagaggagctgtgaagaggctgatgggctgggagtag

SEQ ID NO: 21195 - DNA, 936 bp, Artificial Sequence
  derived and/or modified sequence
atgaacgacgacggcaaggtgaacgccagcagcgagggctacttcatcctggtagggttttccaattggcctcacctggaggtggtgatcttcgtagtggtgctgatcttctaccttatgaccttgatcggaaatctatttattattatcctaagctacctagactcccacctgcacacccccatgtatttctttcttagcaatttgtcatttctggacctgtgctacactacaagctcaattccgcagcttcttgtgaatctgtggggtccagaaaaaacaatatcctatgctgggtgcatgatccagttgtatttcgtgcttgcgctgggaacaaccgagtgtgttctgctcgtggttatgtcctatgaccgatacgctgccgtctgcaggcctctgcactacaccgtgctcatgcacccaagattttgtcacttgttggctgtggcctcctgggtgtccggcttcaccaactccgctctgcatagctccttcaccttttgggtgcccctgtgcggccatcgccaggttgaccatttcttttgcgaggtgcccgctctactgcgcttgtcctgcgtggatacccatgtgaacgaacttacccttatgatcacgtcttccattttcgttctaattcccttgatcctgatcttaactagctacggggccattgtgcgcgccatcctgcggatgcagtccaccacaggtctgcagaaggtgttcgggacatgtggcgctcacttgatggcagtttcacttttcttcatcccagcaatgtgtatgtatctgcaaccccctagtggtaattcacaagatcaggggaaattcatagccctcttctacacggttgtgacacctagtctcaacccccttatttatacactccgcaataaggtcgtcaggggtgccgttaagagactgatgggatgggaatag

SEQ ID NO: 21196 - DNA, 936 bp, Artificial Sequence
  derived and/or modified sequence
atgaatgatgatggaaaagtcaatgctagctctgaggggtactttattttagttggattttctaattggcctcatctggaagtagttatctttgtggttgtcttgatcttctacttgatgacactgataggaaacctgttcatcatcatcctgtcatacctggactcccatctgcacacaccaatgtacttcttcctttcaaacctctcatttctggatctctgctacaccaccagctctatccctcagttgctggtcaatctctggggcccggaaaagaccatctcttatgctggttgcatgattcaactttactttgttctcgcactgggaaccacagagtgtgtcctactggtggtgatgtcctatgaccgttatgcagctgtgtgtagacctttgcattacactgtcctcatgcaccctcgtttctgccacctgctggctgtggcttcttgggtaagtggttttaccaactcagcacttcattcctccttcaccttctgggtacctctgtgtggacaccgccaagtagatcactttttctgtgaagttccagcacttctgcgattatcgtgtgttgatacccatgtcaatgagctgaccctcatgatcacaagctccatatttgttctcatacctctcatcctcattctcacttcttatggtgccatcgtccgagctatactgaggatgcagtcaaccactgggcttcagaaagtgtttggaacatgtggagctcatcttatggctgtatctctctttttcattccggccatgtgcatgtatctccagccaccatcaggaaattctcaagatcaaggcaagttcattgccctcttttatactgttgtcacacctagtcttaaccctctaatctacaccctcagaaacaaagttgtaagaggggcagtgaagagactaatggggtgggaatga

SEQ ID NO: 21197 - DNA, 936 bp, Artificial Sequence
  derived and/or modified sequence
atgaacgacgacgggaaggtcaacgcctcctcagagggttactttattctggtcgggttttctaattggcctcatctggaagtcgtgatatttgtggtcgtgctaattttttaccttatgaccctgattggcaatttattcattatcatcttgagctaccttgactcacacctccatacacctatgtacttcttccttagcaacctatctttcctggatctttgctatacgacctcgtccatcccccagctgctggtaaatctttggggccctgaaaagactatttcttatgccggatgtatgattcagctctactttgtgctagccttgggcaccaccgagtgcgttcttctggtcgtgatgtcgtacgatagatatgcagcagtgtgtagaccccttcattataccgtgctgatgcacccccgattttgccatcttctggccgtggcgagttgggtgtccggctttactaatagcgcccttcactcatcatttactttttgggtgccgttgtgcggccacagacaggtcgatcacttcttttgcgaggttcctgcactgcttcgtctctcctgcgtggacacacatgtgaatgagctgaccttgatgataaccagctcgatctttgtgctgatcccgttgatattgatcttaacaagttacggggctattgtacgcgcaattttacgaatgcaaagtacaaccggtctacagaaggtgttcggaacctgtggagctcaccttatggccgtcagcctgttctttatccctgcaatgtgtatgtatctgcaacccccatcagggaacagccaggatcaaggtaagtttatcgccctgttctacaccgtggtaactcctagcttgaatcccctgatttataccctccgaaacaaggttgtgagaggggctgtaaaacgcttgatgggctgggagtag

SEQ ID NO: 21198 - protein, 278 aa, Artificial Sequence
  derived and/or modified sequence
MGKGNEDSDLHCSSIQCSTDQPPFQQISFTEKGSDEKKPFKEKGKTAFSHSSEKHIQRQGSEPNPNKENSEETKLKAGNSTAGSEPESSSYRENCRKRKMSSKDSCQDTAGNCPEKECSLSLNKKSRSSTAVHNSEIQETCDAHHRGHSRACTGHSKRHRSRALGVQTPSIRKSLVTSVRAMSEAVYQDLAQVWAQQIHSPLTCEQLTLLTRLRGPLCAQVQTLYSMATQAAYVFPAESWLVPATLPGPGESALDREAHPFPGQEITETVSGSDEAKL

SEQ ID NO: 21199 - DNA, 837 bp, Artificial Sequence
  derived and/or modified sequence
atgggcaagggcaacgaggacagcgacctgcactgcagcagcatccagtgcagcaccgaccagccccccttccagcagatcagcttcaccgagaagggcagcgacgagaagaagcccttcaaggagaagggcaagaccgccttcagccacagcagcgagaagcacatccagagacagggcagcgagcccaaccccaacaaggagaacagcgaggagaccaagctgaaggccggcaacagcaccgccggcagcgagcccgagagcagcagctacagagagaactgcagaaagagaaagatgagcagcaaggacagctgccaggacaccgccggcaactgccccgagaaggagtgcagcctgagcctgaacaagaagagcagaagcagcaccgccgtgcacaacagcgagatccaggagacctgcgacgcccaccacagaggccacagcagagcctgcaccggccacagcaagagacacagaagcagagccctgggcgtgcagacccccagcatcagaaagagcctggtgaccagcgtgagagccatgagcgaggccgtgtaccaggacctggcccaggtgtgggcccagcagatccacagccccctgacctgcgagcagctgaccctgctgaccagactgagaggccccctgtgcgcccaggtgcagaccctgtacagcatggccacccaggccgcctacgtgttccccgccgagagctggctggtgcccgccaccctgcccggccccggcgagagcgccctggacagagaggcccaccccttccccggccaggagatcaccgagaccgtgagcggcagcgacgaggccaagctgtag

SEQ ID NO: 21200 - DNA, 837 bp, Artificial Sequence
  derived and/or modified sequence
atgggcaagggaaacgaggactcagacctgcactgcagctcaatccaatgctcaactgatcaacctcccttccagcagataagtttcactgagaagggttcagatgagaaaaagccatttaaggagaaaggaaagaccgcttttagtcattccagcgagaaacacattcagaggcaaggttccgagcctaaccccaataaagagaattctgaggaaactaagctgaaggctgggaattccacggccggaagtgagcccgaatcttcctcctaccgcgaaaattgccgaaagcggaagatgtccagcaaggactcttgccaggatactgccggaaactgccccgaaaaggagtgcagcctctccctgaacaagaagagtcggagcagtacagccgtacacaatagcgaaattcaggagacttgtgacgctcaccacagagggcacagcagggcttgcactggacattctaagcgtcaccggagcagagcacttggagttcaaacaccctcaatccggaagtcactggtcacgagtgtccgtgcaatgagtgaagctgtctaccaggatctagcacaagtctgggctcaacagatccactctcctctcacatgcgaacaactcacgttactgacccgcctcaggggccccctttgcgcccaggtccagacgctctacagcatggccacccaggctgcgtacgtgtttcctgcagagtcttggcttgtcccggctacactcccgggtccaggcgaatccgcgttggatcgggaagcacaccccttccccggccaggaaatcacagaaaccgttagtggatctgacgaagctaaactctag

SEQ ID NO: 21201 - DNA, 837 bp, Artificial Sequence
  derived and/or modified sequence
atgggcaaaggaaatgaagacagcgacctgcactgcagcagcatccagtgcagcacagaccagccccccttccagcagatctccttcacagagaagggcagtgatgagaagaagcccttcaaggagaagggcaagacagccttcagccacagcagcgagaagcacatccagaggcagggcagcgagcccaaccccaacaaggagaacagcgaggagaccaagctgaaggccggcaacagcacagctggcagcgagcctgagagcagcagctaccgggagaactgcaggaagaggaagatgagcagcaaggacagctgccaggacacagctggcaactgcccagagaaggaatgttccctgagcctgaacaagaagagccgcagcagcacagctgtgcacaacagcgagatccaggagacctgtgatgcccaccaccggggccacagccgggcctgcaccggccacagcaagaggcacaggagccgggccctgggcgtgcagacccccagcatcaggaagagcctggtgacctctgtgcgggccatgtctgaggccgtgtaccaggacctggcccaggtgtgggcccagcagatccacagccccctgacctgtgagcagctgaccctgctgacccggctgcggggccccctgtgtgcccaggtgcagaccctgtacagcatggccacccaggccgcctacgtgtttcctgctgagagctggctggtgcctgccaccctgcccggccctggagagagcgccctggaccgggaggcccaccccttccctggccaggagatcacagaaacagtgtctggcagtgatgaggccaagctgtag

SEQ ID NO: 21202 - DNA, 2084 bp, Artificial Sequence
  derived and/or modified sequence
cacactctgcctttggacgtgagagagagcgcacctttcacttgagcttcaacatgggaaagggaaatgaagactccgatctccactgctcctccatccagtgctccactgaccagccccctttccaacagatctcctttacagaaaagggctcagatgagaagaaaccattcaaagaaaaaggcaagaccgccttctcccattccagtgagaagcacatacaaaggcaaggatcggagcccaatccaaacaaggagaattctgaggaaaccaagctcaaggccgggaacagcactgctggatcagaaccagagtccagctcatatcgggaaaactgcaggaaaagaaaaatgagttccaaggacagctgccaagacacagcagggaactgtccagaaaaggagtgcagcttgtcattgaataaaaaatcaagatcctccactgctgtgcacaacagtgaaatccaggagacctgtgatgcccaccataggggacattccagggcttgcactgggcacagcaagcggcataggtctcgggccctaggagtccaaacaccgtcaattcgaaaaagcttggtgacttctgtgcgagctatgtcagaggctgtttatcaagacctagcccaggtgtgggcacagcagatccattctccacttacctgtgagcagctgacactgctcactcggctccgggggcctctgtgtgcccaggtgcagaccttgtattccatggccacccaggcagcttatgtcttccctgctgagagctggcttgtcccagccacactgccaggtcctggggaatcagccctggatagagaagcccatcccttccctgggcaggagataactgagactgtcagtggatcagatgaggctaagctgtgagcaccctgaccctattcagcagagatgcagctctgggaatgagaacaaggatctgcttcttctcagattcttccagatgaccagcagtgacaattttagacacactgtgttaataaatgacagaacctgaagaagtcataggaaagaaacttgagcggtatactcagaatggtgagagccctgaattttgcagaccgctaagactatagacaaattttatatttcatgttagacatttgatgccttttggatgtctgatgacagtcatgcatttctatataatcagaaaaacattagaatgtaatcgtgaatttgcatattttagattgtagaaaagtaaatataaaattatgtgctccttttttgtttttttttttttttgagacagtcttgctatgttacccaggctggagtgcagtggcacaatcttagctcactgcaacctctgcttcctgggttcaaacaattctcatgcctcagcctcccaagcagctgggactacaggcatgtactgctatgcctggctaattttttttttcctgtattgttagtagagacagagttttgtcactttggccaggttggcctcgaactcaggtgatctgccagcctccgcctcccaacgtgctgggattacaggcatgagccgccttaccaagaaattgcttctcttttaatccagaaaaggttgtaggctctcactcttccagcctgaacccatggagtactaatatccacaaaccattaatagcactccctgtgggaaaatgtctatatatttttagtttgatataattatagtaaaattactatgcaagctgtttacttttaatatttctacataaaatttaagtcaagatatagtaaatggtaaatgattgtacttatttattgacctgcctcatgtttcatttcattttaaacatcctaaatttatattttattatattttatacatttcaattgattgtactatattgcaggatatggagatttcatcacgtactacaatacagtgtattttgttatatttgacgtatattctacttgtattttgtactgagatcatacactatttcattatctaagtgtattaattgtttggttgctttataattttcattttatgtaatgaaataaacaatgttgtttggaattttaaatttctttcatatggaatttgtatttaataaa

SEQ ID NO: 21203 - DNA, 837 bp, Artificial Sequence
  derived and/or modified sequence
atgggcaagggcaacgaggacagcgacctgcactgcagcagcatccagtgttctactgaccagccaccctttcagcagatatccttcacagaaaaaggaagtgatgaaaagaagccatttaaagaaaagggcaagactgcattcagtcatagcagtgaaaaacatatacagcggcagggatccgaacccaaccctaataaagaaaacagcgaggagaccaaactgaaagcgggcaactctaccgcaggcagcgagcccgagtctagcagctatagggagaactgtcggaaacgcaagatgtcctcgaaggacagttgccaggataccgcaggcaactgtcctgaaaaagagtgctcattgagcctgaataagaagagccgctcgagtaccgccgtccacaattctgagattcaggaaacttgtgacgcccatcatcgaggccactcccgggcctgtaccggtcattccaaacgacaccgctctagagccctaggagtgcagacacccagcatcagaaaatccctcgtcacttccgtgcgcgctatgagcgaagccgtgtatcaggatttggcgcaagtatgggcccagcagatccactctcctctgacttgtgagcagctgaccctgttgacccgcttacggggtcctctttgcgcccaggtgcaaacactctacagcatggccactcaggcggcctacgtattccctgccgaatcctggctggttcccgctaccctgcccgggcccggggagagcgctctggatagggaagcccatcctttcccagggcaagagatcaccgagacagtcagtggctccgacgaggcaaaactatag

SEQ ID NO: 21204 - DNA, 837 bp, Artificial Sequence
  derived and/or modified sequence
atgggcaaggggaatgaagatagcgacctgcattgcagcagtatccagtgtagcaccgaccagccccctttccagcagatctcctttaccgaaaaaggatcagatgagaagaaacctttcaaggagaaaggcaaaacagcctttagtcactccagcgagaagcacatccaacgccagggatcagagcccaatcctaataaggagaactcagaagagacgaagttgaaagcgggtaactcaaccgccggaagtgaacccgagtcttcctcctatagagaaaattgcaggaagcggaaaatgtccagcaaagacagctgtcaggacacagctggaaattgcccggagaaagaatgcagcctgtcactgaataagaagtcgcgttcctcaacagcggtgcataattcagagatccaagaaacgtgtgacgcacaccacaggggccattcacgtgcatgcaccgggcacagtaagaggcatcgttcccgggcactgggcgtgcagactccgagtattcggaaatccttggtgacatccgtcagagccatgagcgaggccgtctaccaggatctggctcaggtttgggctcagcagatccattcccctctgacgtgcgagcagctcacgctgctgactagactcagagggcctttgtgcgcgcaggtccagacactatacagcatggcaactcaggccgcatacgtctttcctgctgagagttggttggtgcccgcaactctgccgggacccggagagtccgcattggaccgggaggcacatccctttccaggacaggagataactgagacagtgtccgggtctgacgaagccaaactctag

SEQ ID NO: 21205 - DNA, 837 bp, Artificial Sequence
  derived and/or modified sequence
atggggaaaggcaacgaggactctgacctccactgctctagtattcaatgcagcaccgaccagccaccctttcaacagattagctttaccgaaaaaggatctgatgagaagaaaccctttaaggagaagggtaagactgcctttagccactctagcgagaagcatattcagcgccagggctctgagcccaaccccaacaaagaaaactctgaagagacgaaactcaaagcaggcaactccactgcagggagtgaacccgagagctccagctatagagaaaactgtagaaagagaaaaatgtcttctaaggattcatgtcaggacacggcagggaactgtccggaaaaggaatgctccctgtctctaaacaagaagagccgctctagcacggccgttcataactcagaaatccaggaaacttgcgatgctcatcaccgtggccattctagggcctgcacaggccactccaagaggcaccgaagcagggctttaggcgtccagacaccatcaatccgcaaatctctggtaactagcgtgcgcgcaatgtctgaggccgtctatcaggacctagcacaggtctgggctcagcagatccattcccctctgacctgcgagcaactgaccctgcttacaagactgaggggacccctttgcgcccaggtccaaactttgtactctatggccactcaggctgcttatgtatttcccgctgagtcttggttggtccctgcaactctgcccggtcccggagaaagcgccctcgaccgcgaagcgcacccattccctggtcaagaaatcaccgaaaccgtgtccggcagcgatgaggctaaactgtag

SEQ ID NO: 21206 - DNA, 837 bp, Artificial Sequence
  derived and/or modified sequence
atgggcaagggcaacgaggacagcgacctgcactgcagcagcatccagtgcagtaccgaccaacctccttttcagcaaatctcctttacagaaaagggcagcgacgaaaagaagccctttaaggagaagggaaagaccgccttttctcactcctctgaaaaacacattcagcggcagggaagtgagccaaaccctaacaaagaaaatagcgaggagactaagcttaaagccgggaattcgaccgctggatcagaacctgaatcaagctcctaccgagaaaattgtaggaaaaggaaaatgtcaagtaaggactcatgtcaggataccgcaggaaactgtccggagaaggaatgctcactgtccctaaataaaaaatctcgttccagcaccgctgttcacaattcagagatccaggagacttgcgatgcgcaccaccgggggcactccagggcctgtaccggccacagcaaaagacaccgaagcagggctctgggggttcaaacgccttcaataagaaaaagtctcgttacatctgtccgggccatgtccgaagccgtgtatcaggacctggcacaggtgtgggcccagcagatccacagcccacttacttgtgagcagttaacgctgttgactcgactgaggggtccactgtgcgcacaggttcaaacactttacagcatggctacacaggctgcgtacgtgttccctgccgagagttggctagtaccagctaccctaccgggtcctggcgaatccgccctcgacagagaagcccacccattccccggccaggaaattaccgagactgtttcaggttccgacgaagctaagctttag

SEQ ID NO: 21207 - DNA, 837 bp, Artificial Sequence
  derived and/or modified sequence
atgggaaaaggcaatgaagattcagatctgcactgttctagcattcagtgctctaccgaccagccaccattccagcagatttctttcactgagaaaggaagcgacgagaagaaaccgtttaaagagaaagggaaaacagctttctcgcacagctcagagaagcacatccagcggcaggggtctgaacctaatccaaacaaagaaaatagcgaagaaactaaactcaaagcaggaaattctacagccggtagcgaaccagagtcgtcaagctatcgggagaactgccggaagcggaagatgagctcaaaggatagttgtcaggataccgcaggcaattgccccgagaaggaatgtagcctatccttgaacaaaaagagtcgctcgagtaccgccgtacataatagcgaaatccaagaaacctgcgatgcccatcataggggtcacagtagagcctgcaccggccactcaaagcgtcaccggtcaagggctctgggcgttcaaacacccagcatacgcaagagcctggtgacatccgtcagggccatgagcgaggctgtataccaggatctggcccaggtatgggcacagcagatccacagtcccctgacatgcgaacaactgaccctgttgacccgcttgagaggccctctctgcgcacaggtgcagacgctgtatagtatggcgacccaggcagcgtacgtgtttccagccgaaagttggctcgtgcctgctacgctgcccggtcccggtgagagtgctctcgacagggaagcacacccattccctgggcaagagataacggagacagtgtccggctccgatgaagcgaagctttag

SEQ ID NO: 21208 - protein, 313 aa, Artificial Sequence
  derived and/or modified sequence
MNWENESSPKEFILLGFSDRAWLQMPLFVVLLISYTITIFGNVSIMMVCILDPKLHTPMYFFLTNLSILDLCYTTTTVPHMLVNIGCNKKTISYAGCVAHLIIFLALGATECLLLAVMSFDRYVAVCRPLHYVVIMNYWFCLRMAAFSWLIGFGNSVLQSSLTLNMPRCGHQEVDHFFCEVPALLKLSCADTKPIEAELFFFSVLILLIPVTLILISYGFIAQAVLKIRSAEGRQKAFGTCGSHMIVVSLFYGTAIYMYLQPPSSTSKDWGKMVSLFYGIITSMLNSLIYSLRNKDMKEAFKRLMPRIFFCKK

SEQ ID NO: 21209 - DNA, 942 bp, Artificial Sequence
  derived and/or modified sequence
atgaactgggagaacgagagcagccccaaggagttcatcctgctgggcttcagcgacagagcctggctgcagatgcccctgttcgtggtgctgctgatcagctacaccatcaccatcttcggcaacgtgagcatcatgatggtgtgcatcctggaccccaagctgcacacccccatgtacttcttcctgaccaacctgagcatcctggacctgtgctacaccaccaccaccgtgccccacatgctggtgaacatcggctgcaacaagaagaccatcagctacgccggctgcgtggcccacctgatcatcttcctggccctgggcgccaccgagtgcctgctgctggccgtgatgagcttcgacagatacgtggccgtgtgcagacccctgcactacgtggtgatcatgaactactggttctgcctgagaatggccgccttcagctggctgatcggcttcggcaacagcgtgctgcagagcagcctgaccctgaacatgcccagatgcggccaccaggaggtggaccacttcttctgcgaggtgcccgccctgctgaagctgagctgcgccgacaccaagcccatcgaggccgagctgttcttcttcagcgtgctgatcctgctgatccccgtgaccctgatcctgatcagctacggcttcatcgcccaggccgtgctgaagatcagaagcgccgagggcagacagaaggccttcggcacctgcggcagccacatgatcgtggtgagcctgttctacggcaccgccatctacatgtacctgcagccccccagcagcaccagcaaggactggggcaagatggtgagcctgttctacggcatcatcaccagcatgctgaacagcctgatctacagcctgagaaacaaggacatgaaggaggccttcaagagactgatgcccagaatcttcttctgcaagaagtag

SEQ ID NO: 21210 - DNA, 942 bp, Artificial Sequence
  derived and/or modified sequence
atgaactgggagaacgagagctcacccaaggagttcatcttgctcggattcagcgaccgggcgtggctgcagatgccactgttcgtggtgctgctgatttcctacaccattactatatttgggaacgtatccataatgatggtgtgcatcctagatcccaagcttcatacacctatgtacttcttcctaactaatcttagcatactcgatctgtgctacacaacaaccactgtgccccacatgctcgtgaatatcggatgcaataagaagacaatcagctacgctggctgcgttgcacatctgatcatctttttagctcttggcgcaactgagtgcctgctgctagctgtcatgagcttcgacaggtacgtggcggtgtgccggccactccactatgtggtgatcatgaattattggttttgcctaaggatggcagccttctcctggctcatcggatttggcaactccgtcctgcagagttcactcaccctgaatatgccccgctgtgggcaccaggaagtggaccatttcttttgtgaagtgcctgcgctgctgaaactttcatgtgccgacaccaagcctatcgaggctgagctcttctttttcagtgtcctgattttactgatacctgtcacactgatcttgatcagctacggattcattgcacaggccgtgctcaagatcagatctgcagagggacggcagaaggcatttggtacctgcggatcacatatgatcgtggtgtctctgttttacggcaccgctatatatatgtacttgcagccgccctcatccacaagcaaagattggggcaagatggtatctcttttttacgggattattaccagcatgctgaacagcctcatctattcactgcgtaataaggatatgaaggaagcattcaaaaggctcatgccccgcatattcttctgcaagaagtag

SEQ ID NO: 21211 - DNA, 942 bp, Artificial Sequence
  derived and/or modified sequence
atgaattgggagaatgagtcatcccccaaagagttcatcctattgggttttagcgaccgggcctggctgcagatgccgttgttcgtggtgttgctgatttcgtatacgatcacgatctttggtaatgtcagcattatgatggtgtgcattctggatcccaaattgcacaccccaatgtacttttttctcactaacttgagcatccttgatctgtgttacactaccacgaccgttcctcacatgttggtgaatattgggtgcaacaaaaaaacaatttcatacgccgggtgcgtggctcatctaatcatttttctcgcgctgggcgcaaccgaatgtctactgcttgccgtgatgagcttcgatcgctacgtcgccgtgtgccgaccacttcactatgttgtgatcatgaattactggttctgtcttcggatggcagccttctcatggctgatcggtttcggcaactctgtgctccagtcctccttgaccttaaatatgcccaggtgtggtcaccaggaggtcgaccactttttctgcgaagtgcctgctctgctgaagttgagctgtgcagacactaagcctatcgaggccgagctgttcttctttagtgtcctgatcttactgatacctgtcaccctgatcctcatctcgtacggctttattgcgcaggctgtgctcaaaattaggtcagcggagggacggcagaaagcatttggtacttgcggatcgcacatgatcgtggtttccctcttctacggcacagccatctacatgtacttgcagccacccagctctacatccaaggattggggtaaaatggttagtttgttttatgggatcatcacgtcaatgttgaattcactcatttacagtttacggaataaggacatgaaagaggcgtttaaaagattgatgccgcgcatcttcttttgtaagaagtag

SEQ ID NO: 21212 - DNA, 942 bp, Artificial Sequence
  derived and/or modified sequence
atgaactgggagaatgaaagctctcccaaagagttcattctgctcgggtttagcgatcgcgcttggctgcaaatgcccctgttcgttgtcttgctcatatcatataccatcacaattttcgggaacgtctctattatgatggtgtgcatcctggatcctaaacttcatactccaatgtatttttttttaaccaacctgagtatactggatctttgttacacgacaaccaccgtcccccacatgttagtcaacatcggatgtaataagaagacaatcagttatgcaggctgtgtggcccacttaatcatattcctggcgctcggtgctaccgaatgtcttctcctcgctgtgatgagcttcgatcgttatgttgctgtgtgccggccacttcattacgtggtgataatgaattactggttttgcctgaggatggcagcttttagctggctcattggattcggcaactccgtattacagtcctccctcaccctgaacatgcctcggtgtgggcaccaggaagtggaccatttcttctgtgaggtgccagcgttgcttaaactatcgtgtgccgacacaaaacctattgaagcagaactgttctttttcagcgtgctgattctgctgatcccagttactttgattctcatatcctatggtttcatcgcacaggccgttttgaaaatccgctctgccgaggggaggcaaaaggcctttggcacctgcgggtctcatatgattgtggtcagtctcttctatggcaccgctatttacatgtacctccagcctccgagcagcacatccaaggattggggtaagatggtttccctattctatggaataataaccagcatgctgaacagccttatctatagtctccgtaacaaggatatgaaggaggccttcaagcgcctgatgccccggattttcttctgcaaaaagtag

SEQ ID NO: 21213 - DNA, 942 bp, Artificial Sequence
  derived and/or modified sequence
atgaattgggagaacgagtcaagtcctaaggagttcattctgttgggtttctcagatagggcctggcttcagatgccactctttgtggttcttctgatatcttacacaataactatatttgggaacgtcagtatcatgatggtatgcattttggatcctaagctgcatacaccaatgtacttcttccttaccaatctcagtattttagacctctgctataccaccaccacggtcccccacatgctcgtaaatatcggctgcaacaaaaagacaatcagctacgctggctgtgtggcccatcttatcatctttctggctttgggcgccaccgagtgcttactgcttgcagttatgtccttcgaccggtatgttgccgtctgtcgtcctttgcactacgtagtaattatgaactattggttttgcctccggatggctgctttctcctggctgattggctttggcaactccgtgctccagtcatccctgaccctcaatatgccaagatgtggccaccaagaagtcgaccatttcttctgcgaggtacctgccctactcaagttgagctgtgccgataccaagcccattgaagcggaacttttttttttctcagtcctcatactgttaattcccgtcacgcttatactcatcagttacggatttattgcccaggcagttctcaagattcgcagcgccgaaggaaggcagaaagccttcgggacatgcggcagccatatgatcgtcgtgagcctcttctacggcactgccatttatatgtacttacagccaccctcaagcacatccaaagattggggcaagatggtgtccttgttctatggcatcatcactagcatgctaaactccctgatttactccttaagaaataaggatatgaaggaggccttcaagcgtctcatgccaaggatctttttctgcaaaaaatag

SEQ ID NO: 21214 - DNA, 942 bp, Artificial Sequence
  derived and/or modified sequence
atgaattgggagaacgaatcctcaccaaaggagtttatcctactaggattttccgacagagcttggttgcagatgcctcttttcgtggtgcttcttatctcatataccattaccatatttgggaacgtgagcataatgatggtctgtattctagaccccaaactgcacacccccatgtactttttcctgactaatctgagtatccttgatctgtgttacactacaaccacagtgccccacatgctggtcaatattggatgtaataagaagaccatctcctatgctggctgtgtcgcccatcttatcatcttcctagcgctcggagctacagagtgtcttctgctcgccgtcatgtcatttgacagatacgtggctgtttgtagaccccttcactacgttgtgatcatgaactattggttctgtctgcggatggccgctttttcctggcttatcggattcggaaactccgtgctccagtccagcctcacacttaacatgcccaggtgtggccaccaggaggtggatcacttcttctgcgaagtgcccgcactgctgaagctgagctgcgcggataccaagccaatcgaggctgaactcttcttcttcagcgtgctcatcttgctgattcccgtgaccctcatcttgatcagctatggctttattgcccaggccgtactcaagattagaagtgctgaagggagacagaaagccttcggaacatgtgggtctcacatgatcgtggtctcccttttttacgggactgccatttatatgtaccttcagcccccctcctcaacttctaaagattggggaaaaatggtgagcctgttctacggcattataacaagcatgctgaattccttaatttattccctgagaaataaagacatgaaggaggcattcaagcgactaatgcctcgaatcttcttttgtaagaaatag

SEQ ID NO: 21215 - DNA, 942 bp, Artificial Sequence
  derived and/or modified sequence
atgaactgggaaaacgagtccagtcccaaagagtttatactcctcgggttctcggacagggcgtggcttcagatgccactgttcgtggtcttactgatctcttatactatcaccatctttggtaatgtctccatcatgatggtgtgcatcttggatcccaaattgcacacacctatgtattttttccttactaatttgagcattctggacctgtgttatacaaccactactgttcctcacatgctcgtaaacatcggttgcaacaagaagacaatctcctatgcagggtgcgttgcacatctcattatctttctggccttgggggctactgaatgcctcctcctggccgtcatgtcttttgaccgctatgtcgcagtgtgtagaccactgcactacgtggtaattatgaactactggttctgtctgcgcatggcggcttttagctggctgattgggttcgggaatagtgtactgcagagctctctcaccctcaacatgccccgttgcgggcaccaggaggtagatcactttttctgtgaagtccctgctctgcttaagctgtcatgcgcagacaccaaacccattgaggcagaactttttttcttcagtgtgctaatcctcctgatcccagtaacactcattctcatatcttacggattcatcgcacaggccgttttaaagatcagatccgccgagggaaggcagaaagccttcgggacttgtggaagccacatgatagtagtgtcgctgttttacggtacagccatctacatgtatctgcaaccccctagttccacctccaaggactggggtaagatggtgtcactgttctatggcataattacttctatgctaaactccttgatctattccctgcgcaacaaagacatgaaagaggcatttaaaaggttgatgccgcggatctttttttgcaagaaatag

SEQ ID NO: 21216 - DNA, 942 bp, Artificial Sequence
  derived and/or modified sequence
atgaactgggagaatgagagttcccctaaggagtttatcctcctgggcttcagtgatcgggcatggctacagatgccgctgtttgtggttctgctgatttcatacactatcacaatcttcgggaacgtctcgatcatgatggtgtgtatccttgatcccaagctgcacacccccatgtatttctttttaactaatctctcgattttggatctgtgctatacaacaaccaccgtgccacacatgttagtaaatatcgggtgtaacaaaaagacaataagctacgctgggtgcgtggcccatcttatcatttttctggccctgggagctaccgagtgcttgctgttagctgtgatgtctttcgatagatacgtagctgtctgtaggccactacactacgtcgtcattatgaactactggttctgtctgcggatggcagcgttctcctggctcatcggttttggtaacagcgtgcttcagagcagtctcactctcaacatgccccggtgcggccaccaagaggttgaccactttttctgcgaggtccccgccttgctaaagctttcatgtgccgacaccaaacctatcgaggcagagttgttctttttctccgtcctgattctcctcattccagtgacccttatccttatttcttacgggttcattgcccaggccgttcttaagattcgctctgcagaagggcgccagaaggccttcggtacatgtggtagccacatgattgtcgtgtctctgttctatgggacagcaatctacatgtatctgcagccacccagcagcaccagcaaggattggggaaaaatggtttctcttttctatggcattataaccagcatgctcaactcactgatatattcgctgagaaacaaggatatgaaagaagcttttaagagactgatgcctcgtatcttcttttgcaagaagtag

SEQ ID NO: 21217 - DNA, 942 bp, Artificial Sequence
  derived and/or modified sequence
atgaattgggagaatgagtcatcacctaaagaattcattctactcggtttctcggaccgagcttggctgcagatgccactcttcgtggtcctgctgattagctatactattactatcttcggtaatgtcagcataatgatggtatgtattctggatcccaagctgcataccccgatgtattttttcttaacgaacctaagtatacttgatctgtgttatacaaccacgaccgtaccccatatgcttgtcaatattggctgcaataagaaaactatttcctacgcgggttgcgtggcgcacttgataatctttctggcactgggtgctactgaatgcctcttgctcgccgtcatgtcattcgatagatacgtggcagtctgtagacccctacattacgtggttataatgaactattggttctgcctaaggatggccgccttttcatggctgatcggcttcggaaattctgtgttacagtctagtttaactctcaatatgccgaggtgtggacatcaggaggtggatcattttttctgcgaagtgcctgcacttctcaagctgtcttgcgcagacactaagcccattgaggccgagctcttcttctttagtgtcttgatcctactgatcccggtcaccctcattctgatcagttatggctttattgcccaggcagtcctgaagattaggagcgctgaggggcggcaaaaagctttcggaacctgtggtagccacatgatcgtggtctcacttttctacggcaccgcgatttatatgtaccttcagcctccgagctcaaccagtaaggattggggcaagatggtctcactgttctatgggattattacttctatgctgaactcactgatctactctttaagaaataaagacatgaaggaggctttcaagagactcatgcccagaatctttttctgcaagaagtag

SEQ ID NO: 21218 - DNA, 942 bp, Artificial Sequence
  derived and/or modified sequence
atgaactgggagaatgaaagcagccccaaggagttcatcctgctgggcttcagtgaccgggcctggctgcagatgcccctgtttgtggtgctgctgatctcctacaccatcaccatctttggaaatgtgtccatcatgatggtgtgcatcctggaccccaagctgcacacccccatgtacttcttcctgaccaacctgagcatcctggacctgtgctacaccaccaccaccgtgccccacatgctggtgaacatcggctgcaacaagaagaccatctcctatgccggctgtgtggcccacctgatcatcttcctggccctgggcgccacagaatgtctgctgctggccgtgatgagctttgacagatatgtggccgtgtgccggcccctgcactacgtggtgatcatgaactactggttctgcctgaggatggccgccttctcctggctgattggatttggaaacagcgtgctgcagagcagcctgaccctgaacatgccccgctgtggccaccaggaggtggaccacttcttctgtgaggtgcctgccctgctgaagctgagctgtgccgacaccaagcccattgaagctgagctgttcttcttctctgtgctgatcctgctgatccctgtgaccctcatcctgatctcctatggcttcatcgcccaggccgtgctgaagatccgctctgctgagggccggcagaaggccttcggcacctgtggcagccacatgattgtggtgtccctcttctacggcacagccatctacatgtacctgcagccccccagcagcaccagcaaggactggggcaagatggtgtccctcttctacggcatcatcacctccatgctgaacagcctcatctacagcctgaggaacaaggacatgaaggaggccttcaagaggctgatgccccgcatcttcttctgcaagaagtag

SEQ ID NO: 21219 - DNA, 1106 bp, Artificial Sequence
  derived and/or modified sequence
ataaacaaacattgattgctttcctatcttacatttttttaggagtgcgaaataagtgagtcatcatgaattgggaaaatgagagctccccaaaagagtttatactacttggcttctcagatagggcttggctacaaatgcccctttttgtggtcctgttaatatcatacacaatcaccatatttggcaatgtgtccatcatgatggtgtgcattctggatcccaaacttcatactcccatgtatttctttctcactaatctctccatcttagatctctgctataccacaactacagtccctcatatgttggtaaatattggttgcaacaaaaagaccatcagctatgctggctgtgtggcccacctcatcatcttcctggccctaggtgctacagagtgtctccttctggctgttatgtcctttgacagatatgtggctgtttgcagacccctccactatgtagtcatcatgaattattggttctgcctaaggatggcagccttctcatggctcattggtttcggcaactcagtgctgcagtcttccttgactcttaacatgccacgctgtggtcaccaggaagtggaccactttttctgtgaggtgcctgcacttctcaagttgtcatgtgctgacacaaagcctattgaggctgagctcttcttctttagtgtactaattcttctaattccagtgacattgatcctcatctcctatggcttcatagctcaagcagtattaaaaatcaggtcagcagaaggacggcaaaaagcatttgggacatgtgggtcccacatgattgtggtgtccctcttttatggaacagccatttatatgtatcttcaaccaccttcatccacctctaaggactggggaaagatggtttccctcttctatggaatcatcacatccatgttgaactccctcatctacagccttagaaataaagatatgaaggaggccttcaagaggctgatgccaagaatctttttctgtaagaaataagaagtactccattgtgatgagaatcttcttagtctttccttatcttcaatgatggtaatgacctttgaactcattttcctattttccaggctctggtga

SEQ ID NO: 21220 - DNA, 1106 bp, Artificial Sequence
  derived and/or modified sequence
ataaacaaacattgattgctttcctatcttacatttttttaggagtgcgaaataagtgagtcatcatgaattgggaaaatgagagctccccaaaagagtttatactacttggcttctcagatagggcttggctacaaatgcccctttttgtggtcctgttaatatcatacacaatcaccatatttggcaatgtgtccatcatgatggtgtgcattctggatcccaaacttcatactcccatgtatttctttctcactaatctctccatcttagatctctgctataccacaactacagtccctcatatgttggtaaatattggttgcaacaaaaagaccatcagctatgctggctgtgtggcccacctcatcatcttcctggccctaggtgctacagagtgtctccttctggctgttatgtcctttgacagatatgtggctgtttgcagacccctccactatgtagtcatcatgaattattggttctgcctaaggatggcagccttctcatggctcattggtttcggcaactcagtgctgcagtcttccttgactcttaacatgccacgctgtggtcaccaggaagtggaccactttttctgtgaggtgcctgcacttctcaagttgtcatgtgctgacacaaagcctattgaggctgagctcttcttctttagtgtactaattcttctaattccagtgacattgatcctcatctcctatggcttcatagctcaagcagtattaaaaatcaggtcagcagaaggacggcaaaaagcatttgggacatgtgggtcccacatgattgtggtgtccctcttttatggaacagccatttatatgtatcttcaaccaccttcatccacctctaaggactggggaaagatggtttccctcttctatggaatcatcacatccatgttgaactccctcatctacagccttagaaataaagatatgaaggaggccttcaagaggctgatgccaagaatctttttctgtaagaaataagaagtactccattgtgatgagaatcttcttagtctttccttatcttcaatgatggtaatgacctttgaactcattttcctatttttcaggctctggtga

SEQ ID NO: 21221 - DNA, 942 bp, Artificial Sequence
  derived and/or modified sequence
atgaactgggagaacgagagcagccccaaggagttcatcctgctgggcttttccgaccgagcctggctccaaatgcctctgtttgtggttctactgatctcttacaccattacaattttcggcaacgtgtccattatgatggtgtgtatcctagatccaaagcttcacacccctatgtactttttcctcacaaacctcagtatcctggatctttgttataccactaccacagtgcctcatatgctggtcaacatcgggtgtaataaaaagacaatctcctacgccgggtgcgtagcccacctcattatctttctcgcgctcggcgccacagagtgccttcttttggcagtcatgtccttcgatcgctatgtggctgtgtgtagacccctgcactacgtggtaattatgaattactggttctgtctgaggatggcagccttctcctggctgatcgggtttggaaactccgtgcttcaaagcagtttgacattgaatatgccaaggtgcggccaccaagaagttgaccatttcttttgcgaagtgccggcacttcttaaactgtcctgcgccgacacaaagccaatcgaggccgaactgttttttttttccgtcctcattctgctgattccagtgactctgatcctgatctcgtacggctttattgctcaggccgttttaaaaatacggtccgcggagggtcgacaaaaggccttcggaacgtgcggttcacatatgatcgtcgtctcgctcttttacggaactgccatctacatgtatctgcaacccccttccagtaccagcaaagattgggggaagatggtgtctttattctacggcataattactagcatgctaaatagcctcatttacagtctacgaaacaaagacatgaaggaagcctttaaacgactaatgcctcggatcttcttctgcaagaaatag

SEQ ID NO: 21222 - DNA, 942 bp, Artificial Sequence
  derived and/or modified sequence
atgaactgggagaacgagagcagccccaaggagttcatcctgctgggcttctcagatcgtgcgtggctgcagatgcctttatttgtggttttactgatatcctatacaattaccatctttggaaatgtaagcattatgatggtttgcatcctggacccgaaattacataccccaatgtatttttttctgaccaaccttagcattttggacctgtgctacactacaacaacagtgccccatatgctcgtgaacatcgggtgcaacaaaaaaaccatctcttacgccgggtgtgtggcgcaccttataatattcctggccttaggggctaccgagtgtttactgctcgcggtcatgtccttcgacaggtatgtggctgtctgcagaccactccactacgtagtcatcatgaactattggttttgtctacgaatggctgctttcagctggcttatcggatttggcaattcagtactgcagagctcccttactctgaacatgcctagatgtggccatcaggaggttgaccactttttttgtgaggtccctgcgcttctcaagctgagctgcgcagacactaagccaatcgaggcggagctgttttttttctctgtgctcattctcctgattcccgtgacccttatcctaatttcctacggatttatagcccaggccgtgctgaagattagaagcgcagagggacgccaaaaggctttcggaacctgtgggtcgcatatgatagtggtgtcacttttttatggcaccgccatctatatgtatctgcagcctccgtcctcaacctcaaaggactggggaaagatggtttcgttgttttacggcatcatcacaagcatgctcaacagtctgatatacagcctgaggaacaaggacatgaaagaagctttcaagcgactgatgcctcgcatttttttttgtaagaaatag

SEQ ID NO: 21223 - DNA, 942 bp, Artificial Sequence
  derived and/or modified sequence
atgaactgggagaacgagagcagccccaaggagttcatcctgctgggattctcggacagagcctggttgcaaatgccgctgtttgtggtgctcttgatctcgtacactattaccatctttggaaatgtgagcattatgatggtatgtattctggaccccaagctccacactcccatgtatttctttctcaccaacttatctattcttgatctgtgctacaccacaacaaccgttcctcatatgctcgtgaatatcggctgcaacaagaaaactatttcctatgccggctgcgtggctcaccttattatttttcttgcactgggagcaaccgagtgccttcttctggcggtgatgagctttgacaggtatgtggccgtatgcaggcccctccactacgtcgtcatcatgaattactggttttgccttcgaatggccgccttctcttggctaattggttttggaaattctgtcctgcaatccagccttactcttaacatgcctcgttgcggccatcaggaggtcgaccattttttttgcgaggttcctgctctgctcaaactgagttgtgctgataccaaacccattgaggccgagctgttctttttcagcgtgctgattttgcttatccctgtgaccttaatcttgataagctatggtttcatcgcccaagcagtcctgaaaattcgctccgcagagggacggcaaaaggcattcggcacttgtggctctcatatgatagtggtatcccttttctacggtaccgcaatttacatgtatctgcagcccccttcctctacctctaaagactggggcaagatggttagccttttttatgggatcatcacttccatgctgaactccctgatttactctctccgcaataaggatatgaaggaggcttttaaacggttaatgccccggatattcttctgcaaaaaatag

SEQ ID NO: 21224 - DNA, 942 bp, Artificial Sequence
  derived and/or modified sequence
atgaactgggagaacgagagcagccccaaggagttcatcctgctgggcttcagcgatcgcgcttggcttcagatgcccctgttcgtggtactactcatctcatatacaatcactatatttggcaatgtctccattatgatggtgtgcattctggatcccaagttgcacacgccaatgtacttttttctgaccaatctttctattctggatctctgttacactaccaccacagtcccccatatgctcgtgaacattggctgtaataaaaaaaccattagctacgcaggatgcgtggcccacctcatcatatttttagcccttggggcaactgaatgtctcctgctggctgtgatgtccttcgatagatacgttgccgtgtgccgccctctgcactatgtcgtaatcatgaattattggttttgcttgcggatggcggctttctcgtggttaattgggttcggcaactccgtcctgcagagtagtctcacgttgaatatgccaaggtgtggtcaccaagaagtggaccattttttttgtgaggtccccgctttgttaaaactcagctgtgcagacactaagcctatcgaggccgagctcttcttcttctccgtcctgatcctgttgataccggtgaccctgattctcattagttacggcttcatcgcgcaggccgtgctcaagatacggtctgctgaggggcgccagaaggccttcgggacgtgcgggtctcatatgatcgtcgtgtctttattttacggtactgcaatatacatgtatcttcagcctccttcctcaacttcaaaggattgggggaagatggtttctctattttacggaatcattacatctatgctgaattcactgatttattcactccgcaacaaggacatgaaagaagcttttaagcgactgatgccccgtattttcttctgcaaaaagtag

SEQ ID NO: 21225 - DNA, 942 bp, Artificial Sequence
  derived and/or modified sequence
atgaactgggagaacgagagcagccccaaggagttcatcctgctgggattcagcgaccgagcctggctccagatgcctttgtttgtcgttctcctcatatcctataccatcacaatttttgggaacgtatctattatgatggtgtgtatcctggatcctaagttacacacaccgatgtatttcttcttaacaaatttatccatcctggacctgtgctatacaaccactacagtgcctcatatgctggtcaatattggatgcaacaaaaaaacaatctcttacgcggggtgcgtcgcccacctgatcatattcctcgcactgggcgctacagaatgtctgcttctggcagttatgtcttttgaccggtatgttgcagtttgtaggccattacactacgtggttataatgaattattggttttgcctgcggatggcagcgttttcttggctcatcggattcggcaactcagttctccagtcctctcttaccctgaatatgcctaggtgcggccaccaggaggtggaccactttttttgcgaggtgccagctctgctgaagttgagctgcgctgatactaagccaattgaggctgaactgttttttttttccgtgctcatcttgctgatcccagtgaccctgatcttaatcagctacggctttatcgctcaggccgtattaaagattcgctcagctgaaggaaggcagaaagccttcggcacctgtgggtcacacatgatcgttgtttccctcttttacggtaccgccatctatatgtatctccagccgcccagctctacttctaaagactgggggaagatggtgagtctgttctacgggattattacctccatgctgaacagcctcatttactcactacgcaacaaggatatgaaggaggcgttcaagcgactgatgccaagaatctttttctgcaagaagtag

SEQ ID NO: 21226 - DNA, 942 bp, Artificial Sequence
  derived and/or modified sequence
atgaactgggagaacgagagcagccccaaggagttcatcctgctggggttctctgatcgtgcttggctgcagatgccactgtttgtcgtgctgctgatctcgtacacgatcacgatctttggcaatgtgtcgattatgatggtgtgtattctagatcccaaactgcacacccccatgtatttcttcttgactaacttgtccatccttgacctttgctatactactactacagtgccccatatgttggtaaacatcggttgtaataagaaaacaatttcctacgcaggttgcgtggcacatcttatcatattccttgccctcggggccacggagtgcctgttgctggccgtgatgtcatttgatcgttatgtcgctgtatgccgccccctccactacgtggtgataatgaactactggttttgtttgagaatggctgccttttcttggctgataggatttggaaattctgtcctgcagtctagcttaaccttgaacatgccccgttgtgggcaccaggaagtggaccattttttttgcgaggtcccagcgctcctgaagctgtcttgtgctgatacaaaaccgatcgaggccgaactatttttcttctctgttttaatcttgctaattcctgtgaccctgatcctgataagctacggctttattgcccaagccgtgctcaagatccgatcagccgaagggagacaaaaggcctttgggacatgcggcagccacatgatcgtcgttagcttgttctacggaaccgcgatctatatgtacctgcagcccccatcgagcacctcgaaagattgggggaagatggtatctctgttttatggcatcattacgtctatgctcaactccctgatctacagcctgcgaaataaagacatgaaagaggcctttaaaagactcatgcccagaatattcttttgcaaaaaatag

SEQ ID NO: 21227 - DNA, 942 bp, Artificial Sequence
  derived and/or modified sequence
atgaactgggagaacgagagcagccccaaggagttcatcctgctggggttctctgatagagcatggctgcaaatgccgctgttcgtggtgctgctgataagttacacaattacaatctttggcaacgtgtctatcatgatggtctgcatactcgacccaaagctgcatacccccatgtactttttcctgactaacctttctattctggatctttgctacaccactaccacagtgccccacatgctggtgaacatcggctgcaataagaagacaataagctacgctggctgtgtggctcatctgattatctttctggccctgggcgcaactgaatgtctcctgcttgctgtgatgtcatttgaccgctacgtggccgtgtgccgacccctgcactatgtggtgatcatgaattattggttttgccttaggatggccgccttttcgtggcttatcggttttggaaactctgtgctccagagcagcctcaccttgaatatgccaaggtgtggtcatcaagaagtcgaccactttttttgtgaggtccccgcacttttgaagctctcctgcgccgacactaaacccatcgaagccgagttgttcttcttctctgtgttaattctgttgattccggtcactctgatactgataagctatggattcatagctcaagctgttctgaagatccgctctgcggaagggcgccagaaggccttcgggacctgtggatctcatatgatcgtcgtttccctcttttatggtactgcgatctatatgtatttgcagcccccttccagcacctccaaggactggggaaaaatggtgtccctgttctacggcatcatcacatctatgctcaacagcctcatatactctctgcgcaataaggatatgaaagaagcatttaagcgtctgatgcctcgaatttttttttgcaaaaagtag

SEQ ID NO: 21228 - DNA, 942 bp, Artificial Sequence
  derived and/or modified sequence
atgaactgggagaacgagagcagccccaaggagttcatcctgctgggctttagcgaccgtgcgtggctccagatgccactgttcgttgtgctgttaatcagctataccataaccatatttggcaatgtctccatcatgatggtttgcattttggacccaaaacttcatacccccatgtatttcttcctaaccaatctgtctattctagacctgtgttatactaccactactgtcccacacatgctcgtgaatatcggctgcaataagaagacgatctcttacgctggctgcgttgcccacttgataattttcctggctctgggggcgacggaatgcctgttactggcagttatgagttttgatcgttacgtcgccgtttgccggcctcttcactatgtggtgattatgaactactggttctgccttagaatggcagccttctcctggcttatcggattcggtaacagcgtcttgcagtcctctttgacgctgaatatgccaagatgcggccaccaggaagtcgaccattttttctgcgaggtgcccgcgctcttgaagctgtcttgcgccgatactaaacccatagaagctgaactgtttttttttagcgtgctgatcctccttatccctgtcaccttgatcctcattagctatggattcattgcgcaggccgttttgaagattcgatccgctgagggcagacaaaaggcctttggcacttgtggatcccacatgatagtagtgtcccttttttatggcaccgccatttatatgtatctgcaacctcctagctcaacaagtaaagattggggcaagatggtctctttgttttatggcatcattacatccatgctgaactctttgatctacagcctgaggaataaggatatgaaggaggcatttaaaagacttatgcctcgaatatttttttgtaaaaaatag

SEQ ID NO: 21229 - DNA, 942 bp, Artificial Sequence
  derived and/or modified sequence
atgaactgggaaaacgagagttcccccaaggaatttattttgctcggcttttctgacagagcctggttgcagatgcctctatttgtcgtgctgctcatatcatacactataacaatttttggaaatgtgtcgattatgatggtctgcatactggaccctaagttgcacacacccatgtatttctttctcacaaatctaagtattctggatctgtgctacacaaccacaactgtccctcatatgctggttaatattgggtgcaacaagaagacaatcagctacgctggttgcgtggctcatttaatcatattcctggccctcggcgcaactgagtgtttgctgttagccgtcatgtctttcgacaggtatgtggccgtgtgcaggcccttgcattatgttgtgatcatgaattattggttttgccttcgcatggcagccttctcttggcttatcggtttcggcaatagtgtactccaaagctccctgacattgaatatgccacgatgcggccatcaggaggtagatcacttcttttgtgaggtgcccgcattactgaaactgagttgtgctgacaccaaacctatcgaagctgagttgtttttctttagcgtccttatcttgctgattcccgtcacgctcatattgataagctacggattcatcgcacaggctgttctcaagatcaggtctgcagaaggacggcagaaagcattcggcacttgtggaagtcacatgattgtagtgtccctgttctatgggacggctatttacatgtatctgcagcccccatcaagtacgtctaaggattggggtaagatggtgtctctcttctatggcataattacctctatgctgaactccctaatttacagccttagaaacaaggatatgaaggaggcattcaagcggctgatgcctagaatctttttttgtaagaaatag

SEQ ID NO: 21230 - DNA, 942 bp, Artificial Sequence
  derived and/or modified sequence
atgaactgggaaaacgagtcaagtcccaaggaattcatcctactgggcttcagcgatcgcgcatggctgcagatgcctttattcgtggtgctcctgattagctacacaatcaccatcttcggtaatgtgtctattatgatggtatgtatccttgatcccaaactgcacacaccaatgtactttttccttaccaacctcagtatcttggatctgtgttatacaaccactaccgttccacatatgctagtaaacatcggttgtaataagaagactatttcttacgctgggtgcgtggcacatctcataatttttctggctctgggcgcaacagaatgcctgcttcttgccgtgatgtcgttcgaccgttatgtggcagtttgcaggccactgcactacgtagtgataatgaattattggttctgcctgagaatggctgcttttagctggttgattggctttggaaattctgtgctgcagagtagcctcaccttgaacatgccacgctgtgggcaccaggaggtggaccattttttttgcgaggtacctgctcttctgaagctgtcatgtgcagatacaaaacctatcgaggctgaactgttcttcttttccgtgctgatcttgctaatccccgtcacgttgattctcataagctatggcttcatcgcacaggccgtgctgaaaattcgttccgctgagggacggcagaaagcattcggtacctgcggatcccacatgatcgttgtaagcctgttctacggaaccgccatttacatgtatctgcaaccaccgtccagcacctctaaagactggggtaagatggtaagtctcttttacggaatcatcaccagcatgctgaactcgctgatttacagccttcggaacaaagatatgaaggaagcattcaagcgactgatgcctcgcatattcttctgcaaaaagtag

SEQ ID NO: 21231 - DNA, 942 bp, Artificial Sequence
  derived and/or modified sequence
atgaattgggagaatgaaagttctccaaaggagttcatcctattggggttctctgaccgcgcatggctgcagatgcctctgtttgttgtcttacttatttcatacacgattactatttttggcaatgtctccatcatgatggtctgcatcctcgacccaaaactccacacccctatgtactttttcctgactaatctgagtatcctggacctctgctatactactaccacagtgccacatatgctcgtgaatattggctgtaacaagaaaacaatcagttatgccggatgcgtggcccatctgatcatctttttagctctcggagccacagagtgtctccttctcgccgtgatgtcattcgatagatacgtcgcagtctgccgtcccctgcactacgtggtcattatgaattattggttctgcctcaggatggctgccttcagctggctgattggttttggtaacagtgtgctccaatcaagccttacactgaacatgccaaggtgcggtcaccaggaggtcgaccactttttttgcgaagtgcctgctcttttgaagctgtcatgtgctgacaccaaaccgatagaggcggaactgttttttttctctgtccttatcctgctcatacctgtaacattgatcttgatctcctacgggtttatcgctcaagcagtgcttaagatacggtcggctgagggcagacagaaggcattcggaacatgtggatctcacatgatcgtggtatctctgttctatggcaccgccatctacatgtatttacagcccccatcgagtaccagtaaggattggggcaagatggtgtcattattttatgggattatcactagcatgctaaactctctcatttatagcctgcgaaacaaggatatgaaggaggctttcaaaagactgatgccacgtatttttttctgcaagaaatag

SEQ ID NO: 21232 - DNA, 942 bp, Artificial Sequence
  derived and/or modified sequence
atgaattgggagaatgaatctagtccaaaagaatttatactgctgggattcagcgatcgggcatggcttcagatgcccctgttcgtagtgttacttatcagctatacaattactatattcggcaacgtttcaattatgatggtttgtatcctggaccctaagctgcatacccccatgtatttcttcctcaccaacctatcgattttggacctgtgctatacaacaaccaccgtgccacacatgctggtgaatataggctgcaacaagaaaaccatctcatacgccggttgtgtggcacacctgatcatttttttagccctcggagcaactgagtgtttgctcctagccgtaatgtctttcgacagatacgtggccgtttgtcggcctctgcactacgtggtaatcatgaactactggttctgtctgcgtatggccgctttttcatggctcattggtttcggaaactctgttctgcagagtagtttgactctcaatatgcctaggtgtgggcaccaggaagtggatcacttcttttgcgaagtgccagctttactgaaactttcctgcgcagatacgaagcctattgaagcggagctgttcttcttcagcgtcctgatccttctgatacctgtcactctgatcctcatttcatatggatttatcgctcaggccgtactgaaaatcaggtcagccgaaggacggcagaaagctttcggcacttgtggaagtcacatgatagtcgtgtcgctcttttatgggaccgcaatttatatgtacctgcagcctccaagctcgacctcaaaagactggggcaagatggtgagtctcttttatggcattattactagcatgctcaatagcctaatctactctttaagaaacaaggacatgaaagaagctttcaagcgactgatgcctaggatctttttctgtaaaaagtag

SEQ ID NO: 21233 - DNA, 942 bp, Artificial Sequence
  derived and/or modified sequence
atgaattgggaaaatgagagctccccgaaggagtttattctcttggggttctccgacagagcgtggctgcagatgccgctgtttgtcgttctactaatatcttatacaattaccatctttggtaacgttagcattatgatggtatgcatcttagatcccaaactgcacacaccaatgtacttcttcctcacgaatctgtccatcctggacctgtgttacacaacaactaccgtgccacacatgctcgtaaacatcggctgcaataaaaaaactatctcctatgccggatgtgtggcgcacctcataatctttctggcactgggcgctacagagtgtcttctcctggcagtgatgagtttcgatcggtacgtggccgtgtgccggcctctccactacgtcgttatcatgaattactggttttgcctgagaatggctgctttcagctggctcatcggcttcgggaactcggtattgcaatcctctctgactctgaatatgccccgttgcgggcatcaagaagttgatcatttcttctgtgaggtccctgctctgctcaaactatcttgtgccgataccaaaccaattgaggcggaattgttcttcttttccgtgcttattctgctgattcctgtgactctgatcctgattagctacggtttcattgctcaggccgtactgaagatacgttccgccgaaggcagacaaaaagcttttgggacttgcggatcacacatgatcgtggtgagtcttttctacgggaccgccatttacatgtacctccagccacccagttcaactagcaaggattgggggaagatggtttccctgttctacggaatcatcacctctatgctgaactccctgatctacagcctgcggaataaagacatgaaagaggctttcaagcgccttatgccacggatcttcttctgtaagaagtag

SEQ ID NO: 21234 - DNA, 942 bp, Artificial Sequence
  derived and/or modified sequence
atgaactgggagaacgaatccagcccaaaagaattcatcttgctggggttttcagatagggcttggcttcagatgcccctatttgtcgtgctgctaattagctacaccattaccatcttcggaaatgtgtccatcatgatggtgtgcatcctggatcctaagttacacacacctatgtatttcttcctgaccaacctgagcatcctggatctgtgctacacaactaccaccgtaccgcatatgctcgtgaacatcggatgtaataaaaagaccatcagttatgcagggtgtgtggcccacctcatcatcttcttagccctgggggctactgaatgcctcttactggccgttatgtccttcgatcgctacgtggccgtatgtcggccattgcattacgtggtcatcatgaactattggttctgtctacggatggccgcatttagctggttaattggtttcggcaattccgtgctgcagtctagcctgactcttaacatgcccagatgcggtcaccaggaggttgaccacttcttttgtgaagtgcccgctctgttgaagctgtcatgtgctgacactaagcctattgaagcagaactgttttttttctccgtgctgatccttttaatccctgtgaccctgattctcatcagttatggcttcatagcgcaggcagttctgaagatacgatctgcggagggacggcagaaagccttcgggacctgcggttctcacatgattgtggtctccctattttacggcactgctatctatatgtatctgcagcccccatcatcaaccagcaaggactggggcaagatggttagtctgttttacggcatcatcacaagcatgcttaactctctgatctatagtctgcggaacaaggatatgaaagaggcctttaagaggctgatgcccaggatcttcttctgtaagaaatag

SEQ ID NO: 21235 - DNA, 942 bp, Artificial Sequence
  derived and/or modified sequence
atgaactgggagaatgaatcttcccctaaggaatttatactcctggggttcagtgatcgagcttggttgcaaatgccactctttgtagtgctgctcatttcctacactatcacgatctttgggaacgtctcaattatgatggtttgcatactggacccgaagttacacaccccaatgtacttttttctgacgaatctctctatcctggacctttgctacacgacaactacagttccacatatgttggtgaacattggctgtaataaaaagacaattagctacgcaggatgcgtggcacacttgataatcttcctcgcccttggcgcaaccgagtgtctgctcctggctgtgatgtctttcgacagatacgtcgccgtgtgccgccctttacactacgtggtgattatgaactactggttctgcttacgcatggccgcattctcttggttgatcggcttcgggaactcagtcctgcagtcctcccttacgctgaacatgcctcgctgcggtcaccaggaggtggatcacttcttctgcgaggtgcctgctctgcttaaattgagctgtgctgacaccaagccgattgaggcagagctattttttttttcagtgctgatcctcctaatccccgtgactctgatcctgatcagctacggctttatcgcccaggctgtgctcaaaatcagaagcgctgaaggcaggcagaaggcgttcgggacctgcggcagtcacatgattgtcgtctcgttgttttacggcacagccatctatatgtacctgcagccgccttccagcacatctaaagactggggaaagatggtgagccttttctatggcatcattacttcaatgctcaactctctgatctattctctaaggaacaaagacatgaaagaggcgttcaagcgccttatgccccgtattttcttctgcaagaagtag

SEQ ID NO: 21236 - DNA, 942 bp, Artificial Sequence
  derived and/or modified sequence
atgaattgggagaatgagtcttctcccaaagaatttatccttctcggattcagtgaccgtgcttggctacaaatgcccctgtttgtggtgttgctgatatcctataccattacaatcttcggcaacgtgagcataatgatggtatgtatactggatccaaaactccacacgcccatgtacttctttctaacgaacctgagtattttggacctgtgttacacaacaactactgttccgcatatgctggtgaatatcggatgtaacaagaagactatcagttatgcgggttgcgtagcacacttaatcatctttctcgctctgggggctacggagtgtctccttctggccgtgatgtcttttgaccgttacgtggctgtgtgtagacccctccactatgtggtgatcatgaactactggttttgcctccggatggcagccttcagttggctgataggttttggcaattccgtgctccagtcctcactaaccttgaatatgcctcgctgcggacatcaagaggttgaccattttttctgtgaggtgccggcactgttaaaactgtcgtgcgcagataccaagcctattgaggccgaactattttttttcagtgtgctgatcctcctgatcccagtgactctaatactgattagctatggctttattgcccaggcagtgctgaaaatcaggtccgctgaggggaggcagaaggccttcggcacctgcggcagtcacatgattgtggtgagtctgttttacggcactgccatatacatgtatctccagcctccttcttcaacttcgaaggattggggtaagatggtctcactattttatgggatcataacgtcgatgctgaacagtcttatatacagcctgcggaataaggatatgaaagaggcattcaagcgcttgatgccacgtatttttttctgtaaaaagtag

SEQ ID NO: 21237 - protein, 837 aa, Artificial Sequence
  derived and/or modified sequence
MAAPGAPAEYGYIRTVLGQQILGQLDSSSLALPSEAKLKLAGSSGRGGQTVKSLRIQEQVQQTLARKGRSSVGNGNLHRTSSVPEYVYNLHLVENDFVGGRSPVPKTYDMLKAGTTATYEGRWGRGTAQYSSQKSVEERSLRHPLRRLEISPDSSPERAHYTHSDYQYSQRSQAGHTLHHQESRRAALLVPPRYARSEIVGVSRAGTTSRQRHFDTYHRQYQHGSVSDTVFDSIPANPALLTYPRPGTSRSMGNLLEKENYLTAGLTVGQVRPLVPLQPVTQNRASRSSWHQSSFHSTRTLREAGPSVAVDSSGRRAHLTVGQAAAGGSGNLLTERSTFTDSQLGNADMEMTLERAVSMLEADHMLPSRISAAATFIQHECFQKSEARKRVNQLRGILKLLQLLKVQNEDVQRAVCGALRNLVFEDNDNKLEVAELNGVPRLLQVLKQTRDLETKKQITGLLWNLSSNDKLKNLMITEALLTLTENIIIPFSGWPEGDYPKANGLLDFDIFYNVTGCLRNMSSAGADGRKAMRRCDGLIDSLVHYVRGTIADYQPDDKATENCVCILHNLSYQLEAELPEKYSQNIYIQNRNIQTDNNKSIGCFGSRSRKVKEQYQDVPMPEEKSNPKGVEWLWHSIVIRMYLSLIAKSVRNYTQEASLGALQNLTAGSGPMPTSVAQTVVQKESGLQHTRKMLHVGDPSVKKTAISLLRNLSRNLSLQNEIAKETLPDLVSIIPDTVPSTDLLIETTASACYTLNNIIQNSYQNARDLLNTGGIQKIMAISAGDAYASNKASKAASVLLYSLWAHTELHHAYKKAQFKKTDFVNSRTAKAYHSLKD

SEQ ID NO: 21238 - DNA, 2514 bp, Artificial Sequence
  derived and/or modified sequence
atggcagccccaggcgccccagccgaatatggctatattagaacagtcctgggccagcagattctaggacagctggattcctcatccttagccctcccttcagaggctaaactgaagctcgcgggtagctccggacggggaggccagaccgtgaagtctctgcgtatccaggagcaggtgcaacaaactcttgccaggaaggggcgttcttcagtcggtaatgggaatctccatagaacatcctctgtgcctgaatacgtctataatttacacctggtggaaaatgacttcgtgggaggccgatcacctgtcccgaagacctacgacatgcttaaagcaggcacaaccgctacatacgagggtcgatggggacgaggcacggcccagtactcttcccaaaaaagtgtggaagagcgatctctccgccatccactgcgccgtctggaaattagccctgattcttcccccgagcgagcacattacacacacagcgattatcagtacagccagaggagtcaagcaggccacaccctccaccaccaagagtctaggcgcgcagccctgttagtacccccaaggtacgctcggtccgaaattgtaggagtttcgcgggccggaaccacgagtaggcagaggcattttgatacataccacagacagtaccagcatgggagcgtgagcgacactgtctttgacagcatccccgcaaacccagctctcctgacatacccgcgccccgggactagcaggtctatgggcaatctcttggagaaggaaaattatctgactgctggactcaccgtggggcaagtgaggcccctggtacccctgcagccagtcacacagaacagagccagtcgtagctcctggcatcagtcaagtttccattcaacccgaactctgcgagaagccggaccctccgtcgctgttgacagcagtggacgcagagcacatctgaccgtcgggcaggcagccgccggagggtccgggaatctcctgaccgagaggtcaacgtttacagacagccaattgggaaacgccgatatggagatgacattagaacgtgcggtttctatgctggaagccgaccatatgctgccttctaggatttccgccgccgcaacctttatccagcacgagtgttttcagaagtccgaggctaggaagcgggtgaaccaactccgaggtattttgaagctcctccagctgcttaaggtacaaaatgaggacgtgcagcgcgctgtatgtggcgcactgcgaaatctggtttttgaggacaatgataacaaactggaggtggccgagttgaatggcgtaccccggttactgcaggtgttaaagcagacacgcgacctggaaacgaagaagcagatcaccggcctcctgtggaacctgtcttctaacgacaaactaaaaaatctcatgataacggaagcattgctgacactaacggaaaacatcatcatccccttcagcggttggccagagggtgactacccaaaggctaacggattactagactttgatatcttttataacgtgacaggctgcctgaggaacatgtcctcagccggtgcagatggccggaaggctatgagaagatgcgacgggttgatcgactctctggttcattacgtgcgaggcactatagccgattaccaaccggacgacaaagccaccgagaactgcgtgtgcatcctgcataatcttagctaccagctagaagcagaactcccggaaaaatattcgcagaacatctacattcagaatcggaatatccagactgacaacaacaaatccattggctgctttgggtcacgaagccgcaaagtgaaggagcagtatcaagatgttccgatgcctgaagaaaaaagcaaccccaagggggtggagtggctttggcattccatcgtcatacgcatgtacctgtcattaattgcaaagtccgtgcggaactatacccaagaggcctctctaggcgcccttcagaacttaactgctgggtccggtcctatgcctacttccgtggctcagactgtcgttcaaaaggaaagtgggctccagcatactagaaaaatgcttcatgtcggagacccaagtgtgaaaaagaccgcaatatctctgctccgcaatctgtctcgtaatctgtcactccaaaacgagattgcaaaagaaacccttcctgacctcgtttcaatcattcctgataccgttccatctacagacctgctgatagagactaccgccagtgcttgctatacattgaataacatcatccagaattcctatcagaacgctagggacctcctgaacacgggaggcatccagaagatcatggccatctccgcgggggatgcctatgcgtctaataaggcctctaaggccgctagcgttctgctgtatagtctgtgggcccacaccgagctgcatcacgcttataaaaaagcccagtttaagaagaccgacttcgtcaattcaaggactgcgaaagcttaccatagcttgaaagactag

SEQ ID NO: 21239 - DNA, 2514 bp, Artificial Sequence
  derived and/or modified sequence
atggccgcccctggggccccagcagaatatggctacatcagaacagtgctgggccagcagatcctgggccagctggacagcagcagcctggccctgcccagcgaggccaagctgaagctggccggcagcagcggccggggcggccagacagtgaagagcctgcgcatccaggagcaggtgcagcagaccctggccaggaagggccgcagctctgtgggcaatggaaacctgcacaggaccagctctgtgcctgaatatgtgtacaacctgcacctggtggagaatgactttgtgggcggccgcagccctgtgcccaagacctatgacatgctgaaggccggcaccacagccacctatgagggccgctggggccggggcacagcccagtacagcagccagaagtctgtggaggagaggagcctgcggcaccccctgcggcggctggagatcagcccagacagcagccctgagcgggcccactacacccacagcgactaccagtacagccagaggagccaggccggccacaccctgcaccaccaggagagccggcgggccgccctgctggtgcccccaagatatgcccggagtgaaattgtgggcgtgtccagagctggcaccaccagccggcagaggcactttgacacctaccaccggcagtaccagcacggctctgtgtctgacacagtgtttgacagcatcccagccaacccagccctgctgacctacccccggcccggcaccagccgctccatgggcaacctgctggagaaggagaactacctgacagctggcctgactgtgggccaggtgcggcccctggtgcccctgcagcctgtgacccagaacagagccagccgcagctcctggcaccagagcagcttccacagcaccaggaccctgcgggaggccggccccagcgtggccgtggacagcagtggaagaagagcccacctgactgtgggccaggccgccgccggcggcagcggcaacctgctgacagagaggagcaccttcacagacagccagctgggcaatgctgacatggagatgaccctggagagagctgtgtccatgctggaggccgaccacatgctgcccagccgcatctctgctgctgccaccttcatccagcacgagtgcttccagaagtctgaggccaggaagagggtgaaccagctgcggggcatcctgaagctgctgcagctgctgaaggtgcagaatgaagatgtgcagagagctgtgtgtggggccctgaggaacctggtgtttgaagataatgacaacaagctggaggtggccgagctgaatggagtgccccggctgctgcaggtgctgaagcagacccgggacctggagaccaagaagcagatcaccggcctgctgtggaacctgagcagcaatgacaagctgaagaacctgatgatcacagaggccctgctgaccctgacagagaacatcatcatccccttcagcggctggccagagggggactaccccaaggccaacggcctgctggactttgacatcttctacaacgtgacaggctgcctgaggaacatgagcagcgctggagcagatggcaggaaggccatgagaagatgtgatggcctgattgacagcctggtgcactacgtgcggggcaccatcgctgactaccagccagatgacaaggccacagagaactgtgtgtgcatcctgcacaacctgagctaccagctggaggccgagctgcctgagaagtacagccagaacatctacatccagaacagaaacatccagacagacaacaacaagagcatcggctgcttcggcagccgcagcaggaaggtgaaggagcagtaccaggatgtgcccatgcctgaggagaagagcaaccccaagggcgtggagtggctgtggcacagcatcgtcatccgcatgtacctgagcctcatcgccaagtctgtgaggaactacacccaggaggccagcctgggcgccctgcagaacctgacagctggcagcggccccatgcccacctctgtggcccagacagtggtgcagaaggagagcggcctgcagcacaccaggaagatgctgcacgtgggggaccccagcgtgaagaagacagccatcagcctgctgaggaacctgagcaggaacctgagcctgcagaatgagatcgccaaggagaccctgcctgacctggtgtccatcatcccagacacagtgcccagcacagacctgctgattgagaccacagccagcgcctgctacaccctgaacaacatcatccagaacagctaccagaatgcccgggacctgctgaacacaggaggcatccagaagatcatggccatctctgctggagatgcctatgccagcaacaaggccagcaaggccgcctctgtgctgctgtacagcctgtgggcccacacagagctgcaccacgcctacaagaaggcccagttcaagaagacagactttgtgaacagcaggacagccaaggcctaccacagcctgaaggactag

SEQ ID NO: 21240 - DNA, 2514 bp, Artificial Sequence
  derived and/or modified sequence
atggccgcccccggcgcccccgccgagtacggctacatccggaccgtgctgggccagcagattcttggacagcttgattcctctagtctagccctgcccagcgaagcgaagctcaaactggccggcagcagcggccgaggcggacagacagtgaagagcctccggatacaagagcaagtgcaacagaccctagctaggaaaggtaggtcatccgtgggcaatggtaacctgcacaggacttcctctgtgcccgaatacgtttataatctccatttggtggagaatgatttcgtcggtggccgctctcccgttcctaagacctatgacatgctgaaggccggtaccacagccacttacgagggtcgttggggtcgcggcactgcccagtatagttcccagaagagtgtcgaagagagatccctcagacaccctctccgcaggctagagatcagccccgactcctcccccgagcgcgctcactacactcattccgattaccagtattcacagcggagtcaagccggccataccctccaccatcaggaaagtagaagggccgccctgttagttcctcctagatatgccagatccgagattgtgggtgtgagccgggccggaactactagccgtcagcgtcatttcgacacctaccatagacagtaccagcacggatcagtctccgacacagtattcgacagtatccctgctaatcctgcacttttgacgtaccctagacccgggacttctaggagtatgggcaatctgctggaaaaggaaaactaccttaccgcgggccttacagttggtcaggtccggccattagtgccattgcagcctgtaacacagaaccgggccagtagatcatcatggcaccagtccagttttcactctactcgaaccttgagggaagccggaccttctgtggcagtcgactcctccggccgtagagcccacttaaccgtgggccaggccgctgcaggggggagtggtaatttactgaccgagcgctcaacgttcacggattcccagttaggtaatgcagacatggagatgacactggaacgagccgtgtctatgcttgaggctgatcatatgctgccctctagaatctctgcagctgcgacattcatacagcatgaatgctttcagaaaagcgaggcgagaaaaagggtgaaccagttgcgcggtatcctcaagttattgcaattactaaaagtgcaaaatgaagatgtgcagagggcagtttgtggcgccctgaggaatcttgtgttcgaggataacgacaataaactcgaggtggccgagctgaacggagtgccccgtctattgcaggtgttaaaacagacgagggacttggagaccaagaaacaaatcacaggactgctatggaacctgtctagtaatgataagttgaagaacctgatgatcacggaggccctccttaccttgacagagaatattatcatcccattctctggttggcccgaaggtgactaccccaaggccaatgggctgctcgacttcgatatattctacaatgtcacaggatgtctgcgcaatatgtcttccgccggtgctgacggccggaaagccatgaggaggtgcgatgggctgatcgatagtttagttcattatgtgaggggaacaatcgcggattaccagcccgacgacaaggcaaccgagaactgcgtttgtattctccacaacttgagttatcagctagaggccgaactcccagaaaaatatagccagaacatctacatccaaaatcgcaatattcagaccgacaacaacaaatctatcgggtgcttcggctctcggtccagaaaggttaaggagcagtatcaagatgttccgatgcccgaggagaaatccaatccaaagggcgtggaatggttatggcactcgatcgtgatacggatgtacctgagcctgattgccaagagcgtgaggaactacacgcaggaggcgagcctgggcgctctgcagaacctcaccgcggggtcaggcccaatgcctacctcagtggcgcagactgtggtccagaaggaatctggcctccagcacacccgtaagatgctccacgttggcgatccatcagttaaaaagaccgctatctcccttctgaggaacttatccagaaaccttagtctgcaaaacgagattgccaaggaaacgctgcccgatcttgtgagcattataccagacacagttcctagtactgacctcctcatcgagacaacagcatccgcctgctatacactgaacaatatcattcaaaattcttatcagaacgcccgggatctgctgaacacaggtggaattcagaaaattatggccatatccgccggggatgcctacgcaagcaataaagcatccaaagccgcaagcgtccttctgtactcactatgggctcacactgagctgcaccacgcttacaaaaaagcgcagttcaaaaaaaccgacttcgttaactctcgcacggctaaggcataccatagtctcaaagattag

SEQ ID NO: 21241 - DNA, 473 bp, Artificial Sequence
  derived and/or modified sequence
ggaggtaagaactaagacgttcttaaaccctactacgtgctggaatcctgaagtgcctgccatcattcaaacttaagcactaactctctagagagacactgccattcataccacagaacgagaaggcagtggcgatcctcaacggctacatgtcactgcctgccacttccggctcctgcgtcgctccggaagcctgcgagttccggaagccttggtaatccagattcggctaggaaaagacaagctttccagagaatgtttcagagaaagttacgtggagcgtgggcgtttcgcagactcctaagtggtctggaacctaacctgcagtgtctctgagcttctggcaagtatgaggcaaggatttcacagaagaacttggagcaaaaattcccactgtcatagctataggctgtccagtcttgagggagctgcaggaacaggaaaaagagaccttcagagaagacatggcttcc

SEQ ID NO: 21242 - DNA, 4302 bp, Artificial Sequence
  derived and/or modified sequence
ggggccggactcgagcggggcggggctcgcgccagcgcccccagctccgtggcggcttcgcccgcgagtccagaggcaggcgagcagctcggtcgcccccaccggccccatggcagcccccggcgccccagctgagtacggctacatccggaccgtcctgggccagcagatcctgggacaactggacagctccagcctggcgctgccctccgaggccaagctgaagctggcggggagcagcggccgcggcggccagacagtcaagagcctgcggatccaggagcaggtgcagcagaccctcgcccggaagggccgcagctccgtgggcaacggaaatcttcaccgaaccagcagtgttcctgagtatgtctacaacctacacttggttgaaaatgattttgttggaggccgttcccctgttcctaaaacctatgacatgctaaaggctggcacaactgccacttatgaaggtcgctggggaagaggaacagcacagtacagctcccagaagtccgtggaagaaaggtccttgaggcatcctctgaggagactggagatttctcctgacagcagcccggagagggctcactacacgcacagcgattaccagtacagccagagaagccaggctgggcacaccctgcaccaccaagaaagcaggcgggccgccctcctagtgccaccgagatatgctcgttccgagatcgtgggggtcagccgtgctggcaccacaagcaggcagcgccactttgacacataccacagacagtaccagcatggctctgttagcgacaccgtttttgacagcatccctgccaacccggccctgctcacgtaccccaggccagggaccagccgcagcatgggcaacctcttggagaaggagaactacctgacggcagggctcactgtcgggcaggtcaggccgctggtgcccctgcagcccgtcactcagaacagggcttccaggtcctcctggcatcagagctccttccacagcacccgcacgctgagggaagctgggcccagtgtcgccgtggattccagcgggaggagagcgcacttgactgtcggccaggcggccgcagggggaagtgggaatctgctcactgagagaagcactttcactgactcccagctggggaatgcagacatggagatgactctggagcgagcagtgagtatgctcgaggcagaccacatgctgccatccaggatttctgctgcagctactttcatacagcacgagtgcttccagaaatctgaagctcggaagagggttaaccagcttcgtggcatcctcaagcttctgcagctcctaaaagttcagaatgaagacgttcagcgagctgtgtgtggggccttgagaaacttagtatttgaagacaatgacaacaaattggaggtggctgaactaaatggggtacctcggctgctccaggtgctgaagcaaaccagagacttggagactaaaaaacaaataacaggtttgctgtggaatttgtcatctaatgacaaactcaagaatctcatgataacagaagcattgcttacgctgacggagaatatcatcatccccttttctgggtggcctgaaggagactacccaaaagcaaatggtttgctcgattttgacatattctacaacgtcactggatgcctaagaaacatgagttctgctggcgctgatgggagaaaagcgatgagaagatgtgacggactcattgactcactggtccattatgtcagaggaaccattgcagattaccagccagatgacaaggccacggagaattgtgtgtgcattcttcataacctctcctaccagctggaggcagagctcccagagaaatattcccagaatatctatattcaaaaccggaatatccagactgacaacaacaaaagtattggatgttttggcagtcgaagcaggaaagtaaaagagcaataccaggacgtgccgatgccggaggaaaagagcaaccccaagggcgtggagtggctgtggcattccattgttataaggatgtatctgtccttgatcgccaaaagtgtccgcaactacacacaagaagcatccttaggagctctgcagaacctcacggccggaagtggaccaatgccgacatcagtggctcagacagttgtccagaaggaaagtggcctgcagcacacccgaaagatgctgcatgttggtgacccaagtgtgaaaaagacagccatctcgctgctgaggaatctgtcccggaatctttctctgcagaatgaaattgccaaagaaactctccctgatttggtttccatcattcctgacacagtcccgagtactgaccttctcattgaaactacagcctctgcctgttacacattgaacaacataatccaaaacagttaccagaatgcacgcgaccttctaaacaccgggggcatccagaaaattatggccattagtgcaggcgatgcctatgcctccaacaaagcaagtaaagctgcttccgtccttctgtattctctgtgggcacacacggaactgcatcatgcctacaagaaggctcagtttaagaagacagattttgtcaacagccggactgccaaagcctaccactcccttaaagactgaggaaaatgacaaagtattctcggctgcaaaaatccccaaaggaaaacacctatttttctactacccagcccaagaaacctcaaaagcatgccttgtttctatccttctctatttccgtggtcccctgaatccagaaaacaaatagaacataattttatgagtcttccagaagacctttgcaagtttgccaccagtagataccggccacaggctcgacaaatagtggtctttgttattagggcttatggtacatggcttcctggaatcaaaatgtgaattcatgtggaagggacattaatccaataaataaggaaagaagctgttgcattactgggattttaaaagtttgatttacatttatattccttttctggttcccatgttttgtcactcatgtgcacattgcttcgccattgggcctccagtgtattgttctgcagtgttgaaacagaatggaaatgacaagaaatatctgcagttatccaggagaaagtataatggcaaaattattggtttctttctttactttgtgcttgtttttatccccttgggttgtttttctctgatttttaaataaacttaagaaatttagattacagagtatgcatgactgtaagaaaaagaaattgagaggaagtgatcatagcaaattaaagaagtcttttcctcccagaacttaaagtaaaataaaaaataaataaataaataaaatcttttccacagagaaaggcaactgtgatgataaaatttaacgttcccccaaacactgagtcaatgagatttttctcaggagatactttacctataacaacgccgttaaatccaaatctcttctaaacgatggcattctatgtaatgcctttcctggacttttttggccactgccctggactagtgaaagaatggactctatctttatctgcaagaggaactaaggccttctctcagactgcctggccagcctggggcactgaaaatacggctcatgttaatgagttacattatcagccagcccagccttgcccaccatttaagaaatatcacagagccactagatctcatatgatcttcttcaagccattattttaactcaagaaaactctagagaagaaaagtgaagaagtcatgttgaagaagatgtaagaatgtgtcaagaccatccagaaatgatatgagaaatactgatattttaaatggttgacatcatccagcgaaatgaatctacattaaatgttgttttaactgcgctatgattaaaaccattcatatagagttagtctttacaactactattctgttatttttttttttaatctgacaacatttgtcctaagtaagataagcaaaaaaattcttcaactccttttggcaagaaaactgtaacagaaaataaattttgaatgtgtacttaagtctttattatatttgaagcaattttttttcaattttaaaagctgaatgaagacaacttaggttgctaacctagttcaaaatgaaattatttagataccaatttttaaaatactggagagaatttatatgtctttttccagagttctgatgataagcatttggagtgcatttattcctccagataataaatgtgtgttcagaactttttgtgttttttaaggcattaataaagccttcgataatattaaatacaaaatgagaccaaa

SEQ ID NO: 21243 - DNA, 2514 bp, Artificial Sequence
  derived and/or modified sequence
atggctgcacctggagcccctgctgagtacggctatattcgtacggtgttggggcagcagattctcgggcaactcgacagttccagtctagctctgccatcagaggccaagttgaaattagcaggttcttcaggcagggggggacaaaccgtcaagtctttgcgtatccaggagcaagtgcagcagactctggccagaaaaggaaggtcttctgtggggaatggaaatctccaccgaaccagctccgtgcctgagtacgtctacaatctccacctagtcgaaaacgatttcgttggtggccgttctcccgtgcccaaaacttacgatatgctgaaagccggaacgactgccacctatgagggtcggtgggggaggggcacagcacagtacagctctcaaaagtccgtagaagaacggagtctccggcatccactgagaagactggaaatcagccccgatagttcgccggagcgtgctcactacacgcattcagactatcaatacagccaacgaagtcaggctgggcatacccttcatcaccaagaaagtaggcgagcggcactgctagtcccacccaggtacgcaaggtccgaaatagtgggagtctcacgcgcaggtaccaccagcagacagcgacatttcgatacctatcacaggcaataccagcatggaagtgtgtctgatacagtgttcgactctattcccgcaaaccctgctctgctgacatatcccagaccgggaacctcccggtccatgggtaacttgctcgagaaagagaattatcttaccgccggactgactgttggccaggtacggccattggtacccctgcagcccgtcacacaaaacagagcctcacgcagcagctggcatcagagcagcttccattctaccaggacactcagagaagccggtccttccgtggccgtggactcaagcgggaggagggctcatcttacagttgggcaagccgctgccggaggcagcgggaacctcctgaccgagcgctcaacgtttactgatagtcagctcggaaacgctgacatggagatgaccctcgagcgcgcagtttccatgctggaggccgatcatatgctaccctcccggatcagcgctgcagccacatttatccaacatgaatgtttccaaaaatcagaggccagaaagcgggttaaccagctgagaggaatacttaagctgctccagctgctcaaagtgcagaatgaggacgtacaacgagctgtgtgcggcgctctgcggaacctcgtgttcgaagataacgataataaacttgaagtggcagaactaaacggcgttccgcgtttattgcaggtgctgaaacagacccgggatttagagacaaagaagcagatcacagggttattgtggaatttatcttccaacgacaaattaaagaacctgatgatcaccgaagccctgttgactctcactgaaaacatcatcattcccttttcggggtggcctgagggcgactaccccaaagctaacgggcttctggactttgacattttttataacgtgactgggtgtctgcgaaatatgtcaagtgccggagcagatggacgcaaggcgatgagacgctgcgacggacttattgacagtttagttcactatgttcggggaacaatcgcagactaccaacctgatgacaaggctaccgagaactgcgtgtgtatcttgcataacctgtcctatcagctagaggccgagctccccgagaagtacagtcaaaacatttatattcagaaccgtaacattcaaaccgataataacaaatcgattggctgtttcggaagcaggtctaggaaggtcaaggagcagtaccaggacgtaccaatgccagaagagaaatctaatcccaaaggagtggaatggctatggcacagtatcgtaattcgcatgtatctctctcttatcgctaaaagtgttcggaattacacccaggaggccagcttgggcgctctgcagaacctcaccgccggatctggcccaatgcccacatccgtggcacagacagttgtgcagaaggagtcagggctgcagcataccaggaagatgctgcatgttggagacccgagcgtgaaaaaaactgctatttcattattgcggaacctgagccggaatctgtctttgcagaatgagattgccaaggaaacccttccagatctggtaagcatcattcctgataccgtcccaagcacagacctgctgattgagacaactgcatcagcatgttatacccttaacaacatcatccagaatagctaccagaacgctcgcgacctgctgaacaccgggggtattcagaaaatcatggcaattagtgcaggcgacgcttatgctagtaataaggcttcaaaagctgctagtgtcctgctgtattccttatgggcacacactgagctgcatcacgcctacaaaaaggctcagttcaaaaagaccgactttgtgaactcccgcaccgcaaaggcctaccactcattaaaggattag

SEQ ID NO: 21244 - DNA, 2514 bp, Artificial Sequence
  derived and/or modified sequence
atggccgcccccggcgcccccgccgagtacggctacatcagaaccgtgctgggccagcagatcctgggccagctggacagcagcagcctggccctgcccagcgaggccaagctgaagctggccggcagcagcggcagaggcggccagaccgtgaagagcctgagaatccaggagcaggtgcagcagaccctggccagaaagggcagaagcagcgtgggcaacggcaacctgcacagaaccagcagcgtgcccgagtacgtgtacaacctgcacctggtggagaacgacttcgtgggcggcagaagccccgtgcccaagacctacgacatgctgaaggccggcaccaccgccacctacgagggcagatggggcagaggcaccgcccagtacagcagccagaagagcgtggaggagagaagcctgagacaccccctgagaagactggagatcagccccgacagcagccccgagagagcccactacacccacagcgactaccagtacagccagagaagccaggccggccacaccctgcaccaccaggagagcagaagagccgccctgctggtgccccccagatacgccagaagcgagatcgtgggcgtgagcagagccggcaccaccagcagacagagacacttcgacacctaccacagacagtaccagcacggcagcgtgagcgacaccgtgttcgacagcatccccgccaaccccgccctgctgacctaccccagacccggcaccagcagaagcatgggcaacctgctggagaaggagaactacctgaccgccggcctgaccgtgggccaggtgagacccctggtgcccctgcagcccgtgacccagaacagagccagcagaagcagctggcaccagagcagcttccacagcaccagaaccctgagagaggccggccccagcgtggccgtggacagcagcggcagaagagcccacctgaccgtgggccaggccgccgccggcggcagcggcaacctgctgaccgagagaagcaccttcaccgacagccagctgggcaacgccgacatggagatgaccctggagagagccgtgagcatgctggaggccgaccacatgctgcccagcagaatcagcgccgccgccaccttcatccagcacgagtgcttccagaagagcgaggccagaaagagagtgaaccagctgagaggcatcctgaagctgctgcagctgctgaaggtgcagaacgaggacgtgcagagagccgtgtgcggcgccctgagaaacctggtgttcgaggacaacgacaacaagctggaggtggccgagctgaacggcgtgcccagactgctgcaggtgctgaagcagaccagagacctggagaccaagaagcagatcaccggcctgctgtggaacctgagcagcaacgacaagctgaagaacctgatgatcaccgaggccctgctgaccctgaccgagaacatcatcatccccttcagcggctggcccgagggcgactaccccaaggccaacggcctgctggacttcgacatcttctacaacgtgaccggctgcctgagaaacatgagcagcgccggcgccgacggcagaaaggccatgagaagatgcgacggcctgatcgacagcctggtgcactacgtgagaggcaccatcgccgactaccagcccgacgacaaggccaccgagaactgcgtgtgcatcctgcacaacctgagctaccagctggaggccgagctgcccgagaagtacagccagaacatctacatccagaacagaaacatccagaccgacaacaacaagagcatcggctgcttcggcagcagaagcagaaaggtgaaggagcagtaccaggacgtgcccatgcccgaggagaagagcaaccccaagggcgtggagtggctgtggcacagcatcgtgatcagaatgtacctgagcctgatcgccaagagcgtgagaaactacacccaggaggccagcctgggcgccctgcagaacctgaccgccggcagcggccccatgcccaccagcgtggcccagaccgtggtgcagaaggagagcggcctgcagcacaccagaaagatgctgcacgtgggcgaccccagcgtgaagaagaccgccatcagcctgctgagaaacctgagcagaaacctgagcctgcagaacgagatcgccaaggagaccctgcccgacctggtgagcatcatccccgacaccgtgcccagcaccgacctgctgatcgagaccaccgccagcgcctgctacaccctgaacaacatcatccagaacagctaccagaacgccagagacctgctgaacaccggcggcatccagaagatcatggccatcagcgccggcgacgcctacgccagcaacaaggccagcaaggccgccagcgtgctgctgtacagcctgtgggcccacaccgagctgcaccacgcctacaagaaggcccagttcaagaagaccgacttcgtgaacagcagaaccgccaaggcctaccacagcctgaaggactag

SEQ ID NO: 21245 - protein, 335 aa, Artificial Sequence
  derived and/or modified sequence
MLGSKPRVHLYILPCASQQVSTMGDRGTSNHSEMTDFILAGFRVRPELHILLFLLFLFVYAMILLGNVGMMTIIMTDPRLNTPMYFFLGNLSFIDLFYSSVIEPKAMINFWSENKSISFAGCVAQLFLFALLIVTEGFLLAAMAYDRFIAICNPLLYSVQMSTRLCTQLVAGSYFCGCISSVIQTSMTFTLSFCASRAVDHFYCDSRPLQRLSCSDLFIHRMISFSLSCIIILPTIIVIIVSYMYIVSTVLKIHSTEGHKKAFSTCSSHLGVVSVLYGAVFFMYLTPDRFPELSKVASLCYSLVTPMLNPLIYSLRNKDVQEALKKFLEKKNIIL

SEQ ID NO: 21246 - DNA, 1008 bp, Artificial Sequence
  derived and/or modified sequence
atgctgggcagcaagcccagagtgcacctgtacatcctgccctgcgccagccagcaggtgagcaccatgggcgacagaggcaccagcaaccacagcgagatgaccgacttcatcctggccggcttcagagtgagacccgagctgcacatcctgctgttcctgctgttcctgttcgtgtacgccatgatcctgctgggcaacgtgggcatgatgaccatcatcatgaccgaccccagactgaacacccccatgtacttcttcctgggcaacctgagcttcatcgacctgttctacagcagcgtgatcgagcccaaggccatgatcaacttctggagcgagaacaagagcatcagcttcgccggctgcgtggcccagctgttcctgttcgccctgctgatcgtgaccgagggcttcctgctggccgccatggcctacgacagattcatcgccatctgcaaccccctgctgtacagcgtgcagatgagcaccagactgtgcacccagctggtggccggcagctacttctgcggctgcatcagcagcgtgatccagaccagcatgaccttcaccctgagcttctgcgccagcagagccgtggaccacttctactgcgacagcagacccctgcagagactgagctgcagcgacctgttcatccacagaatgatcagcttcagcctgagctgcatcatcatcctgcccaccatcatcgtgatcatcgtgagctacatgtacatcgtgagcaccgtgctgaagatccacagcaccgagggccacaagaaggccttcagcacctgcagcagccacctgggcgtggtgagcgtgctgtacggcgccgtgttcttcatgtacctgacccccgacagattccccgagctgagcaaggtggccagcctgtgctacagcctggtgacccccatgctgaaccccctgatctacagcctgagaaacaaggacgtgcaggaggccctgaagaagttcctggagaagaagaacatcatcctgtag

SEQ ID NO: 21247 - DNA, 1008 bp, Artificial Sequence
  derived and/or modified sequence
atgcttggcagcaaaccaagagtccacctctatattctcccatgtgcctctcagcaggtgtctactatgggggatcgcggaacatccaaccactccgagatgactgacttcatattggctggttttcgagtgaggcccgagttgcatatactcctctttctcctcttcttattcgtgtatgctatgattttgctgggtaacgtaggcatgatgactatcatcatgactgacccaaggctgaacacacccatgtatttcttcttgggcaacctgtcctttatagaccttttctattcttctgtaatagaaccgaaagcaatgatcaatttttggagtgagaacaagtccatctctttcgccggctgcgttgctcagttatttctcttcgctcttctgattgtgacagagggcttcctcctcgccgctatggcatatgaccggtttattgccatatgtaatcccctgttatattcagtccagatgagtacaagactgtgcactcaactggtagctggctcttacttctgcgggtgcattagcagcgttatccagacctctatgacgtttacattgagcttctgcgccagccgggccgtggatcacttttattgtgatagccggccattacaaagattatcctgtagtgacttgttcatacacagaatgatttcctttagtctgtcctgcatcatcatattacccacaattattgtcattattgtctcctacatgtacatagtttccaccgtcctaaaaatccatagtacggaaggacacaagaaggcattctctacatgctctagccatctgggggtggtcagcgttctgtatggcgctgtgttctttatgtatctgacacccgacaggtttccagaactcagtaaagttgcctctttatgttactcactggtaaccccaatgctgaacccgctgatctattcactacgcaacaaggacgtgcaggaggccttgaagaaatttctcgaaaagaagaacattatcttatag

SEQ ID NO: 21248 - DNA, 1008 bp, Artificial Sequence
  derived and/or modified sequence
atgctgggcagcaagccccgggtgcacctgtacatcctgccctgtgccagccagcaggtgtccaccatgggagaccggggcaccagcaaccacagcgagatgacagacttcatcctggccggcttccgggtgcggcctgagctgcacatcctgctcttcctgctcttcctgtttgtgtatgccatgatcctgctgggcaatgtgggcatgatgaccatcatcatgacagacccccggctgaacacccccatgtacttcttcctgggcaacctgtccttcatcgacctcttctacagcagcgtcatcgagcccaaggccatgatcaacttctggagcgagaacaagagcatcagctttgctggctgtgtggcccagctgttcctgtttgccctgctgattgtgacagagggcttcctgctggccgccatggcctatgaccgcttcatcgccatctgcaaccccctgctgtacagcgtgcagatgagcacccggctgtgcacccagctggtggccggcagctacttctgtggctgcatcagcagcgtcatccagacctccatgaccttcaccctgtccttctgtgccagcagagctgtggaccacttctactgtgacagccggcccctgcagaggctgagctgcagcgacctcttcatccacaggatgatctccttcagcctgagctgcatcatcatcctgcccaccatcatcgtcatcatcgtgtcctacatgtacatcgtgtccacagtgctgaagatccacagcacagagggccacaagaaggccttcagcacctgcagcagccacctgggcgtggtgtctgtgctgtatggagctgtgttcttcatgtacctgaccccagaccgcttccctgagctgagcaaggtggccagcctgtgctacagcctggtgacccccatgctgaaccccctcatctacagcctgaggaacaaggatgtgcaggaggccctgaagaagttcctggagaagaagaacatcatcctgtag

SEQ ID NO: 21249 - DNA, 1008 bp, Artificial Sequence
  derived and/or modified sequence
atgctgggcagcaagccccgggtgcacctgtacatcctgccctgcgccagtcaacaggtctcaaccatgggagacaggggtacctccaatcattctgagatgaccgattttattctggccggcttccgcgtgcgacccgaattgcacatcctgctcttcttgttatttcttttcgtctacgccatgattctcctgggcaacgtcgggatgatgaccatcatcatgaccgatcctcgtctgaacacacctatgtactttttcctcggcaacctgagctttatcgacctgttttactcctcagtcatcgagcccaaagccatgatcaatttctggagtgagaataagagtatttccttcgcagggtgcgtagcacagttgttcctattcgcactgctaattgtgacagaaggtttcctactcgctgcaatggcgtacgatcgatttatcgctatatgtaatcccttgctgtacagtgtccagatgtcgaccagactgtgcacccagttggtcgccgggagctatttttgcggttgtatttctagcgtgattcagacatccatgacttttacgctcagcttctgtgcctcaagggccgtcgatcatttttactgtgacagtcgtcctttacagagactctcatgttccgatctcttcatccataggatgatctcctttagcctgagttgtattataatcctgcctacaatcatagttatcatcgtgtcctatatgtacatagtgtccacagtcctcaagattcattcaactgaggggcataagaaagctttcagtacttgttcaagtcacctgggggtggtttccgttctgtacggcgctgtgttcttcatgtatctgaccccagacaggttccccgaattatcaaaggtggctagcctttgttatagcctggtgaccccaatgctgaacccactcatctatagtcttaggaacaaggatgtccaggaggcccttaagaagtttctggaaaaaaaaaacatcatcttgtag

SEQ ID NO: 21250 - DNA, 1122 bp, Artificial Sequence
  derived and/or modified sequence
tcacagtatacttatgaggcaaaaattaataataacattaatttaaaaatagctttgtaaatcctaataccataagagattatttgtaatgctaggatccaaaccaagagttcatttgtatattttgccctgtgcctctcaacaggtttctaccatgggtgacaggggaacaagcaatcactcagaaatgactgacttcattcttgcaggcttcagggtacgcccagagctccacattctcctcttcctgctatttttgtttgtttatgccatgatccttctagggaatgttgggatgatgaccattattatgactgatcctcggctgaacacaccaatgtattttttcctaggcaatctctccttcattgatcttttctattcatctgttattgaacccaaggctatgatcaacttctggtctgaaaacaagtctatctcctttgcaggctgtgtggcccagctctttctctttgccctcctcattgtgactgagggatttctcctggcggccatggcttatgaccgctttattgccatctgcaaccctctgctctactctgttcaaatgtccacacgtctgtgtactcagttggtggctggttcctatttttgtggctgcattagctcagttattcagactagcatgacatttactttatctttttgcgcttctcgggctgttgaccacttttactgtgattctcgcccacttcagagactgtcttgttctgatctctttatccatagaatgatatctttttccttatcatgtattattatcttgcctactatcatagtcattatagtatcttacatgtatattgtgtccacagttctaaagatacattctactgagggacataagaaggccttctccacctgcagctctcacctgggagttgtgagtgtgctgtatggtgctgtcttttttatgtatctcactcctgacagatttcctgagctgagtaaagtggcatccttatgttactccctagtcactcccatgttgaatcctttgatttactctctgaggaacaaagatgtccaagaggctctaaaaaaatttctagagaagaaaaatattattctttgattattatttctctttcaccaatttta

SEQ ID NO: 21251 - DNA, 1008 bp, Artificial Sequence
  derived and/or modified sequence
atgctggggtcgaaaccgcgagttcacctttacatccttccatgcgcctcccaacaagtatctactatgggtgatcgcggtacttcaaaccacagtgagatgactgatttcatcctggccggattccgcgtgcggccagaactccatattcttttattcctgctttttctgtttgtctacgcaatgattctgctgggcaacgtgggcatgatgactataattatgacagatcccagactgaacactccaatgtacttcttcctgggcaacctgtctttcatcgatcttttctactcctccgtaatcgaaccgaaagccatgatcaacttttggtctgagaacaagagtatttcgttcgcaggttgtgtggcacagctgtttctgtttgcactgcttatcgtaaccgaaggctttctcttagctgcgatggcctacgacaggtttatagctatctgcaacccattactttattcggttcagatgtctacccgattatgcacccaactggtagcaggatcatatttctgtggatgtatttctagcgtcattcagactagcatgacattcaccttatctttctgtgcctccagggcagtcgatcatttttactgtgactcaagaccgctgcagcgtctgtcttgtagtgacctcttcatccaccggatgatcagcttctcactgagctgcatcattatactacccaccatcatcgtcattatcgtgtcttacatgtatatcgttagtaccgtcctgaagatccatagtactgaaggccacaagaaggccttctctacttgctcttcccacctaggtgtcgtgagcgtgctgtatggggctgtgttcttcatgtatctgaccccagaccggtttcctgagctcagcaaagtggcgtccctctgctacagcctggtgaccccaatgctcaatcctctcatttattcacttcgaaataaagatgttcaggaggctctgaaaaaattcttggagaagaaaaacattattttatag

SEQ ID NO: 21252 - protein, 309 aa, Artificial Sequence
  derived and/or modified sequence
MEKKKNVTEFILIGLTQNPIMEKVTFVVFLVLYMITLSGNLLIVVTITTSQALSSPMYFFLTHLSLIDTVYSSSSAPKLIVDSFQEKKIISFNGCMAQAYAEHIFGATEIILLTVMACDCYVAICKPLNYTTIMSHSLCILLVAVAWVGGFLHATIQILFTVWLPFCGPNVIGHFMCDLYPLLKLVCIDTHTLGLFVAVNSGFICLLNFLILVVSYVIILRSLKNNSLEGRCKALSTCISHIIVVVLFFVPCIFVYLRSVTTLPIDKAVAVFYTMVVPMLNPVVYTLRNAEVKSAIRKLWRKKVTSDND

SEQ ID NO: 21253 - DNA, 930 bp, Artificial Sequence
  derived and/or modified sequence
atggagaagaagaagaacgtgaccgagttcatcctgatcggcctgacccagaaccccatcatggagaaggtgaccttcgtggtgttcctggtgctgtacatgatcaccctgagcggcaacctgctgatcgtggtgaccatcaccaccagccaggccctgagcagccccatgtacttcttcctgacccacctgagcctgatcgacaccgtgtacagcagcagcagcgcccccaagctgatcgtggacagcttccaggagaagaagatcatcagcttcaacggctgcatggcccaggcctacgccgagcacatcttcggcgccaccgagatcatcctgctgaccgtgatggcctgcgactgctacgtggccatctgcaagcccctgaactacaccaccatcatgagccacagcctgtgcatcctgctggtggccgtggcctgggtgggcggcttcctgcacgccaccatccagatcctgttcaccgtgtggctgcccttctgcggccccaacgtgatcggccacttcatgtgcgacctgtaccccctgctgaagctggtgtgcatcgacacccacaccctgggcctgttcgtggccgtgaacagcggcttcatctgcctgctgaacttcctgatcctggtggtgagctacgtgatcatcctgagaagcctgaagaacaacagcctggagggcagatgcaaggccctgagcacctgcatcagccacatcatcgtggtggtgctgttcttcgtgccctgcatcttcgtgtacctgagaagcgtgaccaccctgcccatcgacaaggccgtggccgtgttctacaccatggtggtgcccatgctgaaccccgtggtgtacaccctgagaaacgccgaggtgaagagcgccatcagaaagctgtggagaaagaaggtgaccagcgacaacgactag

SEQ ID NO: 21254 - DNA, 930 bp, Artificial Sequence
  derived and/or modified sequence
atggagaaaaagaaaaacgtgacagaattcattctgattggtctcactcagaaccctatcatggaaaaggttacatttgtggttttcctggtgctctacatgattacgctgagtgggaatcttctgatagtggttacaatcaccacttctcaggcattatcgtcacccatgtatttctttcttacccacctgtctttgatagataccgtttacagctcttcctcggccccaaaactcatcgtcgactcatttcaggagaaaaagataataagctttaatggttgtatggcccaagcctacgctgaacacatttttggagcaactgaaataatactgctaaccgtcatggcatgcgactgttatgtggcaatatgcaagcccctcaattataccacaattatgtcccactcactctgtatacttctggtggcagtcgcctgggtcgggggcttcttgcatgcaacaatccagattctgttcaccgtatggctgccattttgtggcccgaatgttatcggtcatttcatgtgtgatttgtaccccttgttgaaattagtgtgcatcgacacacacacattgggactgttcgtcgctgtgaattcaggattcatctgcctcctgaactttctcatcctagttgtctcctatgtgatcattctgcgatcattgaagaacaactccctggaagggcgctgtaaagccctctccacctgcataagccatatcattgtagtagtgcttttcttcgtgccgtgcatattcgtctacctccgaagtgtaaccacattgcccatcgataaagccgtcgccgttttctacactatggtggtacccatgcttaatcctgtggtatacacattacgtaatgctgaggtaaaatctgcaatacggaagctgtggaggaagaaggtcacatccgataacgattag

SEQ ID NO: 21255 - DNA, 930 bp, Artificial Sequence
  derived and/or modified sequence
atggagaagaagaagaatgtgacagagttcatcctgattggcctgacccagaaccccatcatggagaaggtgacctttgtggtgttcctggtgctgtacatgatcaccctgagcggcaacctgctgattgtggtgaccatcaccaccagccaggccctgagcagccccatgtacttcttcctgacccacctgagcctgattgacacagtgtacagcagcagcagcgcccccaagctgattgtggacagcttccaggagaagaagatcatctccttcaacggctgcatggcccaggcctatgcagagcacatctttggagccacagagatcatcctgctgactgtgatggcctgtgactgctacgtggccatctgcaagcccctgaactacaccaccatcatgagccacagcctgtgcatcctgctggtggccgtggcctgggtgggcggcttcctgcacgccaccatccagatcctcttcaccgtgtggctgcccttctgtggccccaacgtcatcggccacttcatgtgtgacctgtaccccctgctgaagctggtgtgcatcgacacccacaccctgggcctgtttgtggccgtgaacagcggcttcatctgcctgctgaacttcctgatcctggtggtgtcctatgtgatcatcctgcggagcctgaagaacaacagcctggagggccgctgcaaggccctgagcacctgcatcagccacatcatcgtggtggtgctcttctttgtgccctgcatctttgtgtacctgcggtctgtgaccaccctgcccatcgacaaggctgtggccgtgttctacaccatggtggtgcccatgctgaaccctgtggtgtacaccctgagaaatgctgaggtgaagagcgccatcaggaagctgtggaggaagaaggtgaccagtgacaatgactag

SEQ ID NO: 21256 - DNA, 930 bp, Artificial Sequence
  derived and/or modified sequence
atggagaagaagaagaacgtgaccgagttcatcctgatcggcctgactcaaaacccaattatggaaaaggttacattcgtggtcttcctggtcctgtatatgataacactctccggtaatctcctgatcgtcgtgacaattacaacgtcacaagctttgagcagccctatgtacttcttccttacccatttaagcctcatcgacacagtgtattcttcctcctcagccccaaagcttatcgtggattcatttcaggagaaaaaaataatctcttttaatggttgtatggctcaggcgtatgctgagcacatttttggcgccactgaaattattctgcttaccgtcatggcgtgtgattgctatgtcgctatctgtaaacctctgaactacaccacaattatgtctcactccttgtgtatcttgctggtggcggtagcctgggttggtggttttctgcatgctacaattcagatattattcacagtgtggctcccattttgtggcccgaatgtgataggccactttatgtgcgatctatacccacttttgaagctggtgtgtattgatacacacaccctcggtttatttgtggccgtaaattcaggattcatttgcctgctgaacttcctcattctagttgtttcctacgtgattatcttgcggtcgctgaagaataactcattggaaggcagatgtaaggctctttccacatgcatcagccacatcattgtagtggtgctattctttgtgccgtgtattttcgtctatctgaggtctgttacaaccctccccatagataaggcggtcgctgtattttacacaatggtggtgcctatgcttaacccggtcgtgtataccttgagaaacgccgaagtgaagagcgccatacgtaagctgtggaggaaaaaagtcacctcggataatgactag

SEQ ID NO: 21257 - DNA, 1063 bp, Artificial Sequence
  derived and/or modified sequence
ccttcctggaggttttatcacccacactacatagatggagaagaaaaagaatgtgactgaattcattttaataggtcttacacagaaccccataatggagaaagtcacgtttgtagtatttttggttctttacatgataacactttcaggcaacctgctcattgtggttaccattaccaccagccaggctctgagctcccccatgtacttcttcctgacccacctttctttgatagacacagtttattcttcttcttcagctcctaagttgattgtggattcctttcaagagaagaaaatcatctcctttaatgggtgtatggctcaagcctatgcagaacacatttttggtgctactgagatcatcctgctgacagtgatggcctgtgactgctatgtggccatctgcaaacctctgaactacacaaccattatgagccacagcctgtgcattctcctggtggcagtggcctgggtgggaggatttcttcatgcaactattcagattctctttacagtatggctgcccttctgtggccccaatgtcataggccacttcatgtgtgacttgtacccattgttaaaacttgtttgcatagacactcatacccttggtctctttgttgctgtgaacagtgggtttatctgcttattaaacttccttatcttggtggtatcctatgtgatcatcttgagatctttaaagaacaatagcttggaggggaggtgtaaagccctctccacctgtatttctcacatcatagtagttgtcttattctttgtgccctgtatatttgtgtatctgcgctcagtgaccactctgcccattgataaagctgttgctgtattttatactatggtggtcccaatgttaaatcccgtggtctacacactcagaaatgctgaggtaaaaagtgcaataaggaagctttggagaaaaaaagtgacttcagataatgattaaataagaccattgagcactcaacatagaggtaataggtatttaagcttcttgatttgtagatgaatatgtcaactctaacaaggggctggctaatgcttg

SEQ ID NO: 21258 - DNA, 930 bp, Artificial Sequence
  derived and/or modified sequence
atggaaaaaaagaagaatgttactgaatttatcctgattggcctgacccaaaatcccattatggagaaagtaacattcgtcgtctttctagtgctatatatgatcactctaagtggtaatctgctcattgtggtcactattacgacttcccaagccttgtctagcccaatgtactttttcctgacccatctgtccctcatcgacacggtttatagctctagcagtgctccaaagttgatcgtggacagctttcaggagaaaaaaattatctcattcaacgggtgtatggcgcaggcttacgctgagcacatttttggagccacagagatcatacttctgactgtcatggcctgtgactgttatgttgctatatgtaaacccctgaactatacaacgattatgagtcatagcctctgcatcctgcttgtcgctgtagcctgggtaggtggattcctccacgcgacaatccagatactgttcaccgtgtggttgccattttgcggacccaacgttataggccacttcatgtgcgacttgtatcccctgctgaaattagtctgtatagatactcatactctgggtctattcgtcgcagtcaacagtggattcatttgtcttctcaactttttgattctagtagtgagctatgttattattctacgcagcctcaaaaacaatagtcttgaaggaagatgcaaggccttgtccacatgtatcagccacattattgtggtggtgctgttcttcgtcccatgtattttcgtatacctacgctctgtgacaaccctgcctatcgacaaggccgtggcagtcttttatacaatggtggtcccaatgctaaaccccgttgtctacacccttaggaatgccgaggtgaagtccgctatccggaaactttggcggaagaaggtcacaagcgacaacgactag

SEQ ID NO: 21259 - protein, 2059 aa, Artificial Sequence
  derived and/or modified sequence
MASPLRDEEEEEEEMVVSEEEEEEEEEGDEEEEEEVEAADEDDEEDDDEGVLGRGPGHDRGRDRHSPPGCHLFPPPPPPPPPLPPPPPPPPPDKDDIRLLPSALGVKKRKRGPKKQKENKPGKPRKRKKRDSEEEFGSERDEYREKSESGGSEYGTGPGRKRRRKHREKKEKKTKRRKKGEGDGGQKQVEQKSSATLLLTWGLEDVEHVFSEEDYHTLTNYKAFSQFMRPLIAKKNPKIPMSKMMTILGAKWREFSANNPFKGSAAAVAAAAAAAAAAVAEQVSAAVSSATPIAPSGPPALPPPPAADIQPPPIRRAKTKEGKGPGHKRRSKSPRVPDGRKKLRGKKMAPLKIKLGLLGGKRKKGGSYVFQSDEGPEPEAEESDLDSGSVHSASGRPDGPVRTKKLKRGRPGRKKKKVLGCPAVAGEEEVDGYETDHQDYCEVCQQGGEIILCDTCPRAYHLVCLDPELDRAPEGKWSCPHCEKEGVQWEAKEEEEEYEEEGEEEGEKEEEDDHMEYCRVCKDGGELLCCDACISSYHIHCLNPPLPDIPNGEWLCPRCTCPVLKGRVQKILHWRWGEPPVAVPAPQQADGNPDVPPPRPLQGRSEREFFVKWVGLSYWHCSWAKELQLEIFHLVMYRNYQRKNDMDEPPPLDYGSGEDDGKSDKRKVKDPHYAEMEEKYYRFGIKPEWMTVHRIINHSVDKKGNYHYLVKWRDLPYDQSTWEEDEMNIPEYEEHKQSYWRHRELIMGEDPAQPRKYKKKKKELQGDGPPSSPTNDPTVKYETQPRFITATGGTLHMYQLEGLNWLRFSWAQGTDTILADEMGLGKTIQTIVFLYSLYKEGHTKGPFLVSAPLSTIINWEREFQMWAPKFYVVTYTGDKDSRAIIRENEFSFEDNAIKGGKKAFKMKREAQVKFHVLLTSYELITIDQAALGSIRWACLVVDEAHRLKNNQSKFFRVLNGYKIDHKLLLTGTPLQNNLEELFHLLNFLTPERFNNLEGFLEEFADISKEDQIKKLHDLLGPHMLRRLKADVFKNMPAKTELIVRVELSPMQKKYYKYILTRNFEALNSRGGGNQVSLLNIMMDLKKCCNHPYLFPVAAMESPKLPSGAYEGGALIKSSGKLMLLQKMLRKLKEQGHRVLIFSQMTKMLDLLEDFLDYEGYKYERIDGGITGALRQEAIDRFNAPGAQQFCFLLSTRAGGLGINLATADTVIIFDSDWNPHNDIQAFSRAHRIGQANKVMIYRFVTRASVEERITQVAKRKMMLTHLVVRPGLGSKAGSMSKQELDDILKFGTEELFKDENEGENKEEDSSVIHYDNEAIARLLDRNQDATEDTDVQNMNEYLSSFKVAQYVVREEDKIEEIEREIIKQEENVDPDYWEKLLRHHYEQQQEDLARNLGKGKRVRKQVNYNDAAQEDQDNQSEYSVGSEEEDEDFDERPEGRRQSKRQLRNEKDKPLPPLLARVGGNIEVLGFNTRQRKAFLNAVMRWGMPPQDAFTTQWLVRDLRGKTEKEFKAYVSLFMRHLCEPGADGSETFADGVPREGLSRQQVLTRIGVMSLVKKKVQEFEHINGRWSMPELMPDPSADSKRSSRASSPTKTSPTTPEASATNSPCTSKPATPAPSEKGEGIRTPLEKEEAENQEEKPEKNSRIGEKMETEADAPSPAPSLGERLEPRKIPLEDEVPGVPGEMEPEPGYRGDREKSATESTPGERGEEKPLDGQEHRERPEGETGDLGKREDVKGDRELRPGPRDEPRSNGRREEKTEKPRFMFNIADGGFTELHTLWQNEERAAISSGKLNEIWHRRHDYWLLAGIVLHGYARWQDIQNDAQFAIINEPFKTEANKGNFLEMKNKFLARRFKLLEQALVIEEQLRRAAYLNLSQEPAHPAMALHARFAEAECLAESHQHLSKESLAGNKPANAVLHKVLNQLEELLSDMKADVTRLPATLSRIPPIAARLQMSERSILSRLASKGTEPHPTPAYPPGPYATPPGYGAAFSAAPVGALAAAGANYSQMPAGSFITAATNGPPVLVKKEKEMVGALVSDGLDRKEPRAGEVICIDD

SEQ ID NO: 21260 - DNA, 6180 bp, Artificial Sequence
  derived and/or modified sequence
atggcatctcctctgcgggacgaggaagaggaggaagaggagatggtggtgtccgaggaagaagaggaggaggaggaggaaggtgatgaggaggaggaagaggaggttgaagccgcagatgaggacgacgaagaggatgacgacgaaggagtgctcggtagaggcccagggcacgatcggggtagagacagacatagcccgcctggctgccacctcttccccccacccccaccacctccgccccccctgcctccccctccacctcctccaccgccggataaggacgatatcagactcctgcccagcgcacttggcgtgaagaaaagaaagcgaggccctaagaagcagaaagaaaacaagccgggtaagccaagaaagcgtaagaagcgcgattccgaagaagaattcggcagcgagagagacgaatatcgagaaaagagtgagtctggaggcagtgagtacggcaccgggcctggacggaaacgaaggagaaagcaccgcgagaaaaaagagaagaaaaccaagcgccgtaagaagggcgagggcgacggagggcagaaacaggttgaacagaagtcatccgccacactactgctcacttggggtctcgaggatgtggagcatgttttttcggaggaagattaccatacactgactaattacaaagcattctctcaatttatgcgcccccttatcgccaaaaaaaacccgaaaattcctatgtcaaagatgatgaccattcttggagctaagtggcgggaattctcagccaacaatccctttaaagggtccgccgctgcagttgcagccgcagcagccgcagctgctgcagctgtcgccgaacaggtcagcgctgccgtgagtagtgctaccccaattgctccatctgggcctcccgctctccccccgcctcctgccgcggacattcagcctccccccatcagaagagccaagaccaaggagggtaagggacctgggcataaacggagaagtaaaagtccaagagtcccggatggtagaaaaaagctaagaggcaagaaaatggcgcccctgaagatcaagcttggtctgctgggtggcaaacggaagaaagggggcagttacgtgtttcagagtgacgagggccctgaaccagaggccgaggaaagtgatctcgactccggttctgtgcactccgcctcgggaaggccagacggtccagtgcggaccaaaaaactaaaaagaggacgccctggaagaaaaaaaaagaaagtcctgggctgcccggcagtcgcgggggaagaggaggtagatggttacgagacagaccaccaggactactgcgaggtttgccagcaaggaggggagataattctgtgcgatacctgtccccgagcctaccacttggtctgcctggatccagagctcgatcgggcgcccgagggcaagtggtcttgtccacactgcgagaaagaaggtgttcaatgggaggctaaggaggaagaggaagaatacgaggaagagggcgaagaagaaggagaaaaagaggaagaggatgaccatatggaatattgtagagtgtgcaaggacggaggcgaactgctgtgctgcgatgcatgtatcagctcttatcacattcactgtctgaatccgcccctgcccgacatccccaacggagagtggctgtgtccacgttgcacatgccccgtgctcaagggccgggtccagaagattcttcattggcggtggggtgaacctccagtcgcggtccctgctccacagcaagcggatggcaatcctgacgtccctcctccaaggccattgcaaggtcgcagcgagcgcgagttcttcgtcaagtgggtcggcctgagctattggcattgctcttgggccaaagagctgcaactcgagatattccacttggtgatgtatagaaattaccaaaggaaaaacgacatggacgaacctcccccgcttgattatggatctggtgaggacgacggcaagtctgataagcggaaagtgaaggatcctcattacgcagagatggaggagaaatactaccgatttggaatcaaaccggagtggatgaccgtccataggatcataaatcactcagtggataagaagggcaactaccattatcttgtcaagtggagggacctcccttatgatcaaagcacctgggaagaggacgagatgaatattccagaatacgaggaacacaaacaatcttactggcgacaccgggaacttattatgggggaagacccggcgcaacctcgcaagtacaaaaagaagaaaaaagagctgcaaggagacgggcccccttcgtcccctacaaatgatcctacggttaaatacgagacccagcctcgatttataaccgctactggcgggacccttcacatgtatcagttggagggattgaattggctgaggtttagctgggctcagggtaccgatacgatccttgcagacgagatgggactcgggaagacgattcagacaattgtgttcctctactctctctacaaggaaggccacactaagggaccctttctcgtgtcagcccccctttctaccataataaattgggagagggaattccagatgtgggcccccaaattttacgtcgtgacatacactggcgataaggacagcagagctataattcgggaaaacgaattttctttcgaggataacgctatcaaaggcggcaaaaaagcttttaagatgaaaagagaagcccaagtgaaatttcacgtgttactgacctcatacgagctgataaccatcgatcaggctgcactgggaagcatccggtgggcatgtctggttgtcgacgaggcacacaggctgaagaacaatcagtcaaaattttttagagtgctgaacggctacaaaattgaccacaagctgttgctaaccggaaccccacttcagaacaatctggaggaactgttccatctcctgaatttcttgacacccgaacgattcaataatctcgagggcttcctggaggaatttgctgacatttcaaaggaggatcaaattaagaagctacacgaccttctaggccctcatatgctaaggaggctgaaggccgatgtcttcaaaaacatgcccgcaaaaacagaactgattgtccgcgtggagctgagcccaatgcagaagaagtactataagtacatcttgacacgcaatttcgaagctcttaactccaggggaggtggcaaccaggtgtccttactcaatattatgatggatctgaaaaaatgttgcaatcacccctaccttttccctgtcgcagccatggagagccccaagcttccgtctggagcctatgagggtggagctctcattaagtcaagcggcaagctgatgctacttcagaagatgttgaggaaactgaaagaacaaggccaccgagtgctaatattctcacagatgaccaagatgctggatcttttggaagactttctggattacgagggctataagtacgagcgcattgacggaggcataactggagctctgcgtcaagaggccattgaccggttcaacgccccaggagctcagcagttttgctttctactttctactcgcgcaggtggtctaggaataaatttagctaccgctgacaccgtgataatctttgattctgactggaacccccacaatgatatccaagccttcagccgggcgcaccgcatcggacaggccaataaagtgatgatctacaggttcgtaacaagagcttccgttgaagagcggattactcaggtcgctaaaagaaagatgatgcttactcatctggtggtgagacccggcctgggctccaaggcagggtctatgtcgaagcaggaactcgacgacatattaaagtttggcacagaagagctctttaaagatgaaaacgagggtgaaaataaagaggaggactcatctgtcattcactacgataacgaagcaatcgctagattgctggaccgcaaccaggacgctaccgaggataccgacgttcagaatatgaacgagtacttaagttcctttaaggttgcccagtatgtcgtcagggaagaggacaaaattgaggaaatcgaacgcgaaatcatcaaacaggaggaaaatgtggatcctgactattgggagaagttgctccgacatcattatgagcaacaacaggaggacctcgctaggaatcttggcaagggtaaacgtgtccgcaaacaagtgaactacaacgacgcagctcaagaggaccaagataaccaaagcgagtacagtgtggggtccgaggaggaggacgaagattttgacgagaggccagagggaaggcgccagagcaagcgccagctgaggaatgagaaggataagcccctcccacctctcttggcgagggtcggtggcaacatcgaggttttgggttttaacacccgacagaggaaggccttcctaaacgcagtcatgcgctgggggatgccaccgcaggacgcttttacaactcagtggttagtaagagatctccgggggaaaacggaaaaggaatttaaagcctatgtgtcattgtttatgaggcacctctgtgagccaggcgcagacggttcagaaaccttcgccgatggagttccacgggagggcttgtctcggcaacaagtacttaccagaatcggggtgatgagtctggtcaagaaaaaggtccaggagttcgagcacataaatgggaggtggagtatgccggaactaatgcctgacccaagtgccgatagcaaacggagctctcgcgcttcttctcccacgaagacgagcccaaccacccctgaggcctcagcgacaaacagcccctgcacctccaagccagccactccagctcccagtgagaaaggtgaaggcataagaactcctctggaaaaggaagaggccgagaatcaggaggaaaagcccgagaaaaacagtcgcataggggagaaaatggagaccgaagccgatgccccttccccggccccaagcctaggggagcgactggagccccggaaaatcccactggaagacgaagtgccgggagtgccaggggaaatggagcccgagcccggataccgcggcgatcgagagaaaagtgcaaccgaatccaccccgggtgagaggggtgaagagaagccccttgacggccaagagcacagggagcgccccgaaggcgaaactggtgacctaggcaagagagaagatgtgaaaggcgatcgtgagttgcgccccggacctagagacgaacctcgttccaatgggagacgggaagagaaaacggagaaacctagatttatgttcaatatcgctgacgggggcttcactgaattacacaccctttggcagaacgaggagcgggcggcaatttcctccggcaagcttaacgagatttggcataggcggcatgactactggctcctggctggaatagttctccatgggtatgccagatggcaggacatacaaaatgacgcacagtttgcgattatcaatgagccattcaaaacagaggccaataagggtaatttcctggagatgaagaacaagtttctggcgaggaggtttaagctcctggagcaagctctggttattgaggagcagctgcgacgagccgcctatttaaatttgagccaggagcctgcccaccccgccatggcgctccatgcacgctttgcagaggcagagtgtctggccgagagccatcagcacctaagcaaggagagccttgcaggtaacaagccggctaacgcagtgttgcacaaggtcttgaaccagctggaggagctcctcagcgatatgaaggccgacgtgactcggttgcccgctacgctgagtaggattcctcccatagctgcacggttgcagatgagcgaaagatctattctgtcacgactggcatcgaaggggacagaaccccacccaacaccagcctacccgcctggtccttatgctacccctcccgggtatggcgccgccttttctgctgcacctgtgggggccctcgccgctgcaggagcaaattattcccagatgccagccgggtcctttattactgccgccacaaatggcccgccggttctcgtgaagaaagagaaagaaatggttggcgcacttgtcagcgacggcctggaccgcaaggaaccgcgggccggggaggtgatctgcatcgatgactag

SEQ ID NO: 21261 - DNA, 6180 bp, Artificial Sequence
  derived and/or modified sequence
atggccagccccctgagagatgaggaggaggaggaggaggagatggtggtgtctgaggaggaggaggaggaggaggaggagggagatgaggaggaggaggaggaggtggaggccgcagatgaagatgatgaagaagatgatgatgagggcgtgctgggccggggccctggccatgaccggggccgggacagacacagccccccaggctgccacctgttccccccacctcctcctcctcctccacccctgcccccacctcctcctcctcctcctccagacaaggatgacatccggctgctgcccagcgccctgggcgtgaagaagaggaagaggggccccaagaagcagaaggagaacaagccaggcaagcccaggaagaggaagaagagggacagcgaggaggagtttggcagcgagagagatgagtaccgggagaagtctgagagcggcggctctgaatatggcaccggccctggcaggaagagaagaaggaagcaccgggagaagaaggagaagaagaccaagaggaggaagaagggggagggagatggcggccagaagcaggtggagcagaagagcagcgccaccctgctgctgacctggggcctggaggatgtggagcacgtgttttctgaggaggactaccacaccctgaccaactacaaggccttcagccagttcatgaggcccctcatcgccaagaagaaccccaagatccccatgagcaagatgatgaccatcctgggcgccaagtggagggagttcagcgccaacaaccccttcaagggcagcgctgctgctgtggccgctgctgctgctgctgctgctgctgctgtggccgagcaggtgtctgctgctgtgtcctctgccacccccatcgcccccagcggccccccagccctgcccccacctcctgctgctgacatccagcccccacccatcagaagagccaagaccaaggagggcaaaggacctggccacaagagaagaagcaagagcccccgggtgcctgatggcaggaagaagctgcggggcaagaagatggcccccctgaagatcaagctgggcctgctgggcggcaagaggaagaagggcggcagctatgtgttccagagtgatgagggccctgagcctgaggccgaggagagtgacctggacagcggctctgtgcacagcgccagcggccgcccagatggccctgtgaggaccaagaagctgaagaggggccggcccggcaggaagaagaagaaggtgctgggctgcccagctgtggccggggaggaggaggtggatggctatgaaacagaccaccaggactactgtgaggtgtgccagcagggcggggagatcatcctgtgtgacacctgcccccgggcctaccacctggtgtgcctggaccctgagctggaccgggcccctgagggcaagtggagctgcccccactgtgagaaggagggcgtgcagtgggaggccaaggaggaggaggaggagtatgaggaggagggggaggaggagggggagaaggaggaggaggatgaccacatggagtactgccgggtgtgcaaggatggaggagagctgctgtgctgtgatgcctgcatcagcagctaccacatccactgcctgaacccccccctgcctgacatccccaatggagagtggctgtgcccccgctgcacctgccctgtgctgaagggccgggtgcagaagatcctgcactggcgctggggcgagccccctgtggccgtgcctgccccccagcaggctgatggcaacccagatgtgcccccaccccggcccctgcagggccgctctgagcgggagttctttgtgaagtgggtgggcctgagctactggcactgctcctgggccaaggagctgcagctggagatcttccacctggtgatgtacagaaactaccagaggaagaatgacatggatgagcccccacccctggactatggcagcggggaggatgatggcaagagtgacaagaggaaggtgaaggacccccactacgccgagatggaggagaagtactacagatttggcatcaagccagagtggatgacagtgcaccgcatcatcaaccacagcgtggacaagaagggcaactaccactacctggtgaagtggagggacctgccctatgaccagagcacctgggaggaggatgagatgaacatcccagaatatgaggagcacaagcagagctactggaggcaccgggagctgatcatgggagaagatcctgcccagcccaggaagtacaagaagaagaagaaggagctgcagggagatggcccccccagcagccccaccaatgaccccaccgtgaagtatgagacccagccccgcttcatcacagccactggaggcaccctgcacatgtaccagctggagggcctgaactggctgcgcttctcctgggcccagggcacagacaccatcctggctgatgagatgggcctgggcaagaccatccagaccatcgtgttcctgtacagcctgtacaaggagggccacaccaagggccccttcctggtgtctgcccccctgagcaccatcatcaactgggagcgggagttccagatgtgggcccccaagttctacgtggtgacctacaccggggacaaggacagccgggccatcatcagagaaaatgagttctcctttgaagataatgccatcaagggcggcaagaaggccttcaagatgaagcgggaggcccaggtgaagttccacgtgctgctgaccagctatgagctgatcaccatcgaccaggccgccctgggcagcatccgctgggcctgcctggtggtggatgaggcccaccggctgaagaacaaccagagcaagttcttccgggtgctgaatggctacaagattgaccacaagctgctgctgaccggcacccccctgcagaacaacctggaggagctgttccacctgctgaacttcctgaccccagagcgcttcaacaacctggagggcttcctggaggagtttgctgacatcagcaaagaagaccagatcaagaagctgcatgacctgctgggcccccacatgctgcggcggctgaaggcagatgtgttcaagaacatgcctgccaagacagagctgattgtgcgggtggagctgagccccatgcagaagaagtactacaagtacatcctgaccaggaactttgaggccctgaacagccggggcggcggcaaccaggtgtccctgctgaacatcatgatggacctgaagaagtgctgcaaccacccctacctgtttcctgtggccgccatggagagccccaagctgcccagcggggcctatgaaggaggagccctgatcaagagcagcggcaagctgatgctgctgcagaagatgctgaggaagctgaaggagcagggccaccgggtgctgatcttcagccagatgaccaagatgctggacctgctggaggacttcctggactatgagggctacaagtatgaaagaattgatggcggcatcaccggggccctgcggcaggaggccatcgaccgcttcaatgcccctggggcccagcagttctgcttcctgctgagcaccagggctgggggcctgggcatcaacctggccacagctgacaccgtcatcatctttgacagcgactggaacccccacaatgacatccaggccttcagccgggcccaccgcatcggccaggccaacaaggtgatgatctacagatttgtgacccgggcctctgtggaggagcgcatcacccaggtggccaagaggaagatgatgctgacccacctggtggtgcggcccggcctgggcagcaaggccggctccatgagcaagcaggagctggatgacatcctgaagtttggaacagaggagctgttcaaggatgaaaatgaaggagagaacaaggaggaggacagcagcgtcatccactatgacaatgaggccatcgcccggctgctggacaggaaccaggatgccacagaggacacagatgtgcagaacatgaatgagtacctgagcagcttcaaggtggcccagtatgtggtgcgggaggaggacaagattgaggagattgagcgggagatcatcaagcaggaggagaatgtggaccctgactactgggagaagctgctgcggcaccactatgagcagcagcaggaggacctggccaggaacctgggcaagggcaagagggtgaggaagcaggtgaactacaatgatgctgcccaggaggaccaggacaaccagagcgagtacagcgtgggcagcgaggaggaggatgaagattttgatgagaggcctgagggccggcggcagagcaagaggcagctgagaaatgagaaggacaagcccctgccccccctgctggcccgggtgggcggcaacatcgaggtgctgggcttcaacacccggcagaggaaggccttcctgaatgctgtgatgcgctggggcatgccaccccaggatgccttcaccacccagtggctggtgcgggacctgcggggcaagacagagaaggagttcaaggcctacgtgtccctcttcatgaggcacctgtgtgagcctggagcagatggcagcgagacctttgctgatggagtgccccgggagggcctgagccggcagcaggtgctgaccagaattggagtgatgagcctggtgaagaagaaggtgcaggagtttgagcacatcaatggccgctggagcatgcctgagctgatgccagaccccagcgctgacagcaagaggagcagccgggccagcagccccaccaagaccagccccaccaccccagaggccagcgccaccaacagcccctgcaccagcaagccagccaccccagcccccagcgagaagggggagggcatccgcacccccctggagaaggaggaggccgagaaccaggaggagaagccagagaagaacagccgcatcggggagaagatggagacagaagcagatgcccccagccctgcccccagcctgggggagcggctggagcccaggaagatccccctggaggatgaggtgcctggggtgcctggagagatggagcctgagcccggctacagaggagaccgggagaagagcgccacagagagcaccccaggagagcggggggaggagaagcccctggatggccaggagcaccgggagaggcctgagggggagaccggggacctgggcaagagagaagatgtgaagggggaccgggagctgcggcccggccccagagatgagcccaggagcaatggccggcgggaggagaagacagagaagccccgcttcatgttcaacattgctgatggcggcttcacagagctgcacaccctgtggcagaatgaggagcgggccgccatcagcagcggcaagctgaatgagatctggcacagaagacatgactactggctgctggccggcatcgtgctgcacggctacgcccgctggcaggacatccagaatgatgcccagtttgccatcatcaatgagcccttcaagacagaggccaacaagggcaacttcctggagatgaagaacaagttcctggcccggcgcttcaagctgctggagcaggccctggtgattgaggagcagctgcggcgggccgcctacctgaacctgagccaggagcccgcccacccagccatggccctgcacgccaggtttgctgaggccgagtgcctggccgagagccaccagcacctgagcaaggagagcctggccggcaacaagccagccaatgctgtgctgcacaaggtgctgaaccagctggaggagctgctgagtgacatgaaggcagatgtgacccggctgcctgccaccctgagccgcatcccccccatcgccgcccggctgcagatgtctgagaggagcatcctgagccggctggccagcaaaggaacagagccccaccccaccccagcctacccacctggcccctatgccaccccacctggctacggggccgccttctctgctgcccctgtgggcgccctggccgctgctggggccaactacagccagatgcctgctggcagcttcatcacagctgccaccaatggacctcctgtgctggtgaagaaggagaaggagatggtgggcgccctggtgtctgatggcctggacaggaaggagcccagggctggggaggtgatctgcattgatgactag

SEQ ID NO: 21262 - DNA, 6180 bp, Artificial Sequence
  derived and/or modified sequence
atggccagccccctgcgggacgaggaggaggaggaggaggagatggtggtgtccgaagaagaagaggaagaggaagaggagggggatgaggaggaagaggaggaggtggaagcagccgacgaagatgatgaagaggacgatgatgaaggagttctgggccgggggccgggacatgataggggcagagaccgacactccccaccagggtgccatctgttcccacccccaccccctccgcctccccctctgcctccccctccccccccaccgccgcctgacaaggacgacatcaggctcctgcctagtgcactgggcgtgaaaaaacgcaaacggggccccaaaaagcaaaaggagaacaaaccaggcaagcctagaaaacggaagaagcgtgatagcgaggaggagtttggcagtgagagagacgagtaccgcgaaaagtcagagtccggagggtctgagtacggcacgggtccaggccgcaagaggcgccggaaacacagggaaaagaaagagaagaagactaagagacgaaaaaagggcgagggtgacggaggccagaagcaagttgaacaaaaaagcagcgccaccctactcctgacgtggggccttgaggacgtggaacacgtattctctgaagaggattaccacacgttgactaactataaggcttttagtcagttcatgaggcctctaatagcaaaaaagaatcctaaaataccaatgagtaagatgatgaccatcttaggcgctaagtggcgcgaattcagcgctaataaccccttcaaaggtagcgcggccgccgtggccgctgctgcggctgcagctgccgcagcagttgccgaacaggtgtccgctgcggtatcttcggccactcccatcgccccctcaggcccccctgctctacccccccccccagccgctgacattcagccccctccaatccgtcgtgcaaaaacgaaagaaggaaagggtcctggacacaagcgccggtcgaaatcccctagggttccggacggtaggaaaaaactcaggggaaaaaaaatggcacctctcaaaattaagctcgggttacttggtgggaagagaaagaaaggcggtagctatgtgtttcagtcggatgaaggccctgagcccgaggctgaggagtccgacctggatagtggctcagtacacagcgcaagcgggaggcccgatgggccagtgaggacaaagaagctgaagcgcggaagacctggcaggaaaaagaagaaagttctggggtgtccggccgttgcaggcgaggaggaggtggatggatacgaaaccgaccaccaggactactgtgaggtatgccaacaagggggggagatcatcctgtgcgacacctgccctagggcctaccatctggtttgtctggaccccgaactcgatcgggctcctgaaggaaaatggagttgtcctcactgtgagaaagagggcgttcaatgggaggcaaaggaggaggaggaggagtacgaggaagagggtgaagaagagggcgaaaaggaagaggaggacgaccacatggagtattgtcgcgtgtgcaaagacgggggagagctcctgtgctgcgacgcatgtatatctagttatcatattcattgcctcaatcctccattgccggacatcccaaatggagagtggttatgcccacggtgtacctgcccagtcctcaaggggcgtgttcagaaaatcctgcactggagatggggagagcctcctgtagccgtccctgctcctcaacaggccgacggaaaccccgacgtaccaccacctagaccactgcagggtcgtagcgagagagagttcttcgttaagtgggtcggactcagttattggcattgttcatgggccaaagaacttcaactggagatttttcatcttgtcatgtacagaaattatcagagaaaaaacgacatggacgagcccccacccctagactacggcagcggagaggatgatggtaaatcagataagcgcaaggttaaagacccccactacgctgagatggaagagaaatactaccggtttggaatcaaacctgaatggatgaccgttcaccgtattatcaatcattccgtggataagaaagggaattatcactacttggtgaagtggcgggatctaccctacgatcagagtacctgggaggaagatgaaatgaacatccctgagtatgaggaacataagcaatcctattggcgacatagagagttgattatgggagaggatcccgcccagccccgcaaatataagaagaaaaagaaggagctgcagggcgacggtcccccatcaagtcccacgaacgacccaaccgtgaagtacgagacacaaccacgcttcatcactgccaccggtggtaccctgcatatgtaccagctggaggggttgaactggctgaggttctcatgggcgcagggcacagataccatattagccgatgaaatgggcctagggaaaaccatccagactatagtctttctatattccttgtacaaggagggacatacaaaggggccctttctagtctcagcccctctgagtacaatcatcaattgggagagagagttccagatgtgggcgcctaaattttatgtggtgacgtataccggggataaagatagccgggcaatcatccgagagaacgagttttcatttgaggacaatgccatcaaagggggaaaaaaggcttttaagatgaagcgagaggcccaggtgaaattccatgtgctgctaacctcatatgagttgatcacaattgaccaggctgctctgggctccatcagatgggcctgcctggttgttgacgaagctcaccggctgaagaacaatcagagtaaattttttcgcgtgttaaatggctacaagattgatcataaattgcttcttacgggcacacctctccagaacaaccttgaagagttgtttcatctcttgaactttcttacacctgagaggtttaacaacttggaaggcttcctggaggagttcgctgatatcagcaaagaggatcagatcaagaaactccacgaccttctcggcccccacatgctgaggcgtctgaaggctgatgtgttcaagaatatgcctgctaagactgagctgattgttagagttgaactctcacccatgcagaaaaaatactacaagtatatccttacaagaaatttcgaggcactgaattctcgcgggggcggtaaccaggtgtctctgcttaatattatgatggatctcaaaaaatgctgcaaccatccatacctctttcctgtcgctgcaatggagagcccaaagcttccttctggtgcttatgaaggaggggctctgattaagagctccggcaagcttatgttactccagaagatgctgaggaagctcaaagaacaaggtcaccgtgtcctcattttctcacagatgacgaagatgctggaccttctggaagacttcctggattatgaaggttacaaatatgagaggatagatgggggaattacgggggcactccgacaggaggcaatcgatcgattcaatgccccaggggcgcaacagttttgctttctgctcagcacgcgggcaggaggactggggatcaacctagccaccgccgacactgtgataattttcgatagcgactggaacccccacaatgacattcaagcctttagcagggcccacagaattggtcaggcaaataaagtgatgatctatagatttgtcacaagagcctccgtagaggagcgtatcacccaggtcgctaaaagaaagatgatgctcacccaccttgtggtgcgccccggcctcggctctaaggccggatctatgtctaagcaggagctggatgatattctgaaatttgggacagaggaactttttaaagatgaaaacgagggagaaaataaggaggaagactcttcagttatccattatgacaacgaggccattgcaaggcttctggaccgtaaccaggatgcaactgaagatacggatgtacagaacatgaacgaatacctgagctccttcaaggtcgcccagtacgttgttcgcgaggaggataagattgaagagattgagagggagatcattaagcaggaggaaaatgtggaccctgactactgggagaaattgcttcgacaccactatgaacagcagcaggaagatctggccaggaatctggggaagggcaaacgcgtgagaaaacaggtcaactacaacgatgctgcccaggaagaccaagataaccagtccgagtactctgttggatccgaagaggaagacgaagacttcgacgagcgtcccgaggggaggcggcagtcaaagagacagctaagaaacgagaaagataaacccctgcctcccttattggcgagggtgggggggaacatagaggttctggggttcaatacaagacagagaaaggcttttctcaatgccgtgatgcggtggggtatgccacctcaagacgctttcacaacacagtggttagtgcgagatcttcggggaaagactgaaaaggaattcaaagcctacgttagcctgttcatgcgtcacctgtgcgaacccggcgccgacggaagtgagacctttgccgatggggtgccgcgggaggggctgtcacgacaacaggttctgacgcgcattggcgtgatgtccttagttaaaaaaaaggttcaggagttcgaacacattaacggtcgctggtcaatgccagagctcatgccagatccgagtgccgactcgaaaaggtcgtctcgggcttcatctccgacaaagacgagccctactacaccagaagcgagcgcgacaaacagtccgtgcacatccaagcctgccacacctgcaccttcagaaaagggcgaaggaattagaacacccctggaaaaggaagaggccgagaaccaggaagagaaaccggaaaagaactccaggataggcgaaaagatggaaactgaagcagacgcccctagtcccgccccatccctcggggaacggttggagccaaggaagatcccattagaagatgaggtgcctggggtccctggcgagatggaacctgaacccggctatcggggggatcgggagaaatccgctaccgaatcaaccccaggtgagagaggtgaggaaaaacctttggacggccaggagcacagggaacggcccgagggggaaacgggtgacttaggaaagagagaggacgtgaagggcgacagagaactccggcctgggcccagagacgaaccgaggtccaacggccgtagagaagagaagacggagaaaccacgctttatgtttaatatcgctgacggtggattcacagagttgcatacgctttggcagaatgaggaacgggcagcaattagttccggaaaattaaatgagatatggcatagacgtcatgattattggttactagcgggcattgtgctgcacggatatgcacgctggcaggatattcagaatgatgcacagtttgcaatcattaacgagcccttcaaaacggaagctaataaagggaatttcttagagatgaagaataagtttctcgcacgacgttttaaactgctcgagcaagcccttgtgatcgaggaacagctccggagagccgcgtatctcaacctttcacaagaacctgcccacccagctatggcgttgcatgctagatttgccgaggcagagtgcttggccgagagccaccagcatctcagcaaggagagtctggccggcaataagcctgccaatgcagttttgcacaaggttctgaatcagttagaggaactgctgtcagatatgaaggccgacgtaacccgccttcctgccaccttgtcgagaatacccccaattgctgctcggctgcagatgtctgagcgatccattctcagccggctggcatcaaagggcactgaaccgcaccccactccggcctaccctccaggcccctacgccacgccacccgggtacggggccgctttcagtgcagctcccgtgggggctcttgctgccgccggcgccaattatagccagatgcctgctggaagtttcattaccgccgccacaaatgggccgccagtcctcgtgaagaaggagaaagaaatggtcggtgcgctcgtaagcgacggcttagataggaaggaaccccgcgccggagaggtcatctgcatcgacgactag

SEQ ID NO: 21263 - DNA, 6179 bp, Artificial Sequence
  derived and/or modified sequence
atggcttctccgcttcgcgatgaagaagaggaggaggaggagatggttgtgtctgaggaggaggaagaggaggaggaagagggcgacgaggaagaggaagaggaagtggaagccgctgatgaagacgatgaagaggacgatgatgagggcgtgcttggcagggggccaggccatgataggggcagggataggcattctcctcccggatgccacctgtttccccctcctccaccccctcctccgccactacccccacctcccccaccaccacctccagacaaggatgacatccggcttctgccctctgcgctcggtgtgaagaaaaggaaacgcggtcctaaaaaacagaaggagaataagccaggtaaacctcgcaagcggaagaagagggatagcgaagaagagttcggctccgagagagacgagtatcgggaaaagtcagagtctggcggttctgaatatggtaccggaccaggaaggaaacgtcgaaggaaacaccgtgagaaaaaagagaagaaaaccaagcgtaggaaaaagggcgaaggagatggaggtcagaaacaggttgagcagaaatcatcggccacattactgctaacctggggtctcgaagatgtcgaacacgtgttcagcgaggaggattaccacacactgactaattacaaggcattcagtcaatttatgcgccctctgatcgccaaaaagaaccctaagatacccatgagtaagatgatgacgatcctcggagcgaaatggcgggagtttagtgctaataaccccttcaaggggagcgccgctgctgtcgcagcagctgcagcagcggcagccgctgccgtggccgagcaggtatccgccgcagtgtccagcgctactcccattgccccaagcggcccacctgcccttccccctccccctgccgctgatattcagccacctcctatcaggcgcgcaaagactaaagaaggcaagggacccggtcacaaacggagatcaaaatcgcctcgtgttcccgatggacggaaaaaactacgcggtaagaagatggcaccactgaagattaagctcggcctcctcggcggtaagaggaaaaagggtggcagctacgttttccagagcgatgagggccctgagcccgaggccgaagaaagcgacctcgatagtgggtccgtgcattcggccagtggcaggcctgatggacctgttaggaccaagaagctaaaacgcggacggccaggcagaaagaaaaagaaggttttgggctgtcccgctgtcgcaggagaagaggaagtcgacgggtatgagactgaccaccaggactactgcgaagtgtgccagcagggcggtgagatcatcctgtgcgatacttgtccacgggcataccacctggtttgccttgacccagaactggatagagctcctgagggtaagtggtcatgtccccattgtgagaaagaaggggtgcagtgggaagcaaaggaagaagaggaggagtatgaggaagagggcgaagaagaaggagagaaagaggaggaggatgaccatatggaatactgtagggtgtgtaaagacggtggagaacttctgtgctgtgatgcatgcatcagtagctaccacatacactgtctgaatcccccactgcctgacatacctaatggagagtggttgtgtccccgatgcacttgcccagtgttgaagggccgagtgcagaagatcctgcactggcggtggggtgaaccgccagtagctgtgcccgcaccacagcaagccgatggaaaccccgatgtgccaccccctaggccactgcagggacgctcagaaagagaatttttcgtgaagtgggtcggactctcctactggcactgcagttgggcaaaagagctccagctggaaattttccaccttgtgatgtataggaattaccagaggaagaatgacatggatgaaccacccccactggactacggaagtggggaagatgacggtaaaagcgacaaacgcaaagtaaaggatccccactatgccgaaatggaggaaaaatactatcggtttggaatcaagccggaatggatgaccgtgcatcgcattataaaccactccgtcgacaagaagggtaattaccactaccttgtgaagtggcgcgatctcccctatgaccagtctacttgggaagaggatgagatgaacatccctgagtatgaagagcacaagcagtcatactggcggcaccgcgagctcattatgggtgaagatcctgcacagcctcggaaatacaaaaagaagaagaaggagctgcagggagacgggcctccatcctcccctaccaatgacccaactgtcaaatatgaaacccagccacgatttatcacagccacaggaggaacattacacatgtaccaactggagggcctgaactggctgcgcttctcttgggcacagggaactgatactatactagccgacgaaatgggcctggggaagaccatccagacgattgtgttcctgtactccctgtataaggagggtcacacgaaaggtcccttcctagtctctgcccctttatccaccatcataaactgggagagagaattccagatgtgggccccaaagttttatgtggttacatacaccggcgacaaggattccagggcaataatacgggagaatgagttcagcttcgaagacaatgctataaagggcggtaaaaaagcctttaagatgaagcgagaggcacaggtgaaattccacgttctgctgaccagttacgagttgatcactatcgatcaagctgccctgggcagtattcggtgggcttgcctggtggtcgatgaggcccaccgcctcaaaaataatcagtcaaaattcttccgagtcctcaatggatataagattgaccacaaactcctgctgacagggacacctctgcaaaataaccttgaagagcttttccatctcctcaacttcctgacccccgaaagattcaacaacttggaggggtttttggaggagtttgccgatatctccaaggaggatcagattaaaaaactacatgacctgctgggaccccacatgttgaggcgactaaaagccgacgtgtttaaaaacatgcccgctaagacagagttgattgtccgcgtcgagctaagtcccatgcagaaaaaatactacaaatacatattgacacgaaacttcgaggccttgaacagtcggggaggcggtaaccaggtgagcttactgaacattatgatggatctgaagaagtgttgcaaccacccttacctgttcccggtcgcggctatggaatcacccaagctgccaagcggggcatacgagggcggagccttgataaagagctccgggaaacttatgctgctgcagaaaatgctccgcaagttaaaagagcaaggccacagagtgcttatctttagccagatgaccaaaatgctagatcttctagaggacttcttggattacgaagggtacaagtacgaacgcattgatggcggaattacaggcgcactgcggcaggaggccattgatcgtttcaatgcccctggagcccagcagttctgtttcttgctttctacgagggctggtggactggggatcaatctggcaacggccgacaccgtcattattttcgattcagactggaacccccacaacgatattcaggcgttttctcgcgctcatcggattggtcaggctaataaggtgatgatataccgttttgtcacaagggcgtcagtcgaggagagaatcacacaagtggccaagagaaagatgatgctgacacatctcgtcgtgcgtcccggtttaggctccaaggcaggctccatgagcaagcaggaactcgacgatatcctgaaatttgggaccgaggaactgttcaaagatgagaacgagggtgaaaataaagaggaggatagctcagtgatccactatgacaacgaggcaatagctcgcctccttgacagaaaccaggatgccacagaagataccgacgtgcaaaatatgaacgagtatcttagtagtttcaaagtggcccagtatgttgtgcgggaggaagataagatcgaagagatcgagcgagagatcatcaaacaagaagagaacgtggaccccgattattgggagaagcttctgcgacatcattacgaacagcagcaggaggatcttgccagaaatttaggaaaaggcaaacgcgtccgtaagcaagtcaattataacgacgccgcacaggaggatcaagacaaccaatcggagtattcagtaggaagtgaagaggaagatgaagattttgatgaaaggcccgaaggtcgtcgacaatcaaaaagacagctgcgaaatgaaaaagataagcccttgccacctctgctcgcaagagtcggagggaatattgaggtcctggggttcaacacccgacagaggaaggccttcctcaacgccgtcatgcggtggggtatgccccctcaggatgcatttacaactcaatggttggtgagggatcttaggggcaagactgagaaggaatttaaagcctatgtatcactgtttatgcgacatctttgtgaaccaggagctgatggctcagagacttttgcggacggagtgcccagggaggggctgtcccgtcagcaagttctgactcgtattggcgtcatgtctttagtgaagaaaaaagttcaggaattcgagcatatcaatgggagatggagcatgccagagctgatgcctgacccttctgcagactctaagaggtccagccgcgctagttcccctaccaagacgtcccccaccacaccggaagcctccgctactaactctccctgtaccagcaaacctgccacacctgcaccatcagaaaaaggcgagggcattcggacccctctggagaaagaagaagccgaaaatcaggaagaaaagccggagaagaactcgcggattggggagaagatggaaactgaagctgacgcgcctagtccggctcctagtcttggagaaaggctggagccgagaaagattccgctcgaggacgaagttcctggtgtacctggggagatggagccagagccaggatatcggggagacagggaaaagtctgccaccgaatctactcccggagaacgcggtgaggaaaagccactggacggacaagagcaccgggaaaggcctgaaggcgagacaggcgacctggggaagcgggaggacgtcaagggggaccgagaactgcgacctggaccgagagatgaacccaggagtaacgggagacgagaagaaaagacagagaaaccaagatttatgttcaacatagcggatggcggttttacagagctgcataccctttggcagaacgaagaaagagcagctattagttctggcaaattaaatgaaatctggcacaggagacacgactactggctcttagcagggatagttcttcacggctacgcccgttggcaggatatccaaaacgatgcacaatttgctatcatcaacgagccattcaaaaccgaggccaacaagggtaatttcctggaaatgaagaataagtttcttgctcggagattcaagctcttggagcaggcgctcgtgatcgaagaacagttgaggcgcgctgcttacctgaacctgtcccaggaaccagcccatcccgctatggctttgcatgccaggttcgccgaggccgagtgccttgccgagagtcatcagcatctgagcaaggaatccctggcaggcaacaagcctgccaatgcagtgctccacaaggtgctcaatcaactggaggaactattatcagatatgaaagccgatgtcacgcgcttgccggctaccttatcgagaattcccccaatagccgctcggttacagatgagcgagcggtccattctctctaggcttgccagcaaaggcaccgagccacaccctacacccgcatatccaccagggccttatgccactccacctggttacggagcagctttcagtgctgcccctgtgggcgctttggctgccgctggggcaaattattcccagatgccagccggaagtttcatcaccgcagccacaaacggccctcccgtgctcgtgaagaaagaaaaggagatggtaggtgcactggtgtccgatgggttggatagaaaagagccacgcgcaggtgaagtaatctgcatcgacgatta

SEQ ID NO: 21264 - DNA, 7356 bp, Artificial Sequence
  derived and/or modified sequence
gatggcttcccctctgagggacgaggaggaggaggaggaggagatggtggtgtcggaggaggaagaagaggaggaagaagagggcgacgaggaggaggaggaggaggtggaggcggccgacgaggacgatgaggaggacgacgacgagggagtactcgggcgcgggccgggccacgaccggggccgcgaccgccacagcccccccggctgccacctcttcccgccgccgccgccgccgccgccaccgctgcccccgccgccgccgcccccgccgccagataaggatgacattcggctgctgccgtcagcattgggtgtgaagaagagaaaacgaggacccaagaagcagaaggagaacaagccaggaaaaccccgaaaacgcaagaagcgtgacagtgaggaggaatttggttctgagcgagatgagtaccgggagaagtcagagagtgggggcagtgaatatggaaccggaccgggtcggaaacgaagaaggaagcaccgagaaaaaaaggagaagaagacaaagcggcggaaaaagggggagggagatggggggcaaaagcaagtggaacagaagtcatcagcaactctgcttctgacctggggcctggaggatgtggagcatgtgttctctgaggaggattaccacacgctcaccaactacaaagccttcagccagttcatgaggcccctaattgctaagaagaatcctaagatcccaatgtctaagatgatgaccatccttggggccaaatggagagagttcagtgccaacaaccccttcaaggggtcagcagctgctgtggcggcggcagcggcagcagcagcagcagctgtagctgagcaggtgtcagctgctgtctcgtcggccacccccatagcaccctccggaccccccgcccttccaccaccccctgctgctgatatccagcccccacccatccgaagagccaaaaccaaagagggcaaaggtccaggccataagaggcggagtaagagcccccgagtgcctgatggacgcaagaagcttcggggaaagaaaatggcaccactcaaaataaaactagggcttctgggtggcaagaggaagaaaggaggctcgtatgtttttcagagcgacgaaggtcctgaaccagaggctgaggaatcagacctggacagtggcagtgtccacagtgcctcaggccggcctgatggccctgtccgcaccaagaaactaaagagaggccggccaggaaggaagaagaagaaggtcctgggctgtcctgcagtggccggggaggaggaggttgatggctacgagacggatcaccaggattactgtgaggtgtgccagcagggtggggaaattattctgtgtgacacctgccctcgtgcctaccacctcgtctgccttgatcctgagcttgaccgggctccagagggcaaatggagctgccctcactgtgagaaggagggggtccagtgggaggccaaggaggaagaagaagaatacgaagaggagggagaggaagaaggggagaaggaggaggaggatgatcacatggagtactgccgcgtatgcaaggacggcggggagctcctgtgctgtgacgcgtgcatctcctcctaccacattcattgtctaaaccctcccctgcctgacattcccaatggtgaatggctgtgtccccgatgcacatgccccgtgctgaagggtcgagtgcagaagatcctacattggcggtggggggagccacctgtagcagtgccagcccctcaacaggcagatggaaatccagatgtcccacccccccgtcctcttcaaggcagatcagagcgagagttctttgtcaagtgggtaggactatcctactggcactgctcctgggccaaggagcttcagctggaaatcttccatttggttatgtatcgaaactaccagcggaagaatgacatggatgagcccccacccctggactatggctccggcgaggatgatgggaagagcgacaagcgtaaagtgaaagacccgcactatgctgagatggaggagaagtactatcgttttggcatcaagccagagtggatgaccgtccaccgcatcatcaaccacagtgtggataaaaaggggaattaccactatctagtaaaatggagggacttaccatatgaccagtccacgtgggaggaagatgaaatgaatatccctgaatacgaagaacataagcaaagctactggagacaccgagaactaattatgggggaagaccctgcccagccccgcaagtataagaagaagaagaaggagctacagggtgatgggcctcccagttctcccactaatgatcctaccgtgaaatatgagactcagccacggtttatcacagccactggaggcaccctgcacatgtatcagttggaagggctgaactggctacgcttctcctgggcccagggcactgacaccattctagctgatgagatggggctaggcaagaccatacaaaccatcgtcttcctctactcactctacaaggagggccacacaaaaggtcccttcctggtgagtgccccactctctaccatcattaactgggagcgggagttccagatgtgggcacccaaattctatgtggtgacatacacgggtgacaaggacagccgggccatcattcgtgagaatgaattctcctttgaggacaatgccatcaaagggggcaagaaagcttttaagatgaagagggaggcacaggtgaagttccatgttctcctgacatcgtatgagctgatcaccattgatcaggcagcacttggttccatccgctgggcctgtcttgtggtagatgaggcccatcgactcaagaacaaccagtccaagtttttcagggttctcaatggttacaagatagatcataagttgctgctgacaggaaccccattgcagaataatctggaggagctcttccatctcctgaacttcctcaccccagagagatttaacaacttggagggcttcctggaggagtttgctgacatatccaaagaggaccagatcaagaaactgcatgatttgctggggccacacatgctgcggagactcaaggcagatgtctttaagaacatgccagccaagacagagctcatcgttcgggtggagctaagccccatgcagaagaaatactacaaatacatcctgactcgaaattttgaggccttgaattcacgaggtggtgggaaccaggtgtcgctgcttaatatcatgatggatcttaagaagtgctgcaaccatccatacctttttcccgtggctgctatggagtcccccaaactccccagtggggcttatgagggtggggcacttattaagtcgtctgggaagctcatgctgctccagaagatgctgcgaaagctgaaggagcaaggacaccgagtgctcatcttctcgcagatgaccaaaatgttagacttgcttgaggacttcttagactatgaaggctacaagtatgagcgcatcgatggtggtatcacgggtgccctgaggcaggaggccatcgatcggtttaatgctcctggggcccaacaattctgcttcctcctgtccacccgagctgggggcctgggcatcaatctggccactgctgacactgtcatcatctttgattctgactggaacccccataatgacatccaggcctttagccgggctcatcggattggccaggccaacaaagtgatgatttaccggtttgtgactcgcgcgtcagtggaagagcgaatcacacaagtggccaagagaaagatgatgctgacacacctggttgtgcggcctgggctgggctccaaggcaggctccatgtccaagcaggagcttgacgacattctcaaatttggcactgaagagctattcaaggatgaaaacgagggggagaacaaggaggaggacagcagtgtgattcattatgacaatgaggccatcgctcggctgttggaccggaaccaggatgcaactgaggacactgacgtgcagaacatgaatgagtatctcagctccttcaaggtggcacagtacgtcgtgcgggaagaagacaagattgaggaaattgagcgagagatcatcaagcaggaggagaatgtggaccctgactactgggagaagctgctgaggcatcactatgagcaacagcaggaagacctagcccggaatctaggcaagggcaagcgggttcgcaagcaagttaactacaatgatgctgctcaggaagaccaagacaaccagtcagagtactcggtgggttcagaggaggaggatgaagacttcgatgaacgtcctgaagggcgtagacagtcaaagaggcagctccggaatgagaaagataagccactgcctccactgctggcccgagtcgggggcaacattgaggtgctgggcttcaacacccgtcagcggaaggctttcctcaatgctgtgatgcgctgggggatgccaccacaggatgccttcaccacacagtggctggtgcgggacctgaggggcaagactgagaaggagtttaaggcctatgtgtctttgttcatgcgccatctgtgtgagcctggggcagacggctctgaaacctttgccgatggggtccctcgggagggactgagtcgccagcaggtgttgacccgcattggagtcatgtctctcgtcaaaaagaaggtgcaggagtttgagcacatcaatgggcgttggtcaatgccggaactgatgcctgaccccagcgccgattctaagcgctcctccagagcctcctctcctaccaaaacgtctcccaccactcctgaggcttctgctaccaacagtccctgcacctctaaacctgctactccagctccaagtgagaaaggagaaggcataaggacacctcttgagaaggaggaagctgaaaaccaggaggaaaagccagagaagaacagcagaattggggagaagatggagacagaggctgatgcccccagcccagccccatcacttggggagcggctggagccaaggaagattcctctagaggatgaggtgccaggggtgcctggagagatggagcctgaacctgggtaccgtggggacagagagaagtcagccacagagtcgacgccaggagaaaggggggaggagaagccgttggatggacaggaacacagggagaggccggagggggaaacaggggatttgggcaagagagaagatgtaaaaggtgaccgggagcttcgaccagggcctcgagatgagccacggtccaatgggcgacgagaggaaaagacagagaagccccggttcatgttcaatatcgccgatggtggcttcacagagcttcacacactgtggcagaatgaggaacgggcagctatttcctcggggaaactcaatgagatctggcacagaagacatgactattggcttctggctgggattgtcctccatggctatgcacggtggcaggacatccagaatgatgctcaatttgccattatcaacgagccatttaaaactgaagccaataaggggaactttctggagatgaaaaataagttcctggcccggaggttcaagctcctggagcaggcgctggtgattgaggagcagctgcggcgggcggcctacctgaacctgtcgcaggagccggcgcaccccgccatggccctccacgcccgcttcgccgaggccgagtgcctggccgagagccaccagcacctctccaaggagtcgctggcggggaacaagccggccaacgccgtcctgcacaaggttctgaaccagctggaggagttgctgagcgacatgaaggcggacgtgacccgcctgccagccacgctgtcccgaataccccccatcgcagcccgccttcagatgtccgagcgcagcatcctcagccggctggccagcaagggcacggagcctcaccccacaccggcctacccgccgggtccctacgctacacctccggggtacggggcggccttcagcgccgcacccgtaggggccctggccgccgcaggcgccaattacagccagatgcctgcagggtccttcatcacagccgccaccaacggccctccagtgcttgtgaagaaggagaaggaaatggtgggggcattggtgtcagacgggctggatcggaaggagccccgagccggggaggtgatctgtatagacgactgactggatcccaggcctgcccttcacccaggccccgtccccgaggccgacccccagctcaagcgctggggcctgctgccagccctccaccttccccaccccttgggccatcactgggctaggaacccctttgcccctctctgcagctcctctcttcaagaagggccctttgtctttctccactcccacacacctttcccaccaagccttgaagactgtgctggtgagaagaagtctgggtgggagatggctggcagggtcttccaagtaccttcctcccacactgccaagtatacacaacttcccagtaaatggttgtggggaggaaagaggtggagcctccccagccgtttccctgcagaatcagctctgtctcatgtggaagtggagaatcagccttgcctggcctttaggaacttttgtggggaagagagctttgaagagaggagggggactttagagagggatgaaaatgagccctgggagggaggaagggacgaggaggggtggctgcatgttaccgtcccctacctctccccacgtggagggtggagcagttatgagggaggaagtcaactgctgttcagcctcagaataaaggtgccgttcactggctcagttacctcctgtgtaccggcatcttgtgttgggaatgttcccccctccctagggaccaaggaccacccctacaaaaagagtaatggttgggtgatactccctcaagccaaagaggagctccccaacctgttctagggacccaggtaacctagaagggtgggagagaatacaatgggccagatgtggtggaagcccagctctggggctcaggttcctggaagacttctactaccctccctcctcaaggcctggatacagactaaatttgtataagtcaggcaggggacctagtcagggtcttgggagctaccttgtcgttgggaccagagcaaaatagtggagggcaggctagggaaatgtgggcacatcccccctcccaggaggggccggggagagtggcagtttgcatggcgaaccccccacttcctctttgctgccccttcactttcttgctgcccctttcccagtctctcttcacacccactcctggtctgtcctgatcccctcttctgtatcaggtttattggttgtacatataaattatactttcctttctgtgt

SEQ ID NO: 21265 - DNA, 6180 bp, Artificial Sequence
  derived and/or modified sequence
atggccagccccctgagagacgaggaggaggaggaggaggagatggtggtgagcgaggaggaggaggaggaggaggaggagggcgacgaggaggaggaggaggaggtggaggccgccgacgaggacgacgaggaggacgacgacgagggcgtgctgggcagaggccccggccacgacagaggcagagacagacacagcccccccggctgccacctgttccccccccccccccccccccccccccccctgcccccccccccccccccccccccccccgacaaggacgacatcagactgctgcccagcgccctgggcgtgaagaagagaaagagaggccccaagaagcagaaggagaacaagcccggcaagcccagaaagagaaagaagagagacagcgaggaggagttcggcagcgagagagacgagtacagagagaagagcgagagcggcggcagcgagtacggcaccggccccggcagaaagagaagaagaaagcacagagagaagaaggagaagaagaccaagagaagaaagaagggcgagggcgacggcggccagaagcaggtggagcagaagagcagcgccaccctgctgctgacctggggcctggaggacgtggagcacgtgttcagcgaggaggactaccacaccctgaccaactacaaggccttcagccagttcatgagacccctgatcgccaagaagaaccccaagatccccatgagcaagatgatgaccatcctgggcgccaagtggagagagttcagcgccaacaaccccttcaagggcagcgccgccgccgtggccgccgccgccgccgccgccgccgccgccgtggccgagcaggtgagcgccgccgtgagcagcgccacccccatcgcccccagcggcccccccgccctgccccccccccccgccgccgacatccagcccccccccatcagaagagccaagaccaaggagggcaagggccccggccacaagagaagaagcaagagccccagagtgcccgacggcagaaagaagctgagaggcaagaagatggcccccctgaagatcaagctgggcctgctgggcggcaagagaaagaagggcggcagctacgtgttccagagcgacgagggccccgagcccgaggccgaggagagcgacctggacagcggcagcgtgcacagcgccagcggcagacccgacggccccgtgagaaccaagaagctgaagagaggcagacccggcagaaagaagaagaaggtgctgggctgccccgccgtggccggcgaggaggaggtggacggctacgagaccgaccaccaggactactgcgaggtgtgccagcagggcggcgagatcatcctgtgcgacacctgccccagagcctaccacctggtgtgcctggaccccgagctggacagagcccccgagggcaagtggagctgcccccactgcgagaaggagggcgtgcagtgggaggccaaggaggaggaggaggagtacgaggaggagggcgaggaggagggcgagaaggaggaggaggacgaccacatggagtactgcagagtgtgcaaggacggcggcgagctgctgtgctgcgacgcctgcatcagcagctaccacatccactgcctgaacccccccctgcccgacatccccaacggcgagtggctgtgccccagatgcacctgccccgtgctgaagggcagagtgcagaagatcctgcactggagatggggcgagccccccgtggccgtgcccgccccccagcaggccgacggcaaccccgacgtgcccccccccagacccctgcagggcagaagcgagagagagttcttcgtgaagtgggtgggcctgagctactggcactgcagctgggccaaggagctgcagctggagatcttccacctggtgatgtacagaaactaccagagaaagaacgacatggacgagcccccccccctggactacggcagcggcgaggacgacggcaagagcgacaagagaaaggtgaaggacccccactacgccgagatggaggagaagtactacagattcggcatcaagcccgagtggatgaccgtgcacagaatcatcaaccacagcgtggacaagaagggcaactaccactacctggtgaagtggagagacctgccctacgaccagagcacctgggaggaggacgagatgaacatccccgagtacgaggagcacaagcagagctactggagacacagagagctgatcatgggcgaggaccccgcccagcccagaaagtacaagaagaagaagaaggagctgcagggcgacggcccccccagcagccccaccaacgaccccaccgtgaagtacgagacccagcccagattcatcaccgccaccggcggcaccctgcacatgtaccagctggagggcctgaactggctgagattcagctgggcccagggcaccgacaccatcctggccgacgagatgggcctgggcaagaccatccagaccatcgtgttcctgtacagcctgtacaaggagggccacaccaagggccccttcctggtgagcgcccccctgagcaccatcatcaactgggagagagagttccagatgtgggcccccaagttctacgtggtgacctacaccggcgacaaggacagcagagccatcatcagagagaacgagttcagcttcgaggacaacgccatcaagggcggcaagaaggccttcaagatgaagagagaggcccaggtgaagttccacgtgctgctgaccagctacgagctgatcaccatcgaccaggccgccctgggcagcatcagatgggcctgcctggtggtggacgaggcccacagactgaagaacaaccagagcaagttcttcagagtgctgaacggctacaagatcgaccacaagctgctgctgaccggcacccccctgcagaacaacctggaggagctgttccacctgctgaacttcctgacccccgagagattcaacaacctggagggcttcctggaggagttcgccgacatcagcaaggaggaccagatcaagaagctgcacgacctgctgggcccccacatgctgagaagactgaaggccgacgtgttcaagaacatgcccgccaagaccgagctgatcgtgagagtggagctgagccccatgcagaagaagtactacaagtacatcctgaccagaaacttcgaggccctgaacagcagaggcggcggcaaccaggtgagcctgctgaacatcatgatggacctgaagaagtgctgcaaccacccctacctgttccccgtggccgccatggagagccccaagctgcccagcggcgcctacgagggcggcgccctgatcaagagcagcggcaagctgatgctgctgcagaagatgctgagaaagctgaaggagcagggccacagagtgctgatcttcagccagatgaccaagatgctggacctgctggaggacttcctggactacgagggctacaagtacgagagaatcgacggcggcatcaccggcgccctgagacaggaggccatcgacagattcaacgcccccggcgcccagcagttctgcttcctgctgagcaccagagccggcggcctgggcatcaacctggccaccgccgacaccgtgatcatcttcgacagcgactggaacccccacaacgacatccaggccttcagcagagcccacagaatcggccaggccaacaaggtgatgatctacagattcgtgaccagagccagcgtggaggagagaatcacccaggtggccaagagaaagatgatgctgacccacctggtggtgagacccggcctgggcagcaaggccggcagcatgagcaagcaggagctggacgacatcctgaagttcggcaccgaggagctgttcaaggacgagaacgagggcgagaacaaggaggaggacagcagcgtgatccactacgacaacgaggccatcgccagactgctggacagaaaccaggacgccaccgaggacaccgacgtgcagaacatgaacgagtacctgagcagcttcaaggtggcccagtacgtggtgagagaggaggacaagatcgaggagatcgagagagagatcatcaagcaggaggagaacgtggaccccgactactgggagaagctgctgagacaccactacgagcagcagcaggaggacctggccagaaacctgggcaagggcaagagagtgagaaagcaggtgaactacaacgacgccgcccaggaggaccaggacaaccagagcgagtacagcgtgggcagcgaggaggaggacgaggacttcgacgagagacccgagggcagaagacagagcaagagacagctgagaaacgagaaggacaagcccctgccccccctgctggccagagtgggcggcaacatcgaggtgctgggcttcaacaccagacagagaaaggccttcctgaacgccgtgatgagatggggcatgcccccccaggacgccttcaccacccagtggctggtgagagacctgagaggcaagaccgagaaggagttcaaggcctacgtgagcctgttcatgagacacctgtgcgagcccggcgccgacggcagcgagaccttcgccgacggcgtgcccagagagggcctgagcagacagcaggtgctgaccagaatcggcgtgatgagcctggtgaagaagaaggtgcaggagttcgagcacatcaacggcagatggagcatgcccgagctgatgcccgaccccagcgccgacagcaagagaagcagcagagccagcagccccaccaagaccagccccaccacccccgaggccagcgccaccaacagcccctgcaccagcaagcccgccacccccgcccccagcgagaagggcgagggcatcagaacccccctggagaaggaggaggccgagaaccaggaggagaagcccgagaagaacagcagaatcggcgagaagatggagaccgaggccgacgcccccagccccgcccccagcctgggcgagagactggagcccagaaagatccccctggaggacgaggtgcccggcgtgcccggcgagatggagcccgagcccggctacagaggcgacagagagaagagcgccaccgagagcacccccggcgagagaggcgaggagaagcccctggacggccaggagcacagagagagacccgagggcgagaccggcgacctgggcaagagagaggacgtgaagggcgacagagagctgagacccggccccagagacgagcccagaagcaacggcagaagagaggagaagaccgagaagcccagattcatgttcaacatcgccgacggcggcttcaccgagctgcacaccctgtggcagaacgaggagagagccgccatcagcagcggcaagctgaacgagatctggcacagaagacacgactactggctgctggccggcatcgtgctgcacggctacgccagatggcaggacatccagaacgacgcccagttcgccatcatcaacgagcccttcaagaccgaggccaacaagggcaacttcctggagatgaagaacaagttcctggccagaagattcaagctgctggagcaggccctggtgatcgaggagcagctgagaagagccgcctacctgaacctgagccaggagcccgcccaccccgccatggccctgcacgccagattcgccgaggccgagtgcctggccgagagccaccagcacctgagcaaggagagcctggccggcaacaagcccgccaacgccgtgctgcacaaggtgctgaaccagctggaggagctgctgagcgacatgaaggccgacgtgaccagactgcccgccaccctgagcagaatcccccccatcgccgccagactgcagatgagcgagagaagcatcctgagcagactggccagcaagggcaccgagccccaccccacccccgcctacccccccggcccctacgccaccccccccggctacggcgccgccttcagcgccgcccccgtgggcgccctggccgccgccggcgccaactacagccagatgcccgccggcagcttcatcaccgccgccaccaacggcccccccgtgctggtgaagaaggagaaggagatggtgggcgccctggtgagcgacggcctggacagaaaggagcccagagccggcgaggtgatctgcatcgacgactag

SEQ ID NO: 21266 - protein, 2000 aa, Artificial Sequence
  derived and/or modified sequence
MKAADTVILWARSKNDQLRISFPPGLCWGDRMPDKDDIRLLPSALGVKKRKRGPKKQKENKPGKPRKRKKRDSEEEFGSERDEYREKSESGGSEYGTGPGRKRRRKHREKKEKKTKRRKKGEGDGGQKQVEQKSSATLLLTWGLEDVEHVFSEEDYHTLTNYKAFSQFMRPLIAKKNPKIPMSKMMTILGAKWREFSANNPFKGSAAAVAAAAAAAAAAVAEQVSAAVSSATPIAPSGPPALPPPPAADIQPPPIRRAKTKEGKGPGHKRRSKSPRVPDGRKKLRGKKMAPLKIKLGLLGGKRKKGGSYVFQSDEGPEPEAEESDLDSGSVHSASGRPDGPVRTKKLKRGRPGRKKKKVLGCPAVAGEEEVDGYETDHQDYCEVCQQGGEIILCDTCPRAYHLVCLDPELDRAPEGKWSCPHCEKEGVQWEAKEEEEEYEEEGEEEGEKEEEDDHMEYCRVCKDGGELLCCDACISSYHIHCLNPPLPDIPNGEWLCPRCTCPVLKGRVQKILHWRWGEPPVAVPAPQQADGNPDVPPPRPLQGRSEREFFVKWVGLSYWHCSWAKELQLEIFHLVMYRNYQRKNDMDEPPPLDYGSGEDDGKSDKRKVKDPHYAEMEEKYYRFGIKPEWMTVHRIINHSVDKKGNYHYLVKWRDLPYDQSTWEEDEMNIPEYEEHKQSYWRHRELIMGEDPAQPRKYKKKKKELQGDGPPSSPTNDPTVKYETQPRFITATGGTLHMYQLEGLNWLRFSWAQGTDTILADEMGLGKTIQTIVFLYSLYKEGHTKGPFLVSAPLSTIINWEREFQMWAPKFYVVTYTGDKDSRAIIRENEFSFEDNAIKGGKKAFKMKREAQVKFHVLLTSYELITIDQAALGSIRWACLVVDEAHRLKNNQSKFFRVLNGYKIDHKLLLTGTPLQNNLEELFHLLNFLTPERFNNLEGFLEEFADISKEDQIKKLHDLLGPHMLRRLKADVFKNMPAKTELIVRVELSPMQKKYYKYILTRNFEALNSRGGGNQVSLLNIMMDLKKCCNHPYLFPVAAMESPKLPSGAYEGGALIKSSGKLMLLQKMLRKLKEQGHRVLIFSQMTKMLDLLEDFLDYEGYKYERIDGGITGALRQEAIDRFNAPGAQQFCFLLSTRAGGLGINLATADTVIIFDSDWNPHNDIQAFSRAHRIGQANKVMIYRFVTRASVEERITQVAKRKMMLTHLVVRPGLGSKAGSMSKQELDDILKFGTEELFKDENEGENKEEDSSVIHYDNEAIARLLDRNQDATEDTDVQNMNEYLSSFKVAQYVVREEDKIEEIEREIIKQEENVDPDYWEKLLRHHYEQQQEDLARNLGKGKRVRKQVNYNDAAQEDQDNQSEYSVGSEEEDEDFDERPEGRRQSKRQLRNEKDKPLPPLLARVGGNIEVLGFNTRQRKAFLNAVMRWGMPPQDAFTTQWLVRDLRGKTEKEFKAYVSLFMRHLCEPGADGSETFADGVPREGLSRQQVLTRIGVMSLVKKKVQEFEHINGRWSMPELMPDPSADSKRSSRASSPTKTSPTTPEASATNSPCTSKPATPAPSEKGEGIRTPLEKEEAENQEEKPEKNSRIGEKMETEADAPSPAPSLGERLEPRKIPLEDEVPGVPGEMEPEPGYRGDREKSATESTPGERGEEKPLDGQEHRERPEGETGDLGKREDVKGDRELRPGPRDEPRSNGRREEKTEKPRFMFNIADGGFTELHTLWQNEERAAISSGKLNEIWHRRHDYWLLAGIVLHGYARWQDIQNDAQFAIINEPFKTEANKGNFLEMKNKFLARRFKLLEQALVIEEQLRRAAYLNLSQEPAHPAMALHARFAEAECLAESHQHLSKESLAGNKPANAVLHKVLNQLEELLSDMKADVTRLPATLSRIPPIAARLQMSERSILSRLASKGTEPHPTPAYPPGPYATPPGYGAAFSAAPVGALAAAGANYSQMPAGSFITAATNGPPVLVKKEKEMVGALVSDGLDRKEPRAGEVICIDD

SEQ ID NO: 21267 - DNA, 6003 bp, Artificial Sequence
  derived and/or modified sequence
atgaaggccgcagatactgtgattttgtgggcacgttctaagaatgatcagctgagaatcagtttccctcctggcctctgttggggtgatcggatgcctgataaagatgacattagactcctgccctcggctctgggggttaagaagcggaaacgtgggcccaagaaacagaaggaaaataagcccgggaagcccagaaagaggaagaaaagagacagcgaggaagagttcgggagcgagcgggacgaatacagagagaagtcagaatccggcggttcagagtacggaaccggccctggcagaaagagaaggaggaagcatcgcgagaaaaaggaaaagaagaccaaacgccgcaaaaaaggtgaaggtgacgggggccagaagcaagtggaacaaaaatcttccgcgaccctcctgctgacgtggggactcgaagacgtggagcatgttttctccgaagaagactatcacaccctcaccaattacaaggcttttagtcagttcatgaggccactcatagcaaagaaaaatcctaaaataccaatgagtaaaatgatgacaattcttggcgccaaatggagggagttcagcgccaataatcctttcaagggaagtgctgcggccgtcgccgctgccgccgccgcagcagccgccgcagtggctgagcaggtgtccgcggcagtcagttcggctaccccgatagccccttccggacctccagcccttcctccaccacctgccgccgacatccagccaccccctattaggcgcgcaaagacgaaagaaggaaaggggccgggccacaaacggcgctcaaaatcgcctagggtccccgatggtcgtaagaaactaagaggtaaaaagatggccccacttaagatcaagttagggctcctaggcggcaaacggaagaagggtggttcttatgtgtttcagagtgatgagggtccggaacccgaggcagaagagtccgatctggattcaggatccgttcactcggcaagcggtcgcccggacggtcccgtcaggacaaagaaactcaaaaggggaagaccaggtagaaagaaaaagaaggtgttaggatgccccgctgtagcaggcgaggaggaggttgacgggtatgagacggaccatcaggattactgcgaagtctgtcaacaggggggcgaaatcatcctctgtgacacctgccctagagcatatcatttggtgtgcctggacccagaactggatcgcgccccagaaggcaaatggtcctgccctcactgcgaaaaagaaggggtccagtgggaggccaaggaagaagaagaagagtacgaggaagagggggaggaagagggtgagaaggaagaggaagacgaccacatggaatactgtcgggtttgcaaagatggaggcgagctcctttgctgcgacgcatgtattagctcataccatattcattgtctgaacccacctcttcctgacatacctaacggcgagtggctgtgccctcgttgcacctgcccagtgctgaagggccgtgttcagaagatccttcattggcgatggggggagccacctgtcgcagtgcccgccccccagcaggctgatgggaaccccgacgtgcctcccccacgaccacttcaagggcgaagcgagcgggagttttttgtgaagtgggtcgggttaagttactggcattgtagctgggctaaggagctccagctggagatatttcatcttgttatgtatcgaaattaccagaggaaaaatgacatggacgagccacccccactcgactacggctccggagaagacgatggcaagtcagacaaaagaaaagtaaaagatccgcattacgcagagatggaggaaaaatactaccgattcggcataaagccggaatggatgaccgttcataggatcataaaccattctgttgataagaagggtaattatcattaccttgtgaaatggcgtgatcttccatacgaccagtcaacgtgggaagaagacgaaatgaacattccagagtatgaggaacacaagcagtcttactggcgccatagagagctgattatgggggaggatcccgcccagccaaggaagtataagaagaagaagaaggagctccagggcgatggtccccctagctcaccaaccaatgaccctacggtaaagtacgaaacccagccaaggttcattaccgccaccggcggcaccttacatatgtatcaactggagggtctcaactggcttcggttctcgtgggcccagggtaccgataccatcctggctgacgaaatggggctcggcaaaacaatccagaccatagtattcctttattcactgtacaaggaaggccacactaaaggaccgttcctcgtgtctgctcctctcagcactatcatcaattgggagcgagagtttcagatgtgggccccaaaattctatgtcgtcacatatacaggcgacaaggacagtcgggccataattcgggagaacgagttctctttcgaagacaatgccattaaaggcgggaagaaggcattcaaaatgaaacgtgaggcccaggtgaagttccatgtcctcctcacaagctacgagctcattaccatcgatcaagccgccctcggaagtattcgctgggcttgcctggtcgtggatgaagcccatcgcttgaagaataatcagagtaagttcttcagagtacttaacgggtataaaattgaccacaagcttttgctgaccggaacacctctacagaacaacctggaagaactttttcatctgctcaacttcctaacccctgagcgtttcaacaatctcgaagggtttcttgaggaatttgccgacatctcaaaagaggatcagatcaagaaactccatgatctgctcgggccacacatgctccgccgactgaaggccgacgtgtttaagaacatgcccgctaagacagagttaatcgtgagagttgaactgagcccaatgcagaagaaatactacaagtacatcctgactaggaattttgaggctcttaattcgaggggcggaggcaaccaggtgtcgctgttgaacattatgatggacctaaaaaagtgctgtaatcatccttatttgttcccagtggccgctatggaaagcccaaaactgccttcgggggcctatgagggaggagccctgatcaaaagcagcggaaagctgatgctcctgcagaaaatgcttagaaagctgaaagaacagggccaccgagtcctcatcttctctcagatgaccaagatgctggacttgctggaggattttctggattacgagggttacaaatatgagagaatcgatggcggcattactggggcccttcgacaggaagccatagataggttcaacgcacctggagcacaacagttttgcttcctgctgtctaccagggccggtggactggggatcaacctggcaactgctgacacggtgataatcttcgactcagactggaatccccacaatgatattcaagcattctcgcgggctcacaggataggacaggccaacaaggtgatgatctacagattcgtcacccgcgccagtgtagaagaaaggataacccaagtcgctaagaggaaaatgatgctcacacatttggtggttagaccaggtcttggctccaaagccgggtccatgagcaaacaggagttggatgacattttgaaattcgggaccgaagagttgttcaaagacgaaaatgaaggagaaaacaaggaagaggacagctccgtcattcattacgacaacgaagcgatcgcgagactcctcgatagaaaccaggacgccactgaagacaccgacgtccagaacatgaacgaatatttgtctagcttcaaggtagcccagtatgttgtccgcgaagaggacaaaattgaagagatagagcgagaaatcataaagcaggaagaaaacgtcgatccggactattgggagaaactgctacggcaccactatgaacagcaacaggaagacttagctaggaacctgggcaaagggaagagagtccggaagcaggtgaattacaacgatgctgctcaggaggaccaggataatcaaagcgagtacagtgttggcagtgaggaggaagacgaagattttgacgagcggcctgaggggcggcggcagtctaagagacagctcaggaacgaaaaggataagcccttaccccctctgctcgcccgggtcgggggcaatatcgaggtcctgggcttcaacacgcgccagagaaaggcctttctgaatgctgtgatgagatgggggatgccccctcaggatgctttcacgacccagtggctcgtgagagacctgagaggcaaaacagagaaagagttcaaagcgtacgtcagccttttcatgcggcacctttgtgagccaggagccgatggttccgagactttcgcggacggggttccgcgtgaagggctgagtcggcagcaggtactaacccgaataggtgtgatgagcttagtgaaaaagaaggtccaggaatttgagcatataaatggcagatggtctatgcctgagttgatgccggaccctagtgcggattctaagcgctcttcccgagcttccagcccgactaagacttcacctaccacaccagaagctagcgccaccaatagcccctgcacttctaagccagccacgccagcgccttcggagaagggtgaaggcattaggacaccgcttgagaaggaagaagccgagaatcaagaggaaaaaccagagaaaaactcccgtatcggagaaaagatggaaacagaggccgacgcaccttcacccgccccttcattgggagagcgccttgagcctaggaaaatccctctggaggacgaagtaccaggcgttccgggggaaatggagcccgagcccggatatcgcggcgaccgagaaaaaagtgcaacagaatctacacctggcgagagaggagaggagaagcccctagacggtcaggagcatcgggaacgccccgagggggagaccggcgacctgggaaaaagggaggacgttaaaggcgacagggaactccgacccgggccaagggatgagccccgcagcaatggcaggcgggaggaaaagacggagaagcctaggtttatgttcaatatagcggatgggggcttcacagagctgcacactttgtggcagaatgaggagcgggctgcgatcagcagtggtaaactgaacgaaatttggcataggcgccacgattactggctcctggccggtatcgtgctccacggttatgctcgatggcaggatatccagaacgacgctcaatttgccatcattaatgaaccattcaagactgaggctaacaaaggtaactttctggaaatgaaaaacaagtttctagcgaggcgatttaagctcctggaacaggccctggtaatcgaagaacagctgagaagggctgcctatctcaatctctcgcaggaacctgcccatcctgctatggccctgcatgccagatttgctgaagctgagtgtctcgcagaatcccaccagcacttaagtaaagaatctctcgcaggcaataaaccagcaaatgctgtgcttcataaggtcctgaaccaattagaagagctcctgtctgatatgaaagctgacgtgaccagactcccagccacgttgtccagaattcctccgatcgccgctaggctgcagatgtctgagagatctatactctcgcgcctcgcctcaaagggcaccgagccccacccgacccccgcatatccccccggcccatatgccacgccccctggttatggtgcagcattctcggccgccccagttggggcgctcgccgccgcaggggccaattatagccagatgcccgcggggagttttataacggccgccacaaatggtcccccagtgctcgtgaaaaaggaaaaagaaatggtgggggctctggtgtccgatggactggacagaaaggagccgcgggcaggcgaagtgatctgcatcgacgattag

SEQ ID NO: 21268 - DNA, 6003 bp, Artificial Sequence
  derived and/or modified sequence
atgaaggctgctgacaccgtcatcctgtgggcccggagcaagaatgaccagctgcgcatctccttccccccaggcctgtgctggggagacaggatgccagacaaggatgacatccggctgctgcccagcgccctgggcgtgaagaagaggaagaggggccccaagaagcagaaggagaacaagccaggcaagcccaggaagaggaagaagagggacagcgaggaggagtttggaagtgaaagagatgagtaccgggagaagtctgagagcggcggctctgaatatggaactggacctggcaggaagagaagaaggaagcaccgggagaagaaggagaagaagaccaagaggaggaagaagggggagggagatggcggccagaagcaggtggagcagaagagcagcgccaccctgctgctgacctggggcctggaggatgtggagcacgtgttcagcgaggaggactaccacaccctgaccaactacaaggccttcagccagttcatgaggcccctgattgccaagaagaaccccaagatccccatgagcaagatgatgaccatcctgggcgccaagtggagggagttcagcgccaacaaccccttcaagggcagcgctgctgctgtggccgctgctgctgctgctgctgctgctgctgtggccgagcaggtgtctgctgctgtgagcagcgccacccccatcgcccccagcggccccccagccctgcccccacctcctgctgctgacatccagcccccacccatccggcgggccaagaccaaggagggcaagggccctggccacaagaggaggagcaagagcccccgggtgcctgatggcaggaagaagctgcggggcaagaagatggcccccctgaagatcaagctgggcctgctgggcggcaagaggaagaagggcggcagctatgtgttccagagtgatgagggccctgagcctgaggccgaggagagtgacctggacagcggctctgtgcacagcgccagcggccgcccagatggccctgtgaggaccaagaagctgaagaggggccggcccggcaggaagaagaagaaggtgctgggctgcccagctgtggccggggaggaggaggtggatggctatgaaacagaccaccaggactactgtgaggtgtgccagcagggcggggagatcatcctgtgtgacacctgcccccgggcctaccacctggtgtgcctggaccctgagctggaccgggcccctgagggcaagtggagctgcccccactgtgagaaggagggcgtgcagtgggaggccaaggaggaggaggaggagtatgaggaggagggggaggaggagggggagaaggaggaggaggatgaccacatggagtactgccgggtgtgcaaggatggaggagagctgctgtgctgtgatgcctgcatcagcagctaccacatccactgcctgaacccccccctgcctgacatccccaacggggagtggctgtgcccccgctgcacctgccctgtgctgaagggccgggtgcagaagatcctgcactggcgctggggcgagccccctgtggccgtgcctgccccccagcaggctgatggcaacccagatgtgcccccaccccggcccctgcagggccgctctgagcgggagttctttgtgaagtgggtgggcctgagctactggcactgctcctgggccaaggagctgcagctggagatcttccacctggtgatgtacagaaactaccagaggaagaatgacatggatgagcccccacccctggactatggcagcggagaagatgatggcaagagtgacaagaggaaggtgaaggacccccactatgcagagatggaggagaagtactaccgcttcggcatcaagccagagtggatgacagtgcaccgcatcatcaaccacagcgtggacaagaagggcaactaccactacctggtgaagtggagggacctgccctatgaccagagcacctgggaggaggatgagatgaacatcccagaatatgaggagcacaagcagagctactggaggcaccgggagctgatcatgggagaggaccctgcccagcccaggaagtacaagaagaagaagaaggagctgcagggagatggcccccccagcagccccaccaatgaccccaccgtgaagtatgagacccagccccgcttcatcacagccaccggcggcaccctgcacatgtaccagctggagggcctgaactggctgcgcttctcctgggcccagggcacagacaccatcctggctgatgagatgggcctgggcaagaccatccagaccatcgtgttcctgtacagcctgtacaaggagggccacaccaagggccccttcctggtgtctgcccccctgagcaccatcatcaactgggagcgggagttccagatgtgggcccccaagttctacgtggtgacctacacaggagacaaggacagccgggccatcatccgggagaatgagttctcctttgaggacaatgccatcaagggcggcaagaaggccttcaagatgaagcgggaggcccaggtgaagttccacgtgctgctgaccagctatgagctgatcaccatcgaccaggccgccctgggcagcatccgctgggcctgcctggtggtggatgaggcccaccggctgaagaacaaccagagcaagttcttccgggtgctgaatggctacaagattgaccacaagctgctgctgaccggcacccccctgcagaacaacctggaggagctgttccacctgctgaacttcctgaccccagagcgcttcaacaacctggagggcttcctggaggagtttgctgacatcagcaaggaggaccagatcaagaagctgcatgacctgctgggcccccacatgctgcggcggctgaaggcagatgtgttcaagaacatgcctgccaagacagagctgattgtgcgggtggagctgagccccatgcagaagaagtactacaagtacatcctgaccaggaactttgaggccctgaacagcagaggaggcggcaaccaggtgtccctgctgaacatcatgatggacctgaagaagtgctgcaaccacccctacctgtttcctgtggccgccatggagagccccaagctgcccagcggggcctatgagggcggggccctgatcaagagcagcggcaagctgatgctgctgcagaagatgctgaggaagctgaaggagcagggccaccgggtgctgatcttcagccagatgaccaagatgctggacctgctggaggacttcctggactatgagggctacaagtatgaaagaattgatggcggcatcactggagccctgcggcaggaggccatcgaccgcttcaatgcccctggggcccagcagttctgcttcctgctgagcacccgggccggcggcctgggcatcaacctggccacagctgacaccgtcatcatctttgacagcgactggaacccccacaatgacatccaggccttcagccgggcccacagaattggccaggccaacaaggtgatgatctacagatttgtgacccgggcctctgtggaggagcgcatcacccaggtggccaagaggaagatgatgctgacccacctggtggtgcggcccggcctgggcagcaaggccggctccatgagcaagcaggagctggatgacatcctgaagtttggaacagaggagctgttcaaggatgaaaatgaaggagagaacaaggaggaggacagcagcgtcatccactatgacaatgaggccatcgcccggctgctggacaggaaccaggatgccacagaggacacagatgtgcagaacatgaatgagtacctgagcagcttcaaggtggcccagtatgtggtgcgggaggaggacaagattgaggagattgaaagagagatcatcaagcaggaggagaatgtggaccctgactactgggagaagctgctgcggcaccactatgagcagcagcaggaggacctggccaggaacctgggcaagggcaagagggtgaggaagcaggtgaactacaatgatgctgcccaggaggaccaggacaaccagagcgagtacagcgtgggcagcgaggaggaggatgaggactttgatgagaggcctgagggccggcggcagagcaagaggcagctgagaaatgagaaggacaagcccctgccccccctgctggcccgggtgggcggcaacatcgaggtgctgggcttcaacacccggcagaggaaggccttcctgaatgctgtgatgcgctggggcatgccaccccaggatgccttcaccacccagtggctggtgcgggacctgcggggcaagacagagaaggagttcaaggcctacgtgtccctcttcatgaggcacctgtgtgagcccggggctgatggcagcgagacctttgctgatggagtgccccgggagggcctgagccggcagcaggtgctgacccgcatcggcgtgatgagcctggtgaagaagaaggtgcaggagtttgagcacatcaatggccgctggagcatgcctgagctgatgccagaccccagcgctgacagcaagaggagcagccgggccagcagccccaccaagaccagccccaccaccccagaggccagcgccaccaacagcccctgcaccagcaagccagccaccccagcccccagcgagaagggggagggcatccgcacccccctggagaaggaggaggccgagaaccaggaggagaagccagagaagaacagcagaattggagagaagatggagacagaagcagatgcccccagccctgcccccagcctgggggagcggctggagcccaggaagatccccctggaggatgaggtgcctggggtgcctggagagatggagcctgagcccggctacagaggagaccgggagaagagcgccacagagagcaccccaggagagcggggggaggagaagcccctggatggccaggagcaccgggagaggcctgagggggagactggagacctgggcaagcgggaggatgtgaagggggaccgggagctgcggcccggccccagagatgagcccaggagcaatggaagaagagaggagaagacagagaagccccgcttcatgttcaacattgctgatggcggcttcacagagctgcacaccctgtggcagaatgaggagagagctgccatcagcagcggcaagctgaatgagatctggcacagaagacatgactactggctgctggccggcatcgtgctgcacggctacgcccgctggcaggacatccagaatgatgcccagtttgccatcatcaatgagcccttcaagacagaggccaacaagggcaacttcctggagatgaagaacaagttcctggcccggcgcttcaagctgctggagcaggccctggtgattgaggagcagctgcggcgggccgcctacctgaacctgagccaggagcccgcccacccagccatggccctgcacgccaggtttgctgaggctgaatgtctggccgagagccaccagcacctgagcaaggagagcctggccggcaacaagccagccaatgctgtgctgcacaaggtgctgaaccagctggaggagctgctgagtgacatgaaggcagatgtgacccggctgcctgccaccctgagccgcatcccccccatcgccgcccggctgcagatgtctgagaggagcatcctgagccggctggccagcaagggcacagagccccaccccaccccagcctacccacctggcccctatgccaccccacctggctatggagctgccttctctgctgcccctgtgggcgccctggccgccgccggggccaactacagccagatgcctgctggcagcttcatcacagctgccaccaacggcccccctgtgctggtgaagaaggagaaggagatggtgggcgccctggtgtctgatggcctggacaggaaggagccccgggccggggaggtgatctgcattgatgactag

SEQ ID NO: 21269 - DNA, 6003 bp, Artificial Sequence
  derived and/or modified sequence
atgaaggccgccgacaccgtgatcctgtgggcccggagcaagaacgaccagctcagaatctccttcccaccaggtctatgttggggggatcggatgccagacaaagacgacattaggctcctgccctctgccctgggggtgaaaaaaaggaagcgcggacctaaaaagcagaaagaaaacaaacctggtaaaccaaggaagagaaagaagcgggactccgaagaggaattcggctctgaaagagatgaatatcgagagaagtcagagtccgggggaagtgaatatggcacgggccccggaagaaaacgtcgtaggaagcacagagaaaaaaaggagaaaaagacgaagaggagaaaaaagggagaaggtgacggcgggcagaaacaggttgagcagaaaagctcagctacactacttttgacttggggcctggaggacgtggagcacgtcttctctgaggaggactatcacacgctgaccaactacaaagcattctctcagtttatgcgcccacttatcgcgaaaaagaaccctaaaataccgatgagtaagatgatgacaattttgggggctaaatggcgcgaatttagcgctaataatccattcaaaggaagtgctgccgccgtcgccgcagcagccgccgccgcggcagctgcagtggccgagcaggtcagcgccgcagtaagcagtgccacacccatcgctcccagcggccctcctgccctgcctccccccccagccgctgacatccagccacctcctatcaggagagctaagacaaaagaaggaaaggggccagggcacaagcgaaggagcaagtcgccaagggtgcccgatggcagaaagaagcttagagggaagaaaatggctccactcaagatcaagctgggcctgctcggagggaaaagaaagaagggaggaagttatgtttttcagtcagacgagggaccagagcccgaggcggaagagtctgacctggacagcggtagcgtccacagcgcatctggaaggcctgacggacctgtgagaaccaagaaactgaagcggggtcgccccggtagaaagaagaagaaagtgctgggttgtccagcggtggcgggcgaggaggaagtagatggctatgagacagaccaccaggactattgtgaggtgtgccagcagggaggcgagataattctttgtgacacttgcccgcgggcctaccatttggtgtgtctcgaccctgagcttgatcgcgctcctgagggaaaatggagctgcccccactgtgaaaaggagggcgtgcaatgggaagcaaaagaagaggaggaggagtatgaggaagagggagaagaagagggggagaaggaggaagaggacgaccacatggaatactgtagggtctgcaaggacggcggagaactactatgctgcgatgcctgcatcagttcctatcatattcattgtcttaatccacccctccccgacattccaaatggcgaatggttatgccctcggtgcacctgccctgtgctcaaggggagagttcagaaaattctgcattggcggtggggcgagcctccggtagcagtgcccgccccccagcaggctgacggtaatcccgatgtccccccgccccgaccccttcagggacgatccgagcgggaatttttcgtgaaatgggtgggcctgtcttactggcattgctcctgggctaaagagctgcagctcgagatatttcaccttgtcatgtatagaaactatcagagaaaaaacgatatggacgaacccccccctctggattacgggagcggagaagacgatggcaaatcggacaagcggaaggtgaaggaccctcactatgccgagatggaagaaaagtattataggttcggcataaagcctgagtggatgacagtacacaggataattaaccattctgtggacaaaaagggcaattaccactaccttgtaaagtggagggatctgccgtacgatcagtccacatgggaggaggatgaaatgaatatcccggaatatgaggagcataagcagtcttattggcgacaccgggagctgatcatgggtgaggacccagcgcagcccagaaaatataaaaagaaaaaaaaggagttacagggagatggtcccccctcttcaccgaccaacgatcccactgtgaaatacgaaactcagccaagatttattactgcgactggcggtaccctgcacatgtaccagctagagggactcaactggttgcgctttagctgggcccagggcactgatacaatcctagcagatgaaatgggattaggcaaaaccattcagaccatcgttttcctgtacagcctttataaagaggggcacaccaaaggtccgtttctggtgagtgctccccttagcaccatcatcaattgggagcgcgagttccagatgtgggccccgaaattctacgtggtcacctacaccggcgataaggactcccgcgctattattcgggaaaacgaattttcatttgaggacaatgctataaaaggcggaaaaaaggcctttaagatgaaacgagaagcacaggttaaattccatgtcctgctgacttcttacgagctcatcaccattgaccaggcagcgctcggctccatccgatgggcttgtctggtggtggacgaggcccataggttgaaaaataaccagtccaaattctttagagtgctgaacggttacaaaattgaccacaaattactgttgacagggaccccgttgcaaaacaatctggaggagctgttccacctgctgaattttcttacacctgaaagattcaataacctcgaaggtttccttgaggagtttgctgacatctcaaaagaggaccaaattaagaagcttcatgacttgttaggacctcacatgctccgccggctgaaagcagacgtatttaaaaatatgcccgctaaaaccgagcttatagtaagggtggagctatcgcctatgcagaaaaaatattacaaatacatactgacacggaattttgaagcactcaactccagaggcggcggcaatcaggtctctctgctgaacatcatgatggatctgaaaaaatgttgcaaccatccctatctttttcctgttgcggccatggagagtcccaagttgccctccggagcgtatgagggtggcgccctgataaaatctagtggcaaactgatgctgctccaaaaaatgctgcgcaagctgaaagagcaaggacatagggtgttaattttctcacagatgaccaaaatgctggacctgctggaagactttttagattatgaggggtacaaatacgagcgcatcgacggtggcattactggagctttgaggcaagaggcgattgataggttcaacgcccctggggcacagcagttctgctttttactctccacacgcgccggcggcctcggaatcaatctcgctaccgcagacacagtaatcattttcgattccgattggaacccccataacgatatccaggcctttagccgggctcacaggattggccaggcaaacaaagttatgatctacagatttgtgacccgagcttcagtggaggagcggatcacccaggttgcaaagaggaaaatgatgctgacacacctcgttgttcgcccgggtctgggctcaaaggcaggctcaatgtccaagcaggagcttgacgacatcctgaagttcggcacagaagagttgttcaaggacgagaacgaaggggagaacaaggaggaggattctagcgtgattcactacgacaatgaggctatagccaggctgctcgaccggaatcaggacgctacagaggatacagatgtacaaaacatgaatgaatacctgtctagctttaaggtcgcacagtacgttgtgagggaagaagataagatcgaagaaatcgaaagggaaatcattaaacaggaggaaaatgtcgaccccgactactgggaaaagctattgcgccaccattacgaacagcagcaggaagacctggcgagaaatctgggtaaaggcaagcgagtgcggaaacaggtgaactataatgacgcagcacaggaggatcaggataatcagagcgagtattccgttggctcagaagaagaagacgaagactttgatgaaaggcccgagggacgtcggcagagcaaacggcagctcagaaatgagaaggataagcccctgccccccctccttgccagggtaggcggcaacatcgaagtactcggcttcaatactcgacaaaggaaggccttcttaaatgccgtgatgcggtgggggatgcctccacaagacgccttcaccactcaatggctcgttagggacctgagggggaagaccgagaaggagtttaaagcctatgtgagccttttcatgcgtcatctctgtgagcccggtgctgacgggagcgagacattcgccgacggagtgcctcgcgagggcttgagcaggcagcaagtgttgactagaataggcgtaatgagtctcgtgaaaaaaaaggttcaggagtttgaacatatcaatggaagatggagcatgcccgagctgatgcctgacccctctgcagatagtaagcgatccagccgtgccagttcacccactaaaacctcccctactacgccagaggcctccgccacaaactcaccttgtaccagtaaacccgctacacccgctcccagcgagaagggcgagggcatccgcaccccactggaaaaagaagaagctgaaaaccaggaagagaaaccggaaaagaactctcggattggcgagaaaatggaaaccgaagctgacgccccatctcccgccccaagcctgggcgagaggttggagccccgcaagatcccccttgaagacgaggttccaggggtcccgggcgagatggagcccgagcccggttacagaggcgaccgcgaaaaaagcgcaacagagtcaacccccggagagcgcggcgaagaaaagcccttggatggacaggagcatagagagcgccctgagggggaaacgggggacctgggaaaacgcgaagacgtcaaaggcgaccgggagctcaggcccggtccgagagacgagccccggagcaacggcaggagagaggaaaagactgagaaaccccgatttatgttcaacatagcggatggcggctttacagagctgcacactctgtggcagaatgaagaacgtgcagctatctcgtccggcaagctaaacgagatctggcacaggcgacacgattattggctcttggctggtattgtgctgcacggctacgccagatggcaagacatacaaaacgatgcccagttcgcgataattaatgaacccttcaagacagaggctaataagggcaatttcctggagatgaagaacaagtttctagctaggcgattcaaactgttggagcaggcccttgtgatcgaggaacagctgcgccgcgcagcttacctgaatctaagccaggaacccgctcatcccgctatggcactgcacgcgagattcgctgaggcagaatgcttggctgaatcacaccagcacctgtccaaggaaagcctggccggcaacaagcctgccaatgccgtgctgcataaagtgttgaaccagctcgaagagctgttgagcgatatgaaggcggacgtcacaagacttcctgctacactgagtcgcataccacccatagcggctcgcttgcaaatgtctgaacggagtattctatcccgcctagcgtctaagggcaccgaaccccaccctactccagcgtatcctccaggcccgtacgcaacgcctccaggctacggggccgccttcagtgcagcgcctgtgggggcactcgccgcggcgggggccaactactcccaaatgccagccggcagcttcataacagccgctacaaatgggccaccggttctggttaagaaggaaaaggagatggtgggagcgttggtgtccgacggcctggaccggaaggagccacgggccggagaggtcatttgcatcgacgattag

SEQ ID NO: 21270 - DNA, 6002 bp, Artificial Sequence
  derived and/or modified sequence
atgaaagctgccgacacggtcattctctgggcaaggagcaagaatgatcaacttaggatttcctttccaccaggactttgttggggggaccggatgccagataaagatgatattcgtctcctgccgtctgctctcggagtgaaaaaaagaaagcgtggtccaaaaaagcagaaagagaataagcctggaaagcctcgcaagcggaagaaacgcgactcggaagaagaatttgggagcgaaagagacgaatacagagagaagtctgaatctggcggttccgagtacgggaccgggcctggccgtaagcgcaggagaaaacatagagagaagaaggaaaagaagaccaagagacggaagaagggtgaaggagacggcggacagaaacaggtagaacagaagagctcagccaccctccttctgacatggggattagaagatgtggaacatgtctttagcgaggaggattatcatacactgacaaactacaaggcctttagccagtttatgcgaccgttaattgcaaaaaagaatccgaaaatcccaatgtccaagatgatgacgatcctgggcgcaaagtggcgggagttttccgccaataaccctttcaaggggtcagctgctgctgtggccgcagcagcagcagctgctgcagccgctgtggccgagcaggtcagcgcagcagttagttctgcaactccaatcgccccatcaggcccaccagccctgcctccacctccagccgcagatatccagcctccacccataaggagggccaagaccaaggagggaaaaggtcccggacacaaacggagaagtaagagtccgagagttccagacggccgtaagaagcttcgtggcaagaagatggccccattaaagataaaactggggctgctcggcggaaaaagaaaaaaaggcggtagttatgtgtttcagtctgacgagggcccagaacctgaagctgaggaatccgatctggactctggttctgtgcacagcgcatcaggcagacctgacggtccagtccggacaaagaaattgaaacgagggaggcccggacggaagaaaaagaaggtgctcggatgtcccgcagtcgccggtgaggaggaggtcgacggctatgagacagaccatcaagactactgtgaggtttgccagcaaggaggcgaaattattctctgtgacacctgtcctagagcctatcaccttgtgtgccttgatcccgagcttgacagagcccctgaggggaagtggagttgtccacactgcgagaaggagggcgttcaatgggaagctaaggaggaggaggaagaatatgaggaggagggcgaagaagagggggagaaggaggaggaggacgatcacatggagtactgcagggtgtgcaaggacggcggtgagctgctgtgttgcgacgcatgcatctccagttatcacatacactgtctcaaccctcctctgcccgatatcccaaacggagaatggctctgcccaagatgcacctgccctgttctgaagggcagggtacagaaaattctgcactggcgctggggggagcctcccgtggccgtgccagcacctcagcaggcagatggtaacccggatgtcccacctccacgacctctgcaaggcagatctgagagagaattcttcgtaaaatgggtggggctcagctactggcactgcagctgggcgaaggagctacagcttgagatctttcacctcgtgatgtatcggaactaccagcgcaaaaacgatatggacgagccccctcccctggactacgggagcggagaagacgacgggaaatccgacaagcggaaggtcaaagacccccattacgccgaaatggaagaaaagtattacagatttgggatcaagccagaatggatgaccgtgcatcgaatcataaatcactcagtggataagaaggggaattaccattatctggtgaagtggcgcgacctgccatacgatcaatctacgtgggaggaagatgaaatgaatattccagagtatgaagaacataaacagtcatactggcgccaccgggaactgattatgggtgaggaccctgcgcagcctcgcaagtacaaaaagaaaaaaaaggaattgcagggcgacggcccacccagtagtcccacaaacgatcctacagtcaaatatgaaacccagcctagatttataaccgcaacaggaggaaccctccatatgtaccagctagagggactcaattggctcagattctcctgggcacagggtacagatacgattcttgcagacgagatggggctgggaaaaactatccagacaattgtgtttctgtatagcctctacaaggagggacacactaagggcccattccttgtgtcagcccctttgtctaccatcatcaactgggagcgggagttccagatgtgggcccctaagttttacgtggtaacgtatacgggcgacaaggattcccgcgctataattcgcgagaatgaattttcattcgaagataacgccattaaggggggtaaaaaggccttcaagatgaaacgggaagctcaagttaagtttcacgtgctgctcacctcgtacgagctcattaccatcgaccaagctgctttgggatccatcagatgggcatgtcttgtggttgacgaagctcataggctgaagaataaccagagcaagttcttcagggttcttaatggctataagattgaccataaattgcttctgacagggacacctctccaaaataatctggaggagctgttccacttactcaatttcctgacaccagagagatttaataaccttgagggatttcttgaagagttcgcagacataagcaaagaagaccaaatcaaaaaactgcacgatctcttaggtccgcatatgctgcggcgactgaaggccgacgtgtttaaaaacatgcctgccaagacggagctgatcgttcgggtagagttatcccccatgcagaagaagtactataagtacatcttgacaagaaacttcgaggccctaaactctcgaggcggtggcaaccaggtgtctctcctgaatataatgatggatctcaaaaaatgctgtaatcatccataccttttcccagtggcagctatggagtctcctaaattgcctagcggagcatatgagggcggagcactgatcaagagcagcggcaagctaatgctactgcagaaaatgctgcgtaaactgaaggagcaaggccatcgggtgttgatcttttcccagatgacaaaaatgttggacctcttggaggacttcctggactacgaggggtacaaatatgagagaatagacgggggtatcaccggcgctctaaggcaggaagcgatcgacaggtttaatgcccctggcgcacagcagttttgcttcttgctgtctacccgggcaggcggtctgggcattaatctcgccaccgccgatacagttatcatttttgacagcgattggaacccccacaatgatatacaggcattttcaagagcacaccgcattgggcaggccaataaggtgatgatctacagatttgtgacacgtgcgtctgtggaggagaggataacccaagtggcaaagaggaagatgatgcttactcatcttgtcgtcagaccaggactcggaagtaaagccggaagtatgtcaaaacaggaactcgatgatattctgaagttcgggactgaggagctcttcaaagatgagaacgaaggtgagaacaaagaagaggactcttctgtgatccactatgacaacgaggcaatcgcacgactcctcgatcgaaaccaggatgctaccgaggataccgatgtgcagaacatgaacgagtacctaagcagttttaaggtggcacagtacgtggttagggaggaagacaagattgaagaaattgaacgagagatcattaaacaggaggaaaatgtcgaccccgactactgggaaaaactgctccggcaccactatgagcagcagcaggaggacctggcacgcaacctggggaagggcaagagagtgaggaagcaggttaattacaacgacgctgcccaggaggaccaagataaccagagcgagtatagtgttggttccgaggaggaggatgaagacttcgacgagcgacccgagggaaggcggcagtccaagcggcaacttaggaacgagaaagacaaacctcttccccctctgttggctcgtgtgggtgggaacatagaggttctgggattcaataccaggcaaagaaaagcattcctgaacgctgtgatgcgttggggcatgcccccacaggatgcttttaccactcagtggctcgtgcgcgacctccgcggaaagacagagaaagaatttaaagcctacgtgtctctttttatgagacacctgtgcgagccaggggctgacggaagcgagactttcgccgacggagtgcctcgagaggggttatctcggcagcaagtcctgactcgaataggcgttatgtctctcgtgaagaagaaagtgcaagaatttgagcacattaacgggcgttggtcaatgcccgaactcatgccagacccatccgcagactctaaacgaagtagtcgtgcatcatcgccaaccaagacctcccccactacccccgaagccagcgccacaaactccccctgtacctccaaacccgcaactccagcaccatcagaaaaaggcgaagggatcagaacacccctggagaaagaggaagctgagaaccaggaagagaaacctgaaaaaaattctagaatcggagagaaaatggagaccgaagccgatgcaccgagtccggcaccaagcctgggcgagcggctcgaacccaggaaaataccactggaggacgaagtccccggtgttcctggcgaaatggagcccgaaccaggttacagaggcgaccgcgagaaatctgcaacagaatctaccccaggggagcgcggagaggaaaagccgctggacggtcaagagcatagagaacgaccagaaggcgaaacaggtgatctgggtaaaagagaagatgttaaaggcgatcgggagttacggccaggtcctagggatgaaccacgaagcaatgggagaagggaggaaaagacagagaagcccaggttcatgtttaatatcgcagacggaggatttaccgaactgcacacgctctggcagaatgaagagagggctgccatctcctccggcaagttaaatgagatttggcatcgcagacatgattactggctacttgccggtattgtcttgcacggctacgctaggtggcaagacattcaaaatgacgctcagtttgccattattaatgagcccttcaagaccgaggccaacaaagggaactttctggaaatgaagaataaattcctggccaggcgattcaaactccttgaacaggcactggtgattgaggagcagctgagacgggcagcatatcttaatttgtcccaggagcctgcacacccagccatggcgttacacgcaaggttcgctgaggccgagtgcttggccgagtctcatcagcatctgagcaaagagtcattggcagggaacaagcccgctaacgcagtacttcacaaagtgctgaatcaattagaagaactcctttctgacatgaaagctgatgtgactcggctcccggctaccctgagtcgtatcccgcctattgctgctcgcctgcagatgtcagaaaggagtattttgtctaggctggctagcaaagggaccgagccccaccctacacctgcttatcctcctggcccttacgctaccccacccggatatggagcggcttttagtgctgctccggtgggggcactggctgccgcaggtgctaactacagtcaaatgcccgcaggctcattcattaccgccgctaccaatggacctcccgtactggtgaagaaagagaaagaaatggttggagccctggttagtgatggccttgacaggaaggagcccagagcgggagaggtgatctgcattgacgacta

SEQ ID NO: 21271 - DNA, 7328 bp, Artificial Sequence
  derived and/or modified sequence
atatggaggtgaagggtgagatcgggaaacaaagggtatggccccctagttcccaaagggagcagggagatgggaatagaattgaaggtaggttttaggctacttgggaggaggaatatttaggtaattgtggagactttctcctgtgtgatgaaggcggcagacactgtgatcctgtgggcaagaagtaaaaatgaccagctgaggatttcttttcctccaggactgtgttggggtgacaggatgcctgataaggatgacattcggctgctgccgtcagcattgggtgtgaagaagagaaaacgaggacccaagaagcagaaggagaacaagccaggaaaaccccgaaaacgcaagaagcgtgacagtgaggaggaatttggttctgagcgagatgagtaccgggagaagtcagagagtgggggcagtgaatatggaaccggaccgggtcggaaacgaagaaggaagcaccgagaaaaaaaggagaagaagacaaagcggcggaaaaagggggagggagatggggggcaaaagcaagtggaacagaagtcatcagcaactctgcttctgacctggggcctggaggatgtggagcatgtgttctctgaggaggattaccacacgctcaccaactacaaagccttcagccagttcatgaggcccctaattgctaagaagaatcctaagatcccaatgtctaagatgatgaccatccttggggccaaatggagagagttcagtgccaacaaccccttcaaggggtcagcagctgctgtggcggcggcagcggcagcagcagcagcagctgtagctgagcaggtgtcagctgctgtctcgtcggccacccccatagcaccctccggaccccccgcccttccaccaccccctgctgctgatatccagcccccacccatccgaagagccaaaaccaaagagggcaaaggtccaggccataagaggcggagtaagagcccccgagtgcctgatggacgcaagaagcttcggggaaagaaaatggcaccactcaaaataaaactagggcttctgggtggcaagaggaagaaaggaggctcgtatgtttttcagagcgacgaaggtcctgaaccagaggctgaggaatcagacctggacagtggcagtgtccacagtgcctcaggccggcctgatggccctgtccgcaccaagaaactaaagagaggccggccaggaaggaagaagaagaaggtcctgggctgtcctgcagtggccggggaggaggaggttgatggctacgagacggatcaccaggattactgtgaggtgtgccagcagggtggggaaattattctgtgtgacacctgccctcgtgcctaccacctcgtctgccttgatcctgagcttgaccgggctccagagggcaaatggagctgccctcactgtgagaaggagggggtccagtgggaggccaaggaggaagaagaagaatacgaagaggagggagaggaagaaggggagaaggaggaggaggatgatcacatggagtactgccgcgtatgcaaggacggcggggagctcctgtgctgtgacgcgtgcatctcctcctaccacattcattgtctaaaccctcccctgcctgacattcccaatggtgaatggctgtgtccccgatgcacatgccccgtgctgaagggtcgagtgcagaagatcctacattggcggtggggggagccacctgtagcagtgccagcccctcaacaggcagatggaaatccagatgtcccacccccccgtcctcttcaaggcagatcagagcgagagttctttgtcaagtgggtaggactatcctactggcactgctcctgggccaaggagcttcagctggaaatcttccatttggttatgtatcgaaactaccagcggaagaatgacatggatgagcccccacccctggactatggctccggcgaggatgatgggaagagcgacaagcgtaaagtgaaagacccgcactatgctgagatggaggagaagtactatcgttttggcatcaagccagagtggatgaccgtccaccgcatcatcaaccacagtgtggataaaaaggggaattaccactatctagtaaaatggagggacttaccatatgaccagtccacgtgggaggaagatgaaatgaatatccctgaatacgaagaacataagcaaagctactggagacaccgagaactaattatgggggaagaccctgcccagccccgcaagtataagaagaagaagaaggagctacagggtgatgggcctcccagttctcccactaatgatcctaccgtgaaatatgagactcagccacggtttatcacagccactggaggcaccctgcacatgtatcagttggaagggctgaactggctacgcttctcctgggcccagggcactgacaccattctagctgatgagatggggctaggcaagaccatacaaaccatcgtcttcctctactcactctacaaggagggccacacaaaaggtcccttcctggtgagtgccccactctctaccatcattaactgggagcgggagttccagatgtgggcacccaaattctatgtggtgacatacacgggtgacaaggacagccgggccatcattcgtgagaatgaattctcctttgaggacaatgccatcaaagggggcaagaaagcttttaagatgaagagggaggcacaggtgaagttccatgttctcctgacatcgtatgagctgatcaccattgatcaggcagcacttggttccatccgctgggcctgtcttgtggtagatgaggcccatcgactcaagaacaaccagtccaagtttttcagggttctcaatggttacaagatagatcataagttgctgctgacaggaaccccattgcagaataatctggaggagctcttccatctcctgaacttcctcaccccagagagatttaacaacttggagggcttcctggaggagtttgctgacatatccaaagaggaccagatcaagaaactgcatgatttgctggggccacacatgctgcggagactcaaggcagatgtctttaagaacatgccagccaagacagagctcatcgttcgggtggagctaagccccatgcagaagaaatactacaaatacatcctgactcgaaattttgaggccttgaattcacgaggtggtgggaaccaggtgtcgctgcttaatatcatgatggatcttaagaagtgctgcaaccatccatacctttttcccgtggctgctatggagtcccccaaactccccagtggggcttatgagggtggggcacttattaagtcgtctgggaagctcatgctgctccagaagatgctgcgaaagctgaaggagcaaggacaccgagtgctcatcttctcgcagatgaccaaaatgttagacttgcttgaggacttcttagactatgaaggctacaagtatgagcgcatcgatggtggtatcacgggtgccctgaggcaggaggccatcgatcggtttaatgctcctggggcccaacaattctgcttcctcctgtccacccgagctgggggcctgggcatcaatctggccactgctgacactgtcatcatctttgattctgactggaacccccataatgacatccaggcctttagccgggctcatcggattggccaggccaacaaagtgatgatttaccggtttgtgactcgcgcgtcagtggaagagcgaatcacacaagtggccaagagaaagatgatgctgacacacctggttgtgcggcctgggctgggctccaaggcaggctccatgtccaagcaggagcttgacgacattctcaaatttggcactgaagagctattcaaggatgaaaacgagggggagaacaaggaggaggacagcagtgtgattcattatgacaatgaggccatcgctcggctgttggaccggaaccaggatgcaactgaggacactgacgtgcagaacatgaatgagtatctcagctccttcaaggtggcacagtacgtcgtgcgggaagaagacaagattgaggaaattgagcgagagatcatcaagcaggaggagaatgtggaccctgactactgggagaagctgctgaggcatcactatgagcaacagcaggaagacctagcccggaatctaggcaagggcaagcgggttcgcaagcaagttaactacaatgatgctgctcaggaagaccaagacaaccagtcagagtactcggtgggttcagaggaggaggatgaagacttcgatgaacgtcctgaagggcgtagacagtcaaagaggcagctccggaatgagaaagataagccactgcctccactgctggcccgagtcgggggcaacattgaggtgctgggcttcaacacccgtcagcggaaggctttcctcaatgctgtgatgcgctgggggatgccaccacaggatgccttcaccacacagtggctggtgcgggacctgaggggcaagactgagaaggagtttaaggcctatgtgtctttgttcatgcgccatctgtgtgagcctggggcagacggctctgaaacctttgccgatggggtccctcgggagggactgagtcgccagcaggtgttgacccgcattggagtcatgtctctcgtcaaaaagaaggtgcaggagtttgagcacatcaatgggcgttggtcaatgccggaactgatgcctgaccccagcgccgattctaagcgctcctccagagcctcctctcctaccaaaacgtctcccaccactcctgaggcttctgctaccaacagtccctgcacctctaaacctgctactccagctccaagtgagaaaggagaaggcataaggacacctcttgagaaggaggaagctgaaaaccaggaggaaaagccagagaagaacagcagaattggggagaagatggagacagaggctgatgcccccagcccagccccatcacttggggagcggctggagccaaggaagattcctctagaggatgaggtgccaggggtgcctggagagatggagcctgaacctgggtaccgtggggacagagagaagtcagccacagagtcgacgccaggagaaaggggggaggagaagccgttggatggacaggaacacagggagaggccggagggggaaacaggggatttgggcaagagagaagatgtaaaaggtgaccgggagcttcgaccagggcctcgagatgagccacggtccaatgggcgacgagaggaaaagacagagaagccccggttcatgttcaatatcgccgatggtggcttcacagagcttcacacactgtggcagaatgaggaacgggcagctatttcctcggggaaactcaatgagatctggcacagaagacatgactattggcttctggctgggattgtcctccatggctatgcacggtggcaggacatccagaatgatgctcaatttgccattatcaacgagccatttaaaactgaagccaataaggggaactttctggagatgaaaaataagttcctggcccggaggttcaagctcctggagcaggcgctggtgattgaggagcagctgcggcgggcggcctacctgaacctgtcgcaggagccggcgcaccccgccatggccctccacgcccgcttcgccgaggccgagtgcctggccgagagccaccagcacctctccaaggagtcgctggcggggaacaagccggccaacgccgtcctgcacaaggttctgaaccagctggaggagttgctgagcgacatgaaggcggacgtgacccgcctgccagccacgctgtcccgaataccccccatcgcagcccgccttcagatgtccgagcgcagcatcctcagccggctggccagcaagggcacggagcctcaccccacaccggcctacccgccgggtccctacgctacacctccggggtacggggcggccttcagcgccgcacccgtaggggccctggccgccgcaggcgccaattacagccagatgcctgcagggtccttcatcacagccgccaccaacggccctccagtgcttgtgaagaaggagaaggaaatggtgggggcattggtgtcagacgggctggatcggaaggagccccgagccggggaggtgatctgtatagacgactgactggatcccaggcctgcccttcacccaggccccgtccccgaggccgacccccagctcaagcgctggggcctgctgccagccctccaccttccccaccccttgggccatcactgggctaggaacccctttgcccctctctgcagctcctctcttcaagaagggccctttgtctttctccactcccacacacctttcccaccaagccttgaagactgtgctggtgagaagaagtctgggtgggagatggctggcagggtcttccaagtaccttcctcccacactgccaagtatacacaacttcccagtaaatggttgtggggaggaaagaggtggagcctccccagccgtttccctgcagaatcagctctgtctcatgtggaagtggagaatcagccttgcctggcctttaggaacttttgtggggaagagagctttgaagagaggagggggactttagagagggatgaaaatgagccctgggagggaggaagggacgaggaggggtggctgcatgttaccgtcccctacctctccccacgtggagggtggagcagttatgagggaggaagtcaactgctgttcagcctcagaataaaggtgccgttcactggctcagttacctcctgtgtaccggcatcttgtgttgggaatgttcccccctccctagggaccaaggaccacccctacaaaaagagtaatggttgggtgatactccctcaagccaaagaggagctccccaacctgttctagggacccaggtaacctagaagggtgggagagaatacaatgggccagatgtggtggaagcccagctctggggctcaggttcctggaagacttctactaccctccctcctcaaggcctggatacagactaaatttgtataagtcaggcaggggacctagtcagggtcttgggagctaccttgtcgttgggaccagagcaaaatagtggagggcaggctagggaaatgtgggcacatcccccctcccaggaggggccggggagagtggcagtttgcatggcgaaccccccacttcctctttgctgccccttcactttcttgctgcccctttcccagtctctcttcacacccactcctggtctgtcctgatcccctcttctgtatcaggtttattggttgtacatataaattatactttcctttctgtgt

SEQ ID NO: 21272 - DNA, 6003 bp, Artificial Sequence
  derived and/or modified sequence
atgaaggccgccgacaccgtgatcctgtgggccagaagcaagaacgaccagctgagaatcagcttcccccccggcctgtgctggggcgacagaatgcccgacaaggacgacatcagactgctgcccagcgccctgggcgtgaagaagagaaagagaggccccaagaagcagaaggagaacaagcccggcaagcccagaaagagaaagaagagagacagcgaggaggagttcggcagcgagagagacgagtacagagagaagagcgagagcggcggcagcgagtacggcaccggccccggcagaaagagaagaagaaagcacagagagaagaaggagaagaagaccaagagaagaaagaagggcgagggcgacggcggccagaagcaggtggagcagaagagcagcgccaccctgctgctgacctggggcctggaggacgtggagcacgtgttcagcgaggaggactaccacaccctgaccaactacaaggccttcagccagttcatgagacccctgatcgccaagaagaaccccaagatccccatgagcaagatgatgaccatcctgggcgccaagtggagagagttcagcgccaacaaccccttcaagggcagcgccgccgccgtggccgccgccgccgccgccgccgccgccgccgtggccgagcaggtgagcgccgccgtgagcagcgccacccccatcgcccccagcggcccccccgccctgccccccccccccgccgccgacatccagcccccccccatcagaagagccaagaccaaggagggcaagggccccggccacaagagaagaagcaagagccccagagtgcccgacggcagaaagaagctgagaggcaagaagatggcccccctgaagatcaagctgggcctgctgggcggcaagagaaagaagggcggcagctacgtgttccagagcgacgagggccccgagcccgaggccgaggagagcgacctggacagcggcagcgtgcacagcgccagcggcagacccgacggccccgtgagaaccaagaagctgaagagaggcagacccggcagaaagaagaagaaggtgctgggctgccccgccgtggccggcgaggaggaggtggacggctacgagaccgaccaccaggactactgcgaggtgtgccagcagggcggcgagatcatcctgtgcgacacctgccccagagcctaccacctggtgtgcctggaccccgagctggacagagcccccgagggcaagtggagctgcccccactgcgagaaggagggcgtgcagtgggaggccaaggaggaggaggaggagtacgaggaggagggcgaggaggagggcgagaaggaggaggaggacgaccacatggagtactgcagagtgtgcaaggacggcggcgagctgctgtgctgcgacgcctgcatcagcagctaccacatccactgcctgaacccccccctgcccgacatccccaacggcgagtggctgtgccccagatgcacctgccccgtgctgaagggcagagtgcagaagatcctgcactggagatggggcgagccccccgtggccgtgcccgccccccagcaggccgacggcaaccccgacgtgcccccccccagacccctgcagggcagaagcgagagagagttcttcgtgaagtgggtgggcctgagctactggcactgcagctgggccaaggagctgcagctggagatcttccacctggtgatgtacagaaactaccagagaaagaacgacatggacgagcccccccccctggactacggcagcggcgaggacgacggcaagagcgacaagagaaaggtgaaggacccccactacgccgagatggaggagaagtactacagattcggcatcaagcccgagtggatgaccgtgcacagaatcatcaaccacagcgtggacaagaagggcaactaccactacctggtgaagtggagagacctgccctacgaccagagcacctgggaggaggacgagatgaacatccccgagtacgaggagcacaagcagagctactggagacacagagagctgatcatgggcgaggaccccgcccagcccagaaagtacaagaagaagaagaaggagctgcagggcgacggcccccccagcagccccaccaacgaccccaccgtgaagtacgagacccagcccagattcatcaccgccaccggcggcaccctgcacatgtaccagctggagggcctgaactggctgagattcagctgggcccagggcaccgacaccatcctggccgacgagatgggcctgggcaagaccatccagaccatcgtgttcctgtacagcctgtacaaggagggccacaccaagggccccttcctggtgagcgcccccctgagcaccatcatcaactgggagagagagttccagatgtgggcccccaagttctacgtggtgacctacaccggcgacaaggacagcagagccatcatcagagagaacgagttcagcttcgaggacaacgccatcaagggcggcaagaaggccttcaagatgaagagagaggcccaggtgaagttccacgtgctgctgaccagctacgagctgatcaccatcgaccaggccgccctgggcagcatcagatgggcctgcctggtggtggacgaggcccacagactgaagaacaaccagagcaagttcttcagagtgctgaacggctacaagatcgaccacaagctgctgctgaccggcacccccctgcagaacaacctggaggagctgttccacctgctgaacttcctgacccccgagagattcaacaacctggagggcttcctggaggagttcgccgacatcagcaaggaggaccagatcaagaagctgcacgacctgctgggcccccacatgctgagaagactgaaggccgacgtgttcaagaacatgcccgccaagaccgagctgatcgtgagagtggagctgagccccatgcagaagaagtactacaagtacatcctgaccagaaacttcgaggccctgaacagcagaggcggcggcaaccaggtgagcctgctgaacatcatgatggacctgaagaagtgctgcaaccacccctacctgttccccgtggccgccatggagagccccaagctgcccagcggcgcctacgagggcggcgccctgatcaagagcagcggcaagctgatgctgctgcagaagatgctgagaaagctgaaggagcagggccacagagtgctgatcttcagccagatgaccaagatgctggacctgctggaggacttcctggactacgagggctacaagtacgagagaatcgacggcggcatcaccggcgccctgagacaggaggccatcgacagattcaacgcccccggcgcccagcagttctgcttcctgctgagcaccagagccggcggcctgggcatcaacctggccaccgccgacaccgtgatcatcttcgacagcgactggaacccccacaacgacatccaggccttcagcagagcccacagaatcggccaggccaacaaggtgatgatctacagattcgtgaccagagccagcgtggaggagagaatcacccaggtggccaagagaaagatgatgctgacccacctggtggtgagacccggcctgggcagcaaggccggcagcatgagcaagcaggagctggacgacatcctgaagttcggcaccgaggagctgttcaaggacgagaacgagggcgagaacaaggaggaggacagcagcgtgatccactacgacaacgaggccatcgccagactgctggacagaaaccaggacgccaccgaggacaccgacgtgcagaacatgaacgagtacctgagcagcttcaaggtggcccagtacgtggtgagagaggaggacaagatcgaggagatcgagagagagatcatcaagcaggaggagaacgtggaccccgactactgggagaagctgctgagacaccactacgagcagcagcaggaggacctggccagaaacctgggcaagggcaagagagtgagaaagcaggtgaactacaacgacgccgcccaggaggaccaggacaaccagagcgagtacagcgtgggcagcgaggaggaggacgaggacttcgacgagagacccgagggcagaagacagagcaagagacagctgagaaacgagaaggacaagcccctgccccccctgctggccagagtgggcggcaacatcgaggtgctgggcttcaacaccagacagagaaaggccttcctgaacgccgtgatgagatggggcatgcccccccaggacgccttcaccacccagtggctggtgagagacctgagaggcaagaccgagaaggagttcaaggcctacgtgagcctgttcatgagacacctgtgcgagcccggcgccgacggcagcgagaccttcgccgacggcgtgcccagagagggcctgagcagacagcaggtgctgaccagaatcggcgtgatgagcctggtgaagaagaaggtgcaggagttcgagcacatcaacggcagatggagcatgcccgagctgatgcccgaccccagcgccgacagcaagagaagcagcagagccagcagccccaccaagaccagccccaccacccccgaggccagcgccaccaacagcccctgcaccagcaagcccgccacccccgcccccagcgagaagggcgagggcatcagaacccccctggagaaggaggaggccgagaaccaggaggagaagcccgagaagaacagcagaatcggcgagaagatggagaccgaggccgacgcccccagccccgcccccagcctgggcgagagactggagcccagaaagatccccctggaggacgaggtgcccggcgtgcccggcgagatggagcccgagcccggctacagaggcgacagagagaagagcgccaccgagagcacccccggcgagagaggcgaggagaagcccctggacggccaggagcacagagagagacccgagggcgagaccggcgacctgggcaagagagaggacgtgaagggcgacagagagctgagacccggccccagagacgagcccagaagcaacggcagaagagaggagaagaccgagaagcccagattcatgttcaacatcgccgacggcggcttcaccgagctgcacaccctgtggcagaacgaggagagagccgccatcagcagcggcaagctgaacgagatctggcacagaagacacgactactggctgctggccggcatcgtgctgcacggctacgccagatggcaggacatccagaacgacgcccagttcgccatcatcaacgagcccttcaagaccgaggccaacaagggcaacttcctggagatgaagaacaagttcctggccagaagattcaagctgctggagcaggccctggtgatcgaggagcagctgagaagagccgcctacctgaacctgagccaggagcccgcccaccccgccatggccctgcacgccagattcgccgaggccgagtgcctggccgagagccaccagcacctgagcaaggagagcctggccggcaacaagcccgccaacgccgtgctgcacaaggtgctgaaccagctggaggagctgctgagcgacatgaaggccgacgtgaccagactgcccgccaccctgagcagaatcccccccatcgccgccagactgcagatgagcgagagaagcatcctgagcagactggccagcaagggcaccgagccccaccccacccccgcctacccccccggcccctacgccaccccccccggctacggcgccgccttcagcgccgcccccgtgggcgccctggccgccgccggcgccaactacagccagatgcccgccggcagcttcatcaccgccgccaccaacggcccccccgtgctggtgaagaaggagaaggagatggtgggcgccctggtgagcgacggcctggacagaaaggagcccagagccggcgaggtgatctgcatcgacgactag

SEQ ID NO: 21273 - protein, 344 aa, Artificial Sequence
  derived and/or modified sequence
MELLTNNLKFITDPFVCRLRHLSPTPSEEHMKNKNNVTEFILLGLTQNPEGQKVLFVTFLLIYMVTIMGNLLIIVTIMASQSLGSPMYFFLASLSFIDTVYSTAFAPKMIVDLLSEKKTISFQGCMAQLFMDHLFAGAEVILLVVMAYDRYMAICKPLHELITMNRRVCVLMLLAAWIGGFLHSLVQFLFIYQLPFCGPNVIDNFLCDLYPLLKLACTNTYVTGLSMIANGGAICAVTFFTILLSYGVILHSLKTQSLEGKRKAFYTCASHVTVVILFFVPCIFLYARPNSTFPIDKSMTVVLTFITPMLNPLIYTLKNAEMKSAMRKLWSKKVSLAGKWLYHS

SEQ ID NO: 21274 - DNA, 1035 bp, Artificial Sequence
  derived and/or modified sequence
atggagctgctgaccaacaacctgaagttcatcaccgaccccttcgtgtgcagactgagacacctgagccccacccccagcgaggagcacatgaagaacaagaacaacgtgaccgagttcatcctgctgggcctgacccagaaccccgagggccagaaggtgctgttcgtgaccttcctgctgatctacatggtgaccatcatgggcaacctgctgatcatcgtgaccatcatggccagccagagcctgggcagccccatgtacttcttcctggccagcctgagcttcatcgacaccgtgtacagcaccgccttcgcccccaagatgatcgtggacctgctgagcgagaagaagaccatcagcttccagggctgcatggcccagctgttcatggaccacctgttcgccggcgccgaggtgatcctgctggtggtgatggcctacgacagatacatggccatctgcaagcccctgcacgagctgatcaccatgaacagaagagtgtgcgtgctgatgctgctggccgcctggatcggcggcttcctgcacagcctggtgcagttcctgttcatctaccagctgcccttctgcggccccaacgtgatcgacaacttcctgtgcgacctgtaccccctgctgaagctggcctgcaccaacacctacgtgaccggcctgagcatgatcgccaacggcggcgccatctgcgccgtgaccttcttcaccatcctgctgagctacggcgtgatcctgcacagcctgaagacccagagcctggagggcaagagaaaggccttctacacctgcgccagccacgtgaccgtggtgatcctgttcttcgtgccctgcatcttcctgtacgccagacccaacagcaccttccccatcgacaagagcatgaccgtggtgctgaccttcatcacccccatgctgaaccccctgatctacaccctgaagaacgccgagatgaagagcgccatgagaaagctgtggagcaagaaggtgagcctggccggcaagtggctgtaccacagctag

SEQ ID NO: 21275 - DNA, 1035 bp, Artificial Sequence
  derived and/or modified sequence
atggaactcctcacaaataacctgaagtttataactgaccctttcgtatgtcggctgcggcatctaagtcctactccgtctgaggagcatatgaaaaataagaacaatgtgaccgaatttatattactgggtttgactcagaatccggaaggccagaaagtgttatttgttactttccttttaatttatatggtaactatcatgggaaatttactgattatagtgactataatggcatcccagtcgctcggttctcctatgtacttctttcttgcttctctgagttttattgataccgtctacagtaccgcgttcgcacctaagatgatcgtggatttgttatctgaaaagaagaccatcagttttcaggggtgcatggcgcagctcttcatggaccacctgtttgcaggcgccgaggtgatccttctggtcgtaatggcgtacgataggtatatggcaatatgcaaacccctgcatgagctgatcactatgaacagaagagtgtgcgtcttgatgttgctcgccgcatggataggcggctttctgcactccctggtgcaatttcttttcatctatcagctgccattctgcgggccgaacgtgattgataacttcctctgcgacctgtacccacttttgaagctagcttgcactaatacgtatgttaccgggctgtcaatgattgctaacggtggagccatctgcgctgtgacattcttcaccatcctcctgagctacggggtcatcttacactccctgaaaactcagtctctagaaggcaaacggaaggcgttttacacctgtgcttcccatgtcacagtggtcattctgttttttgttccttgtatattcctgtatgccagacctaatagtaccttccctatcgacaagtctatgacagtagtgttgacctttatcacacccatgctaaacccattgatctacacccttaaaaacgctgagatgaagtccgctatgcggaaactgtggtctaagaaggtgagcttagccggcaaatggctatatcatagctag

SEQ ID NO: 21276 - DNA, 1035 bp, Artificial Sequence
  derived and/or modified sequence
atggagctgctgaccaacaacctgaagttcatcacagacccctttgtgtgccgcctgcggcacctgagccccaccccatctgaggagcacatgaagaacaagaacaacgtgacagagttcatcctgctgggcctgacccagaaccctgagggccagaaggtgctgtttgtgaccttcctgctgatctacatggtgaccatcatgggcaacctgctgatcatcgtgaccatcatggccagccagagcctgggcagccccatgtacttcttcctggccagcctgtccttcatcgacacagtgtacagcacagcctttgcccccaagatgattgtggacctgctgtctgagaagaagaccatctccttccagggctgcatggcccagctgttcatggaccacctgtttgctggagctgaggtgatcctgctggtggtgatggcctatgaccgctacatggccatctgcaagcccctgcacgagctgatcaccatgaacagaagagtgtgtgtgctgatgctgctggccgcctggattggaggcttcctgcacagcctggtgcagttcctgttcatctaccagctgcccttctgtggccccaacgtcatcgacaacttcctgtgtgacctgtaccccctgctgaagctggcctgcaccaacacctacgtgacaggcctgtccatgattgccaacggcggggccatctgtgctgtgaccttcttcaccatcctgctgtcctatggagtcatcctgcacagcctgaagacccagagcctggagggcaagaggaaggccttctacacctgtgccagccacgtgacagtggtgatcctcttctttgtgccctgcatcttcctgtatgcccggcccaacagcaccttccccatcgacaagtccatgacagtggtgctgaccttcatcacccccatgctgaaccccctcatctacaccctgaagaatgctgagatgaagagcgccatgaggaagctgtggagcaagaaggtgtccctggccggcaagtggctgtaccacagctag

SEQ ID NO: 21277 - DNA, 1035 bp, Artificial Sequence
  derived and/or modified sequence
atggagctgctgaccaacaacctgaagttcatcaccgaccccttcgtgtgccgcctccgccacttatcacctactccttccgaggaacatatgaaaaataagaacaacgtcacagagtttatactgctcgggctgacccagaatcccgagggtcagaaagtcctgttcgtgacatttctgctgatctacatggttactatcatgggcaatctgctcataatagttactataatggcctcgcagagccttggatcccctatgtatttttttcttgcctccctgagctttattgatacagtgtacagcacagccttcgcccctaaaatgatcgtggaccttctgtccgaaaagaaaactatcagtttccaaggttgtatggcacaactgtttatggatcacctcttcgcgggggccgaagtgatcctgctcgtggtaatggcctacgatagatacatggccatttgcaaaccactgcacgaattgatcactatgaatcgacgcgtgtgtgtactcatgctgttagccgcctggattggtggcttccttcatagcctagtgcaattcctttttatttatcaactgcccttctgcggccccaatgtgatagataactttctttgtgatttgtaccctttattgaaactggcatgtaccaatacttacgtaacagggctttccatgattgccaatgggggtgctatttgcgcagttacttttttcactattttattgtcgtacggagtcattctccacagcctcaaaacccagtctctggagggcaaaaggaaggctttctatacctgtgctagtcacgtgaccgtagttattctctttttcgtgccatgcatttttctttacgcgcggccaaacagcacattccctattgataagtcaatgacagtggtgttgacctttatcacaccaatgctgaatccgttgatctatactctaaaaaacgcagagatgaaatccgcaatgaggaaattgtggtccaaaaaagtgagcctggcaggaaagtggctgtaccactcttag

SEQ ID NO: 21278 - DNA, 1035 bp, Artificial Sequence
  derived and/or modified sequence
atggagcttctgacaaataatctcaaatttatcactgacccttttgtttgtaggctccgacacctgagtccaacaccttcagaagaacacatgaaaaataagaacaatgtgactgaatttatcctcttagggctcacacagaaccctgaggggcaaaaggttttatttgtcacattcttactaatctacatggtgacgataatgggcaacctgcttatcatagtgaccatcatggccagccagtccctgggttcccccatgtacttttttctggcttctttatcattcatagataccgtctattctactgcatttgctcccaaaatgattgttgacttgctctctgagaaaaagaccatttcctttcagggttgtatggctcaactttttatggatcatttatttgctggtgctgaagtcattcttctggtggtaatggcctatgatcgatacatggccatctgtaagcctcttcatgaattgatcaccatgaatcgtcgagtctgtgttcttatgctgttggcggcctggattggaggctttcttcactcattggttcaatttctctttatttatcagctccctttctgtggacccaatgtcattgacaacttcctgtgtgatttgtatcccttattgaaacttgcttgcaccaatacctatgtcactgggctttctatgatagctaatggaggagcgatttgtgctgtcaccttcttcactatcctgctttcctatggggtcatattacactctcttaagactcagagtttggaagggaaacgaaaagctttctacacctgtgcatcccacgtcactgtggtcattttattctttgtcccctgtatcttcttgtatgcaaggcccaattctacttttcccattgataaatccatgactgtagttctaacttttataactcccatgctgaacccactaatctataccctgaagaatgcagaaatgaaaagtgccatgaggaaactttggagtaaaaaagtaagcttagctgggaaatggctgtatcactcatga

SEQ ID NO: 21279 - DNA, 1035 bp, Artificial Sequence
  derived and/or modified sequence
atggagctgttgaccaataatctgaagttcataacagatccattcgtttgtcgactaaggcacctgtctccaacaccctctgaagaacatatgaagaataagaacaatgtaacagagttcatcctgctcggtctcactcagaatccagaaggccaaaaagtgctgtttgtgacctttcttctgatttatatggtcactattatgggaaatctactcatcattgtcacgattatggccagtcagtccctcggaagtcctatgtacttttttctggccagcttgtccttcattgacacagtctactctactgcttttgctcccaagatgattgtggacctgttgtcagagaagaaaaccatctcgtttcagggctgcatggcccagctcttcatggatcatttatttgccggagcagaggtcattctgctggttgtaatggcatacgacaggtacatggctatatgcaagcccctccacgaactgatcacaatgaatagaagagtgtgtgtcctaatgctacttgcggcatggattggcggtttcttgcactcactcgtgcagtttctctttatatatcagctgcccttctgcgggcctaatgtcatcgataattttctctgtgatctgtacccccttttgaaactagcttgtacaaatacttatgtgacagggctgagtatgatcgctaacggaggagcgatatgcgcggtcaccttcttcaccatcttactgtcttatggagtcatcctccactccctcaaaactcagagtctcgagggcaagagaaaagccttctacacttgcgcttcgcatgttactgtggtgattctgttcttcgtcccatgcatcttcttatatgctcggccaaatagcacttttcccatcgacaaatcaatgaccgtagtattaacattcatcacccctatgctgaatccattaatttacacactaaaaaacgccgaaatgaaatccgcaatgaggaagctatggtccaagaaggtaagtctggccggaaagtggctataccattcctag

SEQ ID NO: 21280 - protein, 317 aa, Artificial Sequence
  derived and/or modified sequence
MDQYNHSSLAEFVFLGFASVGYVRGWLFVLLLLAYLFTICGNMLIFSVIRLDAALHTPMYHFVSVLSFLELWYTATTIPKMLSNILSEKKTISFAGCLLQTYFFHSLGASECYLLTAMAYDRYLAICRPLHYPIIMTTTLCAKMAAACWTCGFLCPISEVILASQLPFCAYNEIQHIFCDFPPLLSLACKDTSANILVDFAINAFIILITFFFIMISYARIIGAVLKIKTASGRKKAFSTCASHLAVVLIFFGSIIFMYVRLKKSYSLTLDRTLAIVYSVLTPMVNPIIYSLRNKEIIKAIKRTIFQKGDKASLAHL

SEQ ID NO: 21281 - DNA, 954 bp, Artificial Sequence
  derived and/or modified sequence
atggaccagtacaaccacagcagcctggccgagttcgtgttcctgggcttcgccagcgtgggctacgtgagaggctggctgttcgtgctgctgctgctggcctacctgttcaccatctgcggcaacatgctgatcttcagcgtgatcagactggacgccgccctgcacacccccatgtaccacttcgtgagcgtgctgagcttcctggagctgtggtacaccgccaccaccatccccaagatgctgagcaacatcctgagcgagaagaagaccatcagcttcgccggctgcctgctgcagacctacttcttccacagcctgggcgccagcgagtgctacctgctgaccgccatggcctacgacagatacctggccatctgcagacccctgcactaccccatcatcatgaccaccaccctgtgcgccaagatggccgccgcctgctggacctgcggcttcctgtgccccatcagcgaggtgatcctggccagccagctgcccttctgcgcctacaacgagatccagcacatcttctgcgacttcccccccctgctgagcctggcctgcaaggacaccagcgccaacatcctggtggacttcgccatcaacgccttcatcatcctgatcaccttcttcttcatcatgatcagctacgccagaatcatcggcgccgtgctgaagatcaagaccgccagcggcagaaagaaggccttcagcacctgcgccagccacctggccgtggtgctgatcttcttcggcagcatcatcttcatgtacgtgagactgaagaagagctacagcctgaccctggacagaaccctggccatcgtgtacagcgtgctgacccccatggtgaaccccatcatctacagcctgagaaacaaggagatcatcaaggccatcaagagaaccatcttccagaagggcgacaaggccagcctggcccacctgtag

SEQ ID NO: 21282 - DNA, 954 bp, Artificial Sequence
  derived and/or modified sequence
atggatcagtataaccacagcagcctcgccgagtttgtcttccttggctttgcgtctgtgggctacgtacgcgggtggctgtttgttctcctgctgcttgcctatttatttacgatttgcggcaatatgctgatcttctcggttattcgcctggacgccgctttgcacaccccgatgtaccactttgtcagtgtgctgtctttcttagaattgtggtacacagccacaaccatcccgaagatgctgagcaatattctgtccgaaaaaaaaacaatttcttttgctggttgtcttctccagacatacttcttccattcgcttggagcatctgagtgttatctgctcacggccatggcatatgacagatacctggcgatttgccgccctctccattatccaataataatgactactactctttgtgccaagatggccgccgcctgttggacctgtgggttcctatgcccaatcagtgaagtgatcctggcaagccagctgcccttctgcgcttataacgagatacagcacatcttctgtgattttcctccgctgctcagtttggcttgtaaggacacatcagccaacatcctcgtggacttcgcaattaacgctttcattatcctaattacctttttcttcatcatgattagctacgcccgcatcatcggagccgttttaaagattaagactgcaagtggaagaaaaaaagcatttagcacatgtgcctcccatctggccgtcgtcctgatcttcttcggaagcatcatcttcatgtatgttaggctaaagaaatcttacagccttacactggatcgcaccttagctatcgtgtacagtgtgctgacccccatggtgaaccccattatctattccttaagaaacaaagaaatcatcaaggccattaaaagaaccatctttcaaaagggggataaggcctccctcgcccatctttag

SEQ ID NO: 21283 - DNA, 954 bp, Artificial Sequence
  derived and/or modified sequence
atggaccagtacaaccacagcagcctggccgagtttgtgttcctgggctttgcctctgtgggctacgtgcggggctggctgtttgtgctgctgctgctggcctacctgttcaccatctgtggcaacatgctgatcttcagcgtcatccggctggatgctgccctgcacacccccatgtaccactttgtgtctgtgctgtccttcctggagctgtggtacacagccaccaccatccccaagatgctgagcaacatcctgtctgagaagaagaccatcagctttgctggctgcctgctgcagacctacttcttccacagcctgggcgccagcgagtgctacctgctgacagccatggcctatgaccgctacctggccatctgccggcccctgcactaccccatcatcatgaccaccaccctgtgtgccaagatggccgccgcctgctggacctgtggcttcctgtgccccatcagcgaggtgatcctggccagccagctgcccttctgtgcctacaatgagatccagcacatcttctgtgacttcccccccctgctgagcctggcctgcaaggacaccagcgccaacatcctggtggactttgccatcaatgccttcatcatcctgatcaccttcttcttcatcatgatctcctatgcccgcatcatcggggctgtgctgaagatcaagacagccagcggcaggaagaaggccttcagcacctgtgccagccacctggccgtggtgctgatcttcttcggcagcatcatcttcatgtatgtgcggctgaagaagagctacagcctgaccctggacaggaccctggccatcgtgtacagcgtgctgacccccatggtgaaccccatcatctacagcctgaggaacaaggagatcatcaaggccatcaagaggaccatcttccagaagggggacaaggccagcctggcccacctgtag

SEQ ID NO: 21284 - DNA, 954 bp, Artificial Sequence
  derived and/or modified sequence
atggaccagtacaaccacagcagcctggccgagttcgtgttcctgggattcgcatccgtcgggtacgtgaggggatggttgttcgttctgctgttgctggcatacctgttcaccatctgcggcaatatgctgatattcagcgtcatccgtctggatgccgccttacatacacccatgtaccacttcgtttccgttctgtcctttctcgaattatggtacacggcaacaactattcctaaaatgctgtctaacattctgtcggaaaagaagacgatctcttttgccggatgcctgttgcagacctatttcttccactccctaggggcaagtgaatgctacctgcttactgcaatggcttatgaccgatatctggcaatttgcagacccctccactatcccatcatcatgactacgaccctctgtgctaagatggctgctgcatgctggacttgtggcttcctgtgtccaatatcagaggtcatcttagccagtcagctgccgttttgtgcttataatgagattcagcacatcttctgtgacttcccaccgttgctcagcctagcctgtaaggatactagtgccaacattctggttgacttcgcaattaacgcatttattatcctgattacatttttcttcatcatgatttcatatgctcgaatcatcggcgcagtgctcaagatcaagacagcaagtggccgtaagaaggctttcagcacttgcgccagccacctggcggttgtgttaattttcttcggcagcatcatcttcatgtacgtccgcctgaagaaatcatactcacttacgctggaccgaactctggctatcgtgtattctgttctaacacctatggtgaatccgataatctactcactacggaataaagagattatcaaagctatcaaacgtaccatttttcagaaaggagacaaagcgagcttggcccatctgtag

SEQ ID NO: 21285 - DNA, 954 bp, Artificial Sequence
  derived and/or modified sequence
atggatcaatacaaccattcaagcctggctgaatttgtgttccttggctttgccagtgtgggctatgtcaggggctggctttttgtcctgctgctattggcatacctgttcaccatctgtggtaacatgctcatcttctcagtcatccgactggatgcagctctgcacacacctatgtaccactttgtcagtgttctttccttcttggagttgtggtatacagctaccactatccctaagatgttgtctaatattctcagtgagaagaaaaccatttcttttgcaggatgcctccttcagacctacttcttccactccttgggagcgtctgaatgctaccttcttacagccatggcctatgatagatacctggccatttgtcggcccctccactaccctataattatgaccaccacactctgtgccaagatggctgctgcttgttggacttgtggcttcctgtgtcccatttctgaggtcatccttgcctcccagctcccattttgtgcttacaatgaaatccaacacattttctgtgactttccacctttgctgagcttggcctgcaaggacacatctgctaacattctggtggactttgccattaatgctttcataattcttatcactttcttctttatcatgatttcttatgcaaggatcattggggctgtgctgaagataaaaacagcatcaggaagaaagaaggccttttctacctgtgcctcacatcttgctgtggtcctcatcttctttgggagcatcatcttcatgtatgtgcggctaaagaagagctattccctgacccttgaccgaacacttgctatagtttactccgtactaacaccaatggtcaatccaattatctacagtcttcgtaacaaggaaatcattaaagctatcaagaggaccatcttccagaagggagataaagctagtcttgctcatctttga

SEQ ID NO: 21286 - DNA, 954 bp, Artificial Sequence
  derived and/or modified sequence
atggatcagtacaaccacagttcgttagccgaattcgtatttttgggttttgcatccgtcggctatgtgaggggttggctttttgtgttactcttactggcttatctgttcaccatctgtgggaacatgctcatcttctctgtaattcgcctggacgccgctctgcatactcctatgtatcactttgtttcagttcttagctttctcgagctctggtacactgcgacaaccatccccaaaatgctatctaacatcctttccgagaaaaagactatcagcttcgccggatgtctcctccaaacatacttttttcattcacttggtgcttccgagtgctatctactcactgcgatggcatatgacagatacctcgccatctgccgacccctgcattatccaatcatcatgacgacaactctttgtgcaaagatggctgcggcttgctggacctgcgggtttctctgtcctattagtgaggtgatattggcaagtcagcttccattttgcgcttacaacgaaatccagcacattttctgtgacttcccacccttgctctccctggcctgcaaggatacgtcagctaatatcttggttgatttcgctatcaacgcatttatcatcttaataaccttttttttcataatgattagctacgccaggataattggcgctgtgctaaaaattaagacggcctctgggcgtaagaaggccttttctacatgcgctagccacttggctgttgtgctcattttctttggaagtattatcttcatgtacgtcagattaaagaagtcctacagcttaactcttgacaggaccttagccatcgtttacagcgtgttgacgccgatggtgaatccgatcatctatagtctcagaaataaagaaattattaaggctattaagcggacaatattccagaagggagacaaggcttctctggcacacttatag

SEQ ID NO: 21287 - protein, 324 aa, Artificial Sequence
  derived and/or modified sequence
MESPNRTTIQEFIFSAFPYSWVKSVVCFVPLLFIYAFIVVGNLVIITVVQLNTHLHTPMYTFISALSFLEIWYTTATIPKMLSSLLSERSISFNGCLLQMYFFHSTGICEVCLLTVMAFDHYLAICSPLHYPSIMTPKLCTQLTLSCCVCGFITPLPEIAWISTLPFCGSNHLEHIFCDFLPVLRLACTDTRAIVMIQVVDVIHAVEIITAVMLIFMSYDGIVAVILRIHSAGGRRTAFSTCVSHFIVFSLFFGSVTLMYLRFSATYSLFWDIAIALAFAVLSPFFNPIIYSLRNKEIKEAIKKHIGQAKIFFSVRPGTSSKIF

SEQ ID NO: 21288 - DNA, 975 bp, Artificial Sequence
  derived and/or modified sequence
atggagagccccaacagaaccaccatccaggagttcatcttcagcgccttcccctacagctgggtgaagagcgtggtgtgcttcgtgcccctgctgttcatctacgccttcatcgtggtgggcaacctggtgatcatcaccgtggtgcagctgaacacccacctgcacacccccatgtacaccttcatcagcgccctgagcttcctggagatctggtacaccaccgccaccatccccaagatgctgagcagcctgctgagcgagagaagcatcagcttcaacggctgcctgctgcagatgtacttcttccacagcaccggcatctgcgaggtgtgcctgctgaccgtgatggccttcgaccactacctggccatctgcagccccctgcactaccccagcatcatgacccccaagctgtgcacccagctgaccctgagctgctgcgtgtgcggcttcatcacccccctgcccgagatcgcctggatcagcaccctgcccttctgcggcagcaaccacctggagcacatcttctgcgacttcctgcccgtgctgagactggcctgcaccgacaccagagccatcgtgatgatccaggtggtggacgtgatccacgccgtggagatcatcaccgccgtgatgctgatcttcatgagctacgacggcatcgtggccgtgatcctgagaatccacagcgccggcggcagaagaaccgccttcagcacctgcgtgagccacttcatcgtgttcagcctgttcttcggcagcgtgaccctgatgtacctgagattcagcgccacctacagcctgttctgggacatcgccatcgccctggccttcgccgtgctgagccccttcttcaaccccatcatctacagcctgagaaacaaggagatcaaggaggccatcaagaagcacatcggccaggccaagatcttcttcagcgtgagacccggcaccagcagcaagatcttctag

SEQ ID NO: 21289 - DNA, 975 bp, Artificial Sequence
  derived and/or modified sequence
atggaaagccctaaccgcaccaccatccaggagtttattttttccgccttcccatactcctgggtgaagtcggttgtctgttttgtgccgcttctgttcatttacgccttcattgtagtgggtaatttggtgatcattaccgtggttcaactgaatactcacttgcatacacccatgtatacatttatttctgctctctcatttctggaaatctggtatacaaccgccactatccctaaaatgctgtcttccttactcagcgaacggagcatatctttcaacggttgtcttctccagatgtacttcttccattcaacaggaatatgcgaagtctgtttgctgactgttatggcgtttgaccactatctagctatctgctcacctttgcattacccaagcatcatgacacctaaactatgtacccaactgaccctctcgtgctgcgtctgcggctttattactcccctgccagaaattgcatggatttccacactacccttctgtggaagtaatcaccttgaacacatattttgcgattttcttccggtgttaagactggcatgcactgacacacgtgccatcgtgatgatacaggtggtggacgttattcacgccgtggagattataacagcagttatgctgatcttcatgagctacgatggaatagtggccgtgatccttcggatccacagcgccggcgggagaaggaccgccttttcgacctgtgtgagccatttcattgtgttctccctgttctttgggtctgttaccctgatgtatttgcgcttctctgcgacctatagcctgttctgggacattgccattgcccttgcttttgcagtactgagccccttttttaaccccatcatctactccctgcggaacaaggagatcaaagaagccatcaagaagcatatcggccaggccaaaatttttttttccgtgcgcccaggaactagctctaagattttttag

SEQ ID NO: 21290 - DNA, 975 bp, Artificial Sequence
  derived and/or modified sequence
atggagagccccaacagaaccaccatccaggagttcatcttcagcgccttcccctacagctgggtgaagtctgtggtgtgctttgtgcccctgctcttcatctatgccttcatcgtggtgggcaacctggtgatcatcaccgtggtgcagctgaacacccacctgcacacccccatgtacaccttcatcagcgccctgtccttcctggagatctggtacaccacagccaccatccccaagatgctgagcagcctgctgtctgagaggagcatctccttcaacggctgcctgctgcagatgtacttcttccacagcacaggcatctgtgaggtgtgcctgctgactgtgatggcctttgaccactacctggccatctgcagccccctgcactaccccagcatcatgacccccaagctgtgcacccagctgaccctgagctgctgcgtgtgtggcttcatcacccccctgcctgagatcgcctggatcagcaccctgcccttctgtggcagcaaccacctggagcacatcttctgtgacttcctgcctgtgctgcggctggcctgcacagacacccgggccatcgtgatgatccaggtggtggatgtgattcatgctgtggagatcatcacagctgtgatgctgatcttcatgtcctatgatggcatcgtggccgtcatcctgcgcatccacagcgctgggggcagaagaacagccttcagcacctgtgtgagccacttcatcgtgttcagcctcttctttggatctgtgaccctgatgtacctgcgcttcagcgccacctacagcctcttctgggacatcgccatcgccctggcctttgctgtgctgagccccttcttcaaccccatcatctacagcctgaggaacaaggagatcaaggaggccatcaagaagcacatcggccaggccaagatcttcttctctgtgcggcccggcaccagcagcaagatcttctag

SEQ ID NO: 21291 - DNA, 975 bp, Artificial Sequence
  derived and/or modified sequence
atggagagccccaaccggaccaccatccaggagttcatcttcagcgccttcccatactcatgggttaagtccgtggtgtgcttcgtgcctctactgtttatctacgctttcatcgtggttggaaacctagtcattatcacggtggtccagctgaacacccatctacatacacccatgtacacattcatctctgccctgagttttctggaaatttggtacaccactgctactatacctaaaatgctgagcagtttactgtctgagcgaagcatttccttcaacggctgcttacttcagatgtatttcttccatagtaccggaatatgcgaggtgtgcttgctgactgttatggcctttgaccattacctcgcaatttgttcccccctccactatcccagcatcatgacacctaaactctgcacccagcttactctgtcctgctgcgtgtgcggattcatcacgccacttcccgagattgcatggatatctacactgcccttctgtgggtccaatcacctggagcacattttctgtgactttctgccggtcctccgcctggcttgcacggacacaagagcaatcgtgatgattcaggtggtggatgtcatccacgccgttgagatcatcacagccgttatgcttatcttcatgagttatgacggcattgtggcagtcatactccgtatccattccgccggtgggcggagaactgcgtttagcacctgtgtctcgcactttatcgttttcagcttatttttcgggagcgtgaccttgatgtacttaaggttttctgccacctacagccttttctgggacatcgccatcgccctggccttcgctgtcctttccccattctttaaccccatcatttactcacttaggaacaaggagatcaaggaagccattaagaagcatatcggccaggccaagatctttttctccgtcaggcctggaacgagtagtaaaatcttctag

SEQ ID NO: 21292 - DNA, 1118 bp, Artificial Sequence
  derived and/or modified sequence
gcttgagtgcactggaaattgaaactctcactttcaacttggagatggagagccccaatcgaaccaccattcaggagtttatcttctccgctttcccttattcctgggttaagtctgttgtctgctttgttccactgctcttcatctatgctttcattgttgttggaaacctggtcatcatcacagtggtccagttgaatactcacctccacactcccatgtatacttttatcagtgctctttctttcctggagatttggtataccacagccacaatcccaaagatgctgtctagcctgcttagtgagaggagcatttccttcaatggttgtctcctgcagatgtatttcttccattccaccggcatctgtgaggtgtgtctcttgacagttatggcctttgaccactacctggccatatgcagccctcttcattatccctctatcatgacccccaagctatgtacccaactgactttaagttgctgtgtttgtggctttatcacaccccttcctgagattgcctggatctctacactgccattttgtggttcgaatcaccttgaacatatcttctgtgacttcctcccagtgctgcgtctggcctgcacagacacacgagccatcgtcatgattcaggtagtggatgtcattcatgcagtggagattattacagctgtgatgctcatcttcatgtcctacgatggtattgtggctgtaattctacgtattcattcagctggaggccgccgcacagcattttccacgtgtgtctctcacttcattgtcttttcgctcttctttggcagtgtgactctcatgtacctacgcttctctgccacctactctttgttctgggatatagccattgctctggcctttgcagttttgtctcccttcttcaaccccattatctatagcctgaggaataaagaaataaaagaagctataaaaaagcacataggtcaagctaagatatttttttccgtaagaccagggacctcaagtaagatattttagttgagattctgtatagttgctggttcctcttcaccttcagctctcagcaatctgtcttttcctatcaaccttctattcaaactggtctcccaaagctca

SEQ ID NO: 21293 - DNA, 975 bp, Artificial Sequence
  derived and/or modified sequence
atggaatctccgaatcgaactactatccaggaatttatcttttcggcatttccctactcatgggtaaaatctgtggtgtgttttgttccactcctgttcatatacgccttcatagttgtcggcaatctcgtgattattactgtagtgcaactaaatacccacctacacacacctatgtacaccttcattagcgcgctttctttcttagagatttggtacaccacagcgacaatccctaagatgctttcttctctgctctccgagcggtctattagcttcaacgggtgcctcttgcagatgtacttctttcatagtactggaatttgtgaggtctgtctcttgacagtgatggcatttgatcattacttggctatttgctccccgctgcactacccaagcattatgacacccaagctttgcacgcaacttaccctgtcatgttgtgtctgtgggttcatcacacccttacccgaaattgcatggattagcacactgcccttctgcggctcgaaccacttggaacatatattttgcgactttctacctgtcctgagattagcctgcacagatacccgagcaattgtaatgattcaggtggtcgacgtcattcatgcagtggaaattatcacggcggtgatgctcattttcatgtcgtatgatggcattgtcgccgtgatcctccgcatccactctgctggagggcgaaggactgccttctcgacatgtgtgtctcattttatcgtgttttccctatttttcgggtctgttaccctgatgtatctgcgtttcagtgctacctatagcctgttttgggatatcgctattgctctggcctttgccgtgcttagtccattctttaaccccataatctactccctcaggaacaaggagatcaaggaagccattaaaaagcacatcgggcaggcgaaaatattcttctcagttcggccaggtacaagcagtaagattttctag

SEQ ID NO: 21294 - protein, 311 aa, Artificial Sequence
  derived and/or modified sequence
MELENQTRVTKFILVGFPGSLSMRAAMFLIFLVAYILTVAENVIIILLVLQNRPLHKPMYFFLANLSFLETWYISVTVPKLLFSFWSVNNSISFTLCMIQLYFFIALMCTECVLLAAMAYDRYVAICRPLHYPTIMSHGLCFRLALGSWAIGFGISLAKIYFISCLSFCGPNVINHFFCDISPVLNLSCTDMSITELVDFILALVIFLFPLFITVLSYGCILATILCMPTGKQKAFSTCASHLVVVTIFYSAIIFMYARPRVIHAFNMNKIISIFYAIVTPSLNPFIYCLRNREVKEALKKLAYCQASRSD

SEQ ID NO: 21295 - DNA, 936 bp, Artificial Sequence
  derived and/or modified sequence
atggagctggagaaccagaccagagtgaccaagttcatcctggtgggcttccccggcagcctgagcatgagagccgccatgttcctgatcttcctggtggcctacatcctgaccgtggccgagaacgtgatcatcatcctgctggtgctgcagaacagacccctgcacaagcccatgtacttcttcctggccaacctgagcttcctggagacctggtacatcagcgtgaccgtgcccaagctgctgttcagcttctggagcgtgaacaacagcatcagcttcaccctgtgcatgatccagctgtacttcttcatcgccctgatgtgcaccgagtgcgtgctgctggccgccatggcctacgacagatacgtggccatctgcagacccctgcactaccccaccatcatgagccacggcctgtgcttcagactggccctgggcagctgggccatcggcttcggcatcagcctggccaagatctacttcatcagctgcctgagcttctgcggccccaacgtgatcaaccacttcttctgcgacatcagccccgtgctgaacctgagctgcaccgacatgagcatcaccgagctggtggacttcatcctggccctggtgatcttcctgttccccctgttcatcaccgtgctgagctacggctgcatcctggccaccatcctgtgcatgcccaccggcaagcagaaggccttcagcacctgcgccagccacctggtggtggtgaccatcttctacagcgccatcatcttcatgtacgccagacccagagtgatccacgccttcaacatgaacaagatcatcagcatcttctacgccatcgtgacccccagcctgaaccccttcatctactgcctgagaaacagagaggtgaaggaggccctgaagaagctggcctactgccaggccagcagaagcgactag

SEQ ID NO: 21296 - DNA, 936 bp, Artificial Sequence
  derived and/or modified sequence
atggaactcgaaaatcagacacgcgtaaccaaattcattcttgtgggcttccccggaagtctttcaatgcgagccgctatgttcctgatcttcctagtcgcctacattctcacagttgcggagaatgtgattataattctgctcgtcctccagaaccgccccctgcataaacctatgtattttttccttgcaaacctttcattcttggagacctggtacatttcggtgacagtcccaaagctgttgttcagtttctggagtgtcaacaacagtatttctttcacactctgcatgatccagctgtattttttcatcgcgctgatgtgcacagagtgtgtccttctggccgccatggcctacgaccgttacgtggccatctgtaggcctctgcattaccctactattatgagtcacggactctgctttcggctggcgttgggttcatgggctatcggattcggcatcagcttggctaaaatttactttatttcatgcctgtccttttgtggccctaatgtcatcaaccatttcttttgcgacatttcgcccgtgctgaatttgtcttgtacagatatgagcattaccgaactggttgattttatcctggcactcgttatttttctgttccctttgttcattactgttctgagctacgggtgcatcttagcaactattctttgcatgccaaccgggaaacagaaggccttctctacgtgtgcttcacatctggttgtagtaactatcttctactcagctataatctttatgtacgccagaccaagagtaatccatgcctttaacatgaataaaatcatttcaatcttctatgctatcgtaactcccagcttgaacccgttcatctactgcctgcgaaatagggaagtcaaagaagccctcaaaaagcttgcatattgtcaggcctccaggtccgattag

SEQ ID NO: 21297 - DNA, 936 bp, Artificial Sequence
  derived and/or modified sequence
atggagctggagaaccagaccagggtgaccaagttcatcctggtgggcttccctggcagcctgtccatgagagctgccatgttcctgatcttcctggtggcctacatcctgactgtggctgaaaatgtcatcatcatcctgctggtgctgcagaaccggcccctgcacaagcccatgtacttcttcctggccaacctgtccttcctggagacctggtacatctctgtgacagtgcccaagctgctcttctccttctggagcgtgaacaacagcatctccttcaccctgtgcatgatccagctgtacttcttcatcgccctgatgtgcacagaatgtgtgctgctggccgccatggcctatgacagatatgtggccatctgccggcccctgcactaccccaccatcatgagccacggcctgtgcttccggctggccctgggctcctgggccatcggcttcggcatcagcctggccaagatctacttcatcagctgcctgtccttctgtggccccaacgtcatcaaccacttcttctgtgacatcagccctgtgctgaacctgagctgcacagacatgagcatcacagagctggtggacttcatcctggccctggtgatcttcctgttccccctcttcatcaccgtgctgtcctatggctgcatcctggccaccatcctgtgcatgcccaccgggaagcagaaggccttcagcacctgtgccagccacctggtggtggtgaccatcttctacagcgccatcatcttcatgtatgcccggcccagggtcatccacgccttcaacatgaacaagatcatcagcatcttctacgccatcgtgacccccagcctgaaccccttcatctactgcctgaggaaccgggaggtgaaggaggccctgaagaagctggcctactgccaggccagcagaagtgactag

SEQ ID NO: 21298 - DNA, 936 bp, Artificial Sequence
  derived and/or modified sequence
atggagctggagaaccagacccgggtgaccaagttcatcctggtgggatttccgggaagcctttccatgagggcagccatgttcctgattttcctggtcgcctatatcctcactgtcgcagagaacgtgatcatcatcctgcttgtactgcagaatagacctttacataagcctatgtacttctttcttgctaatttgtcattcctggagacctggtatattagcgtgacagtgccaaagctgttattcagcttctggtcagttaacaattctatctcattcacattgtgcatgatacagctgtacttttttattgcacttatgtgcaccgagtgcgtgctcctggcagccatggcctatgatcgctatgtcgctatttgtaggcccttacattaccctacgatcatgtcccacggtctgtgtttcaggctcgccttgggctcctgggctataggattcggaatctctctcgccaagatatactttatttcttgtttatctttctgcggcccaaatgtgatcaatcacttcttttgcgatattagtcccgttctcaacctatcgtgcaccgacatgagcattaccgagctcgtagatttcattctcgccctggtaatttttcttttccccttgttcattaccgtgctgtcatatggatgcattttggcaacaattctttgcatgcccacaggaaagcaaaaggcattctcgacttgtgctagccacctggtagtagtcacaatattctactccgccattatctttatgtacgcccggccccgtgttattcatgctttcaatatgaacaagattatatcaatcttttacgcgattgtaacgccaagtctgaatcccttcatatattgtctgagaaatcgggaagttaaggaagccctgaaaaagctggcatactgtcaggcatcccgttccgactag

SEQ ID NO: 21299 - DNA, 1047 bp, Artificial Sequence
  derived and/or modified sequence
tagctgggccatggagtctgatcaaatgatttttcctccccaggagagctaagccctgtgtctccaatatggagttggagaaccagacacgagtcaccaagttcattctggtgggattccctgggagcttgagtatgcgggcagccatgtttctgatattccttgtggcctatattctgacagtggctgaaaacgtgatcatcatcctattggtgctgcaaaatcggccactgcacaagcctatgtacttcttcctggccaacctgtccttcttggagacctggtacatctctgtgactgtgcccaagttactgtttagtttttggtctgtgaacaacagcatctctttcacactctgtatgatacaactgtacttcttcattgctctcatgtgcacagaatgtgtgcttctggccgccatggcctatgaccggtatgtggccatctgtcgcccactccactacccaaccataatgagccatgggctctgcttccgcctcgctcttggttcctgggccattggctttggcatctccctggcgaagatctacttcatctcctgcctcagcttctgtggtcccaatgtcatcaaccacttcttctgtgacatctctccagtacttaatctctcctgcacagacatgtccataactgagttggtagactttatcctggcactggtcatcttcctattcccactctttattactgtcctgtcctacggatgcattctggccaccatattatgcatgcccacaggaaagcagaaagcgttctccacttgtgcctcccatcttgtggtggtcaccattttctattcagccattattttcatgtatgctcgacctcgagttatccatgccttcaacatgaacaaaattatttccatcttctatgccattgtcactccttctctcaaccctttcatttattgcctaagaaaccgagaggtcaaggaagctctgaagaaactggcatattgccaggccagcagatctgactagtcaattacagctgattagaaagaaaggtctgagtgggtgcctg

SEQ ID NO: 21300 - DNA, 936 bp, Artificial Sequence
  derived and/or modified sequence
atggagctggagaaccagactagggtgaccaagtttatcctagtgggctttcctgggtcactgagtatgagagccgctatgtttctcatttttctcgtcgcctacatcctgaccgtggctgaaaatgtgattatcatacttctggtgttacaaaataggccactacacaaaccaatgtactttttcctggcgaacctgtcattcctcgaaacttggtacattagtgtcacggtgcctaagctacttttcagtttctggtcggtcaacaattctatttccttcaccctgtgcatgatccagctctattttttcattgccctgatgtgcaccgaatgcgttctgctagctgccatggcctatgacaggtatgtcgcgatatgtcgacctttgcattatcctacaattatgagtcatgggctgtgctttcggttagctctgggcagctgggccataggctttggaatctctctggcaaaaatctatttcatcagttgcctctccttttgcgggcctaacgtgattaaccatttcttctgcgacatatcaccagtgctgaacctgagttgtacggatatgagtatcaccgaattggtggatttcatcttggctttagttatctttctgtttcccttattcattacagtgctgagctatggctgtatcttagcaacaattctgtgcatgccaacagggaaacagaaggcattttccacctgtgcgagccacctggtggtcgtgactatcttctacagcgccatcatatttatgtatgctcggcctcgtgtgattcatgctttcaacatgaacaaaattatcagcattttttatgccattgtaacacctagtctgaatccatttatttattgcctccgaaaccgagaagtgaaagaggcccttaaaaagctggcctattgccaagccagtcggagcgattag

SEQ ID NO: 21301 - protein, 314 aa, Artificial Sequence
  derived and/or modified sequence
MAERNYTVVTEFFLTAFTEHLQWRVPLFLIFLSFYLATMLGNTGMILLIRGDRRLHTPMYFFLSHLSLVDICYSSAIIPQMLAVLWEHGTTISQARCAAQFFLFTFFASIDCYLLAIMAYDRYTAVCQPLLYVTIITEKARWGLVTGAYVAGFFSAFVRTVTAFTLSFCGNNEINFIFCDLPPLLKLSCGDSYTQEVVIIVFALFVMPACILVILVSYLFIIVAILQIHSAGGRAKTFSTCASHLTAVALFFGTLIFMYLRDNTGQSSEGDRVVSVLYTVVTPMLNPLIYSLRNKEVKEATRKALSKSKPARRP

SEQ ID NO: 21302 - DNA, 945 bp, Artificial Sequence
  derived and/or modified sequence
atggccgagagaaactacaccgtggtgaccgagttcttcctgaccgccttcaccgagcacctgcagtggagagtgcccctgttcctgatcttcctgagcttctacctggccaccatgctgggcaacaccggcatgatcctgctgatcagaggcgacagaagactgcacacccccatgtacttcttcctgagccacctgagcctggtggacatctgctacagcagcgccatcatcccccagatgctggccgtgctgtgggagcacggcaccaccatcagccaggccagatgcgccgcccagttcttcctgttcaccttcttcgccagcatcgactgctacctgctggccatcatggcctacgacagatacaccgccgtgtgccagcccctgctgtacgtgaccatcatcaccgagaaggccagatggggcctggtgaccggcgcctacgtggccggcttcttcagcgccttcgtgagaaccgtgaccgccttcaccctgagcttctgcggcaacaacgagatcaacttcatcttctgcgacctgccccccctgctgaagctgagctgcggcgacagctacacccaggaggtggtgatcatcgtgttcgccctgttcgtgatgcccgcctgcatcctggtgatcctggtgagctacctgttcatcatcgtggccatcctgcagatccacagcgccggcggcagagccaagaccttcagcacctgcgccagccacctgaccgccgtggccctgttcttcggcaccctgatcttcatgtacctgagagacaacaccggccagagcagcgagggcgacagagtggtgagcgtgctgtacaccgtggtgacccccatgctgaaccccctgatctacagcctgagaaacaaggaggtgaaggaggccaccagaaaggccctgagcaagagcaagcccgccagaagaccctag

SEQ ID NO: 21303 - DNA, 945 bp, Artificial Sequence
  derived and/or modified sequence
atggccgaaagaaactataccgtggtgactgagttttttctgaccgctttcactgagcacctgcagtggagggtgcctctattcctgatcttcctttcattttacttggccaccatgctggggaacaccggaatgatcctgctcatcaggggggaccgtagactgcatacccctatgtatttctttctgagccatctgtcccttgtggacatctgctattcctctgccatcatcccccagatgctcgctgtgctgtgggagcacgggaccacaataagccaggcccgctgcgcagcccagtttttcctgtttacattcttcgctagcattgattgctatctgttagcaatcatggcctatgaccgctatactgccgtctgccaaccgctgctttacgtcacaattatcacagaaaaagccaggtggggcctcgtcacgggtgcctatgtggctgggttcttctctgcctttgtaaggacagtgactgcatttacactgtccttttgcggcaataacgaaatcaactttattttttgcgacctgcctccactgctgaagctgtcttgtggcgattcttatacacaagaggttgtgatcatcgtgtttgccctattcgtaatgcctgcctgtatcttggtgattttggtctcatatctgttcataattgtggccatcttgcagatccacagcgcgggtgggcgcgctaagacattcagcacatgcgcgagtcacttaacagccgttgcactattctttgggacgctcatcttcatgtatctgcgcgacaataccgggcagtcaagcgagggcgatcgggtggtgagcgtcttgtacaccgtggtgacccccatgctaaaccccctaatatacagcctgcgaaataaggaggtaaaagaggcgaccaggaaggctctttcaaaatctaagcccgctcgcagaccttag

SEQ ID NO: 21304 - DNA, 945 bp, Artificial Sequence
  derived and/or modified sequence
atggccgagaggaactacacagtggtgacagagttcttcctgacagccttcacagagcacctgcagtggagggtgcccctcttcctgatcttcctgtccttctacctggccaccatgctgggcaacacaggcatgatcctgctgatccggggggaccggcggctgcacacccccatgtacttcttcctgagccacctgagcctggtggacatctgctacagcagcgccatcatcccccagatgctggccgtgctgtgggagcacggcaccaccatcagccaggcccgctgtgccgcccagttcttcctgttcaccttctttgccagcattgactgctacctgctggccatcatggcctatgaccgctacacagctgtgtgccagcccctgctgtatgtgaccatcatcacagagaaggcccgctggggcctggtgactggagcctacgtggccggcttcttcagcgcctttgtgaggacagtgacagccttcaccctgtccttctgtggcaacaatgagatcaacttcatcttctgtgacctgccccccctgctgaagctgagctgtggggacagctacacccaggaggtggtgatcatcgtgtttgccctgtttgtgatgcctgcctgcatcctggtgatcctggtgtcctacctgttcatcatcgtggccatcctgcagatccacagcgctgggggccgggccaagaccttcagcacctgtgccagccacctgacagctgtggccctcttcttcggcaccctcatcttcatgtacctgcgggacaacacaggccagagcagcgagggggacagagtggtgtctgtgctgtacacagtggtgacccccatgctgaaccccctcatctacagcctgaggaacaaggaggtgaaggaggccaccaggaaggccctgagcaagagcaagccagcccggcggccctag

SEQ ID NO: 21305 - DNA, 945 bp, Artificial Sequence
  derived and/or modified sequence
atggccgagcggaactacaccgtggtgaccgagttcttcctgaccgcctttactgagcacctgcagtggcgtgttcctctgtttctaatctttttgagtttttacctggcaacaatgctggggaatactggcatgattttgttgatcagaggggaccgcagactgcacacccctatgtatttcttcctcagtcacttgtcactggtggacatctgttacagcagcgccattataccacagatgctggcagtcctgtgggaacacggcacgacgatcagtcaggcgaggtgcgctgcgcagttttttctttttacgttcttcgcctctatcgactgctacctgcttgccatcatggcctatgaccggtatacagctgtctgccagcctttgctatacgtgacgatcatcactgagaaagcacgatggggattagtgaccggggcatacgttgccgggtttttctcagccttcgtgaggaccgtcacggcattcacactttcattttgtgggaacaacgagattaatttcatcttttgcgaccttccacctctgttgaagttgagttgcggcgactcttacacccaggaagtagtgataatcgtctttgctctgttcgtgatgccagcttgtatactcgtgattctggtgagctatctgttcattatcgtcgcaattctgcagatacactcagccggcggaagagccaaaactttttctacctgcgcaagccacctaacagcagtggctctgttctttgggaccttgatttttatgtacctgcgcgataataccgggcaatcctccgagggcgaccgggttgtatctgtcctatataccgtggtaacaccaatgttaaacccgctgatctactcacttcggaacaaggaagttaaggaagccactcgaaaagccttatctaaatccaaaccagccagaagaccatag

SEQ ID NO: 21306 - DNA, 1085 bp, Artificial Sequence
  derived and/or modified sequence
tgagctgtcccctcatctggctcttgtcttagccgttgcaggtgaaccactggatggatggctgaaaggaattacaccgtagtgacggagttcttccttactgcatttactgaacatctccagtggagggttcctctcttcctcatatttttgagtttctatcttgccactatgttagggaacacaggcatgatcctcctgatccgtggcgatcgtcggctccacaccccgatgtacttcttcctcagccacctttccttggtggacatctgctactcgtccgccatcatccctcagatgctggctgtgctgtgggagcacggcacaaccatctcccaggctcgctgtgcagctcagttcttcctcttcaccttctttgcctccatcgactgctaccttctggccatcatggcctatgaccgctacacggccgtgtgccagcccctgctttatgtcaccatcataaccgagaaggcccgctggggcctagtcactggggcttacgttgctggttttttcagtgcctttgttcgaacggtcacagccttcactctctccttttgtggaaacaatgagatcaacttcattttctgtgacctccctcctctattaaaactctcctgtggggacagctacactcaggaagtggtgattattgtgtttgctcttttcgtcatgcctgcctgtatcttggtgatcttggtatcctacctgtttatcattgtggccatcctgcagatccactctgctggaggccgggccaagaccttctccacctgcgcctcccacctcactgccgtcgctcttttctttggcaccctcatcttcatgtacctgcgagacaacacaggccagtcctccgagggagaccgagtggtgtctgtgctctacacggtggtgaccccaatgctgaatccccttatctatagcctgagaaacaaggaggtaaaagaggccactaggaaagccctgagcaaatcaaagcctgctagaagaccctaaatggacccttgtgaaatatatcattccttagtttccccatcttttctgtcttttctcaatagcaccttctggagagactttcc

SEQ ID NO: 21307 - DNA, 945 bp, Artificial Sequence
  derived and/or modified sequence
atggctgagcggaactataccgtggttacagagttttttttgaccgctttcactgaacacctccaatggcgggttccactgtttctcatttttctgagtttctatcttgcgaccatgctcggaaatactggaatgattctgctcatccgcggtgaccggcgactgcatactcccatgtactttttcctaagccacctgagcctggtggacatttgctacagctcagctataataccccagatgctggccgtactgtgggaacacggcaccaccatctcccaggctcgctgtgcagcacagtttttcttgttcaccttctttgcgtcaattgattgctacctgctggcgatcatggcctacgaccgatacacagccgtctgtcagcccctactgtatgttacgatcatcactgagaaagctcgctgggggctggtgaccggggcatacgtggccggatttttctccgctttcgtccggactgtgaccgccttcaccctatccttctgcggaaacaatgagatcaattttatcttctgcgacctgcccccactgctcaaactgagctgtggggacagctacacgcaggaagtggtcattattgtattcgcccttttcgtgatgccagcgtgcattctggtaatcctcgtgtcatatctctttatcatcgttgccattttgcagattcacagtgctggcggtcgggctaaaaccttctccacctgcgcttcccacctcaccgcagttgcactcttctttgggacgctgatcttcatgtatctacgggacaataccgggcaaagcagcgagggcgatagagtcgttagtgtgctgtacaccgtcgtgaccccaatgttaaaccccctgatatacagcctgagaaacaaagaagtcaaggaggctacacggaaagccttgagcaaaagcaaacccgcacgcagaccttag

SEQ ID NO: 21308 - protein, 320 aa, Artificial Sequence
  derived and/or modified sequence
MDATACNESVDGSPVFYLLGIPSLPETFFLPVFFIFLLFYLLILMGNALILVAVVAEPSLHKPMYFFLINLSTLDILFTTTTVPKMLSLFLLGDRFLSFSSCLLQMYLFQSFTCSEAFILVVMAYDRYVAICHPLHYPVLMNPQTNATLAASAWLTALLLPIPAVVRTSQMAYNSIAYIYHCFCDHLAVVQASCSDTTPQTLMGFCIAMVVSFLPLLLVLLSYVHILASVLRISSLEGRAKAFSTCSSHLLVVGTYYSSIAIAYVAYRADLPLDFHIMGNVVYAILTPILNPLIYTLRNRDVKAAITKIMSQDPGCDRSI

SEQ ID NO: 21309 - DNA, 963 bp, Artificial Sequence
  derived and/or modified sequence
atggacgccaccgcctgcaacgagagcgtggacggcagccccgtgttctacctgctgggcatccccagcctgcccgagaccttcttcctgcccgtgttcttcatcttcctgctgttctacctgctgatcctgatgggcaacgccctgatcctggtggccgtggtggccgagcccagcctgcacaagcccatgtacttcttcctgatcaacctgagcaccctggacatcctgttcaccaccaccaccgtgcccaagatgctgagcctgttcctgctgggcgacagattcctgagcttcagcagctgcctgctgcagatgtacctgttccagagcttcacctgcagcgaggccttcatcctggtggtgatggcctacgacagatacgtggccatctgccaccccctgcactaccccgtgctgatgaacccccagaccaacgccaccctggccgccagcgcctggctgaccgccctgctgctgcccatccccgccgtggtgagaaccagccagatggcctacaacagcatcgcctacatctaccactgcttctgcgaccacctggccgtggtgcaggccagctgcagcgacaccaccccccagaccctgatgggcttctgcatcgccatggtggtgagcttcctgcccctgctgctggtgctgctgagctacgtgcacatcctggccagcgtgctgagaatcagcagcctggagggcagagccaaggccttcagcacctgcagcagccacctgctggtggtgggcacctactacagcagcatcgccatcgcctacgtggcctacagagccgacctgcccctggacttccacatcatgggcaacgtggtgtacgccatcctgacccccatcctgaaccccctgatctacaccctgagaaacagagacgtgaaggccgccatcaccaagatcatgagccaggaccccggctgcgacagaagcatctag

SEQ ID NO: 21310 - DNA, 963 bp, Artificial Sequence
  derived and/or modified sequence
atggacgcaaccgcctgcaacgaatccgtcgacggcagcccggtgttttatctgttgggtatcccatctttacccgagacctttttcctgcccgtgttcttcatctttttactcttttatctgttgatcctaatgggcaatgcgctcatcttggtcgctgttgtggccgaaccatccctgcacaagcctatgtatttcttcttgattaatctgtcaacactggatatattgtttaccacgaccacggttccaaagatgctgtccttattcctcttgggcgatcgattcctgtcctttagcagctgccttcttcagatgtacctgttccagagcttcacgtgctctgaggccttcattcttgttgtgatggcatacgatcggtatgtggccatttgccacccgctgcactaccctgtcctcatgaaccctcagacaaatgctaccctcgctgccagcgcatggctgaccgccttactgctgcccattcccgcagtcgttaggacctctcagatggcgtataatagcatcgcgtatatctaccactgcttctgcgaccacctggcggtcgtgcaggctagctgtagcgacactactccccagacactgatgggattctgtattgctatggtcgtctctttcctgccccttttgttggtgctgttgagctacgttcatatccttgcctcagtgctgcggattagcagcctggagggacgcgctaaagcttttagtacatgcagcagccacctcctggtggtggggacgtactactcttcgattgccattgcctacgttgcttacagggcggaccttccactggatttccacattatggggaacgtggtgtatgctatcctgacccccatcttaaaccctttgatttataccttacggaatagggatgtgaaagcggccataacgaagatcatgtcccaagatccaggctgtgacagatctatttag

SEQ ID NO: 21311 - DNA, 963 bp, Artificial Sequence
  derived and/or modified sequence
atggatgccacagcctgcaatgaatctgtggatggcagccctgtgttctacctgctgggcatccccagcctgcctgagaccttcttcctgcctgtgttcttcatcttcctgctcttctacctgctgatcctgatgggaaatgccctgatcctggtggccgtggtggccgagcccagcctgcacaagcccatgtacttcttcctgatcaacctgagcaccctggacatcctcttcaccaccaccaccgtgcccaagatgctgagcctcttcctgctgggggaccgcttcctgtccttcagcagctgcctgctgcagatgtacctgttccagagcttcacctgcagcgaggccttcatcctggtggtgatggcctatgaccgctacgtggccatctgccaccccctgcactaccctgtgctgatgaacccccagaccaatgccaccctggccgccagcgcctggctgacagccctgctgctgcccatcccagctgtggtgaggaccagccagatggcctacaacagcatcgcctacatctaccactgcttctgtgaccacctggccgtggtgcaggccagctgcagcgacaccaccccccagaccctgatgggcttctgcatcgccatggtggtgtccttcctgcccctgctgctggtgctgctgtcctatgtgcacatcctggcctctgtgctgcgcatcagcagcctggagggccgggccaaggccttcagcacctgcagcagccacctgctggtggtgggcacctactacagcagcatcgccatcgcctacgtggcctacagagctgacctgcccctggacttccacatcatgggaaatgtggtgtatgccatcctgacccccatcctgaaccccctcatctacaccctgaggaacagagatgtgaaggccgccatcaccaagatcatgagccaggaccccggctgtgacaggagcatctag

SEQ ID NO: 21312 - DNA, 1042 bp, Artificial Sequence
  derived and/or modified sequence
ttccagctgcccatctctgagaaatccagctgtgtctcacaatggatgccacagcctgtaatgaatcagtggatggctcacccgtcttctatctattgggcatcccctctctgccagagaccttcttcctccctgtgttttttattttcctcctcttctaccttctcatcctgatgggtaatgccctgatcctggtggccgtggtggcagagcccagcctccacaagcccatgtacttctttctgatcaatctctccaccttggacatccttttcaccacaaccactgtccccaagatgctgtccttattcttgcttggggaccgcttcctcagcttttcttcctgcttactgcagatgtacctcttccaaagttttacatgttcagaagccttcatcctggtggtcatggcctatgaccgctatgtggctatctgccacccactgcactaccctgtcctcatgaacccacagaccaatgctaccttggcagccagtgcctggctaactgccctcctcctgcccatcccagcagtagtaaggacctcccagatggcatataacagcattgcctacatctaccactgcttctgtgatcatctggctgtggtccaggcctcctgctctgacaccaccccccagaccctcatgggcttctgcatcgccatggtggtgtccttcctcccccttctcctggtgcttctctcctatgtccacatcctggcctcagtgcttcgcatcagttccctagaaggacgggcaaaagccttctccacctgcagctcccaccttctggtcgtgggcacctactactcatctattgccatagcctacgtggcctacagggctgacctgccccttgacttccatatcatgggcaatgtggtatatgccattctcacaccaattctcaaccccctcatttacacgctgagaaacagggatgtaaaggcagccatcaccaaaatcatgtctcaagacccaggctgtgacaggagcatttgacctttaaatgcagctaactctgcttccaggacaccaaa

SEQ ID NO: 21313 - DNA, 963 bp, Artificial Sequence
  derived and/or modified sequence
atggacgccaccgcctgcaacgagagcgtggacggcagccccgtgttttacctgctgggcatcccctctctacccgaaaccttctttctcccagtcttctttatttttctcctgttctaccttctgattctgatggggaatgcactcatcctggtggcggtcgtcgctgagccgtcccttcataagcccatgtacttcttcctgataaacctgtctaccctggacattctatttacaactaccacagttccgaaaatgctctcgctgttcttgctcggcgatcgctttttgagcttttccagctgtcttctgcagatgtatctgtttcagagctttacctgtagtgaggctttcatccttgtcgtgatggcttacgaccgctatgtcgccatctgtcaccccctgcactatccagtgctcatgaatccgcagaccaatgccactcttgcagcgagcgcatggctgactgcacttctgctgcccattcccgccgttgtgaggacatcccagatggcatataactctatcgcatatatctaccactgcttctgcgaccacttggccgtggtgcaggctagctgcagtgacaccactccacaaacccttatgggattctgtatcgctatggtagtgagcttcctgccattgttgttggttctgttatcatacgtccacatacttgcgtccgtcctgaggatcagctccctggaagggagggctaaagctttttccacctgctcaagccacctactagttgtcggcacctattactcttcaatcgcaatagcctacgtagcgtaccgggctgatctccccttggattttcacataatgggaaatgttgtttacgccatcctgactccgattctcaacccactcatctacacactgaggaacagggacgtgaaagcagccatcactaagatcatgtcccaggacccaggatgtgatcgttcaatttag

SEQ ID NO: 21314 - DNA, 963 bp, Artificial Sequence
  derived and/or modified sequence
atggatgccaccgcttgtaacgagtccgtggacgggagtccggtcttctacctgctgggaatacccagtctcccagaaaccttttttctgcctgtcttttttatcttcctcctgttctatctgctgatactcatgggcaatgctctcattctggtggccgtggtcgccgaaccttcactccacaagccaatgtacttctttttaatcaacctgtccacgctggatatccttttcactacaactaccgtccccaagatgctgtcactttttctgctaggagatcggttcttgtccttctcgtcctgtcttctacagatgtatttgttccagtccttcacatgcagcgaggcattcatcttggtagtgatggcatatgacaggtatgtcgccatctgccaccctttgcactaccctgtgctgatgaatcctcagaccaatgcaaccctggccgcatccgcttggctaacagcgcttctactaccgataccggcagtggtgagaacttctcagatggcctataactcgatagcatacatctaccactgtttttgtgatcacctagcagtagtgcaggcatcatgtagtgataccactccgcagacgctgatggggttctgcatcgctatggtggtgagttttcttcccttgttactggtgctgctgtcgtacgttcacatccttgctagcgtgctgcgtatttcttctctggagggccgtgccaaagctttctctacttgttcgtcacatcttctagttgtgggcacatactacagttcaatcgctatcgcctacgtggcttaccgggctgacttaccgttggattttcatatcatggggaacgtggtctacgctatcctgacccccatacttaacccattgatatacactctccggaatagagatgtcaaggccgctatcaccaagattatgtcccaggaccctggctgtgatagatctatttag

SEQ ID NO: 21315 - protein, 308 aa, Artificial Sequence
  derived and/or modified sequence
MDTGNKTLPQDFLLLGFPGSQTLQLSLFMLFLVMYILTVSGNVAILMLVSTSHQLHTPMYFFLSNLSFLEIWYTTAAVPKALAILLGRSQTISFTSCLLQMYFVFSLGCTEYFLLAAMAYDRCLAICYPLHYGAIMSSLLSAQLALGSWVCGFVAIAVPTALISGLSFCGPRAINHFFCDIAPWIALACTNTQAVELVAFVIAVVVILSSCLITFVSYVYIISTILRIPSASGRSKAFSTCSSHLTVVLIWYGSTVFLHVRTSIKDALDLIKAVHVLNTVVTPVLNPFIYTLRNKEVRETLLKKWKGK

SEQ ID NO: 21316 - DNA, 927 bp, Artificial Sequence
  derived and/or modified sequence
atggacaccggcaacaagaccctgccccaggacttcctgctgctgggcttccccggcagccagaccctgcagctgagcctgttcatgctgttcctggtgatgtacatcctgaccgtgagcggcaacgtggccatcctgatgctggtgagcaccagccaccagctgcacacccccatgtacttcttcctgagcaacctgagcttcctggagatctggtacaccaccgccgccgtgcccaaggccctggccatcctgctgggcagaagccagaccatcagcttcaccagctgcctgctgcagatgtacttcgtgttcagcctgggctgcaccgagtacttcctgctggccgccatggcctacgacagatgcctggccatctgctaccccctgcactacggcgccatcatgagcagcctgctgagcgcccagctggccctgggcagctgggtgtgcggcttcgtggccatcgccgtgcccaccgccctgatcagcggcctgagcttctgcggccccagagccatcaaccacttcttctgcgacatcgccccctggatcgccctggcctgcaccaacacccaggccgtggagctggtggccttcgtgatcgccgtggtggtgatcctgagcagctgcctgatcaccttcgtgagctacgtgtacatcatcagcaccatcctgagaatccccagcgccagcggcagaagcaaggccttcagcacctgcagcagccacctgaccgtggtgctgatctggtacggcagcaccgtgttcctgcacgtgagaaccagcatcaaggacgccctggacctgatcaaggccgtgcacgtgctgaacaccgtggtgacccccgtgctgaaccccttcatctacaccctgagaaacaaggaggtgagagagaccctgctgaagaagtggaagggcaagtag

SEQ ID NO: 21317 - DNA, 927 bp, Artificial Sequence
  derived and/or modified sequence
atggacaccggtaacaaaactcttccacaggacttcctactgctcggttttccagggtctcaaaccctacaactgtccctcttcatgttgttcctggtcatgtatattttgacagtgtccgggaacgtggcgattttaatgcttgtctcaacgtcacaccagctgcacactccgatgtatttcttcctgtccaacctctcctttctcgagatctggtacaccacagcagcagtccccaaggccctcgccatattgctgggtcgctctcaaacgatcagtttcacctcatgcctgttgcaaatgtactttgtattcagtctcgggtgcacagaatactttcttttggcagcaatggcgtacgataggtgcttggcaatctgctaccccctccattacggagccataatgagcagtctgctctctgcacaactcgccctgggaagttgggtttgtggtttcgttgccatagctgtacctactgcactgatttctgggttgagcttttgcggacctagggccatcaatcactttttctgtgatatcgccccctggatagctttagcttgcaccaacacccaggctgtagagctggtcgcgtttgtgatcgctgtagtcgttattctctcttcctgtttaataacattcgtgtcatatgtctatatcatatcaaccatcctgcggataccatctgcctccggccggagtaaggcttttagcacatgttccagccatcttacagtagtcctcatatggtacggatcgacagtgtttctgcacgttaggacctccatcaaggatgcactggatctgattaaggcagttcatgtgctcaacactgtggtcacccctgtgctgaatccgttcatatataccctcaggaacaaggaagtgcgcgaaactcttttaaaaaaatggaaaggtaagtag

SEQ ID NO: 21318 - DNA, 927 bp, Artificial Sequence
  derived and/or modified sequence
atggacaccggcaacaagaccctgccccaggacttcctgctgctgggcttccctggcagccagaccctgcagctgagcctcttcatgctgttcctggtgatgtacatcctgactgtgtctggaaatgtggccatcctgatgctggtgtccaccagccaccagctgcacacccccatgtacttcttcctgagcaacctgtccttcctggagatctggtacaccacagctgctgtgcccaaggccctggccatcctgctgggccgcagccagaccatctccttcaccagctgcctgctgcagatgtactttgtgttcagcctgggctgcacagagtacttcctgctggccgccatggcctatgaccgctgcctggccatctgctaccccctgcactacggggccatcatgagcagcctgctgagcgcccagctggccctgggctcctgggtgtgtggctttgtggccatcgctgtgcccacagccctgatcagcggcctgtccttctgtggcccccgggccatcaaccacttcttctgtgacatcgccccctggatcgccctggcctgcaccaacacccaggccgtggagctggtggcctttgtgattgctgtggtggtgatcctgagcagctgcctgatcacctttgtgtcctatgtgtacatcatcagcaccatcctgcgcatccccagcgccagcggccgcagcaaggccttcagcacctgcagcagccacctgactgtggtgctgatctggtacggcagcacagtgttcctgcacgtgaggaccagcatcaaggatgccctggacctgatcaaggctgtgcacgtgctgaacacagtggtgacccctgtgctgaaccccttcatctacaccctgaggaacaaggaggtgcgggagaccctgctgaagaagtggaagggcaagtag

SEQ ID NO: 21319 - DNA, 927 bp, Artificial Sequence
  derived and/or modified sequence
atggacaccggcaacaagaccctgccccaggacttcctgctgctgggctttcccggcagtcagacactgcagttatctcttttcatgcttttccttgtgatgtatattctgacagtgagtggaaacgtggccatcctgatgctcgtgagtaccagccaccagctgcatacccccatgtatttcttcctttctaatttatcctttctggagatctggtatacaacagccgccgtccccaaggcccttgcgatcctgctgggaagaagccagacaatttcgtttacgagctgcctgctgcaaatgtacttcgtgttctcactcggttgcacggagtacttcctgttggccgcaatggcttacgatcgctgtttagccatttgctatccacttcattacggagctataatgtcaagcctacttagtgcccagctggccctcggcagttgggtgtgtggcttcgtcgccatcgctgtgcctaccgccctgatttctggcctgtcattttgcgggccacgggccatcaaccactttttctgcgacatcgctccctggatcgcattagcttgtacgaatacccaggcagtcgagcttgtggcctttgtcatcgctgtcgtcgtaattctttctagctgccttatcactttcgtgagctacgtatacatcattagtactattcttaggatccccagtgcgagcggacgcagcaaggctttcagcacgtgcagctcacatctcacagtggtgcttatctggtatggttctaccgtgtttctgcacgtgaggacaagcatcaaagatgccctcgacctgataaaagcagtccacgtgctcaatactgtggtgacccctgtgcttaatccattcatctacacgcttcgcaataaagaagtgcgcgagacattattgaagaagtggaagggtaagtag

SEQ ID NO: 21320 - DNA, 1061 bp, Artificial Sequence
  derived and/or modified sequence
gttaaagggctcagtgcggggactctgttttctggtttcagtaccacaatggacacaggcaacaaaactctgccccaggactttctcttactgggctttcctggttctcaaactcttcagctctctctctttatgctttttctggtgatgtacatcctcacagttagtggtaatgtggctatcttgatgttggtgagcacctcccatcagttgcatacccccatgtacttctttctgagcaacctctccttcctggagatttggtataccacagcagcagtgcccaaagcactggccatcctactggggagaagtcagaccatatcatttacaagctgtcttttgcagatgtactttgttttctcattaggctgcacagagtacttcctcctggcagccatggcttatgaccgctgtcttgccatctgctatcctttacactacggagccatcatgagtagcctgctctcagcgcagctggccctgggctcctgggtgtgtggtttcgtggccattgcagtgcccacagccctcatcagtggcctgtccttctgtggcccccgtgccatcaaccacttcttctgtgacattgcaccctggattgccctggcctgcaccaacacacaggcagtagagcttgtggcctttgtgattgctgttgtggttatcctgagttcatgcctcatcacctttgtctcctatgtgtacatcatcagcaccatcctcaggatcccctctgccagtggccggagcaaagccttctccacgtgctcctcgcatctcaccgtggtgctcatttggtatgggtccacagttttccttcacgtccgcacctctatcaaagatgccttggatctgatcaaagctgtccacgtcctgaacactgtggtgactccagttttaaaccccttcatctatacgcttcgtaataaggaagtaagagagactctgctgaagaaatggaagggaaaataaatctcctctaccacaacagatgtcctgtaaatggtctctgcatctatacagaggttccaagtaagaatgtggaggaatagggcaaa

SEQ ID NO: 21321 - DNA, 927 bp, Artificial Sequence
  derived and/or modified sequence
atggatacagggaataaaacactgccacaggatttccttttactgggcttccctggtagccagacattgcagctatctcttttcatgttgttcttggtaatgtacatcctgactgtttctggaaatgtcgcaattctaatgctggtgtccacttcacaccagctgcatacgcctatgtacttctttctgagcaacctgtcattcctggagatatggtacaccactgccgcagtgcccaaggccctggccatacttctcggcagaagtcagacaattagcttcacgtcgtgcctcctgcagatgtacttcgtattttccctggggtgcaccgaatatttcctgctggccgcaatggcctacgaccggtgtctggctatttgttatcctctacactacggcgcaattatgagctctctgttgtctgcccagctggccctcgggtcatgggtctgtgggtttgttgccattgccgtacctacagctcttatatcaggcctgagcttctgcgggccacgtgccatcaatcacttcttctgcgacatagctccttggattgccctagcctgtacaaatacccaggccgttgaactcgtcgcttttgttatcgcggttgtggtaatactgagctcatgtctgattactttcgtttcatacgtctatatcatttccacgattctgcgtatccccagcgcttccggcagatctaaggcattttccacttgctctagtcacctcacagtagtgttaatctggtatgggtcaacagtgttcctgcacgttagaacaagcatcaaggacgccttggatttgataaaggcggttcatgtcctgaacactgtggtgactcccgtgctgaatccattcatctatacactaagaaataaggaggtgcgggaaactttgttaaaaaagtggaagggcaagtag

SEQ ID NO: 21322 - protein, 1177 aa, Artificial Sequence
  derived and/or modified sequence
MDEPPFSEAALEQALGEPCDLDAALLTDIEGEVGAGRGRANGLDAPRAGADRGAMDCTFEDMLQLINNQDSDFPGLFDPPYAGSGAGGTDPASPDTSSPGSLSPPPATLSSSLEAFLSGPQAAPSPLSPPQPAPTPLKMYPSMPAFSPGPGIKEESVPLSILQTPTPQPLPGALLPQSFPAPAPPQFSSTPVLGYPSPPGGFSTGSPPGNTQQPLPGLPLASPPGVPPVSLHTQVQSVVPQQLLTVTAAPTAAPVTTTVTSQIQQVPVLLQPHFIKADSLLLTAMKTDGATVKAAGLSPLVSGTTVQTGPLPTLVSGGTILATVPLVVDAEKLPINRLAAGSKAPASAQSRGEKRTAHNAIEKRYRSSINDKIIELKDLVVGTEAKLNKSAVLRKAIDYIRFLQHSNQKLKQENLSLRTAVHKSKSLKDLVSACGSGGNTDVLMEGVKTEVEDTLTPPPSDAGSPFQSSPLSLGSRGSGSGGSGSDSEPDSPVFEDSKAKPEQRPSLHSRGMLDRSRLALCTLVFLCLSCNPLASLLGARGLPSPSDTTSVYHSPGRNVLGTESRDGPGWAQWLLPPVVWLLNGLLVLVSLVLLFVYGEPVTRPHSGPAVYFWRHRKQADLDLARGDFAQAAQQLWLALRALGRPLPTSHLDLACSLLWNLIRHLLQRLWVGRWLAGRAGGLQQDCALRVDASASARDAALVYHKLHQLHTMGKHTGGHLTATNLALSALNLAECAGDAVSVATLAEIYVAAALRVKTSLPRALHFLTRFFLSSARQACLAQSGSVPPAMQWLCHPVGHRFFVDGDWSVLSTPWESLYSLAGNPVDPLAQVTQLFREHLLERALNCVTQPNPSPGSADGDKEFSDALGYLQLLNSCSDAAGAPAYSFSISSSMATTTGVDPVAKWWASLTAVVIHWLRRDEEAAERLCPLVEHLPRVLQESERPLPRAALHSFKAARALLGCAKAESGPASLTICEKASGYLQDSLATTPASSSIDKAVQLFLCDLLLVVRTSLWRQQQPPAPAPAAQGTSSRPQASALELRGFQRDLSSLRRLAQSFRPAMRRVFLHEATARLMAGASPTRTHQLLDRSLRRRAGPGGKGGAVAELEPRPTRREHAEALLLASCYLPPGFLSAPGQRVGMLAEAARTLEKLGDRRLLHDCQQMLMRLGGGTTVTSS

SEQ ID NO: 21323 - protein, 1155 aa, Artificial Sequence
  derived and/or modified sequence
  misc_feature (1)..(1): Xaa can be any naturally occurring amino acid
XKIRRALTGEVGAGRGRANGLDAPRAGADRGAMDCTFEDMLQLINNQDSDFPGLFDPPYAGSGAGGTDPASPDTSSPGSLSPPPATLSSSLEAFLSGPQAAPSPLSPPQPAPTPLKMYPSMPAFSPGPGIKEESVPLSILQTPTPQPLPGALLPQSFPAPAPPQFSSTPVLGYPSPPGGFSTGSPPGNTQQPLPGLPLASPPGVPPVSLHTQVQSVVPQQLLTVTAAPTAAPVTTTVTSQIQQVPVLLQPHFIKADSLLLTAMKTDGATVKAAGLSPLVSGTTVQTGPLPTLVSGGTILATVPLVVDAEKLPINRLAAGSKAPASAQSRGEKRTAHNAIEKRYRSSINDKIIELKDLVVGTEAKLNKSAVLRKAIDYIRFLQHSNQKLKQENLSLRTAVHKSKSLKDLVSACGSGGNTDVLMEGVKTEVEDTLTPPPSDAGSPFQSSPLSLGSRGSGSGGSGSDSEPDSPVFEDSKAKPEQRPSLHSRGMLDRSRLALCTLVFLCLSCNPLASLLGARGLPSPSDTTSVYHSPGRNVLGTESRDGPGWAQWLLPPVVWLLNGLLVLVSLVLLFVYGEPVTRPHSGPAVYFWRHRKQADLDLARGDFAQAAQQLWLALRALGRPLPTSHLDLACSLLWNLIRHLLQRLWVGRWLAGRAGGLQQDCALRVDASASARDAALVYHKLHQLHTMGKHTGGHLTATNLALSALNLAECAGDAVSVATLAEIYVAAALRVKTSLPRALHFLTRFFLSSARQACLAQSGSVPPAMQWLCHPVGHRFFVDGDWSVLSTPWESLYSLAGNPVDPLAQVTQLFREHLLERALNCVTQPNPSPGSADGDKEFSDALGYLQLLNSCSDAAGAPAYSFSISSSMATTTGVDPVAKWWASLTAVVIHWLRRDEEAAERLCPLVEHLPRVLQESERPLPRAALHSFKAARALLGCAKAESGPASLTICEKASGYLQDSLATTPASSSIDKAVQLFLCDLLLVVRTSLWRQQQPPAPAPAAQGTSSRPQASALELRGFQRDLSSLRRLAQSFRPAMRRVFLHEATARLMAGASPTRTHQLLDRSLRRRAGPGGKGGAVAELEPRPTRREHAEALLLASCYLPPGFLSAPGQRVGMLAEAARTLEKLGDRRLLHDCQQMLMRLGGGTTVTSS

SEQ ID NO: 21324 - protein, 1073 aa, Artificial Sequence
  derived and/or modified sequence
MDCTFEDMLQLINNQDSDFPGLFDPPQPAPTPLKMYPSMPAFSPGPGIKEESVPLSILQTPTPQPLPGALLPQSFPAPAPPQFSSTPVLGYPSPPGGFSTGSPPGNTQQPLPGLPLASPPGVPPVSLHTQVQSVVPQQLLTVTAAPTAAPVTTTVTSQIQQVPVLLQPHFIKADSLLLTAMKTDGATVKAAGLSPLVSGTTVQTGPLPTLVSGGTILATVPLVVDAEKLPINRLAAGSKAPASAQSRGEKRTAHNAIEKRYRSSINDKIIELKDLVVGTEAKLNKSAVLRKAIDYIRFLQHSNQKLKQENLSLRTAVHKSKSLKDLVSACGSGGNTDVLMEGVKTEVEDTLTPPPSDAGSPFQSSPLSLGSRGSGSGGSGSDSEPDSPVFEDSKAKPEQRPSLHSRGMLDRSRLALCTLVFLCLSCNPLASLLGARGLPSPSDTTSVYHSPGRNVLGTESRDGPGWAQWLLPPVVWLLNGLLVLVSLVLLFVYGEPVTRPHSGPAVYFWRHRKQADLDLARGDFAQAAQQLWLALRALGRPLPTSHLDLACSLLWNLIRHLLQRLWVGRWLAGRAGGLQQDCALRVDASASARDAALVYHKLHQLHTMGKHTGGHLTATNLALSALNLAECAGDAVSVATLAEIYVAAALRVKTSLPRALHFLTRFFLSSARQACLAQSGSVPPAMQWLCHPVGHRFFVDGDWSVLSTPWESLYSLAGNPVDPLAQVTQLFREHLLERALNCVTQPNPSPGSADGDKEFSDALGYLQLLNSCSDAAGAPAYSFSISSSMATTTGVDPVAKWWASLTAVVIHWLRRDEEAAERLCPLVEHLPRVLQESERPLPRAALHSFKAARALLGCAKAESGPASLTICEKASGYLQDSLATTPASSSIDKAVQLFLCDLLLVVRTSLWRQQQPPAPAPAAQGTSSRPQASALELRGFQRDLSSLRRLAQSFRPAMRRVFLHEATARLMAGASPTRTHQLLDRSLRRRAGPGGKGGAVAELEPRPTRREHAEALLLASCYLPPGFLSAPGQRVGMLAEAARTLEKLGDRRLLHDCQQMLMRLGGGTTVTSS

SEQ ID NO: 21325 - DNA, 3534 bp, Artificial Sequence
  derived and/or modified sequence
atggacgagccccccttcagcgaggccgccctggagcaggccctgggcgagccctgcgacctggacgccgccctgctgaccgacatcgagggcgaggtgggcgccggcagaggcagagccaacggcctggacgcccccagagccggcgccgacagaggcgccatggactgcaccttcgaggacatgctgcagctgatcaacaaccaggacagcgacttccccggcctgttcgaccccccctacgccggcagcggcgccggcggcaccgaccccgccagccccgacaccagcagccccggcagcctgagccccccccccgccaccctgagcagcagcctggaggccttcctgagcggcccccaggccgcccccagccccctgagccccccccagcccgcccccacccccctgaagatgtaccccagcatgcccgccttcagccccggccccggcatcaaggaggagagcgtgcccctgagcatcctgcagacccccaccccccagcccctgcccggcgccctgctgccccagagcttccccgcccccgcccccccccagttcagcagcacccccgtgctgggctaccccagcccccccggcggcttcagcaccggcagcccccccggcaacacccagcagcccctgcccggcctgcccctggccagcccccccggcgtgccccccgtgagcctgcacacccaggtgcagagcgtggtgccccagcagctgctgaccgtgaccgccgcccccaccgccgcccccgtgaccaccaccgtgaccagccagatccagcaggtgcccgtgctgctgcagccccacttcatcaaggccgacagcctgctgctgaccgccatgaagaccgacggcgccaccgtgaaggccgccggcctgagccccctggtgagcggcaccaccgtgcagaccggccccctgcccaccctggtgagcggcggcaccatcctggccaccgtgcccctggtggtggacgccgagaagctgcccatcaacagactggccgccggcagcaaggcccccgccagcgcccagagcagaggcgagaagagaaccgcccacaacgccatcgagaagagatacagaagcagcatcaacgacaagatcatcgagctgaaggacctggtggtgggcaccgaggccaagctgaacaagagcgccgtgctgagaaaggccatcgactacatcagattcctgcagcacagcaaccagaagctgaagcaggagaacctgagcctgagaaccgccgtgcacaagagcaagagcctgaaggacctggtgagcgcctgcggcagcggcggcaacaccgacgtgctgatggagggcgtgaagaccgaggtggaggacaccctgacccccccccccagcgacgccggcagccccttccagagcagccccctgagcctgggcagcagaggcagcggcagcggcggcagcggcagcgacagcgagcccgacagccccgtgttcgaggacagcaaggccaagcccgagcagagacccagcctgcacagcagaggcatgctggacagaagcagactggccctgtgcaccctggtgttcctgtgcctgagctgcaaccccctggccagcctgctgggcgccagaggcctgcccagccccagcgacaccaccagcgtgtaccacagccccggcagaaacgtgctgggcaccgagagcagagacggccccggctgggcccagtggctgctgccccccgtggtgtggctgctgaacggcctgctggtgctggtgagcctggtgctgctgttcgtgtacggcgagcccgtgaccagaccccacagcggccccgccgtgtacttctggagacacagaaagcaggccgacctggacctggccagaggcgacttcgcccaggccgcccagcagctgtggctggccctgagagccctgggcagacccctgcccaccagccacctggacctggcctgcagcctgctgtggaacctgatcagacacctgctgcagagactgtgggtgggcagatggctggccggcagagccggcggcctgcagcaggactgcgccctgagagtggacgccagcgccagcgccagagacgccgccctggtgtaccacaagctgcaccagctgcacaccatgggcaagcacaccggcggccacctgaccgccaccaacctggccctgagcgccctgaacctggccgagtgcgccggcgacgccgtgagcgtggccaccctggccgagatctacgtggccgccgccctgagagtgaagaccagcctgcccagagccctgcacttcctgaccagattcttcctgagcagcgccagacaggcctgcctggcccagagcggcagcgtgccccccgccatgcagtggctgtgccaccccgtgggccacagattcttcgtggacggcgactggagcgtgctgagcaccccctgggagagcctgtacagcctggccggcaaccccgtggaccccctggcccaggtgacccagctgttcagagagcacctgctggagagagccctgaactgcgtgacccagcccaaccccagccccggcagcgccgacggcgacaaggagttcagcgacgccctgggctacctgcagctgctgaacagctgcagcgacgccgccggcgcccccgcctacagcttcagcatcagcagcagcatggccaccaccaccggcgtggaccccgtggccaagtggtgggccagcctgaccgccgtggtgatccactggctgagaagagacgaggaggccgccgagagactgtgccccctggtggagcacctgcccagagtgctgcaggagagcgagagacccctgcccagagccgccctgcacagcttcaaggccgccagagccctgctgggctgcgccaaggccgagagcggccccgccagcctgaccatctgcgagaaggccagcggctacctgcaggacagcctggccaccacccccgccagcagcagcatcgacaaggccgtgcagctgttcctgtgcgacctgctgctggtggtgagaaccagcctgtggagacagcagcagccccccgcccccgcccccgccgcccagggcaccagcagcagaccccaggccagcgccctggagctgagaggcttccagagagacctgagcagcctgagaagactggcccagagcttcagacccgccatgagaagagtgttcctgcacgaggccaccgccagactgatggccggcgccagccccaccagaacccaccagctgctggacagaagcctgagaagaagagccggccccggcggcaagggcggcgccgtggccgagctggagcccagacccaccagaagagagcacgccgaggccctgctgctggccagctgctacctgccccccggcttcctgagcgcccccggccagagagtgggcatgctggccgaggccgccagaaccctggagaagctgggcgacagaagactgctgcacgactgccagcagatgctgatgagactgggcggcggcaccaccgtgaccagcagctag

SEQ ID NO: 21326 - DNA, 3468 bp, Artificial Sequence
  derived and/or modified sequence
tgaaagatcagaagagccctgaccggcgaggtgggcgccggcagaggcagagccaacggcctggacgcccccagagccggcgccgacagaggcgccatggactgcaccttcgaggacatgctgcagctgatcaacaaccaggacagcgacttccccggcctgttcgaccccccctacgccggcagcggcgccggcggcaccgaccccgccagccccgacaccagcagccccggcagcctgagccccccccccgccaccctgagcagcagcctggaggccttcctgagcggcccccaggccgcccccagccccctgagccccccccagcccgcccccacccccctgaagatgtaccccagcatgcccgccttcagccccggccccggcatcaaggaggagagcgtgcccctgagcatcctgcagacccccaccccccagcccctgcccggcgccctgctgccccagagcttccccgcccccgcccccccccagttcagcagcacccccgtgctgggctaccccagcccccccggcggcttcagcaccggcagcccccccggcaacacccagcagcccctgcccggcctgcccctggccagcccccccggcgtgccccccgtgagcctgcacacccaggtgcagagcgtggtgccccagcagctgctgaccgtgaccgccgcccccaccgccgcccccgtgaccaccaccgtgaccagccagatccagcaggtgcccgtgctgctgcagccccacttcatcaaggccgacagcctgctgctgaccgccatgaagaccgacggcgccaccgtgaaggccgccggcctgagccccctggtgagcggcaccaccgtgcagaccggccccctgcccaccctggtgagcggcggcaccatcctggccaccgtgcccctggtggtggacgccgagaagctgcccatcaacagactggccgccggcagcaaggcccccgccagcgcccagagcagaggcgagaagagaaccgcccacaacgccatcgagaagagatacagaagcagcatcaacgacaagatcatcgagctgaaggacctggtggtgggcaccgaggccaagctgaacaagagcgccgtgctgagaaaggccatcgactacatcagattcctgcagcacagcaaccagaagctgaagcaggagaacctgagcctgagaaccgccgtgcacaagagcaagagcctgaaggacctggtgagcgcctgcggcagcggcggcaacaccgacgtgctgatggagggcgtgaagaccgaggtggaggacaccctgacccccccccccagcgacgccggcagccccttccagagcagccccctgagcctgggcagcagaggcagcggcagcggcggcagcggcagcgacagcgagcccgacagccccgtgttcgaggacagcaaggccaagcccgagcagagacccagcctgcacagcagaggcatgctggacagaagcagactggccctgtgcaccctggtgttcctgtgcctgagctgcaaccccctggccagcctgctgggcgccagaggcctgcccagccccagcgacaccaccagcgtgtaccacagccccggcagaaacgtgctgggcaccgagagcagagacggccccggctgggcccagtggctgctgccccccgtggtgtggctgctgaacggcctgctggtgctggtgagcctggtgctgctgttcgtgtacggcgagcccgtgaccagaccccacagcggccccgccgtgtacttctggagacacagaaagcaggccgacctggacctggccagaggcgacttcgcccaggccgcccagcagctgtggctggccctgagagccctgggcagacccctgcccaccagccacctggacctggcctgcagcctgctgtggaacctgatcagacacctgctgcagagactgtgggtgggcagatggctggccggcagagccggcggcctgcagcaggactgcgccctgagagtggacgccagcgccagcgccagagacgccgccctggtgtaccacaagctgcaccagctgcacaccatgggcaagcacaccggcggccacctgaccgccaccaacctggccctgagcgccctgaacctggccgagtgcgccggcgacgccgtgagcgtggccaccctggccgagatctacgtggccgccgccctgagagtgaagaccagcctgcccagagccctgcacttcctgaccagattcttcctgagcagcgccagacaggcctgcctggcccagagcggcagcgtgccccccgccatgcagtggctgtgccaccccgtgggccacagattcttcgtggacggcgactggagcgtgctgagcaccccctgggagagcctgtacagcctggccggcaaccccgtggaccccctggcccaggtgacccagctgttcagagagcacctgctggagagagccctgaactgcgtgacccagcccaaccccagccccggcagcgccgacggcgacaaggagttcagcgacgccctgggctacctgcagctgctgaacagctgcagcgacgccgccggcgcccccgcctacagcttcagcatcagcagcagcatggccaccaccaccggcgtggaccccgtggccaagtggtgggccagcctgaccgccgtggtgatccactggctgagaagagacgaggaggccgccgagagactgtgccccctggtggagcacctgcccagagtgctgcaggagagcgagagacccctgcccagagccgccctgcacagcttcaaggccgccagagccctgctgggctgcgccaaggccgagagcggccccgccagcctgaccatctgcgagaaggccagcggctacctgcaggacagcctggccaccacccccgccagcagcagcatcgacaaggccgtgcagctgttcctgtgcgacctgctgctggtggtgagaaccagcctgtggagacagcagcagccccccgcccccgcccccgccgcccagggcaccagcagcagaccccaggccagcgccctggagctgagaggcttccagagagacctgagcagcctgagaagactggcccagagcttcagacccgccatgagaagagtgttcctgcacgaggccaccgccagactgatggccggcgccagccccaccagaacccaccagctgctggacagaagcctgagaagaagagccggccccggcggcaagggcggcgccgtggccgagctggagcccagacccaccagaagagagcacgccgaggccctgctgctggccagctgctacctgccccccggcttcctgagcgcccccggccagagagtgggcatgctggccgaggccgccagaaccctggagaagctgggcgacagaagactgctgcacgactgccagcagatgctgatgagactgggcggcggcaccaccgtgaccagcagctag

SEQ ID NO: 21327 - DNA, 3534 bp, Artificial Sequence
  derived and/or modified sequence
atggacgaaccccccttctctgaggcagctctcgaacaggcactgggtgaaccatgtgacctggatgcggcccttctcactgacatcgagggcgaagtgggagctggcagaggccgtgccaatggactggacgcaccgcgggccggcgccgataggggtgcaatggattgcactttcgaggacatgctgcaactgattaataaccaggattccgattttcccggcctctttgaccccccctacgcgggttctggtgctgggggcacagacccggcttcacccgacacctccagcccaggatctctgtctccaccccccgccacgctctcctcctctctagaagcctttctaagcggacctcaggcggcgccaagcccactctctcctcctcagcccgcccctacacctctgaaaatgtaccccagcatgcccgccttctcccctggcccaggcattaaggaggagtccgtgccacttagtattcttcagacgcccaccccccagccattgccaggagctctgctccctcagagctttcctgcgcccgcgccaccccagttttcgtcaaccccggtgcttggctacccttccccacctggtggttttagtacgggtagccctccagggaacacacagcagccactgcccggtttgcccctcgcctcacctccgggcgtcccccctgtcagcctgcacacccaggttcaatctgtggtgccgcagcagcttctcaccgttaccgctgcaccgacggctgctccggtgacaaccacagtcacgtcccagatccaacaagtgcctgtcttattgcaaccccatttcatcaaggctgattccctcctgctgactgcgatgaagactgatggtgccacagtgaaggctgctggactgtcacccctagtatccggtacaacggtgcagacaggcccactgccaacattggtgtccggaggcacaatcttggccaccgttcccctggtcgtcgacgccgagaagttacccataaatcgtttagcggctggatctaaggccccagcgtccgcccaaagtagaggtgagaaaaggacagcccacaatgcaatagaaaaacgctacaggagctcaattaacgacaagatcatcgaactcaaggacctcgtcgtggggaccgaggccaagctgaacaagtccgccgtactaagaaaggccatcgactacatccgcttcttacagcatagcaaccaaaaattaaaacaggaaaacctttcattacgtacggccgtgcacaagtctaagtctctgaaggatctcgtgagcgcctgcgggtcgggaggcaacaccgacgtgctgatggagggcgtgaagactgaggttgaggacacactcacacctcccccttcggatgcgggcagcccatttcagagctcccctctctccctaggaagtcgtgggtctgggagtggggggtctggctctgactctgagccagattcaccagtgtttgaggattccaaagccaaacccgagcagaggccctccctgcactctagaggtatgttagaccggtctcggttggcactctgcacactagtgtttctgtgtttaagctgtaatcccttagccagcctactcggcgcacgcggactgccaagtccatccgacactaccagcgtgtatcactctcccggccgcaacgtacttggaactgagtcaagagacggtccagggtgggctcagtggcttttgccaccagtggtgtggctccttaatggccttctagtgctagtatcactcgttctgcttttcgtctatggcgagcccgtcacacgccctcatagcggccctgctgtatatttttggcgccacagaaagcaggcggatctagacctggcccgcggtgactttgcacaggctgctcaacaattgtggcttgctctgcgggccttggggagacctctaccaacgagccacctcgatttggcatgctctctgctgtggaatttgattcgtcatttgctccagcggttatgggtcgggaggtggctggccggccgcgctggagggctgcaacaggattgcgcactaagggtcgacgcatccgccagcgcacgcgacgctgcattagtgtaccataaactgcaccagctgcacaccatggggaaacataccgggggtcatctgactgctactaacttagctctttcagccctgaacctggccgagtgcgccggagacgccgtctccgtggccaccctggcggagatctacgtcgccgccgctctgagggttaagacttcactccctcgtgctctgcactttctgactcggtttttcctgtcttcggcacggcaggcttgcctcgctcagtcgggttctgttcctccagcaatgcaatggttgtgccacccagtggggcatcgcttcttcgtcgatggagattggtcagtactgagcaccccatgggaaagtctgtattctctggcgggcaacccagttgatccactggcccaggtcacccagttattccgggagcatctcctggagcgcgcactgaactgtgtcactcagcctaacccaagccctggttccgccgatggcgataaagaattttctgatgccttgggctacctccagctgcttaatagttgctcagacgctgctggagccccagcgtactctttttcaatttcctcttccatggcaacaacaactggtgttgacccagtggccaagtggtgggcatcgctaacggccgtggtcatacattggcttaggagagacgaagaggccgccgaaaggttgtgccccctcgtggagcacttgcctcgggtgctgcaggaaagtgaaagaccgctgcccagagctgcacttcactcattcaaggccgcaagggccctcctgggatgcgccaaggcggagtcaggtcctgcctcattaactatctgcgaaaaagcctctggttatctgcaggactcactggccacgactcctgcctctagctcaatcgacaaagcagtgcagctgtttctatgcgacctgcttttagtggtaagaacctctctgtggcgccagcagcagccgccagcacccgcccccgccgcccaggggacctctagccgcccccaggcctcagccttagagttgcgcggtttccaaagggatctgtcttccctgcgaagactagcacagtcgttccgtcctgcaatgagacgggtatttctgcatgaagcaacggctcggctgatggccggggcctctccgactcgtactcatcagctgctggatcgatccttacgtcgaagagccggtcctggaggcaaagggggtgccgtggccgagctggagccaaggcccaccaggagggaacacgccgaggccctcctgctggccagctgctacctcccgcccggattcctttctgctcccggtcagcgtgtgggtatgcttgcagaggcagccagaactcttgaaaaactcggcgaccggcgtctcctccatgattgccaacagatgcttatgcggttaggtggagggaccaccgtcacatctagctag

SEQ ID NO: 21328 - DNA, 3468 bp, Artificial Sequence
  derived and/or modified sequence
tgaaagatacgaagggcactcacaggggaagtgggagcaggccgtggacgggccaatggtctagatgctccaagggcgggtgccgataggggcgctatggactgcacgtttgaggatatgctgcagctcatcaataaccaggacagcgactttcctggacttttcgatcccccctacgcaggctccggggccggggggacggatccggctagtcctgacacttcgtcccctggttcattaagccctccacccgcaacactaagttcatcactggaggcctttctgtctggaccccaggccgccccctccccactgtctcctccacagccagctccaacccccctgaaaatgtacccatctatgccggcgttttcaccaggtccggggatcaaagaggagagcgtgccactttcaatcctgcagactcctaccccccagcctttgcctggcgctctcctgccccagagcttccccgctcctgcgccaccccaattcagttcaactcccgttttaggatatcccagtccccccggaggcttctctacagggtccccccctggtaacactcagcagccactgccaggcctgccccttgcatccccacccggggttcctcccgtttcactccatacccaggtccagagcgtcgtgcctcagcagctgctgaccgtgacagccgcaccgacagccgcacccgtgaccactactgtgacaagtcaaattcagcaggtcccagtgctgctgcagccgcacttcattaaggcagactctctgttactcactgccatgaagaccgacggcgcaacggtcaaagctgctggtctgtcaccccttgtctcaggcacaacggttcaaaccggccctctgcccaccctggtatcaggcgggacaatcctagcgacagtgccgcttgtggtcgatgcagaaaaattacccatcaaccgactggcggccggctccaaagcccccgctagtgcacagagtagaggggaaaagcggactgcgcacaacgcaatcgagaaaagataccggagtagcattaacgacaaaatcattgagctgaaggacctcgtggtgggcactgaggctaaactgaataaatctgctgtgctgaggaaggccatcgactacattcgcttcctgcagcatagcaaccagaagctcaagcaggagaatctatccttgcggacggcagtccacaaatccaaatccctgaaagacctggtgagcgcttgtggatccggaggcaacactgacgttctaatggagggagtcaaaacagaagtggaagatactcttaccccccctcccagcgacgcgggctctcccttccagagttcaccgttgagtctgggctcccggggctcagggtctggcgggtctggaagtgatagcgaacctgactcccccgttttcgaggactccaaggctaaacccgaacagcgcccatccctgcacagcaggggaatgcttgatagaagccgcctggccctgtgtactctcgtcttcctgtgtctctcgtgtaatcctctggcaagcctgctgggagcacgaggcctgccttcaccgtccgacacaacgagtgtttaccactcgcctggccgaaacgtgctggggacggagtcaagggacggtcccggatgggcacaatggttgctgcctcctgtcgtatggctgctcaatggcttgctggtgctcgtgagcctggtgctgctttttgtgtacggagagcccgtgacacggccacattctgggccagcagtgtatttttggaggcacaggaagcaggccgacctcgaccttgcacgcggagattttgcccaagccgcgcaacagctctggttggctttgagggctcttggaagacctctgccaacttcgcacctggatctagcctgctccctcctgtggaatctgatcaggcacttgttgcagcggctttgggtcggaaggtggctcgctggcagagccggcggactgcaacaggattgtgcgttgagagtcgatgcgtcagcttctgctagagatgccgcactggtgtatcacaagctacatcagttgcacacaatggggaagcacacaggggggcacctgactgccacaaacttggccttatcagcactcaatttagccgagtgcgctggggacgcagtctcagtagccacactggccgagatttacgtcgctgcagcgctgagggtgaaaacaagcctgcccagagcattacactttctgacacgattcttcctgtcctccgcacgtcaggcctgcctcgctcaatcaggcagcgttcctcccgccatgcaatggctctgccaccctgtcggacacaggttttttgtggacggagactggtcagttttatcgacaccctgggaatcactgtactccctggctggtaatccagtggaccctctcgctcaggtgactcagctcttccgggagcacttgcttgagagagcactcaattgcgttactcagcccaacccatcaccaggatcggctgacggcgataaagagttctccgatgccctgggatacctgcaactgttgaactcctgctctgatgccgctggcgcgcctgcctacagcttctccatcagttcatctatggccaccactacgggcgtcgatccagttgcaaagtggtgggctagcttaactgcagtcgtgatccactggttgcggcgagatgaggaggccgcggagagattatgtcccctggtcgagcatctgcctcgtgttctgcaggagtccgaaagacctttgcccagagccgccctgcactcctttaaggctgcccgggccctgctcggttgcgccaaagctgagtcaggcccggctagtctgacaatatgcgaaaaggcgagcggttacctccaggattcactggcgacaacaccagctagctcttctatcgataaggctgtgcagctgtttctgtgcgacttgttgctggtcgtcaggacgagcctttggaggcagcagcagcccccggcgcccgctcctgccgcacagggaacttcctcacggcctcaggccagcgctttggaactgcggggattccagcgggacctgtcatcactgcgcagactcgctcagagtttccggcccgcgatgagaagggtgttcctacatgaagccaccgcccgcttgatggccggggcatctccaacacgaacacatcagttacttgataggagcctgcgccgcagggccggccccggagggaagggtggcgcagtcgccgaactcgagccccgccccactcgccgcgagcatgccgaggctctgctgctggcatcttgctatcttccccctggatttctatctgctcctggccagcgtgtgggaatgctagccgaggctgcacgcacactcgaaaagctgggcgaccgtcgcctgctccacgattgtcagcagatgttgatgcgtctcgggggagggaccacagtgacctccagctag

SEQ ID NO: 21329 - DNA, 3534 bp, Artificial Sequence
  derived and/or modified sequence
atggatgagccccccttcagcgaggccgccctggagcaggccctgggggagccctgtgacctggatgctgccctgctgacagacattgaaggagaggtgggcgccggccggggccgggccaacggcctggatgccccccgggccggggctgacagaggagccatggactgcacctttgaggacatgctgcagctgatcaacaaccaggacagcgacttccctggcctgtttgatcctccctatgccggcagcggggccggcggcacagatcctgccagcccagacaccagcagccctggcagcctgagccccccaccagccaccctgagcagcagcctggaggccttcctgagcggcccccaggccgcccccagccccctgagccccccccagcctgcccccacccccctgaagatgtaccccagcatgcctgccttcagccctggccctggcatcaaggaggagagcgtgcccctgagcatcctgcagacccccaccccccagcccctgcccggggccctgctgccccagagcttccctgccccagccccaccccagttcagcagcacccctgtgctgggctaccccagccccccaggcggcttcagcacaggcagccccccaggcaacacccagcagcccctgcccggcctgcccctggccagccccccaggagtgccccctgtgtccctgcacacccaggtgcagagcgtggtgccccagcagctgctgactgtgacagctgcccccacagctgcccctgtgaccaccaccgtgaccagccagatccagcaggtgcctgtgctgctgcagccccacttcatcaaggctgacagcctgctgctgacagccatgaagacagatggagccaccgtgaaggctgctggcctgagccccctggtgtctggcaccaccgtgcagacaggccccctgcccaccctggtgtctgggggcaccatcctggccaccgtgcccctggtggtggatgctgagaagctgcccatcaaccggctggccgccggcagcaaggccccagccagcgcccagagcagaggagagaagaggacagcccacaatgccatcgagaagcgctaccgcagcagcatcaatgacaagatcatcgagctgaaggacctggtggtgggcacagaggccaagctgaacaagtctgctgtgctgaggaaggccatcgactacatccgcttcctgcagcacagcaaccagaagctgaagcaggagaacctgagcctgaggacagctgtgcacaagagcaagagcctgaaggacctggtgtctgcctgtggcagcggcggcaacacagatgtgctgatggagggcgtgaagacagaggtggaggacaccctgaccccaccacccagtgatgctggcagccccttccagagcagccccctgagcctgggcagccggggcagcggcagcggcggcagcggcagtgacagcgagccagacagccctgtgtttgaggacagcaaggccaagccagagcagaggcccagcctgcacagccggggcatgctggacaggagccggctggccctgtgcaccctggtgttcctgtgcctgagctgcaaccccctggccagcctgctgggcgcccggggcctgcccagccccagcgacaccacctctgtgtaccacagccctggaagaaatgtgctgggcacagagagcagagatggccctggctgggcccagtggctgctgccccctgtggtgtggctgctgaatggcctgctggtgctggtgtccctggtgctgctgtttgtgtatggagagcctgtgacccggccccacagcggccctgctgtgtacttctggaggcacaggaagcaggccgacctggacctggcccggggggactttgcccaggccgcccagcagctgtggctggccctgcgggccctgggccggcccctgcccaccagccacctggacctggcctgcagcctgctgtggaacctgatccgccacctgctgcagaggctgtgggtgggccgctggctggccggccgggccggcggcctgcagcaggactgtgccctgcgggtggatgccagcgccagcgccagagatgctgccctggtgtaccacaagctgcaccagctgcacaccatgggcaagcacactggaggccacctgacagccaccaacctggccctgagcgccctgaacctggccgagtgtgctggagatgctgtgtctgtggccaccctggccgagatctacgtggccgccgccctgcgggtgaagaccagcctgccccgggccctgcacttcctgacccgcttcttcctgagcagcgcccggcaggcctgcctggcccagagcggctctgtgcccccagccatgcagtggctgtgccaccctgtgggccaccgcttctttgtggatggagactggagcgtgctgagcaccccctgggagagcctgtacagcctggccggcaaccctgtggaccccctggcccaggtgacccagctgttccgggagcacctgctggagcgggccctgaactgtgtgacccagcccaaccccagccctggcagcgcagatggagacaaggagttcagtgatgccctgggctacctgcagctgctgaacagctgcagtgatgctgctggggccccagcctacagcttcagcatcagcagctccatggccaccaccactggagtggaccctgtggccaagtggtgggccagcctgacagctgtggtgatccactggctgcggagagatgaggaggccgctgagcggctgtgccccctggtggagcacctgccccgggtgctgcaggagagcgagcggcccctgccccgggccgccctgcacagcttcaaggccgcccgggccctgctgggctgtgccaaggccgagagcggccctgccagcctgaccatctgtgagaaggccagcggctacctgcaggacagcctggccaccaccccagccagcagcagcattgacaaggctgtgcagctgttcctgtgtgacctgctgctggtggtgaggaccagcctgtggaggcagcagcagcccccagccccagccccagctgcccagggcaccagcagccggccccaggccagcgccctggagctgcggggcttccagagggacctgagcagcctgcggcggctggcccagagcttccggcctgccatgagaagagtcttcctgcacgaggccacagcccggctgatggccggggccagccccaccaggacccaccagctgctggacaggagcctgcggaggagagctggccctgggggcaagggcggcgctgtggccgagctggagccccggcccacccggcgggagcacgccgaggccctgctgctggccagctgctacctgcccccaggcttcctgagcgcccctggccagagggtgggcatgctggccgaggccgcccggaccctggagaagctgggggaccggcggctgctgcatgactgccagcagatgctgatgaggctgggcggcggcaccaccgtgaccagcagctag

SEQ ID NO: 21330 - DNA, 3468 bp, Artificial Sequence
  derived and/or modified sequence
tgaaaaatccggcgggccctgaccggggaggtgggcgccggccggggccgggccaacggcctggatgccccccgggccggggctgacagaggagccatggactgcacctttgaggacatgctgcagctgatcaacaaccaggacagcgacttccctggcctgtttgatcctccctatgccggcagcggggccggcggcacagatcctgccagcccagacaccagcagccctggcagcctgagccccccaccagccaccctgagcagcagcctggaggccttcctgagcggcccccaggccgcccccagccccctgagccccccccagcctgcccccacccccctgaagatgtaccccagcatgcctgccttcagccctggccctggcatcaaggaggagagcgtgcccctgagcatcctgcagacccccaccccccagcccctgcccggggccctgctgccccagagcttccctgccccagccccaccccagttcagcagcacccctgtgctgggctaccccagccccccaggcggcttcagcacaggcagccccccaggcaacacccagcagcccctgcccggcctgcccctggccagccccccaggagtgccccctgtgtccctgcacacccaggtgcagagcgtggtgccccagcagctgctgactgtgacagctgcccccacagctgcccctgtgaccaccaccgtgaccagccagatccagcaggtgcctgtgctgctgcagccccacttcatcaaggctgacagcctgctgctgacagccatgaagacagatggagccaccgtgaaggctgctggcctgagccccctggtgtctggcaccaccgtgcagacaggccccctgcccaccctggtgtctgggggcaccatcctggccaccgtgcccctggtggtggatgctgagaagctgcccatcaaccggctggccgccggcagcaaggccccagccagcgcccagagcagaggagagaagaggacagcccacaatgccatcgagaagcgctaccgcagcagcatcaatgacaagatcatcgagctgaaggacctggtggtgggcacagaggccaagctgaacaagtctgctgtgctgaggaaggccatcgactacatccgcttcctgcagcacagcaaccagaagctgaagcaggagaacctgagcctgaggacagctgtgcacaagagcaagagcctgaaggacctggtgtctgcctgtggcagcggcggcaacacagatgtgctgatggagggcgtgaagacagaggtggaggacaccctgaccccaccacccagtgatgctggcagccccttccagagcagccccctgagcctgggcagccggggcagcggcagcggcggcagcggcagtgacagcgagccagacagccctgtgtttgaggacagcaaggccaagccagagcagaggcccagcctgcacagccggggcatgctggacaggagccggctggccctgtgcaccctggtgttcctgtgcctgagctgcaaccccctggccagcctgctgggcgcccggggcctgcccagccccagcgacaccacctctgtgtaccacagccctggaagaaatgtgctgggcacagagagcagagatggccctggctgggcccagtggctgctgccccctgtggtgtggctgctgaatggcctgctggtgctggtgtccctggtgctgctgtttgtgtatggagagcctgtgacccggccccacagcggccctgctgtgtacttctggaggcacaggaagcaggccgacctggacctggcccggggggactttgcccaggccgcccagcagctgtggctggccctgcgggccctgggccggcccctgcccaccagccacctggacctggcctgcagcctgctgtggaacctgatccgccacctgctgcagaggctgtgggtgggccgctggctggccggccgggccggcggcctgcagcaggactgtgccctgcgggtggatgccagcgccagcgccagagatgctgccctggtgtaccacaagctgcaccagctgcacaccatgggcaagcacactggaggccacctgacagccaccaacctggccctgagcgccctgaacctggccgagtgtgctggagatgctgtgtctgtggccaccctggccgagatctacgtggccgccgccctgcgggtgaagaccagcctgccccgggccctgcacttcctgacccgcttcttcctgagcagcgcccggcaggcctgcctggcccagagcggctctgtgcccccagccatgcagtggctgtgccaccctgtgggccaccgcttctttgtggatggagactggagcgtgctgagcaccccctgggagagcctgtacagcctggccggcaaccctgtggaccccctggcccaggtgacccagctgttccgggagcacctgctggagcgggccctgaactgtgtgacccagcccaaccccagccctggcagcgcagatggagacaaggagttcagtgatgccctgggctacctgcagctgctgaacagctgcagtgatgctgctggggccccagcctacagcttcagcatcagcagctccatggccaccaccactggagtggaccctgtggccaagtggtgggccagcctgacagctgtggtgatccactggctgcggagagatgaggaggccgctgagcggctgtgccccctggtggagcacctgccccgggtgctgcaggagagcgagcggcccctgccccgggccgccctgcacagcttcaaggccgcccgggccctgctgggctgtgccaaggccgagagcggccctgccagcctgaccatctgtgagaaggccagcggctacctgcaggacagcctggccaccaccccagccagcagcagcattgacaaggctgtgcagctgttcctgtgtgacctgctgctggtggtgaggaccagcctgtggaggcagcagcagcccccagccccagccccagctgcccagggcaccagcagccggccccaggccagcgccctggagctgcggggcttccagagggacctgagcagcctgcggcggctggcccagagcttccggcctgccatgagaagagtcttcctgcacgaggccacagcccggctgatggccggggccagccccaccaggacccaccagctgctggacaggagcctgcggaggagagctggccctgggggcaagggcggcgctgtggccgagctggagccccggcccacccggcgggagcacgccgaggccctgctgctggccagctgctacctgcccccaggcttcctgagcgcccctggccagagggtgggcatgctggccgaggccgcccggaccctggagaagctgggggaccggcggctgctgcatgactgccagcagatgctgatgaggctgggcggcggcaccaccgtgaccagcagctag

SEQ ID NO: 21331 - DNA, 3534 bp, Artificial Sequence
  derived and/or modified sequence
atggacgagccccccttcagcgaggccgccctggagcaggccctgggagagccctgtgatcttgacgctgccctgctgacagacattgaaggtgaagtgggggctggtcgagggagagcaaacggcctcgacgcacctcgcgcgggtgcagaccggggcgcaatggattgcacattcgaagacatgctccagcttataaacaatcaggattccgacttcccaggtctctttgaccccccatatgcgggatccggggccggggggacggatcccgctagccctgataccagcagccctgggtccctttctcctcccccggcgacattatcctcctcattagaggcatttctctctgggccacaagccgccccttcacccttatccccaccccagccggctcccacgccactcaagatgtacccttcgatgccagccttctctcctgggcctggcatcaaggaggaatctgttccactatctatactgcagacacccacaccccagcctctgccaggagcgctgctccctcagtcatttcctgcccctgccccacctcagttctcgtccacacccgtcctgggctatccttctccccccggtggcttcagcaccggttcccctcctggcaatacccaacaaccgttgcctggactccccctagccagtccgcccggggtaccaccagtgagtctccacacccaggtgcaaagcgtggtgcctcagcagctgcttacagttacagccgccccaaccgcagcacctgtcaccactacggtcacgtcgcagatccagcaggtgcctgttctcctgcagccacacttcatcaaggctgactcgctgcttctgaccgcaatgaagacagatggtgcaacagtgaaggctgccggattatcccctctggtgtccggtacgacggtccagactggtccactgcccaccctggtaagcggcggaaccattctggccaccgtgcctctggtggtcgatgcagagaagctccctataaaccgtctggccgctggttccaaagctccagcctctgcgcaatctagaggagaaaagcgcacagctcacaatgccatcgagaagcgctacagatcctccattaacgataaaatcatcgaactcaaggatctggtggtcggcacagaggcaaaattaaataagtcagctgtactccggaaggcgatcgattatatccggttcttgcagcacagcaatcagaagctcaaacaggagaatctgtccctcagaacagctgtacacaaatcaaaaagcctgaaagatcttgtttccgcttgcggaagcggaggtaataccgatgtactgatggagggcgtgaagactgaagtggaagacacgctgacaccgcccccctcagatgccggaagcccctttcaatcttccccgctaagtctgggttcgcgcggcagtggctctggggggagtggctctgattctgaacctgattctccagtgttcgaggactccaaagccaaacctgagcagcggcctagcctccactcaagaggaatgctggatagatccaggctcgctctgtgtactctggtgtttttgtgtctctcatgcaaccctcttgcctctctgctgggcgcacgaggcctgccttcaccatcagacactacttctgtctatcactcgcctgggagaaatgtactcggcactgaatctagagatggcccaggctgggcgcagtggctacttcctccagtggtgtggctgctcaatgggctacttgtcctcgtgtccctcgtattactttttgtctacggtgagccagtgacccgcccacacagcggccctgccgtctatttctggcggcatcgtaagcaggctgatctggacttggcaagaggcgatttcgcccaggctgcccagcaactgtggcttgctctgagagccctgggacgaccactccccacgagccacctggatctggcctgcagtctgttgtggaacctaatacgacacttactgcagcgtctgtgggttggacgctggctggcgggaagggctggcggtctccaacaggactgcgccctgcgcgtcgacgcgtccgctagcgcacgtgatgcggctctggtataccataagctccaccagctgcacacaatgggaaagcacacaggaggccaccttacagcaaccaatctggccctgtcagccctcaaccttgcagagtgtgcaggagacgctgtgtctgtggcaaccctggctgagatttacgtcgctgcagctttgagagttaaaacctctcttccacgagctcttcattttctgacccgatttttcctgtcctctgcccgtcaggcgtgcctggcccagtctggcagcgtcccgcctgctatgcagtggctgtgccatcccgttggccataggttttttgtcgacggcgactggagcgttttgtccactccgtgggaaagtctttattcattggctggaaacccagtggatccactcgcccaagttacgcagcttttccgagaacacttacttgaaagagccctgaactgtgtcacccagcctaatccaagtccagggagtgccgacggagacaaggaatttagcgatgctttagggtacttgcagctgctaaactcttgcagtgacgcagctggtgctcccgcatattccttcagcatcagttcatccatggctactactactggggtagatcctgtagcaaaatggtgggcctctttaaccgccgtggtgattcattggcttagaagggacgaggaggcggcagagaggctttgtccactggttgagcacctccctcgggtgctgcaggagagcgaaagaccactgcctcgggctgccctgcattcattcaaagccgcccgggccttgttgggctgtgcaaaggccgagtcaggacccgcctcactgacaatctgtgaaaaggcatccgggtacctccaggactccctcgcaacaacaccggcctcctcatccattgacaaggccgtgcagctgtttctctgcgacctgctgctggtggtaaggaccagcttatggcggcagcaacagccaccggcccccgcaccggccgcacaaggcactagcagccggcctcaggcctcagcccttgagttgaggggattccaaagggacctgtcttctctgcgccgactcgcacaaagcttccggccagctatgaggcgagtatttcttcacgaggccaccgcgcggctcatggctggagcttcgccaacacgtacacaccaattgctggataggtccctcagacgacgagctggccccggcggtaagggcggagctgtagctgagctggagccccgcccaacgagacgggagcacgcagaggccttattactagcctcctgctacctgcccccaggcttcctcagtgccccgggccagcgggtcggaatgctggctgaagcggcaaggacactcgaaaaattgggtgacaggagattgttgcacgattgtcaacagatgctgatgagactggggggcggcaccacagtgacctcttcctag

SEQ ID NO: 21332 - DNA, 3468 bp, Artificial Sequence
  derived and/or modified sequence
tgaaagatccggcgggccctgaccggcgaggtgggcgccggccggggtagagcaaacgggcttgacgctccccgagccggagccgatagaggcgcaatggactgtacattcgaggatatgttgcaattgattaataaccaggattccgactttccaggcctgtttgaccccccctatgctggaagtggagcaggcgggaccgaccccgcatcccccgacacatctagccccggctcactgtccccaccaccggcaaccctttcttcttcgctggaagctttcttatcaggcccccaagctgcccccagcccgttgagccctcctcagcctgcacctaccccacttaaaatgtacccaagcatgcctgccttttcccctggcccagggatcaaggaagaatccgtgccactgtccatactgcagaccccaaccccccagccccttccaggggcccttctgcctcagtcctttcccgcgcctgcacccccacagttttcctcaactccagtgctggggtacccttctccaccaggcgggttttctaccggttcgcctcctggtaatacacagcagccactgccaggactgcctctggcctccccacccggggtgcccccagtgtccctgcacacccaggtgcagagtgtggtaccccagcagttgttgacagtgaccgccgctcccaccgccgctccagtcaccacaacagttacctctcagatccagcaggttccagtgctgcttcagccacacttcatcaaggcagactctttgctgcttacagccatgaaaactgatggcgcgacagttaaggccgccggactgagccctctagtctccgggacgacagtgcagaccggacccctcccgactctcgtgtccggcggcaccattcttgccaccgttccactggtggtggatgcagaaaaattacccattaaccggctagcggccggctcgaaagcccctgcttccgcgcaatctcgaggcgaaaaacgaaccgcccacaacgctattgaaaaacggtacaggagctccatcaatgataagattatcgagctcaaagatttagtcgtaggtactgaggcaaagctgaataaatctgctgtgctgcggaaagcaatcgactacataaggtttcttcagcacagcaatcagaagctgaagcaggaaaacctctctcttcggaccgccgttcacaagtccaagtcactgaaagacttggtgagcgcatgtgggtcaggcgggaataccgatgtccttatggaaggcgtgaaaaccgaagtggaggataccctcacccccccaccttctgacgcgggaagcccatttcaatcctctcccctgtcactgggatctcgcggctctggtagtggcggctccgggagcgatagtgaaccagacagtccagtttttgaggatagtaaagccaaaccggagcagcgaccctccctgcattctagagggatgctcgacagatctaggctcgccctctgcacactcgtcttcttatgcctgtcttgtaaccctctggctagtctcctgggcgcaaggggcctaccatccccttcagatacaacatccgtttaccactctcctggtagaaatgtactgggaacagaatcccgggacgggcccggctgggcccagtggctgcttccccctgtggtgtggttactgaacgggcttctcgtgctcgtgtccctggtcttgctctttgtgtacggcgagccagtaacaagaccccactctgggccggcggtgtatttctggcgccacaggaaacaagcggacctggatcttgcaaggggcgactttgctcaagccgcacaacaactgtggctggcccttagagctttaggccggcccctccctaccagtcacctggatctggcctgtagcctactgtggaacctcattcggcatctgttgcagagactttgggtgggtcgctggttggcaggtcgcgctggtggtttgcagcaggattgcgcgcttcgagtggatgcgtcagcttcagctcgcgatgccgcactggtttatcacaagctgcaccagttacacacaatgggaaaacacactggtggccatctgactgcaacaaacctggctttgtctgcactcaaccttgcggagtgtgccggcgatgcagtcagcgtggccaccctggccgagatttacgtggccgctgcgctgcgagtcaagacttcgctgcccagagccctccactttctgaccagattcttcctctccagtgcacggcaggcctgcctagctcagtccggatccgtccctccagccatgcaatggctctgccatcctgtgggccatcgctttttcgttgatggcgactggagtgtgctcagtaccccctgggaatcactgtacagtctcgccggtaacccagtagaccctctggcccaggtcacacagttgtttcgcgaacacctgctggagcgggctcttaactgcgttacgcaacccaatccctcaccaggttcggccgacggggataaagaattcagcgatgcgcttgggtacctgcaactgctcaacagttgctctgatgctgccggggcccccgcgtacagtttctcaatcagctcttcaatggctaccacaaccggcgttgaccccgttgccaagtggtgggcaagcctgacagctgtcgttattcactggctcagacgggacgaggaggccgccgaacgtctgtgccccttagtcgaacatttaccaagggtgctgcaggaatcagagaggccactgcctagagcagccctgcacagctttaaggccgcgagggccctcttgggatgtgccaaggcagagtctggccccgcttccctcacaatctgcgagaaagcttcaggatacttgcaggattccctggcgacgactcctgcttccagtagtatcgacaaggccgttcagctttttctgtgcgacttgttgttagtggtgagaacttccttatggcgccaacagcagccacctgcccccgcccccgcggcacaaggaacctcaagtaggccgcaagcctcggccctggaactgagaggatttcagagagacctgtcctccctgaggcgtctggcccagtcttttcggccggcgatgcgacgggtattcttacacgaagcaacggctagactgatggccggagcctcccccacgaggacccaccagctgctggatcggagcctccgcagacgggccggccccggtggaaaggggggcgccgtggccgagctggagccacgccccactcgccgtgagcacgctgaggctctccttttagctagctgttacctccctccaggtttcctttccgcacctggccagcgcgtcgggatgttggctgaggctgccaggaccctggaaaagctgggcgaccgtaggctgttacacgactgccagcagatgttgatgcggctgggaggaggtactacagtcacaagcagttag

SEQ ID NO: 21333 - DNA, 3534 bp, Artificial Sequence
  derived and/or modified sequence
atggacgagccacccttctccgaggctgctctggagcaggcacttggggaaccatgtgatctcgatgctgctctgctcactgatattgagggggaggtgggagccggtcgtggacgagcaaacggactggacgctccacgagcaggagccgaccggggtgcgatggactgcacgtttgaggacatgttgcaactcattaataaccaggactcagactttcctgggctgttcgacccaccttacgcgggaagcggtgcaggaggcaccgatccagcctcgccagacacaagtagccccggtagcctgtctcctccgccagccacactgtcatccagtttggaggcttttctctctggaccccaggctgcgccaagtcccctgagtcctccccaaccagcaccgacccctctgaagatgtatcctagcatgccggcattctccccgggaccaggcataaaagaagaaagcgtgcctctctcgatcctgcaaacccctacccctcagcctcttcctggcgcactactgcctcaaagctttcccgctccagctccgcctcagttctctagtacccctgtgctgggatacccatcgccccctggcggtttttccaccggtagccctccgggtaacacgcagcagcctctgcctggcctccctcttgcctccccacctggcgtgccacctgtgagtctgcatacccaggtgcagagtgtcgttccacaacagctcctcaccgtgactgccgctccaaccgccgcacccgttactaccaccgttaccagccaaatccagcaagtacccgtcttattacagccacacttcatcaaagcagatagccttttactgaccgcaatgaagacagacggtgctaccgtgaaggcagcagggctgtctcctcttgtttctggaacaactgttcagacgggaccgctaccaaccctcgtctccggtggaacaatcctggccactgtgccattggtcgtggacgcagaaaaactgccaattaacaggctggccgcaggctctaaggccccagcttccgctcagtctagaggagagaagcggactgcacacaacgccattgagaaaaggtaccgctcctctatcaacgacaaaattatagagttgaaagatcttgttgtgggcaccgaggctaaactgaataaatctgctgtcctccgcaaggccatcgactatattcgattcctgcagcattccaaccaaaagctcaaacaggaaaacttgagcctacgcaccgcagtccataagagcaaatcactgaaggacctcgtttccgcatgcggctccgggggtaacacggatgtgctaatggaaggagtcaagactgaggtggaagatactctaacacctccgcctagcgacgccggatcccccttccagtcttctccactatccttgggttccagaggatcaggctctgggggatctggaagcgacagcgagcccgacagccctgtcttcgaggactccaaagcaaagccagagcagcgccctagtcttcacagccgaggtatgctcgatcgttctaggctggccctgtgtaccctcgtattcctctgcctgtcctgcaatccgctcgcgtccctactgggcgctagaggcctcccaagccccagtgatactaccagcgtctaccactccccgggtcgcaacgttctcggtaccgagtccagggacggccctgggtgggcacagtggctcttgccacccgtggtttggctgctgaatgggctgctggtcctggttagccttgtcctgctgttcgtgtacggagaacccgtgactcgccctcatagtggccctgcagtctacttctggagacaccggaagcaggccgacttagacctggctcgcggtgactttgctcaagctgcccagcagctgtggctggccttacgcgcactgggaaggcctcttccgacaagccacctggacctcgcctgctcactgctgtggaacttaatcagacacctactccaaagactctgggtggggaggtggctggccggacgggcaggaggcctccagcaggactgtgccttgcgcgtcgatgccagtgcttcagcacgcgacgctgcacttgtgtaccacaaactgcatcagttacacaccatggggaagcatacaggaggacaccttaccgcaacaaatcttgccctctctgctttgaatcttgccgagtgcgcgggtgatgctgtgagtgttgctacgcttgcggagatttacgtcgcagctgctcttagggtaaagactagcctgcccagagccctgcattttctgactcgcttttttctgtcctccgcgaggcaggcttgcctggcacagtcaggttctgtgccgccagcaatgcagtggctgtgccatccggtgggccaccgctttttcgtcgacggagactggtccgtgctgagtacaccctgggaaagcttgtatagcctggccggaaatcctgtcgatccacttgctcaggtgactcagctgttccgcgaacacctgcttgaaagggccctgaactgcgtcacacagccaaatccatcccctggaagcgctgacggggacaaagaattctctgatgccctgggctatctgcagttactgaacagctgctctgacgctgctggggcaccagcttactctttctccatatcatcttcgatggcaacaaccacaggggtagatccagtggctaagtggtgggcttctcttacggcagtcgtcattcattggctcaggagagatgaagaagccgcagaacggctgtgtccactcgttgagcacctcccacgggtcttgcaggagtctgagcggcctcttccacgagccgcactgcatagctttaaggccgcacgggcattactcgggtgtgcaaaagctgagtccggtccagcatccctcacaatctgtgaaaaggcctccggatatttgcaggattccctcgctaccacacctgccagctcgtctatcgataaggcggtgcagctctttctgtgcgatttactcctggttgttcgaaccagtctttggcgccagcagcagcctccagctcctgcccctgcagcgcagggaacctcttcccgccctcaggccagtgcgctcgaattgagaggatttcagagggatctgtcttcccttcgcaggctggctcagagttttagaccagccatgcgcagagtttttctgcacgaagctaccgccaggctcatggctggcgcaagtcccaccaggactcatcagttgcttgatcgaagtcttcgtcggcgtgccggtccagggggtaaagggggagcagtggcagagctcgaaccacgtccaactcgccgagaacatgccgaggctctccttctcgcttcctgttatctgccgccaggctttttgtccgcccctggtcagcgagttgggatgctggccgaggcagcccgtactttggaaaagttgggagaccgcaggctcctccatgactgtcagcagatgctgatgcggctcgggggaggaaccacagtaacctcatcctag

SEQ ID NO: 21334 - DNA, 3468 bp, Artificial Sequence
  derived and/or modified sequence
tagaagattcgaagagcacttaccggagaagtgggcgctggaaggggtagagctaatgggcttgatgccccacgggcaggggctgaccggggagctatggattgcacattcgaagacatgttgcagctgattaataaccaggactctgattttccgggactctttgatcctccctatgcaggaagtggcgcagggggtacagatcctgcaagtcccgacacttcctcacctggctcgctttcccctccacccgcaaccctgagttcctctctggaagcattcctgagtggacctcaggcggcacctagccctctatcaccgccacagccggctccaacgcctctgaagatgtatccaagcatgcccgctttctctcctggaccaggcatcaaggaggagtctgtgccattatccattttacagacgccaactcctcagcctcttcctggtgccctgttgccccagagctttccagcccctgctccaccgcagtttagttccacgcccgtgctcggataccctagcccacccggaggctttagcacaggatcaccacctggtaacacacagcagccattgcccggtcttcccctggccagtccgccaggagtgccacccgtgtcccttcacacacaggtgcagtccgtcgtcccacagcaactcttaactgtcactgccgcaccaaccgcagctcctgtaactaccacagtcacgtcacagatacagcaggtgcctgtgctgttgcagcctcattttataaaagccgatagtctccttttgactgccatgaaaacggacggcgctaccgtgaaagctgccggtctttccccgttggtgagcgggaccactgtgcaaactggtcccctaccaactctagtctccgggggtactattcttgcaaccgtgcctctggtggtggatgccgagaaattgccaattaataggttagcggcaggctctaaagcccctgcgtcagcacagtcccggggagagaaacggactgctcacaacgctattgaaaagaggtaccgctcatcgatcaatgacaaaatcatagaactgaaggacttggtggtcggaacagaggctaaattaaacaagagcgctgttctccggaaggccattgactatatcagatttctccagcactctaaccaaaaattgaagcaggagaacctgtcgttacggaccgcagttcataaatcaaaatccctgaaggatctggtgtcagcctgcggcagcggcggaaacactgacgtgctgatggagggcgttaaaacagaagttgaggatacactgacaccccctcccagtgatgcgggatcacccttccagtcgtctccactctccctgggtagcaggggatctggctctgggggatccggttcagattccgagccagacagccccgtcttcgaggatagcaaagcaaaacctgagcaaaggccgtccctccacagcagaggtatgttagatagatcccgtctggctctgtgcacactggtgttcttgtgtctctcttgcaatcccctggcctcacttcttggggcacggggactgccaagccccagcgatactaccagcgtttatcattctccagggcgtaacgtgctaggcacagagtcccgcgacggcccaggatgggcgcagtggctgctgcccccagtcgtgtggcttcttaatgggctactagtgctggtgtctctcgtgctcctttttgtgtatggtgagcctgtgactcgtccacactccggtccagctgtgtacttctggcgtcaccgcaagcaggccgaccttgatttggccagaggcgactttgcacaagccgcacagcagctgtggcttgccctgagggcccttggaagaccccttcctacctcccacctcgacctggcctgcagcctgttgtggaatctgattaggcacctactgcaacgcctgtgggtgggtcgctggctggcagggagggcagggggactgcagcaggattgcgccttacgtgtggacgctagcgccagcgctagggacgccgctctggtatatcacaagctacatcagttgcacaccatgggtaagcacacaggcggacatttgactgcaacaaatctcgccctctccgctcttaatctagccgaatgtgctggggatgctgtgagcgttgcaaccctggccgaaatttatgtggcggctgctttgcgcgtcaaaacttcactccctagagcactgcatttcctgaccagattcttcctctcaagcgcgagacaggcatgtctcgcccagtcaggatctgttccaccagcaatgcagtggctgtgccaccctgttggccatagattcttcgttgatggcgattggtctgtcctgagcacaccctgggaatctctctattccctggctgggaatccagtggatccgctggcccaggttactcagttgtttcgcgaacacctcctggaacgcgcattaaattgtgtaacccagccaaaccctagtccgggatctgccgatggggataaagaatttagcgatgctctggggtatcttcaattactgaactcctgctcagatgcagcaggagcacccgcttactctttttcgattagcagttctatggccactactacaggggtagaccccgtggccaagtggtgggccagcctgaccgcagtagtgatacactggctgcgtcgagatgaagaggccgctgagcgtctttgtccattggtcgagcaccttcccagagtcctacaagagtccgaacgaccgctccccagagcagcattacacagctttaaggcggcaagggccctgttaggctgcgccaaagcagagagcgggcctgcttccctgacgatttgtgaaaaggcatccggatatttgcaggactctttggcaaccactccagcctcaagttctatcgacaaggctgtccagttatttctgtgcgatctgcttctggtcgtaaggactagcctatggcgacagcagcagccaccggcacccgctcccgctgcccaggggacgtccagtcgtcctcaagcctctgcactggagctgagggggttccagagggacttgagctccctgaggagactagcacagtcctttaggccggctatgcggagagtctttctgcatgaggccacggcccgactcatggccggagcctcccccactcgtactcaccagctgcttgaccggtctcttaggaggagagccggtccaggagggaagggcggagctgtggcagagctagaaccaagacctacccgtcgcgaacacgcagaagcacttctgttggcgtcttgctacctgccgcctggcttcctgagcgctcctgggcagagagtgggcatgttggcagaggccgctcgtactctggaaaaactgggcgatagaagactcctgcatgactgccagcaaatgctcatgcgattagggggaggaactaccgtgacatcatcttag

SEQ ID NO: 21335 - DNA, 4252 bp, Artificial Sequence
  derived and/or modified sequence
agtttccgaggaacttttcgccggcgccgggccgcctctgaggccagggcaggacacgaacgcgcggagcggcggcggcgactgagagccggggccgcggcggcgctccctaggaagggccgtacgaggcggcgggcccggcgggcctcccggaggaggcggctgcgccatggacgagccacccttcagcgaggcggctttggagcaggcgctgggcgagccgtgcgatctggacgcggcgctgctgaccgacatcgaaggtgaagtcggcgcggggaggggtagggccaacggcctggacgccccaagggcgggcgcagatcgcggagccatggattgcactttcgaagacatgcttcagcttatcaacaaccaagacagtgacttccctggcctatttgacccaccctatgctgggagtggggcagggggcacagaccctgccagccccgataccagctccccaggcagcttgtctccacctcctgccacattgagctcctctcttgaagccttcctgagcgggccgcaggcagcgccctcacccctgtcccctccccagcctgcacccactccattgaagatgtacccgtccatgcccgctttctcccctgggcctggtatcaaggaagagtcagtgccactgagcatcctgcagacccccaccccacagcccctgccaggggccctcctgccacagagcttcccagccccagccccaccgcagttcagctccacccctgtgttaggctaccccagccctccgggaggcttctctacaggaagccctcccgggaacacccagcagccgctgcctggcctgccactggcttccccgccaggggtcccgcccgtctccttgcacacccaggtccagagtgtggtcccccagcagctactgacagtcacagctgcccccacggcagcccctgtaacgaccactgtgacctcgcagatccagcaggtcccggtcctgctgcagccccacttcatcaaggcagactcgctgcttctgacagccatgaagacagacggagccactgtgaaggcggcaggtctcagtcccctggtctctggcaccactgtgcagacagggcctttgccgaccctggtgagtggcggaaccatcttggcaacagtcccactggtcgtagatgcggagaagctgcctatcaaccggctcgcagctggcagcaaggccccggcctctgcccagagccgtggagagaagcgcacagcccacaacgccattgagaagcgctaccgctcctccatcaatgacaaaatcattgagctcaaggatctggtggtgggcactgaggcaaagctgaataaatctgctgtcttgcgcaaggccatcgactacattcgctttctgcaacacagcaaccagaaactcaagcaggagaacctaagtctgcgcactgctgtccacaaaagcaaatctctgaaggatctggtgtcggcctgtggcagtggagggaacacagacgtgctcatggagggcgtgaagactgaggtggaggacacactgaccccacccccctcggatgctggctcacctttccagagcagccccttgtcccttggcagcaggggcagtggcagcggtggcagtggcagtgactcggagcctgacagcccagtctttgaggacagcaaggcaaagccagagcagcggccgtctctgcacagccggggcatgctggaccgctcccgcctggccctgtgcacgctcgtcttcctctgcctgtcctgcaaccccttggcctccttgctgggggcccgggggcttcccagcccctcagataccaccagcgtctaccatagccctgggcgcaacgtgctgggcaccgagagcagagatggccctggctgggcccagtggctgctgcccccagtggtctggctgctcaatgggctgttggtgctcgtctccttggtgcttctctttgtctacggtgagccagtcacacggccccactcaggccccgccgtgtacttctggaggcatcgcaagcaggctgacctggacctggcccggggagactttgcccaggctgcccagcagctgtggctggccctgcgggcactgggccggcccctgcccacctcccacctggacctggcttgtagcctcctctggaacctcatccgtcacctgctgcagcgtctctgggtgggccgctggctggcaggccgggcagggggcctgcagcaggactgtgctctgcgagtggatgctagcgccagcgcccgagacgcagccctggtctaccataagctgcaccagctgcacaccatggggaagcacacaggcgggcacctcactgccaccaacctggcgctgagtgccctgaacctggcagagtgtgcaggggatgccgtgtctgtggcgacgctggccgagatctatgtggcggctgcattgagagtgaagaccagtctcccacgggccttgcattttctgacacgcttcttcctgagcagtgcccgccaggcctgcctggcacagagtggctcagtgcctcctgccatgcagtggctctgccaccccgtgggccaccgtttcttcgtggatggggactggtccgtgctcagtaccccatgggagagcctgtacagcttggccgggaacccagtggaccccctggcccaggtgactcagctattccgggaacatctcttagagcgagcactgaactgtgtgacccagcccaaccccagccctgggtcagctgatggggacaaggaattctcggatgccctcgggtacctgcagctgctgaacagctgttctgatgctgcgggggctcctgcctacagcttctccatcagttccagcatggccaccaccaccggcgtagacccggtggccaagtggtgggcctctctgacagctgtggtgatccactggctgcggcgggatgaggaggcggctgagcggctgtgcccgctggtggagcacctgccccgggtgctgcaggagtctgagagacccctgcccagggcagctctgcactccttcaaggctgcccgggccctgctgggctgtgccaaggcagagtctggtccagccagcctgaccatctgtgagaaggccagtgggtacctgcaggacagcctggctaccacaccagccagcagctccattgacaaggccgtgcagctgttcctgtgtgacctgcttcttgtggtgcgcaccagcctgtggcggcagcagcagcccccggccccggccccagcagcccagggcaccagcagcaggccccaggcttccgcccttgagctgcgtggcttccaacgggacctgagcagcctgaggcggctggcacagagcttccggcccgccatgcggagggtgttcctacatgaggccacggcccggctgatggcgggggccagccccacacggacacaccagctcctcgaccgcagtctgaggcggcgggcaggccccggtggcaaaggaggcgcggtggcggagctggagccgcggcccacgcggcgggagcacgcggaggccttgctgctggcctcctgctacctgccccccggcttcctgtcggcgcccgggcagcgcgtgggcatgctggctgaggcggcgcgcacactcgagaagcttggcgatcgccggctgctgcacgactgtcagcagatgctcatgcgcctgggcggtgggaccactgtcacttccagctagaccccgtgtccccggcctcagcacccctgtctctagccactttggtcccgtgcagcttctgtcctgcgtcgaagctttgaaggccgaaggcagtgcaagagactctggcctccacagttcgacctgcggctgctgtgtgccttcgcggtggaaggcccgaggggcgcgatcttgaccctaagaccggcggccatgatggtgctgacctctggtggccgatcggggcactgcaggggccgagccattttggggggcccccctccttgctctgcaggcaccttagtggcttttttcctcctgtgtacagggaagagaggggtacatttccctgtgctgacggaagccaacttggctttcccggactgcaagcagggctctgccccagaggcctctctctccgtcgtgggagagagacgtgtacatagtgtaggtcagcgtgcttagcctcctgacctgaggctcctgtgctactttgccttttgcaaactttattttcatagattgagaagttttgtacagagaattaaaaatgaaattatttataatctg

SEQ ID NO: 21336 - DNA, 4015 bp, Artificial Sequence
  derived and/or modified sequence
aaaaatccgccgcgccttgacaggtgaagtcggcgcggggaggggtagggccaacggcctggacgccccaagggcgggcgcagatcgcggagccatggattgcactttcgaagacatgcttcagcttatcaacaaccaagacagtgacttccctggcctatttgacccaccctatgctgggagtggggcagggggcacagaccctgccagccccgataccagctccccaggcagcttgtctccacctcctgccacattgagctcctctcttgaagccttcctgagcgggccgcaggcagcgccctcacccctgtcccctccccagcctgcacccactccattgaagatgtacccgtccatgcccgctttctcccctgggcctggtatcaaggaagagtcagtgccactgagcatcctgcagacccccaccccacagcccctgccaggggccctcctgccacagagcttcccagccccagccccaccgcagttcagctccacccctgtgttaggctaccccagccctccgggaggcttctctacaggaagccctcccgggaacacccagcagccgctgcctggcctgccactggcttccccgccaggggtcccgcccgtctccttgcacacccaggtccagagtgtggtcccccagcagctactgacagtcacagctgcccccacggcagcccctgtaacgaccactgtgacctcgcagatccagcaggtcccggtcctgctgcagccccacttcatcaaggcagactcgctgcttctgacagccatgaagacagacggagccactgtgaaggcggcaggtctcagtcccctggtctctggcaccactgtgcagacagggcctttgccgaccctggtgagtggcggaaccatcttggcaacagtcccactggtcgtagatgcggagaagctgcctatcaaccggctcgcagctggcagcaaggccccggcctctgcccagagccgtggagagaagcgcacagcccacaacgccattgagaagcgctaccgctcctccatcaatgacaaaatcattgagctcaaggatctggtggtgggcactgaggcaaagctgaataaatctgctgtcttgcgcaaggccatcgactacattcgctttctgcaacacagcaaccagaaactcaagcaggagaacctaagtctgcgcactgctgtccacaaaagcaaatctctgaaggatctggtgtcggcctgtggcagtggagggaacacagacgtgctcatggagggcgtgaagactgaggtggaggacacactgaccccacccccctcggatgctggctcacctttccagagcagccccttgtcccttggcagcaggggcagtggcagcggtggcagtggcagtgactcggagcctgacagcccagtctttgaggacagcaaggcaaagccagagcagcggccgtctctgcacagccggggcatgctggaccgctcccgcctggccctgtgcacgctcgtcttcctctgcctgtcctgcaaccccttggcctccttgctgggggcccgggggcttcccagcccctcagataccaccagcgtctaccatagccctgggcgcaacgtgctgggcaccgagagcagagatggccctggctgggcccagtggctgctgcccccagtggtctggctgctcaatgggctgttggtgctcgtctccttggtgcttctctttgtctacggtgagccagtcacacggccccactcaggccccgccgtgtacttctggaggcatcgcaagcaggctgacctggacctggcccggggagactttgcccaggctgcccagcagctgtggctggccctgcgggcactgggccggcccctgcccacctcccacctggacctggcttgtagcctcctctggaacctcatccgtcacctgctgcagcgtctctgggtgggccgctggctggcaggccgggcagggggcctgcagcaggactgtgctctgcgagtggatgctagcgccagcgcccgagacgcagccctggtctaccataagctgcaccagctgcacaccatggggaagcacacaggcgggcacctcactgccaccaacctggcgctgagtgccctgaacctggcagagtgtgcaggggatgccgtgtctgtggcgacgctggccgagatctatgtggcggctgcattgagagtgaagaccagtctcccacgggccttgcattttctgacacgcttcttcctgagcagtgcccgccaggcctgcctggcacagagtggctcagtgcctcctgccatgcagtggctctgccaccccgtgggccaccgtttcttcgtggatggggactggtccgtgctcagtaccccatgggagagcctgtacagcttggccgggaacccagtggaccccctggcccaggtgactcagctattccgggaacatctcttagagcgagcactgaactgtgtgacccagcccaaccccagccctgggtcagctgatggggacaaggaattctcggatgccctcgggtacctgcagctgctgaacagctgttctgatgctgcgggggctcctgcctacagcttctccatcagttccagcatggccaccaccaccggcgtagacccggtggccaagtggtgggcctctctgacagctgtggtgatccactggctgcggcgggatgaggaggcggctgagcggctgtgcccgctggtggagcacctgccccgggtgctgcaggagtctgagagacccctgcccagggcagctctgcactccttcaaggctgcccgggccctgctgggctgtgccaaggcagagtctggtccagccagcctgaccatctgtgagaaggccagtgggtacctgcaggacagcctggctaccacaccagccagcagctccattgacaaggccgtgcagctgttcctgtgtgacctgcttcttgtggtgcgcaccagcctgtggcggcagcagcagcccccggccccggccccagcagcccagggcaccagcagcaggccccaggcttccgcccttgagctgcgtggcttccaacgggacctgagcagcctgaggcggctggcacagagcttccggcccgccatgcggagggtgttcctacatgaggccacggcccggctgatggcgggggccagccccacacggacacaccagctcctcgaccgcagtctgaggcggcgggcaggccccggtggcaaaggaggcgcggtggcggagctggagccgcggcccacgcggcgggagcacgcggaggccttgctgctggcctcctgctacctgccccccggcttcctgtcggcgcccgggcagcgcgtgggcatgctggctgaggcggcgcgcacactcgagaagcttggcgatcgccggctgctgcacgactgtcagcagatgctcatgcgcctgggcggtgggaccactgtcacttccagctagaccccgtgtccccggcctcagcacccctgtctctagccactttggtcccgtgcagcttctgtcctgcgtcgaagctttgaaggccgaaggcagtgcaagagactctggcctccacagttcgacctgcggctgctgtgtgccttcgcggtggaaggcccgaggggcgcgatcttgaccctaagaccggcggccatgatggtgctgacctctggtggccgatcggggcactgcaggggccgagccattttggggggcccccctccttgctctgcaggcaccttagtggcttttttcctcctgtgtacagggaagagaggggtacatttccctgtgctgacggaagccaacttggctttcccggactgcaagcagggctctgccccagaggcctctctctccgtcgtgggagagagacgtgtacatagtgtaggtcagcgtgcttagcctcctgacctgaggctcctgtgctactttgccttttgcaaactttattttcatagattgagaagttttgtacagagaattaaaaatgaaattatttataatctg

SEQ ID NO: 21337 - DNA, 3570 bp, Artificial Sequence
  derived and/or modified sequence
aaaaatccgccgcgccttgacaggtgaagtcggcgcggggaggggtagggccaacggcctggacgccccaagggcgggcgcagatcgcggagccatggattgcactttcgaagacatgcttcagcttatcaacaaccaagacagtgacttccctggcctatttgacccaccccagcctgcacccactccattgaagatgtacccgtccatgcccgctttctcccctgggcctggtatcaaggaagagtcagtgccactgagcatcctgcagacccccaccccacagcccctgccaggggccctcctgccacagagcttcccagccccagccccaccgcagttcagctccacccctgtgttaggctaccccagccctccgggaggcttctctacaggaagccctcccgggaacacccagcagccgctgcctggcctgccactggcttccccgccaggggtcccgcccgtctccttgcacacccaggtccagagtgtggtcccccagcagctactgacagtcacagctgcccccacggcagcccctgtaacgaccactgtgacctcgcagatccagcaggtcccggtcctgctgcagccccacttcatcaaggcagactcgctgcttctgacagccatgaagacagacggagccactgtgaaggcggcaggtctcagtcccctggtctctggcaccactgtgcagacagggcctttgccgaccctggtgagtggcggaaccatcttggcaacagtcccactggtcgtagatgcggagaagctgcctatcaaccggctcgcagctggcagcaaggccccggcctctgcccagagccgtggagagaagcgcacagcccacaacgccattgagaagcgctaccgctcctccatcaatgacaaaatcattgagctcaaggatctggtggtgggcactgaggcaaagctgaataaatctgctgtcttgcgcaaggccatcgactacattcgctttctgcaacacagcaaccagaaactcaagcaggagaacctaagtctgcgcactgctgtccacaaaagcaaatctctgaaggatctggtgtcggcctgtggcagtggagggaacacagacgtgctcatggagggcgtgaagactgaggtggaggacacactgaccccacccccctcggatgctggctcacctttccagagcagccccttgtcccttggcagcaggggcagtggcagcggtggcagtggcagtgactcggagcctgacagcccagtctttgaggacagcaaggcaaagccagagcagcggccgtctctgcacagccggggcatgctggaccgctcccgcctggccctgtgcacgctcgtcttcctctgcctgtcctgcaaccccttggcctccttgctgggggcccgggggcttcccagcccctcagataccaccagcgtctaccatagccctgggcgcaacgtgctgggcaccgagagcagagatggccctggctgggcccagtggctgctgcccccagtggtctggctgctcaatgggctgttggtgctcgtctccttggtgcttctctttgtctacggtgagccagtcacacggccccactcaggccccgccgtgtacttctggaggcatcgcaagcaggctgacctggacctggcccggggagactttgcccaggctgcccagcagctgtggctggccctgcgggcactgggccggcccctgcccacctcccacctggacctggcttgtagcctcctctggaacctcatccgtcacctgctgcagcgtctctgggtgggccgctggctggcaggccgggcagggggcctgcagcaggactgtgctctgcgagtggatgctagcgccagcgcccgagacgcagccctggtctaccataagctgcaccagctgcacaccatggggaagcacacaggcgggcacctcactgccaccaacctggcgctgagtgccctgaacctggcagagtgtgcaggggatgccgtgtctgtggcgacgctggccgagatctatgtggcggctgcattgagagtgaagaccagtctcccacgggccttgcattttctgacacgcttcttcctgagcagtgcccgccaggcctgcctggcacagagtggctcagtgcctcctgccatgcagtggctctgccaccccgtgggccaccgtttcttcgtggatggggactggtccgtgctcagtaccccatgggagagcctgtacagcttggccgggaacccagtggaccccctggcccaggtgactcagctattccgggaacatctcttagagcgagcactgaactgtgtgacccagcccaaccccagccctgggtcagctgatggggacaaggaattctcggatgccctcgggtacctgcagctgctgaacagctgttctgatgctgcgggggctcctgcctacagcttctccatcagttccagcatggccaccaccaccggcgtagacccggtggccaagtggtgggcctctctgacagctgtggtgatccactggctgcggcgggatgaggaggcggctgagcggctgtgcccgctggtggagcacctgccccgggtgctgcaggagtctgagagacccctgcccagggcagctctgcactccttcaaggctgcccgggccctgctgggctgtgccaaggcagagtctggtccagccagcctgaccatctgtgagaaggccagtgggtacctgcaggacagcctggctaccacaccagccagcagctccattgacaaggccgtgcagctgttcctgtgtgacctgcttcttgtggtgcgcaccagcctgtggcggcagcagcagcccccggccccggccccagcagcccagggcaccagcagcaggccccaggcttccgcccttgagctgcgtggcttccaacgggacctgagcagcctgaggcggctggcacagagcttccggcccgccatgcggagggtgttcctacatgaggccacggcccggctgatggcgggggccagccccacacggacacaccagctcctcgaccgcagtctgaggcggcgggcaggccccggtggcaaaggaggcgcggtggcggagctggagccgcggcccacgcggcgggagcacgcggaggccttgctgctggcctcctgctacctgccccccggcttcctgtcggcgcccgggcagcgcgtgggcatgctggctgaggcggcgcgcacactcgagaagcttggcgatcgccggctgctgcacgactgtcagcagatgctcatgcgcctgggcggtgggaccactgtcacttccagctagaccccgtgtccccggcctcagcacccctgtctctagccactttggtcccgtgcagcttctgtcctgcgtcgaagctttgaaggccgaaggcagtgcaagagactctggcctccacagttcgacctgcggctgctgtgtgccttcgcggtggaaggcccgaggggcgcgatcttgaccctaagaccggcggccatgatggtgctgacctctggtggccgatcggggcactgcaggggccgagccattttgggggg

SEQ ID NO: 21338 - protein, 315 aa, Artificial Sequence
  derived and/or modified sequence
MESGNQSTVTEFIFTGFPQLQDGSLLYFFPLLFIYTFIIIDNLLIFSAVRLDTHLHNPMYNFISIFSFLEIWYTTATIPKMLSNLISEKKAISMTGCILQMYFFHSLENSEGILLTTMAIDRYVAICNPLRYQMIMTPRLCAQLSAGSCLFGFLILLPEIVMISTLPFCGPNQIHQIFCDLVPVLSLACTDTSMILIEDVIHAVTIIITFLIIALSYVRIVTVILRIPSSEGRQKAFSTCAGHLMVFPIFFGSVSLMYLRFSDTYPPVLDTAIALMFTVLAPFFNPIIYSLRNKDMNNAIKKLFCLQKVLNKPGG

SEQ ID NO: 21339 - protein, 331 aa, Artificial Sequence
  derived and/or modified sequence
MCWTMPSPFTGSSTRNMESGNQSTVTEFIFTGFPQLQDGSLLYFFPLLFIYTFIIIDNLLIFSAVRLDTHLHNPMYNFISIFSFLEIWYTTATIPKMLSNLISEKKAISMTGCILQMYFFHSLENSEGILLTTMAIDRYVAICNPLRYQMIMTPRLCAQLSAGSCLFGFLILLPEIVMISTLPFCGPNQIHQIFCDLVPVLSLACTDTSMILIEDVIHAVTIIITFLIIALSYVRIVTVILRIPSSEGRQKAFSTCAGHLMVFPIFFGSVSLMYLRFSDTYPPVLDTAIALMFTVLAPFFNPIIYSLRNKDMNNAIKKLFCLQKVLNKPGG

SEQ ID NO: 21340 - DNA, 948 bp, Artificial Sequence
  derived and/or modified sequence
atggagagcggcaaccagagcaccgtgaccgagttcatcttcaccggcttcccccagctgcaggacggcagcctgctgtacttcttccccctgctgttcatctacaccttcatcatcatcgacaacctgctgatcttcagcgccgtgagactggacacccacctgcacaaccccatgtacaacttcatcagcatcttcagcttcctggagatctggtacaccaccgccaccatccccaagatgctgagcaacctgatcagcgagaagaaggccatcagcatgaccggctgcatcctgcagatgtacttcttccacagcctggagaacagcgagggcatcctgctgaccaccatggccatcgacagatacgtggccatctgcaaccccctgagataccagatgatcatgacccccagactgtgcgcccagctgagcgccggcagctgcctgttcggcttcctgatcctgctgcccgagatcgtgatgatcagcaccctgcccttctgcggccccaaccagatccaccagatcttctgcgacctggtgcccgtgctgagcctggcctgcaccgacaccagcatgatcctgatcgaggacgtgatccacgccgtgaccatcatcatcaccttcctgatcatcgccctgagctacgtgagaatcgtgaccgtgatcctgagaatccccagcagcgagggcagacagaaggccttcagcacctgcgccggccacctgatggtgttccccatcttcttcggcagcgtgagcctgatgtacctgagattcagcgacacctacccccccgtgctggacaccgccatcgccctgatgttcaccgtgctggcccccttcttcaaccccatcatctacagcctgagaaacaaggacatgaacaacgccatcaagaagctgttctgcctgcagaaggtgctgaacaagcccggcggctag

SEQ ID NO: 21341 - DNA, 996 bp, Artificial Sequence
  derived and/or modified sequence
atgtgctggaccatgcccagccccttcaccggcagcagcaccagaaacatggagagcggcaaccagagcaccgtgaccgagttcatcttcaccggcttcccccagctgcaggacggcagcctgctgtacttcttccccctgctgttcatctacaccttcatcatcatcgacaacctgctgatcttcagcgccgtgagactggacacccacctgcacaaccccatgtacaacttcatcagcatcttcagcttcctggagatctggtacaccaccgccaccatccccaagatgctgagcaacctgatcagcgagaagaaggccatcagcatgaccggctgcatcctgcagatgtacttcttccacagcctggagaacagcgagggcatcctgctgaccaccatggccatcgacagatacgtggccatctgcaaccccctgagataccagatgatcatgacccccagactgtgcgcccagctgagcgccggcagctgcctgttcggcttcctgatcctgctgcccgagatcgtgatgatcagcaccctgcccttctgcggccccaaccagatccaccagatcttctgcgacctggtgcccgtgctgagcctggcctgcaccgacaccagcatgatcctgatcgaggacgtgatccacgccgtgaccatcatcatcaccttcctgatcatcgccctgagctacgtgagaatcgtgaccgtgatcctgagaatccccagcagcgagggcagacagaaggccttcagcacctgcgccggccacctgatggtgttccccatcttcttcggcagcgtgagcctgatgtacctgagattcagcgacacctacccccccgtgctggacaccgccatcgccctgatgttcaccgtgctggcccccttcttcaaccccatcatctacagcctgagaaacaaggacatgaacaacgccatcaagaagctgttctgcctgcagaaggtgctgaacaagcccggcggctag

SEQ ID NO: 21342 - DNA, 948 bp, Artificial Sequence
  derived and/or modified sequence
atggagagtggcaatcagtcaaccgtgaccgagtttatttttaccggctttccacagctgcaggacggtagtctgctttacttctttcctctgctcttcatctataccttcatcattatagacaaccttctgatcttcagcgccgttaggctagacacgcacttacataatccgatgtacaatttcatctcaatcttctcctttctggaaatctggtacactaccgccacgataccaaagatgctttcgaacctgatcagtgaaaagaaagctatctctatgaccgggtgtatccttcagatgtacttcttccattctctcgaaaattccgaggggatactgctcactaccatggctatagatagatatgtggcaatttgtaaccctctgcgatatcagatgattatgacacccaggctgtgtgcccagttgtccgcaggcagttgtctgttcggctttttgattctgcttcccgagattgtcatgatttccacactccctttctgcggacctaatcagattcaccagatcttctgcgatctggtacccgtcctctccctcgcctgcactgacacaagcatgatcttgattgaggatgtgatccatgcagtcactataatcattaccttcctcattatcgctctatcatatgttagaatagttactgttatcctccggattccatcttctgagggacgccagaaagccttctcaacatgtgctggtcacctaatggtgttccccattttctttggctccgtctctcttatgtacctgcggttctccgatacttacccacccgttttggacacagcgattgccctgatgttcacagtgctggctcccttttttaatccgatcatttatagcctacgaaacaaggatatgaataacgccattaagaaactcttttgtctgcagaaagtgctcaataagcctggggggtag

SEQ ID NO: 21343 - DNA, 996 bp, Artificial Sequence
  derived and/or modified sequence
atgtgctggaccatgcccagtccatttaccggctcctctactcgcaacatggaatccgggaaccagtcaactgtaactgagttcatattcaccggatttccgcaactgcaagacggcagtctgttatatttcttccctttgctcttcatctacacatttattatcatcgacaatttactaatttttagtgcagtgcgtcttgatacacatctgcataaccccatgtataacttcatcagtatatttagctttctggaaatttggtacacaactgcgacgatcccaaaaatgctatctaacttgataagcgaaaagaaggcgatctccatgacgggatgcattctgcagatgtacttttttcattctctagaaaattctgagggcatattgctgacgacaatggccatcgacagatatgtggccatttgtaatcctctgaggtaccagatgataatgacacccagactgtgcgcccagttaagcgccggcagctgtctattcggattcctgatactgctgcccgaaattgtaatgatctcaacactcccattctgcggccctaaccagattcaccagatcttttgcgacctcgtgcctgttctgtccttggcctgcaccgacaccagtatgatcttgatcgaggacgtgatccatgccgtgacaatcattatcacatttctgatcatcgcgctctcctacgtccgcatagtgactgtcatcttacgaataccatcaagcgagggcagacagaaagccttttctacatgtgccggacatttaatggtgttcccaatcttctttgggtcggtcagtcttatgtatttgcgcttctccgacacatatccgccagtccttgacactgccatagccctgatgtttacagtgcttgctccattcttcaatccaattatctactccttgcgcaataaagacatgaataatgctattaagaagcttttttgtctgcaaaaagtgctgaataagccaggaggctag

SEQ ID NO: 21344 - DNA, 948 bp, Artificial Sequence
  derived and/or modified sequence
atggagagcggcaaccagagcacagtgacagagttcatcttcaccggcttcccccagctgcaggacggcagcctgctgtacttcttccccctgctcttcatctacaccttcatcatcatcgacaacctgctgatcttctctgctgtgcggctggacacccacctgcacaaccccatgtacaacttcatcagcatcttctccttcctggagatctggtacaccacagccaccatccccaagatgctgagcaacctgatcagcgagaagaaggccatctccatgacaggctgcatcctgcagatgtacttcttccacagcctggagaacagcgagggcatcctgctgaccaccatggccatcgacagatatgtggccatctgcaaccccctgcgctaccagatgatcatgaccccccggctgtgtgcccagctgtctgctggcagctgcctgtttggcttcctgatcctgctgcctgagatcgtgatgatcagcaccctgcccttctgtggccccaaccagatccaccagatcttctgtgacctggtgcctgtgctgagcctggcctgcacagacacctccatgatcctgattgaagatgtgattcatgctgtgaccatcatcatcaccttcctgatcatcgccctgtcctatgtgcgcatcgtgaccgtcatcctgcgcatccccagcagcgagggccggcagaaggccttcagcacctgtgccggccacctgatggtgttccccatcttctttggatctgtgtccctgatgtacctgcgcttcagtgacacctacccacctgtgctggacacagccatcgccctgatgttcaccgtgctggcccccttcttcaaccccatcatctacagcctgaggaacaaggacatgaacaatgccatcaagaagctgttctgcctgcagaaggtgctgaacaagccaggcggctag

SEQ ID NO: 21345 - DNA, 996 bp, Artificial Sequence
  derived and/or modified sequence
atgtgctggaccatgcccagccccttcaccggcagcagcaccaggaacatggagagcggcaaccagagcacagtgacagagttcatcttcaccggcttcccccagctgcaggacggcagcctgctgtacttcttccccctgctcttcatctacaccttcatcatcatcgacaacctgctgatcttctctgctgtgcggctggacacccacctgcacaaccccatgtacaacttcatcagcatcttctccttcctggagatctggtacaccacagccaccatccccaagatgctgagcaacctgatcagcgagaagaaggccatctccatgacaggctgcatcctgcagatgtacttcttccacagcctggagaacagcgagggcatcctgctgaccaccatggccatcgacagatatgtggccatctgcaaccccctgcgctaccagatgatcatgaccccccggctgtgtgcccagctgtctgctggcagctgcctgtttggcttcctgatcctgctgcctgagatcgtgatgatcagcaccctgcccttctgtggccccaaccagatccaccagatcttctgtgacctggtgcctgtgctgagcctggcctgcacagacacctccatgatcctgattgaagatgtgattcatgctgtgaccatcatcatcaccttcctgatcatcgccctgtcctatgtgcgcatcgtgaccgtcatcctgcgcatccccagcagcgagggccggcagaaggccttcagcacctgtgccggccacctgatggtgttccccatcttctttggatctgtgtccctgatgtacctgcgcttcagtgacacctacccacctgtgctggacacagccatcgccctgatgttcaccgtgctggcccccttcttcaaccccatcatctacagcctgaggaacaaggacatgaacaatgccatcaagaagctgttctgcctgcagaaggtgctgaacaagccaggcggctag

SEQ ID NO: 21346 - DNA, 948 bp, Artificial Sequence
  derived and/or modified sequence
atggagagcggcaaccagagcaccgtgaccgagttcatcttcaccggattcccccaacttcaggatggctcactgctctacttttttccccttctgttcatatacaccttcatcataatagataacctactcatattttccgccgtgaggctggacactcacctgcataatccgatgtacaatttcatctcgatcttttctttcctggagatttggtacactacagcaaccatcccaaagatgttgtcaaacctcatttctgaaaaaaaggcgatttctatgactgggtgtattttgcagatgtacttcttccactccttagaaaatagtgagggcattttgctgactaccatggctattgatcgttacgtcgccatctgtaaccccctgagataccaaatgatcatgacgcctaggttgtgcgcccagctgtccgctgggtcatgcctttttggcttcctgatcctgttgccggaaatagtcatgatctcaactttgccattttgcgggcccaaccagatacaccagattttctgcgacctggtacccgtcctgtcactagcgtgcaccgatacatctatgatcctgattgaagatgtaatccatgctgtgacgataatcatcacctttctcataatcgccttatcctatgtaagaatagtcactgtgatactgaggatcccgtcaagtgaaggacgacagaaagcgttctccacctgcgcggggcatctaatggtgttccctatttttttcgggtcagtgtcactgatgtacctcagatttagtgacacgtatccacccgtattagacaccgctattgcgctgatgttcacagtcctcgctcccttcttcaacccaatcatttacagcctgcgtaataaggacatgaataatgcgatcaaaaaactgttctgccttcagaaggtcctgaacaagcccggaggctag

SEQ ID NO: 21347 - DNA, 996 bp, Artificial Sequence
  derived and/or modified sequence
atgtgctggaccatgcccagccccttcaccggcagcagcacccggaacatggagagtgggaaccagtccaccgtgaccgaattcatctttaccggatttccccagctccaagatggctctctgctatatttcttcccactgcttttcatttatacattcatcattatcgataacctgctgatcttcagcgccgtccgcctcgatacccaccttcataacccaatgtacaactttatctcgattttctccttcctcgagatctggtacaccactgctactattcccaagatgctgtccaacctaatctcagagaaaaaggccatctctatgaccgggtgcattctgcagatgtacttcttccactctttggagaattctgaggggatactgctcactaccatggccattgatagatatgttgccatctgtaacccactcaggtaccagatgattatgaccccccggttgtgtgcccagctcagcgctggtagctgtctttttgggttcctgatcctccttcctgaaatcgtgatgatctccacgttgccattctgcgggccaaaccaaatccatcagatcttttgcgacctcgtaccagttctgtctctcgcgtgcaccgatacttctatgatactgattgaagatgtgattcacgctgtgacaattatcattaccttcctgatcattgcgctgtcttacgttagaatcgtcacagtgattctccgaatcccctcgagcgaaggccgccagaaagctttttctacctgcgcgggccatctaatggtgttccctatcttctttggaagtgtttccctgatgtatctgagatttagtgatacttatcctccagtccttgacacagctatcgccctgatgtttactgttctggcccctttctttaatcccatcatctactctctaagaaataaagacatgaacaacgctatcaaaaagctgttctgcttgcagaaagtcctgaataaacctggtggctag

SEQ ID NO: 21348 - DNA, 948 bp, Artificial Sequence
  derived and/or modified sequence
atggagagcggaaaccaatcaacagtgactgaatttatcttcactggattccctcagcttcaggatggtagtctcctgtacttctttcctttacttttcatctatacttttattatcattgataacttattaatcttctctgctgtaaggctggacacccatctccacaaccccatgtataattttatcagtatattttcctttctggagatctggtacaccacagccaccattcccaagatgctctccaacctcatcagtgaaaagaaggccatctcaatgactggctgcatcttgcagatgtatttcttccactcacttgaaaactcagaggggatcttgctgaccaccatggccattgacagatacgttgccatctgcaaccctcttcgctatcaaatgatcatgaccccccggctctgtgctcaactctctgcaggttcctgcctcttcggtttccttatcctgcttcccgagattgtgatgatttccacactgcctttctgtgggcccaaccaaatccatcagatcttctgtgacttggtccctgtgctaagcctggcctgtacagacacgtccatgattctgattgaggatgtgattcatgctgtgaccatcatcattaccttcctaatcattgccctgtcctatgtaagaattgtcactgtgatattgaggattccctcttctgaagggaggcaaaaggctttttctacctgtgcaggccacctcatggtcttcccgatattctttggcagtgtatcactcatgtacttgcgtttcagcgacacttatccaccagttttggacacagccattgcactgatgtttactgtacttgctccattcttcaatcccatcatttatagcctgagaaacaaggacatgaacaatgcgattaaaaaactgttctgtcttcaaaaagtgttgaacaagcctggaggttaa

SEQ ID NO: 21349 - DNA, 996 bp, Artificial Sequence
  derived and/or modified sequence
atgtgctggactatgccctctccatttacaggtagctctactagaaatatggagagcggaaaccaatcaacagtgactgaatttatcttcactggattccctcagcttcaggatggtagtctcctgtacttctttcctttacttttcatctatacttttattatcattgataacttattaatcttctctgctgtaaggctggacacccatctccacaaccccatgtataattttatcagtatattttcctttctggagatctggtacaccacagccaccattcccaagatgctctccaacctcatcagtgaaaagaaggccatctcaatgactggctgcatcttgcagatgtatttcttccactcacttgaaaactcagaggggatcttgctgaccaccatggccattgacagatacgttgccatctgcaaccctcttcgctatcaaatgatcatgaccccccggctctgtgctcaactctctgcaggttcctgcctcttcggtttccttatcctgcttcccgagattgtgatgatttccacactgcctttctgtgggcccaaccaaatccatcagatcttctgtgacttggtccctgtgctaagcctggcctgtacagacacgtccatgattctgattgaggatgtgattcatgctgtgaccatcatcattaccttcctaatcattgccctgtcctatgtaagaattgtcactgtgatattgaggattccctcttctgaagggaggcaaaaggctttttctacctgtgcaggccacctcatggtcttcccgatattctttggcagtgtatcactcatgtacttgcgtttcagcgacacttatccaccagttttggacacagccattgcactgatgtttactgtacttgctccattcttcaatcccatcatttatagcctgagaaacaaggacatgaacaatgcgattaaaaaactgttctgtcttcaaaaagtgttgaacaagcctggaggttaa

SEQ ID NO: 21350 - DNA, 948 bp, Artificial Sequence
  derived and/or modified sequence
atggagagcggaaaccaaagtacagtgactgaattcatattcacgggattccctcagctgcaggacggcagcctgctatacttttttcctctcctttttatctatacattcataatcattgataacctcctcatcttcagcgcggtacgcctcgacacacatttacataacccgatgtacaatttcatctctattttttcatttctcgagatttggtatacaacggccactatccctaaaatgctttcaaatttaatttccgagaaaaaggctatctccatgacaggttgcatcctacagatgtatttctttcacagcttagaaaatagcgaaggcatcctcctgacgactatggctattgataggtacgtagccatttgtaatccactgaggtatcagatgatcatgacaccaagactttgtgcacagctgtctgctggcagctgcttgtttgggttcctgattctgttaccagaaattgtgatgatcagcacacttccattctgtggccctaatcagatccatcaaatcttttgtgacctggtgccagtgcttagtctggcctgcacagacacgtctatgatccttattgaggatgttattcacgcagttaccattattattacctttcttatcatcgcacttagctacgtgcggatagtcaccgtgatcttacgcattccctcaagcgaggggcgacagaaagcgttttctacctgcgctggacacctgatggtgttcccaatctttttcggctccgtgtctctgatgtacttgcgattctctgacacgtacccccctgtgctggacaccgcaatcgccttgatgtttaccgtgctggccccattcttcaatcccatcatctatagccttcgcaataaagatatgaataatgccatcaagaaactcttctgtcttcaaaaggtgttgaacaaacccggtggatag

SEQ ID NO: 21351 - DNA, 996 bp, Artificial Sequence
  derived and/or modified sequence
atgtgctggacgatgccctccccctttaccggctcaagtacccggaatatggagtctggcaaccaatccacagtcaccgaatttatcttcactgggtttccacagctgcaagatggatccctgttgtactttttccccttactgtttatttacacattcatcatcattgacaacctgctcatctttagcgcggtgcggctggacacacacctccacaatcctatgtacaacttcatatccatttttagcttcctcgaaatatggtacacgacagccacgatccctaaaatgctcagcaacttaatctctgaaaaaaaggccatctcaatgactggttgcatccttcagatgtatttcttccacagtttagagaatagcgagggtattctcctgacgacaatggccattgacaggtatgtggcaatatgtaaccccctaagatatcagatgatcatgaccccccgactgtgtgcccagctaagcgctggcagttgcctgtttggttttctgatcctgcttcccgaaatagtaatgatttctacgctgcctttctgtggtccaaatcagatacaccagattttctgtgatctggtccccgtgctatctctggcgtgtaccgacactagtatgattcttatcgaagatgttatccacgctgtcacgattattatcactttcctgataatcgccctgtcatacgtgcggattgtgacagtaatcttgcggattcctagctcagagggtaggcagaaggctttctcaacctgcgccggacacttgatggtgttcccgattttcttcgggtctgtgtctctcatgtacctccgcttttcagacacttacccccctgtgttggacaccgcgatcgctttgatgtttacagtgcttgccccattttttaatcccatcatctacagtcttcggaataaggacatgaataacgcgatcaagaaattgttctgcctccaaaaggtgctcaataagccagggggttag

SEQ ID NO: 21352 - protein, 778 aa, Artificial Sequence
  derived and/or modified sequence
MAQKMDCGAGLLGFQAEASVEDSALLMQTLMEAIQISEAPPTNQATAAASPQSSQPPTANEMADIQVSAAAARPKSAFKVQNATTKGPNGVYDFSQAHNAKDVPNTQPKAAFKSQNATPKGPNAAYDFSQAATTGELAANKSEMAFKAQNATTKVGPNATYNFSQSLNANDLANSRPKTPFKAWNDTTKAPTADTQTQNVNQAKMATSQADIETDPGISEPDGATAQTSADGSQAQNLESRTIIRGKRTRKINNLNVEENSSGDQRRAPLAAGTWRSAPVPVTTQNPPGAPPNVLWQTPLAWQNPSGWQNQTARQTPPARQSPPARQTPPAWQNPVAWQNPVIWPNPVIWQNPVIWPNPIVWPGPVVWPNPLAWQNPPGWQTPPGWQTPPGWQGPPDWQGPPDWPLPPDWPLPPDWPLPTDWPLPPDWIPADWPIPPDWQNLRPSPNLRPSPNSRASQNPGAAQPRDVALLQERANKLVKYLMLKDYTKVPIKRSEMLRDIIREYTDVYPEIIERACFVLEKKFGIQLKEIDKEEHLYILISTPESLAGILGTTKDTPKLGLLLVILGVIFMNGNRASEAVLWEALRKMGLRPGVRHPLLGDLRKLLTYEFVKQKYLDYRRVPNSNPPEYEFLWGLRSYHETSKMKVLRFIAEVQKRDPRDWTAQFMEAADEALDALDAAAAEAEARAEARTRMGIGDEAVSGPWSWDDIEFELLTWDEEGDFGDPWSRIPFTFWARYHQNARSRFPQTFAGPIIGPGGTASANFAANFGAIGFFWVE

SEQ ID NO: 21353 - protein, 137 aa, Artificial Sequence
  derived and/or modified sequence
MAQKMDCGAGLLGFQAEASVEDSALLMQTLMEAIQISEAPPTNQATAAASPQSSQPPTANEMADIQVSAAAARPKSAFKVQNATTKGPNGVYDFSQSLNANDLANSRPKTQVSLNLTVQLHRHQQMVPRLRIWSPGQ

SEQ ID NO: 21354 - DNA, 2337 bp, Artificial Sequence
  derived and/or modified sequence
atggcccagaagatggactgcggcgccggcctgctgggcttccaggccgaggccagcgtggaggacagcgccctgctgatgcagaccctgatggaggccatccagatcagcgaggccccccccaccaaccaggccaccgccgccgccagcccccagagcagccagccccccaccgccaacgagatggccgacatccaggtgagcgccgccgccgccagacccaagagcgccttcaaggtgcagaacgccaccaccaagggccccaacggcgtgtacgacttcagccaggcccacaacgccaaggacgtgcccaacacccagcccaaggccgccttcaagagccagaacgccacccccaagggccccaacgccgcctacgacttcagccaggccgccaccaccggcgagctggccgccaacaagagcgagatggccttcaaggcccagaacgccaccaccaaggtgggccccaacgccacctacaacttcagccagagcctgaacgccaacgacctggccaacagcagacccaagacccccttcaaggcctggaacgacaccaccaaggcccccaccgccgacacccagacccagaacgtgaaccaggccaagatggccaccagccaggccgacatcgagaccgaccccggcatcagcgagcccgacggcgccaccgcccagaccagcgccgacggcagccaggcccagaacctggagagcagaaccatcatcagaggcaagagaaccagaaagatcaacaacctgaacgtggaggagaacagcagcggcgaccagagaagagcccccctggccgccggcacctggagaagcgcccccgtgcccgtgaccacccagaacccccccggcgccccccccaacgtgctgtggcagacccccctggcctggcagaaccccagcggctggcagaaccagaccgccagacagaccccccccgccagacagagcccccccgccagacagaccccccccgcctggcagaaccccgtggcctggcagaaccccgtgatctggcccaaccccgtgatctggcagaaccccgtgatctggcccaaccccatcgtgtggcccggccccgtggtgtggcccaaccccctggcctggcagaacccccccggctggcagaccccccccggctggcagaccccccccggctggcagggcccccccgactggcagggcccccccgactggcccctgccccccgactggcccctgccccccgactggcccctgcccaccgactggcccctgccccccgactggatccccgccgactggcccatcccccccgactggcagaacctgagacccagccccaacctgagacccagccccaacagcagagccagccagaaccccggcgccgcccagcccagagacgtggccctgctgcaggagagagccaacaagctggtgaagtacctgatgctgaaggactacaccaaggtgcccatcaagagaagcgagatgctgagagacatcatcagagagtacaccgacgtgtaccccgagatcatcgagagagcctgcttcgtgctggagaagaagttcggcatccagctgaaggagatcgacaaggaggagcacctgtacatcctgatcagcacccccgagagcctggccggcatcctgggcaccaccaaggacacccccaagctgggcctgctgctggtgatcctgggcgtgatcttcatgaacggcaacagagccagcgaggccgtgctgtgggaggccctgagaaagatgggcctgagacccggcgtgagacaccccctgctgggcgacctgagaaagctgctgacctacgagttcgtgaagcagaagtacctggactacagaagagtgcccaacagcaacccccccgagtacgagttcctgtggggcctgagaagctaccacgagaccagcaagatgaaggtgctgagattcatcgccgaggtgcagaagagagaccccagagactggaccgcccagttcatggaggccgccgacgaggccctggacgccctggacgccgccgccgccgaggccgaggccagagccgaggccagaaccagaatgggcatcggcgacgaggccgtgagcggcccctggagctgggacgacatcgagttcgagctgctgacctgggacgaggagggcgacttcggcgacccctggagcagaatccccttcaccttctgggccagataccaccagaacgccagaagcagattcccccagaccttcgccggccccatcatcggccccggcggcaccgccagcgccaacttcgccgccaacttcggcgccatcggcttcttctgggtggagtag

SEQ ID NO: 21355 - DNA, 2337 bp, Artificial Sequence
  derived and/or modified sequence
atggctcaaaaaatggactgcggggccggcctgctgggctttcaagctgaagcttccgtggaggacagcgctttactgatgcaaacacttatggaggctatccagatatccgaggcccccccaaccaatcaagccacagctgcggcaagtccccagtcctcgcaacctccaaccgccaacgaaatggcggacatccaggtgtctgccgctgccgcccggcctaagagcgcttttaaggtccaaaatgccacaaccaagggccccaacggcgtctacgatttcagccaggcacataacgccaaagacgtccccaatacgcaacctaaggcagcattcaagtcccagaacgccacacctaaggggccgaatgcagcgtatgatttttctcaggcggccacgacgggtgaattggcagcaaataagtccgaaatggcgttcaaagcccagaacgctacaaccaaggtcggccctaatgctacgtacaactttagccaaagcctgaatgctaacgacctggcaaactcacgccccaagaccccttttaaagcctggaacgacaccaccaaggctcccaccgcggacacccagacccagaatgtcaatcaggctaagatggctacttcccaggccgatattgagaccgatccaggaatttccgagcccgacggtgccacggcgcagacgtccgctgatggctcacaagcccagaacctagaatcacgaactatcatccgaggcaagcgaacccgcaaaatcaacaaccttaacgtggaggaaaactcctccggcgaccaacgcagggctcctcttgccgcaggcacctggcgaagtgcccctgtcccggtgactactcaaaacccgccaggcgctccacctaatgtcctttggcagaccccgctagcttggcagaaccctagtggctggcagaatcagactgcgcggcagactccgcctgctagacagagtccacctgcaagacaaactcctcccgcttggcagaatcccgttgcctggcaaaacccagtgatttggccgaatcctgtgatttggcagaatccagtcatttggcctaatcccatcgtctggccagggcccgtggtatggcctaacccccttgcctggcagaatcccccaggctggcaaacgccaccaggatggcagacgccaccaggatggcagggacctcctgactggcagggtccacccgactggcccttgccccctgactggcccctccctcctgactggcccttacctactgattggcccctcccccccgattggattcctgctgattggcccataccccccgactggcaaaaccttcgcccaagtccgaatcttagacccagtcccaactctagggcgtcgcagaaccctggggccgcacagccaagggatgtcgccctcctgcaggagagggccaataaactagtgaagtacctgatgttgaaagactacaccaaagtgccaatcaagcgaagcgagatgctccgcgacattattagagagtatacagacgtttatcccgaaataatcgagcgggcctgcttcgttctggagaagaaattcgggattcaattgaaggaaatagacaaggaagagcatctttacattctgattagcacgcctgaatcgctcgcaggcatcctaggtaccaccaaagatactcccaagcttggactgttactcgtaatcttaggggtaatattcatgaatggaaaccgggccagcgaggctgtactgtgggaggctctgcgaaagatggggttacggcccggagtacgccaccctttgctgggagatctccgcaagttgttgacctacgagtttgttaagcagaaatacctggattacaggcgcgtaccaaattctaaccctcccgaatacgagttcttgtggggcctcagatcataccatgaaacatcaaaaatgaaagtgctgaggtttattgcggaagtccagaaaagagatccgcgggattggaccgctcaattcatggaagccgccgatgaggccttagatgccctggatgcagcagcagctgaggccgaagcgagggcagaagcacgtacaaggatgggaatcggcgacgaggccgtgagtgggccatggtcctgggacgacattgagtttgagctcctgacatgggacgaggaaggcgatttcggtgacccttggagtcggattccctttactttctgggccagatatcaccagaatgccagaagcaggtttccgcaaactttcgcaggacccattatagggcccgggggtacagccagtgccaatttcgcagctaattttggggctatcggcttcttctgggtcgagtag

SEQ ID NO: 21356 - DNA, 2337 bp, Artificial Sequence
  derived and/or modified sequence
atggcccagaaaatggactgtggagcaggcttactgggatttcaagcagaagcctcggtggaggattcagctttattgatgcaaaccctgatggaggctattcagatcagtgaagcaccgcctaccaatcaggccaccgctgccgccagccctcagtcttcacaaccccccactgcaaacgaaatggctgatatccaggtgagcgctgccgccgcgaggccaaagagcgctttcaaagtgcagaatgccaccactaaggggcctaacggagtttatgacttttctcaagcacacaacgccaaagatgtgccaaatacacagccaaaggccgcttttaaatcccaaaacgcaacgcccaaggggccaaacgctgcatatgatttcagtcaagctgccactactggagagctggctgcaaacaagagcgagatggcgtttaaggcacagaacgctacaacaaaggtggggcccaacgcaacctacaatttctctcagagtctaaacgccaacgatctggccaacagtcgccccaaaacgcctttcaaagcctggaatgacacaacgaaggccccaactgccgacacacagacacaaaatgtgaaccaagcaaaaatggctaccagccaggcagatatcgagaccgacccgggcatatctgaacctgatggggccactgcacagacatctgccgacggtagccaggctcaaaatctcgagtcaagaaccattatccgaggcaagaggacgagaaagatcaacaacctgaacgttgaagagaattctagcggggaccagcgcagggcacctctagctgcaggcacatggcgctccgcccctgtacccgtgactacccagaatcccccaggcgcccctcccaacgtcctatggcaaaccccactcgcctggcagaacccgtctggatggcagaaccagaccgctagacagactccccccgcgcgccagtcccctccagcccgccagactcctcccgcttggcagaaccctgtggcctggcagaatcctgtcatctggccgaaccccgtaatctggcagaatccagtgatatggccaaaccctatcgtgtggcctgggcctgtggtctggcctaatccgttggcatggcagaatcctccaggctggcagaccccccccggctggcagactcctccgggatggcagggaccccctgattggcaggggccccctgactggcctttacctcctgactggcctctgccccctgattggccgcttcccacagattggccactaccccccgactggattccagccgactggccaatcccaccggattggcagaacttgcgcccgagtcctaacctgagacccagccccaattccagagcctcgcaaaatcccggggctgcacagccccgtgatgtcgccctcctgcaggaaagagctaataagctagtaaaatacttgatgttgaaggattatacgaaggttccaatcaagaggtctgagatgctgcgtgatattattagggaatatacggacgtttacccggaaatcatcgaaagagcttgttttgtgctggagaagaagttcggcatacagctcaaggaaatcgataaagaggagcatctgtacatcctgatatcaacacctgagtcactggcggggattctggggacgactaaggacacacctaagttaggactgcttctggtgatcctgggagtcatatttatgaacgggaacagagcttccgaggcagtgttgtgggaggcacttcgtaagatgggcctgcgccccggtgtgagacacccattattaggtgatctgaggaagctcctgacatacgagtttgtgaaacaaaaatacctggattacagacgtgtccccaacagcaatcctccggagtacgaattcttgtggggattgcgctcttatcacgaaacctcaaaaatgaaggtgcttcgttttattgctgaggtgcagaaaagggaccctcgggattggacagcgcagtttatggaagccgcagacgaggccctcgacgcactcgacgccgcagctgctgaggcagaagctcgcgctgaggctaggactcggatgggaattggggacgaggctgtatctggcccgtggagttgggatgacatagaatttgaacttttaacatgggacgaagagggggattttggcgacccctggtcccggataccgttcaccttctgggccaggtaccaccaaaatgctcgaagccgattcccccagacctttgccggacccatcattgggccgggcgggacggcttcagcaaacttcgcagctaattttggagcgattggctttttctgggtggagtag

SEQ ID NO: 21357 - DNA, 2337 bp, Artificial Sequence
  derived and/or modified sequence
atggcccagaagatggactgtggggccggcctgctgggcttccaggccgaggcctctgtggaggacagcgccctgctgatgcagaccctgatggaggccatccagatcagcgaggccccacccaccaaccaggccacagctgctgccagcccccagagcagccagcccccaacagccaatgagatggctgacatccaggtgtctgctgctgctgcccggcccaagagcgccttcaaggtgcagaatgccaccaccaagggccccaatggagtgtatgacttcagccaggcccacaatgccaaggatgtgcccaacacccagcccaaggccgccttcaagagccagaatgccacccccaagggccccaatgctgcctatgacttcagccaggccgccaccaccggggagctggccgccaacaagtctgagatggccttcaaggcccagaatgccaccaccaaggtgggccccaatgccacctacaacttcagccagagcctgaatgccaatgacctggccaacagccggcccaagacccccttcaaggcctggaatgacaccaccaaggcccccacagctgacacccagacccagaatgtgaaccaggccaagatggccaccagccaggccgacatcgagacagaccccggcatcagcgagccagatggagccacagcccagaccagcgcagatggcagccaggcccagaacctggagagcaggaccatcatccggggcaagaggaccaggaagatcaacaacctgaatgtggaggagaacagcagcggggaccagaggcgggcccccctggccgccggcacctggaggtctgcccctgtgcctgtgaccacccagaaccccccaggggcccccccaaatgtgctgtggcagacccccctggcctggcagaaccccagcggctggcagaaccagacagcccggcagaccccaccagcccggcagagccccccagcccggcagaccccaccagcctggcagaaccctgtggcctggcagaaccctgtgatctggcccaaccctgtgatctggcagaaccctgtgatctggcccaaccccatcgtgtggccaggccctgtggtgtggcccaaccccctggcctggcagaaccccccaggctggcagaccccacctggctggcagaccccacctggctggcagggccccccagactggcagggccccccagactggcccctgcccccagactggcccctgcccccagactggcccctgcccacagactggcccctgcccccagactggatcccagctgactggcccatccccccagactggcagaacctgcggcccagccccaacctgcggcccagccccaacagccgggccagccagaaccctggggccgcccagcccagagatgtggccctgctgcaggagcgggccaacaagctggtgaagtacctgatgctgaaggactacaccaaggtgcccatcaagaggtctgagatgctgcgggacatcatccgggagtacacagatgtgtacccagagatcatcgagcgggcctgctttgtgctggagaagaagtttggcatccagctgaaggagattgacaaggaggagcacctgtacatcctgatcagcaccccagagagcctggccggcatcctgggcaccaccaaggacacccccaagctgggcctgctgctggtgatcctgggcgtcatcttcatgaatggaaacagagccagcgaggccgtgctgtgggaggccctgaggaagatgggcctgcggcctggggtgcgccaccccctgctgggggacctgaggaagctgctgacctatgaatttgtgaagcagaagtacctggactaccgccgggtgcccaacagcaaccccccagaatatgagttcctgtggggcctgcggagctaccacgagaccagcaagatgaaggtgctgcgcttcatcgccgaggtgcagaagagggacccccgggactggacagcccagttcatggaggccgcagatgaggccctggatgccctggatgctgctgctgctgaggccgaggcccgggcagaggcccggaccaggatgggcattggagatgaggccgtgtctggcccctggagctgggatgacatcgagtttgagctgctgacctgggatgaggagggggactttggagacccctggagccgcatccccttcaccttctgggcccgctaccaccagaatgcccggagccgcttcccccagacctttgctggccccatcatcggccctgggggcacagccagcgccaactttgctgccaactttggagccatcggcttcttctgggtggagtag

SEQ ID NO: 21358 - DNA, 2337 bp, Artificial Sequence
  derived and/or modified sequence
atggcccagaagatggactgcggcgccggcctgctgggcttccaggccgaagcatctgttgaggactctgccttgctgatgcagactttaatggaagccatccaaattagcgaggcaccccccacaaatcaggctaccgccgccgcgtcccctcagtcatctcaacccccaactgccaatgagatggccgatatacaggttagtgccgccgccgccagacccaaatctgcctttaaagttcagaacgctaccaccaagggacccaacggggtgtatgacttctctcaagcccataatgccaaggacgtccctaatacccaacctaaggctgcatttaagagtcagaatgccacccctaagggcccgaacgcggcctacgacttctcacaggcagccacaaccggagaactcgccgccaataagtccgagatggcattcaaagcacaaaacgctacgactaaagtggggcctaacgccacctataacttttcccagagcctgaacgccaacgaccttgcaaacagtagacccaagaccccctttaaggcttggaatgacaccacaaaggcgccaaccgcagacacccaaactcaaaatgtgaatcaggcaaagatggctacctcccaggccgatatcgagactgatccaggtatttcagagcctgatggtgcgactgctcagacctctgccgacggctcacaggcccaaaatcttgagagccgcacaattatccgagggaagagaacgcgcaagatcaacaacctaaacgttgaagagaactcctcaggggaccaaaggcgcgcacccctggcagccgggacctggagatccgctcctgttcccgttaccacccagaacccgccgggcgccccccccaacgttttgtggcaaactcctctcgcctggcagaacccctctggttggcagaatcaaaccgcccgccagaccccaccagcgcggcagtctcctcccgctcggcagactcccccagcatggcaaaacccggtggcgtggcagaatcctgtgatctggccgaatcccgtaatatggcaaaatccggttatttggccaaacccgatcgtgtggcctgggccggtagtgtggcccaatcctctcgcctggcaaaaccccccaggctggcagacccccccgggctggcaaactcccccggggtggcagggacctcccgactggcaggggccacctgactggcctctcccacccgactggccgctcccaccggactggcccttgcccacagactggcccctgccccccgactggataccagcggattggcccattccccccgactggcagaacttgcgcccctctcccaacctgcggcccagccctaattcccgcgctagtcagaatccgggggccgctcagccaagagatgtcgcccttctccaggaacgggcaaataaacttgttaagtacctgatgttaaaggactataccaaggtgcccataaagagaagtgaaatgctgcgggatattattagggaatatacagacgtgtacccggagataattgaaagagcatgctttgtactggagaaaaagttcggaatccaactgaaagaaatagacaaggaggagcacctgtatatacttatttctacccccgagagcctggccggcattttgggcacaactaaagacacccctaaattaggactcttgctggttatcctgggtgtgattttcatgaacgggaaccgggcaagcgaggccgtactctgggaggcactgcgaaaaatggggcttcgccctggtgtccgacacccattactgggcgaccttaggaagctgctgacatatgagttcgtcaagcagaaatacctggactatcgcagggttcccaatagcaatccgcccgaatacgagtttctgtggggactcagatcataccacgaaaccagtaaaatgaaagtgctgagattcattgctgaggtccaaaagcgcgatccccgcgattggaccgcccagttcatggaggccgctgacgaggcgttggatgccctggacgctgccgctgctgaagcagaagccagggcagaggctcgtacaagaatggggattggagacgaagctgtaagcggcccatggtcctgggatgatatagagtttgagctcctgacttgggacgaggaaggggattttggcgacccatggtcccgaatcccattcacattttgggctagatatcaccaaaacgcccgtagtcgcttcccccagacattcgccggccccataattggtcctggcgggactgcctcggcaaacttcgcagccaattttggcgcgatcggctttttctgggtcgagtag

SEQ ID NO: 21359 - DNA, 2337 bp, Artificial Sequence
  derived and/or modified sequence
atggcccagaagatggactgcggcgccggcctgctgggcttccaggccgaagcttccgtggaggatagtgctctgctgatgcagacactgatggaggccatccaaattagcgaagcaccccccacaaaccaggccactgcggctgccagtccacagagctcacaacctccaactgctaatgaaatggcggatatacaggtttcagcagcagctgcccgaccaaagtctgcatttaaggtgcagaatgccacgaccaagggcccaaatggtgtctacgacttctctcaggctcacaatgccaaagatgtcccgaacacacagcctaaagccgcattcaagtcgcagaatgccacccccaaaggtccaaatgccgcttatgatttctcacaggctgcaacaactggagagttggcagcaaacaagagcgagatggctttcaaagcacaaaatgccacaacaaaagtaggcccaaacgcgacatacaatttttctcagtcgttgaacgccaatgatctggcaaactcacggcctaaaacgccattcaaagcctggaacgacactactaaggcgcctaccgcagacacacagactcagaacgtgaatcaagccaagatggctaccagccaggcagacatcgagaccgaccctggaatctccgagcctgacggagccacggcccagacatcagccgacggctcgcaggcccagaatctggagtcccggacgatcatcagaggtaagcggacaagaaagataaacaacttgaacgtggaagaaaacagtagtggtgaccagcgaagagcgccccttgctgcgggtacatggcgatctgcaccagtgcccgtaacgacccagaatcctcccggcgctcctcccaatgtgctctggcagacacccctggcatggcagaacccttccggctggcagaatcagacggcccggcagactcctcccgcaagacagtcccctccagcgaggcagactcctcccgcgtggcagaaccctgtggcgtggcagaacccagtcatttggcccaaccccgtgatttggcagaatccggtaatttggcctaaccccatcgtgtggcccgggcctgtggtgtggccaaaccccctggcatggcagaatccccctggatggcagactcctcccggctggcagacgcctccgggttggcagggtccaccagactggcaggggcctccagactggcccctcccccccgattggccactgcccccagactggcctttgcccacagactggccactgcctcctgactggattcccgcagattggcccatccctccagattggcaaaacttgaggcctagcccgaatctcagaccgagcccaaattctagggcatcccagaaccctggcgccgctcagccacgtgacgttgctctcctacaggagcgggcaaacaaattagtcaagtatcttatgctgaaggactataccaaggtgccaatcaaacgttcagaaatgctgcgggatattatccgtgaatataccgatgtgtatcccgaaatcatcgagcgcgcttgctttgtgttggagaaaaaattcgggatccagctcaaggaaatcgataaagaagaacacctctacatcttgattagcacccccgagtcccttgctggtatcctcgggacaaccaaagacacccctaagctgggtctgcttctggtcatactcggagtgattttcatgaacgggaacagggcctccgaagcagtgctgtgggaagccctgcgcaaaatgggactgcgcccaggcgtcaggcatcctctactaggcgatttaaggaagcttcttacatatgagttcgtcaaacagaagtacctggattacagacgggtgccaaactccaaccctccggaatacgagttcctctggggcctccggtcgtaccacgagacatcaaaaatgaaggtgctccggttcattgctgaagtgcagaagagggatcctcgtgactggacagcacaatttatggaggccgcagatgaggccttggatgccctggacgcagccgcggctgaggcggaggccagagcagaagcccggacccggatgggaattggggatgaagcagtctccggaccatggtcctgggatgacattgaatttgagcttctgacctgggatgaggagggggactttggagatccctggtcacggattcccttcacattttgggccagatatcatcagaacgcacgttccagatttccccagacattcgccggcccaataattgggcccggagggaccgcttctgctaatttcgccgccaatttcggtgcaattgggtttttctgggtggaatag

SEQ ID NO: 21360 - DNA, 2747 bp, Artificial Sequence
  derived and/or modified sequence
ggcgaagaggcggggtcgcccaagctgccgcgctggcattttctcctggacaaggagagagtgcggctgctgagagccgagcccagcaatcccgatcctctgagtcgtgaagaagggaggcagcgagggggttggggttggggcctgaggcaagcccccaggctccgctcttgccagagggacaggagccatggctcagaaaatggactgtggtgcgggcctcctcggcttccaggctgaggcctccgtagaagacagcgccttgcttatgcagaccttgatggaggccatccagatctcagaggctccacctactaaccaggccaccgcagctgctagtccccagagttcacagcccccaactgccaatgagatggctgacattcaggtttcagcagctgccgctaggcctaagtcagcctttaaagtccagaatgccaccacaaaaggcccaaatggtgtctatgatttctctcaggctcataatgccaaggatgtgcccaacacgcagcccaaggcagcctttaagtcccaaaatgctaccccaaagggtccaaatgctgcctatgatttttcccaggcagcaaccactggtgagttagctgctaacaagtctgagatggccttcaaggcccagaatgccactactaaagtgggcccaaatgccacctacaatttctctcagtctctcaatgccaatgacctggccaacagcaggcctaagacccctttcaaggcttggaatgataccactaaggccccaacagctgatacccagacccagaatgtaaatcaggccaaaatggccacttcccaggctgacatagagaccgacccaggtatctctgaacctgacggtgcaactgcacagacatcagcagatggttcccaggctcagaatctggagtcccggacaataattcggggcaagaggacccgcaagattaataacttgaatgttgaagagaacagcagtggggatcagaggcgggccccactggctgcagggacctggaggtctgcaccagttccagtgaccactcagaacccacctggcgcaccccccaatgtgctctggcagacgccattggcttggcagaacccctcaggctggcaaaaccagacagccaggcagaccccaccagcacgtcagagccctccagctaggcagaccccaccagcctggcagaacccagtcgcttggcagaacccagtgatttggccaaacccagtaatctggcagaacccagtgatctggccaaaccccattgtctggcccggccctgttgtctggccgaatccactggcctggcagaatccacctggatggcagactccacctggatggcagaccccaccgggctggcagggtcctccagactggcaaggtcctcctgactggccgctaccacccgactggccactgccacctgattggccacttcccactgactggccactaccacctgactggatccccgctgattggccaattccacctgactggcagaacctgcgcccctcgcctaacctgcgcccttctcccaactcgcgtgcctcacagaacccaggtgctgcacagccccgagatgtggcccttcttcaggaaagagcaaataagttggtcaagtacttgatgcttaaggactacacaaaggtgcccatcaagcgctcagaaatgctgagagatatcatccgtgaatacactgatgtttatccagaaatcattgaacgtgcatgctttgtcctagagaagaaatttgggattcaactgaaagaaattgacaaagaagaacacctgtatattctcatcagtacccccgagtccctggctggcatactgggaacgaccaaagacacacccaagctcggtctcctcttggtgattctgggtgtcatcttcatgaatggcaaccgtgccagtgaggctgtcctctgggaggcactacgcaagatgggactgcgtcctggggtgagacatcccctccttggagatctaaggaaacttctcacctatgagtttgtaaagcagaaatacctggactacagacgagtgcccaacagcaaccccccggagtatgagttcctctggggcctccgttcctaccatgagactagcaagatgaaagtgctgagattcattgcagaggttcagaaaagagaccctcgtgactggactgcacagttcatggaggctgcagatgaggccttggatgctctggatgctgctgcagctgaggccgaagcccgggctgaagcaagaacccgcatgggaattggagatgaggctgtgtctgggccctggagctgggatgacattgagtttgagctgctgacctgggatgaggaaggagattttggagatccctggtccagaattccatttaccttctgggccagataccaccagaatgcccgctccagattccctcagacctttgccggtcccattattggtcctggtggtacagccagtgccaacttcgctgccaactttggtgccattggtttcttctgggttgagtgagatgttggatattgctatcaatcgcagtagtctttcccctgtgtgaggctgaagcctcagattccttctaaacacagctatctagagagccacatcctgttgactgaaagtggcatgcaagataaatttatttgctgttccttgtctactgctttttttccccttgtgtgctgtcaagttttggtatcagaaataaacattgaaattgcaaagtgaatta

SEQ ID NO: 21361 - DNA, 2701 bp, Artificial Sequence
  derived and/or modified sequence
gaagttgcctgaagtgaaggagggggtagcggctgcagaagctaaagcttccgccaaacaaaagaggacagcacttccggtcacgccatcgttgctgccttcttcgtcaagcccccaggctccgctcttgccagagggacaggagccatggctcagaaaatggactgtggtgcgggcctcctcggcttccaggctgaggcctccgtagaagacagcgccttgcttatgcagaccttgatggaggccatccagatctcagaggctccacctactaaccaggccaccgcagctgctagtccccagagttcacagcccccaactgccaatgagatggctgacattcaggtttcagcagctgccgctaggcctaagtcagcctttaaagtccagaatgccaccacaaaaggcccaaatggtgtctatgatttctctcaggctcataatgccaaggatgtgcccaacacgcagcccaaggcagcctttaagtcccaaaatgctaccccaaagggtccaaatgctgcctatgatttttcccaggcagcaaccactggtgagttagctgctaacaagtctgagatggccttcaaggcccagaatgccactactaaagtgggcccaaatgccacctacaatttctctcagtctctcaatgccaatgacctggccaacagcaggcctaagacccctttcaaggcttggaatgataccactaaggccccaacagctgatacccagacccagaatgtaaatcaggccaaaatggccacttcccaggctgacatagagaccgacccaggtatctctgaacctgacggtgcaactgcacagacatcagcagatggttcccaggctcagaatctggagtcccggacaataattcggggcaagaggacccgcaagattaataacttgaatgttgaagagaacagcagtggggatcagaggcgggccccactggctgcagggacctggaggtctgcaccagttccagtgaccactcagaacccacctggcgcaccccccaatgtgctctggcagacgccattggcttggcagaacccctcaggctggcaaaaccagacagccaggcagaccccaccagcacgtcagagccctccagctaggcagaccccaccagcctggcagaacccagtcgcttggcagaacccagtgatttggccaaacccagtaatctggcagaacccagtgatctggccaaaccccattgtctggcccggccctgttgtctggccgaatccactggcctggcagaatccacctggatggcagactccacctggatggcagaccccaccgggctggcagggtcctccagactggcaaggtcctcctgactggccgctaccacccgactggccactgccacctgattggccacttcccactgactggccactaccacctgactggatccccgctgattggccaattccacctgactggcagaacctgcgcccctcgcctaacctgcgcccttctcccaactcgcgtgcctcacagaacccaggtgctgcacagccccgagatgtggcccttcttcaggaaagagcaaataagttggtcaagtacttgatgcttaaggactacacaaaggtgcccatcaagcgctcagaaatgctgagagatatcatccgtgaatacactgatgtttatccagaaatcattgaacgtgcatgctttgtcctagagaagaaatttgggattcaactgaaagaaattgacaaagaagaacacctgtatattctcatcagtacccccgagtccctggctggcatactgggaacgaccaaagacacacccaagctcggtctcctcttggtgattctgggtgtcatcttcatgaatggcaaccgtgccagtgaggctgtcctctgggaggcactacgcaagatgggactgcgtcctggggtgagacatcccctccttggagatctaaggaaacttctcacctatgagtttgtaaagcagaaatacctggactacagacgagtgcccaacagcaaccccccggagtatgagttcctctggggcctccgttcctaccatgagactagcaagatgaaagtgctgagattcattgcagaggttcagaaaagagaccctcgtgactggactgcacagttcatggaggctgcagatgaggccttggatgctctggatgctgctgcagctgaggccgaagcccgggctgaagcaagaacccgcatgggaattggagatgaggctgtgtctgggccctggagctgggatgacattgagtttgagctgctgacctgggatgaggaaggagattttggagatccctggtccagaattccatttaccttctgggccagataccaccagaatgcccgctccagattccctcagacctttgccggtcccattattggtcctggtggtacagccagtgccaacttcgctgccaactttggtgccattggtttcttctgggttgagtgagatgttggatattgctatcaatcgcagtagtctttcccctgtgtgaggctgaagcctcagattccttctaaacacagctatctagagagccacatcctgttgactgaaagtggcatgcaagataaatttatttgctgttccttgtctactgctttttttccccttgtgtgctgtcaagttttggtatcagaaataaacattgaaattgcaaagtgaa

SEQ ID NO: 21362 - DNA, 2337 bp, Artificial Sequence
  derived and/or modified sequence
atggcgcaaaagatggactgtggggctgggctcctgggctttcaggcggaagctagcgtagaggattctgctttactcatgcagaccttaatggaggccatacagatcagcgaggcacccccaacgaaccaagcaacagccgcagcctcaccccaatcctcgcagccacctacggcaaacgaaatggccgacattcaggtctctgcggctgcagccaggcctaaatctgccttcaaagtgcagaatgccaccaccaagggcccaaacggggtgtacgacttctcccaggctcataacgctaaggacgtgcccaatactcaacccaaggccgcattcaagagccagaatgctactccaaaaggtcctaatgccgcttacgacttcagccaggcagctaccaccggagaacttgctgctaataaaagcgagatggccttcaaagctcagaacgccactaccaaggtgggccctaacgctacctacaactttagccagtccctaaacgctaacgacctggcaaacagcaggcccaaaacccccttcaaagcatggaacgacacgacgaaggccccaaccgccgatacccagactcagaacgtcaatcaggctaagatggcaactagccaggccgacatcgagacggaccctggaatttcagagccagacggggcaactgcccagacgagtgctgacgggtcccaagcccagaatctggagagtcgaaccatcatacggggaaagaggaccagaaaaattaacaatttgaacgtggaagagaacagctccggggatcagaggcgcgctcccctggccgcaggcacatggagaagtgcccctgtgcccgtcaccacacaaaatcctcctggggcacctcctaacgtcctctggcaaacgcccctagcgtggcagaatccctcaggttggcagaaccaaacggcccgtcagactccgcctgcccgtcagagccctccagcccgacagacccccccagcctggcagaaccccgtggcctggcagaaccccgtgatctggcccaaccccgtgatttggcaaaatcctgtaatttggcctaaccctatcgtttggcccggaccagtcgtttggcctaaccctctggcgtggcagaacccgcctggctggcagactccccctggttggcagacaccccctggctggcagggcccaccagactggcagggtccccctgattggcctctgccgccagattggccgcttcctcctgattggccgctcccaacggactggcctctccctcctgattggattccagccgactggccaattcccccagattggcagaacttgcgtccatccccgaacctgagacccagccctaattccagggcttcccaaaatccaggtgctgctcagcctagggacgtggctctcctgcaggagagggccaataaactggtgaagtacctcatgctcaaggactacaccaaagtgcccattaagcgctcagagatgctgcgggacatcataagggagtacaccgacgtgtaccctgagatcatagagcgggcttgctttgtgctggaaaagaagttcggaatccagcttaaagagattgacaaagaggaacacctgtatatattgatctccacgcccgagtccttagccggtatcttggggactaccaaggacacacctaaattagggttacttttagtcatcttgggcgtcattttcatgaacggaaaccgggcatccgaggccgttctgtgggaggcactgcggaagatgggcttacgcccaggcgtccgacacccactgctgggagacctgcgcaagttactgacttacgagtttgtaaagcaaaagtatttagactatcgcagagttccaaattctaacccacctgagtacgaatttttgtggggtcttcgatcgtatcacgaaacttccaagatgaaggtgttacgtttcattgcggaggtccagaaaagagaccccagggactggactgcccagttcatggaagcagccgatgaggcattggatgccctcgacgcagccgcagccgaggccgaggcaagagctgaggctagaacccgcatggggattggcgatgaggccgtctccggcccttggagctgggatgatatcgaatttgagctgctcacatgggacgaggaaggcgatttcggggatccttggtctcgcatcccgttcacgttttgggccagatatcaccagaacgcaagatccaggttcccccaaacctttgccggtccaattatcggtcccggaggtacagccagcgcaaactttgctgcaaacttcggggcaatcggttttttctgggtcgagtag

SEQ ID NO: 21363 - DNA, 2337 bp, Artificial Sequence
  derived and/or modified sequence
atggctcagaagatggattgcggagcaggtctgctgggctttcaagccgaggccagcgtcgaagactcggccctgctgatgcagacgctcatggaagccattcagattagtgaagcccctccaaccaaccaagccacagccgcagcatcaccacaatccagtcagccaccgaccgcgaatgagatggccgatatccaggtttccgcggcagctgcaagacccaaatccgcttttaaagtgcagaacgctactacaaaaggacctaacggtgtctacgacttcagtcaggcccataacgccaaagacgtgccgaatacccaacctaaggcggcatttaaatcccagaatgcaacccccaagggacccaatgccgcatacgatttctcccaggctgccactactggcgagttagctgctaacaagtctgaaatggctttcaaagctcagaatgccacgactaaggtggggcctaacgccacgtataatttcagtcagtccctgaatgccaacgacctggcgaacagccggccaaaaactccctttaaagcatggaacgacactacaaaggctcccactgccgatactcagactcagaatgtcaaccaggccaagatggcaacctcacaggcagacattgaaaccgacccaggaatttccgaacccgatggcgcaactgctcagacatctgcggacgggtcgcaggcacagaatttagaaagccgcactatcattcggggtaagagaacccgaaaaattaacaatcttaacgtcgaagagaattcatcaggtgatcagcggagagctcccctggccgctgggacctggcggagtgcgccagtcccggttaccacgcaaaatccccctggcgctccgccaaacgttctgtggcagacccccttggcgtggcagaaccctagcggatggcagaaccagacagcacgccaaacaccacctgctagacagtcccctcccgcaaggcaaactccgccagcttggcaaaacccagtggcctggcaaaatcccgttatctggcccaatcctgttatatggcagaatcccgtaatctggcccaaccctatcgtgtggcccggtcccgtcgtgtggcccaacccactggcctggcaaaaccctcctgggtggcagaccccaccaggttggcaaacacctcctgggtggcaaggcccaccagactggcagggccctcctgactggcccctgccgccagactggcctctgccacctgactggccccttccaacggactggcccctaccacccgattggattcccgcagattggccaatcccccctgactggcaaaacctccgacctagtcccaacctgcgaccctctccaaattctcgagcttcccagaatccgggagctgcccagccaagggatgtagctttgcttcaggaacgcgctaacaaactggtgaaatatctaatgctgaaggactataccaaggtgcctatcaagagatctgaaatgctgagagatatcataagggagtacaccgatgtttatccggaaatcatcgagcgcgcatgtttcgtgctcgaaaaaaaatttggcattcaactgaaggaaattgacaaagaggaacacctatatattctgatttcaaccccggagtctcttgcgggaattcttggaactacaaaggatactccgaaacttggcctgctgcttgttatcttgggagtgatcttcatgaatggaaatagggcctcagaagccgtactctgggaagcactgagaaagatgggcttacggccaggggtgcggcaccccctcctgggtgacctccgaaaactgttgacttacgagtttgtgaaacagaagtacttggattataggcgggtccccaattctaaccctccagagtacgagttcctgtggggtttgaggagctatcatgagacttctaagatgaaagtgttaaggtttattgccgaggttcaaaaaagagatcctagagactggacagctcagttcatggaagcggctgacgaagctctggacgcacttgacgccgctgccgcagaggctgaagctcgggctgaggccagaactcggatgggcataggggacgaggctgttagtggcccttggtcatgggacgatattgagtttgaactgctcacatgggatgaggaaggcgactttggcgatccatggtctcggattcccttcaccttttgggccaggtaccaccaaaacgccaggtctaggttccctcagacctttgccggaccgatcattggacctggcggaaccgcaagcgctaattttgctgccaatttcggtgcaatcggcttcttctgggtcgagtag

SEQ ID NO: 21364 - DNA, 2337 bp, Artificial Sequence
  derived and/or modified sequence
atggcccaaaagatggactgcggggccggacttctgggctttcaagccgaggcatcagttgaggactctgcactactcatgcagactctgatggaggccatccaaataagtgaggctcctccaactaaccaggcgacggccgctgcatcgcctcaatcttcacagcctcctactgccaatgagatggctgatatccaggtgtctgccgcagccgcaaggccaaagagtgcattcaaggtgcaaaacgctaccaccaaaggacctaatggcgtgtatgatttctcccaggcccacaacgccaaggatgtgcccaacacgcagcccaaggccgccttcaaatcccagaacgccacacccaaaggccccaacgccgcatacgacttttcgcaggcagccacgactggcgaattggctgcaaataaatctgagatggcctttaaggctcaaaatgccacaaccaaggtggggcccaatgcaacgtacaacttctcacagagtttgaatgccaacgacctcgccaattctagacccaaaactccatttaaggcgtggaatgacacaaccaaggctcccactgccgatacccagacccagaacgttaaccaggctaaaatggctacctcacaggcggatattgaaacagatcccggcattagcgaacccgacggcgccactgcgcaaacctcagccgacgggagtcaggcccagaatctggaatccaggaccatcataagagggaaaagaacaaggaagatcaataatctgaatgtggaagagaattcctcgggggatcagcgtagggcaccactggcggcaggtacctggaggtccgctcctgtgcccgtaaccactcagaatccaccaggcgcccccccgaatgtgctgtggcagacgcccttggcgtggcagaacccctctggctggcagaaccagaccgcccgccagactccaccggcccgccagtcacctccagccagacagactccacctgcttggcagaatcctgtcgcctggcagaacccagtgatttggccaaacccagtaatctggcagaacccagtaatttggccaaaccctatagtatggccaggacccgtcgtttggccgaaccccctcgcctggcagaatccacccggttggcagacacccccaggttggcaaactccccccggctggcaggggccccccgactggcagggccccccagattggcctttgcccccagactggccactaccgccagactggccccttcccactgactggcctctgcctccagattggatccctgccgattggccaataccacctgattggcaaaacctacgtcctagccccaacctcaggccctccccaaatagccgggcctcacaaaacccaggggctgcccagcctcgagatgtggcactgctgcaagagcgagctaataagctggttaagtacctgatgttaaaagactacaccaaggtacccataaagagatccgaaatgctacgcgatatcatcagagagtacaccgatgtgtacccggaaataatcgagcgcgcttgtttcgtgctagagaagaaattcggtatccaactcaaggagatcgataaggaagagcacctgtatatcctcatctctactccggaatcactcgctggaatccttggcaccacaaaagatacacctaagcttggactgctgctcgtcatacttggggtgatcttcatgaatgggaaccgtgcctccgaggcagtcctgtgggaagcccttcggaagatggggttgcgaccaggagtgcgccatccccttctgggcgacctgaggaagctgttgacttacgaatttgtcaaacagaaatacctcgactaccgcagagtaccaaattcaaaccctcccgagtatgagtttttgtgggggctgcgcagctaccacgaaacgtccaaaatgaaagttctacggttcatcgccgaggtgcaaaaacgtgacccacgggattggactgcacagttcatggaagccgccgatgaagccctggacgcgctggacgcagcggctgccgaggcagaagctcgagccgaggctaggaccaggatgggcataggtgacgaggcagtgtccggaccgtggtcctgggacgacatagagttcgagctgctgacatgggacgaagagggagacttcggggacccctggtccagaattccctttactttttgggctcgatatcaccaaaacgcccgctctcggttccctcagacctttgccggacccataatcggacctggtgggaccgctagcgcaaacttcgcggccaacttcggcgcaatcggttttttctgggttgagtag

SEQ ID NO: 21365 - DNA, 2337 bp, Artificial Sequence
  derived and/or modified sequence
atggcccaaaagatggactgcggggctggtttgctggggtttcaggctgaggccagtgtggaggattcagctctattaatgcagacattaatggaggctatacagatctcagaggcacccccaaccaatcaagccacagccgctgccagtccacaaagctctcagcctcctaccgctaatgagatggcagacatccaggtgtctgctgccgctgctcgtcccaagtccgctttcaaggtacaaaatgctaccacaaaagggccaaacggcgtctacgatttctcccaggcccacaatgccaaagacgtgcccaacacccagcctaaggccgctttcaaaagccagaacgccacccctaaaggccccaatgccgcgtacgatttctcacaggcagccactaccggcgagctggcagcaaacaagagcgaaatggccttcaaggctcagaatgctacaactaaagtcggccctaatgcaacatacaacttctcacagtctcttaatgctaacgatctggcaaacagcagacccaaaaccccttttaaagcgtggaacgatactacaaaggcaccaacagctgatactcagacccagaacgttaatcaagccaagatggccacctcgcaggcagatatcgagactgatcctggcatctccgagcccgatggggctacagcgcagaccagtgcggatggctcccaggcacaaaacctggagtcccgtaccattatccgcggaaaaagaacccgcaagatcaataacctcaatgtcgaggaaaactcttctggagatcagcgtcgggctcctttggccgctggcacttggagaagtgcgcctgtgcccgtcactacccaaaacccccccggtgcccctcccaatgtcctctggcagacccctctggcttggcaaaaccccagcggatggcagaaccaaacggcgcggcagacgccccctgccaggcagtcccctcctgcaagacaaactccccccgcctggcagaatcctgtggcatggcagaaccctgtgatctggccgaaccctgtgatttggcagaacccagtcatatggcctaatccaatcgtatggccaggcccagtggtttggccaaatcccttggcctggcagaacccccccggatggcagaccccacccggctggcagaccccccccggatggcaaggaccccccgattggcagggccccccagactggcccctcccacccgactggccattgccgcccgactggccattgcctaccgattggccactgccccccgattggattccggctgattggccaatccctcccgactggcaaaatctccgtccctcccccaacctcaggccatctccaaacagcagagcatcccaaaaccctggcgccgcgcaacccagagatgtggctctcttacaagagcgcgccaataagttggtcaaatatctgatgctcaaagactacaccaaggttcccatcaagcgcagcgaaatgcttcgggatatcatcagggagtacacagatgtgtaccccgaaataatcgaaagggcctgtttcgtcctagagaagaaatttggcattcagttgaaggaaatcgataaagaagagcatttatatattctcatctccacccccgagtccctggcgggaatactagggaccactaaggatacgccaaagttgggactgcttctggtgatccttggagtgatttttatgaatggaaaccgggcgtccgaagctgtgctttgggaggcccttcggaaaatgggactgcggcccggcgtgcggcacccgctcttgggagacctacgcaaactgctcacctatgagtttgtgaaacagaagtacttggactacagaagggttcctaatagcaacccacccgagtatgagtttctgtgggggctccggagctaccatgaaacatccaagatgaaggtgctgcgctttattgctgaagtgcaaaagcgcgatcccagggactggacagcccagtttatggaagccgctgatgaggcactagacgccttggatgctgctgccgcagaagctgaggcacgggccgaagccagaacgcggatgggcattggcgacgaggcagtgagcggcccctggagttgggatgatatcgagttcgagttactaacatgggatgaagagggagatttcggtgatccttggtcacgcatcccttttactttctgggcccgctaccaccaaaacgcgcggtcccgatttccgcagactttcgcaggacccatcatcggccctggaggtactgcaagtgcaaacttcgccgccaactttggagcaattgggtttttctgggtggagtag

SEQ ID NO: 21366 - DNA, 2337 bp, Artificial Sequence
  derived and/or modified sequence
atggcacagaaaatggactgtggcgccggcttgctgggctttcaggccgaagcaagtgttgaggatagtgctctgctgatgcagacgctcatggaggctatccaaatctccgaagcccctccaacgaaccaagcaacggcggctgcatccccacagagctcacaaccacctactgccaacgagatggcagacatccaggtgtcagctgcagcagcaagaccaaagagtgccttcaaggtccaaaatgccacgacgaaggggcctaatggcgtatacgacttctctcaggcccataacgccaaagatgtgcctaacacccaacctaaggccgctttcaaaagccaaaatgcgactcccaagggacctaacgcagcatatgatttttcacaggctgccactaccggagagctagctgcaaataaatctgagatggccttcaaggcccaaaatgccactactaaggtaggacccaacgcaacatacaacttttcgcagtctttgaacgccaacgacctggccaactcacgccccaagacaccttttaaggcctggaatgacactactaaggctccaaccgcagatacccagacgcagaatgtcaaccaagccaagatggcaacatcacaggccgacatcgagaccgatcccggaattagtgagcccgatggtgccactgctcagactagcgccgacgggtcgcaagcccaaaacctggagagccgaaccatcatccgtgggaaaagaaccagaaagatcaataacttaaatgttgaggaaaactccagtggagatcaacgaagagctccccttgccgccggcacttggcggtcggcgccggttcccgtaaccactcagaaccctcctggggcccccccgaacgtgctctggcaaactccactcgcctggcagaatccttcggggtggcagaatcagacagctcgccagacaccacccgcccggcaaagtccaccagccaggcagaccccaccggcctggcagaatcccgtggcttggcagaatcctgttatttggcctaatccggttatctggcagaaccctgtaatatggcccaatcccatcgtgtggccagggccagtggtctggcccaatccacttgcttggcagaacccacccggatggcagactccacctggctggcagacaccccccgggtggcaggggcctcccgattggcagggaccccccgactggccactccccccggattggccgttgcctcccgactggcccctgccgacagactggccactgccaccagattggatccccgccgattggccaattccacccgactggcaaaacctgcggccctcccctaatctgagaccctctcccaactctagagccagccaaaaccccggagccgctcagccgcgcgatgtagccctgttgcaggaaagggctaataagctcgtaaagtacctgatgctcaaggactatacaaaagtcccaatcaaaagatccgaaatgttgcgtgatattatcagagaatatactgatgtgtatcctgagatcatcgaaagagcgtgtttcgtgttagagaaaaagtttgggattcagttaaaagagatcgacaaagaagaacacctctacatcctgattagtaccccagagagtctagctgggatcttgggtactaccaaggatacacccaaactcgggctgctgttagtgatccttggtgttatattcatgaatggaaatcgagccagtgaggccgtgctgtgggaggctttacggaagatgggccttcggcccggcgtcagacatccacttctgggggaccttaggaaactgctgacatacgagttcgtgaaacagaagtaccttgactatcgcagggttcctaattccaacccaccggagtatgagtttctttggggactcaggagttatcacgagactagcaagatgaaagtgttaagatttattgctgaagtgcagaagcgcgacccacgggactggactgcacagtttatggaagcagccgacgaagctctggacgcactcgacgctgctgctgccgaggcggaggctcgagccgaggcgaggacacgcatgggaataggcgacgaagccgtgtcaggcccctggtcttgggatgacatcgagttcgaactcctgacgtgggatgaggagggagattttggggatccctggagtagaatcccttttaccttttgggcaagataccaccagaatgctcgttctagatttccacaaactttcgcggggcctattattgggcccgggggcacagcctctgcaaattttgctgcaaacttcggagccataggcttcttttgggttgaatag

SEQ ID NO: 21367 - DNA, 414 bp, Artificial Sequence
  derived and/or modified sequence
atggcccaaaaaatggactgcggcgctggtttactcggatttcaggccgaagcaagtgtggaggacagcgccctgctcatgcagactctgatggaagccatccagataagtgaggcgccccccacaaatcaggctaccgcagctgcgagcccacaatcatctcaaccaccaaccgctaatgagatggcagacatccaagtgagcgctgccgctgcacggcccaaatcagcgtttaaagtgcaaaatgcaaccaccaaagggcccaacggcgtttacgatttctctcagtccctgaacgcaaatgacctcgcgaattcccgtccaaaaacccaagtaagcctgaacctgacagtgcagctccaccgccaccagcagatggtgccacgactgaggatatggagcccaggtcaatag

SEQ ID NO: 21368 - DNA, 414 bp, Artificial Sequence
  derived and/or modified sequence
atggcccagaagatggactgtggggccggcctgctgggcttccaggccgaggcctctgtggaggacagcgccctgctgatgcagaccctgatggaggccatccagatcagcgaggccccacccaccaaccaggccacagctgctgccagcccccagagcagccagcccccaacagccaatgagatggctgacatccaggtgtctgctgctgctgcccggcccaagagcgccttcaaggtgcagaatgccaccaccaagggccccaatggagtgtatgacttcagccagagcctgaatgccaatgacctggccaacagccggcccaagacccaggtgtccctgaacctgactgtgcagctgcaccgccaccagcagatggtgccccggctgcgcatctggagccctggccagtag

SEQ ID NO: 21369 - DNA, 2806 bp, Artificial Sequence
  derived and/or modified sequence
cgggactgactttggctcttcagtgtttgcgcatgcgcgtaacgtcctgaggcggtgggtggtatattaggcgaagaggcggggtcgcccaagctgccgcgctggcattttctcctggacaaggagagagtgcggctgctgagagccgagcccagcaatcccgatcctctgagtcgtgaagaagggaggcagcgagggggttggggttggggcctgaggcaaggctccgctcttgccagagggacaggagccatggctcagaaaatggactgtggtgcgggcctcctcggcttccaggctgaggcctccgtagaagacagcgccttgcttatgcagaccttgatggaggccatccagatctcagaggctccacctactaaccaggccaccgcagctgctagtccccagagttcacagcccccaactgccaatgagatggctgacattcaggtttcagcagctgccgctaggcctaagtcagcctttaaagtccagaatgccaccacaaaaggcccaaatggtgtctatgatttctctcaggctcataatgccaaggatgtgcccaacacgcagcccaaggcagcctttaagtcccaaaatgctaccccaaagggtccaaatgctgcctatgatttttcccaggcagcaaccactggtgagttagctgctaacaagtctgagatggccttcaaggcccagaatgccactactaaagtgggcccaaatgccacctacaatttctctcagtctctcaatgccaatgacctggccaacagcaggcctaagacccctttcaaggcttggaatgataccactaaggccccaacagctgatacccagacccagaatgtaaatcaggccaaaatggccacttcccaggctgacatagagaccgacccaggtatctctgaacctgacggtgcaactgcacagacatcagcagatggttcccaggctcagaatctggagtcccggacaataattcggggcaagaggacccgcaagattaataacttgaatgttgaagagaacagcagtggggatcagaggcgggccccactggctgcagggacctggaggtctgcaccagttccagtgaccactcagaacccacctggcgcaccccccaatgtgctctggcagacgccattggcttggcagaacccctcaggctggcaaaaccagacagccaggcagaccccaccagcacgtcagagccctccagctaggcagaccccaccagcctggcagaacccagtcgcttggcagaacccagtgatttggccaaacccagtaatctggcagaacccagtgatctggccaaaccccattgtctggcccggccctgttgtctggccgaatccactggcctggcagaatccacctggatggcagactccacctggatggcagaccccaccgggctggcagggtcctccagactggcaaggtcctcctgactggccgctaccacccgactggccactgccacctgattggccacttcccactgactggccactaccacctgactggatccccgctgattggccaattccacctgactggcagaacctgcgcccctcgcctaacctgcgcccttctcccaactcgcgtgcctcacagaacccaggtgctgcacagccccgagatgtggcccttcttcaggaaagagcaaataagttggtcaagtacttgatgcttaaggactacacaaaggtgcccatcaagcgctcagaaatgctgagagatatcatccgtgaatacactgatgtttatccagaaatcattgaacgtgcatgctttgtcctagagaagaaatttgggattcaactgaaagaaattgacaaagaagaacacctgtatattctcatcagtacccccgagtccctggctggcatactgggaacgaccaaagacacacccaagctcggtctcctcttggtgattctgggtgtcatcttcatgaatggcaaccgtgccagtgaggctgtcctctgggaggcactacgcaagatgggactgcgtcctggggtgagacatcccctccttggagatctaaggaaacttctcacctatgagtttgtaaagcagaaatacctggactacagacgagtgcccaacagcaaccccccggagtatgagttcctctggggcctccgttcctaccatgagactagcaagatgaaagtgctgagattcattgcagaggttcagaaaagagaccctcgtgactggactgcacagttcatggaggctgcagatgaggccttggatgctctggatgctgctgcagctgaggccgaagcccgggctgaagcaagaacccgcatgggaattggagatgaggctgtgtctgggccctggagctgggatgacattgagtttgagctgctgacctgggatgaggaaggagattttggagatccctggtccagaattccatttaccttctgggccagataccaccagaatgcccgctccagattccctcagacctttgccggtcccattattggtcctggtggtacagccagtgccaacttcgctgccaactttggtgccattggtttcttctgggttgagtgagatgttggatattgctatcaatcgcagtagtctttcccctgtgtgaggctgaagcctcagattccttctaaacacagctatctagagagccacatcctgttgactgaaagtggcatgcaagataaatttatttgctgttccttgtctactgctttttttccccttgtgtgctgtcaagttttggtatcagaaataaacattgaaattgcaaagtgaa

SEQ ID NO: 21370 - DNA, 1528 bp, Artificial Sequence
  derived and/or modified sequence
attttctcctggacaaggagagagtgcggctgctgagagccgagcccagcaatcccgatcctctgagtcgtgaagaagggaggcagcgagggggttggggttggggcctgaggcaagcccccaggctccgctcttgccagagggacaggagccatggctcagaaaatggactgtggtgcgggcctcctcggcttccaggctgaggcctccgtagaagacagcgccttgcttatgcagaccttgatggaggccatccagatctcagaggctccacctactaaccaggccaccgcagctgctagtccccagagttcacagcccccaactgccaatgagatggctgacattcaggtttcagcagctgccgctaggcctaagtcagcctttaaagtccagaatgccaccacaaaaggcccaaatggtgtctatgatttctctcagtctctcaatgccaatgacctggccaacagcaggcctaagacccaggtatctctgaacctgacggtgcaactgcacagacatcagcagatggttcccaggctcagaatctggagtcccggacaataattcggggcaagaggacccgcaagattaataacttgaatgttgaagagaacagcagtggggatcagaggcgggccccactggctgcagggacctggaggtctgcaccagttccagtgaccactcagaacccacctggcgcaccccccaatgtgctctggcagacgccattggcttggcagaacccctcaggctggcaaaaccagacagccaggcagaccccaccagcacgtcagagccctccagctaggcagaccccaccagcctggcagaacccagtcgcttggcagaacccagtgatttggccaaacccagtaatctggcagaacccagtgatctggccaaaccccattgtctggcccggccctgttgtctggccgaatccactggcctggcagaatccacctggatggcagactccacctggatggcagaccccaccgggctggcagggtcctccagactggcaaggtcctcctgactggccgctaccacccgactggccactgccacctgattggccacttcccactgactggccactaccacctgactggatccccgctgattggccaattccacctgactggcagaacctgcgcccctcgcctaacctgcgcccttctcccaactcgcgtgcctcacagaacccaggtgctgcacagccccgagatgtggcccttcttcaggaaagagcaaataagttggtcaagtacttgatgcttaaggactacacaaaggtgcccatcaagcgctcagaaatgctgagagatatcatccgtgaatacactgatgtttatccagaaatcattgaacgtgcatgctttgtcctagagaagaaatttgggattcaactgaaagaaattgacaaagaagaacacctgtatattctcatcagtacccccgagtccctggctggcatactgggaacgaccaaagacacacccaagctcggtctcctctt

SEQ ID NO: 21371 - DNA, 2337 bp, Artificial Sequence
  derived and/or modified sequence
atggcccagaagatggactgcggcgccggcctgctgggcttccaggcagaagcttccgtggaagattctgcccttttgatgcagacgctaatggaggctatccagatcagcgaagcacctcctacgaaccaggctaccgccgctgcaagcccacagtcatcccagcctcctacagctaatgagatggctgatatccaggtcagtgccgccgctgctcgaccaaagtccgccttcaaggtgcaaaacgccacaacgaaagggcccaatggcgtgtatgacttcagccaggcccataacgccaaagatgtcccaaacacacaacctaaagcagcttttaaatcccagaacgctacccctaaaggtccgaacgccgcctatgatttttcacaggctgctacaaccggtgagttggcggctaacaagtccgagatggccttcaaagcccagaatgccaccaccaaagtgggcccaaacgccacctacaacttcagccaatccctgaatgcgaatgatttagcaaacagcagacccaagactccgtttaaagcatggaatgacacaacgaaggcccctacggccgacacgcagacccagaatgttaaccaggccaagatggctactagccaggctgatattgagactgatcctggcatcagcgagccagatggtgcaaccgcgcagaccagcgcggatggttctcaggcacagaatctcgagtccaggacgattataagaggtaagagaactaggaagattaacaatctcaatgttgaagagaattctagcggagatcagcgacgcgcaccactagccgcaggaacctggagaagtgcgcccgtgccggttacgactcaaaatcctccaggagctccacctaatgtgctgtggcagacaccactggcctggcagaatccctcagggtggcagaatcagactgctcggcagaccccgcccgcccgtcaatcgccgccagcacgccagaccccgccggcctggcagaatcccgttgcatggcagaatcctgtaatttggcctaaccctgttatttggcagaaccccgttatatggcccaatcccatagtgtggccgggaccggtcgtgtggcccaatcccctggcctggcaaaatcctcccggctggcagacacctcccggatggcaaacccctcccggttggcagggccccccagattggcagggtcctccagattggcccctcccgccagactggcccctgccccctgattggccgctccctactgattggccattgccccccgattggatacctgccgactggcctattccaccagattggcaaaaccttcggcccagccccaacttacgcccgtcacctaatagtagagcctcccagaacccaggagccgctcaacctcgcgacgtggctcttctgcaagaaagggctaataagcttgtaaagtaccttatgctgaaggattacacaaaagtgccgatcaagcggagtgagatgctgagggacattattcgggagtataccgatgtttatcctgagatcatcgaaagggcatgtttcgtcctggaaaaaaaatttggaattcagctgaaggaaatcgataaagaagagcatctgtacatcctgatctccactccggaaagcttagctggaattctagggacaacgaaagataccccaaagttaggcctgctgctggtgattcttggagtcatcttcatgaatgggaatagagctagcgaggcggtgctgtgggaagccctccgaaagatgggcttgagaccgggagtacgtcatccactgctcggcgacctgcggaagcttttgacctacgagttcgtcaagcaaaagtacctggactacaggcgggttccgaattcaaaccctccagagtacgagttcttgtggggcctgaggtcttaccacgagacctccaaaatgaaggtgttgcggttcatcgcggaggttcagaagcgtgacccccgggattggaccgcccagttcatggaggcggccgacgaggcgctggacgcccttgacgctgcagcggctgaagcggaagcccgggcagaggctcgcaccagaatgggtatcggcgacgaagccgtctcaggaccttggagttgggacgatatcgaattcgaacttctgacttgggatgaagagggggattttggcgatccatggtccaggataccattcacgttctgggcaagataccaccagaacgcccgctcacgctttccccagactttcgccgggcccattatcggccccggtggaactgcttcagccaatttcgcagccaattttggtgctatcggctttttttgggtggagtag

SEQ ID NO: 21372 - DNA, 2337 bp, Artificial Sequence
  derived and/or modified sequence
atggcccagaagatggactgcggcgccggcctgctgggcttccaggcagaggcctctgtcgaagacagcgccctcctgatgcagacgctgatggaggccatccagattagcgaggcacctcccaccaaccaggctaccgctgctgctagtcctcagagtagtcagccaccgacggccaacgagatggcggatatacaggtaagcgctgccgctgcacgcccaaaatcggcgtttaaagttcagaatgccacaacgaagggcccaaatggggtttatgatttttctcaggcccataacgccaaagacgtacccaacactcagcccaaggccgccttcaaatcacagaatgccacccccaagggccctaatgcagcgtacgacttcagccaggccgcaacaactggcgagctggcagctaacaagagtgagatggccttcaaggcccagaacgccaccacaaaagtcggacctaatgccacttataacttttctcaatcactgaatgcgaacgacttggctaattcacgccctaaaaccccttttaaggcctggaatgataccacgaaagcacctacggcagacacccagacacagaatgtgaatcaggctaagatggccacctcacaggccgacatcgagacagacccaggcatttcagagccggatggcgctacagctcagacatccgcggacgggagccaggctcagaacttggagtcgagaacaatcatcagagggaagaggacgcgtaaaatcaacaatctgaacgttgaagaaaattcttcgggagatcaacgaagggctcccctggcggccgggacatggcgatctgcccctgttcctgtcaccacacaaaatccacccggggccccgcccaatgtgttgtggcaaacacccctcgcttggcagaacccatcaggctggcagaaccaaactgcgagacagacgcctcccgctagacagagcccacccgcccgccagaccccacctgcctggcagaatcctgtggcctggcagaatcccgttatctggccaaacccggttatatggcagaaccctgtaatatggcctaatccgatcgtctggccaggtccagtcgtgtggcccaacccactggcctggcagaatcctcctggatggcagacgcctcctggctggcagacacctccagggtggcagggacctccagactggcagggtccaccagattggcccctccccccagattggcccttgcctccggactggcccctgccaacagactggcctctacccccagactggattcccgctgattggcccatcccccctgattggcaaaatctgcggccatcaccaaacctgaggcccagccccaacagccgcgccagtcagaatcctggggcagcccaacctcgcgatgtcgcactgctgcaagaaagggctaacaagctggtgaaatatttgatgctgaaggattatacaaaggtgcctattaagcggagtgaaatgctccgagacatcatccgggaatataccgacgtgtacccagaaatcattgaaagagcatgcttcgtactcgaaaagaagtttggcattcagctgaaggaaatagacaaggaggagcacctctacattctcatttcaacccctgagtcactggctggcatccttggaaccacaaaggacacccccaagctgggactgctgctggtgatcttaggtgttatatttatgaatggaaaccgggcctccgaagcagttttgtgggaagccctgagaaagatgggactgaggccaggtgtgcgacaccccctcctgggcgatctgcgtaagttgttaacatacgagtttgtgaagcaaaaatatctggattaccggcgtgtgccaaacagtaacccacccgaatacgagtttctgtggggcctacgatcataccacgagacaagcaagatgaaggtgttgagattcatcgcggaagtgcagaagagggatcctagggactggacagcccagtttatggaggccgccgatgaggctcttgatgccctggatgcagcagccgcggaagccgaggccagggccgaggccagaacacggatgggaatcggggacgaggctgtgtccggcccatggtcttgggacgatatcgagtttgaattattgacatgggatgaagagggggattttggcgatccctggtctcgtataccattcacattctgggcccgttaccaccagaatgcgcgtagccggttcccccagacttttgctggtccaatcatcggccccggcggaacggcgagtgcaaacttcgctgccaattttggagctatcggattcttctgggttgagtag

SEQ ID NO: 21373 - DNA, 2337 bp, Artificial Sequence
  derived and/or modified sequence
atggcccagaagatggactgcggcgccggcctgctgggcttccaggctgaggcgtctgtagaggactctgccctactgatgcagactctgatggaggccatccaaattagcgaggcccctcctaccaatcaggcaacagcggctgcgtctccccagtctagtcagccacctacagccaatgaaatggcagatatccaggtctctgcagccgccgcacgtccaaaatccgcgttcaaggtgcagaatgccactacaaaagggccaaacggcgtctacgatttctctcaggcgcacaatgctaaggatgtgccgaatacccagcctaaagctgcgttcaagtcacaaaacgctacacccaagggtcctaacgcagcctacgatttttcccaggcagcgacaacaggggagttggctgctaacaagtccgagatggccttcaaagctcagaatgccactactaaggttggccctaacgcgacctacaacttctctcagtctctcaatgctaacgatcttgcgaattccagaccaaaaactccttttaaggcctggaacgacaccaccaaggctcctacagctgatacgcagacccagaatgtgaaccaggccaagatggccacatctcaggcggacatcgaaacagatcccgggatttccgagcccgatggcgctaccgcccagacatccgccgacgggagccaggcacaaaatctagaaagccgcaccattatccgcggtaagcgcacaaggaagatcaataatttgaacgtggaagagaactctagtggagaccaacgacgggcccctctagcagcaggcacctggaggtctgcacctgtgcctgtgacaactcagaatccacccggcgcacccccaaacgtcctgtggcaaacacccttagcttggcagaaccctagcggatggcagaaccaaaccgcccgccaaacacccccggcacgccaaagcccaccagccagacagacccctcctgcatggcagaaccctgtcgcgtggcagaacccagttatatggcccaacccagtaatatggcaaaaccctgtcatctggcccaatcctatcgtatggccagggccagttgtttggcctaatccactggcttggcagaatccgccgggttggcagactcctcccggatggcagacacccccgggctggcagggccctcccgattggcaaggacccccggactggcctctgccaccagactggcccctgcccccggactggcctctccctactgattggccgctgcctcctgattggatccccgctgattggccgatcccaccagactggcagaacctccgtccctccccaaaccttaggccttcccccaactccagggccagtcagaaccccggagccgcccagcctcgggatgttgccctgctgcaggaaagggcgaataaactggtgaagtacctgatgctaaaagattacacaaaggtcccaattaagaggtccgaaatgctacgagatatcatccgggagtacacagacgtataccccgaaatcatcgagcgtgcttgcttcgtgctcgaaaagaagtttggaattcagctgaaagagatcgacaaggaggaacacctgtatattctgattagcacgcctgaaagcctggccgggatcctgggtacgacaaaggacacccccaaactggggctcctcctagttatactaggcgtcatctttatgaatggcaaccgggcttcagaggcagttctgtgggaagcgctccggaaaatgggcctccgtcctggcgtgcggcatcctctcctgggagacctccgcaaattgctgacatatgagttcgtaaagcagaaatatttagattaccgacgggtgcctaacagtaatcctcctgagtacgagttcctttggggccttcggtcctatcatgaaacgagcaagatgaaggtgttgagatttatagccgaagtgcaaaaaagggatcccagggattggacagcccagtttatggaggccgcggatgaagctctcgacgccctggacgctgccgcggctgaggcagaagccagggctgaggcgcggacccggatgggtattggagacgaagccgtgagcgggccttggtcctgggatgatatagagtttgaactgctgacatgggacgaagaaggagacttcggcgatccctggtctagaatccccttcaccttctgggcacggtaccatcagaacgctcgaagccgctttccgcagacctttgccggccccataattggtcccggaggcaccgcatctgccaacttcgcggcaaactttggagccatcgggttcttctgggtggaatag

SEQ ID NO: 21374 - DNA, 414 bp, Artificial Sequence
  derived and/or modified sequence
atggcccagaagatggactgcggcgccggcctgctgggcttccaggcggaggcttctgtggaagactcagcactgctgatgcaaaccctgatggaggcaatacagatatcagaggccccaccaacaaatcaggccacagccgcagcctctccccagtctagccagccccccaccgcaaacgagatggctgatattcaggtcagcgccgccgcggcccggcctaagtccgcatttaaggttcagaacgcaaccacaaaaggccccaacggagtctatgatttctcacaaagtctgaacgcaaacgatttggcgaatagccggcctaagacacaagtgagcctcaacctcacagtacagctacatcgacatcagcagatggtccctagactcagaatttggagccccggccagtag

SEQ ID NO: 21375 - DNA, 2337 bp, Artificial Sequence
  derived and/or modified sequence
atggcgcagaaaatggactgtggtgcaggcctcctggggttccaagccgaggccagtgtcgaggatagcgctctgctgatgcagaccctgatggaagcaatacagattagcgaagctcccccaacgaaccaggccaccgccgctgcatcaccccagtcaagtcaaccaccaactgcgaatgagatggccgatattcaggtctctgcagcagctgcccgaccaaagagcgcctttaaagtacagaatgctacgacaaaagggcctaatggcgtgtacgatttcagccaagcccataacgctaaagatgtaccaaatactcagccaaaggccgcattcaaaagccagaacgcaacaccgaaaggtccaaatgcggcttatgacttttctcaagccgctacaacaggcgagttagcggcaaataagtccgagatggctttcaaagctcagaacgctaccaccaaagtgggtccaaatgccacgtacaacttctcccaatcacttaatgccaacgatctggccaacagtcgcccaaagacgccctttaaggcatggaacgacacgaccaaagcacctactgcagacacccagacacaaaatgtcaaccaagcaaaaatggctacatctcaggcagacatcgagacagaccctggcatctccgaacctgacggggctaccgcacagaccagtgccgatggcagccaggcacaaaatctagaatctcgcactattattcgtggaaaaagaactcggaagattaataatctgaacgtcgaggaaaacagctcaggtgaccagagacgggcacctttagcggctgggacttggcgctctgccccagtacctgttactacacagaacccacctggggcacccccaaacgtgctgtggcaaaccccattagcatggcagaatccttccggctggcaaaaccagacagctcggcagaccccaccagctagacaatcacccccagcaaggcagacccctccagcctggcagaaccccgtcgcatggcaaaacccagtgatatggcccaatccggtaatctggcagaaccctgtgatttggccgaacccaattgtgtggcctggccctgtggtctggcctaaccctctagcatggcaaaacccacccggatggcagacaccgcctggatggcagacgccccctggatggcagggcccacccgattggcaaggacccccagactggccactccccccagattggcccttgcctccagattggcctttgcccacagactggccgctgccacccgactggattccggcagattggcccatcccccctgattggcagaacctgcggccatcacctaatctgaggccaagtcccaattctcgagccagccaaaaccctggggctgcccagcctcgtgatgtagccttgctgcaggagagggccaacaaattggtcaagtacttgatgctcaaggattatacgaaggtaccaatcaagcgctctgagatgctccgagatattatacgggaatacactgatgtgtatcctgaaataattgagagggcctgttttgtcctcgagaaaaagttcggtatccaacttaaggagattgataaagaagagcatctgtacatactgatcagcacacccgagtcgctggcaggaatacttgggactaccaaggacacccccaaactgggcttgctcctggtaatcttgggggtgatcttcatgaatggaaatcgggctagcgaagccgtgctctgggaggcactccgaaagatggggctccgacctggcgtgcggcacccactgctaggtgacttgagaaagctgctgacttatgagttcgtaaagcagaagtacttagactaccggagggtcccaaatagcaatccacctgagtatgagttcttatggggcctgagatcataccatgagacatccaagatgaaggttcttcgctttatcgctgaggtccagaaaagagacccaagagactggacagcccagttcatggaagcagctgacgaggcactggatgccctcgatgccgcagccgctgaggcagaagctcgcgctgaggcccgaacacgtatggggattggagatgaggccgtatccggaccttggtcctgggacgacattgaattcgaactgcttacctgggacgaggaaggcgattttggggacccatggtccagaatcccattcacattctgggcgaggtaccaccagaacgcgcgttctcggttcccacagacattcgcgggaccaattattggtccaggaggaactgccagcgccaactttgctgctaattttggtgcgataggattcttttgggtggagtag

SEQ ID NO: 21376 - DNA, 2337 bp, Artificial Sequence
  derived and/or modified sequence
atggcacaaaaaatggactgtggagctggactccttggctttcaagcggaggcatccgtggaggatagtgcactcctgatgcaaaccttgatggaggcgattcaaatctccgaggctccccctaccaaccaggccaccgccgctgctagtcctcagtcgtcccagccacccaccgctaacgagatggctgacattcaggtatctgctgcagcggctagacctaaatcagcctttaaggttcagaatgctaccaccaaggggccaaatggggtgtatgacttttcgcaagcacacaacgctaaggacgtacctaatacgcaacccaaggccgcttttaagagccagaatgccactccaaagggccctaacgcggcttacgatttctcacaggccgctaccaccggcgaacttgctgccaacaagagtgagatggcgtttaaggcccagaacgctactactaaggtgggccctaatgcaacttataattttagccagtccttaaatgcgaacgatctagcaaacagccgccctaaaacgccctttaaggcatggaatgatacaactaaggcgcctacagccgacacacagacacaaaacgtgaatcaggccaaaatggccaccagccaggccgacattgagaccgaccctggtatcagcgagcctgatggagccaccgctcagactagtgccgacggctctcaagctcaaaacctggagtctcgcacaataattcgaggaaaacggaccagaaagattaacaatctcaacgtcgaggagaatagttctggcgaccagcgaagagcccctctggcagccggaacgtggcgctctgcgccagtgccggtcaccacccagaacccacccggagctccgcctaacgtattgtggcagactcccctcgcctggcaaaatccctctggttggcaaaaccagaccgccagacagaccccacctgcccgacaaagtccgccagcgcgacaaaccccgcctgcttggcagaaccctgtcgcttggcagaatcccgtgatttggcccaacccggtgatctggcagaatcccgtcatttggcctaacccgattgtatggccaggacccgtggtgtggcccaaccccttagcttggcaaaaccctcccggatggcagacccctccaggctggcaaactcctcctggttggcagggaccccctgactggcagggacctccagactggcctctgccccctgattggcctttgcctcctgattggcctctgcctacagactggcctctgccacccgactggatcccagctgactggccaattccaccggactggcaaaacctacggcctagccccaatctgcgaccctcgcccaacagcagagcaagccagaatccaggcgctgcacagccaagggacgtggccctgctgcaggagcgggcaaataaacttgttaagtaccttatgttaaaggattacactaaggttcccatcaaaaggtctgaaatgctcagggacataatccgagagtacacagatgtctaccctgaaattatcgaacgtgcctgctttgtgctggagaaaaaattcggcatccaacttaaagagattgacaaagaagagcacctatacatcctcatttccacccccgaatccctggcaggaatactgggaaccactaaggacacacccaagttgggactgctgcttgtgatactgggtgtgattttcatgaatggtaatcgggctagcgaagccgtgctctgggaggctctgcgcaaaatggggctccgcccaggggtcagacaccccctgctcggcgaccttcggaagctgctgacatacgagttcgtaaagcagaaatacctggactatcgtagggttcctaattcaaatcccccagagtatgagtttttgtggggcctccggtcctaccatgagacgagcaaaatgaaagtcctgcgctttatcgccgaagtgcaaaagcgggaccccagagactggacggctcaatttatggaagcggcagatgaggcccttgacgcactcgacgctgctgccgctgaggccgaggctagggctgaggccaggacacgaatgggtataggggacgaagctgtgagtgggccttggtcatgggatgacatagagtttgaactgctgacatgggacgaggaaggggattttggcgacccatggtcacgcatcccattcactttctgggctaggtatcatcaaaatgcacggtcacggttcccccagacatttgctggccctatcatcgggcctgggggtaccgcatccgctaactttgccgctaatttcggggctatcggctttttctgggtggagtag

SEQ ID NO: 21377 - DNA, 2337 bp, Artificial Sequence
  derived and/or modified sequence
atggcacaaaagatggactgcggtgctgggctgctgggctttcaggccgaggcttccgttgaggattccgcgctactaatgcaaacgctaatggaggccattcaaatctccgaggcacccccaacaaaccaagctacagccgctgccagtccccagtcaagccagccacccacagcaaacgaaatggcagacattcaggtctccgcggcagctgcacggccaaaatccgcttttaaagttcaaaacgccacaactaaggggcctaacggggtttacgatttctctcaggcgcacaatgccaaggatgtacccaacactcagccaaaggctgcattcaaatctcagaacgccaccccaaagggaccaaacgcagcctacgatttttcacaggctgctacaacaggagagctggctgccaacaagtcagaaatggcattcaaggcccagaacgccacgaccaaggtgggcccaaatgccacctacaatttcagccagtccctgaacgccaacgacctagccaactcccgcccaaagaccccctttaaggcctggaacgacaccactaaagctccaactgcagacactcagacccagaatgtgaaccaggccaaaatggccacatcccaggcagatatagaaacggacccgggaatcagcgaaccagacggagccactgcacagacatcggctgacggatcgcaggcacagaacctggagtctcgcaccatcattaggggcaaacgcacaagaaaaatcaataatctgaatgtggaggaaaatagtagtggcgatcagcggcgagcaccactggccgcagggacttggcgttccgcacctgtaccagtcactacccagaaccctccaggggctccacccaatgtgttatggcagactccactggcctggcagaacccgagtggatggcagaaccagactgcgcgtcagacgcccccagccagacagtcccctcccgcaagacaaacgccccctgcgtggcagaatccagtggcgtggcaaaatcccgtgatctggccaaaccctgtgatatggcagaaccccgtcatctggcctaacccaatcgtctggcccggacctgtcgtctggcccaatcccctggcttggcagaaccctcccggatggcaaaccccacctggctggcagaccccccctggttggcaggggccaccggattggcagggcccacctgactggccattgcctcccgactggccgttgcctccggactggcccttaccaactgactggccattgcctcctgattggattccggcagactggcccataccaccggactggcagaacctccgtccctctcctaacttaagaccgtccccaaactctcgcgcttcacaaaatcccggagccgctcagcccagagatgtggcattactgcaggaaagggcaaataagctcgtcaaatacctgatgctgaaagactacacaaaagtgccgataaagaggagtgaaatgctcagagacattatccgtgagtatacggatgtgtatccagagattatcgagagagcttgctttgtgctggaaaagaagttcggaattcagctgaaagaaatcgataaagaggagcacctctatattctcatcagcacccccgagagtctcgccggaattctcggaaccaccaaagatacaccgaagctggggctcctgctcgttatcttgggagtaattttcatgaacggaaatagggcttcagaggctgtcctgtgggaggccctcaggaagatgggcctgcggccaggcgttcgccatccgttgctgggagatctgaggaaactcctgacttatgagttcgtgaagcaaaagtacttagattaccggagagtgcccaatagcaaccccccagagtacgaatttctgtggggcttgagatcttaccatgaaacaagcaagatgaaggttctgcgattcatcgcagaagtccagaaacgtgatccaagagactggactgcccagttcatggaagctgccgacgaggctttagatgcattggatgcagccgctgccgaagcggaggctcgagccgaagctaggactcgtatgggcatcggtgacgaagccgtctcggggccatggagctgggatgatatcgagttcgaacttctcacctgggacgaagagggcgactttggcgacccttggtccaggatcccttttaccttctgggctaggtaccatcagaacgctcggagtcggttcccgcagacattcgccggtcccattattggtcctgggggaacagcgtctgctaactttgctgctaattttggggctattggattcttttgggtcgaatag

SEQ ID NO: 21378 - DNA, 414 bp, Artificial Sequence
  derived and/or modified sequence
atggcgcaaaaaatggattgcggcgcaggcctgctgggcttccaggctgaggcctctgtggaagatagtgcactgttgatgcagacacttatggaggcaatccaaatcagtgaggcgcctcctacgaatcaggctacagctgcagcgagccctcagtcctcacaacccccaacagctaacgaaatggctgatatccaagtgagtgcagcagctgccagaccaaaatctgccttcaaagtgcagaacgctacaacaaagggcccaaatggagtatatgatttttcccaaagtctgaacgctaacgaccttgcaaacagccgccctaagactcaggtatcactgaacctgacagtgcagctccaccgccatcaacagatggtaccaagacttaggatctggtccccgggtcaatag

SEQ ID NO: 21379 - DNA, 414 bp, Artificial Sequence
  derived and/or modified sequence
atggcccagaagatggactgcggcgccggcctgctgggcttccaggccgaggccagcgtggaggacagcgccctgctgatgcagaccctgatggaggccatccagatcagcgaggccccccccaccaaccaggccaccgccgccgccagcccccagagcagccagccccccaccgccaacgagatggccgacatccaggtgagcgccgccgccgccagacccaagagcgccttcaaggtgcagaacgccaccaccaagggccccaacggcgtgtacgacttcagccagagcctgaacgccaacgacctggccaacagcagacccaagacccaggtgagcctgaacctgaccgtgcagctgcacagacaccagcagatggtgcccagactgagaatctggagccccggccagtag

SEQ ID NO: 21380 - protein, 834 aa, Artificial Sequence
  derived and/or modified sequence
MAQKMDCGAGLLGFQNPDACRAVCHPLPQPPASTLPLSAFPTLCDPPYSQLRDPPAVLSCYCTPLGASPAPAEASVEDSALLMQTLMEAIQISEAPPTNQATAAASPQSSQPPTANEMADIQVSAAAARPKSAFKVQNATTKGPNGVYDFSQAHNAKDVPNTQPKAAFKSQNATPKGPNAAYDFSQAATTGELAANKSEMAFKAQNATTKVGPNATYNFSQSLNANDLANSRPKTPFKAWNDTTKAPTADTQTQNVNQAKMATSQADIETDPGISEPDGATAQTSADGSQAQNLESRTIIRGKRTRKINNLNVEENSSGDQRRAPLAAGTWRSAPVPVTTQNPPGAPPNVLWQTPLAWQNPSGWQNQTARQTPPARQSPPARQTPPAWQNPVAWQNPVIWPNPVIWQNPVIWPNPIVWPGPVVWPNPLAWQNPPGWQTPPGWQTPPGWQGPPDWQGPPDWPLPPDWPLPPDWPLPTDWPLPPDWIPADWPIPPDWQNLRPSPNLRPSPNSRASQNPGAAQPRDVALLQERANKLVKYLMLKDYTKVPIKRSEMLRDIIREYTDVYPEIIERACFVLEKKFGIQLKEIDKEEHLYILISTPESLAGILGTTKDTPKLGLLLVILGVIFMNGNRASEAVLWEALRKMGLRPGVRHPLLGDLRKLLTYEFVKQKYLDYRRVPNSNPPEYEFLWGLRSYHETSKMKVLRFIAEVQKRDPRDWTAQFMEAADEALDALDAAAAEAEARAEARTRMGIGDEAVSGPWSWDDIEFELLTWDEEGDFGDPWSRIPFTFWARYHQNARSRFPQTFAGPIIGPGGTASANFAANFGAIGFFWVE

SEQ ID NO: 21381 - DNA, 2505 bp, Artificial Sequence
  derived and/or modified sequence
atggctcaaaagatggattgtggggccggcctgctcggttttcagaacccagacgcttgtcgtgccgtttgtcacccactccctcagcctcctgcttctacgttacctctcagcgcattcccaacactgtgtgaccccccctattctcagctccgtgatccccccgccgttctcagctgctactgtacaccgctgggtgcttccccagcacccgcagaggctagcgtggaggatagcgctctgttgatgcaaaccctgatggaagcgattcagatctcagaggccccaccaacaaatcaagctaccgcggctgcatcacctcagagtagtcagcctccaacggccaatgagatggcagacattcaagtatcagctgcggccgcccgcccgaagagcgccttcaaagtacagaatgcaacaaccaaaggtcccaacggggtctatgacttcagccaggcccataatgcaaaagatgttcctaacacacagccaaaggccgcatttaaaagccagaatgcaacaccaaaaggtccgaacgccgcttatgacttttcgcaggccgccaccaccggggagctggctgcgaataagagtgagatggccttcaaggcacagaacgcaacgaccaaagtgggtcccaatgctacttataatttcagccagagcttaaacgctaatgatttagcaaacagtcggcctaagacaccctttaaggcctggaacgataccaccaaggcacccaccgccgacacacagacacagaacgtaaaccaggctaaaatggccacttctcaggccgatatcgaaaccgacccagggatctccgagcccgacggagccacagcacagacgtcagccgatggcagtcaggcccaaaacttggagtccaggactattatccgagggaagagaacacgcaagattaacaatctaaatgttgaagaaaactcttccggtgaccaacgccgggcgccattggctgctggcacatggaggtctgcaccagtacctgttacaactcagaatccaccaggcgctcctccaaacgtgctttggcagaccccactggcctggcagaatccgtcaggctggcagaaccaaacagcccgccagaccccccccgcacgacagtcccctcctgcaagacagacgcctcctgcttggcagaaccctgttgcctggcagaaccccgtcatctggcccaatcctgttatttggcaaaaccccgtcatttggcccaatcccatagtgtggccgggcccagtcgtctggccgaatccccttgcctggcagaatccacccggatggcaaacccccccaggctggcagaccccacccgggtggcaaggccctcctgactggcaggggcctccagactggcctctgcctccagattggccactaccgcctgattggcctttgcctactgattggcctctgccgccggactggatccctgccgattggccgataccacctgactggcaaaatttaagaccatctccaaatcttagaccatctcctaattcacgggccagtcaaaatcccggagcagctcagcccagggatgtggccttacttcaggagcgcgctaacaagctcgttaaatacctgatgctgaaagattatactaaagtgccgattaagaggtctgaaatgctgcgtgacataatccgagagtataccgatgtttacccggaaataatcgagagagcatgcttcgtcctcgagaagaaattcggtatccagctgaaagaaattgataaggaggaacacctgtacatcctcatttctactccagaatcgcttgccggcatactgggaactacgaaggacacgccgaagctaggcctgctccttgtgatcctcggcgtgatcttcatgaatgggaatcgcgcgtcagaagccgtgctgtgggaggcactacgcaaaatggggctgcgacccggcgtgcggcacccgctgcttggcgacctacgcaagttgctgacatacgaatttgtcaagcaaaaatacctggactaccgccgggtccctaatagtaatccgccggagtacgaattcctgtggggtctcagaagctatcacgagacttccaaaatgaaggttctgcgcttcatcgccgaggttcagaaacgcgacccaagagactggaccgcacaattcatggaggctgcggacgaggccctcgacgccctggacgccgctgctgcagaggccgaggctcgcgccgaggctagaactcggatgggcatcggcgatgaggccgtgagcggcccttggagctgggacgatattgaattcgagctgttgacctgggatgaagagggcgatttcggcgacccttggtcccggatccccttcaccttctgggctagataccatcaaaacgcacgctcacggtttcctcagacgttcgcgggaccaatcatcggaccgggtggtacggcttccgctaactttgccgcaaactttggggcgataggcttcttctgggtggagtag

SEQ ID NO: 21382 - DNA, 2505 bp, Artificial Sequence
  derived and/or modified sequence
atggcccagaagatggactgtggggccggcctgctgggcttccagaacccagatgcctgcagagctgtgtgccaccccctgccccagcccccagccagcaccctgcccctgagcgccttccccaccctgtgtgaccccccctacagccagctgcgggaccccccagctgtgctgagctgctactgcacccccctgggcgccagccctgccccagctgaggcctctgtggaggacagcgccctgctgatgcagaccctgatggaggccatccagatcagcgaggccccacccaccaaccaggccacagctgctgccagcccccagagcagccagcccccaacagccaatgagatggctgacatccaggtgtctgctgctgctgcccggcccaagagcgccttcaaggtgcagaatgccaccaccaagggccccaatggagtgtatgacttcagccaggcccacaatgccaaggatgtgcccaacacccagcccaaggccgccttcaagagccagaatgccacccccaagggccccaatgctgcctatgacttcagccaggccgccaccaccggggagctggccgccaacaagtctgagatggccttcaaggcccagaatgccaccaccaaggtgggccccaatgccacctacaacttcagccagagcctgaatgccaatgacctggccaacagccggcccaagacccccttcaaggcctggaatgacaccaccaaggcccccacagctgacacccagacccagaatgtgaaccaggccaagatggccaccagccaggccgacatcgagacagaccccggcatcagcgagccagatggagccacagcccagaccagcgcagatggcagccaggcccagaacctggagagcaggaccatcatccggggcaagaggaccaggaagatcaacaacctgaatgtggaggagaacagcagcggggaccagaggcgggcccccctggccgccggcacctggaggtctgcccctgtgcctgtgaccacccagaaccccccaggggcccccccaaatgtgctgtggcagacccccctggcctggcagaaccccagcggctggcagaaccagacagcccggcagaccccaccagcccggcagagccccccagcccggcagaccccaccagcctggcagaaccctgtggcctggcagaaccctgtgatctggcccaaccctgtgatctggcagaaccctgtgatctggcccaaccccatcgtgtggccaggccctgtggtgtggcccaaccccctggcctggcagaaccccccaggctggcagaccccacctggctggcagaccccacctggctggcagggccccccagactggcagggccccccagactggcccctgcccccagactggcccctgcccccagactggcccctgcccacagactggcccctgcccccagactggatcccagctgactggcccatccccccagactggcagaacctgcggcccagccccaacctgcggcccagccccaacagccgggccagccagaaccctggggccgcccagcccagagatgtggccctgctgcaggagcgggccaacaagctggtgaagtacctgatgctgaaggactacaccaaggtgcccatcaagaggtctgagatgctgcgggacatcatccgggagtacacagatgtgtacccagagatcatcgagcgggcctgctttgtgctggagaagaagtttggcatccagctgaaggagattgacaaggaggagcacctgtacatcctgatcagcaccccagagagcctggccggcatcctgggcaccaccaaggacacccccaagctgggcctgctgctggtgatcctgggcgtcatcttcatgaatggaaacagagccagcgaggccgtgctgtgggaggccctgaggaagatgggcctgcggcctggggtgcgccaccccctgctgggggacctgaggaagctgctgacctatgaatttgtgaagcagaagtacctggactaccgccgggtgcccaacagcaaccccccagaatatgagttcctgtggggcctgcggagctaccacgagaccagcaagatgaaggtgctgcgcttcatcgccgaggtgcagaagagggacccccgggactggacagcccagttcatggaggccgcagatgaggccctggatgccctggatgctgctgctgctgaggccgaggcccgggcagaggcccggaccaggatgggcattggagatgaggccgtgtctggcccctggagctgggatgacatcgagtttgagctgctgacctgggatgaggagggggactttggagacccctggagccgcatccccttcaccttctgggcccgctaccaccagaatgcccggagccgcttcccccagacctttgctggccccatcatcggccctgggggcacagccagcgccaactttgctgccaactttggagccatcggcttcttctgggtggagtag

SEQ ID NO: 21383 - DNA, 2875 bp, Artificial Sequence
  derived and/or modified sequence
attttctcctggacaaggagagagtgcggctgctgagagccgagcccagcaatcccgatcctctgagtcgtgaagaagggaggcagcgagggggttggggttggggcctgaggcaagcccccaggctccgctcttgccagagggacaggagccatggctcagaaaatggactgtggtgcgggcctcctcggcttccagaatcctgacgcttgtagagcagtctgtcaccccctcccccagcctcctgcctccaccctccctctttctgcattccccactctgtgcgaccccccttattctcaactccgcgatccgcctgccgtcctgagctgctactgcacgcctcttggagcgtccccggctcctgctgaggcctccgtagaagacagcgccttgcttatgcagaccttgatggaggccatccagatctcagaggctccacctactaaccaggccaccgcagctgctagtccccagagttcacagcccccaactgccaatgagatggctgacattcaggtttcagcagctgccgctaggcctaagtcagcctttaaagtccagaatgccaccacaaaaggcccaaatggtgtctatgatttctctcaggctcataatgccaaggatgtgcccaacacgcagcccaaggcagcctttaagtcccaaaatgctaccccaaagggtccaaatgctgcctatgatttttcccaggcagcaaccactggtgagttagctgctaacaagtctgagatggccttcaaggcccagaatgccactactaaagtgggcccaaatgccacctacaatttctctcagtctctcaatgccaatgacctggccaacagcaggcctaagacccctttcaaggcttggaatgataccactaaggccccaacagctgatacccagacccagaatgtaaatcaggccaaaatggccacttcccaggctgacatagagaccgacccaggtatctctgaacctgacggtgcaactgcacagacatcagcagatggttcccaggctcagaatctggagtcccggacaataattcggggcaagaggacccgcaagattaataacttgaatgttgaagagaacagcagtggggatcagaggcgggccccactggctgcagggacctggaggtctgcaccagttccagtgaccactcagaacccacctggcgcaccccccaatgtgctctggcagacgccattggcttggcagaacccctcaggctggcaaaaccagacagccaggcagaccccaccagcacgtcagagccctccagctaggcagaccccaccagcctggcagaacccagtcgcttggcagaacccagtgatttggccaaacccagtaatctggcagaacccagtgatctggccaaaccccattgtctggcccggccctgttgtctggccgaatccactggcctggcagaatccacctggatggcagactccacctggatggcagaccccaccgggctggcagggtcctccagactggcaaggtcctcctgactggccgctaccacccgactggccactgccacctgattggccacttcccactgactggccactaccacctgactggatccccgctgattggccaattccacctgactggcagaacctgcgcccctcgcctaacctgcgcccttctcccaactcgcgtgcctcacagaacccaggtgctgcacagccccgagatgtggcccttcttcaggaaagagcaaataagttggtcaagtacttgatgcttaaggactacacaaaggtgcccatcaagcgctcagaaatgctgagagatatcatccgtgaatacactgatgtttatccagaaatcattgaacgtgcatgctttgtcctagagaagaaatttgggattcaactgaaagaaattgacaaagaagaacacctgtatattctcatcagtacccccgagtccctggctggcatactgggaacgaccaaagacacacccaagctcggtctcctcttggtgattctgggtgtcatcttcatgaatggcaaccgtgccagtgaggctgtcctctgggaggcactacgcaagatgggactgcgtcctggggtgagacatcccctccttggagatctaaggaaacttctcacctatgagtttgtaaagcagaaatacctggactacagacgagtgcccaacagcaaccccccggagtatgagttcctctggggcctccgttcctaccatgagactagcaagatgaaagtgctgagattcattgcagaggttcagaaaagagaccctcgtgactggactgcacagttcatggaggctgcagatgaggccttggatgctctggatgctgctgcagctgaggccgaagcccgggctgaagcaagaacccgcatgggaattggagatgaggctgtgtctgggccctggagctgggatgacattgagtttgagctgctgacctgggatgaggaaggagattttggagatccctggtccagaattccatttaccttctgggccagataccaccagaatgcccgctccagattccctcagacctttgccggtcccattattggtcctggtggtacagccagtgccaacttcgctgccaactttggtgccattggtttcttctgggttgagtgagatgttggatattgctatcaatcgcagtagtctttcccctgtgtgaggctgaagcctcagattccttctaaacacagctatctagagagccacatcctgttgactgaaagtggcatgcaagataaatttatttgctgttccttgtctactgctttttttccccttgtgtgctgtcaagttttggtatcagaaataaacattgaaattgcaaagtgaa

SEQ ID NO: 21384 - DNA, 282 bp, Artificial Sequence
  derived and/or modified sequence
atgctgggcctggtgatgagctgccccgaccggaccctggtgaccaaagtgcggagccacccctccggtaatcagcaccggccgactagaggaggctctcgaagcttccactgtagacgaggggtgccacgcccagctgcactgcgtgtattgccccgatgtcccgccttctccgatgccgcttgccccgcggctatgcgacccccccaatgcctcctgcacacaccaagcctggcttcacccttgttactgctcctgctatggctcctcggtggcgggtag

SEQ ID NO: 21385 - DNA, 2505 bp, Artificial Sequence
  derived and/or modified sequence
atggcccagaagatggactgcggcgccggcctgctgggcttccagaaccctgacgcttgtagggcagtctgtcatccgctgccccaacctccagcttctaccctgcccttgtccgctttcccgacgctttgtgaccctccatattcacagcttcgggatccccccgcagtactgagttgctattgcaccccactcggcgcctcacctgccccggccgaagcaagcgtagaggacagtgccctgctgatgcagacactaatggaggctatacagatctccgaagccccacccactaaccaagcgacagccgcagcgtcgccccaatctagccaacccccaacagctaacgagatggctgatatccaggtctctgccgcagcagcacgccctaagtccgccttcaaagtacaaaacgccaccacaaagggaccaaatggggtttacgactttagtcaggcacataatgctaaggatgtgccaaatactcagccgaaggccgcattcaagagtcaaaatgccacaccaaagggccccaacgcagcctacgacttcagccaggcggctactaccggggagctagctgcaaataagagcgaaatggctttcaaagcgcagaatgctacaacaaaggtcggtcctaacgcaacttacaatttcagccagtcactcaacgctaatgacctagccaacagtcgtcctaaaacaccctttaaggcctggaatgatacaacgaaagccccaactgctgacacacaaacacagaatgtgaatcaggcaaagatggcaacctcacaagccgatatagagacggaccctggcatttctgaaccggatggtgctactgctcagaccagtgccgacggatcgcaagcacagaatcttgaatctcgcaccatcatacggggaaaaaggacccgcaagattaacaatctgaatgtcgaagagaactctagtggggatcaacgaagagccccgctcgcggccgggacatggagatccgctcccgtgccagtcactacacagaatccgcctggcgccccccctaatgtgctttggcagacacccctcgcttggcagaatccaagcgggtggcagaatcagaccgctagacagaccccccctgcacggcagagcccacccgcaagacagacacctcctgcctggcagaaccccgtggcctggcaaaacccggtgatctggcccaacccggtgatttggcaaaaccctgtgatttggccgaacccaatagtgtggccaggaccagtggtgtggcctaatccgctcgcctggcagaaccctcccggctggcagaccccaccgggctggcaaactccaccaggttggcagggaccacccgactggcaggggcccccggactggccactccccccagattggcccctgcccccagactggccgctgcctactgattggcctctgccccccgactggataccggctgactggcccattcctcccgactggcaaaatttgagacctagccccaatctgcgaccaagccccaattccagagcctcccagaatccaggagccgcacaaccgcgagatgtggctttgctccaggagcgcgccaataaattagttaaataccttatgttaaaggactacacaaaggttcccatcaagaggtcagagatgttacgtgacattatccgcgaatacaccgacgtctaccctgagatcatcgagagagcctgttttgtactcgaaaagaaattcgggattcagcttaaagagatcgataaagaggagcatctgtacatattgatctccactccagagtccttagcaggcattctgggaaccaccaaggataccccaaagctgggcctgctcctggtgattctcggggttatctttatgaatgggaatcgcgcttccgaggctgttttgtgggaagcgcttcgcaagatgggattaaggcctggggtgcggcatccgctgctgggcgacctgcgcaaactactgacatacgaattcgtgaagcagaagtacctggactatcggcgggtgcctaactcaaatcctcccgaatacgaattcttgtggggcctgcggtcatatcacgaaacatctaaaatgaaggtacttagattcattgcggaggtccagaaacgtgatcctcgggactggaccgcccagttcatggaagccgcggacgaagctctagacgcactcgatgccgcagctgccgaggcagaggcccgcgctgaagcccggacgcggatgggaattggtgacgaggcagtgagtgggccctggagctgggatgacattgaattcgaactgctaacatgggatgaggagggagatttcggggacccttggtcccgaattcctttcaccttctgggctagatatcaccagaatgccaggtctcgcttcccacagacctttgccggtcccataataggcccagggggaacagccagcgcaaactttgcggccaacttcggagcaatcgggttcttttgggttgagtag

SEQ ID NO: 21386 - DNA, 2505 bp, Artificial Sequence
  derived and/or modified sequence
atggctcagaaaatggattgcggtgctggattactgggcttccagaatcccgacgcctgccgggctgtctgtcacccattgccacagcctcctgccagcacccttccgctttctgctttcccgacgctctgcgacccaccctattcacagctgcgcgatccccctgccgtcctcagttgttactgtacccctttaggcgcatcccctgcacctgccgaagcttcagtggaagatagtgccctgctgatgcagaccctgatggaagctatccagatcagtgaagcacctcctacgaatcaggctacagccgctgcctctccacagtccagccagccccctaccgccaacgagatggccgatatacaggtcagcgcggctgctgctagacccaaaagtgccttcaaagtgcagaatgcaactaccaagggacctaacggggtctacgacttctctcaggcccacaatgctaaagacgtgccaaatactcagcccaaggctgccttcaagtcccagaatgcaacccccaagggtcctaacgctgcatacgacttcagtcaagcagcaaccactggggagctggccgctaacaagtccgagatggcctttaaagctcagaacgccaccaccaaagtgggtcccaatgccacctacaactttagtcagtcattaaacgcaaatgacctagcaaattctcggcctaagacgcccttcaaagcctggaatgataccaccaaggcaccaaccgcagacacacaaacccagaacgttaatcaggctaagatggccaccagccaagctgacatcgaaacagaccccggaatctctgagcctgatggcgctaccgcgcagacaagtgcagacggttctcaggcacagaatctagagtccaggacaataatcaggggcaagcgcaccagaaagatcaataaccttaatgtggaggaaaacagtagcggcgatcagaggagggcaccgctggccgcaggcacctggaggtccgcaccagtccccgtgacgacccagaaccccccaggagcgccacccaacgtgctgtggcagacacctttggcctggcagaatccgagcggctggcagaatcagaccgctcgtcagacccctcccgcacgccagagtcctcctgccagacagacccccccagcctggcagaaccccgtcgcctggcagaaccctgtaatctggcctaacccggtcatctggcaaaacccggtgatttggcccaaccccatcgtctggccgggtcccgtcgtttggcccaacccacttgcctggcagaatccccctggctggcagactcccccaggatggcagacccctccaggctggcaaggcccacccgattggcagggcccaccggactggcctctgcccccagattggccactaccgccagactggcctctgcctacagattggccactcccacctgattggatacccgctgattggccaatcccaccagactggcagaatctgcgcccatctccaaatctgagaccctcgcctaatagccgcgcttcacagaatcccggtgcagctcagcccagagacgtggcccttcttcaagagagagccaataagctggtgaaatacttgatgctgaaggactacacgaaggtgccaatcaagcggagtgagatgttgcgcgacatcatccgggagtacactgatgtctacccagagatcattgagcgagcttgtttcgtcctggagaagaagttcggaatacagttgaaggagatcgacaaagaggaacatctttacattcttatttcaactcctgagagcttagctggaatcttgggcactaccaaggatacccctaaactcggactattgttagtgatcttgggcgtgatctttatgaatggtaaccgcgcttccgaagcagtgctgtgggaagcacttcgcaagatgggcctgagacccggagtgagacacccccttctgggcgaccttcggaagcttctcacatacgagttcgtgaagcagaaatatctcgactatcggagggtgccgaacagtaaccctcccgagtatgagttcctctgggggctgaggagctaccacgagacatctaagatgaaggtgctacgcttcatcgctgaagtgcaaaaacgagacccgagggattggaccgcccagtttatggaagccgcagatgaggcgctggatgctctggacgctgcagcagctgaagctgaagcgcgagctgaagcacggacaagaatgggaatcggcgatgaagctgtcagcgggccatggtcctgggatgatatcgaattcgagctcctgacctgggacgaggagggggacttcggcgatccctggtcccgaatcccttttaccttttgggcacgttaccaccagaacgctcggagtcggtttccgcagacatttgcagggcctattatcggacctggaggcactgcttctgcaaattttgcggcaaattttggtgccatcggatttttttgggtggagtag

SEQ ID NO: 21387 - DNA, 2505 bp, Artificial Sequence
  derived and/or modified sequence
atggcccagaagatggactgcggcgccggcctgctgggcttccagaaccccgacgcctgcagagccgtgtgccaccccctgccccagccccccgccagcaccctgcccctgagcgccttccccaccctgtgcgaccccccctacagccagctgagagacccccccgccgtgctgagctgctactgcacccccctgggcgccagccccgcccccgccgaggccagcgtggaggacagcgccctgctgatgcagaccctgatggaggccatccagatcagcgaggccccccccaccaaccaggccaccgccgccgccagcccccagagcagccagccccccaccgccaacgagatggccgacatccaggtgagcgccgccgccgccagacccaagagcgccttcaaggtgcagaacgccaccaccaagggccccaacggcgtgtacgacttcagccaggcccacaacgccaaggacgtgcccaacacccagcccaaggccgccttcaagagccagaacgccacccccaagggccccaacgccgcctacgacttcagccaggccgccaccaccggcgagctggccgccaacaagagcgagatggccttcaaggcccagaacgccaccaccaaggtgggccccaacgccacctacaacttcagccagagcctgaacgccaacgacctggccaacagcagacccaagacccccttcaaggcctggaacgacaccaccaaggcccccaccgccgacacccagacccagaacgtgaaccaggccaagatggccaccagccaggccgacatcgagaccgaccccggcatcagcgagcccgacggcgccaccgcccagaccagcgccgacggcagccaggcccagaacctggagagcagaaccatcatcagaggcaagagaaccagaaagatcaacaacctgaacgtggaggagaacagcagcggcgaccagagaagagcccccctggccgccggcacctggagaagcgcccccgtgcccgtgaccacccagaacccccccggcgccccccccaacgtgctgtggcagacccccctggcctggcagaaccccagcggctggcagaaccagaccgccagacagaccccccccgccagacagagcccccccgccagacagaccccccccgcctggcagaaccccgtggcctggcagaaccccgtgatctggcccaaccccgtgatctggcagaaccccgtgatctggcccaaccccatcgtgtggcccggccccgtggtgtggcccaaccccctggcctggcagaacccccccggctggcagaccccccccggctggcagaccccccccggctggcagggcccccccgactggcagggcccccccgactggcccctgccccccgactggcccctgccccccgactggcccctgcccaccgactggcccctgccccccgactggatccccgccgactggcccatcccccccgactggcagaacctgagacccagccccaacctgagacccagccccaacagcagagccagccagaaccccggcgccgcccagcccagagacgtggccctgctgcaggagagagccaacaagctggtgaagtacctgatgctgaaggactacaccaaggtgcccatcaagagaagcgagatgctgagagacatcatcagagagtacaccgacgtgtaccccgagatcatcgagagagcctgcttcgtgctggagaagaagttcggcatccagctgaaggagatcgacaaggaggagcacctgtacatcctgatcagcacccccgagagcctggccggcatcctgggcaccaccaaggacacccccaagctgggcctgctgctggtgatcctgggcgtgatcttcatgaacggcaacagagccagcgaggccgtgctgtgggaggccctgagaaagatgggcctgagacccggcgtgagacaccccctgctgggcgacctgagaaagctgctgacctacgagttcgtgaagcagaagtacctggactacagaagagtgcccaacagcaacccccccgagtacgagttcctgtggggcctgagaagctaccacgagaccagcaagatgaaggtgctgagattcatcgccgaggtgcagaagagagaccccagagactggaccgcccagttcatggaggccgccgacgaggccctggacgccctggacgccgccgccgccgaggccgaggccagagccgaggccagaaccagaatgggcatcggcgacgaggccgtgagcggcccctggagctgggacgacatcgagttcgagctgctgacctgggacgaggagggcgacttcggcgacccctggagcagaatccccttcaccttctgggccagataccaccagaacgccagaagcagattcccccagaccttcgccggccccatcatcggccccggcggcaccgccagcgccaacttcgccgccaacttcggcgccatcggcttcttctgggtggagtag

SEQ ID NO: 21388 - protein, 851 aa, Artificial Sequence
  derived and/or modified sequence
MGNRGMEDLIPLVNRLQDAFSAIGQNADLDLPQIAVVGGQSAGKSSVLENFVGRDFLPRGSGIVTRRPLVLQLVNATTEYAEFLHCKGKKFTDFEEVRLEIEAETDRVTGTNKGISPVPINLRVYSPHVLNLTLVDLPGMTKVPVGDQPPDIEFQIRDMLMQFVTKENCLILAVSPANSDLANSDALKVAKEVDPQGQRTIGVITKLDLMDEGTDARDVLENKLLPLRRGYIGVVNRSQKDIDGKKDITAALAAERKFFLSHPSYRHLADRMGTPYLQKVLNQQLTNHIRDTLPGLRNKLQSQLLSIEKEVEEYKNFRPDDPARKTKALLQMVQQFAVDFEKRIEGSGDQIDTYELSGGARINRIFHERFPFELVKMEFDEKELRREISYAIKNIHGIRTGLFTPDMAFETIVKKQVKKIREPCLKCVDMVISELISTVRQCTKKLQQYPRLREEMERIVTTHIREREGRTKEQVMLLIDIELAYMNTNHEDFIGFANAQQRSNQMNKKKTSGNQDEILVIRKGWLTINNIGIMKGGSKEYWFVLTAENLSWYKDDEEKEKKYMLSVDNLKLRDVEKGFMSSKHIFALFNTEQRNVYKDYRQLELACETQEEVDSWKASFLRAGVYPERVGDKEKASETEENGSDSFMHSMDPQLERQVETIRNLVDSYMAIVNKTVRDLMPKTIMHLMINNTKEFIFSELLANLYSCGDQNTLMEESAEQAQRRDEMLRMYHALKEALSIIGDINTTTVSTPMPPPVDDSWLQVQSVPAGRRSPTSSPTPQRRAPAVPPARPGSRGPAPGPPPAGSALGGAPPVPSRPGASPDPFGPPPQVPSRPNRAPPGVPRITISDP

SEQ ID NO: 21389 - protein, 396 aa, Artificial Sequence
  derived and/or modified sequence
MERIVTTHIREREGRTKEQVMLLIDIELAYMNTNHEDFIGFANAQQRSNQMNKKKTSGNQDEILVIRKGWLTINNIGIMKGGSKEYWFVLTAENLSWYKDDEEKEKKYMLSVDNLKLRDVEKGFMSSKHIFALFNTEQRNVYKDYRQLELACETQEEVDSWKASFLRAGVYPERVGDKEKASETEENGSDSFMHSMDPQLERQVETIRNLVDSYMAIVNKTVRDLMPKTIMHLMINNTKEFIFSELLANLYSCGDQNTLMEESAEQAQRRDEMLRMYHALKEALSIIGDINTTTVSTPMPPPVDDSWLQVQSVPAGRRSPTSSPTPQRRAPAVPPARPGSRGPAPGPPPAGSALGGAPPVPSRPGASPDPFGPPPQVPSRPNRAPPGVPRITISDP

SEQ ID NO: 21390 - DNA, 2556 bp, Artificial Sequence
  derived and/or modified sequence
atggggaaccgtggtatggaggacttgatcccgttggtaaaccggctccaggatgccttcagcgcaataggccagaacgcagacctggacctcccacagatcgccgtcgtgggcgggcagtccgcaggcaagtctagcgttttagagaacttcgtagggagagatttcctacctaggggaagcggtatcgtgacgcgcaggcctcttgttctgcagctggtaaacgcaaccaccgagtacgccgagttcctgcactgcaagggcaaaaagtttaccgattttgaggaggtaaggctagaaatcgaggcagagaccgatagggtaacagggacaaacaagggaattagcccagtgcctatcaacctgagggtgtactccccgcatgtgctcaatctgacacttgtggacctgccggggatgaccaaagtcccggtgggcgatcagccacccgacatcgaatttcagattagggacatgctcatgcagttcgtgaccaaagaaaactgtctcatcctggctgtgagtccagccaattctgatttggctaattcagatgcactcaaggtggctaaagaagtggatccccagggccagcgtaccattggggttataactaaactggacctcatggatgagggcaccgatgcccgagacgtcctcgagaataaactattgccactgcggagagggtacattggagtagttaaccgctcccagaaggacattgacggaaagaaagatatcaccgccgcactcgctgcggagcgtaaattttttctctcccacccttcctatcggcatcttgctgatcgtatggggacaccttatttacagaaagtgcttaaccagcagttgactaaccacattcgtgatacgcttccagggctgaggaataagctccagagtcaactcttgtccatcgaaaaagaggttgaggaatacaagaattttaggcctgacgaccccgcccggaaaacgaaggccctcctccaaatggtccagcaatttgcagttgacttcgagaagagaatcgaagggtcaggcgaccagatcgatacttatgagctgtctggcggcgcccgcatcaacaggatattccacgagcgctttccatttgagctcgtgaaaatggagttcgacgaaaaagagctgcgcagagaaatatcttatgcaattaagaacatccacggcatccgtacaggactgtttacccccgatatggctttcgagacgattgttaagaagcaggtgaaaaagatccgggaaccttgtctgaaatgtgtggacatggtgatctcagagctgatctcaaccgtaaggcaatgtactaagaaactgcagcagtaccctaggctcagagaagagatggaacggatagtcaccacgcatatacgagaacgggagggcaggacaaaagaacaagtgatgttgttgatagacatcgaattggcctatatgaataccaaccacgaggatttcatcggcttcgccaacgcccaacagagatccaaccagatgaataagaaaaaaaccagtggcaatcaggacgagattctggtgattaggaaaggatggcttaccattaataacatcggaatcatgaagggcggcagtaaagagtactggtttgtgctgaccgctgaaaacctgtcctggtataaggatgatgaagagaaggagaagaagtatatgctgtctgtggataatctcaaacttcgcgatgtagagaaaggatttatgtcttctaagcacattttcgccctgtttaacactgagcaacgcaacgtgtacaaggattataggcagcttgaactggcctgtgagacccaggaggaggtggacagctggaaggcctctttcctgagagccggagtctatcctgagcgagtcggggacaaggaaaaagcttctgaaacagaggaaaacggaagtgactcttttatgcactccatggaccctcagcttgagcgacaggttgagacaatccgaaatttagtagatagttacatggcgatagtgaacaagaccgtgcgtgatcttatgcccaagactatcatgcatctgatgattaacaataccaaagaattcattttcagtgaactgctggccaacctgtactcctgtggggaccaaaataccctaatggaggaaagcgctgaacaggcacagcgaagggacgagatgctgcggatgtaccatgctcttaaggaagccctgtctattattggtgacattaacacaacaacggtgtcaacccctatgcctcctcccgtcgatgacagttggctgcaggttcaaagtgtcccagcagggcgtcggtccccaacgtcttctcccacacctcaaaggcgcgcaccagccgtgcctcccgctcggcctggcagtagaggacccgctccaggccccccccctgcaggtagtgcgttggggggcgcccccccggtcccgagcaggcccggggcatcaccggatcccttcggcccccctccgcaggtaccgtcccggccaaacagggcgccaccaggagtccctagaatcaccatctccgacccttag

SEQ ID NO: 21391 - DNA, 2556 bp, Artificial Sequence
  derived and/or modified sequence
atgggcaacagaggcatggaggacctgatccccctggtgaaccggctgcaggatgccttcagcgccatcggccagaatgctgacctggacctgccccagattgctgtggtgggcggccagagcgctgggaagagctctgtgctggagaactttgtgggccgggacttcctgccccggggcagcggcatcgtgacccggcggcccctggtgctgcagctggtgaatgccaccacagaatatgcagagttcctgcactgcaagggcaagaagttcacagactttgaggaggtgcggctggagattgaagctgagacagacagagtgacaggcaccaacaagggcatcagccctgtgcccatcaacctgcgggtgtacagcccccacgtgctgaacctgaccctggtggacctgcccggcatgaccaaggtgcctgtgggggaccagcccccagacatcgagttccagatccgggacatgctgatgcagtttgtgaccaaggagaactgcctgatcctggccgtgtccccagccaacagcgacctggccaacagtgatgccctgaaggtggccaaggaggtggacccccagggccagaggaccatcggggtcatcaccaagctggacctgatggatgagggcacagatgccagagatgtgctggagaacaagctgctgcccctgcggcggggctacatcggcgtggtgaacagaagccagaaggacattgatggcaagaaggacatcacagctgccctggccgctgagaggaagttcttcctgagccaccccagctaccgccacctggccgacaggatgggcaccccctacctgcagaaggtgctgaaccagcagctgaccaaccacatccgggacaccctgcccggcctgaggaacaagctgcagagccagctgctgagcattgagaaggaggtggaggagtacaagaacttccggccagatgatcctgccaggaagaccaaggccctgctgcagatggtgcagcagtttgctgtggactttgagaagagaattgagggcagcggggaccagattgacacctatgagctgtctggaggagcccgcatcaaccgcatcttccacgagcgcttcccctttgagctggtgaagatggagtttgatgagaaggagctgcggcgggagatctcctatgccatcaagaacatccacggcatcagaacaggcctcttcaccccagacatggcctttgagaccatcgtgaagaagcaggtgaagaagatccgggagccctgcctgaagtgtgtggacatggtgatcagcgagctgatcagcacagtgcggcagtgcaccaagaagctgcagcagtacccccggctgcgggaggagatggagagaattgtgaccacccacatccgggagcgggagggccgcaccaaggagcaggtgatgctgctgattgatattgagctggcctacatgaacaccaaccacgaggacttcatcggctttgccaatgcccagcagaggagcaaccagatgaacaagaagaagaccagcggcaaccaggatgagatcctggtgatcaggaagggctggctgaccatcaacaacatcggcatcatgaagggcggcagcaaggagtactggtttgtgctgacagctgagaacctgtcctggtacaaggatgatgaggagaaggagaagaagtacatgctgtctgtggacaacctgaagctgagagatgtggagaagggcttcatgagcagcaagcacatctttgccctcttcaacacagagcagagaaatgtgtacaaggactaccggcagctggagctggcctgtgagacccaggaggaggtggacagctggaaggccagcttcctgcgggccggcgtgtacccagagcgggtgggggacaaggagaaggccagcgagacagaagaaaatggaagtgacagcttcatgcacagcatggacccccagctggagcggcaggtggagaccatccggaacctggtggacagctacatggccatcgtgaacaagacagtgcgggacctgatgcccaagaccatcatgcacctgatgatcaacaacaccaaggagttcatcttcagcgagctgctggccaacctgtacagctgtggggaccagaacaccctgatggaggagagcgctgagcaggcccagaggagagatgagatgctgaggatgtaccacgccctgaaggaggccctgagcatcatcggggacatcaacaccaccaccgtgtccacccccatgcctcctcctgtggatgacagctggctgcaggtgcagagcgtgcctgctggccgccgcagccccaccagcagccccaccccccagaggcgggccccagctgtgcccccagcccggcccggcagccggggccctgcccctggccccccacctgctggcagcgccctgggcggggcccctcctgtgcccagcaggcctggggccagcccagaccccttcggccccccaccccaggtgcccagccggcccaacagagcccctcctggggtgccccgcatcaccatcagtgacccctag

SEQ ID NO: 21392 - DNA, 2556 bp, Artificial Sequence
  derived and/or modified sequence
atgggcaaccggggcatggaggacctgatccccctggtgaaccggctgcaagatgccttcagcgccattgggcagaacgccgacctggatctcccacaaatcgccgtggttggcggccagtcagccggcaaatcaagcgtgctcgaaaattttgtgggtagagactttctccccaggggcagcggcatcgtgactcgccggcctctggtcctgcaactggtgaatgctaccacagaatatgcggagtttctgcattgcaagggaaagaagtttaccgatttcgaggaggtgcgtttggagattgaggcggaaaccgaccgagtgactggcactaacaagggcatcagcccagtgccaatcaatctaagagtctactctccccacgttctgaacctaacactcgtggacctgcccggtatgaccaaagtgccagtcggcgaccagcctcctgacatcgagttccaaatcagggatatgctcatgcagttcgtcactaaagaaaattgcctaattctcgcagtgagtccagccaatagcgatttagcaaattccgacgctcttaaggtcgccaaggaagttgatccacaggggcaacgaacaatcggcgtgataactaaattggacctcatggatgaggggacagatgcccgggacgtcctggaaaacaaacttctcccgctgcgaagaggttacattggagtggtgaatagaagccagaaggacatcgatggcaagaaagatattacggcagccctcgccgctgaaaggaagttcttcctgtcacacccaagttacagacaccttgccgaccgtatgggcacaccttatctacagaaagtgctgaaccagcaactcaccaaccatatacgagacacgctgccgggactgcgtaataagcttcaaagccaacttctgtcaatcgagaaggaggttgaggagtataaaaattttcgcccagacgatcccgccagaaaaacaaaagctctgctgcagatggtccagcagtttgccgtggatttcgagaaacgtattgaaggcagcggcgaccagatcgacacctacgagctctctggcggtgcaagaatcaatcggatctttcacgaacgattcccttttgagttagttaagatggaattcgacgagaaagagcttcgtagagaaatctcctacgccattaaaaacattcacgggatccgcactggattgttcaccccggacatggccttcgagacaattgtgaaaaagcaggttaagaaaatccgggagccgtgcctaaaatgtgttgatatggtgatcagcgaactgatctctacagtgcgccagtgtacaaagaagctgcagcagtacccaaggctaagagaggaaatggagagaatagtaactactcacatcagagagagagaaggccggactaaggagcaggtaatgctgttaatcgacattgaattggcgtatatgaatacgaatcatgaagattttatcggatttgccaacgcacaacagaggtcaaaccaaatgaataagaaaaagactagtggcaatcaggacgaaatcctagtaatcaggaagggctggctgaccataaacaatataggcataatgaaaggcggctctaaagagtactggttcgtgctgactgccgagaatctctcttggtacaaggacgatgaggagaaagagaaaaagtacatgctctcagtggacaacctgaaactacgagacgttgagaaaggtttcatgagctcgaagcacatcttcgccctttttaacacggaacagcgcaacgtgtataaggattacagacaattggagttggcctgcgaaacacaggaggaggtggacagctggaaggcctccttcctgagggccggcgtgtatcccgagagagtcggagataaagagaaggcctctgaaacagaggaaaacgggtctgatagcttcatgcacagcatggatccacaactcgagcgacaggtcgagactattaggaacctcgtggattcctacatggcgatcgttaacaagacagtgagagacctgatgcctaaaactatcatgcacctgatgattaataatactaaggaatttatcttcagtgaattgctggcgaatctgtatagctgcggtgatcagaatacattgatggaggaatccgcggagcaggcccagaggagggatgaaatgttaagaatgtaccacgctctcaaagaagccttaagcatcattggggacataaataccacaaccgtcagtaccccaatgcccccgcccgtggatgacagctggttgcaggtccaatctgttccagctggacgtcggagccctacgtctagccccaccccgcaaaggcgggcccccgctgtaccccccgctaggcctggctcacggggcccagctcccggccctccaccagcaggttctgccttaggcggggccccccctgttccgagccggcctggagctagtcctgacccattcggccctcctccgcaggtaccctccaggccaaatagggctcctcccggcgtgccaagaatcacgatttcagacccctag

SEQ ID NO: 21393 - DNA, 2556 bp, Artificial Sequence
  derived and/or modified sequence
atgggcaacaggggcatggaggatctgatccccttagttaatcgactgcaggacgcatttagtgctattggacagaacgccgatctggacctgccacagattgccgtggtgggaggacagtcggccggaaagagttcagtactggagaacttcgtggggagggattttctgccgaggggaagcggaattgtcacccgtagaccactcgtacttcagcttgttaacgccacgacagagtatgcagaatttttgcactgcaaggggaagaagttcactgactttgaggaagtccggcttgaaatagaggcagagaccgacagggtcacaggtacaaacaaagggatttctcctgttccaattaacctcagggtgtactcccctcacgtgctcaatctgactctagtagatctccctggaatgaccaaagtccccgttggagaccaacctccagatatagaattccaaatccgggacatgctgatgcagtttgtgacaaaggagaactgtttgattctagcagttagccccgctaacagcgatcttgctaactcggacgcgctgaaagtagccaaggaggtagatccacagggccagaggaccatcggcgtcataactaaactggacctgatggacgagggcaccgatgcacgagatgtcctcgaaaacaagttgctgccacttagaagaggatacatcggggtggttaacagaagtcagaaggatattgacggcaagaaggacatcaccgccgctctggcagctgaaaggaaattcttcctatctcatccgagctaccgccatctagctgatcgtatggggactccatacttgcagaaggtgctcaatcagcagctgacaaatcacatcagagatactctgcctggactgagaaataagctccaatctcaattactgtctatcgaaaaggaagtggaagagtacaaaaattttcgacccgacgatcctgcacggaagacaaaagctctactccagatggtccagcagttcgctgttgactttgagaaacgtatagaaggctccggcgaccaaattgacacttacgagctcagcggcggagccaggatcaataggatcttccatgaaagattccctttcgagctggtgaagatggagtttgacgagaaagaactgcgtcgggagatcagctatgcaatcaaaaatatccacggaatccgaactggtttgttcacccctgacatggctttcgagacaatagtgaagaagcaagtcaaaaaaattagggagccctgtcttaagtgtgttgacatggtgattagtgagttgatctctacggtccgacagtgtacaaagaagctacagcaatacccacgactaagagaggagatggaaagaattgtcaccacccacatccgagaaagggagggccgaacaaaggagcaggtgatgttgctcatagatatcgagctcgcatacatgaatacaaaccatgaggattttatcgggtttgccaatgctcagcagcgctccaaccagatgaataagaaaaagacctctggaaaccaggacgagatcctggtcattaggaagggttggctgacgatcaataatattggcatcatgaagggcggaagtaaggaatattggttcgttctgaccgctgagaatttatcatggtataaagacgacgaggaaaaggaaaaaaagtacatgctgtctgtggataacctgaagctgagggacgtggagaagggcttcatgagttctaagcatatcttcgcactgttcaatacggaacagcggaatgtatataaagactataggcagctcgaactggcctgtgagacccaagaggaggtcgacagctggaaggcctcttttctccgggctggagtataccctgagcgcgtgggcgacaaagaaaaggctagtgaaacggaggagaacgggtcagattcctttatgcactctatggacccacagcttgagagacaggtagaaaccattcgcaacttggtggatagttacatggccattgtcaacaagacagtgagggacctgatgccgaaaactatcatgcacttgatgatcaacaacacaaaagaattcattttcagtgaattacttgcaaacctgtattcctgtggtgatcagaacactttaatggaggagtctgctgagcaggctcagcgtagagatgaaatgttacggatgtatcacgccttaaaggaagccctatctattatcggcgatatcaacacaacaacagtgtcaacacctatgccacccccagtcgacgactcctggcttcaagtccagagcgtccctgccggtcggagaagccccacctcaagcccaacacctcaacgccgtgctccggcagtgccacccgcacggccaggttcccgcggacctgctccgggacctcctcctgccggaagtgccctggggggagcacctccggtgccatcgcggcctggggcttccccagacccttttggaccacctccacaggtgccatcccgtcctaatcgagcacctcctggtgtccccagaatcaccatctctgatccttag

SEQ ID NO: 21394 - DNA, 2556 bp, Artificial Sequence
  derived and/or modified sequence
atgggcaacagaggcatggaggacctgatccccctggtgaacagactgcaggacgccttcagcgccatcggccagaacgccgacctggacctgccccagatcgccgtggtgggcggccagagcgccggcaagagcagcgtgctggagaacttcgtgggcagagacttcctgcccagaggcagcggcatcgtgaccagaagacccctggtgctgcagctggtgaacgccaccaccgagtacgccgagttcctgcactgcaagggcaagaagttcaccgacttcgaggaggtgagactggagatcgaggccgagaccgacagagtgaccggcaccaacaagggcatcagccccgtgcccatcaacctgagagtgtacagcccccacgtgctgaacctgaccctggtggacctgcccggcatgaccaaggtgcccgtgggcgaccagccccccgacatcgagttccagatcagagacatgctgatgcagttcgtgaccaaggagaactgcctgatcctggccgtgagccccgccaacagcgacctggccaacagcgacgccctgaaggtggccaaggaggtggacccccagggccagagaaccatcggcgtgatcaccaagctggacctgatggacgagggcaccgacgccagagacgtgctggagaacaagctgctgcccctgagaagaggctacatcggcgtggtgaacagaagccagaaggacatcgacggcaagaaggacatcaccgccgccctggccgccgagagaaagttcttcctgagccaccccagctacagacacctggccgacagaatgggcaccccctacctgcagaaggtgctgaaccagcagctgaccaaccacatcagagacaccctgcccggcctgagaaacaagctgcagagccagctgctgagcatcgagaaggaggtggaggagtacaagaacttcagacccgacgaccccgccagaaagaccaaggccctgctgcagatggtgcagcagttcgccgtggacttcgagaagagaatcgagggcagcggcgaccagatcgacacctacgagctgagcggcggcgccagaatcaacagaatcttccacgagagattccccttcgagctggtgaagatggagttcgacgagaaggagctgagaagagagatcagctacgccatcaagaacatccacggcatcagaaccggcctgttcacccccgacatggccttcgagaccatcgtgaagaagcaggtgaagaagatcagagagccctgcctgaagtgcgtggacatggtgatcagcgagctgatcagcaccgtgagacagtgcaccaagaagctgcagcagtaccccagactgagagaggagatggagagaatcgtgaccacccacatcagagagagagagggcagaaccaaggagcaggtgatgctgctgatcgacatcgagctggcctacatgaacaccaaccacgaggacttcatcggcttcgccaacgcccagcagagaagcaaccagatgaacaagaagaagaccagcggcaaccaggacgagatcctggtgatcagaaagggctggctgaccatcaacaacatcggcatcatgaagggcggcagcaaggagtactggttcgtgctgaccgccgagaacctgagctggtacaaggacgacgaggagaaggagaagaagtacatgctgagcgtggacaacctgaagctgagagacgtggagaagggcttcatgagcagcaagcacatcttcgccctgttcaacaccgagcagagaaacgtgtacaaggactacagacagctggagctggcctgcgagacccaggaggaggtggacagctggaaggccagcttcctgagagccggcgtgtaccccgagagagtgggcgacaaggagaaggccagcgagaccgaggagaacggcagcgacagcttcatgcacagcatggacccccagctggagagacaggtggagaccatcagaaacctggtggacagctacatggccatcgtgaacaagaccgtgagagacctgatgcccaagaccatcatgcacctgatgatcaacaacaccaaggagttcatcttcagcgagctgctggccaacctgtacagctgcggcgaccagaacaccctgatggaggagagcgccgagcaggcccagagaagagacgagatgctgagaatgtaccacgccctgaaggaggccctgagcatcatcggcgacatcaacaccaccaccgtgagcacccccatgcccccccccgtggacgacagctggctgcaggtgcagagcgtgcccgccggcagaagaagccccaccagcagccccaccccccagagaagagcccccgccgtgccccccgccagacccggcagcagaggccccgcccccggccccccccccgccggcagcgccctgggcggcgccccccccgtgcccagcagacccggcgccagccccgaccccttcggcccccccccccaggtgcccagcagacccaacagagccccccccggcgtgcccagaatcaccatcagcgacccctag

SEQ ID NO: 21395 - DNA, 3247 bp, Artificial Sequence
  derived and/or modified sequence
agtctgggcgcgcggctgcagcggcggagccggagtcggagccgggagcgctagcggcagccggatcgcagcctgcggggcccgccgcagccatgggcaaccgcggcatggaagatctcatcccgctggtcaaccggctgcaagacgccttctctgccatcggccagaacgcggacctcgacctgccgcagatcgctgtggtgggcggccagagcgccggcaagagctcggtgctcgagaatttcgtaggcagggacttcttgcctcgaggatctggcattgtcacccgacgtcccctggtcttgcagctggtcaatgcaaccacagaatatgccgagttcctgcactgcaagggaaagaaattcaccgacttcgaggaggtgcgccttgagatcgaggccgagaccgacagggtcaccggcaccaacaagggcatctcgccggtgcctatcaacctccgcgtctactcgccgcacgtgctgaacctgaccctggtggacctgcccggaatgaccaaggtcccggtgggggaccaacctcccgacatcgagttccagatccgagacatgcttatgcagtttgtcaccaaggagaactgcctcatcctggccgtgtcccccgccaactctgacctggccaattctgacgccctcaaggtcgccaaggaggtggacccccagggccagcgcaccatcggggtcatcaccaagctggacctgatggacgagggcacagatgcccgtgatgtgctggagaacaagctgctccccctgcgcagaggctacattggagtggtgaaccggagccagaaggacattgatggcaagaaggacattaccgccgccttggctgctgaacgaaagttcttcctctcccatccatcttatcgccacttggctgaccgtatgggcacgccctacctgcagaaggtcctcaatcagcaactgacgaaccacatccgggacacactgccggggctgcggaacaagctgcagagccagctactgtccattgagaaggaggtggaggaatacaagaacttccgccctgatgacccagctcgcaagaccaaggccctgctgcagatggtccagcagttcgccgtagactttgagaagcgcattgagggctcaggagatcagatcgacacctacgaactgtcagggggagcccgcattaaccgaatcttccacgagcgcttccctttcgagctggtcaagatggagtttgatgagaaggaactccgaagggagatcagctatgctatcaagaatatccatggcattagaacggggctgtttaccccagacatggcctttgagaccattgtgaaaaagcaggtgaagaagatccgagaaccgtgtctcaagtgtgtggacatggttatctcggagctaatcagcaccgttagacagtgcaccaagaagctccagcagtacccgcggctacgggaggagatggagcgcatcgtgaccacccacatccgggagcgcgagggccgcactaaggagcaggtcatgcttctcatcgatatcgagctggcttacatgaacaccaaccatgaggacttcataggctttgccaatgctcagcagaggagcaaccagatgaacaagaagaagacttcagggaaccaggatgagattctggtcatccgcaagggctggctgactatcaataatattggcatcatgaaagggggctccaaggagtactggtttgtgctgactgctgagaatctgtcctggtacaaggatgatgaggagaaagagaagaaatacatgctgtctgtggacaacctcaagctgcgggacgtggagaagggctttatgtcgagcaagcatatctttgccctctttaacacggagcagaggaatgtctacaaggattatcggcagctggagctagcctgtgagacacaggaggaggtggacagctggaaggcctccttcctgagggctggcgtgtaccctgagcgtgttggggacaaagagaaagccagcgagaccgaggagaatggctccgacagcttcatgcattccatggacccacagctggaacggcaagtggagaccatccggaatcttgtggactcatacatggccattgtcaacaagaccgtgagggacctcatgcccaagaccatcatgcacctcatgattaacaataccaaggagttcatcttctcggagctgctggccaacctgtactcgtgtggggaccagaacacgctgatggaggagtcggcggagcaggcacagcggcgcgacgagatgctgcgcatgtaccacgcactgaaggaggcgctcagcatcatcggcgacatcaacacgaccaccgtcagcacgcccatgcccccgcccgtggacgactcctggctgcaggtgcagagcgtaccggccggacgcaggtcgcccacgtccagccccacgccgcagcgccgagcccccgccgtgcccccagcccggcccgggtcgcggggccctgctcctgggcctccgcctgctgggtccgccctggggggggcgccccccgtgccctccaggccgggggcttcccctgaccctttcggccctccccctcaggtgccctcgcgccccaaccgcgccccgcccggggtccccagaatcactatcagtgacccctgaggagcgtcagccatgccgatcgggtcaggcaagtccatcccgtcctgagagccccaggccccccttcgacctctaaacagatccctcctcttctcggagacctccctttccaagcctgcctggacggctgttctgtgacttgacagtggctcccccagccccaaagccagcccccttcatctgtgacttaatctgttgtagtggtgagctgatacattcaggtgtgaccgttggtgaaaacttgtgccccttctgtggtatgcccttgccctgttctataaatatctataaatactcatatatatacacacctacacatggccaaccgcctcgcctctagcgctgggaatcagtcactgtgctatccttgtggagtcttgtggcccaactaccagagaacgctgtcccccgacatcccactccaaagtgtgccacctccagtgagcctccttgtcatgcccggcctgtggacagccagcccccgccatccctcccaccccctaccaagcatgggggtgctgtgcaggcagccgtgtggcctgacagtttctaccagtcctgctgtccctcggctgagaataaaacccatttctggatga

SEQ ID NO: 21396 - protein, 726 aa, Artificial Sequence
  derived and/or modified sequence
MNHSPLKTALAYECFQDQDNSTLALPSDQKMKTGTSGRQRVQEQVMMTVKRQKSKSSQSSTLSHSNRGSMYDGLADNYNYGTTSRSSYYSKFQAGNGSWGYPIYNGTLKREPDNRRFSSYSQMENWSRHYPRGSCNTTGAGSDICFMQKIKASRSEPDLYCDPRGTLRKGTLGSKGQKTTQNRYSFYSTCSGQKAIKKCPVRPPSCASKQDPVYIPPISCNKDLSFGHSRASSKICSEDIECSGLTIPKAVQYLSSQDEKYQAIGAYYIQHTCFQDESAKQQVYQLGGICKLVDLLRSPNQNVQQAAAGALRNLVFRSTTNKLETRRQNGIREAVSLLRRTGNAEIQKQLTGLLWNLSSTDELKEELIADALPVLADRVIIPFSGWCDGNSNMSREVVDPEVFFNATGCLRNLSSADAGRQTMRNYSGLIDSLMAYVQNCVAASRCDDKSVENCMCVLHNLSYRLDAEVPTRYRQLEYNARNAYTEKSSTGCFSNKSDKMMNNNYDCPLPEEETNPKGSGWLYHSDAIRTYLNLMGKSKKDATLEACAGALQNLTASKGLMSSGMSQLIGLKEKGLPQIARLLQSGNSDVVRSGASLLSNMSRHPLLHRVMGNQVFPEVTRLLTSHTGNTSNSEDILSSACYTVRNLMASQPQLAKQYFSSSMLNNIINLCRSSASPKAAEAARLLLSDMWSSKELQGVLRQQGFDRNMLGTLAGANSLRNFTSRF

SEQ ID NO: 21397 - DNA, 2181 bp, Artificial Sequence
  derived and/or modified sequence
atgaaccactcaccactgaagacggcactcgcttatgagtgcttccaagaccaggacaactcgaccctcgcccttcccagtgaccagaaaatgaagactgggacttctggacgccagagagtgcaggagcaggtgatgatgaccgtgaaacgccagaaaagcaagagctcccagtcctcaacgctgtcacactctaaccgcgggagtatgtacgatgggctggctgacaattacaattacggaactacgagccgatcctcctactactctaagtttcaggccggcaacggcagctggggctaccctatttacaatggcacactgaagcgagagcccgataacaggcgattttcgtcttactcccaaatggaaaattggagccgacattaccccaggggcagctgcaacaccactggggctggatctgatatctgtttcatgcaaaagattaaagccagcaggtctgaaccggatctgtactgcgacccaagaggcacattacggaaagggactttaggctctaagggacagaaaaccacacagaacaggtacagcttctactccacctgctctgggcaaaaggctattaaaaagtgcccagtgcgcccgcctagctgcgcctctaaacaggatcccgtgtacatccctccgatctcctgtaacaaggacctgtctttcgggcatagcagagcctcctcaaaaatctgttctgaagatattgagtgctccggcttgacaatcccaaaagccgtccagtacctgagcagtcaggacgagaaatatcaggccatcggggcctactacatacagcatacatgttttcaagacgaaagtgcaaaacaacaggtctaccaactcggcggaatctgcaaattagttgatttgctaaggtcccccaaccagaatgtccagcaggctgccgccggcgccctccgaaatttggtctttaggtcaaccaccaataaattggagacacgcaggcaaaacgggatacgtgaagccgtgagccttctccggcggactgggaatgccgaaattcaaaaacagttaactgggctcctgtggaatctctctagcaccgatgaactgaaagaggaactgattgcggacgcactccctgtcctcgcagaccgagtcataattccatttagcggttggtgtgatggcaacagtaacatgtccagggaggtagtggatccagaggtattctttaatgctaccggctgcctgcggaacttgtcctctgctgacgcaggcaggcagaccatgcggaactatagcggactgattgattctttgatggcttatgttcaaaattgcgttgccgccagccgatgtgacgacaagtctgtggagaactgcatgtgcgtgctgcacaacttatcatatcgcctggatgctgaggtgcctactcgctaccgccaacttgagtataacgctcgcaatgcgtacaccgaaaagagtagcaccggatgtttttcaaacaaaagcgacaagatgatgaacaataactacgattgtcccctgcctgaagaggagaccaatccaaagggtagcggctggctctaccattcagacgcaattaggacctacctaaacctgatgggtaagagtaagaaagatgcaactctcgaggcctgcgcaggagctctgcagaacttgaccgcctctaagggactcatgtcctcgggcatgtcacagctcattggcttgaaagaaaaggggctgccccaaatcgctagattgctccagtccggcaatagtgatgttgtacgtagtggagcctcactgctctcaaatatgagtcgccatcctcttctgcacagggtcatgggcaatcaagtgtttcctgaggtgacccggctgctaacatctcatacgggtaacacctcaaacagtgaagacatcctgagtagcgcttgctacaccgtgcgtaacctgatggcttcacaaccccagctggctaaacagtatttttcttcttcgatgttgaacaacatcatcaacctttgtagatctagcgcatcaccaaaagcagctgaggccgcgcgcttgttactgagcgacatgtggagctccaaggagctccagggggtgttgaggcagcagggattcgacaggaatatgctggggaccctggctggtgccaacagtttgagaaatttcacatcacggttttag

SEQ ID NO: 21398 - DNA, 2181 bp, Artificial Sequence
  derived and/or modified sequence
atgaaccacagccccctgaagacagccctggcctatgagtgcttccaggaccaggacaacagcaccctggccctgcccagcgaccagaagatgaagacaggcaccagcggccggcagagggtgcaggagcaggtgatgatgacagtgaagaggcagaagagcaagagcagccagagcagcaccctgagccacagcaacagaggctccatgtatgatggcctggccgacaactacaactacggcaccaccagccgcagcagctactacagcaagttccaggccggaaatggctcctggggctaccccatctacaacggcaccctgaagcgggagccagacaacagacgcttcagcagctacagccagatggagaactggagccgccactacccccggggcagctgcaacaccaccggggccggcagtgacatctgcttcatgcagaagatcaaggccagccgctctgagccagacctgtactgtgacccccggggcaccctgaggaagggcaccctgggcagcaagggccagaagaccacccagaaccgctacagcttctacagcacctgcagcggccagaaggccatcaagaagtgccctgtgcggccccccagctgtgccagcaagcaggaccctgtgtacatcccccccatcagctgcaacaaggacctgagctttggccacagccgggccagcagcaagatctgcagcgaggacattgaatgttctggcctgaccatccccaaggctgtgcagtacctgagcagccaggatgagaagtaccaggccatcggggcctactacatccagcacacctgcttccaggatgagagcgccaagcagcaggtgtaccagctgggcggcatctgcaagctggtggacctgctgcggagccccaaccagaatgtgcagcaggccgccgccggggccctgaggaacctggtgttccgcagcaccaccaacaagctggagacccggcggcagaatggcatccgggaggccgtgtccctgctgcggaggactggaaatgctgagatccagaagcagctgaccggcctgctgtggaacctgagcagcacagatgagctgaaggaggagctgattgctgatgccctgcctgtgctggccgacagagtcatcatccccttcagcggctggtgtgatggcaacagcaacatgagccgggaggtggtggaccctgaggtgttcttcaatgccaccggctgcctgaggaacctgagcagcgcagatgctggccggcagaccatgaggaactacagcggcctgattgacagcctgatggcctacgtgcagaactgtgtggccgccagccgctgtgatgacaagtctgtggagaactgcatgtgtgtgctgcacaacctgagctaccgcctggatgctgaggtgcccacccgctaccggcagctggagtacaatgccagaaatgcctacacagagaagagcagcacaggctgcttcagcaacaagagtgacaagatgatgaacaacaactatgactgccccctgcctgaggaggagaccaaccccaagggcagcggctggctgtaccacagtgatgccatccgcacctacctgaacctgatgggcaagagcaagaaggatgccaccctggaggcctgtgccggggccctgcagaacctgacagccagcaagggcctgatgagcagcggcatgagccagctgattggcctgaaggagaagggcctgccccagatcgcccggctgctgcagagcggcaacagtgatgtggtgcgcagcggggccagcctgctgagcaacatgagccgccaccccctgctgcaccgggtgatgggcaaccaggtgtttcctgaggtgacccggctgctgaccagccacactggaaacaccagcaacagcgaggacatcctgagcagcgcctgctacacagtgaggaacctgatggccagccagccccagctggccaagcagtacttcagcagctccatgctgaacaacatcatcaacctgtgccgcagcagcgccagccccaaggctgctgaggccgcccggctgctgctgagtgacatgtggagcagcaaggagctgcagggcgtgctgcggcagcagggctttgacaggaacatgctgggcaccctggccggggccaacagcctgaggaacttcaccagccgcttctag

SEQ ID NO: 21399 - DNA, 2181 bp, Artificial Sequence
  derived and/or modified sequence
atgaaccacagccccctgaagaccgccctggcctacgagtgcttccaggaccaggataactccactctggccttgccatccgaccaaaagatgaaaacaggcacttctggacgtcagagggtgcaggagcaagtgatgatgacggtgaagagacagaagagcaaaagcagccaatcctcaacacttagccattccaatagaggcagcatgtatgacggcctagcagacaattataattatggcactacgagtagatctagctactattcaaagttccaggctgggaatggctcttggggttaccctatttataacggcactctgaagagagagcccgataacagacgtttctcttcctatagccagatggaaaattggtcgcggcattatccgaggggcagctgcaatacaacaggggcagggagcgatatttgcttcatgcagaagattaaggcaagtcgtagtgagcctgacctatactgtgatcctagagggacattaagaaagggcacgctgggttctaagggacagaagacaacgcagaataggtatagtttctattccacttgtagtggacagaaggccatcaaaaaatgccccgtaaggcctcctagctgcgcttctaagcaagatccagtctatatcccacccatctcctgtaataaggacctttctttcgggcactcccgcgcgagctcaaagatatgcagtgaggacatcgaatgctctgggctgacaatccccaaagccgtacagtatctgagttcgcaggacgaaaagtaccaagccataggagcttattacattcagcacacgtgctttcaggacgaaagcgctaagcagcaagtataccagctcggcggcatctgtaaattagttgatctgctgcgctccccgaaccagaatgtgcaacaggccgcagcaggggccctacgcaacttagtatttagaagcacaaccaataaactagagacccgaaggcagaatggaatacgagaggcagtgagcctcctacgcaggacgggcaatgccgagatccagaaacagctgaccggcttgctttggaacctgagctcaactgacgagctgaaagaggagctgattgcggacgcccttcctgtcctagctgaccgcgtgattatacctttttcagggtggtgcgacggcaatagcaatatgtccagagaggttgtcgatcccgaggtgttcttcaatgctacgggctgcctccgcaatctgtccagcgcggatgccggccggcagacaatgcgaaattacagcggcctcatcgatagtctcatggcctatgttcagaactgtgttgcagcaagtaggtgtgacgataaatctgtggaaaattgcatgtgtgtgcttcataacctgtcgtaccggctggacgccgaagtgccaacgcggtacagacagctggagtacaatgcccgcaacgcctacaccgagaagagttctaccggttgtttctccaacaaatccgataaaatgatgaataacaactacgactgtccccttccagaggaggagaccaacccaaaggggtcgggttggctctatcattccgacgccatccggacttacctgaacttgatgggcaagagcaaaaaggacgcgaccctcgaagcttgcgcaggagcgctacagaatctgacggcttctaagggtctaatgtcttcaggcatgtctcaactcattggcctcaaggaaaaggggctcccgcaaattgctaggctgctgcaatctggaaattccgatgtggtgcgcagcggagcctccctgttgtctaacatgtcccgtcatcctctgcttcatagagttatgggtaatcaagttttccccgaagttactagacttctcacatcccatactggcaatacctctaacagcgaggacatcctaagttcggcctgctataccgtacgtaatctgatggccagtcagccccaactggccaaacagtacttcagctcatccatgctgaacaatataataaacctgtgtagatcgtccgcctctccaaaggctgctgaggctgcgaggctgctgctctcagatatgtggagcagtaaggagcttcagggcgttctacgccaacagggatttgacagaaacatgttgggaacccttgcaggagcaaatagtctccgaaattttacatctcgcttctag

SEQ ID NO: 21400 - DNA, 5384 bp, Artificial Sequence
  derived and/or modified sequence
gggtggtgcagggcaggggtggtatatcctgtctgacggagggcgggcctcgccagtgccagagagggacgaaccagggtggaagcgccaggagcagctgcagggagccctcacgcggaccacgcactctatggccgtagggagccgctgagagcgagaagagcacgctcctgcccgcccgctgcaccgcacctcgcctcgcctctctgctctcctaggccccggccgcgcgccacccgcctcccgccaccatgaaccactcgccgctcaagaccgccttggcgtacgaatgcttccaggaccaggacaactccacgttggctttgccgtcggaccaaaagatgaaaacaggcacgtctggcaggcagcgcgtgcaggagcaggtgatgatgaccgtcaagcggcagaagtccaagtcttcccagtcgtccaccctgagccactccaatcgaggttccatgtatgatggcttggctgacaattacaactatgggaccaccagcaggagcagctactactccaagttccaggcagggaatggctcatggggatatccgatctacaatggaaccctcaagcgggagcctgacaacaggcgcttcagctcctacagccagatggagaactggagccggcactacccccggggcagctgtaacaccaccggcgcaggcagcgacatctgcttcatgcagaaaatcaaggcgagccgcagtgagcccgacctctactgtgacccacggggcaccctgcgcaagggcacgctgggcagcaagggccagaagaccacccagaaccgctacagcttttacagcacctgcagtggtcagaaggccataaagaagtgccctgtgcgcccgccctcttgtgcctccaagcaggaccctgtgtatatcccgcccatctcctgcaacaaggacctgtcctttggccactctagggccagctccaagatctgcagtgaggacatcgagtgcagtgggctgaccatccccaaggctgtgcagtacctgagctcccaggatgagaaataccaggccattggggcctattacatccagcatacctgcttccaggatgaatctgccaagcaacaggtctatcagctgggaggcatctgcaagctggtggacctcctccgcagccccaaccagaacgtccagcaggccgcggcaggggccctgcgcaacctggtgttcaggagcaccaccaacaagctggagacccggaggcagaatgggatccgcgaggcagtcagcctcctgaggagaaccgggaacgccgagatccagaagcagctgactgggctgctctggaacctgtcttccactgacgagctgaaggaggaactcattgccgacgccctgcctgttctggccgaccgcgtcatcattcccttctctggctggtgcgatggcaatagcaacatgtcccgggaagtggtggaccctgaggtcttcttcaatgccacaggctgcttgaggaacctgagctcggccgatgcaggccgccagaccatgcgtaactactcagggctcattgattccctcatggcctatgtccagaactgtgtagcggccagccgctgtgacgacaagtctgtggaaaactgcatgtgtgttctgcacaacctctcctaccgcctggacgccgaggtgcccacccgctaccgccagctggagtataacgcccgcaacgcctacaccgagaagtcctccactggctgcttcagcaacaagagcgacaagatgatgaacaacaactatgactgccccctgcctgaggaagagaccaaccccaagggcagcggctggttgtaccattcagatgccatccgcacctacctgaacctcatgggcaagagcaagaaagatgctaccctggaggcctgtgctggtgccctgcagaacctgacagccagcaaggggctgatgtccagtggcatgagccagttgattgggctgaaggaaaagggcctgccacaaattgcccgcctcctgcaatctggcaactctgatgtggtgcggtccggagcctccctcctgagcaacatgtcccgccaccctctgctgcacagagtgatggggaaccaggtgttcccggaggtgaccaggctcctcaccagccacactggcaataccagcaactccgaagacatcttgtcctcggcctgctacactgtgaggaacctgatggcctcgcagccacaactggccaagcagtacttctccagcagcatgctcaacaacatcatcaacctgtgccgaagcagtgcctcacccaaggccgcagaagctgcccggcttctcctgtctgacatgtggtccagcaaggaactgcagggtgtcctcagacagcaaggtttcgataggaacatgctgggaaccttagctggggccaacagcctcaggaacttcacctcccgattctaagaagagactgtccaagcaagttaggcttgcaggaagatatgacccagctgagaagccctcaggcctcgctggatggggttttctgtccatcctatgcagtatttgggaaagttcacaagaaactgagaagaaacctaaaaactgtggatagtggaaagatttttagattttttttttccttggggaaactggcaggcaatgggggttagggaggttggggcggtgggggctttcttgagttaaaggggcttatatgtgatgtcaatatttcttcctctgagaaatggtatatatatgtgtataatgtaagtgtgtgcatgcatgtgcgcgtgcatgtgtgtgtgtgtgagtgtcttaaagcataaccacaaactgcaaaaagctaggtaagctattttgttgcagctcataaggtggtgaaaaggactctcctgtgtttcttactcataggcaaggacaacatgtgctttttggtgagctgctcataattcctgaaatgtgtggtgccagggcaagggggccatcactgcagtcaggccctcagaggagtcctgcaggcttcctaccagtggtctccaggggtgcaggagtaactggggctgggccagcctccccacttacaaggctgctttccaggaagggaggtctggtgtatctcatgggagaatctggggtgtctgtaatgtcacccctccagcagcgccacaaggactgaggttgggtaggtgtggggttccagaggacagcaggacactctcgcatactttgccaaatgaggcctgctcagaggagtaggagctgaaagatggtgccttccaccctcttgggctgtgtgcccatcagagcaggctcagcctgcaaaggccctgcattcagaggtcttgtaatctacttgttgcaggagaaagaaggtaaaaaatgatttttttaagaaaagctattttattgcagctctttcccaagagctgttctgggaatggctggtcttcatattcccagtggagaggggaacaagtggggctgggcatatacctattccggcttctagtgggatggagttggggtatagaaattaaccaggaagatgtttccaccaagcctgctgtgagtcaattgagggagtgtttggggtcccaggagacttggacggggggagtttgggtagactaggaaaggaaagtgccatatcagggtaccggtaccggcaagctcacatctcagccaggggccatgccccacttcccctgaccccagctgtcttgtctccactctgtgaaacccacaggggatgtgataaacagggctattaggggtatcagccacgtcgagcccccagactctgtgcacttcagaccagcagcagcaggagggctcccgagggccttatgagaaaacctgtgtggacatcccttggtgtacactaagacagagcagagcccagcgctcccaagccttcctccttccagcttctacctccatgctagcattgctggtgttagagaggaattaacttcctggtctgtgcccttctctagaagaatataagatgctcctcctcctcaccccttctcagcctcctcccaagtcttcctcttctgcaccacccccgagtccaaacccacctcttgccccagcattcaggctggaaaacactgatgtggactcagtatgataactgagatgggggacgccagacatgtgaggacgctgtcctccgagaggtgtccccggctgttagccagctgtgctgtggtgctgtgggtctgtcataccctcccttgcttctgttcacactgggaggcccactcctggctcacctctccctctcagggacccacgtgggagcctggatccctggactgtcctgggcataggtttcaggggcctcctttgttgtcatcagaacccagaggaattcttctcctaaaaaatacgtatggcataccaatctgtgcggggcagtgtcctaagcacttagactacatcagggaagaacacagaccacatccctgtcctcatgcggcttatgttttctggaggaaagtggagacacaagtccttggctttagggctcccccggctgggggctgtgcagtccggtcagggcgggaggggaaatgcaccgctgcatgtgaaccttaccagcccaggcggatgccccttccccttagcactaccctggcctcctgcatcccctcgcctcatgttcctcccaccttcaaagaatgaagagccccatgggcccagcccctgccctgggaaccaggcagccttccagacctcaggggctgaggcagactattagggcagggctgactttggtgacactgcccattccctctcaggccagctcaggtcacccgggcctctgacccaggcctgtcactttgagaggggcaaaactgagaggggcttttcctagagaaagagaacaaggagcttgccaggcttcatgtagccgacacacgtctcaggattttaagtccacattggcctcacactaccagggccaatgcccaaaataaggagttccaatttggggccaaatgaggaaggacacagactctgccctgggatctcctgtgctagcggccaatgacaaatccagtcattggccaccagccacctctgcagtggggaccacactagcagccctgactccacactcctcctggggacccaagaggcagtgttgctgtctgcatgtccaccttggaatctggctgaactggctggcaggaccaagactgcggctggggtgggcagggaagggaagccgggggctgctgtgagggatcttggagcttccctgtagcccaccttccccttgcttcatgtttgtagaggaaccttgtgccggccaggcccagtttccttgtgtgatacactaatgtatttgctttttttggaaatagagaaaatcaataaattgctagtgtttctttgaacttt

SEQ ID NO: 21401 - DNA, 2181 bp, Artificial Sequence
  derived and/or modified sequence
atgaaccacagcccattgaagactgctctggcttacgaatgcttccaagaccaagataattcgactctcgcgctaccctccgatcagaaaatgaaaactggcacctccggacggcagagggtacaagagcaagttatgatgaccgtgaaacgccagaaatctaaatccagtcaatcctcgaccctgtctcactccaatcgcggatccatgtatgacggcctggctgataactataactatggaaccacctccaggagcagctactatagtaagttccaggcaggaaacggctcgtggggatatcctatttacaacggtacactcaaacgtgaaccagacaatcggcgtttctccagctattctcagatggaaaactggtcacggcactaccctagaggctcgtgcaacacaaccggcgcaggaagcgatatctgctttatgcagaagatcaaggccagccgatctgagccggatctttattgcgatcccagaggcaccctgagaaagggaactctggggagtaagggacagaagacgacccaaaaccggtactctttctacagcacctgctcaggccaaaaggccatcaaaaagtgtccagtcagacctccaagttgtgcaagcaaacaggaccctgtgtacatccccccaataagctgtaacaaggatctgagctttggtcattctcgcgctagttccaagatttgttcagaagatattgaatgtagcgggctcactatccccaaggccgtgcagtacctcagcagccaggacgagaagtatcaagctatcggtgcttactacatacagcacacatgcttccaagatgaaagtgcaaaacagcaggtataccaactcggcggaatttgcaagctcgtggacctcctacggagcccaaaccagaacgtgcagcaggcagcagctggggctctgcggaacctggtgtttcgctctactaccaacaaactggagacaaggagacagaatggcatccgcgaggctgttagcctgctgcgacggaccggaaacgctgagatccaaaaacaactgacaggcctcctgtggaacctgtcttctacggacgaacttaaggaggagctgattgcggacgctctaccagtgctggccgacagggtgataataccctttagcgggtggtgtgatggaaatagcaatatgtcgcgggaggttgtcgaccccgaggtcttcttcaacgccactggctgcctcagaaatctgagctcagccgatgccggaagacagactatgagaaattacagcggtttaattgactctttgatggcttacgtccagaattgcgttgctgcaagccggtgcgacgataagagcgtggagaattgcatgtgtgttcttcacaacctttcttaccggctggatgccgaagtacctactcgatatagacagctggagtataatgcaaggaatgcctatacggagaaaagttctaccggctgtttcagcaacaagagcgataaaatgatgaataacaattatgactgccccctgcctgaggaagagacaaaccccaaggggagtggctggctctatcactctgatgcaatacggacttatctcaacctgatgggtaaatccaagaaggacgcgaccctggaggcatgtgcaggagccctccaaaaccttaccgcctcaaaagggctgatgtcctcggggatgagccaattgatcggccttaaggaaaagggactgcctcaaatcgccagactgctacagtctggcaattctgatgtggttaggtcaggcgcatcactgctatccaatatgtctcggcatcccctcctccatagggttatgggcaaccaggtgttcccagaggtgacccggctgcttacttctcatacgggcaataccagcaatagtgaagatatcctgtcctccgcatgctacacggtgcgcaatttgatggcctcccagcctcagctcgccaagcagtatttttctagctccatgctcaacaacatcataaatctatgtcgctcttccgcaagcccgaaagctgccgaggccgctagactgttgttgtccgacatgtggagcagcaaagaactgcagggagtcttgagacagcaggggttcgatagaaacatgctagggaccctggctggtgctaatagtttgcgaaatttcacctctagattctag

SEQ ID NO: 21402 - DNA, 2181 bp, Artificial Sequence
  derived and/or modified sequence
atgaaccacagccccctgaagaccgccctggcctacgagtgcttccaggaccaggacaacagcaccctggccctgcccagcgaccagaagatgaagaccggcaccagcggcagacagagagtgcaggagcaggtgatgatgaccgtgaagagacagaagagcaagagcagccagagcagcaccctgagccacagcaacagaggcagcatgtacgacggcctggccgacaactacaactacggcaccaccagcagaagcagctactacagcaagttccaggccggcaacggcagctggggctaccccatctacaacggcaccctgaagagagagcccgacaacagaagattcagcagctacagccagatggagaactggagcagacactaccccagaggcagctgcaacaccaccggcgccggcagcgacatctgcttcatgcagaagatcaaggccagcagaagcgagcccgacctgtactgcgaccccagaggcaccctgagaaagggcaccctgggcagcaagggccagaagaccacccagaacagatacagcttctacagcacctgcagcggccagaaggccatcaagaagtgccccgtgagaccccccagctgcgccagcaagcaggaccccgtgtacatcccccccatcagctgcaacaaggacctgagcttcggccacagcagagccagcagcaagatctgcagcgaggacatcgagtgcagcggcctgaccatccccaaggccgtgcagtacctgagcagccaggacgagaagtaccaggccatcggcgcctactacatccagcacacctgcttccaggacgagagcgccaagcagcaggtgtaccagctgggcggcatctgcaagctggtggacctgctgagaagccccaaccagaacgtgcagcaggccgccgccggcgccctgagaaacctggtgttcagaagcaccaccaacaagctggagaccagaagacagaacggcatcagagaggccgtgagcctgctgagaagaaccggcaacgccgagatccagaagcagctgaccggcctgctgtggaacctgagcagcaccgacgagctgaaggaggagctgatcgccgacgccctgcccgtgctggccgacagagtgatcatccccttcagcggctggtgcgacggcaacagcaacatgagcagagaggtggtggaccccgaggtgttcttcaacgccaccggctgcctgagaaacctgagcagcgccgacgccggcagacagaccatgagaaactacagcggcctgatcgacagcctgatggcctacgtgcagaactgcgtggccgccagcagatgcgacgacaagagcgtggagaactgcatgtgcgtgctgcacaacctgagctacagactggacgccgaggtgcccaccagatacagacagctggagtacaacgccagaaacgcctacaccgagaagagcagcaccggctgcttcagcaacaagagcgacaagatgatgaacaacaactacgactgccccctgcccgaggaggagaccaaccccaagggcagcggctggctgtaccacagcgacgccatcagaacctacctgaacctgatgggcaagagcaagaaggacgccaccctggaggcctgcgccggcgccctgcagaacctgaccgccagcaagggcctgatgagcagcggcatgagccagctgatcggcctgaaggagaagggcctgccccagatcgccagactgctgcagagcggcaacagcgacgtggtgagaagcggcgccagcctgctgagcaacatgagcagacaccccctgctgcacagagtgatgggcaaccaggtgttccccgaggtgaccagactgctgaccagccacaccggcaacaccagcaacagcgaggacatcctgagcagcgcctgctacaccgtgagaaacctgatggccagccagccccagctggccaagcagtacttcagcagcagcatgctgaacaacatcatcaacctgtgcagaagcagcgccagccccaaggccgccgaggccgccagactgctgctgagcgacatgtggagcagcaaggagctgcagggcgtgctgagacagcagggcttcgacagaaacatgctgggcaccctggccggcgccaacagcctgagaaacttcaccagcagattctag

SEQ ID NO: 21403 - protein, 173 aa, Artificial Sequence
  derived and/or modified sequence
MQSELCFADIHDSDGSSSSSHQSLKSTAKWAASLENLLEDPEGVKRFREFLKKEFSEENVLFWLACEDFKKMQDKTQMQEKAKEIYMTFLSSKASSQVNVEGQSRLNEKILEEPHPLMFQKLQDQIFNLMKYDSYSRFLKSDLFLKHKRTEEEEEDLPDAQTAAKRASRIYNT

SEQ ID NO: 21404 - protein, 181 aa, Artificial Sequence
  derived and/or modified sequence
MFNRAVSRLSRKRPPSDIHDSDGSSSSSHQSLKSTAKWAASLENLLEDPEGVKRFREFLKKEFSEENVLFWLACEDFKKMQDKTQMQEKAKEIYMTFLSSKASSQVNVEGQSRLNEKILEEPHPLMFQKLQDQIFNLMKYDSYSRFLKSDLFLKHKRTEEEEEDLPDAQTAAKRASRIYNT

SEQ ID NO: 21405 - DNA, 522 bp, Artificial Sequence
  derived and/or modified sequence
atgcagagcgagctgtgcttcgccgacatccacgacagcgacggcagcagcagcagcagccaccagagcctgaagagcaccgccaagtgggccgccagcctggagaacctgctggaggaccccgagggcgtgaagagattcagagagttcctgaagaaggagttcagcgaggagaacgtgctgttctggctggcctgcgaggacttcaagaagatgcaggacaagacccagatgcaggagaaggccaaggagatctacatgaccttcctgagcagcaaggccagcagccaggtgaacgtggagggccagagcagactgaacgagaagatcctggaggagccccaccccctgatgttccagaagctgcaggaccagatcttcaacctgatgaagtacgacagctacagcagattcctgaagagcgacctgttcctgaagcacaagagaaccgaggaggaggaggaggacctgcccgacgcccagaccgccgccaagagagccagcagaatctacaacacctag

SEQ ID NO: 21406 - DNA, 546 bp, Artificial Sequence
  derived and/or modified sequence
atgttcaacagagccgtgagcagactgagcagaaagagaccccccagcgacatccacgacagcgacggcagcagcagcagcagccaccagagcctgaagagcaccgccaagtgggccgccagcctggagaacctgctggaggaccccgagggcgtgaagagattcagagagttcctgaagaaggagttcagcgaggagaacgtgctgttctggctggcctgcgaggacttcaagaagatgcaggacaagacccagatgcaggagaaggccaaggagatctacatgaccttcctgagcagcaaggccagcagccaggtgaacgtggagggccagagcagactgaacgagaagatcctggaggagccccaccccctgatgttccagaagctgcaggaccagatcttcaacctgatgaagtacgacagctacagcagattcctgaagagcgacctgttcctgaagcacaagagaaccgaggaggaggaggaggacctgcccgacgcccagaccgccgccaagagagccagcagaatctacaacacctag

SEQ ID NO: 21407 - DNA, 522 bp, Artificial Sequence
  derived and/or modified sequence
atgcagtctgagctctgctttgccgatattcatgatagtgatggctctagttcctcctcccaccaaagccttaagtctaccgctaagtgggccgcttctctagaaaatctgctggaagacccggaaggagtcaaacgcttccgtgaattcctgaagaaggagttttccgaggaaaatgtactgttttggttagcttgtgaagattttaaaaaaatgcaggacaagactcagatgcaggaaaaggcgaaggaaatttacatgacttttctgagctcgaaagccagctcccaagtgaatgtggaaggtcagtccagactgaacgagaagatactggaagagcctcatccactcatgttccagaagctacaggatcagatcttcaatcttatgaagtacgacagctactccaggtttctgaaatcagatttatttttaaaacacaagcgtaccgaagaggaggaggaggacctgcctgacgcccagaccgctgcaaagcgggcaagccgcatctataacacatag

SEQ ID NO: 21408 - DNA, 546 bp, Artificial Sequence
  derived and/or modified sequence
atgttcaacagggctgtgtctagactgagccggaagaggccccctagtgatatccatgactcagatggatcttcctctagctcacaccaaagtctgaagagcacggccaagtgggccgcatccttagagaacctgctcgaggacccggagggggtgaagaggttccgcgagttcctgaagaaggagttctcagaggagaatgtccttttctggcttgcgtgcgaagactttaaaaagatgcaggacaaaacccagatgcaggagaaagccaaggagatttatatgacatttctgagctcaaaggcgtcttcccaggtgaacgtagaaggccagagtcggcttaacgaaaagatactcgaggaaccccacccgctgatgtttcagaagctgcaggatcagattttcaatctcatgaagtatgactcctatagcaggtttctaaaaagtgacctgtttctcaagcacaaacgaaccgaggaggaggaggaagatcttcctgacgcacagacagctgccaagcgagcttctaggatctacaacacttag

SEQ ID NO: 21409 - DNA, 522 bp, Artificial Sequence
  derived and/or modified sequence
atgcagagcgagctgtgctttgctgacatccatgacagtgatggcagcagcagcagcagccaccagagcctgaagagcacagccaagtgggccgccagcctggagaacctgctggaggaccctgagggcgtgaagcgcttccgggagttcctgaagaaggagttcagcgaggagaatgtgctcttctggctggcctgtgaggacttcaagaagatgcaggacaagacccagatgcaggagaaggccaaggagatctacatgaccttcctgagcagcaaggccagcagccaggtgaatgtggagggccagagccggctgaatgagaagatcctggaggagccccaccccctgatgttccagaagctgcaggaccagatcttcaacctgatgaagtatgacagctacagccgcttcctgaagagtgacctcttcctgaagcacaagaggacagaggaggaggaggaggacctgcctgatgcccagacagctgccaagagggccagccgcatctacaacacctag

SEQ ID NO: 21410 - DNA, 546 bp, Artificial Sequence
  derived and/or modified sequence
atgttcaacagagctgtgtcccggctgagcaggaagaggcctcccagcgacatccatgacagtgatggcagcagcagcagcagccaccagagcctgaagagcacagccaagtgggccgccagcctggagaacctgctggaggaccctgagggcgtgaagcgcttccgggagttcctgaagaaggagttcagcgaggagaatgtgctcttctggctggcctgtgaggacttcaagaagatgcaggacaagacccagatgcaggagaaggccaaggagatctacatgaccttcctgagcagcaaggccagcagccaggtgaatgtggagggccagagccggctgaatgagaagatcctggaggagccccaccccctgatgttccagaagctgcaggaccagatcttcaacctgatgaagtatgacagctacagccgcttcctgaagagtgacctcttcctgaagcacaagaggacagaggaggaggaggaggacctgcctgatgcccagacagctgccaagagggccagccgcatctacaacacctag

SEQ ID NO: 21411 - DNA, 522 bp, Artificial Sequence
  derived and/or modified sequence
atgcagagcgagctgtgcttcgccgacatccacgacagcgacggctcatccagcagcagtcaccaatcgcttaaatctaccgccaagtgggccgccagtctcgagaatctgttggaagatcccgagggagtcaaacggtttcgggaattcctgaagaaggagtttagtgaggaaaatgtgctgttttggcttgcttgcgaagactttaaaaagatgcaggataagacccaaatgcaggaaaaagcaaaagagatctacatgacgttcttaagtagtaaggcttccagccaggttaacgtggaaggccaatcccgtctgaatgagaaaattctggaggaaccacacccattgatgtttcagaaactgcaagaccaaatcttcaacctgatgaagtatgacagctactcccgattcttaaaatcagatctatttttgaagcacaagaggactgaggaagaggaggaagatctgcccgacgcgcaaactgcagccaagcgcgcgtccaggatctacaatacctag

SEQ ID NO: 21412 - DNA, 546 bp, Artificial Sequence
  derived and/or modified sequence
atgttcaaccgggccgtgagccggctgagccggaagcggccccccagcgatattcacgacagtgacgggtctagctccagttctcaccagtccttaaagagcaccgcaaaatgggcagcttctcttgagaatctgctggaggaccccgagggcgtaaaaagatttcgggaattcctaaagaaagaattcagcgaggagaacgtgctgttctggctagcctgcgaggattttaaaaaaatgcaagacaagacacagatgcaggaaaaggctaaggagatttacatgacttttctgtctagtaaggcaagctctcaagtcaacgtcgagggccagtcccgcttaaacgaaaagatcctcgaagagccccatccactcatgttccaaaaactgcaggatcagatcttcaacttaatgaagtatgactcttattcccgcttcctcaaatctgatctctttctgaagcacaaacgcacagaagaagaggaagaagatctaccagacgctcagaccgccgcaaagagagccagccggatctacaatacctag

SEQ ID NO: 21413 - DNA, 522 bp, Artificial Sequence
  derived and/or modified sequence
atgcagtcagagttgtgtttcgcggacatacacgatagcgacggcagcagttcctctagtcaccagtccttaaaaagcaccgcaaaatgggctgccagtctcgaaaatttactagaggatcccgaaggtgtcaagaggtttcgagaattcttgaaaaaagagttcagtgaagagaacgtccttttctggttggcttgtgaggacttcaaaaagatgcaggacaaaacccaaatgcaagaaaaagccaaagagatttacatgacgttcctgagttcgaaagcttctagtcaggttaacgtggagggccagtcacggcttaatgagaagattctggaagaacctcatccccttatgttccagaaattacaggatcaaatcttcaacctcatgaagtatgactcgtacagccggttccttaagagcgacctgttcctcaagcacaagcgcactgaagaggaagaagaagacctgcccgatgcccagacagccgcaaagcgtgcttcccgtatatacaacacctag

SEQ ID NO: 21414 - DNA, 546 bp, Artificial Sequence
  derived and/or modified sequence
atgtttaatcgtgcggtgtcccgactcagtcgcaaacgtcccccatctgatatccacgactctgatggtagttcctcgtccagccaccagagcctgaaatcaaccgctaaatgggcagccagtctggagaacttattagaggatcctgaaggcgtcaagcgctttagggagttcctgaagaaggagttttccgaagaaaacgttctcttttggctagcctgtgaagatttcaaaaaaatgcaggataagacacagatgcaagagaaagccaaggagatctatatgaccttcctgtcaagcaaggctagttctcaggtgaatgtagaaggccagtctaggctgaacgaaaagattctggaggagccacatccgctcatgtttcagaagcttcaggatcaaatttttaatctcatgaaatatgattcctacagcaggtttctgaaaagcgatctttttttgaaacataaacgtaccgaggaggaagaggaggacctccccgacgctcagacagcagccaaacgagcttctcggatctacaatacctag

SEQ ID NO: 21415 - DNA, 738 bp, Artificial Sequence
  derived and/or modified sequence
ttaaaatgacagtgtctgttggccacatatgcagtctgaactttgctttgcagacatccacgacagcgatggcagttccagcagcagccaccagagcctcaagagcacagccaaatgggcggcatccctggagaatctgctggaagacccagaaggcgtgaaaagatttagggaatttttaaaaaaggaattcagtgaagaaaatgttttgttttggctagcatgtgaagattttaagaaaatgcaagataagacgcagatgcaggaaaaggcaaaggagatctacatgacctttctgtccagcaaggcctcatcacaggtcaacgtggaggggcagtctcggctcaacgagaagatcctggaagaaccgcaccctctgatgttccagaaactccaggaccagatctttaatctcatgaagtacgacagctacagccgcttcttaaagtctgacttgtttttaaaacacaagcgaaccgaggaagaggaagaagatttgcctgatgctcaaactgcagctaaaagagcttccagaatttataacacatgagcccccaaaaagccgggactggcagctttaagaagcaaaggaatttcctctcaggaccgtgccgggtttatcattgctttgttatttgtaaggactgaaatgtacaaaacccttcaatgggatgtgtgttttattaactgcttcaccagtaaattttgcatgatggctaagctaacataaaaaaagaa

SEQ ID NO: 21416 - DNA, 804 bp, Artificial Sequence
  derived and/or modified sequence
cctcgccttcctccggctcagccgccgcgccgccgggctgctccttcttcctcctcgggcgcccgcggcgatgttcaaccgcgccgtgagccggctgagcaggaagcggccgccgtcagacatccacgacagcgatggcagttccagcagcagccaccagagcctcaagagcacagccaaatgggcggcatccctggagaatctgctggaagacccagaaggcgtgaaaagatttagggaatttttaaaaaaggaattcagtgaagaaaatgttttgttttggctagcatgtgaagattttaagaaaatgcaagataagacgcagatgcaggaaaaggcaaaggagatctacatgacctttctgtccagcaaggcctcatcacaggtcaacgtggaggggcagtctcggctcaacgagaagatcctggaagaaccgcaccctctgatgttccagaaactccaggaccagatctttaatctcatgaagtacgacagctacagccgcttcttaaagtctgacttgtttttaaaacacaagcgaaccgaggaagaggaagaagatttgcctgatgctcaaactgcagctaaaagagcttccagaatttataacacatgagcccccaaaaagccgggactggcagctttaagaagcaaaggaatttcctctcaggaccgtgccgggtttatcattgctttgttatttgtaaggactgaaatgtacaaaacccttcaatgggatgtgtgttttattaactgcttcaccagtaaattttgcatgatggctaagctaacataaaaaaagaa

SEQ ID NO: 21417 - protein, 572 aa, Artificial Sequence
  derived and/or modified sequence
MECLYYFLGFLLLAARLPLDAAKRFHDVLGNERPSAYMREHNQLNGWSSDENDWNEKLYPVWKRGDMRWKNSWKGGRVQAVLTSDSPALVGSNITFAVNLIFPRCQKEDANGNIVYEKNCRNEAGLSADPYVYNWTAWSEDSDGENGTGQSHHNVFPDGKPFPHHPGWRRWNFIYVFHTLGQYFQKLGRCSVRVSVNTANVTLGPQLMEVTVYRRHGRAYVPIAQVKDVYVVTDQIPVFVTMFQKNDRNSSDETFLKDLPIMFDVLIHDPSHFLNYSTINYKWSFGDNTGLFVSTNHTVNHTYVLNGTFSLNLTVKAAAPGPCPPPPPPPRPSKPTPSLATTLKSYDSNTPGPAGDNPLELSRIPDENCQINRYGHFQATITIVEGILEVNIIQMTDVLMPVPWPESSLIDFVVTCQGSIPTEVCTIISDPTCEITQNTVCSPVDVDEMCLLTVRRTFNGSGTYCVNLTLGDDTSLALTSTLISVPDRDPASPLRMANSALISVGCLAIFVTVISLLVYKKHKEYNPIENSPGNVVRSKGLSVFLNRAKAVFFPGNQEKDPLLKNQEFKGVS

SEQ ID NO: 21418 - protein, 455 aa, Artificial Sequence
  derived and/or modified sequence
MECLYYFLGFLLLAARLPLDAAKRFHDVLGNERPSAYMREHNQLNGWSSDENDWNFIYVFHTLGQYFQKLGRCSVRVSVNTANVTLGPQLMEVTVYRRHGRAYVPIAQVKDVYVVTDQIPVFVTMFQKNDRNSSDETFLKDLPIMFDVLIHDPSHFLNYSTINYKWSFGDNTGLFVSTNHTVNHTYVLNGTFSLNLTVKAAAPGPCPPPPPPPRPSKPTPSLATTLKSYDSNTPGPAGDNPLELSRIPDENCQINRYGHFQATITIVEGILEVNIIQMTDVLMPVPWPESSLIDFVVTCQGSIPTEVCTIISDPTCEITQNTVCSPVDVDEMCLLTVRRTFNGSGTYCVNLTLGDDTSLALTSTLISVPDRDPASPLRMANSALISVGCLAIFVTVISLLVYKKHKEYNPIENSPGNVVRSKGLSVFLNRAKAVFFPGNQEKDPLLKNQEFKGVS

SEQ ID NO: 21419 - protein, 607 aa, Artificial Sequence
  derived and/or modified sequence
MILPEALYLIKIEREAPQMPEEHCCSWWTGPEEFSMECLYYFLGFLLLAARLPLDAAKRFHDVLGNERPSAYMREHNQLNGWSSDENDWNEKLYPVWKRGDMRWKNSWKGGRVQAVLTSDSPALVGSNITFAVNLIFPRCQKEDANGNIVYEKNCRNEAGLSADPYVYNWTAWSEDSDGENGTGQSHHNVFPDGKPFPHHPGWRRWNFIYVFHTLGQYFQKLGRCSVRVSVNTANVTLGPQLMEVTVYRRHGRAYVPIAQVKDVYVVTDQIPVFVTMFQKNDRNSSDETFLKDLPIMFDVLIHDPSHFLNYSTINYKWSFGDNTGLFVSTNHTVNHTYVLNGTFSLNLTVKAAAPGPCPPPPPPPRPSKPTPSLATTLKSYDSNTPGPAGDNPLELSRIPDENCQINRYGHFQATITIVEGILEVNIIQMTDVLMPVPWPESSLIDFVVTCQGSIPTEVCTIISDPTCEITQNTVCSPVDVDEMCLLTVRRTFNGSGTYCVNLTLGDDTSLALTSTLISVPDRDPASPLRMANSALISVGCLAIFVTVISLLVYKKHKEYNPIENSPGNVVRSKGLSVFLNRAKAVFFPGNQEKDPLLKNQEFKGVS

SEQ ID NO: 21420 - protein, 514 aa, Artificial Sequence
  derived and/or modified sequence
MECLYYFLGFLLLAARLPLDAAKRFHDVLGNERPSAYMREHNQLNGWSSDENDWNEKLYPVWKRGDMRWKNSWKGGRVQAVLTSDSPALVGSNITFAVNLIFPRCQKEDANGNIVYEKNCRNGQYFQKLGRCSVRVSVNTANVTLGPQLMEVTVYRRHGRAYVPIAQVKDVYVVTDQIPVFVTMFQKNDRNSSDETFLKDLPIMFDVLIHDPSHFLNYSTINYKWSFGDNTGLFVSTNHTVNHTYVLNGTFSLNLTVKAAAPGPCPPPPPPPRPSKPTPSLATTLKSYDSNTPGPAGDNPLELSRIPDENCQINRYGHFQATITIVEGILEVNIIQMTDVLMPVPWPESSLIDFVVTCQGSIPTEVCTIISDPTCEITQNTVCSPVDVDEMCLLTVRRTFNGSGTYCVNLTLGDDTSLALTSTLISVPDRDPASPLRMANSALISVGCLAIFVTVISLLVYKKHKEYNPIENSPGNVVRSKGLSVFLNRAKAVFFPGNQEKDPLLKNQEFKGVS

SEQ ID NO: 21421 - DNA, 1719 bp, Artificial Sequence
  derived and/or modified sequence
atggagtgcctgtactacttcctgggcttcctgctgctggccgccagactgcccctggacgccgccaagagattccacgacgtgctgggcaacgagagacccagcgcctacatgagagagcacaaccagctgaacggctggagcagcgacgagaacgactggaacgagaagctgtaccccgtgtggaagagaggcgacatgagatggaagaacagctggaagggcggcagagtgcaggccgtgctgaccagcgacagccccgccctggtgggcagcaacatcaccttcgccgtgaacctgatcttccccagatgccagaaggaggacgccaacggcaacatcgtgtacgagaagaactgcagaaacgaggccggcctgagcgccgacccctacgtgtacaactggaccgcctggagcgaggacagcgacggcgagaacggcaccggccagagccaccacaacgtgttccccgacggcaagcccttcccccaccaccccggctggagaagatggaacttcatctacgtgttccacaccctgggccagtacttccagaagctgggcagatgcagcgtgagagtgagcgtgaacaccgccaacgtgaccctgggcccccagctgatggaggtgaccgtgtacagaagacacggcagagcctacgtgcccatcgcccaggtgaaggacgtgtacgtggtgaccgaccagatccccgtgttcgtgaccatgttccagaagaacgacagaaacagcagcgacgagaccttcctgaaggacctgcccatcatgttcgacgtgctgatccacgaccccagccacttcctgaactacagcaccatcaactacaagtggagcttcggcgacaacaccggcctgttcgtgagcaccaaccacaccgtgaaccacacctacgtgctgaacggcaccttcagcctgaacctgaccgtgaaggccgccgcccccggcccctgccccccccccccccccccccccagacccagcaagcccacccccagcctggccaccaccctgaagagctacgacagcaacacccccggccccgccggcgacaaccccctggagctgagcagaatccccgacgagaactgccagatcaacagatacggccacttccaggccaccatcaccatcgtggagggcatcctggaggtgaacatcatccagatgaccgacgtgctgatgcccgtgccctggcccgagagcagcctgatcgacttcgtggtgacctgccagggcagcatccccaccgaggtgtgcaccatcatcagcgaccccacctgcgagatcacccagaacaccgtgtgcagccccgtggacgtggacgagatgtgcctgctgaccgtgagaagaaccttcaacggcagcggcacctactgcgtgaacctgaccctgggcgacgacaccagcctggccctgaccagcaccctgatcagcgtgcccgacagagaccccgccagccccctgagaatggccaacagcgccctgatcagcgtgggctgcctggccatcttcgtgaccgtgatcagcctgctggtgtacaagaagcacaaggagtacaaccccatcgagaacagccccggcaacgtggtgagaagcaagggcctgagcgtgttcctgaacagagccaaggccgtgttcttccccggcaaccaggagaaggaccccctgctgaagaaccaggagttcaagggcgtgagctag

SEQ ID NO: 21422 - DNA, 1368 bp, Artificial Sequence
  derived and/or modified sequence
atggagtgcctgtactacttcctgggcttcctgctgctggccgccagactgcccctggacgccgccaagagattccacgacgtgctgggcaacgagagacccagcgcctacatgagagagcacaaccagctgaacggctggagcagcgacgagaacgactggaacttcatctacgtgttccacaccctgggccagtacttccagaagctgggcagatgcagcgtgagagtgagcgtgaacaccgccaacgtgaccctgggcccccagctgatggaggtgaccgtgtacagaagacacggcagagcctacgtgcccatcgcccaggtgaaggacgtgtacgtggtgaccgaccagatccccgtgttcgtgaccatgttccagaagaacgacagaaacagcagcgacgagaccttcctgaaggacctgcccatcatgttcgacgtgctgatccacgaccccagccacttcctgaactacagcaccatcaactacaagtggagcttcggcgacaacaccggcctgttcgtgagcaccaaccacaccgtgaaccacacctacgtgctgaacggcaccttcagcctgaacctgaccgtgaaggccgccgcccccggcccctgccccccccccccccccccccccagacccagcaagcccacccccagcctggccaccaccctgaagagctacgacagcaacacccccggccccgccggcgacaaccccctggagctgagcagaatccccgacgagaactgccagatcaacagatacggccacttccaggccaccatcaccatcgtggagggcatcctggaggtgaacatcatccagatgaccgacgtgctgatgcccgtgccctggcccgagagcagcctgatcgacttcgtggtgacctgccagggcagcatccccaccgaggtgtgcaccatcatcagcgaccccacctgcgagatcacccagaacaccgtgtgcagccccgtggacgtggacgagatgtgcctgctgaccgtgagaagaaccttcaacggcagcggcacctactgcgtgaacctgaccctgggcgacgacaccagcctggccctgaccagcaccctgatcagcgtgcccgacagagaccccgccagccccctgagaatggccaacagcgccctgatcagcgtgggctgcctggccatcttcgtgaccgtgatcagcctgctggtgtacaagaagcacaaggagtacaaccccatcgagaacagccccggcaacgtggtgagaagcaagggcctgagcgtgttcctgaacagagccaaggccgtgttcttccccggcaaccaggagaaggaccccctgctgaagaaccaggagttcaagggcgtgagctag

SEQ ID NO: 21423 - DNA, 1824 bp, Artificial Sequence
  derived and/or modified sequence
atgatcctgcccgaggccctgtacctgatcaagatcgagagagaggccccccagatgcccgaggagcactgctgcagctggtggaccggccccgaggagttcagcatggagtgcctgtactacttcctgggcttcctgctgctggccgccagactgcccctggacgccgccaagagattccacgacgtgctgggcaacgagagacccagcgcctacatgagagagcacaaccagctgaacggctggagcagcgacgagaacgactggaacgagaagctgtaccccgtgtggaagagaggcgacatgagatggaagaacagctggaagggcggcagagtgcaggccgtgctgaccagcgacagccccgccctggtgggcagcaacatcaccttcgccgtgaacctgatcttccccagatgccagaaggaggacgccaacggcaacatcgtgtacgagaagaactgcagaaacgaggccggcctgagcgccgacccctacgtgtacaactggaccgcctggagcgaggacagcgacggcgagaacggcaccggccagagccaccacaacgtgttccccgacggcaagcccttcccccaccaccccggctggagaagatggaacttcatctacgtgttccacaccctgggccagtacttccagaagctgggcagatgcagcgtgagagtgagcgtgaacaccgccaacgtgaccctgggcccccagctgatggaggtgaccgtgtacagaagacacggcagagcctacgtgcccatcgcccaggtgaaggacgtgtacgtggtgaccgaccagatccccgtgttcgtgaccatgttccagaagaacgacagaaacagcagcgacgagaccttcctgaaggacctgcccatcatgttcgacgtgctgatccacgaccccagccacttcctgaactacagcaccatcaactacaagtggagcttcggcgacaacaccggcctgttcgtgagcaccaaccacaccgtgaaccacacctacgtgctgaacggcaccttcagcctgaacctgaccgtgaaggccgccgcccccggcccctgccccccccccccccccccccccagacccagcaagcccacccccagcctggccaccaccctgaagagctacgacagcaacacccccggccccgccggcgacaaccccctggagctgagcagaatccccgacgagaactgccagatcaacagatacggccacttccaggccaccatcaccatcgtggagggcatcctggaggtgaacatcatccagatgaccgacgtgctgatgcccgtgccctggcccgagagcagcctgatcgacttcgtggtgacctgccagggcagcatccccaccgaggtgtgcaccatcatcagcgaccccacctgcgagatcacccagaacaccgtgtgcagccccgtggacgtggacgagatgtgcctgctgaccgtgagaagaaccttcaacggcagcggcacctactgcgtgaacctgaccctgggcgacgacaccagcctggccctgaccagcaccctgatcagcgtgcccgacagagaccccgccagccccctgagaatggccaacagcgccctgatcagcgtgggctgcctggccatcttcgtgaccgtgatcagcctgctggtgtacaagaagcacaaggagtacaaccccatcgagaacagccccggcaacgtggtgagaagcaagggcctgagcgtgttcctgaacagagccaaggccgtgttcttccccggcaaccaggagaaggaccccctgctgaagaaccaggagttcaagggcgtgagctag

SEQ ID NO: 21424 - DNA, 1545 bp, Artificial Sequence
  derived and/or modified sequence
atggagtgcctgtactacttcctgggcttcctgctgctggccgccagactgcccctggacgccgccaagagattccacgacgtgctgggcaacgagagacccagcgcctacatgagagagcacaaccagctgaacggctggagcagcgacgagaacgactggaacgagaagctgtaccccgtgtggaagagaggcgacatgagatggaagaacagctggaagggcggcagagtgcaggccgtgctgaccagcgacagccccgccctggtgggcagcaacatcaccttcgccgtgaacctgatcttccccagatgccagaaggaggacgccaacggcaacatcgtgtacgagaagaactgcagaaacggccagtacttccagaagctgggcagatgcagcgtgagagtgagcgtgaacaccgccaacgtgaccctgggcccccagctgatggaggtgaccgtgtacagaagacacggcagagcctacgtgcccatcgcccaggtgaaggacgtgtacgtggtgaccgaccagatccccgtgttcgtgaccatgttccagaagaacgacagaaacagcagcgacgagaccttcctgaaggacctgcccatcatgttcgacgtgctgatccacgaccccagccacttcctgaactacagcaccatcaactacaagtggagcttcggcgacaacaccggcctgttcgtgagcaccaaccacaccgtgaaccacacctacgtgctgaacggcaccttcagcctgaacctgaccgtgaaggccgccgcccccggcccctgccccccccccccccccccccccagacccagcaagcccacccccagcctggccaccaccctgaagagctacgacagcaacacccccggccccgccggcgacaaccccctggagctgagcagaatccccgacgagaactgccagatcaacagatacggccacttccaggccaccatcaccatcgtggagggcatcctggaggtgaacatcatccagatgaccgacgtgctgatgcccgtgccctggcccgagagcagcctgatcgacttcgtggtgacctgccagggcagcatccccaccgaggtgtgcaccatcatcagcgaccccacctgcgagatcacccagaacaccgtgtgcagccccgtggacgtggacgagatgtgcctgctgaccgtgagaagaaccttcaacggcagcggcacctactgcgtgaacctgaccctgggcgacgacaccagcctggccctgaccagcaccctgatcagcgtgcccgacagagaccccgccagccccctgagaatggccaacagcgccctgatcagcgtgggctgcctggccatcttcgtgaccgtgatcagcctgctggtgtacaagaagcacaaggagtacaaccccatcgagaacagccccggcaacgtggtgagaagcaagggcctgagcgtgttcctgaacagagccaaggccgtgttcttccccggcaaccaggagaaggaccccctgctgaagaaccaggagttcaagggcgtgagctag

SEQ ID NO: 21425 - DNA, 2763 bp, Artificial Sequence
  derived and/or modified sequence
tgccgcttaataccatcacatgatcctccccgaggccctgtatttaattaaaatagagagggaggcaccacagatgccagaagaacactgttgctcttggtggacgggcccagaggaattcagagttaaaccttgagtgcctgcgtccgtgagaattcagcatggaatgtctctactatttcctgggatttctgctcctggctgcaagattgccacttgatgccgccaaacgatttcatgatgtgctgggcaatgaaagaccttctgcttacatgagggagcacaatcaattaaatggctggtcttctgatgaaaatgactggaatgaaaaactctacccagtgtggaagcggggagacatgaggtggaaaaactcctggaagggaggccgtgtgcaggcggtcctgaccagtgactcaccagccctcgtgggctcaaatataacatttgcggtgaacctgatattccctagatgccaaaaggaagatgccaatggcaacatagtctatgagaagaactgcagaaatgaggctggtttatctgctgatccgtatgtttacaactggacagcatggtcagaggacagtgacggggaaaatggcaccggccaaagccatcataacgtcttccctgatgggaaaccttttcctcaccaccccggatggagaagatggaatttcatctacgtcttccacacacttggtcagtatttccagaaattgggacgatgttcagtgagagtttctgtgaacacagccaatgtgacacttgggcctcaactcatggaagtgactgtctacagaagacatggacgggcatatgttcccatcgcacaagtgaaagatgtgtacgtggtaacagatcagattcctgtgtttgtgactatgttccagaagaacgatcgaaattcatccgacgaaaccttcctcaaagatctccccattatgtttgatgtcctgattcatgatcctagccacttcctcaattattctaccattaactacaagtggagcttcggggataatactggcctgtttgtttccaccaatcatactgtgaatcacacgtatgtgctcaatggaaccttcagccttaacctcactgtgaaagctgcagcaccaggaccttgtccgccaccgccaccaccacccagaccttcaaaacccaccccttctttagcaactactctaaaatcttatgattcaaacaccccaggacctgctggtgacaaccccctggagctgagtaggattcctgatgaaaactgccagattaacagatatggccactttcaagccaccatcacaattgtagagggaatcttagaggttaacatcatccagatgacagacgtcctgatgccggtgccatggcctgaaagctccctaatagactttgtcgtgacctgccaagggagcattcccacggaggtctgtaccatcatttctgaccccacctgcgagatcacccagaacacagtctgcagccctgtggatgtggatgagatgtgtctgctgactgtgagacgaaccttcaatgggtctgggacgtactgtgtgaacctcaccctgggggatgacacaagcctggctctcacgagcaccctgatttctgttcctgacagagacccagcctcgcctttaaggatggcaaacagtgccctgatctccgttggctgcttggccatatttgtcactgtgatctccctcttggtgtacaaaaaacacaaggaatacaacccaatagaaaatagtcctgggaatgtggtcagaagcaaaggcctgagtgtctttctcaaccgtgcaaaagccgtgttcttcccgggaaaccaggaaaaggatccgctactcaaaaaccaagaatttaaaggagtttcttaaatttcgaccttgtttctgaagctcacttttcagtgccattgatgtgagatgtgctggagtggctattaacctttttttcctaaagattattgttaaatagatattgtggtttggggaagttgaattttttataggttaaatgtcattttagagatggggagagggattatactgcaggcagcttcagccatgttgtgaaactgataaaagcaacttagcaaggcttcttttcattattttttatgtttcacttataaagtcttaggtaactagtaggatagaaacactgtgtcccgagagtaaggagagaagctactattgattagagcctaacccaggttaactgcaagaagaggcgggatactttcagctttccatgtaactgtatgcataaagccaatgtagtccagtttctaagatcatgttccaagctaactgaatcccacttcaatacacactcatgaactcctgatggaacaataacaggcccaagcctgtggtatgatgtgcacacttgctagactcagaaaaaatactactctcataaatgggtgggagtattttggtgacaacctactttgcttggctgagtgaaggaatgatattcatatattcatttattccatggacatttagttagtgctttttatataccaggcatgatgctgagtgacactcttgtgtatatttccaaatttttgtacagtcgctgcacatatttgaaatcatatattaagactttccaaagatgaggtccctggtttttcatggcaacttgatcagtaaggatttcacctctgtttgtaactaaaaccatctactatatgttagacatgacattctttttctctccttcctgaaaaataaagtgtgggaagagaca

SEQ ID NO: 21426 - DNA, 2409 bp, Artificial Sequence
  derived and/or modified sequence
tgccgcttaataccatcacatgatcctccccgaggccctgtatttaattaaaatagagagggaggcaccacagatgccagaagaacactgttgctcttggtggacgggcccagaggaattcagagttaaaccttgagtgcctgcgtccgtgagaattcagcatggaatgtctctactatttcctgggatttctgctcctggctgcaagattgccacttgatgccgccaaacgatttcatgatgtgctgggcaatgaaagaccttctgcttacatgagggagcacaatcaattaaatggctggtcttctgatgaaaatgactggaatttcatctacgtcttccacacacttggtcagtatttccagaaattgggacgatgttcagtgagagtttctgtgaacacagccaatgtgacacttgggcctcaactcatggaagtgactgtctacagaagacatggacgggcatatgttcccatcgcacaagtgaaagatgtgtacgtggtaacagatcagattcctgtgtttgtgactatgttccagaagaacgatcgaaattcatccgacgaaaccttcctcaaagatctccccattatgtttgatgtcctgattcatgatcctagccacttcctcaattattctaccattaactacaagtggagcttcggggataatactggcctgtttgtttccaccaatcatactgtgaatcacacgtatgtgctcaatggaaccttcagccttaacctcactgtgaaagctgcagcaccaggaccttgtccgccaccgccaccaccacccagaccttcaaaacccaccccttctttagcaactactctaaaatcttatgattcaaacaccccaggacctgctggtgacaaccccctggagctgagtaggattcctgatgaaaactgccagattaacagatatggccactttcaagccaccatcacaattgtagagggaatcttagaggttaacatcatccagatgacagacgtcctgatgccggtgccatggcctgaaagctccctaatagactttgtcgtgacctgccaagggagcattcccacggaggtctgtaccatcatttctgaccccacctgcgagatcacccagaacacagtctgcagccctgtggatgtggatgagatgtgtctgctgactgtgagacgaaccttcaatgggtctgggacgtactgtgtgaacctcaccctgggggatgacacaagcctggctctcacgagcaccctgatttctgttcctgacagagacccagcctcgcctttaaggatggcaaacagtgccctgatctccgttggctgcttggccatatttgtcactgtgatctccctcttggtgtacaaaaaacacaaggaatacaacccaatagaaaatagtcctgggaatgtggtcagaagcaaaggcctgagtgtctttctcaaccgtgcaaaagccgtgttcttcccgggaaaccaggaaaaggatccgctactcaaaaaccaagaatttaaaggagtttcttaaatttcgaccttgtttctgaagctcacttttcagtgccattgatgtgagatgtgctggagtggctattaacctttttttcctaaagattattgttaaatagatattgtggtttggggaagttgaattttttataggttaaatgtcattttagagatggggagagggattatactgcaggcagcttcagccatgttgtgaaactgataaaagcaacttagcaaggcttcttttcattattttttatgtttcacttataaagtcttaggtaactagtaggatagaaacactgtgtcccgagagtaaggagagaagctactattgattagagcctaacccaggttaactgcaagaagaggcgggatactttcagctttccatgtaactgtatgcataaagccaatgtagtccagtttctaagatcatgttccaagctaactgaatcccacttcaatacacactcatgaactcctgatggaacaataacaggcccaagcctgtggtatgatgtgcacacttgctagactcagaaaaaatactactctcataaatgggtgggagtattttggtgacaacctactttgcttggctgagtgaaggaatgatattcatatattcatttattccatggacatttagttagtgctttttatataccaggcatgatgctgagtgacactcttgtgtatatttccaaatttttgtacagtcgctgcacatatttgaaatcatatattaagactttccaaagatgaggtccctggtttttcatggcaacttgatcagtaaggatttcacctctgtttgtaactaaaaccatctactatatgttagacatgacattctttttctctccttcctgaaaaataaagtgtgggaagag

SEQ ID NO: 21427 - DNA, 1994 bp, Artificial Sequence
  derived and/or modified sequence
agagaccagatcaggcagtgccgcttaataccatcacatgatcctccccgaggccctgtatttaattaaaatagagagggaggcaccacagatgccagaagaacactgttgctcttggtggacgggcccagaggaattcagcatggaatgtctctactatttcctgggatttctgctcctggctgcaagattgccacttgatgccgccaaacgatttcatgatgtgctgggcaatgaaagaccttctgcttacatgagggagcacaatcaattaaatggctggtcttctgatgaaaatgactggaatgaaaaactctacccagtgtggaagcggggagacatgaggtggaaaaactcctggaagggaggccgtgtgcaggcggtcctgaccagtgactcaccagccctcgtgggctcaaatataacatttgcggtgaacctgatattccctagatgccaaaaggaagatgccaatggcaacatagtctatgagaagaactgcagaaatgaggctggtttatctgctgatccgtatgtttacaactggacagcatggtcagaggacagtgacggggaaaatggcaccggccaaagccatcataacgtcttccctgatgggaaaccttttcctcaccaccccggatggagaagatggaatttcatctacgtcttccacacacttggtcagtatttccagaaattgggacgatgttcagtgagagtttctgtgaacacagccaatgtgacacttgggcctcaactcatggaagtgactgtctacagaagacatggacgggcatatgttcccatcgcacaagtgaaagatgtgtacgtggtaacagatcagattcctgtgtttgtgactatgttccagaagaacgatcgaaattcatccgacgaaaccttcctcaaagatctccccattatgtttgatgtcctgattcatgatcctagccacttcctcaattattctaccattaactacaagtggagcttcggggataatactggcctgtttgtttccaccaatcatactgtgaatcacacgtatgtgctcaatggaaccttcagccttaacctcactgtgaaagctgcagcaccaggaccttgtccgccaccgccaccaccacccagaccttcaaaacccaccccttctttagcaactactctaaaatcttatgattcaaacaccccaggacctgctggtgacaaccccctggagctgagtaggattcctgatgaaaactgccagattaacagatatggccactttcaagccaccatcacaattgtagagggaatcttagaggttaacatcatccagatgacagacgtcctgatgccggtgccatggcctgaaagctccctaatagactttgtcgtgacctgccaagggagcattcccacggaggtctgtaccatcatttctgaccccacctgcgagatcacccagaacacagtctgcagccctgtggatgtggatgagatgtgtctgctgactgtgagacgaaccttcaatgggtctgggacgtactgtgtgaacctcaccctgggggatgacacaagcctggctctcacgagcaccctgatttctgttcctgacagagacccagcctcgcctttaaggatggcaaacagtgccctgatctccgttggctgcttggccatatttgtcactgtgatctccctcttggtgtacaaaaaacacaaggaatacaacccaatagaaaatagtcctgggaatgtggtcagaagcaaaggcctgagtgtctttctcaaccgtgcaaaagccgtgttcttcccgggaaaccaggaaaaggatccgctactcaaaaaccaagaatttaaaggagtttcttaaatttcgaccttgtttctgaagctcacttttcagtgccattgatgtgagatgtgctggagtggctattaacctttttttcctaaagattattgttaaatagatattgtggtttggggaagttgaattttttata

SEQ ID NO: 21428 - DNA, 2155 bp, Artificial Sequence
  derived and/or modified sequence
agaagaacactgttgctcttggtggacgggcccagaggaattcagagttaaaccttgagtgcctgcgtccgtgagaattcagcatggaatgtctctactatttcctgggatttctgctcctggctgcaagattgccacttgatgccgccaaacgatttcatgatgtgctgggcaatgaaagaccttctgcttacatgagggagcacaatcaattaaatggctggtcttctgatgaaaatgactggaatgaaaaactctacccagtgtggaagcggggagacatgaggtggaaaaactcctggaagggaggccgtgtgcaggcggtcctgaccagtgactcaccagccctcgtgggctcaaatataacatttgcggtgaacctgatattccctagatgccaaaaggaagatgccaatggcaacatagtctatgagaagaactgcagaaatggtcagtatttccagaaattgggacgatgttcagtgagagtttctgtgaacacagccaatgtgacacttgggcctcaactcatggaagtgactgtctacagaagacatggacgggcatatgttcccatcgcacaagtgaaagatgtgtacgtggtaacagatcagattcctgtgtttgtgactatgttccagaagaacgatcgaaattcatccgacgaaaccttcctcaaagatctccccattatgtttgatgtcctgattcatgatcctagccacttcctcaattattctaccattaactacaagtggagcttcggggataatactggcctgtttgtttccaccaatcatactgtgaatcacacgtatgtgctcaatggaaccttcagccttaacctcactgtgaaagctgcagcaccaggaccttgtccgccaccgccaccaccacccagaccttcaaaacccaccccttctttagcaactactctaaaatcttatgattcaaacaccccaggacctgctggtgacaaccccctggagctgagtaggattcctgatgaaaactgccagattaacagatatggccactttcaagccaccatcacaattgtagagggaatcttagaggttaacatcatccagatgacagacgtcctgatgccggtgccatggcctgaaagctccctaatagactttgtcgtgacctgccaagggagcattcccacggaggtctgtaccatcatttctgaccccacctgcgagatcacccagaacacagtctgcagccctgtggatgtggatgagatgtgtctgctgactgtgagacgaaccttcaatgggtctgggacgtactgtgtgaacctcaccctgggggatgacacaagcctggctctcacgagcaccctgatttctgttcctgacagagacccagcctcgcctttaaggatggcaaacagtgccctgatctccgttggctgcttggccatatttgtcactgtgatctccctcttggtgtacaaaaaacacaaggaatacaacccaatagaaaatagtcctgggaatgtggtcagaagcaaaggcctgagtgtctttctcaaccgtgcaaaagccgtgttcttcccgggaaaccaggaaaaggatccgctactcaaaaaccaagaatttaaaggagtttcttaaatttcgaccttgtttctgaagctcacttttcagtgccattgatgtgagatgtgctggagtggctattaacctttttttcctaaagattattgttaaatagatattgtggtttggggaagttgaattttttataggttaaatgtcattttagagatggggagagggattatactgcaggcagcttcagccatgttgtgaaactgataaaagcaacttagcaaggcttcttttcattattttttatgtttcacttataaagtcttaggtaactagtaggatagaaacactgtgtcccgagagtaaggagagaagctactattgattagagcctaacccaggttaactgcaagaagaggcgggatactttcagctttccatgtaactgtatgcataaagccaatgtagtccagtttctaagatcatgttccaagctaactgaatcccacttcaatacacactcatgaactcctgatggaacaataacaggcccaagcctgtggtatgatgtgcacacttgctagactcag

SEQ ID NO: 21429 - DNA, 1719 bp, Artificial Sequence
  derived and/or modified sequence
atggaatgtctttactatttcctaggcttcctgcttctcgcagctagactgcctcttgacgccgccaagcgctttcacgatgtcctgggtaacgagaggccgagtgcgtacatgcgcgagcataatcaactgaacggttggtcttccgatgagaacgattggaacgaaaaactttatcccgtctggaagagaggggacatgcgatggaaaaactcatggaagggtgggcgggtgcaggccgtgctgacatcagactcccccgccctcgtgggctcgaacattacctttgcagtgaatctgattttcccccggtgccagaaggaagacgcgaatgggaatatagtgtacgaaaagaactgtcggaatgaggcaggattaagtgcagatccgtacgtgtataactggacagcctggtcagaggactccgatggggagaatggaacagggcagtcacatcataatgttttccctgacggaaagccatttccgcatcacccagggtggcggcgctggaacttcatatacgtctttcataccctcggacaatatttccagaagctgggccgctgttctgtccgagtatctgtcaatactgctaatgtgacgctcggaccgcagcttatggaggttaccgtgtatcgtcgccacggaagggcttatgttcccattgcacaggtgaaggacgtgtatgttgtgacggatcagattcccgtgtttgtgacaatgttccagaaaaatgacaggaatagttccgacgagacatttttgaaggatttgcccattatgttcgatgtccttattcacgacccctcccattttttaaattatagcactatcaattacaagtggtcatttggagacaacaccggactctttgtaagcacgaatcacacagtcaatcacacatatgtcctaaacgggactttctcgctgaacctcaccgtaaaagctgcagctccgggcccatgcccccctccgcccccgcctcccaggccctcaaagcccactccgagcctagccactactctgaagagctatgactcaaatacacccggccctgcaggagacaaccccctggaactgtccagaattcccgacgagaattgtcagattaacagatacggccatttccaagccacgatcacaattgtcgagggtatcctggaggtaaatattatccagatgacagacgtgttgatgccggtgccgtggcccgagtcttctctcattgacttcgtagttacctgtcaaggttccataccgaccgaagtatgcactattataagcgatccgacgtgcgagataacacagaacacagtttgtagtcccgtggacgtggatgagatgtgtctgctgactgtgaggcgaacatttaacggcagcggtacgtattgcgttaatcttaccctgggagacgatacatcattggcacttacatccaccctcatctccgtgcccgaccgcgatcccgcatctcccttgcgcatggctaattcagccctgatcagcgtgggctgcttggcgatctttgtgactgttatctcactgttggtgtacaagaagcacaaggagtataaccccatcgagaactcacccggtaatgttgttaggagcaaggggttgtccgtgtttctgaatcgagctaaagctgttttcttccccggtaatcaggagaaagatccccttctgaagaatcaggaatttaagggggtttcatag

SEQ ID NO: 21430 - DNA, 1368 bp, Artificial Sequence
  derived and/or modified sequence
atggagtgtctctattactttctgggatttctgttgctggcggccagacttcctttggacgcagcaaagcgttttcacgatgtattggggaacgaacgcccatctgcctacatgagagaacacaatcagctgaacggttggtcctccgacgagaatgattggaactttatatacgtcttccacaccctgggtcagtactttcagaagcttggccgctgcagcgtcagggtgagtgtgaacaccgccaacgttaccctggggccgcaactcatggaggttaccgtgtacagacggcatggaagagcctatgtgccaattgcgcaggtgaaggatgtgtacgtcgtaacagatcagattccggtgtttgtgacaatgttccagaaaaacgatagaaactctagcgatgaaacctttttgaaggacctgcccattatgtttgacgtgctgattcacgatccatcacactttcttaattactctacaattaattacaaatggtcctttggcgacaataccggattgttcgtatctacaaatcacactgtgaatcatacctacgtgctcaacggaacctttagcctcaatctcactgttaaggcggccgcgccaggcccctgtccccccccaccaccgccaccccgtccaagcaaaccaaccccttcgttggccaccaccttaaagtcatacgacagtaatacccccggccccgccggagacaatccactcgagctgtcacgcatcccagacgaaaattgccagattaatcggtacggacatttccaggccacgatcactatcgtggagggaattctcgaggtaaatatcattcagatgacagatgtgttgatgccagttccctggcctgaatccagtttaattgattttgtggtgacatgtcagggtagcatcccaactgaagtgtgtaccattatcagcgatccaacctgtgagattacacagaatactgtgtgcagtcctgtggatgtcgacgagatgtgcctgcttactgtgcggagaacatttaatggctccggtacttactgtgttaatcttactctgggagatgataccagtctggcattgacatccaccctaatatcagtgccagatagagacccggcctcaccactccggatggcaaattccgccctcatttctgttggctgcctcgccatcttcgtcaccgtgatctcgttgcttgtctataaaaaacacaaggaatacaatcctatagagaattctccggggaatgttgtccgctcaaagggactgagtgtgtttctcaacagagctaaggctgtcttttttcccggaaatcaggagaaggaccctctgctgaagaatcaggagttcaagggcgtgagctag

SEQ ID NO: 21431 - DNA, 1824 bp, Artificial Sequence
  derived and/or modified sequence
atgatactgccagaggccctgtatctgatcaagatcgagcgagaagcacctcaaatgcctgaggagcactgttgctcctggtggacagggcctgaagagttttccatggagtgtctgtactactttctcgggtttctgttactggccgctaggctgcccctggatgcagctaagcggtttcacgatgtgctggggaacgagcgcccttcagcctacatgcgagagcataatcagctaaacggatggagcagcgacgagaacgactggaacgagaaactatacccagtctggaagcgaggtgatatgagatggaagaactcgtggaaaggcgggcgcgttcaggccgtcctcacctctgacagccctgccctggtggggagcaacataacctttgccgtaaatctgatattcccgaggtgccagaaggaggatgctaatggaaatattgtatatgagaaaaactgtcgcaacgaggctggactgtctgcggatccatatgtgtataactggacagcatggtccgaagacagcgacggggaaaatggcactgggcagtcacaccataatgttttccccgacggcaaacccttcccccaccacccgggttggaggcggtggaacttcatttatgtgtttcacacgctgggccagtatttccaaaaactgggtcgttgtagcgtgagggtgtctgtcaatacggctaatgtgacgctgggccctcagctcatggaggtaacagtttatcggcgccacggccgggcatacgtgcccatagcgcaagtcaaggacgtttatgtggtgacagaccaaatccccgtgttcgtgaccatgtttcagaaaaacgataggaactcctcggatgaaaccttcctgaaggaccttccgatcatgttcgatgtgctcatacatgacccttcacacttcctgaattactcaaccataaattacaaatggtctttcggagacaacacagggctgttcgtctccacaaaccacacagtgaatcatacatacgtgctcaatggaacgttttcattgaacctaaccgtcaaggctgcggcgcccgggccctgtccaccacccccccctccaccacgcccctcaaaacccaccccgtcgcttgctaccacccttaagtcttatgatagtaacacccccgggccagcaggggacaatccattggaactgagtcgcattcccgatgagaattgccagatcaaccgatacgggcatttccaggccaccatcaccattgtggaagggattctggaggtcaatatcattcagatgacagatgtattgatgccagtcccatggcctgaatcctctctcatcgattttgtggttacatgtcaaggctctattccaacagaggtgtgcactatcatttcagaccccacatgcgagataacgcagaacaccgtgtgttcacctgttgacgttgacgagatgtgtttgttgaccgtgcgacgcacatttaatggtagcgggacctactgtgtgaacttgaccctcggggatgacacatccctggcattgacttccacactgatctcagtgcctgatagagaccccgcgagccccttacggatggctaacagcgcactaatctcagtgggttgtcttgcgatcttcgtgaccgtgataagcctcttagtatataaaaaacacaaggagtacaacccaattgaaaactcacctgggaacgtggttcgcagcaagggcctctccgtgttcttgaacagagccaaggcggtgttctttcctggtaaccaggagaaagatcccttactgaagaaccaggaatttaagggagtttcctag

SEQ ID NO: 21432 - DNA, 1545 bp, Artificial Sequence
  derived and/or modified sequence
atggagtgcctgtactatttcctggggtttctgctgctggcagctcgcttaccgctggacgcagcaaaacggtttcatgatgtcctggggaacgaacgtccttctgcatacatgcgggaacacaatcagctgaacggatggtcttctgacgagaatgactggaatgagaaactatatccagtatggaagcgcggagacatgcgatggaagaactcatggaagggcggccgagtgcaggcagttctcacttcggattcaccagctctagtcggctccaatatcacatttgctgttaatctaatcttccctagatgccagaaagaagacgcaaacggaaacattgtgtacgaaaaaaactgcaggaacgggcagtacttccagaaactcggacgctgttctgtgcgcgtttctgttaacaccgccaatgtaacccttggcccccagctaatggaagtgacagtgtatcgccgccacggccgcgcttatgtgccgatcgcccaggtgaaggatgtttatgtcgtgactgatcagatacccgtcttcgtcaccatgtttcaaaagaacgatagaaatagcagcgacgaaacgttcttaaaggacctacctattatgtttgatgttctaatccacgaccctagtcatttcctcaattattccacgatcaactataagtggagttttggagacaacacgggactctttgtgagcaccaaccacactgtgaaccacacatatgtattgaacggcaccttcagcctcaacctgaccgtgaaggccgccgcccctgggccttgccccccccccccaccacccccacgaccctctaagccgaccccttccctggctacaaccctgaaatcctacgacagcaatactcccggacctgctggcgacaatcctctggaactttcccgaattcctgatgagaattgtcagatcaaccggtacggacatttccaggctactattacaatagtagagggcatcctggaggtgaacatcatccagatgacagatgtcctgatgcctgtcccctggcccgagagttcacttatagacttcgtggtcacatgtcagggctcgatccccaccgaggtgtgtaccatcatcagcgaccctacgtgtgaaattacccagaacactgtgtgcagccctgtggatgtggatgagatgtgtcttctgaccgtgcgaaggacattcaacggatcaggtacgtattgtgtcaacttgacgttgggggatgacacctctttggccctgacgtccacactgatatcagtgcccgatcgcgacccggccagtccactccggatggccaacagcgcactcataagcgttggctgcttagccatcttcgttaccgtgattagtctcctggtttataagaaacataaagagtacaacccaattgagaattcacccggaaatgtggtcaggagcaagggcctgtcagtgttccttaaccgggcaaaggctgtgttcttccctggcaaccaggaaaaggatcctcttctgaagaatcaggagttcaagggggtgtcttag

SEQ ID NO: 21433 - DNA, 1719 bp, Artificial Sequence
  derived and/or modified sequence
atggagtgcctgtactacttcctgggcttcctgctgctggccgcccggctgcccctggatgctgccaagcgcttccatgatgtgctgggcaatgaaagaccttctgcctacatgagggagcacaaccagctgaatggctggagcagtgatgaaaatgactggaatgagaagctgtaccctgtgtggaagagaggagacatgcgctggaagaacagctggaagggcggccgggtgcaggccgtgctgaccagtgacagccctgccctggtgggcagcaacatcacctttgctgtgaacctgatcttcccccgctgccagaaggaggatgccaatggaaacatcgtgtatgagaagaactgcagaaatgaggccggcctgtctgctgacccctacgtgtacaactggacagcctggagcgaggacagtgatggagaaaatggcaccggccagagccaccacaacgtgtttcctgatggcaagcccttcccccaccaccctggctggaggcgctggaacttcatctacgtgttccacaccctgggccagtacttccagaagctgggccgctgcagcgtgcgggtgtctgtgaacacagccaacgtgaccctgggcccccagctgatggaggtgacagtgtaccgccgccacggccgggcctacgtgcccatcgcccaggtgaaggatgtgtatgtggtgacagaccagatccctgtgtttgtgaccatgttccagaagaatgacaggaacagcagtgatgagaccttcctgaaggacctgcccatcatgtttgatgtgctgattcatgaccccagccacttcctgaactacagcaccatcaactacaagtggagctttggagacaacacaggcctgtttgtgtccaccaaccacacagtgaaccacacctacgtgctgaatggcaccttcagcctgaacctgactgtgaaggccgccgcccctggcccctgccccccacctcctcctccaccccggcccagcaagcccacccccagcctggccaccaccctgaagagctatgacagcaacaccccaggccctgctggggacaaccccctggagctgagccgcatcccagatgagaactgccagatcaacagatatggccacttccaggccaccatcaccatcgtggagggcatcctggaggtgaacatcatccagatgacagatgtgctgatgcctgtgccctggccagagagcagcctgattgactttgtggtgacctgccagggcagcatccccacagaggtgtgcaccatcatcagtgaccccacctgtgagatcacccagaacacagtgtgcagccctgtggatgtggatgagatgtgcctgctgactgtgcggaggaccttcaatggaagtggcacctactgtgtgaacctgaccctgggagatgacaccagcctggccctgaccagcaccctcatctctgtgcctgaccgggaccctgccagccccctgaggatggccaacagcgccctgatctctgtgggctgcctggccatctttgtgaccgtcatcagcctgctggtgtacaagaagcacaaggagtacaaccccatcgagaacagccctggaaatgtggtgcgcagcaagggcctgagcgtcttcctgaacagagccaaggctgtgttcttccctggcaaccaggagaaggaccccctgctgaagaaccaggagttcaagggcgtgtcctag

SEQ ID NO: 21434 - DNA, 1368 bp, Artificial Sequence
  derived and/or modified sequence
atggagtgcctgtactacttcctgggcttcctgctgctggccgcccggctgcccctggatgctgccaagcgcttccatgatgtgctgggcaatgaaagaccttctgcctacatgagggagcacaaccagctgaatggctggagcagtgatgaaaatgactggaacttcatctacgtgttccacaccctgggccagtacttccagaagctgggccgctgcagcgtgcgggtgtctgtgaacacagccaacgtgaccctgggcccccagctgatggaggtgacagtgtacagaagacatggccgggcctacgtgcccatcgcccaggtgaaggatgtgtatgtggtgacagaccagatccctgtgtttgtgaccatgttccagaagaatgacaggaacagcagtgatgagaccttcctgaaggacctgcccatcatgtttgatgtgctgattcatgaccccagccacttcctgaactacagcaccatcaactacaagtggagctttggagacaacacaggcctgtttgtgtccaccaaccacacagtgaaccacacctacgtgctgaatggcaccttcagcctgaacctgactgtgaaggctgctgcccctggcccctgccccccacctcctcctccaccccggcccagcaagcccacccccagcctggccaccaccctgaagagctatgacagcaacaccccaggccctgctggggacaaccccctggagctgagccgcatcccagatgagaactgccagatcaacagatatggccacttccaggccaccatcaccatcgtggagggcatcctggaggtgaacatcatccagatgacagatgtgctgatgcctgtgccctggccagagagcagcctgattgactttgtggtgacctgccagggcagcatccccacagaggtgtgcaccatcatcagtgaccccacctgtgagatcacccagaacacagtgtgcagccctgtggatgtggatgagatgtgcctgctgactgtgcggaggaccttcaacggcagcggcacctactgtgtgaacctgaccctgggagatgacaccagcctggccctgaccagcaccctcatctctgtgcctgaccgggaccctgccagccccctgaggatggccaacagcgccctgatctctgtgggctgcctggccatctttgtgaccgtcatcagcctgctggtgtacaagaagcacaaggagtacaaccccatcgagaacagccctggaaatgtggtgcgcagcaagggcctgtctgtgttcctgaacagagccaaggctgtgttcttccctggcaaccaggagaaggaccccctgctgaagaaccaggagttcaagggcgtgtcctag

SEQ ID NO: 21435 - DNA, 1824 bp, Artificial Sequence
  derived and/or modified sequence
atgatcctgcctgaggccctgtacctgatcaagattgaaagagaggccccccagatgcctgaggagcactgctgctcctggtggacaggccctgaggagttctccatggagtgcctgtactacttcctgggcttcctgctgctggccgcccggctgcccctggatgctgccaagcgcttccatgatgtgctgggcaatgaaagacccagcgcctacatgagggagcacaaccagctgaatggctggagcagtgatgaaaatgactggaatgagaagctgtaccctgtgtggaagagaggagacatgcgctggaagaacagctggaagggcggccgggtgcaggccgtgctgaccagtgacagccctgccctggtgggcagcaacatcacctttgctgtgaacctgatcttcccccgctgccagaaggaggatgccaacggcaacatcgtgtatgagaagaactgcagaaatgaagctggcctgtctgctgacccctacgtgtacaactggacagcctggagcgaagattctgatggagaaaatggaacaggccagagccaccacaacgtgtttcctgatggcaagcccttcccccaccaccctggctggaggcgctggaacttcatctacgtgttccacaccctgggccagtacttccagaagctgggccgctgcagcgtgcgggtgtctgtgaacacagccaacgtgaccctgggcccccagctgatggaggtgacagtgtacagaagacatggccgggcctacgtgcccatcgcccaggtgaaggatgtgtatgtggtgacagaccagatccctgtgtttgtgaccatgttccagaagaatgacaggaacagcagtgatgagaccttcctgaaggacctgcccatcatgtttgatgtgctgattcatgaccccagccacttcctgaactacagcaccatcaactacaagtggagctttggagacaacacaggcctgtttgtgtccaccaaccacacagtgaaccacacctacgtgctgaatggcaccttcagcctgaacctgactgtgaaggctgctgcccctggcccctgccccccacctcctcctccaccccggcccagcaagcccacccccagcctggccaccaccctgaagagctatgacagcaacaccccaggccctgctggggacaaccccctggagctgagccgcatcccagatgagaactgccagatcaacagatatggccacttccaggccaccatcaccatcgtggagggcatcctggaggtgaacatcatccagatgacagatgtgctgatgcctgtgccctggccagagagcagcctgattgactttgtggtgacctgccagggcagcatccccacagaggtgtgcaccatcatcagtgaccccacctgtgagatcacccagaacacagtgtgcagccctgtggatgtggatgagatgtgcctgctgactgtgcggaggaccttcaacggcagcggcacctactgtgtgaacctgaccctgggagatgacaccagcctggccctgaccagcaccctcatctctgtgcctgaccgggaccctgccagccccctgaggatggccaacagcgccctgatctctgtgggctgcctggccatctttgtgaccgtcatcagcctgctggtgtacaagaagcacaaggagtacaaccccatcgagaacagccctggaaatgtggtgcgcagcaagggcctgtctgtgttcctgaacagagccaaggctgtgttcttccctggcaaccaggagaaggaccccctgctgaagaaccaggagttcaagggcgtgtcctag

SEQ ID NO: 21436 - DNA, 1545 bp, Artificial Sequence
  derived and/or modified sequence
atggagtgcctgtactacttcctgggcttcctgctgctggccgcccggctgcccctggatgctgccaagcgcttccatgatgtgctgggcaatgaaagaccttctgcctacatgagggagcacaaccagctgaatggctggagcagtgatgaaaatgactggaatgagaagctgtaccctgtgtggaagagaggagacatgcgctggaagaacagctggaagggcggccgggtgcaggccgtgctgaccagtgacagccctgccctggtgggcagcaacatcacctttgctgtgaacctgatcttcccccgctgccagaaggaggatgccaatggaaacatcgtgtatgagaagaactgcagaaatggccagtacttccagaagctgggccgctgcagcgtgcgggtgtctgtgaacacagccaacgtgaccctgggcccccagctgatggaggtgacagtgtaccgccgccacggccgggcctacgtgcccatcgcccaggtgaaggatgtgtatgtggtgacagaccagatccctgtgtttgtgaccatgttccagaagaatgacaggaacagcagtgatgagaccttcctgaaggacctgcccatcatgtttgatgtgctgattcatgaccccagccacttcctgaactacagcaccatcaactacaagtggagctttggagacaacacaggcctgtttgtgtccaccaaccacacagtgaaccacacctacgtgctgaatggcaccttcagcctgaacctgactgtgaaggccgccgcccctggcccctgccccccacctcctcctccaccccggcccagcaagcccacccccagcctggccaccaccctgaagagctatgacagcaacaccccaggccctgctggggacaaccccctggagctgagccgcatcccagatgagaactgccagatcaacagatatggccacttccaggccaccatcaccatcgtggagggcatcctggaggtgaacatcatccagatgacagatgtgctgatgcctgtgccctggccagagagcagcctgattgactttgtggtgacctgccagggcagcatccccacagaggtgtgcaccatcatcagtgaccccacctgtgagatcacccagaacacagtgtgcagccctgtggatgtggatgagatgtgcctgctgactgtgcggaggaccttcaatggaagtggcacctactgtgtgaacctgaccctgggagatgacaccagcctggccctgaccagcaccctcatctctgtgcctgaccgggaccctgccagccccctgaggatggccaacagcgccctgatctctgtgggctgcctggccatctttgtgaccgtcatcagcctgctggtgtacaagaagcacaaggagtacaaccccatcgagaacagccctggaaatgtggtgcgcagcaagggcctgagcgtcttcctgaacagagccaaggctgtgttcttccctggcaaccaggagaaggaccccctgctgaagaaccaggagttcaagggcgtgtcctag

SEQ ID NO: 21437 - DNA, 1719 bp, Artificial Sequence
  derived and/or modified sequence
atggagtgcctgtactacttcctgggcttcctgctgctggccgccagactgcctttggatgcggccaagcgatttcacgatgtgttaggaaatgaaagaccatccgcatacatgcgcgagcataatcaactgaatgggtggagctctgacgagaacgattggaacgagaagttgtaccccgtctggaagcggggcgatatgagatggaaaaattcatggaagggcggtcgagttcaagctgtgctgacatcagactctccagctctcgtgggatctaatataacctttgccgtgaacctaatattcccccgatgccagaaggaggatgccaacgggaacatcgtttacgagaaaaactgtagaaacgaagctggtttgagcgcagatccatatgtatataactggaccgcctggtcggaggatagtgatggtgaaaacgggaccggccagtcccaccacaatgtgttccctgacggcaaaccctttccacaccaccctgggtggaggcggtggaactttatctacgtgtttcatacccttggccagtactttcaaaaacttggtaggtgttccgtcagggtttcggtgaatacagcaaacgtgaccttaggtccccagctgatggaggtgacggtttataggcgtcacgggagagcgtacgtgccgatcgcccaggtgaaagacgtgtacgttgttacagaccaaattccagtgttcgtaacgatgttccagaaaaatgataggaatagctccgatgagacatttctgaaggacctgccgatcatgttcgatgtcctgatccacgatccttcccacttcctcaactacagcaccataaattataaatggagcttcggagacaatacgggtctgttcgtcagcactaaccacacagtgaaccacacatacgtgcttaatggaaccttttcacttaatctcacggttaaggcagccgcaccaggcccctgtccaccccccccacctccacccaggccgagcaagcccacaccttcactcgccacaactcttaagtcctacgactccaacacaccgggccccgcaggggataaccccctggagctctcccgaatccccgatgagaactgccagataaaccggtatggccatttccaggcaaccatcaccattgtggaaggtatcctggaggtaaacatcatacagatgacagatgttttgatgcccgtgccatggccagagtcaagcctgatcgacttcgtggtcacttgccagggatctatcccaactgaagtgtgtacgattatatcagacccaacatgtgaaatcacccagaatacagtttgtagcccagtggacgtcgatgagatgtgcctcctcaccgtgagacggaccttcaatggcagtggcacatattgcgtcaacctgacgctcggcgacgacaccagtctcgccttgactagtaccctgatcagtgtaccagaccgtgacccagcctcacctctgcggatggccaactctgcactgatctcagtgggttgcctcgctatctttgtgactgttatctcacttttagtgtacaagaaacataaagagtataaccctattgagaattcgcccgggaatgtcgtaagatccaaggggctgtcagtgtttctaaacagggcaaaggccgtgttttttcccggaaaccaagaaaaagaccccctgctaaaaaaccaagagttcaaaggggtctcttag

SEQ ID NO: 21438 - DNA, 1368 bp, Artificial Sequence
  derived and/or modified sequence
atggagtgcctgtactacttcctgggcttcctgctgctggccgccagattgccattggatgctgcaaagcggtttcatgatgtgttggggaacgagcgcccgagcgcctatatgagggagcacaatcagctcaacggctggtcctccgacgaaaacgactggaacttcatatacgtctttcacaccctcggccagtactttcaaaagcttggccgatgcagtgtaagggtctcagtgaacactgccaatgtcacgctaggtccgcagctcatggaagtcaccgtataccggaggcacgggagggcctacgtgccaatagctcaggtgaaagacgtgtatgtcgtaacggaccagatcccagtatttgtcactatgtttcagaaaaacgacagaaatagttcggatgagacctttttgaaagacctaccaatcatgtttgacgtccttatccatgatccctctcacttcctcaattatagcactataaactataaatggagcttcggtgataatacaggcctctttgtgagtaccaatcacaccgtgaaccacacatatgtgttaaatggcaccttctctttgaacctgacagtaaaggctgctgctcccggtccatgccccccccccccaccccctccaagaccctctaaacctacacccagtctggccactaccctcaagtcctatgattcaaatacccctggtcccgccggagacaacccattggagctgtcacgtatcccagatgagaactgtcagataaacaggtacgggcattttcaggctaccattacgattgtcgagggcatcctggaagtgaacatcatccaaatgacagacgtcttgatgcccgtgccgtggcccgaatctagccttattgattttgtggttacctgccagggcagcattccaaccgaagtctgtacaattatcagcgaccccacatgcgaaattacccaaaacaccgtttgttccccagtggatgtagacgagatgtgcctgctgacagttaggaggacgtttaatggctctggtacttattgtgtgaacctgactctgggtgatgacacgtcattggcgctgacaagcacactcatctccgtcccggaccgcgatccagcaagccctctgcggatggccaacagcgccttgatatccgtgggatgcctggctatttttgttacggtcatatcactcctcgtgtataaaaaacacaaagagtacaatccaatcgagaacagtccagggaacgtcgtgagaagtaagggcctatcagtgttcttaaaccgcgccaaagctgtgttcttcccaggcaaccaggagaaggacccgctactgaagaaccaagagtttaagggggtaagctag

SEQ ID NO: 21439 - DNA, 1824 bp, Artificial Sequence
  derived and/or modified sequence
atgatcctgcccgaggccctgtacctgatcaagatcgagcgggaggccccccaaatgcctgaggaacattgctgctcatggtggacaggtcccgaggaattttctatggagtgcctttactatttcctgggttttcttctcttggctgcacgcctcccacttgacgccgccaagaggttccacgacgttctcgggaacgaacgcccttccgcatacatgagggagcataatcagttgaatggctggagctccgatgagaacgactggaacgagaagttatatcccgtctggaagcgaggggacatgcggtggaagaattcctggaagggtggtagagttcaggcagttcttaccagcgactctccggcattggtcggcagcaatattacctttgctgtcaatttgattttccctcggtgccagaaggaggatgcaaatgggaatatagtttatgaaaagaactgtaggaacgaggccggcctttctgccgatccctatgtgtacaattggacagcctggtccgaagactccgatggtgagaacggcaccggccagtcacatcacaacgtcttccctgacggtaaaccgttcccccatcaccccggttggcgcaggtggaatttcatttatgtcttccacactttaggccagtactttcagaagctgggacgctgttcagttcgggttagtgttaataccgccaacgtgaccctaggcccacaactcatggaggtgaccgtgtatcgccggcatggccgggcctacgtccctatcgctcaagtgaaggatgtttacgtggtgacagatcagatacctgtgttcgtgaccatgttccaaaagaatgaccgcaattcgagtgacgagaccttcctcaaagatttacccatcatgttcgatgtgctgatccatgatccatcccacttcttgaattattccaccattaattacaagtggtccttcggagacaacactggattgttcgttagtaccaatcacacagtgaaccatacttacgtgctaaatgggacgttttcactcaacctcacggtgaaagctgcggctccagggccctgtcctcctccccccccccctcctcgtcctagcaaacccacaccaagccttgccacaacattgaaatcatatgatagcaacacccccggacccgctggtgataatccgctcgagctgtccagaatcccggacgaaaactgtcagattaacaggtacggccacttccaggccactatcacaattgtggagggcattctcgaagtgaatataatccagatgactgatgtgctgatgccagttccctggccagagagttctcttattgattttgtcgtaacctgtcagggctccattccgacagaggtgtgtacaattattagtgatccaacatgtgaaatcacacaaaacacagtttgttcccctgttgatgtggacgaaatgtgcttgttaaccgtgaggagaacattcaatggaagcggtacttactgcgtgaatctgaccctgggggacgacacaagcctcgcgctgacctctactctcatctctgtacctgatcgagatcctgcttcgccccttcgcatggctaactcagctttaatttccgtggggtgtcttgctatcttcgttactgtaatcagcctcttagtctataaaaagcataaggagtacaacccaattgagaattcccctggaaacgtggttcgctccaagggcctctcggttttcttaaatagggcgaaagccgttttcttcccgggcaaccaagaaaaagaccccttactgaagaaccaggagtttaaaggggtgagttag

SEQ ID NO: 21440 - DNA, 1545 bp, Artificial Sequence
  derived and/or modified sequence
atggagtgcctgtactacttcctgggcttcctgctgctggccgccagattgcccttggatgccgcgaagagatttcatgatgtactcggcaacgagaggccttctgcatacatgcgcgagcataaccaactcaacggatggtcctccgatgaaaacgattggaacgagaagctgtatcctgtgtggaagaggggtgacatgagatggaagaacagctggaaggggggtcgggtgcaggccgtattaacgagcgacagtcctgcactggtcggatcgaacatcacattcgccgtgaatctgattttcccccggtgccagaaggaggatgctaatggtaacattgtatatgagaagaactgtaggaacggtcaatattttcagaaacttggccgctgctccgtccgtgtatcggtcaacacagccaacgttacccttggaccgcagctcatggaggtgactgtttaccgtcggcacggacgggcatacgtcccaatagcacaggttaaggacgtctatgttgtgacagaccagatccccgtatttgtgacaatgttccagaagaacgacaggaattcatctgatgagaccttcctaaaggatttgccaatcatgttcgacgtgctgatccatgatccgtcccactttctgaactactcaacgatcaactataagtggtcatttggagataacacggggttgttcgtgagcacgaatcataccgtcaatcacacctatgtgttgaacgggaccttttctttgaacttgaccgtcaaggccgctgccccaggcccctgcccgcctccaccccctcctccacgccctagtaagcccactccctcccttgcaaccaccctcaagtcatacgatagcaatacacccggccccgccggtgacaatccattggaactgtcccgtatccctgacgagaactgtcaaataaataggtatggacacttccaggccacgattaccatagtggaaggcattctggaagtcaatattattcagatgactgacgtactgatgccagtgccttggccagagagctccctgatagacttcgtggtgacgtgccagggatctattcctaccgaagtgtgcaccattataagtgatccaacgtgtgaaatcacacagaataccgtgtgtagtcctgttgatgttgatgagatgtgtctgctaacagtgcgcaggaccttcaacggctcggggacctactgtgtgaacctcactttgggagacgacacgtccctggcactgacaagcactcttattagcgtccctgatcgcgatccagccagtccactcagaatggccaactccgctctgatctcggtgggctgtcttgctatctttgtaaccgttattagcctcctggtctacaagaagcataaggaatataaccctatcgagaatagccccggtaatgtcgtgcggtccaagggactgtcagtgttcttaaaccgagccaaggcggtcttcttccctggaaatcaagaaaaggaccctcttctaaagaatcaagagtttaagggcgtttcctag

SEQ ID NO: 21441 - DNA, 1719 bp, Artificial Sequence
  derived and/or modified sequence
atggaatgtctgtactatttcctcggattcctcttactagctgcgcgactgccattggacgctgccaaacgattccatgatgtgctcgggaacgagagaccttctgcttatatgagagagcacaatcagctgaacggatggagttcagacgagaacgattggaatgagaagctgtatcctgtgtggaaacgaggggatatgaggtggaaaaactcctggaagggagggagggtgcaggctgtcctgacctctgacagtccggcacttgtagggtccaacataacctttgccgttaacctgattttcccccgatgccaaaaggaggacgccaatggtaacattgtgtacgagaagaactgccgaaatgaggcagggctaagcgctgacccctacgtctataattggaccgcatggtctgaggactctgacggagaaaatggaactgggcagtcacaccataacgtcttccctgatggaaagcccttcccacaccacccaggctggcgacgatggaacttcatctacgtgttccataccctgggacagtattttcagaaactgggaagatgcagcgtgagggtgtcggtgaatacagcaaacgttactctcggtcctcagctaatggaagtgaccgtttatcggagacacggcagagcctacgtgcctatcgctcaagtgaaggacgtgtacgttgtcacagaccaaatcccagtattcgtgactatgtttcaaaaaaacgatcgtaacagcagtgatgaaacatttctgaaggacttacctattatgtttgacgtgcttattcacgacccatcccactttctcaattactctacaattaactacaaatggagcttcggtgataatacaggcctgttcgtaagcaccaaccacaccgtaaaccatacctatgttctgaatggcaccttctccctgaatctgaccgtcaaggcagctgctcccggtccttgtccgccacccccacctcccccaaggccctcaaagcccacaccctccctggctacaacgctgaaaagctacgactctaacacacctggacccgctggggacaatccgcttgagctgagtcggatcccggatgagaactgccagattaaccgctacgggcattttcaagcgactattaccatcgtggaaggcatcttagaggtgaatatcattcagatgacagacgtactgatgccagtgccctggcctgagtcttcccttatcgacttcgtggtaacgtgtcaggggagtatacccaccgaggtttgtaccatcatcagtgatccaacatgcgagattacacagaatacagtttgctcccccgttgatgtggacgagatgtgcttgctgactgttagacggacgttcaacggttccgggacttactgtgtaaacctgacgctgggtgacgatactagcttagcactgacaagcaccctgatctccgtacccgacagggacccggcaagtccccttcgtatggccaattcggcacttatcagcgttggatgtctagcgatattcgtcaccgtgatcagtcttctggtgtacaagaaacacaaggaatataaccctattgagaatagtcctggaaacgttgtgcggagcaagggattgtccgtatttctgaatagggcgaaggcagtcttcttcccgggaaaccaggagaaggaccccctgctgaaaaaccaggagtttaagggggtgagttag

SEQ ID NO: 21442 - DNA, 1368 bp, Artificial Sequence
  derived and/or modified sequence
atggaatgcctatactacttcctcggatttcttctcctagccgcaagactacccctggatgccgctaaacgtttccatgatgtactgggaaatgagcgcccatcagcctatatgcgagaacataatcaactgaatggttggtcctctgatgagaacgattggaatttcatttacgtctttcacacattgggacagtactttcagaagctcggcagatgtagtgtcagagtgagcgtgaatacagcgaatgttacactgggccctcagcttatggaagtcaccgtttacagacgacacggacgcgcttatgtgcccatcgcacaggttaaggatgtctacgtggttacagaccaaatccccgtttttgttaccatgtttcagaaaaatgacagaaactcatccgacgagacttttctgaaggatctaccaataatgtttgatgtcttgattcacgatccttctcactttttaaattactctacaatcaactataaatggtcttttggagacaacaccggactgttcgtatctactaaccatactgtgaaccatacctacgtgttaaacggaacctttagcttgaatcttaccgtcaaagccgctgcgccaggaccatgtccccctccgccaccccctcctcgaccgtccaaacccacacctagtttagccactactctcaagtcatacgactccaacacacccggaccagctggagataaccccctagagctgtcgcgcattcctgacgagaactgccagatcaataggtatgggcatttccaggccaccattacaattgtggagggaatcctggaggtgaatataatccagatgacagacgtgctgatgcctgtcccatggcccgagtcaagcctcattgattttgtcgtgacctgtcagggaagtattcccactgaagtgtgtacaattatctcagaccccacgtgtgaaattacgcaaaatacggtatgctctccggtggatgtggacgagatgtgcctcctaacagtccgcagaacttttaacggtagtggcacctactgcgttaatctgacgttgggagatgatacttccctcgccctgacaagtacgcttatttctgtccccgaccgggatccagcatcgccactgagaatggctaacagcgctctgatttccgtgggctgtctcgctatctttgttaccgtgatctcactgctggtgtacaaaaaacacaaggaatacaatccgattgagaactccccaggaaacgtcgtacggtccaaagggctgtccgtgttcctgaacagagccaaagccgtgttcttccctgggaaccaggaaaaggaccctctgcttaagaatcaagaattcaaaggagtttcttag

SEQ ID NO: 21443 - DNA, 1824 bp, Artificial Sequence
  derived and/or modified sequence
atgatactgccagaagccctctacttaatcaaaattgaacgcgaagcccctcagatgcctgaggaacattgttgttcttggtggacaggacccgaggagttctcaatggaatgcctatattacttcctaggcttcctgctgctcgcagcacgattgcctctcgatgccgcaaaacgctttcacgatgtgctgggaaatgaaagaccgtccgcctacatgcgcgaacacaatcagctgaatggctggtccagtgatgagaacgattggaatgagaagctataccctgtttggaagaggggcgatatgcggtggaagaattcttggaaggggggacgggtgcaggctgtgctcacgtcagatagtccagctttggttggctcaaacatcacattcgccgtcaatctcatattcccaaggtgtcaaaaggaagacgccaacggaaatatcgtctatgaaaaaaattgccggaacgaagctgggctgagtgctgacccatacgtatacaactggacagcctggtctgaagactctgatggagaaaatggaacaggacagagtcaccataatgtcttccctgatggcaaaccatttccccaccatcccggttggcggcgatggaatttcatctacgtgttccatacgctgggacagtattttcaaaagctcggccgttgctcggtgcgcgtcagcgttaacacggcgaacgtgacactgggaccacaactgatggaggttaccgtgtaccgcagacatgggcgagcttatgttcccatagcacaggtgaaagacgtctacgtagtgaccgaccagattccagtgtttgtcacaatgtttcagaagaatgatcgtaacagcagcgacgaaacttttctgaaagacttacccattatgttcgatgttttaattcatgatccaagccacttcctgaactattcaaccatcaattacaagtggagcttcggcgacaacactgggctctttgtgtctacaaaccacacagtgaaccacacatacgtgttgaacggcaccttcagcttgaatttgactgtcaaggctgccgcaccaggcccttgccccccacctccgcctcctccacgaccatcaaaacccacaccaagtttggcaactactctgaaatcttacgattctaacacccccggtccagccggagacaacccgctggaactgagtcgtatccccgatgagaactgtcagattaaccgctatggacatttccaagccacaattaccattgtcgagggaatactcgaggtaaacatcattcagatgactgatgtgttgatgcccgtgccatggcctgaatcctcactaattgatttcgtggtgacctgtcagggttctatacccactgaagtctgcacaataattagcgaccccacgtgtgagatcacacagaataccgtctgtagtccagtagacgtcgatgaaatgtgcctgctgaccgttagaaggaccttcaatgggtcaggaacatactgtgtaaatctgactctaggtgatgatacttctctggccttgacaagcactctgatctcagtccccgaccgagacccagcctctccattgcggatggctaactcagctctaatctctgtgggctgtctggcaattttcgtgaccgtcatctccctgctggtctataagaaacataaagaatataaccctattgaaaatagccccggaaatgttgtgagatctaagggactttcagtgtttttgaaccgcgcaaaagccgtcttctttccaggtaaccaagagaaagatccgctgttgaaaaatcaagagtttaagggcgtcagctag

SEQ ID NO: 21444 - DNA, 1545 bp, Artificial Sequence
  derived and/or modified sequence
atggaatgcctgtactacttcctcggctttcttctgctcgccgcaagattacccctggacgccgctaaaaggttccacgacgttctcggcaatgaacgcccttccgcttacatgcgcgaacacaatcaactgaacggctggtcctccgatgagaacgattggaatgagaagctgtatcccgtatggaaacggggtgacatgcggtggaaaaattcctggaagggtggacgcgtgcaagccgtgctgacatctgacagtcccgctttggtgggttctaatatcacttttgctgtgaatcttatcttcccccgatgccagaaggaagatgcgaacggaaatatcgtgtatgagaagaactgtcggaacggacagtactttcaaaaacttggtaggtgcagcgtccgggtgagcgttaacactgctaacgtgacccttggtccgcagctgatggaagtaaccgtctataggcggcacggcagggcctacgtgcccatcgctcaagttaaagatgtgtacgtggtgaccgatcagatcccggtgtttgtaactatgttccagaagaacgacaggaacagttcagacgagacttttctgaaagacttgcctatcatgttcgacgtactcattcatgatccctcgcacttcttgaattacagcacaataaattacaaatggtccttcggcgataatacaggcctctttgtgtctactaaccatacggtaaatcatacgtacgtgcttaatggcaccttctctctgaacctgacagtcaaggctgctgcacctggtccttgcccccctcctccacctccaccacgcccatcaaaacccaccccttctctggctaccactcttaaatcatacgattccaacacacctggacctgctggggacaacccgctggagttgagccgcattcctgacgaaaattgtcagattaataggtatggtcacttccaggccaccattaccatcgtagagggcatcttggaggtgaacatcatacagatgacagatgtgcttatgcccgtcccgtggccagagagctctcttattgacttcgtcgtcacatgtcaaggctccattcctacagaggtctgtaccattatctctgatcccacatgtgaaatcactcagaacacagtatgtagcccagtggacgtggatgagatgtgtctactaacggtgcgcagaacattcaatggctcaggcacctactgcgtcaaccttacgctcggcgacgacacatctttggctctgacgtcaacgttaattagcgtgccggaccgtgatccagcttccccactcaggatggctaattcagccttgatctccgtgggttgtctggcgattttcgtgaccgttatttcacttcttgtgtacaagaaacacaaagagtataacccaatcgaaaattcgccagggaacgtagtaaggtccaagggactaagcgttttccttaaccgggctaaggcggtattcttccctggaaaccaggaaaaagaccctctgctgaaaaaccaggagtttaagggtgttagttag

SEQ ID NO: 21445 - DNA, 81 bp, Artificial Sequence
  derived and/or modified sequence
ttcctgatggacaagagcagcctgaccggcgccctgtgcagcatcaccctggccagcccctgtggaaccccaggaatctag

SEQ ID NO: 21446 - protein, 98 aa, Artificial Sequence
  derived and/or modified sequence
MWNPNAGGPPHPVPQPGYPGCQPLGPYPPPYPPPAPGIPPVNPLAPGMVGPAVIVDKKMQKKMKKAHKKMHKHQKHHKYHKHGKHSSSSSSSSSSDSD

SEQ ID NO: 21447 - protein, 162 aa, Artificial Sequence
  derived and/or modified sequence
MGYLDSIGWRTHLNMWNPNAGQPGPNPYPPNIGCPGGSNPAHPPPINPPFPPGPCPPPPGAPHGNPAFPPGGPPHPVPQPGYPGCQPLGPYPPPYPPPAPGIPPVNPLAPGMVGPAVIVDKKMQKKMKKAHKKMHKHQKHHKYHKHGKHSSSSSSSSSSDSD

SEQ ID NO: 21448 - protein, 508 aa, Artificial Sequence
  derived and/or modified sequence
MVAEAGSMPAASSVKKPFGLRSKMGKWCRHCFPWCRGSGKSNVGTSGDHDDSAMKTLRSKMGKWCRHCFPWCRGSSKSNVGTSGDHDDSAMKTLRSKMGKWCCHCFPCCRGSGKSKVGPWGDYDDSAFMEPRYHVRREDLDKLHRAAWWGKVPRKDLIVMLKDTDMNKKDKQKRTALHLASANGNSEVVKLLLDRRCQLNILDNKKRTALTKAVQCREDECALMLLEHGTDPNIPDEYGNTALHYAIYNEDKLMAKALLLYGADIESKNKHGLTPLLLGVHEQKQQVVKFLIKKKANLNALDRYGRTALILAVCCGSASIVSLLLEQNIDVSSQDLSGQTAREYAVSSHHNVICQLLSDYKEKQMLKVSSENSNPEQDLKLTSEEESQRLKGSENSQPEEMSQEPEINKGGDRKVEEEMKKHGSTHMGFPENLPNGATADNGDDGLIPPRKSRTPESQQFPDTENEQYHSDEQNDTQKQLSEEQNTGILQDEILIHEEKQIEVAENEF

SEQ ID NO: 21449 - DNA, 1527 bp, Artificial Sequence
  derived and/or modified sequence
atggtggccgaggccggcagcatgcccgccgccagcagcgtgaagaagcccttcggcctgagaagcaagatgggcaagtggtgcagacactgcttcccctggtgcagaggcagcggcaagagcaacgtgggcaccagcggcgaccacgacgacagcgccatgaagaccctgagaagcaagatgggcaagtggtgcagacactgcttcccctggtgcagaggcagcagcaagagcaacgtgggcaccagcggcgaccacgacgacagcgccatgaagaccctgagaagcaagatgggcaagtggtgctgccactgcttcccctgctgcagaggcagcggcaagagcaaggtgggcccctggggcgactacgacgacagcgccttcatggagcccagataccacgtgagaagagaggacctggacaagctgcacagagccgcctggtggggcaaggtgcccagaaaggacctgatcgtgatgctgaaggacaccgacatgaacaagaaggacaagcagaagagaaccgccctgcacctggccagcgccaacggcaacagcgaggtggtgaagctgctgctggacagaagatgccagctgaacatcctggacaacaagaagagaaccgccctgaccaaggccgtgcagtgcagagaggacgagtgcgccctgatgctgctggagcacggcaccgaccccaacatccccgacgagtacggcaacaccgccctgcactacgccatctacaacgaggacaagctgatggccaaggccctgctgctgtacggcgccgacatcgagagcaagaacaagcacggcctgacccccctgctgctgggcgtgcacgagcagaagcagcaggtggtgaagttcctgatcaagaagaaggccaacctgaacgccctggacagatacggcagaaccgccctgatcctggccgtgtgctgcggcagcgccagcatcgtgagcctgctgctggagcagaacatcgacgtgagcagccaggacctgagcggccagaccgccagagagtacgccgtgagcagccaccacaacgtgatctgccagctgctgagcgactacaaggagaagcagatgctgaaggtgagcagcgagaacagcaaccccgagcaggacctgaagctgaccagcgaggaggagagccagagactgaagggcagcgagaacagccagcccgaggagatgagccaggagcccgagatcaacaagggcggcgacagaaaggtggaggaggagatgaagaagcacggcagcacccacatgggcttccccgagaacctgcccaacggcgccaccgccgacaacggcgacgacggcctgatcccccccagaaagagcagaacccccgagagccagcagttccccgacaccgagaacgagcagtaccacagcgacgagcagaacgacacccagaagcagctgagcgaggagcagaacaccggcatcctgcaggacgagatcctgatccacgaggagaagcagatcgaggtggccgagaacgagttctag

SEQ ID NO: 21450 - DNA, 1527 bp, Artificial Sequence
  derived and/or modified sequence
atggtagccgaggcagggtccatgcctgcagcatcctctgtgaaaaagccattcggtttgagatccaaaatgggcaagtggtgccggcactgctttccttggtgcagaggctccgggaagtcaaacgtgggcacgtccggtgatcacgatgacagtgctatgaagacgctgagaagtaaaatgggcaagtggtgtagacactgtttcccttggtgccgcggcagcagcaagagcaatgtgggcacatccggggatcatgatgattctgccatgaagacgctaaggtccaagatggggaaatggtgctgccactgcttcccctgctgccgaggaagcggtaaatccaaggtcggcccgtggggcgactatgacgactccgcctttatggagccccggtaccatgttcggcgtgaggacctcgataagctccatcgcgcagcgtggtggggcaaggtcccacgaaaggacttgatcgtgatgttgaaagacactgacatgaataagaaagacaagcagaagaggacagctctacacctcgctagcgcgaacggcaatagtgaagttgttaaactgcttctggatcgccggtgtcagctgaacatcctggacaacaagaagagaacggccctgactaaggcagtgcagtgccgcgaagacgagtgtgctttgatgcttttagagcacggaaccgaccctaacatccccgatgagtacggaaacactgcactgcattatgctatatacaacgaggacaagctgatggcgaaagccctcctgctttacggtgccgatattgaaagtaagaacaagcatgggctcacccctctgctactgggggtgcatgagcagaagcagcaggtggtgaagttcctgatcaaaaaaaaagccaatctcaacgctctggacaggtatggcaggactgcacttatattggctgtgtgctgtgggtcagcttcaatcgtgtcgttgctgctcgagcaaaatatcgacgtcagttcacaggacctgtcaggccagaccgctagggaatacgcagtgtcttctcatcataatgtcatatgtcaattattatcggactataaggaaaagcagatgctcaaggtttcctcggaaaacagcaatccagaacaggaccttaaactgacctcagaggaggagagccagaggttaaaaggttccgaaaattcccagccagaggagatgtcccaggaaccggaaatcaataaaggcggtgatcgcaaggttgaggaggagatgaagaagcacggcagtacgcatatgggctttcccgaaaacttgcctaatggagccacagccgacaacggagacgatgggctcattccgcccagaaagagtaggacacccgaaagtcagcaattcccggatacggagaatgagcagtatcactcagacgagcagaatgacacccagaagcagctttcagaagaacaaaatacaggcatcctgcaggatgagattctcatccacgaagagaagcagatagaagtcgccgagaacgagttctag

SEQ ID NO: 21451 - DNA, 1527 bp, Artificial Sequence
  derived and/or modified sequence
atggtggccgaggccggctccatgcctgctgccagctctgtgaagaagcccttcggcctgcggagcaagatgggcaagtggtgccgccactgcttcccctggtgccggggcagcggcaagagcaatgtgggcaccagcggggaccatgatgacagcgccatgaagaccctgcggagcaagatgggcaagtggtgccgccactgcttcccctggtgccggggcagcagcaagagcaatgtgggcaccagcggggaccatgatgattctgccatgaagaccctgcggagcaagatgggcaagtggtgctgccactgcttcccctgctgccggggcagcggcaagagcaaggtgggcccctggggagactatgatgacagcgccttcatggagccccgctaccacgtgcggcgggaggacctggacaagctgcaccgggccgcctggtggggcaaggtgcccaggaaggacctgattgtgatgctgaaggacacagacatgaacaagaaggacaagcagaagaggacagccctgcacctggccagcgccaatggaaacagcgaggtggtgaagctgctgctggaccggcgctgccagctgaacatcctggacaacaagaagaggacagccctgaccaaggctgtgcagtgccgggaggatgaatgtgccctgatgctgctggagcacggcacagaccccaacatcccagatgaatatggcaacacagccctgcactacgccatctacaatgaagacaagctgatggccaaggccctgctgctgtatggagctgacatcgagagcaagaacaagcacggcctgacccccctgctgctgggcgtgcatgagcagaagcagcaggtggtgaagttcctgatcaagaagaaggccaacctgaatgccctggacagatatggccgcacagccctgatcctggccgtgtgctgcggcagcgccagcatcgtgtccctgctgctggagcagaacattgatgtgagcagccaggacctgagcggccagacagcccgggagtatgctgtgagcagccaccacaacgtcatctgccagctgctgagtgactacaaggagaagcagatgctgaaggtgtcctctgagaacagcaaccctgagcaggacctgaagctgaccagcgaggaggagagccagaggctgaagggcagcgagaacagccagcctgaggagatgagccaggagcctgagatcaacaagggcggggacaggaaggtggaggaggagatgaagaagcacggcagcacccacatgggcttccctgagaacctgcccaatggagccacagctgacaatggagatgatggcctcatcccccccaggaagagcaggaccccagagagccagcagttcccagacacagaaaatgagcagtaccacagtgatgagcagaatgacacccagaagcagctgtctgaggagcagaacacaggcatcctgcaggatgagatcctgatccacgaggagaagcagatcgaggtggctgaaaatgagttctag

SEQ ID NO: 21452 - DNA, 1527 bp, Artificial Sequence
  derived and/or modified sequence
atggtggccgaggccggcagcatgcccgccgccagcagcgtgaagaagccattcgggctacgctctaagatgggcaaatggtgccggcactgttttccatggtgtcgcggatccggtaaatctaacgtggggacctctggagatcacgatgactcagccatgaaaacactgcgaagcaaaatggggaagtggtgtaggcactgctttccttggtgcaggggctcaagcaagagcaacgtggggactagcggagatcacgatgattcagccatgaaaacgctcaggagtaagatgggcaaatggtgctgtcattgtttcccatgctgtcggggtagtggcaaatctaaggtgggaccatggggcgactacgacgacagcgcgtttatggagccacgctatcatgtaagaagggaagatctggataaactccatcgtgctgcctggtgggggaaggttccgcgcaaggatctgattgtcatgcttaaagacacagacatgaataagaaagataagcagaagagaaccgcattgcatctcgcttcagccaatggcaacagtgaggtggtcaagctgttacttgaccgacggtgtcagttgaacattttagataataaaaaaaggacagccttgactaaggcagttcagtgtcgagaagacgaatgcgcactcatgctcctggagcacggaaccgaccccaacataccagacgagtacgggaacaccgccctccactatgccatatacaacgaagataaacttatggctaaagcattactcttatacggagctgacatcgagtctaagaataagcatggactgactccacttctcctcggtgtccatgaacagaaacagcaggtcgttaaattcctgattaaaaagaaagcaaatcttaacgctttggacaggtacggcagaaccgctcttattctggcggtatgctgcggatccgcatcaatcgtttcacttttgctcgagcagaatattgacgttagcagccaggatctgagcggtcagactgctagagagtacgcggtctctagccatcataatgtaatctgccagctgctcagcgattacaaggagaagcagatgctcaaagtgagctcagagaatagcaatcccgagcaggacctgaagctcactagcgaggaggaaagccagagactaaagggctcagagaacagccagcccgaggaaatgagtcaagaacccgagatcaacaaaggaggcgatcggaaagtcgaagaggaaatgaagaaacatggctcaacacacatgggctttcccgaaaacctgcctaacggcgctaccgcggataacggggacgacggtttgatcccaccacggaaaagccggacccccgagagccagcagtttcccgataccgaaaacgaacagtatcattctgacgaacagaatgatacccaaaaacagttgagcgaagagcagaacaccggcattcttcaggacgaaattctgattcatgaggagaagcagatcgaagtggccgaaaatgagttttag

SEQ ID NO: 21453 - DNA, 1527 bp, Artificial Sequence
  derived and/or modified sequence
atggtcgcagaagctgggagcatgcctgcagcttcttcagtaaaaaaaccatttggtctaaggagtaagatgggaaagtggtgtcgccactgctttccatggtgtcggggatccgggaaatcaaacgtcgggactagtggcgaccatgatgactcagcgatgaagacccttaggtccaaaatgggcaagtggtgtagacattgctttccgtggtgtcgcggatcctctaagtcaaacgtgggaacttcgggcgatcacgatgacagcgcgatgaaaaccctgaggtcaaaaatgggaaaatggtgttgccactgctttccctgttgtagagggagcggcaaaagtaaggtcggcccttggggagattacgatgattctgccttcatggagccgagatatcatgtcagaagagaggacctggacaaactccacagagcagcctggtgggggaaggtgcctcggaaggacctcatcgtgatgctgaaagacactgacatgaacaagaaggacaagcagaaacggactgctttacacctcgctagtgcaaatggtaatagcgaggtcgtgaagttgctcctagacaggcgttgccagctaaacattctcgacaacaaaaaacgcacagcccttactaaggccgtccagtgtagggaagacgaatgtgctttgatgctgctcgagcacggaacagatcctaacatcccagatgaatacgggaatacagccctccattatgcaatctacaacgaggacaagctcatggcaaaggctctcctactgtatggagccgacatcgagtccaaaaataagcacgggctaacacccctgctcttgggcgtacatgagcagaagcagcaagtggttaagttcctaatcaaaaagaaggcaaacctcaacgccctcgatcgatatggccgtactgctcttatcctcgcagtctgctgcggctctgcttccatcgtatcattgctcctggaacagaacattgacgttagctcccaggacttatccggacagacagcaagagagtatgcagtgagcagtcatcacaatgtcatttgccagttgttgagtgattacaaagaaaagcagatgctcaaggtgtctagcgagaattcgaacccagagcaggaccttaagctcacttctgaggaggaaagtcaaagactcaagggttcagagaacagccaacctgaggagatgtcccaagaacctgaaatcaacaaaggaggcgatcgtaaagtagaagaggagatgaagaaacacgggtccacacacatgggtttcccagagaatctccctaatggagctaccgcagataacggagatgatggactcatcccgccaaggaaaagtagaacacccgagagtcagcaattccctgatactgaaaatgaacagtaccacagtgacgagcaaaacgacactcagaaacaattaagcgaagagcagaacaccgggatccttcaggatgagatcctgattcacgaggagaagcaaattgaggtggctgaaaacgagttctag

SEQ ID NO: 21454 - DNA, 7062 bp, Artificial Sequence
  derived and/or modified sequence
ggtagacgcgatctgctggctactaccggcctcccctggctgttaaaagcagatggtggctgaggctggttcaatgccggctgcctcctctgtgaagaagccatttggtctcagaagcaagatgggcaagtggtgccgccactgcttcccctggtgcagggggagcggcaagagcaacgtgggcacttctggagaccacgacgattctgctatgaagacactcaggagcaagatgggcaagtggtgccgccactgcttcccctggtgcagggggagcagcaagagcaacgtgggcacttctggagaccacgacgactctgctatgaagacactcaggagcaagatgggcaagtggtgctgccactgcttcccctgctgcagggggagcggcaagagcaaagtgggcccttggggagactacgacgacagcgctttcatggagccgaggtaccacgtccgtcgagaagatctggacaagctccacagagctgcctggtggggtaaagtccccagaaaggatctcatcgtcatgctcaaggacactgacatgaacaagaaggacaagcaaaagaggactgctctacatctggcctctgccaatggaaattcagaagtagtaaaactcctgctggacagacgatgtcaacttaatatccttgacaacaaaaagaggacagctctgacaaaggccgtacaatgccgggaagatgaatgtgcgttaatgttgctggaacatggcactgatccgaatattccagatgagtatggaaataccgctctacactatgctatctacaatgaagataaattaatggccaaagcactgctcttatacggtgctgatatcgaatcaaaaaacaagcatggcctcacaccactgttacttggtgtacatgagcaaaaacagcaagtggtgaaattcttaatcaagaaaaaagcaaatttaaatgcactggatagatatggaagaactgctctcatacttgctgtatgttgtggatcggcaagtatagtcagccttctacttgagcaaaacattgatgtatcttctcaagatctatctggacagacggccagagagtatgctgtttctagtcatcataatgtaatttgccagttactttctgactacaaagaaaaacagatgctaaaagtctcttctgaaaacagcaatccagaacaagacttaaagctgacatcagaggaagagtcacaaaggcttaaaggaagtgaaaatagccagccagaggaaatgtctcaagaaccagaaataaataagggtggtgatagaaaggttgaagaagaaatgaagaagcacggaagtactcatatgggattcccagaaaacctgcctaacggtgccactgctgacaatggtgatgatggattaattccaccaaggaaaagcagaacacctgaaagccagcaatttcctgacactgagaatgaacagtatcacagtgatgaacaaaatgatactcagaagcaactttctgaagaacagaacactggaatattacaagatgagattctgattcatgaagaaaagcagatagaagtggctgaaaatgaattctgagctttctcttagttataagaaagaaaaagacctcttgcatgaaaatagtacgttgcaggaagaaattgtcatgctaagactggaactagacgtaatgaaacatcagagccagctaagagaaaagaaatatttggaggaaattgaaagtgtggaaaaaaagaatgataatcttttaaagggtctacaactgaatgagctcaccatggatgatgatactgccgtgctcgtcattgacaacggctctggcatgtgcaaggccggctttgcaggtgacgatgccccccgggctgtcttcccttccatcgtggggtgccccaggcaccagaacatgatggggggcatgcgtcagatggagtcctatgtgggcaatgaggcccagagcaagagaggcatcctgaccctgaagtaccccatggagcacggcatcatcaccaactgggacgacatggagaagatctggcaccacaccttctacaatgagctgcgtgtggctcccgaggagcaccccatcctgctgaccgaggcacccctgaaccccaaggccaaccgtgagaagatgacccggatcatgtttgagaccttcaacaccccagccatgtacgtggccatccaagccgtgctgtccttgtacacctctggccgtactactggcattgtgatggactctggtgacggggtcacccacactgtgcccatctatgaggggaatgccctcccccatgccaccctgcgcctagacctggctggccgggaactgactgactacctcatgaagatcctcaccgagcgtggctataggttcaccaccatggccgagcgggaaatcgtgcgtgacatcacagagaagctgtgctatgttgccctggacttcgagcaggagatggccacagcggcctccagctcctccctagagaacagctatgagctgcccaacggccaggtcatcaccattagcaacgagcggttccgctgccccgaggtgctcttccagccttgcttcctgggcatggaatcctgtggcatccacgaaactaccttcaactctatcatgaagtctgatgtggacatccacaaagacctgtacaccaacacagtgctatctggtggcaccaccatgtaccctggcattgcccacaggatgcagaaggagatcgctgccctggcgcctagcacgatgaagatcaagattgttgctcctcccaagcgcaagtactccgtgtgggtcggtggctccatcctggcctcgctgtccaccttccagcagatgtggatcagcaagcaggagtatgatgagtcaggcccctccattgtccaccgcaaatgcttctaggtggacgctgacttagttgcattacaccctttcttgacaaaaccaaacttcgcagaaagccacatgagattggtatggctttaattgttttcttatttcattttttgttttgttttttattggcttgactcaggatttaaaaactggaatggtgaaggcgagagcagttggttggagtgagcttcccccaaagttctacaatgtggctgaggactttgatcgtacattgtttttcttttcaatagtcattccaaatattgtgagatgcattgtttcaggaagccccttgcccttctaaaagccaccccacttctctctaaggagaatggcccagtcctctccctaattcacacaggggaggtgatggcattgctttcatgcaaattacgtaatgcaaaattttttgaatctttgcctaaatactttttaattttgttttatttagaatgatcagccttcgcggccccccttttttgtaccccaacttggggtgtatgaaggcttttggtctccctgagagtggctggaggcagccagggcttacctgtactctgacttaaggagagttggaaaaaagtgcacaccttaaaaaaaattcaatgaggaagcattaacaaaaacagtatttctgtacagtggacagcttagcatgttgacaactgagaataaaatgctcagttctgaactggacaatgtaagacacaacgacgaaacactggaaatggaaattcaattacatcattgtagactggctactgctctacatgattgtgaccaaagtcagagagctgaaagagacttctttccagagaacaagacatgaacaggtttatttacagaagacaatgaattctcatttgtctaacctaaaagattacagaatctttctcaacaagtctaatgtagacagtaaaatcaacaggctaaaaattaagttccatgaaacaagataaaactctgagagaaaagatggggcaggccgccatctttcccgttcgggcaacttagtcattccagcctgagggctttggagagtacaaactgaccagggaaagaagagatcccagagcacagcatagctgctttaccaaatcatggccagactgcttctgtaagcaggcccctgatcctgttccacctcactggacaggacctcccaactggggcctccagctacccccaccagcatcccttggccaatggaaatttgaaatgttcctgggacagagctcctggagagaggggcaggccaccacctttgctgtttgggtgactagccgttctggcctgcaggctttggagagcccaagctgacaaggggtagaagaggtgcctcagcacagcacagccacgctacgaaaacatggccagactcttgtttaagtcagtccccgaacacatttctagtcagtgggtgaagtctttcaaccagggtctctggctaccttgactgctgttctctggccgacagaggtctcaggcctccctgagtcagagctcccggggggaggaccagattgtcatctttgctgtttgggtgacccagccatttcagccttagggcttcagagtgtctgaggtagccaggggctgaagtgaacccccagcacagcacagctgctctataaaaacgtggccagactttttctttaagcaagtccctgttcttattcctcctgactaggtaagacttcttaacttgcctccagccacatcttattggtgtgttcagattggcaacgggttcgtacctcagtggtacagagctcccagaggaaggggtaggctatcatcttccctggaaaatacgagtcaattagggacttgaggggacccccagcattccacagcagcccttcagaaaagtggccagactctgtacttgatgggcagatcctcctggcctgtgtctctagccagcccaccactggagctatcaagccagtagcaactcagcagttccttggacagagcttccaggagcaaatgaaatcctttctgccactgcctttgcagtgaactgcccttgctatcctcagaagatatatcacgggagcaaagaccctaagtgccatatcaacacctccaataagctgcagttgacccgaagaacaaggcaatccatctcccacaggtaccacacacactccactactcatcaccagacagggaaccctggcttgggcccacagcacagaccctccatcctgggccgattacactgagtgattgctaactcacatgtctctgggatggagcacccaggagacaagcaaagtggtggagcagcaagtcaggtgatgtggagcccagagggcagggacagctatctctctaggctccacttgcccttgtgagacactttgtcccagcactttaggaatgctgaggtcagaccagccacatctcatgtgcaagattgcccagcagacatcaggtctgagagttccccttttaaaaaaggggacttgcttaaaaaagaagtctagccacgattgtgtagagcagctgtgctgtgctggagattcacttttgagagagttctcctctgagacctgatctttagaggctgggcagtcttgcacatgagatggggctggtctgatctcagcactccttagtctgcttgcctctcccagggccccagcctggccacacctgcttacagggcactctcaggtgcccataccatagtttctgtgctagtggaccgtaccatatcagtggagagctgcagcaaggtggcccctacggccacgcaccagcctgcacattacttctccatactgcagccctttatatggaaacttcctacatcactttgctgtgtgtgtttacacaggtggattttgctttacttgcactgacagcacacaggagtgcagcacacaccccaacccacatcaactgccattaaagaaaagaaatttcagcccataatttcatgtccagcaaaattaggcatcataagtgaaggagaaataagatccttttcagacaagcaaatgctgagggaattcaatatcaccagatctaccttacaagagctcctgaaggaagcactaaatatggaaagaaaaaaccatcaccagccactacaaaaatgcagtgaagaacgcagtgaattacgcagtccagtgatgctaaaaaccaaccacatacgttaagtctgcaaaataaccagctgacagcatgacgacaggataaaatccacacataccattactaaccttaaatgaaaatgggctaaatgctcccattgaaagacacggggcaagctggataaagaaccaagacccactggagtatgctgtcttcaagaaacccatctcacatgcggtggcatacataggctcaaaataaaggaatggagaaaaatatttcaagcaaatggaaaacagaaaaaagcaggtgttgcactcctactttctgacaaaacagactatgcgaataaagataaaaaagagaaggacattacaaaggtggtcctgacctttgataaatctcattgcttgataccaacctgggctgttttaattgcccaaaccaaaaggataatttgctgaggttgtggagcttctcccctgcagagagtccctgatctcccaaaatttggttgagatgtaaggttgattttgctgtacaactccttttctgaagttttactcatttccaaaaaggaaggcaagttttcctgcttccatgacgatggagagcaggcatctcctttcctgagtttcagcttgcttctgacagggaaggtgagtgtaagttttttccagcttctaagatggcagagaacgatcaccagcctgagccttatttccaggtaagtagctgaattagagttttgtcttaaaatttttccttaatgattaaaatgtaagattacccaccagctgcttttaatttctccttagcattagaacactcagtaatcatatgaattgtgcatttgtttgttttgcttaactctttctgtttgtttatgtttggggttttattgttgttgtttcacttttctcccatctcttcctgacttggtcaaatccaaaggaatgttccaaattgtggggagcaaggcatctgaaatggctaaaactcctgtggctgcaaaaaataaaaataaaaaaaaaatataaaaaaataaaca

SEQ ID NO: 21455 - protein, 870 aa, Artificial Sequence
  derived and/or modified sequence
MGNRGMEELIPLVNKLQDAFSSIGQSCHLDLPQIAVVGGQSAGKSSVLENFVGRDFLPRGSGIVTRRPLILQLIFSKTEHAEFLHCKSKKFTDFDEVRQEIEAETDRVTGTNKGISPVPINLRVYSPHVLNLTLIDLPGITKVPVGDQPPDIEYQIKDMILQFISRESSLILAVTPANMDLANSDALKLAKEVDPQGLRTIGVITKLDLMDEGTDARDVLENKLLPLRRGYIGVVNRSQKDIEGKKDIRAALAAERKFFLSHPAYRHMADRMGTPHLQKTLNQQLTNHIRESLPALRSKLQSQLLSLEKEVEEYKNFRPDDPTRKTKALLQMVQQFGVDFEKRIEGSGDQVDTLELSGGARINRIFHERFPFELVKMEFDEKDLRREISYAIKNIHGVRTGLFTPDLAFEAIVKKQVVKLKEPCLKCVDLVIQELINTVRQCTSKLSSYPRLREETERIVTTYIREREGRTKDQILLLIDIEQSYINTNHEDFIGFANAQQRSTQLNKKRAIPNQGEILVIRRGWLTINNISLMKGGSKEYWFVLTAESLSWYKDEEEKEKKYMLPLDNLKIRDVEKGFMSNKHVFAIFNTEQRNVYKDLRQIELACDSQEDVDSWKASFLRAGVYPEKDQAENEDGAQENTFSMDPQLERQVETIRNLVDSYVAIINKSIRDLMPKTIMHLMINNTKAFIHHELLAYLYSSADQSSLMEESADQAQRRDDMLRMYHALKEALNIIGDISTSTVSTPVPPPVDDTWLQSASSHSPTPQRRPVSSIHPPGRPPAVRGPTPGPPLIPVPVGAAASFSAPPIPSRPGPQSVFANSDLFPAPPQIPSRPVRIPPGIPPGVPSRRPPAAPSRPTIIRPAEPSLLD

SEQ ID NO: 21456 - DNA, 2613 bp, Artificial Sequence
  derived and/or modified sequence
atgggcaatagaggcatggaagaacttataccccttgttaataagctgcaggacgcgtttagttcgatcggccaatcatgccatcttgatctgccccagatcgccgtggtgggaggccaaagtgcgggcaaaagttccgtgcttgaaaattttgtgggccgggacttcctgcctcgcggctctgggattgttacaaggaggccacttatactgcagctgatcttcagtaagactgagcatgccgagttccttcattgcaaatcaaaaaaatttacggatttcgatgaggtgagacaggaaatcgaggccgaaacggatcgggtgacaggcactaacaaagggatttctcctgtcccaattaatctgcgcgtttacagcccccacgttcttaatctcaccttgatcgatcttccggggatcacgaaagtccccgtgggggaccagccgccagatatagagtatcagatcaaggacatgatcttacaatttatttcaagagaaagcagtttgatcttggccgttactcccgctaatatggatctcgccaactctgatgcactgaaattggctaaggaggtggatccccaggggctacgtacaattggcgttatcacaaaacttgacttaatggacgaagggaccgacgctagagacgtgctggagaataagcttctgccccttaggagaggctacatcggagtggtaaacagaagccagaaagacatcgagggcaagaaagacatcagagcagcgctcgccgccgagcggaaatttttcctgtcccacccagcttatcggcacatggcagaccggatgggcacaccccacctgcaaaagacactaaatcagcagctaacaaaccatattcgcgaaagccttcccgccctgcgctccaagctccagagccagttgctttcgttggagaaagaggtggaagagtataagaattttaggcctgatgaccccactagaaaaaccaaagccctgcttcaaatggtgcagcaatttggtgtggattttgagaagagaattgaaggaagcggcgatcaagttgatacactggagttaagtgggggggcaagaatcaacagaatcttccacgagcggttccccttcgagctggtgaagatggagtttgacgagaaagatcttcgcagagagattagctacgcaataaagaatattcacggggtacgaacaggcctctttactccagacctcgcgtttgaggccatcgttaaaaagcaagtcgtcaaactgaaggagccttgcctaaaatgcgtcgatctggtgatacaggagttgatcaacacagttcgacagtgcacatcaaaactgtcgagctacccccggctcagggaggagaccgagcggatcgtcaccacttacatcagagaaagagaggggcggaccaaagaccaaattctcctgctaattgatattgaacaatcttatatcaacaccaaccatgaggactttattggttttgccaacgcgcaacagagaagcactcagctgaataagaagcgcgcaattccgaaccagggtgaaattctcgtgatccggcgggggtggctgacgatcaacaatattagcctaatgaaggggggttctaaggagtactggttcgtgcttaccgcagagtctctgagttggtataaggatgaagaggaaaaggagaagaaatatatgctacccctggataaccttaaaattcgggacgtggagaagggcttcatgtccaacaagcacgtttttgctatctttaatactgagcagcggaacgtctataaggatctgagacagattgagctggcctgcgacagccaggaggatgtagacagctggaaggcaagcttcctgcgggccggggtttatcccgagaaagatcaggccgagaatgaagatggcgctcaggagaacacattctctatggaccctcaactcgagcggcaggtggagactattcgaaatctggtcgattcttatgtggccattatcaacaagtcaatccgcgatctgatgcccaagacaattatgcacttgatgattaacaacactaaggcgttcatccaccatgaattactagcgtacctgtatagcagcgccgaccaaagctccctgatggaagaatctgccgatcaggcccagagacgcgacgatatgctgcggatgtaccatgctctgaaagaggcgctgaacattatcggggatatttctacctctacagtgagcacacccgtgcctccgcctgtagacgatacttggctgcaaagcgcatccagtcattcacctacaccacagaggcggcctgtgtcatcaatccacccgccaggtagaccaccagctgtaaggggaccaacacccggtccaccactgattcccgtgcccgttggcgctgcggcatcgttttctgctcccccgattccttctaggcccggcccccagagtgttttcgccaactcagacctgtttccagcccctccccaaattccttctaggcctgttagaatcccccccggtataccgccaggtgtaccatctagacgaccccctgctgctccctctcgccctactattatacggccagcagaaccctcactgttagactag

SEQ ID NO: 21457 - DNA, 2613 bp, Artificial Sequence
  derived and/or modified sequence
atgggcaacagaggcatggaggagctgatccccctggtgaacaagctgcaggatgccttcagcagcatcggccagagctgccacctggacctgccccagattgctgtggtgggcggccagagcgctgggaagagctctgtgctggagaactttgtgggccgggacttcctgccccggggcagcggcatcgtgacccggcggcccctcatcctgcagctgatcttcagcaagacagagcacgccgagttcctgcactgcaagagcaagaagttcacagactttgatgaggtgcggcaggagattgaagctgagacagacagagtgacaggcaccaacaagggcatcagccctgtgcccatcaacctgcgggtgtacagcccccacgtgctgaacctgaccctgattgacctgcccggcatcaccaaggtgcctgtgggggaccagcccccagacatcgagtaccagatcaaggacatgatcctgcagttcatcagccgggagagcagcctcatcctggccgtgaccccagccaacatggacctggccaacagtgatgccctgaagctggccaaggaggtggacccccagggcctgcggaccatcggggtcatcaccaagctggacctgatggatgagggcacagatgccagagatgtgctggagaacaagctgctgcccctgcggcggggctacatcggcgtggtgaacagaagccagaaggacatcgagggcaagaaggacatccgggccgccctggccgctgagaggaagttcttcctgagccacccagcctaccgccacatggctgacaggatgggcaccccccacctgcagaagaccctgaaccagcagctgaccaaccacatccgggagagcctgcctgccctgcggagcaagctgcagagccagctgctgagcctggagaaggaggtggaggagtacaagaacttccggccagatgaccccaccaggaagaccaaggccctgctgcagatggtgcagcagtttggagtggactttgagaagagaattgagggcagcggggaccaggtggacaccctggagctgtctggaggagcccgcatcaaccgcatcttccacgagcgcttcccctttgagctggtgaagatggagtttgatgagaaggacctgcggcgggagatctcctatgccatcaagaacatccacggcgtgaggacaggcctcttcaccccagacctggcctttgaggccatcgtgaagaagcaggtggtgaagctgaaggagccctgcctgaagtgtgtggacctggtgatccaggagctgatcaacacagtgcggcagtgcaccagcaagctgagcagctacccccggctgcgggaggagacagaaagaattgtgaccacctacatccgggagcgggagggccgcaccaaggaccagatcctgctgctgattgatattgagcagagctacatcaacaccaaccacgaggacttcatcggctttgccaatgcccagcagaggagcacccagctgaacaagaagagggccatccccaaccagggcgagatcctggtgatccggcggggctggctgaccatcaacaacatcagcctgatgaagggcggcagcaaggagtactggtttgtgctgacagctgagagcctgtcctggtacaaggatgaggaggagaaggagaagaagtacatgctgcccctggacaacctgaagatcagagatgtggagaagggcttcatgagcaacaagcacgtgtttgccatcttcaacacagagcagagaaatgtgtacaaggacctgcggcagatcgagctggcctgtgacagccaggaggatgtggacagctggaaggccagcttcctgcgggccggcgtgtacccagagaaggaccaggctgaaaatgaagatggagcccaggagaacaccttctccatggacccccagctggagcggcaggtggagaccatccggaacctggtggacagctatgtggccatcatcaacaagagcatccgggacctgatgcccaagaccatcatgcacctgatgatcaacaacaccaaggccttcatccaccacgagctgctggcctacctgtacagcagcgctgaccagagcagcctgatggaggagagcgctgaccaggcccagaggagagatgacatgctgaggatgtaccacgccctgaaggaggccctgaacatcatcggggacatcagcaccagcacagtgtccacccctgtgcccccacctgtggatgacacctggctgcagagcgccagcagccacagccccaccccccagaggaggcctgtgagcagcatccaccccccaggccggcccccagctgtgcggggccccaccccaggccccccactcatccctgtgcctgtgggcgctgctgccagcttcagcgccccacccatccccagcaggcctggcccccagagcgtgtttgccaacagcgacctcttccctgccccaccccagatccccagcaggcctgtgcgcatccccccaggcatccccccaggagtgcccagcagaagacctcctgctgcccccagccggcccaccatcatccggcctgctgagcccagcctgctggactag

SEQ ID NO: 21458 - DNA, 2613 bp, Artificial Sequence
  derived and/or modified sequence
atgggcaaccggggcatggaggagctgatccccctggtgaacaagcttcaggatgccttctcatctattggccagtcttgtcatttggacttaccccagatagccgtcgtaggaggccagagcgccggtaagagctcggtgctggaaaattttgtgggccgcgattttttgcctcgcggcagtggtatagtcacccgaaggcctcttatactgcaactaattttttcgaaaactgagcacgcagaatttctgcactgtaaaagcaagaagtttaccgactttgacgaagtacggcaagagattgaagctgagacagatagagtgacgggtactaataaaggcatttcccctgtccccattaacctaagagtgtactcacctcacgtgcttaatcttaccctcattgaccttcccgggattaccaaagtgcccgtgggcgaccaacctccggatatcgagtaccagattaaggatatgatcttgcaattcatctcccgggagtcaagcctcattctggccgtgaccccggcgaacatggatttggcaaacagcgatgcactcaaactggcaaaggaagtcgatccccagggtctgcgcaccataggcgtgattactaaactggatctgatggacgagggcacggacgctagagacgtgctcgaaaataaactcctaccactcagacgtggatatattggtgtggttaatagaagccaaaaggacatcgaaggtaagaaggacatcagggcggcccttgcagcagaacgcaagttttttctgtcacaccccgcttacaggcatatggcagaccgcatgggtactccgcacctgcagaagacactgaaccagcagctcacgaatcacattagggaaagcctgcccgccctgagatccaaactccagtctcagctgctgtctctggagaaggaagttgaagagtataagaactttcgtccagacgacccgacccgcaaaaccaaggccttgcttcagatggtgcagcaatttggggtggactttgagaagagaatagaaggttcaggcgaccaggtggataccttggagctctccggaggggccagaatcaatcgcatattccatgagagattcccattcgagctggtgaaaatggaattcgatgagaaggatctgcgacgcgaaatcagctacgcaattaaaaacattcacggagtgcggaccggactgtttacacccgacctggctttcgaagccattgtgaaaaagcaggttgtgaagttaaaagagccttgcctgaagtgtgtggacctggtcatccaggaactgattaatacagtccgtcagtgcacctctaagttgtcctcttacccccggcttcgcgaagaaactgaaaggattgtgacaacatacattagagaacgagagggacgcaccaaagatcagatcctcttgctgatagatattgagcagagctacattaatactaatcacgaggatttcattggctttgccaatgcccaacagcggagcacccagctcaataaaaaacgcgcgataccaaaccagggggagatcctggttattcgcagagggtggctgaccataaataatatttccctcatgaaaggcggctccaaggagtattggttcgtgttaacagctgaatctctgtcctggtataaggatgaggaagaaaaggaaaagaagtacatgcttccgctcgataatctgaagattcgggacgtggaaaaaggattcatgtcgaacaaacacgtctttgcaatattcaataccgaacaacgcaacgtctacaaggacttgagacagatcgaactcgcatgtgacagtcaggaagatgtagatagctggaaggctagttttctgagagctggggtgtaccctgagaaggaccaggcggagaacgaagacggcgcgcaggaaaatactttctccatggatccccagctggagagacaagtcgaaacaattagaaatctggtggactcttacgtggctatcatcaataagtctatccgggacctgatgcctaagactatcatgcatttaatgatcaacaataccaaagccttcattcatcatgaactgcttgcgtacctgtactcctctgccgaccagagctccttgatggaagaaagcgctgatcaggcccaacggcgagacgacatgctgcggatgtaccatgccttgaaagaagctctcaacataatcggggacatctccactagcacagtcagcacaccggtgcccccgcctgtggacgatacatggctccagtctgcgagtagccactctccaactccccagagacgtcccgtgagttccatacacccaccggggaggcccccagcagtacgagggcccacacccgggccacctctgatacccgtacctgtcggcgccgctgcatcattttctgcgccccctatcccctctagacccgggcctcagagtgtatttgcgaattccgacctgtttccagctcctccccagattcctagccgtcctgtacggatcccacctggcatccccccaggggtcccttcccgccgccccccagcagcgccttctcggcctaccatcatcaggcccgctgaaccctctctgctcgattag

SEQ ID NO: 21459 - DNA, 2613 bp, Artificial Sequence
  derived and/or modified sequence
atgggtaatcggggtatggaagagctgatcccactggttaacaagcttcaggacgcattttcctcaattggccagtcatgtcatctggacttgcctcagatcgctgttgtcggaggccagtcagccggtaaatcaagtgttttggaaaacttcgttgggagggacttcttgcctagaggctctggtatagtcacaagaaggcctttaattctgcagctcattttcagtaaaaccgagcatgccgaatttcttcattgcaagtcaaagaaatttactgactttgacgaagtgcgtcaagagatcgaggccgaaaccgacagagttacgggtacaaacaagggtataagtcctgtaccaatcaaccttcgtgtatatagtccccatgtgctaaatctcacacttattgacctgcctgggatcactaaggtccccgtcggggaccaacccccagatatcgagtaccagatcaaggatatgatcctgcagttcatcagccgagagtcctccctaatcctggcggtgacaccagctaacatggacctggcgaactccgacgccttgaagttagcaaaggaagtcgatcctcagggcctgagaaccataggcgtaataactaagctcgacttaatggacgagggaaccgacgccagagacgtgttagagaacaaactgctacctctgaggaggggatatatcggcgtagtgaatcgatcccagaaggatatcgaggggaagaaagacatccgggcagcacttgcagcggagagaaagttcttcttgagtcatccggcatacaggcacatggcagacagaatggggacaccccatcttcagaaaacgctgaatcagcagctcactaatcacatccgggaaagtctgcctgcattgagatccaagctgcagtcccagttgttatctctggagaaggaagtagaggaatacaagaacttccgtccagatgaccctacgaggaagacgaaagccctgctgcaaatggtccagcagtttggcgtggactttgaaaagaggatcgagggctctggcgatcaggtagatacactggagctgagcgggggtgcccgtattaaccgaattttccacgagcgatttccctttgagttggttaagatggagttcgatgagaaagaccttcgtagagaaattagttacgctataaagaacattcatggcgtgcggaccgggctgttcaccccggatctggcgtttgaggccattgtcaaaaagcaggtggtcaaattaaaggaaccttgtctcaaatgtgttgatctggtgattcaagagcttattaataccgtgaggcagtgcactagcaagctgtccagttaccctcgcttaagggaagaaaccgagcggatagtgacaacctacatacgggaacgggaagggaggaccaaagatcaaatcctgctcttgatagatatagagcaaagctatattaacactaatcacgaggatttcattgggtttgcgaatgctcagcaacgctctactcagctgaataagaagagagcgattccaaaccagggggagatcctcgtcatacgaagaggctggctcacgatcaacaacatcagtctgatgaagggaggctcgaaggagtactggttcgtcctcaccgctgaaagcctaagctggtacaaggatgaggaggagaaagaaaaaaaatacatgctccccctggataatttaaaaattagagacgtcgaaaaggggtttatgtccaacaagcacgtgttcgccatctttaacaccgagcagcgaaatgtgtacaaggacctgaggcaaatcgagctcgcatgcgatagccaggaggacgtggattcctggaaggcatcattcctacgcgcaggcgtctaccccgagaaggatcaggcagaaaacgaggacggagctcaagagaataccttctctatggacccccagctagagcggcaggtggagactatcaggaatctggttgattcttacgtggcaatcataaacaagtccataagagacttgatgcctaagaccattatgcatctgatgatcaacaatacaaaagcatttattcatcatgagctcctggcctatctatacagcagtgccgatcagtcttccctgatggaagaatctgccgaccaagcccagaggcgagacgacatgctgcgcatgtatcacgctctgaaagaggcactgaatatcatcggagatatttctacaagcaccgtcagcaccccggtgcctcctccggtcgacgatacatggctgcagagtgcgtccagccacagccccacaccccagcgcaggcctgtctccagtattcacccacctggtagaccgccagctgtccgcggaccgactcctggcccaccactcatccccgtgccagtgggcgctgctgcctctttctctgctcccccaattccttccaggcctggaccccagtccgtgttcgccaactcagacttgttccccgctcctccacagatcccaagcagaccagtgcggatccctccagggattccccctggagtgccgtctagacgacctcccgcagcgccttctcgacccacaattatcaggcccgcagagcccagcctgctggattag

SEQ ID NO: 21460 - DNA, 2613 bp, Artificial Sequence
  derived and/or modified sequence
atgggcaacagaggcatggaggagctgatccccctggtgaacaagctgcaggacgccttcagcagcatcggccagagctgccacctggacctgccccagatcgccgtggtgggcggccagagcgccggcaagagcagcgtgctggagaacttcgtgggcagagacttcctgcccagaggcagcggcatcgtgaccagaagacccctgatcctgcagctgatcttcagcaagaccgagcacgccgagttcctgcactgcaagagcaagaagttcaccgacttcgacgaggtgagacaggagatcgaggccgagaccgacagagtgaccggcaccaacaagggcatcagccccgtgcccatcaacctgagagtgtacagcccccacgtgctgaacctgaccctgatcgacctgcccggcatcaccaaggtgcccgtgggcgaccagccccccgacatcgagtaccagatcaaggacatgatcctgcagttcatcagcagagagagcagcctgatcctggccgtgacccccgccaacatggacctggccaacagcgacgccctgaagctggccaaggaggtggacccccagggcctgagaaccatcggcgtgatcaccaagctggacctgatggacgagggcaccgacgccagagacgtgctggagaacaagctgctgcccctgagaagaggctacatcggcgtggtgaacagaagccagaaggacatcgagggcaagaaggacatcagagccgccctggccgccgagagaaagttcttcctgagccaccccgcctacagacacatggccgacagaatgggcaccccccacctgcagaagaccctgaaccagcagctgaccaaccacatcagagagagcctgcccgccctgagaagcaagctgcagagccagctgctgagcctggagaaggaggtggaggagtacaagaacttcagacccgacgaccccaccagaaagaccaaggccctgctgcagatggtgcagcagttcggcgtggacttcgagaagagaatcgagggcagcggcgaccaggtggacaccctggagctgagcggcggcgccagaatcaacagaatcttccacgagagattccccttcgagctggtgaagatggagttcgacgagaaggacctgagaagagagatcagctacgccatcaagaacatccacggcgtgagaaccggcctgttcacccccgacctggccttcgaggccatcgtgaagaagcaggtggtgaagctgaaggagccctgcctgaagtgcgtggacctggtgatccaggagctgatcaacaccgtgagacagtgcaccagcaagctgagcagctaccccagactgagagaggagaccgagagaatcgtgaccacctacatcagagagagagagggcagaaccaaggaccagatcctgctgctgatcgacatcgagcagagctacatcaacaccaaccacgaggacttcatcggcttcgccaacgcccagcagagaagcacccagctgaacaagaagagagccatccccaaccagggcgagatcctggtgatcagaagaggctggctgaccatcaacaacatcagcctgatgaagggcggcagcaaggagtactggttcgtgctgaccgccgagagcctgagctggtacaaggacgaggaggagaaggagaagaagtacatgctgcccctggacaacctgaagatcagagacgtggagaagggcttcatgagcaacaagcacgtgttcgccatcttcaacaccgagcagagaaacgtgtacaaggacctgagacagatcgagctggcctgcgacagccaggaggacgtggacagctggaaggccagcttcctgagagccggcgtgtaccccgagaaggaccaggccgagaacgaggacggcgcccaggagaacaccttcagcatggacccccagctggagagacaggtggagaccatcagaaacctggtggacagctacgtggccatcatcaacaagagcatcagagacctgatgcccaagaccatcatgcacctgatgatcaacaacaccaaggccttcatccaccacgagctgctggcctacctgtacagcagcgccgaccagagcagcctgatggaggagagcgccgaccaggcccagagaagagacgacatgctgagaatgtaccacgccctgaaggaggccctgaacatcatcggcgacatcagcaccagcaccgtgagcacccccgtgcccccccccgtggacgacacctggctgcagagcgccagcagccacagccccaccccccagagaagacccgtgagcagcatccacccccccggcagaccccccgccgtgagaggccccacccccggcccccccctgatccccgtgcccgtgggcgccgccgccagcttcagcgccccccccatccccagcagacccggcccccagagcgtgttcgccaacagcgacctgttccccgcccccccccagatccccagcagacccgtgagaatcccccccggcatcccccccggcgtgcccagcagaagaccccccgccgcccccagcagacccaccatcatcagacccgccgagcccagcctgctggactag

SEQ ID NO: 21461 - DNA, 3633 bp, Artificial Sequence
  derived and/or modified sequence
gagaaccggatgaggcggcgaccgtgaggccgagccgggagcgggcgtcttgccgaggcccgggcgggcggggagcaacggctacagacgccgcggggccaggtcgttgagggtcggcggcgggcgaggagcgcagggcgctcgggccgggggccgccggcgccatgggcaaccgcgggatggaagagctgatcccgctggtcaacaaactgcaggacgccttcagctccatcggccagagctgccacctggacctgccgcagatcgctgtagtgggcggccagagcgccggcaagagctcggtgctggagaacttcgtgggccgggacttccttccccgcggttcaggaatcgtcacccggcggcctctcattctgcagctcatcttctcaaaaacagaacatgccgagtttttgcactgcaagtccaaaaagtttacagactttgatgaagtccggcaggagattgaagcagagaccgacagggtcacggggaccaacaaaggcatctccccagtgcccatcaaccttcgagtctactcgccacacgtgttgaacttgaccctcatcgacctcccgggtatcaccaaggtgcctgtgggcgaccagcctccagacatcgagtaccagatcaaggacatgatcctgcagttcatcagccgggagagcagcctcattctggctgtcacgcccgccaacatggacctggccaactccgacgccctcaagctggccaaggaagtcgatccccaaggcctacggaccatcggtgtcatcaccaagcttgacctgatggacgagggcaccgacgccagggacgtcttggagaacaagttgctcccgttgagaagaggctacattggcgtggtgaaccgcagccagaaggatattgagggcaagaaggacatccgtgcagcactggcagctgagaggaagttcttcctctcccacccggcctaccggcacatggccgaccgcatgggcacgccacatctgcagaagacgctgaatcagcaactgaccaaccacatccgggagtcgctgccggccctacgtagcaaactacagagccagctgctgtccctggagaaggaggtggaggagtacaagaactttcggcccgacgaccccacccgcaaaaccaaagccctgctgcagatggtccagcagtttggggtggattttgagaagaggatcgagggctcaggagatcaggtggacactctggagctctccgggggcgcccgaatcaatcgcatcttccacgagcggttcccatttgagctggtgaagatggagtttgacgagaaggacttacgacgggagatcagctatgccattaagaacatccatggagtcaggaccgggcttttcaccccggacttggcattcgaggccattgtgaaaaagcaggtcgtcaagctgaaagagccctgtctgaaatgtgtcgacctggttatccaggagctaatcaatacagttaggcagtgtaccagtaagctcagttcctacccccggttgcgagaggagacagagcgaatcgtcaccacttacatccgggaacgggaggggagaacgaaggaccagattcttctgctgatcgacattgagcagtcctacatcaacacgaaccatgaggacttcatcgggtttgccaatgcccagcagaggagcacgcagctgaacaagaagagagccatccccaatcagggggagatcctggtgatccgcaggggctggctgaccatcaacaacatcagcctgatgaaaggcggctccaaggagtactggtttgtgctgactgccgagtcactgtcctggtacaaggatgaggaggagaaagagaagaagtacatgctgcctctggacaacctcaagatccgtgatgtggagaagggcttcatgtccaacaagcacgtcttcgccatcttcaacacggagcagagaaacgtctacaaggacctgcggcagatcgagctggcctgtgactcccaggaagacgtggacagctggaaggcctcgttcctccgagctggcgtctaccccgagaaggaccaggcagaaaacgaggatggggcccaggagaacaccttctccatggacccccaactggagcggcaggtggagaccattcgcaacctggtggactcatacgtggccatcatcaacaagtccatccgcgacctcatgccaaagaccatcatgcacctcatgatcaacaatacgaaggccttcatccaccacgagctgctggcctacctatactcctcggcagaccagagcagcctcatggaggagtcggctgaccaggcacagcggcgggacgacatgctgcgcatgtaccatgccctcaaggaggcgctcaacatcatcggtgacatcagcaccagcactgtgtccacgcctgtacccccgcctgtcgatgacacctggctccagagcgccagcagccacagccccactccacagcgccgaccggtgtccagcatacacccccctggccggcccccagcagtgaggggccccactccagggccccccctgattcctgttcccgtgggggcagcagcctccttctcggcgcccccaatcccatcccggcctggaccccagagcgtgtttgccaacagtgacctcttcccagccccgcctcagatcccatctcggccagttcggatccccccagggattcccccaggagtgcccagcagaagaccccctgctgcgcccagccggcccaccattatccgcccagccgagccatccctgctcgactaggcctcgaggggggcgtgctctcgggggggcctcacgcacccgcggcgcaggagcttcagtggtctggggccctccgccgcccctatgctgggaccaggctcccagtgggcagccctggcctcttccttaacgctggccccggtccagggccggcccctgtgcctggctggacaccgcactgcgcaaaggggccctggagctccaggcagggggcgctggggtgttgcactttgggggatggagtctcagggtggcagaggggggaccagaacccttgacaccatcctgaatgaggggtccagcctgggggggactctaccaaggtcttcttgggctgggaaagcccatgtagggcaggccttctataagtgcgggcaccaagggcgcctacatccccaggccttgctggggtgcaggggtatatcaacttcccattagcaggagctccccagcggcaagcctggcccagtgggctcggtagtgcccagctggcaggcctgaggtgtacatagtccttcccggccatattaaccacacagcctgagcctggcccagcctcggctgccagaggtgcctttgctaggcccggagccgttggcccgggccggccttgccctattcctctcctcctcctcctcctgggtcccccagggtggctgggcttgggctatgtgggtggtggtggcggggggtcttgggggcctctcagctcccgcccatgcctccctgatgggtgggcccagggcggcctctctctgaggagacctcacccactcctcgctcagtttgaccactgtaagtgcctgcactctgtattctattaataaactaaaataaagggaagacgctgctggtg

SEQ ID NO: 21462 - protein, 870 aa, Artificial Sequence
  derived and/or modified sequence
MGNRGMEELIPLVNKLQDAFSSIGQSCHLDLPQIAVVGGQSAGKSSVLENFVGRDFLPRGSGIVTRRPLILQLIFSKTEHAEFLHCKSKKFTDFDEVRQEIEAETDRVTGTNKGISPVPINLRVYSPHVLNLTLIDLPGITKVPVGDQPPDIEYQIKDMILQFISRESSLILAVTPANMDLANSDALKLAKEVDPQGLRTIGVITKLDLMDEGTDARDVLENKLLPLRRGYIGVVNRSQKDIEGKKDIRAALAAERKFFLSHPAYRHMADRMGTPHLQKTLNQQLTNHIRESLPALRSKLQSQLLSLEKEVEEYKNFRPDDPTRKTKALLQMVQQFGVDFEKRIEGSGDQVDTLELSGGARINRIFHERFPFELVKMEFDEKDLRREISYAIKNIHGVRTGLFTPDMAFEAIVKKQIVKLKEPSLKCVDLVVSELATVIKKCAEKLSSYPRLREETERIVTTYIREREGRTKDQILLLIDIEQSYINTNHEDFIGFANAQQRSTQLNKKRAIPNQPETLVIRRGWLTINNISLMKGGSKEYWFVLTAESLSWYKDEEEKEKKYMLPLDNLKIRDVEKGFMSNKHVFAIFNTEQRNVYKDLRQIELACDSQEDVDSWKASFLRAGVYPEKDQAENEDGAQENTFSMDPQLERQVETIRNLVDSYVAIINKSIRDLMPKTIMHLMINNTKAFIHHELLAYLYSSADQSSLMEESADQAQRRDDMLRMYHALKEALNIIGDISTSTVSTPVPPPVDDTWLQSASSHSPTPQRRPVSSIHPPGRPPAVRGPTPGPPLIPVPVGAAASFSAPPIPSRPGPQSVFANSDLFPAPPQIPSRPVRIPPGIPPGVPSRRPPAAPSRPTIIRPAEPSLLD

SEQ ID NO: 21463 - protein, 870 aa, Artificial Sequence
  derived and/or modified sequence
MGNRGMEELIPLVNKLQDAFSSIGQSCHLDLPQIAVVGGQSAGKSSVLENFVGRDFLPRGSGIVTRRPLILQLIFSKTEHAEFLHCKSKKFTDFDEVRQEIEAETDRVTGTNKGISPVPINLRVYSPHVLNLTLIDLPGITKVPVGDQPPDIEYQIKDMILQFISRESSLILAVTPANMDLANSDALKLAKEVDPQGLRTIGVITKLDLMDEGTDARDVLENKLLPLRRGYIGVVNRSQKDIEGKKDIRAALAAERKFFLSHPAYRHMADRMGTPHLQKTLNQQLTNHIRESLPALRSKLQSQLLSLEKEVEEYKNFRPDDPTRKTKALLQMVQQFGVDFEKRIEGSGDQVDTLELSGGARINRIFHERFPFELVKMEFDEKDLRREISYAIKNIHGVRTGLFTPDMAFEAIVKKQIVKLKEPSLKCVDLVVSELATVIKKCAEKLSSYPRLREETERIVTTYIREREGRTKDQILLLIDIEQSYINTNHEDFIGFANAQQRSTQLNKKRAIPNQGEILVIRRGWLTINNISLMKGGSKEYWFVLTAESLSWYKDEEEKEKKYMLPLDNLKIRDVEKGFMSNKHVFAIFNTEQRNVYKDLRQIELACDSQEDVDSWKASFLRAGVYPEKDQAENEDGAQENTFSMDPQLERQVETIRNLVDSYVAIINKSIRDLMPKTIMHLMINNTKAFIHHELLAYLYSSADQSSLMEESADQAQRRDDMLRMYHALKEALNIIGDISTSTVSTPVPPPVDDTWLQSASSHSPTPQRRPVSSIHPPGRPPAVRGPTPGPPLIPVPVGAAASFSAPPIPSRPGPQSVFANSDLFPAPPQIPSRPVRIPPGIPPGVPSRRPPAAPSRPTIIRPAEPSLLD

SEQ ID NO: 21464 - DNA, 2613 bp, Artificial Sequence
  derived and/or modified sequence
atgggaaatcggggcatggaagagctgattcctctagttaataaattgcaggatgcattttcctcaatcgggcagtcttgtcacctggatctcccccagatagcggtcgttggcgggcaatcagcgggtaagtcttctgtcctggagaattttgtggggagagacttcctgccacgggggtccggcattgtaacacgccgcccccttatcttacagctcatcttcagcaaaacagagcatgcagagttcttgcactgcaaatcaaagaagttcacagattttgacgaggtaagacaggagatcgaggctgagactgatagggtcaccgggaccaacaaagggataagccctgtgcctattaacttgagggtgtactctcctcatgtcctcaacctcaccttgattgatctccccggcatcaccaaagttcccgtaggagaccagccccctgacatcgagtatcaaatcaaagatatgatactgcagttcatctctcgagagtcctcgctcatactggctgtgacccctgcaaatatggacctcgccaacagtgatgctcttaaactggcgaaagaagtggatcctcaaggcttaaggacaattggggtcataaccaagctggaccttatggacgagggcacggacgcccgagacgtcctcgagaacaaactgctccctctgcgccgcggctacattggggtggtcaatcgctctcaaaaggacatagaggggaagaaggacattcgggcagcgcttgccgccgaaaggaagttctttctttcgcatcccgcctaccggcacatggccgatagaatggggacaccacacctgcaaaagacgcttaaccagcagcttactaaccatataagagaaagcttgcctgcattgcggtctaagcttcaaagtcagctgctgagtctggaaaaggaagtcgaggaatataagaatttccgtcccgatgacccgacccgaaagacgaaggctcttctgcagatggtccaacaatttggggttgatttcgagaaaagaatcgagggatccggcgaccaggttgatacgttagaactgtccggaggagctaggattaaccgtatattccatgagcgcttccccttcgagttagtgaagatggagttcgacgagaaagacctgcgaagggaaatctcttatgccatcaaaaatatccatggtgtgcggaccggactgtttacccccgacatggctttcgaggctatcgtcaagaaacagatagtgaaactgaaggagccttctctgaagtgtgtggacctggtggttagcgagctcgcgaccgttatcaagaagtgcgcagagaagcttagtagttaccccaggcttagggaagaaacagagaggattgtcaccacttacatacgcgagcgcgagggacggaccaaagatcagatcctcctgctgattgacattgaacagagttacatcaacacaaatcacgaggactttattggcttcgccaatgcccaacagaggagcacacagctgaataaaaaaagggccatccccaaccagccagagacgctcgtgatccggaggggctggctcactatcaacaacatctctttaatgaagggcggcagcaaagaatactggttcgtcctgaccgccgagtcactaagctggtataaggatgaggaggagaaagagaaaaaatatatgttacccctcgacaatctcaaaattagggatgtcgagaagggttttatgagtaacaaacatgtgttcgccatattcaacacagagcagagaaatgtctacaaggacctgcggcagatcgaacttgcttgcgactctcaagaggatgtcgatagttggaaggcttctttcctacgtgcaggggtctatcctgagaaagaccaagcagagaatgaggacggggctcaggagaacacgttctctatggacccccaattggaacgacaggttgaaaccattaggaatttagtagactcttatgttgccattattaacaaaagcattagagatttaatgccaaagaccattatgcatcttatgatcaacaacaccaaagcctttattcaccatgagttactggcttatttgtattcttctgctgatcagtcctccctcatggaggagtcggcagatcaggcacagagaagagacgatatgttacgcatgtatcatgccctcaaggaggctttaaacataatcggcgatatttctacaagtacagtgtccacacccgtacccccacccgtggatgatacatggctacagtcggcctcctctcactctcccacaccacagcggcgtcctgtttcatccatacatcctcctgggaggccccccgccgtaaggggtcctacccccggcccgccgctaattccagtgcccgtcggcgcagccgcctccttttcggcccccccgataccatcacgaccagggcctcaatccgtcttcgcaaattcagacttatttcctgcacctccacagataccctctaggcccgtgagaatcccacccgggattccacccggcgtgccttccagaaggccacccgcagcccctagccgcccaaccataatccggccggctgagcctagcctcctggattag

SEQ ID NO: 21465 - DNA, 2613 bp, Artificial Sequence
  derived and/or modified sequence
atgggcaaccgcgggatggaagaattaattccccttgtcaacaagctgcaggatgccttcagcagcatcgggcagtcctgccatctggacctccctcagattgcagttgttggagggcaaagcgcaggaaagagcagcgtgttagagaatttcgtggggagagactttctcccaagaggaagtgggatcgtgacccggcggcccctgatacttcagttaattttctctaagaccgaacacgccgaatttttacactgcaagtctaaaaagttcacagattttgatgaggtgcgacaggagatcgaagctgaaacagaccgcgtcactgggaccaacaagggtataagcccagtgcccattaacttaagggtgtacagcccccacgtcctgaatctcactctcatcgatctcccaggtatcacgaaggtacctgtaggggatcagccgcccgacattgaataccagattaaggacatgatactgcagttcatcagcagggagtcatccctcattctggccgtcacacccgcaaacatggacctcgcaaattcagacgcactaaaattagcaaaggaggtcgatccccaagggttgcggactattggcgtgattacaaaattggatttgatggacgagggcacagacgcacgcgacgtactagagaataagcttctgcctctgcggaggggctacataggtgtggtgaaccgatctcagaaggacattgaaggaaagaaggacatcagagctgcccttgccgcagagcggaagttttttctctcacaccccgcgtatcggcatatggccgatagaatggggacaccacatcttcaaaagacactcaatcagcagttgaccaaccacatccgggagtcgttgcccgctcttcgctccaagctccaaagccagctgctttctctggagaaagaggtagaggagtataaaaatttccgaccggacgacccgaccagaaagacaaaagctttgttgcagatggtccagcagtttggcgtggattttgagaagcggatcgaggggtcaggcgaccaggttgacactctggaactcagcgggggagctaggattaacagaatcttccacgagagatttccattcgagcttgtgaagatggaattcgatgagaaggacctccgacgggagattagttacgctatcaagaacattcatggagtgagaaccgggctcttcaccccagacatggcttttgaggcaatcgtcaaaaaacagattgttaaactgaaggagccatcattgaagtgcgtggatctagtcgtgtctgaacttgcaactgtcatcaagaagtgcgctgagaaactgagcagctacccccgcctacgagaagagacggaacggatcgtgaccacctacatccgggagagagagggacgtaccaaggaccagattctgcttctgatcgacatcgagcagtcctacatcaatactaaccacgaggattttatcggattcgcgaacgcccagcagcgcagtacacagttgaacaagaagagagcaattccaaatcagggggaaatactcgtcatcagaaggggatggctgactatcaacaacatctcactcatgaaaggggggagtaaggagtactggttcgtccttaccgctgagtctcttagctggtacaaagatgaggaagagaaggagaaaaaatacatgctccccttggataatcttaagatccgagacgtagagaagggatttatgagcaacaagcacgtgttcgcaatttttaacactgagcagcggaatgtgtataaagatctgagacagattgaactggcctgtgactcccaggaggacgttgactcctggaaagcatctttcttacgtgctggtgtgtaccccgagaaggatcaggccgaaaatgaggacggcgcacaggagaataccttttcaatggacccgcagctggaaaggcaggttgagaccatccggaacctggtggactcctacgtggctatcataaacaaatcaattcgtgatctcatgcccaaaaccattatgcatctcatgatcaacaatacgaaagcctttatccatcatgagctgctcgcatacctatattcgtctgccgaccagtctagcctgatggaagaatctgccgatcaggcgcagaggcgcgatgacatgctgagaatgtatcatgccctcaaagaagctctgaatattattggcgacatcagcacatccactgtgtccacacctgttccacctcccgtcgacgatacatggctccagtcggctagtagccacagcccaacgcctcagcgcagaccagtgagttctatacatcctccaggacggcctcccgcagtgcgaggaccgacaccaggccctcccttaattccagttccggttggcgccgccgcaagtttttcggcaccccccatccctagccgtccaggccctcagagcgtgtttgccaattccgatctgttccctgcacccccgcaaatccctagcaggcccgtcagaataccccccggcatccccccaggggtgcctagccggcgaccaccagctgctccttcccgaccaacaatcatcaggccggctgagccctcccttctggactag

SEQ ID NO: 21466 - DNA, 2613 bp, Artificial Sequence
  derived and/or modified sequence
atgggcaacagaggcatggaggagctgatccccctggtgaacaagctgcaggatgccttcagcagcatcggccagagctgccacctggacctgccccagattgctgtggtgggcggccagagcgctgggaagagctctgtgctggagaactttgtgggccgggacttcctgccccggggcagcggcatcgtgacccggcggcccctcatcctgcagctgatcttcagcaagacagagcacgccgagttcctgcactgcaagagcaagaagttcacagactttgatgaggtgcggcaggagattgaagctgagacagacagagtgacaggcaccaacaagggcatcagccctgtgcccatcaacctgcgggtgtacagcccccacgtgctgaacctgaccctgattgacctgcccggcatcaccaaggtgcctgtgggggaccagcccccagacatcgagtaccagatcaaggacatgatcctgcagttcatcagccgggagagcagcctcatcctggccgtgaccccagccaacatggacctggccaacagtgatgccctgaagctggccaaggaggtggacccccagggcctgcggaccatcggggtcatcaccaagctggacctgatggatgagggcacagatgccagagatgtgctggagaacaagctgctgcccctgcggcggggctacatcggcgtggtgaacagaagccagaaggacatcgagggcaagaaggacatccgggccgccctggccgctgagaggaagttcttcctgagccacccagcctaccgccacatggctgacaggatgggcaccccccacctgcagaagaccctgaaccagcagctgaccaaccacatccgggagagcctgcctgccctgcggagcaagctgcagagccagctgctgagcctggagaaggaggtggaggagtacaagaacttccggccagatgaccccaccaggaagaccaaggccctgctgcagatggtgcagcagtttggagtggactttgagaagagaattgagggcagcggggaccaggtggacaccctggagctgtctggaggagcccgcatcaaccgcatcttccacgagcgcttcccctttgagctggtgaagatggagtttgatgagaaggacctgcggcgggagatctcctatgccatcaagaacatccacggcgtgaggacaggcctcttcaccccagacatggcctttgaggccatcgtgaagaagcagatcgtgaagctgaaggagcccagcctgaagtgtgtggacctggtggtgtctgagctggccaccgtcatcaagaagtgtgccgagaagctgagcagctacccccggctgcgggaggagacagaaagaattgtgaccacctacatccgggagcgggagggccgcaccaaggaccagatcctgctgctgattgatattgagcagagctacatcaacaccaaccacgaggacttcatcggctttgccaatgcccagcagaggagcacccagctgaacaagaagagggccatccccaaccagcctgagaccctggtgatccggcggggctggctgaccatcaacaacatcagcctgatgaagggcggcagcaaggagtactggtttgtgctgacagctgagagcctgtcctggtacaaggatgaggaggagaaggagaagaagtacatgctgcccctggacaacctgaagatcagagatgtggagaagggcttcatgagcaacaagcacgtgtttgccatcttcaacacagagcagagaaatgtgtacaaggacctgcggcagatcgagctggcctgtgacagccaggaggatgtggacagctggaaggccagcttcctgcgggccggcgtgtacccagagaaggaccaggctgaaaatgaagatggagcccaggagaacaccttctccatggacccccagctggagcggcaggtggagaccatccggaacctggtggacagctatgtggccatcatcaacaagagcatccgggacctgatgcccaagaccatcatgcacctgatgatcaacaacaccaaggccttcatccaccacgagctgctggcctacctgtacagcagcgctgaccagagcagcctgatggaggagagcgctgaccaggcccagaggagagatgacatgctgaggatgtaccacgccctgaaggaggccctgaacatcatcggggacatcagcaccagcacagtgtccacccctgtgcccccacctgtggatgacacctggctgcagagcgccagcagccacagccccaccccccagaggaggcctgtgagcagcatccaccccccaggccggcccccagctgtgcggggccccaccccaggccccccactcatccctgtgcctgtgggcgctgctgccagcttcagcgccccacccatccccagcaggcctggcccccagagcgtgtttgccaacagcgacctcttccctgccccaccccagatccccagcaggcctgtgcgcatccccccaggcatccccccaggagtgcccagcagaagacctcctgctgcccccagccggcccaccatcatccggcctgctgagcccagcctgctggactag

SEQ ID NO: 21467 - DNA, 2613 bp, Artificial Sequence
  derived and/or modified sequence
atgggcaacagaggcatggaggagctgatccccctggtgaacaagctgcaggatgccttcagcagcatcggccagagctgccacctggacctgccccagattgctgtggtgggcggccagagcgctgggaagagctctgtgctggagaactttgtgggccgggacttcctgccccggggcagcggcatcgtgacccggcggcccctcatcctgcagctgatcttcagcaagacagagcacgccgagttcctgcactgcaagagcaagaagttcacagactttgatgaggtgcggcaggagattgaagctgagacagacagagtgacaggcaccaacaagggcatcagccctgtgcccatcaacctgcgggtgtacagcccccacgtgctgaacctgaccctgattgacctgcccggcatcaccaaggtgcctgtgggggaccagcccccagacatcgagtaccagatcaaggacatgatcctgcagttcatcagccgggagagcagcctcatcctggccgtgaccccagccaacatggacctggccaacagtgatgccctgaagctggccaaggaggtggacccccagggcctgcggaccatcggggtcatcaccaagctggacctgatggatgagggcacagatgccagagatgtgctggagaacaagctgctgcccctgcggcggggctacatcggcgtggtgaacagaagccagaaggacatcgagggcaagaaggacatccgggccgccctggccgctgagaggaagttcttcctgagccacccagcctaccgccacatggctgacaggatgggcaccccccacctgcagaagaccctgaaccagcagctgaccaaccacatccgggagagcctgcctgccctgcggagcaagctgcagagccagctgctgagcctggagaaggaggtggaggagtacaagaacttccggccagatgaccccaccaggaagaccaaggccctgctgcagatggtgcagcagtttggagtggactttgagaagagaattgagggcagcggggaccaggtggacaccctggagctgtctggaggagcccgcatcaaccgcatcttccacgagcgcttcccctttgagctggtgaagatggagtttgatgagaaggacctgcggcgggagatctcctatgccatcaagaacatccacggcgtgaggacaggcctcttcaccccagacatggcctttgaggccatcgtgaagaagcagatcgtgaagctgaaggagcccagcctgaagtgtgtggacctggtggtgtctgagctggccaccgtcatcaagaagtgtgccgagaagctgagcagctacccccggctgcgggaggagacagaaagaattgtgaccacctacatccgggagcgggagggccgcaccaaggaccagatcctgctgctgattgatattgagcagagctacatcaacaccaaccacgaggacttcatcggctttgccaatgcccagcagaggagcacccagctgaacaagaagagggccatccccaaccagggcgagatcctggtgatccggcggggctggctgaccatcaacaacatcagcctgatgaagggcggcagcaaggagtactggtttgtgctgacagctgagagcctgtcctggtacaaggatgaggaggagaaggagaagaagtacatgctgcccctggacaacctgaagatcagagatgtggagaagggcttcatgagcaacaagcacgtgtttgccatcttcaacacagagcagagaaatgtgtacaaggacctgcggcagatcgagctggcctgtgacagccaggaggatgtggacagctggaaggccagcttcctgcgggccggcgtgtacccagagaaggaccaggctgaaaatgaagatggagcccaggagaacaccttctccatggacccccagctggagcggcaggtggagaccatccggaacctggtggacagctatgtggccatcatcaacaagagcatccgggacctgatgcccaagaccatcatgcacctgatgatcaacaacaccaaggccttcatccaccacgagctgctggcctacctgtacagcagcgctgaccagagcagcctgatggaggagagcgctgaccaggcccagaggagagatgacatgctgaggatgtaccacgccctgaaggaggccctgaacatcatcggggacatcagcaccagcacagtgtccacccctgtgcccccacctgtggatgacacctggctgcagagcgccagcagccacagccccaccccccagaggaggcctgtgagcagcatccaccccccaggccggcccccagctgtgcggggccccaccccaggccccccactcatccctgtgcctgtgggcgctgctgccagcttcagcgccccacccatccccagcaggcctggcccccagagcgtgtttgccaacagcgacctcttccctgccccaccccagatccccagcaggcctgtgcgcatccccccaggcatccccccaggagtgcccagcagaagacctcctgctgcccccagccggcccaccatcatccggcctgctgagcccagcctgctggactag

SEQ ID NO: 21468 - DNA, 2613 bp, Artificial Sequence
  derived and/or modified sequence
atgggcaaccggggcatggaggagctgatccccctggtgaacaagttacaggacgccttttcctccatcgggcagagctgtcatttggacctcccccagatcgccgttgtgggaggacagagcgccggcaagtcttccgtcctggagaattttgttggaagagacttcctcccgcgggggagcggcatcgtgaccaggcgccctctcatacttcagcttatttttagcaagacagaacacgccgagtttttgcactgtaaaagcaaaaagttcactgactttgacgaagttagacaggagatcgaggccgagaccgatcgcgttaccgggacaaataagggtatttcacctgtacccatcaatctgcgcgtgtactcacctcacgtactgaacctgactctcatcgatcttcctggaataacgaaagttccagttggcgaccaaccacccgacattgaataccagattaaggacatgattttgcagttcattagtcgcgagtcatcactgatattggccgttacccctgcaaatatggatctggctaacagcgacgcactgaaactggccaaagaggtcgatccacagggccttaggactattggagtgattactaaactggatctcatggatgaaggcacagacgcacgggatgtacttgaaaacaaattactgcccctgaggcggggatatatcggcgtggtgaaccgctcccagaaagacatcgaaggaaagaaggacatccgcgcagcactggcagccgaacgcaaatttttcctcagtcaccccgcttaccgacatatggccgatagaatgggtacacctcacctgcagaagacgctgaaccaacaactgaccaatcacatccgagagagcttaccggccttaaggtctaaactgcaatcgcaactacttagcttggaaaaggaagtagaagagtataagaatttcaggccagacgaccctacccgcaaaacaaaggcgcttctgcaaatggtgcagcaatttggcgtcgatttcgaaaaaagaatagaaggctctggcgatcaggtagatactctggagttgtccggtggcgcccgaatcaaccggatattccacgagcgtttcccatttgaactggtgaaaatggagttcgacgaaaaggatttgcgacgcgagatttcttacgccattaaaaatatacacggggttaggacaggactgttcacccccgacatggcctttgaggccatagtgaagaagcaaatcgtcaaactgaaggaaccatccctgaaatgcgtcgaccttgtcgtgtctgagctggccaccgtgatcaagaaatgtgcagaaaagctaagttcttacccgcgactcagggaggagaccgaacgaatagtgactacatacatcagggagcgagagggtagaacgaaggaccagattctgctgctcattgacatcgagcagtcttatataaataccaatcatgaggacttcatcggctttgctaacgctcagcagaggagtacacaactgaacaaaaagcgtgctatcccaaaccaaccagagacattggtcatccgtcgcgggtggctgaccattaacaatatctcgttaatgaagggtgggagtaaggaatactggttcgtactaacagcagaatctctgtcttggtacaaagatgaagaggaaaaggaaaaaaaatatatgctgccacttgataacctcaagatacgcgatgtggagaagggatttatgagcaataagcacgtgtttgcaatctttaacacagagcaaagaaacgtatataaggatctgaggcagatcgagcttgcatgcgacagccaggaagatgtggattcttggaaggcctcctttctcagagccggcgtgtacccagagaaggatcaggctgaaaacgaagatggtgcccaggaaaataccttttccatggatcctcagcttgagcgccaagttgagactatcaggaacctggttgattcttacgtggcgatcatcaacaagagcatccgcgacctgatgccgaagaccattatgcacctgatgattaacaatactaaggcatttatccatcacgagcttcttgcttacttgtattcttctgcagaccagtcctcacttatggaggaaagtgccgaccaagcccagcgccgggatgatatgctgcgtatgtatcacgcactaaaggaagccctcaacataatcggagacataagcacctctacagtcagcacacctgtccccccaccagtcgatgatacctggctgcagtccgcatcctcccacagccccacacctcaacgccggccagttagtagtatccacccccctggaagacctccagccgtccgtggacccactccagggcctccgctgattccagtgcccgtgggggctgctgcctcttttagtgccccccctatacccagtcgccccggaccacagagcgtttttgccaatagtgatcttttcccagctcctccgcagattccctctcgcccagtgcggataccaccaggaatacctccaggcgtcccctcaagacgcccaccagctgccccctctcggcctacaattatccgccccgcagaaccatccctacttgattag

SEQ ID NO: 21469 - DNA, 2613 bp, Artificial Sequence
  derived and/or modified sequence
atgggcaaccggggcatggaggagctgatccccctggtgaacaagttacaggacgccttcagctctattgggcaatcatgtcacttagatcttccgcagatcgccgttgtgggcggccagtccgctggaaaatcctcagtcttagaaaactttgtgggcagagatttccttccgcggggctccgggatcgttaccaggagacccctgattttacagctgatattttcgaagacagagcatgcagagtttttacactgtaagtcgaagaagttcaccgatttcgatgaagtccggcaggaaattgaggctgaaacggacagggtcaccgggaccaataagggcataagcccggtgcccattaatctgcgggtttacagtccccacgtgttaaacctcaccctgattgatctcccaggcataactaaggtgccagtcggtgaccagccgccagacatcgagtaccagatcaaagatatgatcctccagttcattagccgggagtcatccttgatcctcgcagtgacccctgcgaatatggacctcgccaacagcgacgctcttaagctggcaaaggaagtagacccacaggggctcaggacaattggagtaattactaaacttgacttgatggacgaagggacggatgcccgggatgtactggagaacaaactgctacccctccgccgcggctacattggcgtggtgaataggtcccaaaaagatatcgagggcaagaaggacattcgggccgcacttgcggctgagcgcaaattctttttgagccaccccgcttatagacatatggctgatagaatggggacccctcacctccagaaaacgctcaatcaacagcttactaatcatattcgagagagcctccctgcccttcgaagcaaattgcagtcccagttgctgtctctagagaaggaagtcgaagaatacaagaactttaggcccgacgaccctacacggaagacaaaggcccttctgcaaatggtgcagcagttcggcgtggactttgagaagcgcatagagggatctggcgatcaggttgatactctggagctttctgggggagctagaattaaccggatcttccacgagagatttcctttcgagttggtcaaaatggaattcgatgagaaagacctgcggcgtgagatctcctacgccatcaaaaatatccatggagtaaggacaggccttttcacaccagacatggctttcgaggctattgttaagaagcaaatcgtgaagctgaaagagcctagtctcaagtgtgtcgacctagtggtcagcgaactcgccactgtgatcaagaaatgcgcggaaaagctgagcagttacccaagactgagggaggagacagaacggattgtgaccacatacataagagagcgcgagggcagaactaaggaccagatcctcctgctaatcgatattgagcagagctatattaacacaaatcacgaagatttcatcggattcgcaaatgctcaacagaggtcaactcagctgaacaagaagagagctatcccgaaccagggcgaaattctcgtgatacggagaggatggctcaccatcaacaatatttcgctgatgaagggcgggagcaaagaatattggtttgtccttacagcggagagcctgagttggtataaagacgaggaggagaaagaaaagaagtatatgctcccactggacaatctgaagattcgtgacgtagagaaaggcttcatgtctaataaacacgtgttcgccatcttcaataccgagcagcgcaacgtgtataaagacctgcgccaaattgaactggcttgcgacagtcaagaggacgtagacagctggaaagcgtctttcctccgggccggagtgtacccagaaaaggatcaggctgaaaatgaggatggcgctcaggagaacactttttcaatggaccctcaactggagaggcaggtggaaacaatcagaaatctggtagactcctatgtggcaataatcaataaaagtatcagggatctgatgcccaaaacaattatgcatttgatgatcaacaatactaaagcttttatacaccacgagcttctggcatacctctactcttcagctgatcagtcatccctcatggaagagagtgctgaccaggcgcagagacgtgacgatatgctcagaatgtatcacgccttgaaggaggccctgaacattattggggatatttctactagcacagtgtcgacccctgtaccaccacccgttgacgacacttggctgcagtccgctagcagccactctccgacaccccagaggaggcccgtttcttcgattcaccctccaggtagacctcccgccgtaagaggcccaactcccgggcccccccttattccagtgccagtgggagccgctgctagttttagcgcccctcccataccatcgcgccctggacctcagagcgtgttcgcaaactcagatttgtttccagcaccccctcagatcccttcacgacccgttagaattccgcctgggatccctccaggcgtgccgtcacgccgcccacctgcggcgccgtcccgtcccactattatacgacctgcggagccctccctgcttgattag

SEQ ID NO: 21470 - DNA, 2613 bp, Artificial Sequence
  derived and/or modified sequence
atggggaacagagggatggaggagctgattccgttagtgaacaaactgcaggacgcgttctcctcaattggtcagtcttgtcatcttgatcttcctcagattgctgtagtaggaggccaatccgcgggaaagagttccgtcctggagaacttcgttggccgtgatttcctacctcgtgggtccggcatcgtgaccaggaggcccctcatactgcagctgattttctcaaagacagaacatgccgaattcctgcactgcaaatctaaaaaatttacagacttcgatgaggtgcgacaagagattgaagccgagactgaccgcgtgaccggaaccaataagggaatatcacccgtccccatcaatcttagggtctactctccgcatgtgctaaatctcactcttattgacctccctggaatcaccaaggtccccgtgggggatcagccacccgacattgaataccaaatcaaagacatgattttgcagttcatctcaagggagtcaagcctgatcctcgccgtgacccccgcaaatatggatttagccaactccgatgcactcaaactagccaaggaagtcgatccacaaggtctgaggacaatcggtgtcattactaaattggacctaatggatgaggggaccgatgcaagagacgtgctggaaaacaagttactccctctgaggcgcggttacatcggagtggtgaaccgaagccagaaagatatagaaggcaagaaagacatccgcgctgcgcttgccgcagaacggaagttctttctgagccatccagcatatcgtcatatggccgatagaatggggaccccccatcttcagaagacgttgaaccagcagttgaccaaccatattcgggagagtcttccggctcttcggagtaagcttcagtcacagctcctgtcccttgagaaagaagtggaggaatataagaatttccggcctgacgatcctacaagaaagacaaaggctctgctacagatggttcagcaatttggcgtcgattttgagaaacggatcgaggggtccggcgatcaggttgatacattagagttgtctggcggagctaggattaataggattttccacgaaaggttcccgtttgagcttgtaaaaatggagttcgatgagaaggatttgaggcgcgaaatctcatacgcgatcaaaaatatccatggcgtgcggaccggcttattcactcctgatatggcttttgaggcaattgtgaagaagcagatcgttaaacttaaggaacctagcctcaaatgtgtggacttggtggttagtgagttggcaacagtaataaagaaatgcgctgaaaagcttagctcataccctagactccgtgaggaaacggagaggatcgtgaccacctacatccgggaacgggagggcagaacaaaagaccagatcctgctcttgatcgatatagaacagtcctacatcaatacaaaccacgaagatttcattggtttcgccaacgcccagcagcggagcacccagctcaataagaagagagcaattcctaatcagcctgaaacgctcgtaattaggcgcggatggctgaccatcaataacataagcctaatgaagggaggctctaaggaatattggttcgttctcacagctgaatccttgtcctggtacaaggacgaggaggagaaggagaagaagtacatgctgccacttgataacctcaaaatacgtgacgtagagaagggattcatgtcaaataagcacgtctttgcaatcttcaatactgagcagcggaatgtttacaaggaccttcgacaaatagagttggcttgcgattctcaggaggatgtcgatagctggaaggcttcatttcttagggctggggtgtaccccgaaaaagatcaggctgaaaatgaagacggcgcacaggaaaatacgttctctatggacccacagttggaacgccaagttgagaccattcggaacctggttgatagttacgtggccatcattaacaagtcaatcagagatctgatgccaaaaactattatgcatttgatgatcaataataccaaggcctttatccaccacgagctcctagcctatctctactcttccgctgatcagagcagcctgatggaggagtcagccgaccaggctcagaggcgggatgatatgctgagaatgtatcatgccctcaaggaagcactcaacataatcggtgatattagcacatcaacagtgtccacccctgtgccacctcctgtggatgacacctggctacaatcagccagtagtcattccccaacgccccaaagaagacccgtatccagcatccaccctcccggaagaccccctgctgtaagggggccaacgccgggaccacccctgatccctgtccccgtcggggcagccgctagcttctcggcacccccaataccctccaggcccggtccccagagcgtgtttgctaattccgatctgttccctgctccaccccagatcccttcacgcccagtccgaattcccccaggtattccgcctggagttccatcaaggcgccctcctgctgcacccagcagacctacgattatccgtccggctgaacctagcctcctcgattag

SEQ ID NO: 21471 - DNA, 2613 bp, Artificial Sequence
  derived and/or modified sequence
atgggtaatcgaggcatggaggagctcatcccactggtgaacaagttgcaggacgcctttagcagcattggtcaatcctgccaccttgatctaccacaaatcgccgtggtcggaggtcaatctgctggaaaatctagcgtgctcgagaactttgtgggcagggactttttgccccgtggctctggcatagttacgcggcgacctctgatcttacagctcatattcagcaagactgaacatgccgagttcttgcactgtaagtctaagaaattcacggactttgacgaagtacggcaggaaattgaggctgagactgatagagtgacgggaacaaacaaaggaatttcccctgtccccatcaacctgcgggtatacagcccacacgtcctgaacctgaccttgatcgacctgccagggattacaaaggtccccgttggcgaccagcctcctgatatcgagtaccaaattaaggacatgatcctgcagtttatcagccgggaatcgtcgctgattctggcggttactccagccaatatggatcttgccaactccgacgctctgaagttggccaaggaggtcgatcctcagggcctcaggactattggcgtaatcactaagctggacttgatggacgagggtactgatgcacgagacgtccttgagaataagctgctccctctgcgaaggggatacatcggcgtggtgaataggagtcagaaggatatagaaggcaagaaggacattagagctgccctagccgcagaaagaaagttcttcctgagccaccccgcttaccgacatatggctgaccgcatgggaacccctcacctgcaaaaaactctgaatcagcaactgaccaatcacattcgtgagagtctccccgcattaaggagtaagctgcagagtcagctgctgagcttggaaaaggaagtggaggagtataagaattttcgcccagacgatcccacgcggaagaccaaggcgctgcttcagatggttcagcagtttggagtcgactttgaaaagcgaatcgagggttctggggatcaggtcgacacgctggagctttccggtggggctcggatcaatcggatcttccacgagaggttcccatttgagttggttaagatggagttcgacgagaaggatctcaggcgggaaattagttatgctatcaaaaacatacacggcgtccgtacaggcctttttacacccgatatggcattcgaggccattgtgaagaagcagatcgtgaagctgaaagagccctccctaaagtgtgttgatctcgttgtgtcagagctcgccacggttatcaaaaagtgcgccgaaaaattgagtagctaccctcgactgagggaggagactgaaagaatcgtgacaacatatatcagagaacgggaggggagaactaaggaccagatcttactccttatcgacattgaacagtcgtacatcaatactaaccacgaggattttatcggtttcgccaatgctcagcagaggagtacacagttaaataagaaacgcgctataccaaatcagggggaaattctagtgattaggcgtggctggttaactatcaataatatttcactaatgaaaggtggcagtaaagagtactggttcgttctgacagctgagtccttgtcatggtacaaggacgaggaggaaaaagaaaagaagtatatgctgcctctggacaatcttaagatacgcgacgtggagaagggctttatgtcgaataaacacgtatttgccatcttcaataccgaacaacgcaacgtgtacaaagatctgcgccagatcgagcttgcctgtgactcacaggaggatgtagatagttggaaggctagctttctgcgtgccggtgtctatcctgaaaaggatcaagctgaaaatgaagacggcgctcaagaaaatacattctccatggacccccagctcgagcgacaggtggaaactattaggaatctagtggattcttacgtggctataattaataagtcaattcgggatctaatgccgaaaaccatcatgcaccttatgatcaacaatacaaaggcctttatccaccacgagctgctcgcttacctttacagttctgcggaccagtcctctctgatggaggagagcgccgatcaagcccagcggagggacgacatgctgcgaatgtatcatgccctgaaggaagcgctgaacatcatcggggacatatccacatctaccgtgtcgactcctgttccaccccctgtagatgacacttggctccagagtgcctcatcccattctcctactccacagcgccgtcccgtcagttctatacatcctccaggccgacccccagccgtcaggggcccaaccccgggtccacccctgattccagtgcctgttggcgcagcagccagttttagcgcccctcccattccctccaggccaggccctcagagtgttttcgcgaacagtgatctgttccccgcacctccccagatacctagccgacctgtccggattccaccaggcattccaccaggtgtgccaagtcgtcgcccacccgcagccccaagcagacccaccatcatcagaccagcggaaccttcgttactcgactag

SEQ ID NO: 21472 - DNA, 2613 bp, Artificial Sequence
  derived and/or modified sequence
atgggcaacagaggcatggaggagctgatccccctggtgaacaagctgcaggacgccttcagcagcatcggccagagctgccacctggacctgccccagatcgccgtggtgggcggccagagcgccggcaagagcagcgtgctggagaacttcgtgggcagagacttcctgcccagaggcagcggcatcgtgaccagaagacccctgatcctgcagctgatcttcagcaagaccgagcacgccgagttcctgcactgcaagagcaagaagttcaccgacttcgacgaggtgagacaggagatcgaggccgagaccgacagagtgaccggcaccaacaagggcatcagccccgtgcccatcaacctgagagtgtacagcccccacgtgctgaacctgaccctgatcgacctgcccggcatcaccaaggtgcccgtgggcgaccagccccccgacatcgagtaccagatcaaggacatgatcctgcagttcatcagcagagagagcagcctgatcctggccgtgacccccgccaacatggacctggccaacagcgacgccctgaagctggccaaggaggtggacccccagggcctgagaaccatcggcgtgatcaccaagctggacctgatggacgagggcaccgacgccagagacgtgctggagaacaagctgctgcccctgagaagaggctacatcggcgtggtgaacagaagccagaaggacatcgagggcaagaaggacatcagagccgccctggccgccgagagaaagttcttcctgagccaccccgcctacagacacatggccgacagaatgggcaccccccacctgcagaagaccctgaaccagcagctgaccaaccacatcagagagagcctgcccgccctgagaagcaagctgcagagccagctgctgagcctggagaaggaggtggaggagtacaagaacttcagacccgacgaccccaccagaaagaccaaggccctgctgcagatggtgcagcagttcggcgtggacttcgagaagagaatcgagggcagcggcgaccaggtggacaccctggagctgagcggcggcgccagaatcaacagaatcttccacgagagattccccttcgagctggtgaagatggagttcgacgagaaggacctgagaagagagatcagctacgccatcaagaacatccacggcgtgagaaccggcctgttcacccccgacatggccttcgaggccatcgtgaagaagcagatcgtgaagctgaaggagcccagcctgaagtgcgtggacctggtggtgagcgagctggccaccgtgatcaagaagtgcgccgagaagctgagcagctaccccagactgagagaggagaccgagagaatcgtgaccacctacatcagagagagagagggcagaaccaaggaccagatcctgctgctgatcgacatcgagcagagctacatcaacaccaaccacgaggacttcatcggcttcgccaacgcccagcagagaagcacccagctgaacaagaagagagccatccccaaccagcccgagaccctggtgatcagaagaggctggctgaccatcaacaacatcagcctgatgaagggcggcagcaaggagtactggttcgtgctgaccgccgagagcctgagctggtacaaggacgaggaggagaaggagaagaagtacatgctgcccctggacaacctgaagatcagagacgtggagaagggcttcatgagcaacaagcacgtgttcgccatcttcaacaccgagcagagaaacgtgtacaaggacctgagacagatcgagctggcctgcgacagccaggaggacgtggacagctggaaggccagcttcctgagagccggcgtgtaccccgagaaggaccaggccgagaacgaggacggcgcccaggagaacaccttcagcatggacccccagctggagagacaggtggagaccatcagaaacctggtggacagctacgtggccatcatcaacaagagcatcagagacctgatgcccaagaccatcatgcacctgatgatcaacaacaccaaggccttcatccaccacgagctgctggcctacctgtacagcagcgccgaccagagcagcctgatggaggagagcgccgaccaggcccagagaagagacgacatgctgagaatgtaccacgccctgaaggaggccctgaacatcatcggcgacatcagcaccagcaccgtgagcacccccgtgcccccccccgtggacgacacctggctgcagagcgccagcagccacagccccaccccccagagaagacccgtgagcagcatccacccccccggcagaccccccgccgtgagaggccccacccccggcccccccctgatccccgtgcccgtgggcgccgccgccagcttcagcgccccccccatccccagcagacccggcccccagagcgtgttcgccaacagcgacctgttccccgcccccccccagatccccagcagacccgtgagaatcccccccggcatcccccccggcgtgcccagcagaagaccccccgccgcccccagcagacccaccatcatcagacccgccgagcccagcctgctggactag

SEQ ID NO: 21473 - DNA, 2613 bp, Artificial Sequence
  derived and/or modified sequence
atgggcaacagaggcatggaggagctgatccccctggtgaacaagctgcaggacgccttcagcagcatcggccagagctgccacctggacctgccccagatcgccgtggtgggcggccagagcgccggcaagagcagcgtgctggagaacttcgtgggcagagacttcctgcccagaggcagcggcatcgtgaccagaagacccctgatcctgcagctgatcttcagcaagaccgagcacgccgagttcctgcactgcaagagcaagaagttcaccgacttcgacgaggtgagacaggagatcgaggccgagaccgacagagtgaccggcaccaacaagggcatcagccccgtgcccatcaacctgagagtgtacagcccccacgtgctgaacctgaccctgatcgacctgcccggcatcaccaaggtgcccgtgggcgaccagccccccgacatcgagtaccagatcaaggacatgatcctgcagttcatcagcagagagagcagcctgatcctggccgtgacccccgccaacatggacctggccaacagcgacgccctgaagctggccaaggaggtggacccccagggcctgagaaccatcggcgtgatcaccaagctggacctgatggacgagggcaccgacgccagagacgtgctggagaacaagctgctgcccctgagaagaggctacatcggcgtggtgaacagaagccagaaggacatcgagggcaagaaggacatcagagccgccctggccgccgagagaaagttcttcctgagccaccccgcctacagacacatggccgacagaatgggcaccccccacctgcagaagaccctgaaccagcagctgaccaaccacatcagagagagcctgcccgccctgagaagcaagctgcagagccagctgctgagcctggagaaggaggtggaggagtacaagaacttcagacccgacgaccccaccagaaagaccaaggccctgctgcagatggtgcagcagttcggcgtggacttcgagaagagaatcgagggcagcggcgaccaggtggacaccctggagctgagcggcggcgccagaatcaacagaatcttccacgagagattccccttcgagctggtgaagatggagttcgacgagaaggacctgagaagagagatcagctacgccatcaagaacatccacggcgtgagaaccggcctgttcacccccgacatggccttcgaggccatcgtgaagaagcagatcgtgaagctgaaggagcccagcctgaagtgcgtggacctggtggtgagcgagctggccaccgtgatcaagaagtgcgccgagaagctgagcagctaccccagactgagagaggagaccgagagaatcgtgaccacctacatcagagagagagagggcagaaccaaggaccagatcctgctgctgatcgacatcgagcagagctacatcaacaccaaccacgaggacttcatcggcttcgccaacgcccagcagagaagcacccagctgaacaagaagagagccatccccaaccagggcgagatcctggtgatcagaagaggctggctgaccatcaacaacatcagcctgatgaagggcggcagcaaggagtactggttcgtgctgaccgccgagagcctgagctggtacaaggacgaggaggagaaggagaagaagtacatgctgcccctggacaacctgaagatcagagacgtggagaagggcttcatgagcaacaagcacgtgttcgccatcttcaacaccgagcagagaaacgtgtacaaggacctgagacagatcgagctggcctgcgacagccaggaggacgtggacagctggaaggccagcttcctgagagccggcgtgtaccccgagaaggaccaggccgagaacgaggacggcgcccaggagaacaccttcagcatggacccccagctggagagacaggtggagaccatcagaaacctggtggacagctacgtggccatcatcaacaagagcatcagagacctgatgcccaagaccatcatgcacctgatgatcaacaacaccaaggccttcatccaccacgagctgctggcctacctgtacagcagcgccgaccagagcagcctgatggaggagagcgccgaccaggcccagagaagagacgacatgctgagaatgtaccacgccctgaaggaggccctgaacatcatcggcgacatcagcaccagcaccgtgagcacccccgtgcccccccccgtggacgacacctggctgcagagcgccagcagccacagccccaccccccagagaagacccgtgagcagcatccacccccccggcagaccccccgccgtgagaggccccacccccggcccccccctgatccccgtgcccgtgggcgccgccgccagcttcagcgccccccccatccccagcagacccggcccccagagcgtgttcgccaacagcgacctgttccccgcccccccccagatccccagcagacccgtgagaatcccccccggcatcccccccggcgtgcccagcagaagaccccccgccgcccccagcagacccaccatcatcagacccgccgagcccagcctgctggactag

SEQ ID NO: 21474 - DNA, 3633 bp, Artificial Sequence
  derived and/or modified sequence
gagaaccggatgaggcggcgaccgtgaggccgagccgggagcgggcgtcttgccgaggcccgggcgggcggggagcaacggctacagacgccgcggggccaggtcgttgagggtcggcggcgggcgaggagcgcagggcgctcgggccgggggccgccggcgccatgggcaaccgcgggatggaagagctgatcccgctggtcaacaaactgcaggacgccttcagctccatcggccagagctgccacctggacctgccgcagatcgctgtagtgggcggccagagcgccggcaagagctcggtgctggagaacttcgtgggccgggacttccttccccgcggttcaggaatcgtcacccggcggcctctcattctgcagctcatcttctcaaaaacagaacatgccgagtttttgcactgcaagtccaaaaagtttacagactttgatgaagtccggcaggagattgaagcagagaccgacagggtcacggggaccaacaaaggcatctccccagtgcccatcaaccttcgagtctactcgccacacgtgttgaacttgaccctcatcgacctcccgggtatcaccaaggtgcctgtgggcgaccagcctccagacatcgagtaccagatcaaggacatgatcctgcagttcatcagccgggagagcagcctcattctggctgtcacgcccgccaacatggacctggccaactccgacgccctcaagctggccaaggaagtcgatccccaaggcctacggaccatcggtgtcatcaccaagcttgacctgatggacgagggcaccgacgccagggacgtcttggagaacaagttgctcccgttgagaagaggctacattggcgtggtgaaccgcagccagaaggatattgagggcaagaaggacatccgtgcagcactggcagctgagaggaagttcttcctctcccacccggcctaccggcacatggccgaccgcatgggcacgccacatctgcagaagacgctgaatcagcaactgaccaaccacatccgggagtcgctgccggccctacgtagcaaactacagagccagctgctgtccctggagaaggaggtggaggagtacaagaactttcggcccgacgaccccacccgcaaaaccaaagccctgctgcagatggtccagcagtttggggtggattttgagaagaggatcgagggctcaggagatcaggtggacactctggagctctccgggggcgcccgaatcaatcgcatcttccacgagcggttcccatttgagctggtgaagatggagtttgacgagaaggacttacgacgggagatcagctatgccattaagaacatccatggagtcaggacggggctcttcacccccgacatggcctttgaagccattgtgaaaaaacagattgtaaaactcaaagagccgagtttgaagtgtgttgatctcgtggtctcagagctggccacggtcataaaaaagtgtgccgagaagctcagttcctacccccggttgcgagaggagacagagcgaatcgtcaccacttacatccgggaacgggaggggagaacgaaggaccagattcttctgctgatcgacattgagcagtcctacatcaacacgaaccatgaggacttcatcgggtttgccaatgcccagcagaggagcacgcagctgaacaagaagagagccatccccaatcagcctgaaaccctggtgatccgcaggggctggctgaccatcaacaacatcagcctgatgaaaggcggctccaaggagtactggtttgtgctgactgccgagtcactgtcctggtacaaggatgaggaggagaaagagaagaagtacatgctgcctctggacaacctcaagatccgtgatgtggagaagggcttcatgtccaacaagcacgtcttcgccatcttcaacacggagcagagaaacgtctacaaggacctgcggcagatcgagctggcctgtgactcccaggaagacgtggacagctggaaggcctcgttcctccgagctggcgtctaccccgagaaggaccaggcagaaaacgaggatggggcccaggagaacaccttctccatggacccccaactggagcggcaggtggagaccattcgcaacctggtggactcatacgtggccatcatcaacaagtccatccgcgacctcatgccaaagaccatcatgcacctcatgatcaacaatacgaaggccttcatccaccacgagctgctggcctacctatactcctcggcagaccagagcagcctcatggaggagtcggctgaccaggcacagcggcgggacgacatgctgcgcatgtaccatgccctcaaggaggcgctcaacatcatcggtgacatcagcaccagcactgtgtccacgcctgtacccccgcctgtcgatgacacctggctccagagcgccagcagccacagccccactccacagcgccgaccggtgtccagcatacacccccctggccggcccccagcagtgaggggccccactccagggccccccctgattcctgttcccgtgggggcagcagcctccttctcggcgcccccaatcccatcccggcctggaccccagagcgtgtttgccaacagtgacctcttcccagccccgcctcagatcccatctcggccagttcggatccccccagggattcccccaggagtgcccagcagaagaccccctgctgcgcccagccggcccaccattatccgcccagccgagccatccctgctcgactaggcctcgaggggggcgtgctctcgggggggcctcacgcacccgcggcgcaggagcttcagtggtctggggccctccgccgcccctatgctgggaccaggctcccagtgggcagccctggcctcttccttaacgctggccccggtccagggccggcccctgtgcctggctggacaccgcactgcgcaaaggggccctggagctccaggcagggggcgctggggtgttgcactttgggggatggagtctcagggtggcagaggggggaccagaacccttgacaccatcctgaatgaggggtccagcctgggggggactctaccaaggtcttcttgggctgggaaagcccatgtagggcaggccttctataagtgcgggcaccaagggcgcctacatccccaggccttgctggggtgcaggggtatatcaacttcccattagcaggagctccccagcggcaagcctggcccagtgggctcggtagtgcccagctggcaggcctgaggtgtacatagtccttcccggccatattaaccacacagcctgagcctggcccagcctcggctgccagaggtgcctttgctaggcccggagccgttggcccgggccggccttgccctattcctctcctcctcctcctcctgggtcccccagggtggctgggcttgggctatgtgggtggtggtggcggggggtcttgggggcctctcagctcccgcccatgcctccctgatgggtgggcccagggcggcctctctctgaggagacctcacccactcctcgctcagtttgaccactgtaagtgcctgcactctgtattctattaataaactaaaataaagggaagacgctgctggtg

SEQ ID NO: 21475 - DNA, 3436 bp, Artificial Sequence
  derived and/or modified sequence
cacgtcactgtggcagcagcggatagctggaaaccacctgccagtgcccagcatgtagggcgtgcccctagagcgggagctgccacctgcttcctggggcccaggccccccagccaccttggagggagggacttccttccccgcggttcaggaatcgtcacccggcggcctctcattctgcagctcatcttctcaaaaacagaacatgccgagtttttgcactgcaagtccaaaaagtttacagactttgatgaagtccggcaggagattgaagcagagaccgacagggtcacggggaccaacaaaggcatctccccagtgcccatcaaccttcgagtctactcgccacacgtgttgaacttgaccctcatcgacctcccgggtatcaccaaggtgcctgtgggcgaccagcctccagacatcgagtaccagatcaaggacatgatcctgcagttcatcagccgggagagcagcctcattctggctgtcacgcccgccaacatggacctggccaactccgacgccctcaagctggccaaggaagtcgatccccaaggcctacggaccatcggtgtcatcaccaagcttgacctgatggacgagggcaccgacgccagggacgtcttggagaacaagttgctcccgttgagaagaggctacattggcgtggtgaaccgcagccagaaggatattgagggcaagaaggacatccgtgcagcactggcagctgagaggaagttcttcctctcccacccggcctaccggcacatggccgaccgcatgggcacgccacatctgcagaagacgctgaatcagcaactgaccaaccacatccgggagtcgctgccggccctacgtagcaaactacagagccagctgctgtccctggagaaggaggtggaggagtacaagaactttcggcccgacgaccccacccgcaaaaccaaagccctgctgcagatggtccagcagtttggggtggattttgagaagaggatcgagggctcaggagatcaggtggacactctggagctctccgggggcgcccgaatcaatcgcatcttccacgagcggttcccatttgagctggtgaagatggagtttgacgagaaggacttacgacgggagatcagctatgccattaagaacatccatggagtcaggacggggctcttcacccccgacatggcctttgaagccattgtgaaaaaacagattgtaaaactcaaagagccgagtttgaagtgtgttgatctcgtggtctcagagctggccacggtcataaaaaagtgtgccgagaagctcagttcctacccccggttgcgagaggagacagagcgaatcgtcaccacttacatccgggaacgggaggggagaacgaaggaccagattcttctgctgatcgacattgagcagtcctacatcaacacgaaccatgaggacttcatcgggtttgccaatgcccagcagaggagcacgcagctgaacaagaagagagccatccccaatcagggggagatcctggtgatccgcaggggctggctgaccatcaacaacatcagcctgatgaaaggcggctccaaggagtactggtttgtgctgactgccgagtcactgtcctggtacaaggatgaggaggagaaagagaagaagtacatgctgcctctggacaacctcaagatccgtgatgtggagaagggcttcatgtccaacaagcacgtcttcgccatcttcaacacggagcagagaaacgtctacaaggacctgcggcagatcgagctggcctgtgactcccaggaagacgtggacagctggaaggcctcgttcctccgagctggcgtctaccccgagaaggaccaggcagaaaacgaggatggggcccaggagaacaccttctccatggacccccaactggagcggcaggtggagaccattcgcaacctggtggactcatacgtggccatcatcaacaagtccatccgcgacctcatgccaaagaccatcatgcacctcatgatcaacaatacgaaggccttcatccaccacgagctgctggcctacctatactcctcggcagaccagagcagcctcatggaggagtcggctgaccaggcacagcggcgggacgacatgctgcgcatgtaccatgccctcaaggaggcgctcaacatcatcggtgacatcagcaccagcactgtgtccacgcctgtacccccgcctgtcgatgacacctggctccagagcgccagcagccacagccccactccacagcgccgaccggtgtccagcatacacccccctggccggcccccagcagtgaggggccccactccagggccccccctgattcctgttcccgtgggggcagcagcctccttctcggcgcccccaatcccatcccggcctggaccccagagcgtgtttgccaacagtgacctcttcccagccccgcctcagatcccatctcggccagttcggatccccccagggattcccccaggagtgcccagcagaagaccccctgctgcgcccagccggcccaccattatccgcccagccgagccatccctgctcgactaggcctcgaggggggcgtgctctcgggggggcctcacgcacccgcggcgcaggagcttcagtggtctggggccctccgccgcccctatgctgggaccaggctcccagtgggcagccctggcctcttccttaacgctggccccggtccagggccggcccctgtgcctggctggacaccgcactgcgcaaaggggccctggagctccaggcagggggcgctggggtgttgcactttgggggatggagtctcagggtggcagaggggggaccagaacccttgacaccatcctgaatgaggggtccagcctgggggggactctaccaaggtcttcttgggctgggaaagcccatgtagggcaggccttctataagtgcgggcaccaagggcgcctacatccccaggccttgctggggtgcaggggtatatcaacttcccattagcaggagctccccagcggcaagcctggcccagtgggctcggtagtgcccagctggcaggcctgaggtgtacatagtccttcccggccatattaaccacacagcctgagcctggcccagcctcggctgccagaggtgcctttgctaggcccggagccgttggcccgggccggccttgccctattcctctcctcctcctcctcctgggtcccccagggtggctgggcttgggctatgtgggtggtggtggcggggggtcttgggggcctctcagctcccgcccatgcctccctgatgggtgggcccagggcggcctctctctgaggagacctcacccactcctcgctcagtttgaccactgtaagtgcctgcactctgtattctattaataaactaaaataaagggaagacgctgctggtg

SEQ ID NO: 21476 - DNA, 3633 bp, Artificial Sequence
  derived and/or modified sequence
gagaaccggatgaggcggcgaccgtgaggccgagccgggagcgggcgtcttgccgaggcccgggcgggcggggagcaacggctacagacgccgcggggccaggtcgttgagggtcggcggcgggcgaggagcgcagggcgctcgggccgggggccgccggcgccatgggcaaccgcgggatggaagagctgatcccgctggtcaacaaactgcaggacgccttcagctccatcggccagagctgccacctggacctgccgcagatcgctgtagtgggcggccagagcgccggcaagagctcggtgctggagaacttcgtgggccgggacttccttccccgcggttcaggaatcgtcacccggcggcctctcattctgcagctcatcttctcaaaaacagaacatgccgagtttttgcactgcaagtccaaaaagtttacagactttgatgaagtccggcaggagattgaagcagagaccgacagggtcacggggaccaacaaaggcatctccccagtgcccatcaaccttcgagtctactcgccacacgtgttgaacttgaccctcatcgacctcccgggtatcaccaaggtgcctgtgggcgaccagcctccagacatcgagtaccagatcaaggacatgatcctgcagttcatcagccgggagagcagcctcattctggctgtcacgcccgccaacatggacctggccaactccgacgccctcaagctggccaaggaagtcgatccccaaggcctacggaccatcggtgtcatcaccaagcttgacctgatggacgagggcaccgacgccagggacgtcttggagaacaagttgctcccgttgagaagaggctacattggcgtggtgaaccgcagccagaaggatattgagggcaagaaggacatccgtgcagcactggcagctgagaggaagttcttcctctcccacccggcctaccggcacatggccgaccgcatgggcacgccacatctgcagaagacgctgaatcagcaactgaccaaccacatccgggagtcgctgccggccctacgtagcaaactacagagccagctgctgtccctggagaaggaggtggaggagtacaagaactttcggcccgacgaccccacccgcaaaaccaaagccctgctgcagatggtccagcagtttggggtggattttgagaagaggatcgagggctcaggagatcaggtggacactctggagctctccgggggcgcccgaatcaatcgcatcttccacgagcggttcccatttgagctggtgaagatggagtttgacgagaaggacttacgacgggagatcagctatgccattaagaacatccatggagtcaggacggggctcttcacccccgacatggcctttgaagccattgtgaaaaaacagattgtaaaactcaaagagccgagtttgaagtgtgttgatctcgtggtctcagagctggccacggtcataaaaaagtgtgccgagaagctcagttcctacccccggttgcgagaggagacagagcgaatcgtcaccacttacatccgggaacgggaggggagaacgaaggaccagattcttctgctgatcgacattgagcagtcctacatcaacacgaaccatgaggacttcatcgggtttgccaatgcccagcagaggagcacgcagctgaacaagaagagagccatccccaatcagggggagatcctggtgatccgcaggggctggctgaccatcaacaacatcagcctgatgaaaggcggctccaaggagtactggtttgtgctgactgccgagtcactgtcctggtacaaggatgaggaggagaaagagaagaagtacatgctgcctctggacaacctcaagatccgtgatgtggagaagggcttcatgtccaacaagcacgtcttcgccatcttcaacacggagcagagaaacgtctacaaggacctgcggcagatcgagctggcctgtgactcccaggaagacgtggacagctggaaggcctcgttcctccgagctggcgtctaccccgagaaggaccaggcagaaaacgaggatggggcccaggagaacaccttctccatggacccccaactggagcggcaggtggagaccattcgcaacctggtggactcatacgtggccatcatcaacaagtccatccgcgacctcatgccaaagaccatcatgcacctcatgatcaacaatacgaaggccttcatccaccacgagctgctggcctacctatactcctcggcagaccagagcagcctcatggaggagtcggctgaccaggcacagcggcgggacgacatgctgcgcatgtaccatgccctcaaggaggcgctcaacatcatcggtgacatcagcaccagcactgtgtccacgcctgtacccccgcctgtcgatgacacctggctccagagcgccagcagccacagccccactccacagcgccgaccggtgtccagcatacacccccctggccggcccccagcagtgaggggccccactccagggccccccctgattcctgttcccgtgggggcagcagcctccttctcggcgcccccaatcccatcccggcctggaccccagagcgtgtttgccaacagtgacctcttcccagccccgcctcagatcccatctcggccagttcggatccccccagggattcccccaggagtgcccagcagaagaccccctgctgcgcccagccggcccaccattatccgcccagccgagccatccctgctcgactaggcctcgaggggggcgtgctctcgggggggcctcacgcacccgcggcgcaggagcttcagtggtctggggccctccgccgcccctatgctgggaccaggctcccagtgggcagccctggcctcttccttaacgctggccccggtccagggccggcccctgtgcctggctggacaccgcactgcgcaaaggggccctggagctccaggcagggggcgctggggtgttgcactttgggggatggagtctcagggtggcagaggggggaccagaacccttgacaccatcctgaatgaggggtccagcctgggggggactctaccaaggtcttcttgggctgggaaagcccatgtagggcaggccttctataagtgcgggcaccaagggcgcctacatccccaggccttgctggggtgcaggggtatatcaacttcccattagcaggagctccccagcggcaagcctggcccagtgggctcggtagtgcccagctggcaggcctgaggtgtacatagtccttcccggccatattaaccacacagcctgagcctggcccagcctcggctgccagaggtgcctttgctaggcccggagccgttggcccgggccggccttgccctattcctctcctcctcctcctcctgggtcccccagggtggctgggcttgggctatgtgggtggtggtggcggggggtcttgggggcctctcagctcccgcccatgcctccctgatgggtgggcccagggcggcctctctctgaggagacctcacccactcctcgctcagtttgaccactgtaagtgcctgcactctgtattctattaataaactaaaataaagggaagacgctgctggtg

SEQ ID NO: 21477 - protein, 486 aa, Artificial Sequence
  derived and/or modified sequence
HVTVAAADSWKPPASAQHVGRAPRAGAATCFLGPRPPSHLGGRDFLPRGSGIVTRRPLILQLIFSKTEHAEFLHCKSKKFTDFDEVRQEIEAETDRVTGTNKGISPVPINLRVYSPHVLNLTLIDLPGITKVPVGDQPPDIEYQIKDMILQFISRESSLILAVTPANMDLANSDALKLAKEVDPQGLRTIGVITKLDLMDEGTDARDVLENKLLPLRRGYIGVVNRSQKDIEGKKDIRAALAAERKFFLSHPAYRHMADRMGTPHLQKTLNQQLTNHIRESLPALRSKLQSQLLSLEKEVEEYKNFRPDDPTRKTKALLQMVQQFGVDFEKRIEGSGDQVDTLELSGGARINRIFHERFPFELVKMEFDEKDLRREISYAIKNIHGVRTGLFTPDMAFEAIVKKQIVKLKEPSLKCVDLVVSELATVIKKCAEKLSSYPRLREETERIVTTYIREREGRTKDQILLLIDIEQSYINTNHEDFIGFA

SEQ ID NO: 21478 - protein, 866 aa, Artificial Sequence
  derived and/or modified sequence
MGNRGMEELIPLVNKLQDAFSSIGQSCHLDLPQIAVVGGQSAGKSSVLENFVGRDFLPRGSGIVTRRPLILQLIFSKTEHAEFLHCKSKKFTDFDEVRQEIEAETDRVTGTNKGISPVPINLRVYSPHVLNLTLIDLPGITKVPVGDQPPDIEYQIKDMILQFISRESSLILAVTPANMDLANSDALKLAKEVDPQGLRTIGVITKLDLMDEGTDARDVLENKLLPLRRGYIGVVNRSQKDIEGKKDIRAALAAERKFFLSHPAYRHMADRMGTPHLQKTLNQQLTNHIRESLPALRSKLQSQLLSLEKEVEEYKNFRPDDPTRKTKALLQMVQQFGVDFEKRIEGSGDQVDTLELSGGARINRIFHERFPFELVKMEFDEKDLRREISYAIKNIHGVRTGLFTPDMAFEAIVKKQIVKLKEPSLKCVDLVVSELATVIKKCAEKLSSYPRLREETERIVTTYIREREGRTKDQILLLIDIEQSYINTNHEDFIGFANAQQRSTQLNKKRAIPNQVIRRGWLTINNISLMKGGSKEYWFVLTAESLSWYKDEEEKEKKYMLPLDNLKIRDVEKGFMSNKHVFAIFNTEQRNVYKDLRQIELACDSQEDVDSWKASFLRAGVYPEKDQAENEDGAQENTFSMDPQLERQVETIRNLVDSYVAIINKSIRDLMPKTIMHLMINNTKAFIHHELLAYLYSSADQSSLMEESADQAQRRDDMLRMYHALKEALNIIGDISTSTVSTPVPPPVDDTWLQSASSHSPTPQRRPVSSIHPPGRPPAVRGPTPGPPLIPVPVGAAASFSAPPIPSRPGPQSVFANSDLFPAPPQIPSRPVRIPPGIPPGVPSRRPPAAPSRPTIIRPAEPSLLD

SEQ ID NO: 21479 - protein, 399 aa, Artificial Sequence
  derived and/or modified sequence
MLPLEPYLTQTSAVPQMSHFMCHSPTHKPQGLLPWAPFHQASVSLYPISPWPSESVCPPTCPGGASCWFPAGNAWDRVELGFLGFGAGGVSIAVPGFPLSCGQGCCAGGWLGHGARFPAKLRAFPQVIRRGWLTINNISLMKGGSKEYWFVLTAESLSWYKDEEEKEKKYMLPLDNLKIRDVEKGFMSNKHVFAIFNTEQRNVYKDLRQIELACDSQEDVDSWKASFLRAGVYPEKDQAENEDGAQENTFSMDPQLERQVETIRNLVDSYVAIINKSIRDLMPKTIMHLMINNTKAFIHHELLAYLYSSADQSSLMEESADQAQRRDDMLRMYHALKEALNIIGDISTSTVSTPVPPPVDDTWLQSASSHSPTPQRRPVSSIHPPGRPPAVRGPTPGPP

SEQ ID NO: 21480 - DNA, 1461 bp, Artificial Sequence
  derived and/or modified sequence
catgttacagtggccgctgccgacagctggaaaccccctgccagtgctcagcacgtcggaagggcgccgagagccggagcagccacttgctttctgggccctcggcctccttctcacctagggggacgggacttcctccctagggggtctggcatcgtgacacgaagaccactaattctccagcttattttttccaaaacagaacacgccgaatttctgcactgcaaaagcaagaaatttaccgatttcgacgaggtaaggcaggagatagaggcggaaacagacagagtgactggcaccaataagggcattagtccagttcccattaacctcagagtgtattcaccgcacgtgttgaaccttaccctgatcgatctgcctgggatcacaaaggtccccgtgggggatcaacctccagatattgagtatcaaataaaagatatgatcctgcagttcatttcccgggaatcctccttgattttggccgtgacgcctgccaacatggatctggctaactctgatgctttgaaattggccaaggaggtagaccctcaagggctgcggaccataggggtgataacgaagctcgatttgatggatgaaggcactgacgcaagagacgtgctggaaaataagcttcttcccctaagacgagggtacatcggtgtggttaacaggtcacagaaggacatagaggggaagaaagatatcagggctgcattagcagccgaacggaaatttttcctgtcgcacccagcctaccggcacatggccgataggatgggcacaccacatcttcagaagaccctaaatcagcagctaaccaatcacatccgagaatcactgccagctctgaggtctaagctccagtcccaactcctctctctggagaaagaggttgaagagtacaagaacttcaggcctgatgatcccacgcggaagaccaaagccttgctccaaatggtccagcagtttggcgtcgattttgagaagcgaattgagggcagcggggaccaggttgacaccttggaattgtccggaggggcacgcattaatcgcatcttccacgagagattccccttcgaactcgtgaagatggagtttgatgagaaagatctgagacgggagatctcttatgccataaagaacattcacggcgtcagaactggcttattcacccctgatatggccttcgaggccatcgtgaagaaacagatcgtgaagcttaaagagccatccctgaaatgcgttgatctcgtggtgtctgaactggccaccgtcattaaaaaatgtgccgaaaagctctccagctaccctaggctaagggaagagacggagcgtattgttaccacttatattagagaaagggagggaaggacgaaggatcaaatacttctcttaatagatattgaacagtcatacatcaatactaaccatgaggactttatcggcttcgcctag

SEQ ID NO: 21481 - DNA, 2601 bp, Artificial Sequence
  derived and/or modified sequence
atgggcaatagaggaatggaggagctgattccgctggtgaataagcttcaagatgcctttagttccattggacaatcctgccaccttgacttacctcagattgccgtggtcgggggacagtctgccggcaaaagtagtgtgctggagaacttcgtgggcagggacttccttcctagaggctccggcattgtgacgcggagaccgctgatattacaactgatctttagcaaaaccgagcacgcggagtttctgcactgcaagagtaaaaaattcactgactttgacgaagtgcgacaggaaatagaggctgaaactgatcgcgtcactggcaccaataagggcatttctcccgtgccgatcaatctccgcgtctattcaccacacgtgcttaatctcacattaattgaccttcctggaataaccaaagttcccgtgggggaccagccccccgacatagaataccaaatcaaagatatgattctgcagttcattagtcgtgaaagttctttgatcttagctgttacaccagcaaacatggacctcgcaaactctgacgccctgaaactggccaaggaggttgacccccagggtctacggactatcggggtcatcaccaagctggatcttatggacgagggtactgatgcccgggatgtcctggaaaataagcttctgccattacgccgcggctacataggggtcgtcaaccgctctcaaaaagatatagaagggaagaaagatattagagcggccctcgcagccgaaagaaagttctttctgtctcaccctgcctataggcacatggccgatagaatggggaccccccatctacagaagaccctgaaccagcagcttaccaatcatattagagagagcctccccgcccttcggtcgaagctccagagtcagttgctttctttggagaaagaagtagaggagtacaagaactttcgcccggacgatcctacacggaaaaccaaggccctgttgcaaatggttcaacagttcggcgtagattttgagaagcgaatcgaagggtctggtgaccaagtggatacattggagctctccggtggcgcaaggattaacagaatatttcacgaaagatttccgtttgaactggtgaaaatggagttcgatgaaaaagatcttagaagagagatctcatatgctatcaagaatatacatggcgtgaggaccggactttttaccccagatatggcattcgaagccatcgtgaagaaacagattgtgaaactgaaagagccgtcacttaaatgcgtcgacctcgttgtttcagaattggctacagtaatcaaaaagtgcgccgaaaagctgtctagctacccgcgactgagggaggagacagaacgcattgtgacaacatacatccgggagcgagagggcagaaccaaggaccagatcctcctcctgatcgatatagagcagagttacattaatactaaccatgaggacttcatcggtttcgctaacgcacaacagaggtctacacagttgaacaagaaacgcgccattccaaatcaggtcatccggcggggctggcttacaataaacaacattagtctcatgaaggggggcagtaaggagtattggtttgtccttactgcagagagcctgtcttggtacaaggacgaggaggagaaggagaagaagtacatgctgccactcgataatctgaaaataagggatgtggagaagggtttcatgtcgaataagcacgtgtttgcgatatttaatactgagcaacgaaatgtctataaagatttgcggcagatcgaactggcatgcgattctcaggaagacgtcgattcttggaaagcgtcttttttgagggctggcgtgtatcctgaaaaggatcaggcagaaaacgaagacggggcccaggagaacactttcagcatggatcctcagcttgaaagacaggtggagactatccggaacctcgtggactcctacgtggccattatcaataagtccatccgggatttgatgccgaaaactatcatgcatctcatgatcaacaacactaaggccttcatacatcacgaacttttggcatacctttactccagtgcagaccaatcatctctcatggaggaatccgcagaccaggcccaacgcagagatgatatgctgcgtatgtatcacgcactaaaggaggcactgaacattataggggacatctccactagcaccgtgtcaacgcccgtgcctcctcctgtcgacgatacttggctgcagtctgcctcaagccacagccccacccctcagagaagaccggtgagtagtatccacccacccgggcgacccccagcagtgcggggtcccaccccggggccccccctgattccagtgccagtcggcgcggccgctagctttagtgcccccccaatcccaagtcggccggggccacagtctgtgttcgcaaattcagacctgttccccgctcctcctcagattccttcgagacctgtgcggatccccccgggcataccacctggtgtcccgtctcgtaggccccctgcagccccaagcagaccgactatcattcgcccggctgaaccatctctgttagactag

SEQ ID NO: 21482 - DNA, 1200 bp, Artificial Sequence
  derived and/or modified sequence
atgttaccattagagccatatctcacacagacaagcgctgtccctcaaatgtcacactttatgtgtcacagccccacacataagccccagggtctgctcccatgggccccatttcatcaggcgagcgtaagtctttatcctataagtccctggccctccgagtccgtgtgcccccctacttgcccaggaggggctagttgttggtttccagcgggtaatgcctgggatcgggtggagttgggattcttaggatttggagctggcggagtgtccatagcagttccaggctttcccctgtcttgtgggcagggttgttgtgcaggggggtggctgggacacggcgctagatttccagctaagctgcgagcatttcctcaggttattagacgaggatggctgacgatcaataacatttctctaatgaaaggcggaagcaaagaatactggtttgttctgacggccgagtctttgtcgtggtacaaggatgaggaggagaaggaaaaaaagtatatgctaccgctggacaatctcaaaattagagacgtggaaaagggtttcatgtcgaataagcacgtcttcgcaatcttcaacacagagcagagaaacgtgtataaggacctccgtcagatcgagctggcctgtgattcccaggaagatgtagactcctggaaggcgtctttcctccgagccggggtctatcccgagaaagatcaagcagaaaatgaagatggagcccaggaaaacacttttagtatggaccctcaacttgaacgccaggtggagactattcggaaccttgttgattcatatgtcgccattatcaataagtcaatcagggatcttatgccaaaaaccattatgcacctcatgatcaacaatacgaaagcgtttattcaccatgaactcctcgcgtatctgtatagctccgcagatcagagcagtctgatggaagagtctgctgatcaggcccaaaggagagatgacatgctgcggatgtaccacgcgttgaaggaagcactcaatattatcggagatatttctacctccacagtgtctacccctgttccaccacctgtggacgatacctggctgcaatctgcttcttctcattcccccaccccacaacgccggcccgtgtcctccatccatcctcccgggaggcctcccgctgtgcgtggccctacgcctggacccccctag

SEQ ID NO: 21483 - DNA, 1461 bp, Artificial Sequence
  derived and/or modified sequence
catgtgacagtggccgctgctgacagctggaagcccccagccagcgcccagcacgtgggccgggcccccagggctggagctgccacctgcttcctgggcccccggccccccagccacctgggcggccgggacttcctgccccggggcagcggcatcgtgacccggcggcccctcatcctgcagctgatcttcagcaagacagaacatgctgagttcctgcactgcaagagcaagaagttcacagactttgatgaggtgcggcaggagattgaggccgagacagacagagtgacaggcaccaacaagggcatcagccctgtgcccatcaacctgcgggtgtacagcccccacgtgctgaacctgaccctgattgacctgcccggcatcaccaaggtgcctgtgggggaccagcccccagacatcgagtaccagatcaaggacatgatcctgcagttcatcagccgggagagcagcctcatcctggccgtgaccccagccaacatggacctggccaacagtgatgccctgaagctggccaaggaggtggacccccagggcctgcggaccatcggggtcatcaccaagctggacctgatggatgagggcacagatgccagagatgtgctggagaacaagctgctgcccctgcggcggggctacatcggcgtggtgaacagaagccagaaggacatcgagggcaagaaggacatccgggccgccctggccgctgagaggaagttcttcctgagccacccagcctaccgccacatggctgacaggatgggcaccccccacctgcagaagaccctgaaccagcagctgaccaaccacatccgggagagcctgcctgccctgcggagcaagctgcagagccagctgctgagcctggagaaggaggtggaggagtacaagaacttccggccagatgaccccaccaggaagaccaaggccctgctgcagatggtgcagcagtttggagtggactttgagaagagaattgagggcagcggggaccaggtggacaccctggagctgagcggcggggcccgcatcaaccgcatcttccacgagcgcttcccctttgagctggtgaagatggagtttgatgagaaggacctgcggcgggagatctcctatgccatcaagaacatccatggagtgaggacaggcctcttcaccccagacatggcctttgaggccatcgtgaagaagcagatcgtgaagctgaaggagcccagcctgaagtgtgtggacctggtggtgtctgagctggccaccgtcatcaagaagtgtgccgagaagctgagcagctacccccggctgcgggaggagacagagcgcatcgtgaccacctacatccgggagcgggagggccgcaccaaggaccagatcctgctgctgattgacatcgagcagagctacatcaacaccaaccacgaggacttcatcggctttgcctag

SEQ ID NO: 21484 - DNA, 2601 bp, Artificial Sequence
  derived and/or modified sequence
atgggcaacagaggcatggaggagctgatccccctggtgaacaagctgcaggatgccttcagcagcatcggccagagctgccacctggacctgccccagattgctgtggtgggcggccagagcgctgggaagagctctgtgctggagaactttgtgggccgggacttcctgccccggggcagcggcatcgtgacccggcggcccctcatcctgcagctgatcttcagcaagacagagcacgccgagttcctgcactgcaagagcaagaagttcacagactttgatgaggtgcggcaggagattgaagctgagacagacagagtgacaggcaccaacaagggcatcagccctgtgcccatcaacctgcgggtgtacagcccccacgtgctgaacctgaccctgattgacctgcccggcatcaccaaggtgcctgtgggggaccagcccccagacatcgagtaccagatcaaggacatgatcctgcagttcatcagccgggagagcagcctcatcctggccgtgaccccagccaacatggacctggccaacagtgatgccctgaagctggccaaggaggtggacccccagggcctgcggaccatcggggtcatcaccaagctggacctgatggatgagggcacagatgccagagatgtgctggagaacaagctgctgcccctgcggcggggctacatcggcgtggtgaacagaagccagaaggacatcgagggcaagaaggacatccgggccgccctggccgctgagaggaagttcttcctgagccacccagcctaccgccacatggctgacaggatgggcaccccccacctgcagaagaccctgaaccagcagctgaccaaccacatccgggagagcctgcctgccctgcggagcaagctgcagagccagctgctgagcctggagaaggaggtggaggagtacaagaacttccggccagatgaccccaccaggaagaccaaggccctgctgcagatggtgcagcagtttggagtggactttgagaagagaattgagggcagcggggaccaggtggacaccctggagctgtctggaggagcccgcatcaaccgcatcttccacgagcgcttcccctttgagctggtgaagatggagtttgatgagaaggacctgcggcgggagatctcctatgccatcaagaacatccacggcgtgaggacaggcctcttcaccccagacatggcctttgaggccatcgtgaagaagcagatcgtgaagctgaaggagcccagcctgaagtgtgtggacctggtggtgtctgagctggccaccgtcatcaagaagtgtgccgagaagctgagcagctacccccggctgcgggaggagacagaaagaattgtgaccacctacatccgggagcgggagggccgcaccaaggaccagatcctgctgctgattgatattgagcagagctacatcaacaccaaccacgaggacttcatcggctttgccaatgcccagcagaggagcacccagctgaacaagaagagggccatccccaaccaggtgatccggcggggctggctgaccatcaacaacatcagcctgatgaagggcggcagcaaggagtactggtttgtgctgacagctgagagcctgtcctggtacaaggatgaggaggagaaggagaagaagtacatgctgcccctggacaacctgaagatcagagatgtggagaagggcttcatgagcaacaagcacgtgtttgccatcttcaacacagagcagagaaatgtgtacaaggacctgcggcagatcgagctggcctgtgacagccaggaggatgtggacagctggaaggccagcttcctgcgggccggcgtgtacccagagaaggaccaggctgaaaatgaagatggagcccaggagaacaccttctccatggacccccagctggagcggcaggtggagaccatccggaacctggtggacagctatgtggccatcatcaacaagagcatccgggacctgatgcccaagaccatcatgcacctgatgatcaacaacaccaaggccttcatccaccacgagctgctggcctacctgtacagcagcgctgaccagagcagcctgatggaggagagcgctgaccaggcccagaggagagatgacatgctgaggatgtaccacgccctgaaggaggccctgaacatcatcggggacatcagcaccagcacagtgtccacccctgtgcccccacctgtggatgacacctggctgcagagcgccagcagccacagccccaccccccagaggaggcctgtgagcagcatccaccccccaggccggcccccagctgtgcggggccccaccccaggccccccactcatccctgtgcctgtgggcgctgctgccagcttcagcgccccacccatccccagcaggcctggcccccagagcgtgtttgccaacagcgacctcttccctgccccaccccagatccccagcaggcctgtgcgcatccccccaggcatccccccaggagtgcccagcagaagacctcctgctgcccccagccggcccaccatcatccggcctgctgagcccagcctgctggactag

SEQ ID NO: 21485 - DNA, 1200 bp, Artificial Sequence
  derived and/or modified sequence
atgctgcccctggagccctacctgacccagaccagcgctgtgccccagatgagccacttcatgtgccacagccccacccacaagccccagggcctgctgccctgggcccccttccaccaggcctctgtgtccctgtaccccatcagcccctggcccagcgagagcgtgtgcccccccacctgccctgggggcgccagctgctggttccctgctggaaatgcctgggacagagtggagctgggcttcctgggctttggagctggaggagtgtccattgctgtgcccggcttccccctgagctgtggccagggctgctgtgccggcggctggctgggccatggagcccgcttccctgccaagctgcgggccttcccccaggtgatcagaagaggctggctgaccatcaacaacatcagcctgatgaagggcggcagcaaggagtactggtttgtgctgacagctgagagcctgtcctggtacaaggatgaggaggagaaggagaagaagtacatgctgcccctggacaacctgaagatcagagatgtggagaagggcttcatgagcaacaagcacgtgtttgccatcttcaacacagagcagagaaatgtgtacaaggacctgcggcagatcgagctggcctgtgacagccaggaggatgtggacagctggaaggccagcttcctgcgggccggcgtgtacccagagaaggaccaggccgagaatgaagatggagcccaggagaacaccttctccatggacccccagctggagcggcaggtggagaccatccggaacctggtggacagctatgtggccatcatcaacaagagcatccgggacctgatgcccaagaccatcatgcacctgatgatcaacaacaccaaggccttcatccaccacgagctgctggcctacctgtacagcagcgctgaccagagcagcctgatggaggagagcgctgaccaggcccagaggagagatgacatgctgaggatgtaccacgccctgaaggaggccctgaacatcattggagacatcagcaccagcacagtgtccacccctgtgcccccacctgtggatgacacctggctgcagagcgccagcagccacagccccaccccccagaggaggcctgtgagcagcatccaccccccaggccggcccccagctgtgcggggccccaccccaggccccccatag

SEQ ID NO: 21486 - DNA, 1461 bp, Artificial Sequence
  derived and/or modified sequence
cacgtgaccgtggccgccgccgacagctggaagccccccgccagcgcacagcacgtaggacgcgcacctagggccggggccgcaacttgtttcctggggccccggccacccagtcatctggggggcagggacttcctgcccaggggctccggaatcgtcactcgtagaccgctgattctgcagctcatattcagcaagacggagcacgcggaattcctccactgtaagagtaagaaattcaccgacttcgacgaggttaggcaagagatcgaagccgagacagacagagtcaccggaactaacaaaggtatcagccccgtgccaataaacctgagggtgtattcaccacacgtgttgaaccttactctgatagatcttccaggcataaccaaggtgcccgtaggcgaccagcccccggatatcgaataccagatcaaggatatgatactgcagttcatcagtcgcgagtcttccctgatcttagccgtcacgccggcgaacatggatttggccaactcagacgccctgaagctggctaaagaggtcgacccccagggactgagaaccatcggagtgataaccaaactggatcttatggacgaggggacagacgcccgcgatgtgctggagaacaaactccttcctctcagacgtggctatatcggtgttgtgaaccgttcccagaaagatattgaaggaaaaaaagacatacgggcagccctagccgctgagaggaagttttttctttcccatcccgcttatcgccatatggcagatcggatgggcacaccccatcttcagaagaccctgaaccaacagctgacaaaccacatccgtgagtccctgccagcactccggtcaaagctgcaaagtcagcttttgtcattggaaaaagaggttgaggagtacaagaactttcgccccgatgatccaacacgaaagacaaaggcacttctgcagatggtccagcaatttggtgttgatttcgagaagagaatcgaggggtctggagatcaagtcgacactctcgagctgagtggcggcgctaggatcaacaggattttccatgagcgcttcccttttgagctggtgaagatggagtttgatgaaaaggacctgagacgggagatctcatacgccatcaaaaatatacacggcgtgagaacaggcctattcacacccgatatggcgtttgaagcaatagtgaaaaaacaaatcgtgaagcttaaggaaccgtctctgaaatgtgtggaccttgttgtgagcgaacttgccaccgtcattaaaaagtgcgccgagaagctgtcctcctatccccgtcttcgcgaagaaacagagaggatcgtcacaacttatatccgagagagagaagggcgcacaaaagaccagattttactgttaatcgatatagagcagagctacattaacactaaccacgaggattttatcgggtttgcatag

SEQ ID NO: 21487 - DNA, 2601 bp, Artificial Sequence
  derived and/or modified sequence
atgggcaaccggggcatggaggagctgatccccctggtgaacaagctgcaggatgcctttagctccatcgggcaaagttgtcacctcgacctcccacagatcgctgttgtggggggccagagcgcaggtaaatcatcggtcctggaaaacttcgtggggcgggacttcctaccccggggatcgggaatcgtgactcgacgcccacttattttgcagctcattttttccaaaaccgagcatgcagaattcttacattgcaagtcgaagaagtttaccgacttcgatgaggtaaggcaggaaattgaagccgagaccgatagagtcacaggaacgaataagggaatcagcccagtgcccattaacctgagggtgtactctcctcacgtgctaaacctgacactcatagatctccccgggattacgaaggtccctgttggtgatcagcctccagatattgagtaccagatcaaggacatgatcctccagttcatttcaagagaatcgagcctgatcctggccgtcactcccgcaaacatggatttggccaactccgacgctctgaagctggccaaagaagtagaccctcagggactgcggacaatcggcgtcattactaagctggatctcatggatgaggggacagatgctcgggacgtacttgagaacaaactactcccactgcggcgaggatacattggagttgtcaaccgctctcaaaaagacatcgagggcaagaaagatattagagcggccctcgcggccgagcgcaaattctttttgtcacacccagcctatagacacatggccgacaggatgggaaccccgcatctccagaaaaccctcaatcaacaactaactaaccatattcgtgaaagcttgcccgccctgcgatccaagctgcagagccagctgctctccctggagaaagaggtggaagaatacaagaactttcgaccagacgatcctacacgaaaaactaaggctctgctgcagatggtccagcagtttggcgtggacttcgaaaaacgaatcgagggaagtggtgatcaggttgacactttagaactatcgggcggcgcccgcattaatcgtattttccatgagaggttcccatttgaacttgtgaaaatggaattcgatgaaaaagatctgcgccgagaaatcagctacgccattaagaacatccacggtgtccggacagggctctttacacctgatatggccttcgaagcgattgttaagaagcagattgtgaaacttaaggagccgtccctcaagtgtgtggaccttgtggtgtctgaactcgccacagtgataaaaaaatgcgccgagaagctgagcagctatcccaggctgcgcgaggaaacagaacgcattgtgaccacgtacatcagggagagggagggacgcactaaggatcaaattctgctcctaattgatattgagcagtcctacataaacacgaatcacgaggattttataggttttgcaaatgctcagcagcgttccacgcagctcaacaaaaagagggccataccgaatcaggtgatcagacgtggctggctcactattaacaacatttctctaatgaagggaggctccaaagagtactggtttgtcctgaccgctgagtctcttagctggtacaaggacgaagaggagaaagaaaaaaagtatatgctccctttggacaacttaaagatccgcgacgtggagaagggattcatgtcgaataagcacgtgtttgccatattcaataccgagcagcgtaacgtgtacaaagacctcagacagattgagctagcttgtgactctcaggaggacgtggatagctggaaggcttccttcttgcgtgcaggggtttatccagaaaaggaccaagcggagaacgaagacggggcgcaggagaatactttttccatggacccccagctagagagacaggttgaaacgattcggaacctcgtagacagctatgtggccatcatcaataaatctatcagggatctaatgcccaaaaccatcatgcacctgatgatcaacaacaccaaagcatttatccatcatgagctactggcctatctgtactcttctgctgaccaatcctccctgatggaggaatcagcagaccaggcacagcgacgagatgatatgctacgcatgtaccacgcattaaaggaggccttgaacatcataggcgatatctctacatccaccgtgtccacccccgtgccgcctcctgtcgatgatacctggcttcagtcagcttcctcccacagccccactccacagaggagacctgtgtcgagcattcacccgcccgggaggccccctgcggtgagaggacccacaccaggtcccccccttattccagttccagtgggagcggcagcatcatttagcgctcctccaatcccatcacggcccggtccacaaagtgttttcgccaactccgacctgtttccagccccacctcagatcccctctagaccagtgcgcatcccaccaggcattcctccgggcgtgccatccaggcgcccgccagcagcgccttctaggccaacaatcatcaggccagcggaaccctcccttctcgactag

SEQ ID NO: 21488 - DNA, 1200 bp, Artificial Sequence
  derived and/or modified sequence
atgctgcccctggagccctacctgacccagaccagcgccgtgccccaaatgtcccattttatgtgccattctccgacacataaaccccaggggctactgccatgggcaccttttcaccaagcgtctgtctctctgtatccgatctctccatggcccagtgagtctgtatgtcctccaacatgtccaggtggagcctcttgctggtttcccgccggaaacgcctgggatagggttgaacttggcttcctgggctttggagctgggggggtgtctattgctgtacctggctttccacttagttgcggtcagggatgttgtgcaggcggttggctggggcacggtgcccgattccctgccaagcttcgcgccttcccccaagtgatcagacgcgggtggctaaccattaacaacatcagcctgatgaaggggggctcaaaagagtactggtttgtgctgactgcagaaagtctgtcttggtataaagacgaagaagagaaagagaaaaaatatatgctgccattggacaatcttaaaattcgtgatgtggagaaaggcttcatgagcaataagcatgtatttgctattttcaatactgagcagaggaacgtgtataaggacctgaggcagatcgagctcgcctgtgatagccaggaagacgttgacagctggaaggcatcattccttcgcgctggagtctacccggagaaagatcaggccgagaacgaggacggcgcccaagagaacactttttccatggacccccaattggagaggcaagtggagaccatcagaaacttggtggactcatacgtcgcgattatcaacaagtccatcagggatctgatgccgaaaacgatcatgcacctcatgataaataataccaaggccttcattcaccacgagctgcttgcatatctgtatagttcggcagaccagtcgtcactgatggaggagtctgccgatcaggctcagagaagagacgacatgctccgtatgtatcatgccctgaaagaggccctgaatatcatcggcgacatttctacctctaccgtgagcacaccagtgcctccaccggttgacgacacctggttgcagtccgcaagctcccattctcctacgccccagaggcgccctgtgtcatccatccatccaccaggcagaccaccagcagtgcgaggaccaactcccggccctccctag

SEQ ID NO: 21489 - DNA, 1461 bp, Artificial Sequence
  derived and/or modified sequence
cacgtcacagtagcagcagccgattcgtggaaacccccagccagcgctcaacacgtcgggcgagcgccaagagctggcgcagccacatgtttccttggaccacggccaccctcgcatctaggtggcagagacttccttccacggggatccggcatagtcactagaagacccctgattttacagctgatcttcagtaagacagagcacgctgagttcctgcactgcaagtctaagaagttcaccgactttgatgaggtaaggcaggaaatcgaagctgagacggatcgcgtgactggaaccaacaagggcatctcaccggtacccatcaatctgagggtgtattcccctcatgtgttgaatctgaccctcattgacctccctggaataaccaaggttcccgtgggcgatcagccgcctgacatcgaataccaaataaaagacatgatcctacagttcatttcccgcgagagctctctcattctagccgttacccccgctaacatggaccttgctaatagcgatgcactaaaactggcaaaggaagtggatccccaggggctcaggaccatcggagtcattaccaagctggatctgatggatgagggaacggatgcgcgtgacgtcctggagaacaaacttttaccccttcgacggggatacatcggtgtagtgaatcggtcccaaaaggacatcgaaggcaagaaggatataagagccgctcttgccgctgagcgcaagttcttcttgagtcatcccgcatatcggcacatggcagaccggatgggtactccacaccttcagaagaccctgaaccagcaactgaccaaccatattcgagagtcactccctgctctcaggtcaaagttgcagtctcagcttttgtcactggaaaaggaggtagaggaatataaaaactttcgcccagatgaccccacaagaaaaacaaaagcattactgcagatggttcagcaatttggggttgattttgagaagagaatagagggcagtggggatcaggttgatactctggagctgtcgggaggggctagaataaataggatatttcatgagagatttcctttcgagcttgtgaagatggaatttgacgaaaaagacttacgacgtgagataagctacgctataaaaaatatccatggcgtgcgaaccggcctgtttacccctgatatggcctttgaagcaattgtgaagaaacagatagttaagctgaaagagccttctttaaagtgtgtagatctggtagtttccgaattagcaacagtgattaaaaagtgcgccgagaagctctcctcttacccgaggttgagagaagaaacggaaaggatcgtgacaacatacattcgagaacgggaaggccgtaccaaggatcagatattgctcctgatcgacatagaacaaagttatatcaataccaatcatgaagactttataggctttgcttag

SEQ ID NO: 21490 - DNA, 2601 bp, Artificial Sequence
  derived and/or modified sequence
atgggaaatcgtggtatggaggagttaattcccctcgtcaataaattacaagatgcctttagttctatcggacaatcctgccaccttgacctaccacaaatcgccgtagtggggggacagtccgccggaaaaagtagtgtgctcgagaactttgtgggacgcgatttcttgcccagggggtccggaattgtgactagacgccctctgatcttgcaactgattttttccaagaccgaacacgcggaattccttcattgcaagagtaaaaagtttactgactttgacgaagtaaggcaagaaatcgaagcagagacggatcgggtgaccgggacaaacaaaggcatcagccccgtgccgattaatcttcgtgtgtacagtccacacgtgctgaatctgacgctaattgatctgcccggtattacgaaggtccccgtgggcgaccaacccccagacatcgaataccagatcaaggatatgatactccagtttatttcaagggagtctagcctgattttagccgtcacgccagccaatatggatttggctaattccgatgccctcaaattagccaaggaagtggacccgcagggccttaggacaatcggcgtgattaccaagctggacttgatggacgaggggaccgatgccagggatgtgctggaaaataagctgctccccctgcgtagagggtatatcggcgtggtgaaccggtctcagaaagatattgagggaaagaaggatatacgggcagctttggctgcagaacggaaattttttctgagtcaccccgcttatcgccacatggccgatagaatgggcacaccccatctgcagaagaccctaaatcaacaacttacaaaccatatcagggagtccctgccagctctgcggtctaaactccagagtcaattgctgagcctggaaaaggaggtggaagaatataagaattttcgcccagacgaccctacgagaaagaccaaggctctgttacagatggttcaacagttcggggtcgattttgaaaagagaatcgaaggtagcggggatcaggtggacaccctcgaactgagcggtggggcacgcatcaatcggattttccatgagcgttttccttttgagctggtgaagatggaatttgatgaaaaagaccttcgccgagagatttcttacgccattaaaaacattcatggggtgcgcaccgggctgtttactcccgatatggcttttgaggcgattgtgaaaaaacagattgtaaagctcaaggagccgtccctcaagtgtgtggacctggtagtgtctgagctcgctactgtgatcaaaaaatgtgccgaaaagctatcgagctatcccagactccgcgaggagacagagcgcatcgtcactacctatatacgcgagcgagaaggcaggaccaaggatcagatcctccttctgatcgacattgaacagtcctacataaacaccaaccatgaagatttcattggtttcgcaaacgcccagcaacggtctacgcaactgaataagaaacgcgcaattccaaatcaagtaatccgaaggggttggttgactattaacaacatatcactcatgaaagggggaagcaaagaatactggtttgtgctgaccgccgaaagcctgagctggtataaagatgaggaggagaaagaaaagaagtacatgttacccctggacaatttaaaaattagagacgtggagaagggattcatgtccaataagcacgtgtttgccatcttcaacacagaacagcgcaacgtctataaggacttgcgccaaatcgagctggcatgtgacagccaggaggatgtggatagctggaaggccagctttctgcgcgcaggagtatacccggagaaagaccaggctgaaaatgaagacggcgcacaggaaaacaccttcagcatggaccctcagctggaacgccaggtcgaaaccatccgcaacctggtcgattcctacgtcgcaattattaacaagagtatccgcgatctgatgcctaagacaatcatgcatcttatgatcaacaataccaaagcctttatacaccacgagcttctggcttacttatatagctccgcggaccagtcttcccttatggaggagagcgccgatcaggcacagagaagagacgacatgctgagaatgtaccacgcactgaaggaagctctcaacattataggcgacatttcgacgtctactgttagcacacctgttcctccacctgtggatgatacctggctgcaaagcgcctcatcccactccccaacgccccaacgcaggcctgtaagctcgatccacccccctggaaggcctcctgccgtgcggggtcccaccccaggcccacccctcatacccgtgccagttggcgcagcagcctcctttagtgcaccccctatccccagccggccaggaccacaatccgtcttcgccaattcagacctgtttcctgcaccccctcagattccaagtaggcccgtgcgcatcccacccggaattccacctggggtcccttcacggcgtcctcctgctgccccatctcggccaaccataattaggcccgctgaacccagcttgctggattag

SEQ ID NO: 21491 - DNA, 1200 bp, Artificial Sequence
  derived and/or modified sequence
atgctcccactggagccatacttgacccagactagcgccgtgccgcaaatgtcacattttatgtgccactcacccacgcacaagccacagggcctgctgccatgggccccattccaccaggcctcagtgtccctgtaccccatctctccttggccctcagagtccgtctgccctcctacctgtcccggtggagcgtcttgctggttccccgctgggaatgcatgggatagagtggagcttgggttcctagggttcggggcagggggagttagcatcgctgtgcccggttttccgctgtcatgcgggcaaggctgctgtgccggaggctggctggggcatggcgctcgattccctgctaaacttcgggcatttccacaagtaatcaggaggggctggctcaccataaacaacatctccctgatgaaaggagggtctaaggaatattggtttgttctaactgctgaatcactgtcttggtacaaggacgaagaggaaaaagagaagaaatacatgcttccgctcgacaatttaaagatccgagacgtggaaaaaggctttatgtccaataagcacgtgttcgctatttttaacaccgagcaaaggaacgtctacaaggatcttcggcagatagagctggcgtgcgacagccaggaagacgtcgacagctggaaggcctcttttttacgggctggagtatatcccgaaaaagaccaggccgaaaacgaggatggcgcacaagaaaacacattctccatggaccctcaacttgaaagacaggtggagaccatccggaatctggtggatagctacgtggcaatcatcaataagagtatccgagatctgatgccaaaaacgattatgcatctgatgattaataatacaaaggcctttatccaccatgaacttctcgcgtatctttatagctctgcagaccaaagttctttgatggaggagagcgccgatcaggcacaaaggcgggatgatatgctgcgcatgtaccacgccttgaaggaagcattaaacattatcggcgatatatcaactagtaccgtttccactcccgttccaccacctgttgatgatacttggctgcagagcgcctcctcacacagtcccacaccacagcgccgtccagttagtagcatccatcctcctggacgacccccagctgtccgaggtcctacccctggccctccgtag

SEQ ID NO: 21492 - DNA, 1461 bp, Artificial Sequence
  derived and/or modified sequence
cacgtgaccgtggccgccgccgacagctggaagccccccgccagcgcccagcacgtgggcagagcccccagagccggcgccgccacctgcttcctgggccccagaccccccagccacctgggcggcagagacttcctgcccagaggcagcggcatcgtgaccagaagacccctgatcctgcagctgatcttcagcaagaccgagcacgccgagttcctgcactgcaagagcaagaagttcaccgacttcgacgaggtgagacaggagatcgaggccgagaccgacagagtgaccggcaccaacaagggcatcagccccgtgcccatcaacctgagagtgtacagcccccacgtgctgaacctgaccctgatcgacctgcccggcatcaccaaggtgcccgtgggcgaccagccccccgacatcgagtaccagatcaaggacatgatcctgcagttcatcagcagagagagcagcctgatcctggccgtgacccccgccaacatggacctggccaacagcgacgccctgaagctggccaaggaggtggacccccagggcctgagaaccatcggcgtgatcaccaagctggacctgatggacgagggcaccgacgccagagacgtgctggagaacaagctgctgcccctgagaagaggctacatcggcgtggtgaacagaagccagaaggacatcgagggcaagaaggacatcagagccgccctggccgccgagagaaagttcttcctgagccaccccgcctacagacacatggccgacagaatgggcaccccccacctgcagaagaccctgaaccagcagctgaccaaccacatcagagagagcctgcccgccctgagaagcaagctgcagagccagctgctgagcctggagaaggaggtggaggagtacaagaacttcagacccgacgaccccaccagaaagaccaaggccctgctgcagatggtgcagcagttcggcgtggacttcgagaagagaatcgagggcagcggcgaccaggtggacaccctggagctgagcggcggcgccagaatcaacagaatcttccacgagagattccccttcgagctggtgaagatggagttcgacgagaaggacctgagaagagagatcagctacgccatcaagaacatccacggcgtgagaaccggcctgttcacccccgacatggccttcgaggccatcgtgaagaagcagatcgtgaagctgaaggagcccagcctgaagtgcgtggacctggtggtgagcgagctggccaccgtgatcaagaagtgcgccgagaagctgagcagctaccccagactgagagaggagaccgagagaatcgtgaccacctacatcagagagagagagggcagaaccaaggaccagatcctgctgctgatcgacatcgagcagagctacatcaacaccaaccacgaggacttcatcggcttcgcctag

SEQ ID NO: 21493 - DNA, 2601 bp, Artificial Sequence
  derived and/or modified sequence
atgggcaacagaggcatggaggagctgatccccctggtgaacaagctgcaggacgccttcagcagcatcggccagagctgccacctggacctgccccagatcgccgtggtgggcggccagagcgccggcaagagcagcgtgctggagaacttcgtgggcagagacttcctgcccagaggcagcggcatcgtgaccagaagacccctgatcctgcagctgatcttcagcaagaccgagcacgccgagttcctgcactgcaagagcaagaagttcaccgacttcgacgaggtgagacaggagatcgaggccgagaccgacagagtgaccggcaccaacaagggcatcagccccgtgcccatcaacctgagagtgtacagcccccacgtgctgaacctgaccctgatcgacctgcccggcatcaccaaggtgcccgtgggcgaccagccccccgacatcgagtaccagatcaaggacatgatcctgcagttcatcagcagagagagcagcctgatcctggccgtgacccccgccaacatggacctggccaacagcgacgccctgaagctggccaaggaggtggacccccagggcctgagaaccatcggcgtgatcaccaagctggacctgatggacgagggcaccgacgccagagacgtgctggagaacaagctgctgcccctgagaagaggctacatcggcgtggtgaacagaagccagaaggacatcgagggcaagaaggacatcagagccgccctggccgccgagagaaagttcttcctgagccaccccgcctacagacacatggccgacagaatgggcaccccccacctgcagaagaccctgaaccagcagctgaccaaccacatcagagagagcctgcccgccctgagaagcaagctgcagagccagctgctgagcctggagaaggaggtggaggagtacaagaacttcagacccgacgaccccaccagaaagaccaaggccctgctgcagatggtgcagcagttcggcgtggacttcgagaagagaatcgagggcagcggcgaccaggtggacaccctggagctgagcggcggcgccagaatcaacagaatcttccacgagagattccccttcgagctggtgaagatggagttcgacgagaaggacctgagaagagagatcagctacgccatcaagaacatccacggcgtgagaaccggcctgttcacccccgacatggccttcgaggccatcgtgaagaagcagatcgtgaagctgaaggagcccagcctgaagtgcgtggacctggtggtgagcgagctggccaccgtgatcaagaagtgcgccgagaagctgagcagctaccccagactgagagaggagaccgagagaatcgtgaccacctacatcagagagagagagggcagaaccaaggaccagatcctgctgctgatcgacatcgagcagagctacatcaacaccaaccacgaggacttcatcggcttcgccaacgcccagcagagaagcacccagctgaacaagaagagagccatccccaaccaggtgatcagaagaggctggctgaccatcaacaacatcagcctgatgaagggcggcagcaaggagtactggttcgtgctgaccgccgagagcctgagctggtacaaggacgaggaggagaaggagaagaagtacatgctgcccctggacaacctgaagatcagagacgtggagaagggcttcatgagcaacaagcacgtgttcgccatcttcaacaccgagcagagaaacgtgtacaaggacctgagacagatcgagctggcctgcgacagccaggaggacgtggacagctggaaggccagcttcctgagagccggcgtgtaccccgagaaggaccaggccgagaacgaggacggcgcccaggagaacaccttcagcatggacccccagctggagagacaggtggagaccatcagaaacctggtggacagctacgtggccatcatcaacaagagcatcagagacctgatgcccaagaccatcatgcacctgatgatcaacaacaccaaggccttcatccaccacgagctgctggcctacctgtacagcagcgccgaccagagcagcctgatggaggagagcgccgaccaggcccagagaagagacgacatgctgagaatgtaccacgccctgaaggaggccctgaacatcatcggcgacatcagcaccagcaccgtgagcacccccgtgcccccccccgtggacgacacctggctgcagagcgccagcagccacagccccaccccccagagaagacccgtgagcagcatccacccccccggcagaccccccgccgtgagaggccccacccccggcccccccctgatccccgtgcccgtgggcgccgccgccagcttcagcgccccccccatccccagcagacccggcccccagagcgtgttcgccaacagcgacctgttccccgcccccccccagatccccagcagacccgtgagaatcccccccggcatcccccccggcgtgcccagcagaagaccccccgccgcccccagcagacccaccatcatcagacccgccgagcccagcctgctggactag

SEQ ID NO: 21494 - DNA, 1200 bp, Artificial Sequence
  derived and/or modified sequence
atgctgcccctggagccctacctgacccagaccagcgccgtgccccagatgagccacttcatgtgccacagccccacccacaagccccagggcctgctgccctgggcccccttccaccaggccagcgtgagcctgtaccccatcagcccctggcccagcgagagcgtgtgcccccccacctgccccggcggcgccagctgctggttccccgccggcaacgcctgggacagagtggagctgggcttcctgggcttcggcgccggcggcgtgagcatcgccgtgcccggcttccccctgagctgcggccagggctgctgcgccggcggctggctgggccacggcgccagattccccgccaagctgagagccttcccccaggtgatcagaagaggctggctgaccatcaacaacatcagcctgatgaagggcggcagcaaggagtactggttcgtgctgaccgccgagagcctgagctggtacaaggacgaggaggagaaggagaagaagtacatgctgcccctggacaacctgaagatcagagacgtggagaagggcttcatgagcaacaagcacgtgttcgccatcttcaacaccgagcagagaaacgtgtacaaggacctgagacagatcgagctggcctgcgacagccaggaggacgtggacagctggaaggccagcttcctgagagccggcgtgtaccccgagaaggaccaggccgagaacgaggacggcgcccaggagaacaccttcagcatggacccccagctggagagacaggtggagaccatcagaaacctggtggacagctacgtggccatcatcaacaagagcatcagagacctgatgcccaagaccatcatgcacctgatgatcaacaacaccaaggccttcatccaccacgagctgctggcctacctgtacagcagcgccgaccagagcagcctgatggaggagagcgccgaccaggcccagagaagagacgacatgctgagaatgtaccacgccctgaaggaggccctgaacatcatcggcgacatcagcaccagcaccgtgagcacccccgtgcccccccccgtggacgacacctggctgcagagcgccagcagccacagccccaccccccagagaagacccgtgagcagcatccacccccccggcagaccccccgccgtgagaggccccacccccggccccccctag

SEQ ID NO: 21495 - DNA, 3654 bp, Artificial Sequence
  derived and/or modified sequence
gaggtcgctcgggtcgggtgtcgcctgagaaccggatgaggcggcgaccgtgaggccgagccgggagcgggcgtcttgccgaggcccgggcgggcggggagcaacggctacagacgccgcggggccaggtcgttgagggtcggcggcgggcgaggagcgcagggcgctcgggccgggggccgccggcgccatgggcaaccgcgggatggaagagctgatcccgctggtcaacaaactgcaggacgccttcagctccatcggccagagctgccacctggacctgccgcagatcgctgtagtgggcggccagagcgccggcaagagctcggtgctggagaacttcgtgggccgggacttccttccccgcggttcaggaatcgtcacccggcggcctctcattctgcagctcatcttctcaaaaacagaacatgccgagtttttgcactgcaagtccaaaaagtttacagactttgatgaagtccggcaggagattgaagcagagaccgacagggtcacggggaccaacaaaggcatctccccagtgcccatcaaccttcgagtctactcgccacacgtgttgaacttgaccctcatcgacctcccgggtatcaccaaggtgcctgtgggcgaccagcctccagacatcgagtaccagatcaaggacatgatcctgcagttcatcagccgggagagcagcctcattctggctgtcacgcccgccaacatggacctggccaactccgacgccctcaagctggccaaggaagtcgatccccaaggcctacggaccatcggtgtcatcaccaagcttgacctgatggacgagggcaccgacgccagggacgtcttggagaacaagttgctcccgttgagaagaggctacattggcgtggtgaaccgcagccagaaggatattgagggcaagaaggacatccgtgcagcactggcagctgagaggaagttcttcctctcccacccggcctaccggcacatggccgaccgcatgggcacgccacatctgcagaagacgctgaatcagcaactgaccaaccacatccgggagtcgctgccggccctacgtagcaaactacagagccagctgctgtccctggagaaggaggtggaggagtacaagaactttcggcccgacgaccccacccgcaaaaccaaagccctgctgcagatggtccagcagtttggggtggattttgagaagaggatcgagggctcaggagatcaggtggacactctggagctctccgggggcgcccgaatcaatcgcatcttccacgagcggttcccatttgagctggtgaagatggagtttgacgagaaggacttacgacgggagatcagctatgccattaagaacatccatggagtcaggacggggctcttcacccccgacatggcctttgaagccattgtgaaaaaacagattgtaaaactcaaagagccgagtttgaagtgtgttgatctcgtggtctcagagctggccacggtcataaaaaagtgtgccgagaagctcagttcctacccccggttgcgagaggagacagagcgaatcgtcaccacttacatccgggaacgggaggggagaacgaaggaccagattcttctgctgatcgacattgagcagtcctacatcaacacgaaccatgaggacttcatcgggtttgccaatgcccagcagaggagcacgcagctgaacaagaagagagccatccccaatcaggtgatccgcaggggctggctgaccatcaacaacatcagcctgatgaaaggcggctccaaggagtactggtttgtgctgactgccgagtcactgtcctggtacaaggatgaggaggagaaagagaagaagtacatgctgcctctggacaacctcaagatccgtgatgtggagaagggcttcatgtccaacaagcacgtcttcgccatcttcaacacggagcagagaaacgtctacaaggacctgcggcagatcgagctggcctgtgactcccaggaagacgtggacagctggaaggcctcgttcctccgagctggcgtctaccccgagaaggaccaggcagaaaacgaggatggggcccaggagaacaccttctccatggacccccaactggagcggcaggtggagaccattcgcaacctggtggactcatacgtggccatcatcaacaagtccatccgcgacctcatgccaaagaccatcatgcacctcatgatcaacaatacgaaggccttcatccaccacgagctgctggcctacctatactcctcggcagaccagagcagcctcatggaggagtcggctgaccaggcacagcggcgggacgacatgctgcgcatgtaccatgccctcaaggaggcgctcaacatcatcggtgacatcagcaccagcactgtgtccacgcctgtacccccgcctgtcgatgacacctggctccagagcgccagcagccacagccccactccacagcgccgaccggtgtccagcatacacccccctggccggcccccagcagtgaggggccccactccagggccccccctgattcctgttcccgtgggggcagcagcctccttctcggcgcccccaatcccatcccggcctggaccccagagcgtgtttgccaacagtgacctcttcccagccccgcctcagatcccatctcggccagttcggatccccccagggattcccccaggagtgcccagcagaagaccccctgctgcgcccagccggcccaccattatccgcccagccgagccatccctgctcgactaggcctcgaggggggcgtgctctcgggggggcctcacgcacccgcggcgcaggagcttcagtggtctggggccctccgccgcccctatgctgggaccaggctcccagtgggcagccctggcctcttccttaacgctggccccggtccagggccggcccctgtgcctggctggacaccgcactgcgcaaaggggccctggagctccaggcagggggcgctggggtgttgcactttgggggatggagtctcagggtggcagaggggggaccagaacccttgacaccatcctgaatgaggggtccagcctgggggggactctaccaaggtcttcttgggctgggaaagcccatgtagggcaggccttctataagtgcgggcaccaagggcgcctacatccccaggccttgctggggtgcaggggtatatcaacttcccattagcaggagctccccagcggcaagcctggcccagtgggctcggtagtgcccagctggcaggcctgaggtgtacatagtccttcccggccatattaaccacacagcctgagcctggcccagcctcggctgccagaggtgcctttgctaggcccggagccgttggcccgggccggccttgccctattcctctcctcctcctcctcctgggtcccccagggtggctgggcttgggctatgtgggtggtggtggcggggggtcttgggggcctctcagctcccgcccatgcctccctgatgggtgggcccagggcggcctctctctgaggagacctcacccactcctcgctcagtttgaccactgtaagtgcctgcactctgtattctattaataaactaaaataaagggaagacgctgctggtggctgctg

SEQ ID NO: 21496 - DNA, 5650 bp, Artificial Sequence
  derived and/or modified sequence
tgcctgctcttccctgatttacccacaaccctaactttgcatattcaaagggggagatcctggtaagtacatgcttagtgtggtagcaaacattagagaatctagtggtgatggagaccccgcccacccctaatattccctgttccccatcccctccaaataacaaaaatactaaaaatcgagctaacctggaaaccccatgccgcagccggcgctggactgcacgttgccctgggtataagtcgactcacacaggcactaactggaccgccacccttgaaggcgcacttctgcagccagttcctggcaggttttcctggtttcctgtaggtcagggatggcaaatacttacacaccgcccctgcctcccctcacatccctggctgtggaagatctcgcttaagccagaccagaattcattcttggcactgcccctcctccttctatctcctatgcagatgtcactcatggatcagagcatatttttccacatggcagaaatcttgccctcttgtgcccatggcagacatggctagttgatctagcactctttgccttgtgccgctcctctagcacacgcccatggcagacattgctaagcaatcctagcattctttccaaataagcttgccagcactcctgttctatagcagatgtggctaagtgattaaggtattgtttttctccctatatgataccctcttctctatgcatggcaggcatgactagtcaatcaggagcctctttcctagatgctgcctcttgtcctccagataaattgatgaggctcttctgttccacttaccctttctcctatccttggcctgtgacaggcaacactaattgatcctagcaccgtttcctgccacgcccagaattctcaccacagtgcttcaggtatcttgtaccagtcgattgacatggctcccgagatgaatcatatttgctgtccatccctgctgtgggtaacacctccttcctttgtgcagaaccctcagctggggcccagtgtggggcgtgagatgggcgtgaggcccagtccagcccagcccagcgggaagcagcctgctactcatagctgagaactgaacccagctcaaggagctcacctctaggcagccggcctcagcccggctcttacacttggacagcacagcctgggcctccagtcctagcaggggctcccttttgctggacattctcccactgccagccaccaaggcgctggtcatccctgccactgccctctggcggggctcttctggcaatcccagggtctttcttgtagctgagccgatcctatgccagggcctcgctgctcccagggcctgggtgtgcagatagggccatgggtggggcagtgacgggaggaattagttggcctcgggcttgtggttttcaggttcctcatgtgttccccccagtccctttgaatttgccaggccaagaccaggaacctgcttctcccttgtaccccaagaggtttaggggttcctcttttcctaccagaggccacatagcccagccccgtcatgagcgtggccgtggcctctgggtctcccatctgtggttcccatctctacccgggagactcaggccaggaccctcacccaggaaagagactggagcagcctgccagaggatccctgctttgccgccccctgcctgccctgccacccataccgccccatgtgcctgcctgcctgtcactgtgcaccctagcccgcaacggcctgccgcctcttctgtctctcccacccctacttccttctaagcccagtcccattgggatgtgtcccttggatgcaaacctgactttctgctgaggcctggctgctccctttctctggctcacaagtggtggatggctaacgggcctttgtttgccacccacagcttgcagctccctagggtgggattttgtctctgaacccgtgtggagaagggcacctcagggcttctgccagacgtcctgccccaaggcttggtgtgccatccccagcatggccccgatcagtgccctggccctgtggccatgcaccccaaagtgtagcgtgggccctgtgctccagctctgaccaacactaaccccggctggaggcaggagagccaggccaccgaggggtgtgcgggcacatccctctccttagaaaccgggccaggcctaggagtatggaggcctcacatttctctgggggagcaccgacagcctgtctccctgttttccctcacctggttgtcattcagtcatggaaccagggtctactaagcactcgttctgtgcccagctctgggctgagacaaggcagtgcccccaccccgctccccccgggtgaatggaggcattcccagactgccagacctttggtgctaacaccaggacgtcctggacagaccaggaagagctcgtcactgcgttcccagaggggatgctgtgacctcacaggggctgctggcctcagccccctcacccaccaccaggcagcccgtgaatggccagatgccaggggtcactgcctgctccaaacaactgtgagagtcctgtctgctcatcccagggagggataagtctgtacccttggccttaacaaggggcgcccggtggcatctcatgctgtccccagcctgggcagtgacttctgcatggtccaggggtccctgggtactctttagccacctccgtcttcatggccacctggggcttagcactcacatccagccaccaaggagccgctggagctgtgggctggtggccctggttcagaatgtcaggcccggggtgggtcggggtagtccggatgaagcccctccagaggaccgcccccgactaggacagcatctgggccccagagggattcctggaggccccatctctggcgctcctgccgtgccgtgccctgccatgccctgcactgggggatgcaggccagcccttcgcagctgtccatggccatgctcagcccaccctttgtagcttggccaagtctgtcagtgcctgggtcccaggccgccctgtgcgtgcctccgtgtgcttcctgcagctcccagggccctcgtcctgagtggggtggggggctctgcccacacatgcctccagcggccagggagcatgggagcacagcccccaggctgcctgccgttagttgtcaggtgagtccctgcgcaggcctgggttctgacccccacgcagatgacagctacagccacacaatccccatccatggggtctcccagcctgaaaccctgatgtgtcagtcaaaaggatgaccaccaggcttgcagccagcttgggacatgagccgcgctccttcaatgtccttggggagggcccctgggctcacacctttgaccctagccctctgtgtggatgctacccttggaaccttatctcacgcaaacaagtgcagttcctcagatgtcacatttcatgtgccacagccccacacacaagccccagggactcctcccatgggcccctttccatcaggcctctgtgagtctataccccatcagcccctggcccagtgagtctgtctgtccgcccacctgcccaggtggcgcctcatgttggtttcctgctggaaatgcttgggacagggtggaactgggtttcctgggctttggggctggaggtgtctctattgcggtccctggcttcccactgagctgtgggcaaggctgctgcgctgggggatggctggggcacggagcgaggttccctgctaagctgcgcgctttcccccaggtgatccgcaggggctggctgaccatcaacaacatcagcctgatgaaaggcggctccaaggagtactggtttgtgctgactgccgagtcactgtcctggtacaaggatgaggaggagaaagagaagaagtacatgctgcctctggacaacctcaagatccgtgatgtggagaagggcttcatgtccaacaagcacgtcttcgccatcttcaacacggagcagagaaacgtctacaaggacctgcggcagatcgagctggcctgtgactcccaggaagacgtggacagctggaaggcctcgttcctccgagctggcgtctaccccgagaaggaccaggcagaaaacgaggatggggcccaggagaacaccttctccatggacccccaactggagcggcaggtggagaccattcgcaacctggtggactcatacgtggccatcatcaacaagtccatccgcgacctcatgccaaagaccatcatgcacctcatgatcaacaatacgaaggccttcatccaccacgagctgctggcctacctatactcctcggcagaccagagcagcctcatggaggagtcggctgaccaggcacagcggcgggacgacatgctgcgcatgtaccatgccctcaaggaggcgctcaacatcatcggtgacatcagcaccagcactgtgtccacgcctgtacccccgcctgtcgatgacacctggctccagagcgccagcagccacagccccactccacagcgccgaccggtgtccagcatacacccccctggccggcccccagcagtgaggggccccactccagggcccccctgattcctgttcccgtgggggcagcagcctccttctcggcgcccccaatcccatcccggcctggaccccagagcgtgtttgccaacagtgacctcttcccagccccgcctcagatcccatctcggccagttcggatccccccagggattcccccaggagtgcccagcagaagaccccctgctgcgcccagccggcccaccattatccgcccagccgagccatccctgctcgactaggcctcgaggggggcgtgctctcgggggggcctcacgcacccgcggcgcaggagcttcagtggtctggggccctccgccgcccctatgctgggaccaggctcccagtgggcagccctggcctcttccttaacgctggccccggtccagggccggcccctgtgcctggctggacaccgcactgcgcaaaggggccctggagctccaggcagggggcgctggggtgttgcactttgggggatggagtctcagggtggcagaggggggaccagaacccttgacaccatcctgaatgaggggtccagcctgggggggactctaccaaggtcttcttgggctgggaaagcccatgtagggcaggccttctataagtgcgggcaccaagggcgcctacatccccaggccttgctggggtgcaggggtatatcaacttcccattagcaggagctccccagcggcaagcctggcccagtgggctcggtagtgcccagctggcaggcctgaggtgtacatagtccttcccggccatattaaccacacagcctgagcctggcccagcctcggctgccagaggtgcctttgctaggcccggagccgttggcccgggccggccttgccctattcctctcctcctcctcctcctgggtcccccagggtggctgggcttgggctatgtgggtggtggtggcggggggtcttgggggcctctcagctcccgcccatgcctccctgatgggtgggcccagggcggcctctctctgaggagacctcacccactcctcgctcagtttgaccactgtaagtgcctgcactctgtattctattaataaactaaaataaagggaagacgctg

SEQ ID NO: 21497 - protein, 1265 aa, Artificial Sequence
  derived and/or modified sequence
MEAEKDSGRRLRPIDRQRYDENEDLSDVEEIVSVRGFSLEEKLRSQLYQGDFVHAMEGKDFNYEYVQREALRVPLIFREKDGLGIKMPDPDFTVRDVKLLVGSRRLVDVMDVNTQKGTEMSMSQFVRYYETPEAQRDKLYNVISLEFSHTKLEHLVKRPTVVDLVDWVDNMWPQHLKEKQTEATNAIAEMKYPKVKKYCLMSVKGCFTDFHIDFGGTSVWYHVFRGGKIFWLIPPTLHNLALYEEWVLSGKQSDIFLGDRVERCQRIELKQGYTFFIPSGWIHAVYTPVDSLVFGGNILHSFNVPMQLRIYEIEDRTRVQPKFRYPFYYEMCWYVLERYVYCVTQRSHLTQEYQRESMLIDAPRKPSIDGFSSDSWLEMEEEACDQQPQEEEEKDEEGEGRDRAPKPPTDGSTSPTSTPSEDQEALGKKPKAPALRFLKRTLSNESEESVKSTTLAVDYPKTPTGSPATEVSAKWTHLTEFELKGLKALVEKLESLPENKKCVPEGIEDPQALLEGVKNVLKEHADDDPSLAITGVPVVTWPKKTPKNRAVGRPKGKLGPASAVKLAANRTTAGARRRRTRCRKCEACLRTECGECHFCKDMKKFGGPGRMKQSCIMRQCIAPVLPHTAVCLVCGEAGKEDTVEEEEGKFNLMLMECSICNEIIHPGCLKIKESEGVVNDELPNCWECPKCNHAGKTGKQKRGPGFKYASNLPGSLLKEQKMNRDNKEGQEPAKRRSECEEAPRRRSDEHSKKVPPDGLLRRKSDDVHLRKKRKYEKPQELSGRKRLKPGKEDKLFRKKRRSWKNAEDRMALANKPLRRFKQEPEDELPEAPPKTRESDHSRSSSPTAGPSTEGAEGPEEKKKVKMRRKRRLPNKELSRELSKELNHEIQRTENSLANENQQPIKSEPESEGEEPKRPPGICERPHRFSKGLNGTPRELRHQLGPSLRSPPRVISRPPPSVSPPKCIQMERHVIRPPPISPPPDSLPLDDGAAHVMHREVWMAVFSYLSHQDLCVCMRVCRTWNRWCCDKRLWTRIDLNHCKSITPLMLSGIIRRQPVSLDLSWTNISKKQLSWLINRLPGLRDLVLSGCSWIAVSALCSSSCPLLRTLDVQWVEGLKDAQMRDLLSPPTDNRPGQMDNRSKLRNIVELRLAGLDITDASLRLIIRHMPLLSKLHLSYCNHVTDQSINLLTAVGTTTRDSLTEINLSDCNKVTDQCLSFFKRCGNICHIDLRYCKQVTKEGCEQFIAEMSSFQGRSCSTTRLGDE

SEQ ID NO: 21498 - DNA, 139 bp, Artificial Sequence
  derived and/or modified sequence
aaagaaagacagagaacaaacgtaattcaagatgactgattacatatccaagaacattagatggtcaaagactttaagaaggaatacattcaaaggcaaaaagtcacttactgattttggtggagtttgccacatggac

SEQ ID NO: 21499 - DNA, 139 bp, Artificial Sequence
  derived and/or modified sequence
aaagaaagacagagaacaaacgtaattcaagatgactgtttacatatccaagaacattagatggtcaaagactttaagaaggaatacattcaaaggcaaaaagtcacttactgattttggtggagtttgccacatggac

SEQ ID NO: 21500 - DNA, 138 bp, Artificial Sequence
  derived and/or modified sequence
aagaaagacagagaacaaacgtaattcaagatgactgattacatatccaagaacattagatggtcaaagactttaagaaggaatacattcaaaggcaaaacgtcacttactgattttggtggagtttgccacatggac

SEQ ID NO: 21501 - DNA, 4812 bp, Artificial Sequence
  derived and/or modified sequence
ccaacaacaaaacagcgatgccacggcgctaacggcgcccggtgcctcccgggctccctccccgccccatacctcctcgggccgccgcccccacccccccaagcccgggccgagagcccccccaaatagcccggccgcgggctccgagcgcgatcggcaacaatgtttacgttccggggattatgacgtcgacgcctccccccccccacaactgctgaaaatggtttcctaggactttgcaaacggatctgcctaagtgttggtgcaaaactttgtagatctcggctctggcttgctttatttatttattttttggtttgttttctttggtcttccctccttcccccctcggccaaaatgcagggggcaggagtgttgacaattaattggtgaactctcctaaaaaaatggaggcagagaaagactctggaagaagattgcgcccgattgaccgccagcgatacgacgagaacgaggacttgtcggacgtggaggagatcgtcagcgtccgcggcttcagcctggaggagaagcttcgcagccagctgtaccagggggacttcgtgcacgccatggagggcaaagatttcaactatgagtacgtacagagagaagctctcagggttcccctgatatttcgagaaaaggatggactgggaattaagatgcctgaccctgatttcacagtccgagacgtcaaactcctagtggggagccggcggcttgtggacgtgatggatgtgaacacccagaagggcacggagatgagcatgtcccagtttgtgcgttactacgagacgcccgaggcccagcgggacaagctgtacaacgtcatcagcctagagttcagccacaccaagctggagcacttggtcaagcgtccgactgtggtagacctggtggactgggtggacaacatgtggccccagcatctgaaggagaagcagacagaagccacgaacgccattgcagagatgaagtacccgaaagtgaaaaagtactgtctgatgagcgtgaaaggttgtttcaccgacttccacatcgactttggaggcacttccgtttggtaccatgttttccggggtgggaagattttttggctgattcctccaacgctgcacaatttggcgctgtacgaggagtgggtgctgtcaggcaaacagagtgacatctttctgggagaccgtgtggaacgatgccaaagaattgagctgaagcagggctacacatttttcatcccttccggttggatccatgccgtctacacccctgtagactctttggtgttcggcggaaacatcctgcacagctttaacgtgcccatgcagctgcggatctacgagatcgaggacaggacgcgggtgcagcccaaattccgttaccccttctactatgagatgtgctggtatgtcctggagagatacgtgtactgtgtgacccagcgctcccacctcactcaggaataccagagggagtcgatgcttattgatgccccgaggaagcccagcatagacggcttctcttcggattcctggctggagatggaggaggaggcctgtgatcagcagcctcaggaggaggaggagaaggacgaggagggcgagggcagggacagggcacccaaaccgcccaccgatggctccacttcacccaccagcacgccctctgaggaccaggaggccctcgggaagaagcccaaagcacctgccctgcgattcctcaaaaggactttgtctaatgagtcggaggaaagtgtgaagtccaccacattggccgtagactaccccaagacccccaccggctctcccgccacggaggtctctgccaaatggacccatctcactgagtttgaactgaagggcctgaaagctctggtggagaaactggaatccctcccggagaacaagaagtgtgtccccgagggcatcgaggacccccaggcactcctggagggtgtgaagaacgtcctgaaggagcacgcagatgatgaccctagtctggccatcactggggtccctgtggtgacttggccaaagaagactccaaagaaccgggctgtgggtcggcccaaggggaagctgggcccggcctccgcggtgaagttggccgccaaccggacaacggcaggagctcggcggcgccggacgcgatgccgcaagtgcgaggcctgcctgcggaccgagtgcggagagtgccacttctgcaaggacatgaagaagttcgggggccccgggcgcatgaagcagagctgcatcatgcggcagtgcatcgcgccagtgctgccccacaccgccgtgtgccttgtgtgtggcgaggcggggaaggaagacacggtggaagaggaggaaggcaagtttaacctcatgctcatggagtgctccatctgcaatgaaatcatccaccctggatgccttaagattaaggagtcagagggtgtggtcaacgacgagcttccaaactgctgggagtgtccgaagtgtaaccacgccggcaagaccgggaaacaaaagcgtggccctggctttaagtacgcctccaacctgcccggctccctgctcaaggagcagaagatgaaccgggacaacaaggaagggcaggaacctgccaagcggaggagtgagtgtgaggaggcgccccggcgcaggtcggatgagcactcgaagaaggtgccgccggacggccttctgcgcagaaagtctgacgacgtgcacctgaggaagaagcggaaatacgagaagccccaggagctgagtggacgcaagcggctcaaacctggcaaagaagataagcttttcaggaaaaagcggcggtcctggaagaacgccgaggaccgcatggcgctggccaacaagcccctccggcgcttcaagcaggaacccgaggacgaactgcccgaggcgccccccaagaccagggagagcgaccactcccgctccagctcccccaccgcgggacccagcaccgaaggggccgagggcccggaggagaagaagaaggtgaagatgcgccggaagcggcggcttcccaacaaggagctgagcagggagctgagcaaggagctcaaccacgagatccagaggacggagaacagcctggccaacgagaaccagcagcccatcaagtcggagcctgagagcgagggcgaggagcccaagcggcccccgggcatctgcgagcgtccccaccgcttcagcaaggggctcaacggcaccccccgggagctgcggcaccagctggggcccagcctgcgcagcccgccccgtgtcatctcccggcccccaccctccgtgtccccgcccaagtgtatccagatggagcgccatgtgatccggccaccccccatcagccccccgcctgactcgctacccctggacgatggggcagcccacgtcatgcacagggaggtgtggatggccgtcttcagctacctcagccaccaagacctgtgtgtgtgcatgcgggtctgcaggacctggaaccgctggtgctgcgataagcggttgtggacccgcattgacctgaaccactgcaagtctatcacacccctgatgctgagtggcatcatccggcgacagcccgtctccctcgacctcagctggaccaatatctccaagaagcagctgagctggctcatcaaccggctgcctgggctccgggacttggtgctgtcaggctgctcatggatcgcggtctcggccctttgcagctccagttgtccgctgctccggaccctggatgtccagtgggtggagggactaaaggatgcccagatgcgggatctcctgtccccgcccacagacaacaggccaggtcagatggacaatcggagcaagctccggaacatcgtggagctgcgcctggcaggcctggacatcacagatgcctccctgcggctcatcatccgccacatgcccctgctctccaagctccacctcagttactgtaaccacgtcaccgaccagtctatcaacctgctcactgctgttggcaccaccacccgagactccttaaccgagatcaacctgtctgactgcaataaggtcactgatcagtgcctgtccttcttcaaacgctgtggaaacatctgtcatattgacctgaggtactgcaagcaagtcaccaaggaaggctgtgagcagttcatagccgagatgtcttctttccaagggagaagctgttcaaccacccgtttgggggatgagtgagccgacactttcctttggtctttctgaatcgtaactgcactgctttctggaccatttctaaggcggcctttacaagaagacattcctgtcggagaggagggtggacttcggagaaattctcatactgaagcatgagcttaggagtttctgttagtggtagtggtgttttggacacttcattccttgcaacaccgaggttttgggtgttgacataaagtggaccacacaccacatctgctgccgtcttgacacttttttttgtttggttggttttgttacatcttacattatgcagaactatttttgtacaaattgtttaaaagttatttatgcaaggtttgaatgcataccagtgtttttattgttttgagattgccaattttcctgatttccttaaggtaggagagaatttaacgtgtacttcatcgacacaacccatctacaaatgtgcccagatctaacaaagtaggctaagaccttccacttaaaagcatgtttaactggaagttgagagtctgctttgtacctcaagagttacatgagcatgttgtggataaatgtaaattatagtcaaagtaagatactctgccaagtttcctctgtagag

SEQ ID NO: 21502 - DNA, 3798 bp, Artificial Sequence
  derived and/or modified sequence
atggaagccgagaaagactcgggcaggcggctcagaccaatagacagacagcgatatgatgagaatgaggatcttagcgacgtggaagagatcgtcagtgtgcgcggctttagtctggaggaaaagctgcgctcccagctctatcagggcgactttgttcatgccatggagggaaaagacttcaactacgagtacgtccagcgagaggctctgcgagtgcctctcatcttccgagagaaagatgggttgggcattaaaatgccagatcccgattttactgttagggacgttaagctgctggtgggttccagacgcttggtggatgttatggatgtgaatactcagaagggaaccgaaatgagcatgtcacagtttgtccggtattacgaaacaccggaagcccagcgagataaattgtacaatgtgatcagtctggaattcagtcatactaaactagagcacctagtcaagagaccaacggtggttgacttggttgactgggtcgacaatatgtggccccaacacctcaaggagaaacagaccgaggcaacaaacgccatcgctgaaatgaagtaccccaaggtgaaaaaatattgcctgatgagcgttaagggatgcttcacagactttcacatagatttcgggggcacctcagtgtggtatcacgtatttcgcggggggaagattttctggctgatcccacccaccctgcataacttagcactatacgaagagtgggtactctctggcaaacagagtgacatctttctcggtgacagggtcgaacggtgccagcggatagagcttaagcaggggtacacatttttcatccccagtggctggatacacgctgtctatacccccgtggactctctggtctttggtggaaacattctgcatagtttcaacgtcccaatgcagctccggatttatgaaatagaggacaggacacgggtgcagccaaaattccggtatcccttctactacgaaatgtgctggtacgtccttgaacgttacgtatattgcgtgacgcagaggtcacacctcacccaagaataccagcgggaatcaatgctgatcgacgcaccccgtaaaccttctattgacggtttttccagcgactcttggcttgaaatggaagaagaggcctgtgaccagcagccccaggaagaagaggaaaaggatgaggaaggagagggacgtgaccgtgcacctaaaccgcccacggacggcagtacgagcccaacctcaacaccgtcggaggaccaggaagccttgggtaagaagcccaaagctccagcgctgcgattcctcaagcgaaccttgtccaatgagagcgaggaatccgtcaagtccacaactctggctgtggattatcccaagacccctactggcagcccggctacggaggtgtccgctaaatggacccaccttacggaattcgaacttaagggattgaaagctctggtcgaaaagctggagagtctgcctgagaataaaaaatgcgtacccgaggggattgaggacccgcaggctctcttggaaggcgtcaaaaatgtgcttaaagaacatgccgacgatgatccttcactggcgataacgggggtgcctgtcgtcacgtggcctaagaagacaccgaagaacagggccgttggccggcctaaggggaaactcggccccgcgtctgcagtaaagctcgcagcgaatcgaaccaccgctggagcccggagacgaaggacccgctgtagaaaatgcgaagcctgccttcgcaccgaatgcggcgaatgccatttctgtaaggacatgaagaaattcggcgggcccggcaggatgaaacaaagttgtattatgcgccaatgcatagccccagtgttgccacatactgcagtgtgcctggtttgcggcgaggccggaaaggaggacactgtggaggaagaggagggcaaatttaacctgatgctgatggagtgttctatttgtaacgaaatcatacaccccggctgtctgaagattaaggagtcagagggagtggtcaatgacgaattgccaaactgctgggagtgtcctaaatgtaaccacgctggcaagactggcaagcagaagcgcggacccggcttcaagtacgcgagcaacctcccggggagcctactcaaggaacagaaaatgaaccgcgataacaaggaaggccaggaaccagccaaacggcgctctgagtgcgaagaggctccgaggaggcggagcgacgagcattcaaaaaaggtgccaccagatggccttctgcgccgtaaatccgacgacgtacacctgcgaaaaaagcggaaatatgaaaagccacaagagctctctggccggaagaggctgaagccaggcaaggaagacaagctgtttcgaaagaaacgccggtcctggaaaaacgcggaagataggatggctctcgcaaacaagcctctgagacggtttaaacaggaaccagaagacgaactcccagaggcacctcccaaaaccagagagagtgatcattcgaggtcttcaagtcctaccgccgggccatccacagaaggggccgaaggccctgaggagaagaaaaaggttaagatgcgacgcaaacgccgactaccaaataaggaattaagtcgtgagctctccaaagagcttaatcacgagatccagcgaacagaaaatagtcttgccaacgagaaccagcagccgattaaaagtgagcctgagtcagagggtgaagaaccaaaacgacctccaggaatctgtgaaagaccacatcgcttttccaagggtttgaatggtacgccccgggaacttagacatcagttgggaccgtccctgcgatccccaccacgtgtgattagcagaccccccccctctgtctctccaccaaaatgcatccagatggaaaggcatgtgattagacccccaccaatttcccctccccctgactccctgcctttggacgacggcgcagctcacgtcatgcaccgggaagtttggatggcggtattcagttacctgtctcaccaggacttgtgcgtatgcatgagggtgtgtagaacctggaacaggtggtgttgtgataaaagactatggacacggatcgacctgaaccattgtaagtctattacaccactgatgctgagcggaataattcgtaggcaacccgttagtctcgacctcagttggactaatatatctaaaaaacagctcagttggctgattaatcggctgcctggactccgcgatctggtgctgtcgggctgctcgtggattgcggtatcagcgctgtgcagctcatcctgcccattgctcaggactctggacgtgcagtgggttgagggactcaaagacgcacagatgcgcgacctgctgtcccctcctacagataatcggcctggacaaatggataataggtctaagctgcgaaatattgtggaactgcggcttgccgggctagacatcactgatgcttctctccgcctgataattcggcacatgcctctactatccaagctacacctcagttactgtaatcacgtgaccgaccagtcgataaacctcctcacagccgtcgggacgactacccgggacagcctcacagagattaatctgagcgattgtaataaggtgactgatcaatgtctgagtttcttcaagcgctgcgggaatatctgtcacatagacctgagatactgcaaacaggtcacaaaagagggctgcgagcagtttatagcggaaatgtcctccttccaagggcgaagctgcagcaccactcgattgggcgacgaatag

SEQ ID NO: 21503 - DNA, 3798 bp, Artificial Sequence
  derived and/or modified sequence
atggaggccgagaaggacagcggccgccgcctgcggcccatcgaccggcagagatatgatgaaaatgaagacctgagtgatgtggaggagatcgtgtctgtgcggggcttcagcctggaggagaagctgcggagccagctgtaccagggcgactttgtgcacgccatggagggcaaggacttcaactatgaatatgtgcagcgggaggccctgcgggtgcccctcatcttccgggagaaggatggcctgggcatcaagatgccagaccctgacttcaccgtgagagatgtgaagctgctggtgggcagccggcggctggtggatgtgatggatgtgaacacccagaagggcacagagatgtccatgagccagtttgtgcgctactatgagaccccagaggcccagagggacaagctgtacaacgtcatcagcctggagttcagccacaccaagctggagcacctggtgaagaggcccaccgtggtggacctggtggactgggtggacaacatgtggccccagcacctgaaggagaagcagacagaggccaccaatgccatcgccgagatgaagtaccccaaggtgaagaagtactgcctgatgtctgtgaagggctgcttcacagacttccacatcgactttggaggcacctctgtgtggtaccacgtgttccggggcggcaagatcttctggctgatcccccccaccctgcacaacctggccctgtatgaggagtgggtgctgagcggcaagcagagcgacatcttcctgggggacagagtggagcgctgccagagaattgagctgaagcagggctacaccttcttcatccccagcggctggattcatgctgtgtacacccctgtggacagcctggtgtttggaggcaacatcctgcacagcttcaacgtgcccatgcagctgcgcatctatgaaattgaggacaggaccagggtgcagcccaagttccgctaccccttctactatgagatgtgctggtacgtgctggagagatatgtgtactgtgtgacccagaggagccacctgacccaggagtaccagcgggagagcatgctgattgatgcccccaggaagcccagcattgatggcttcagcagtgacagctggctggagatggaggaggaggcctgtgaccagcagccccaggaggaggaggagaaggatgaggagggggagggccgggaccgggcccccaagcccccaacagatggcagcaccagccccaccagcacccccagcgaggaccaggaggccctgggcaagaagcccaaggccccagccctgcgcttcctgaagaggaccctgagcaatgaaagtgaggagagcgtgaagagcaccaccctggccgtggactaccccaagacccccaccggcagccctgccacagaggtgtctgccaagtggacccacctgacagaatttgagctgaagggcctgaaggccctggtggagaagctggagagcctgcctgagaacaagaagtgtgtgcctgagggcatcgaggacccccaggccctgctggagggcgtgaagaatgtgctgaaggagcacgcagatgatgaccccagcctggccatcaccggggtgcctgtggtgacctggcccaagaagacccccaagaacagagctgtgggccggcccaagggcaagctgggccctgccagcgctgtgaagctggccgccaacagaaccacagctggggccaggagaagaaggacccgctgcaggaaatgtgaggcctgcctgaggacagaatgtggggagtgccacttctgcaaggacatgaagaagtttggaggccctggccgcatgaagcagagctgcatcatgaggcagtgcatcgcccctgtgctgccccacacagctgtgtgcctggtgtgtggggaggccggcaaggaggacacagtggaggaggaggagggcaagttcaacctgatgctgatggagtgcagcatctgcaatgagatcatccaccctggctgcctgaagatcaaggagagcgagggcgtggtgaatgatgagctgcccaactgctgggagtgccccaagtgcaaccacgccggcaagacaggcaagcagaagaggggccctggcttcaagtatgccagcaacctgcccggcagcctgctgaaggagcagaagatgaacagagacaacaaggagggccaggagcccgccaagagaagaagtgaatgtgaggaggcccccaggagaagaagtgatgagcacagcaagaaggtgcccccagatggcctgctgcggaggaagagtgatgatgtgcacctgaggaagaagaggaaatatgagaagccccaggagctgagcggcaggaagaggctgaagccaggcaaggaggacaagctgttcaggaagaagaggaggtcctggaagaatgctgaggacaggatggccctggccaacaagcccctgcggcgcttcaagcaggagccagaagatgagctgcctgaggccccacccaagacccgggagagtgaccacagccgcagcagcagccccacagctggccccagcacagagggcgctgagggccctgaggagaagaagaaggtgaagatgaggaggaagaggcggctgcccaacaaggagctgagccgggagctgagcaaggagctgaaccacgagatccagaggacagagaacagcctggccaatgaaaaccagcagcccatcaagtctgagcctgagagcgagggggaggagcccaagaggcctcctggcatctgtgagcggccccaccgcttcagcaagggcctgaatggcaccccccgggagctgcggcaccagctgggccccagcctgcggagcccccccagggtcatcagccggcccccacccagcgtgtccccacccaagtgcatccagatggagcggcacgtgatccggcccccacccatcagccccccaccagacagcctgcccctggatgatggagctgcccacgtgatgcaccgggaggtgtggatggctgtgttctcctacctgagccaccaggacctgtgtgtgtgcatgagggtgtgcaggacctggaaccgctggtgctgtgacaagaggctgtggaccagaattgacctgaaccactgcaagagcatcacccccctgatgctgagcggcatcatccggcggcagcctgtgtccctggacctgtcctggaccaacatcagcaagaagcagctgtcctggctgatcaaccggctgcccggcctgcgggacctggtgctgagcggctgctcctggattgctgtgtctgccctgtgcagcagcagctgccccctgctgcggaccctggatgtgcagtgggtggagggcctgaaggatgcccagatgagggacctgctgagccccccaacagacaaccggcccggccagatggacaacagaagcaagctgaggaacatcgtggagctgcggctggccggcctggacatcacagatgccagcctgcggctcatcatccgccacatgcccctgctgagcaagctgcacctgagctactgcaaccacgtgacagaccagagcatcaacctgctgacagctgtgggcaccaccacccgggacagcctgacagagatcaacctgagtgactgcaacaaggtgacagaccagtgcctgtccttcttcaagagatgtggcaacatctgccacatcgacctgcgctactgcaagcaggtgaccaaggagggctgtgagcagttcatcgccgagatgagcagcttccagggccgcagctgcagcaccacccggctgggagatgaatag

SEQ ID NO: 21504 - DNA, 3798 bp, Artificial Sequence
  derived and/or modified sequence
atggaggccgagaaggacagcggccggcggctgcggcccatcgacaggcaacggtacgacgagaatgaagatctctctgatgtggaggaaattgtttctgtgcgcgggttctctctggaggagaaattgcgatcccagctgtaccagggagattttgttcacgccatggaaggcaaagattttaactacgagtatgtgcagcgcgaggccttgagggttccactgattttccgggaaaaagacggactgggaattaagatgcccgaccccgattttacagtgagagatgtgaaactccttgtaggctcacgcaggctggttgacgtaatggacgttaacacccagaagggaaccgagatgagcatgtcacaattcgtgaggtactatgaaacacctgaggcacagagggataagctctataatgtgattagtctcgagttcagtcacacaaagctggagcacttggtgaaacgcccgaccgtcgtcgacttagttgattgggtcgataacatgtggcctcagcatcttaaagaaaagcagactgaggcaacaaatgccatcgcagagatgaaatacccaaaagtcaagaaatactgcctgatgtccgtgaaggggtgcttcaccgacttccatattgatttcggcggaaccagcgtctggtaccatgtgttccgcgggggcaaaattttctggctgatcccaccaactttgcacaatttagctttgtacgaagagtgggttctgtcgggcaagcagtccgatatcttccttggcgatagagtcgagcgttgtcagagaattgagctcaaacaaggttacaccttttttatcccctctggatggatccacgcggtctatacccctgttgattccttggtgtttggagggaatatacttcacagtttcaatgtgccaatgcaactaaggatttacgagatcgaagatcgcacccgcgtgcaaccgaaattccggtacccattctactacgagatgtgttggtacgtgctggaaagatacgtctactgcgtgacccaaagatcacatctgacacaggaatatcaacgggaatccatgctgattgacgctccacggaaaccttctatagacgggtttagctccgatagctggctcgagatggaagaagaagcatgtgaccaacagccccaggaagaagaagagaaggacgaagaaggcgaagggcgggacagggccccaaaaccacccacggacggttctacctcccctacttcaactccttccgaggaccaggaggccctcggcaagaaaccaaaggcacctgctttacgtttcctcaaacgcacactgagcaacgagtctgaagagtcggtgaagtctaccacactggcagtggactaccccaagacacccacgggtagtccagcaactgaagtcagcgctaagtggacccacctgactgaattcgagctgaaagggttaaaagccctagtagagaagctagagagcctgcctgagaacaagaaatgcgtacctgagggtattgaagatccgcaggccctgctcgaaggagtcaagaatgtcctcaaagaacacgccgatgacgacccgagtctcgcaattaccggggtgcctgtggtcacatggcccaagaagacacccaagaaccgcgccgtcggaagacccaaagggaagctgggccccgcctctgcggtgaaattggctgctaaccggaccacagccggagctaggcgcaggcggacgagatgtaggaagtgcgaagcttgtcttcggacggagtgcggagaatgtcatttttgcaaagacatgaagaagttcggcggtcccgggcgcatgaagcagagctgtatcatgcgccaatgcatagctcccgtccttccccacactgctgtttgcctcgtgtgcggggaggctggcaaggaagatacggtcgaggaagaagagggcaaattcaacctgatgctcatggagtgttctatttgcaatgagatcatccatcctggatgcctcaagattaaggagtccgagggggttgttaacgatgaactgccaaattgttgggagtgccccaagtgcaatcacgccggtaaaaccgggaagcagaagcggggacccggtttcaaatacgcatcaaaccttcccggctcactgctgaaagaacagaagatgaaccgggacaataaagaaggacaggaacctgcgaagagaaggagcgaatgtgaagaggctccacgccgccgctccgatgaacatagtaagaaggtgccgccagacggcttgctccgaagaaaatctgatgacgttcacctgcgaaagaagaggaagtacgagaaaccgcaggaactgtccggaagaaaaagactgaagcctggaaaggaggataaactttttcgaaaaaagagacgtagttggaagaacgctgaggaccggatggccctggcaaataagcccctgcgccgttttaaacaagagcctgaagacgaactgcccgaagccccacctaagacaagggagtccgatcactccaggtctagctcacctacagcgggcccgtctacagagggagccgaagggcctgaagagaaaaaaaaggtaaagatgagaagaaaacgcagactgcccaataaggagttgagcagagagttgagcaaagagttgaaccacgagatacagcgcacagagaactccttggccaatgagaatcaacagccaattaagtccgagcctgagtcagagggggaggaacctaaaaggcctccggggatttgcgagcggccccataggtttagtaaaggcctgaatggtaccccccgggaactacggcatcagctcggcccgtccctgagatctccaccccgtgtgatttctcggccacctccatccgtctctcctcctaagtgcattcaaatggaacggcatgtgattcggcccccacctattagccccccacctgacagcctcccactggacgacggcgccgcacacgttatgcatagggaagtttggatggccgtcttcagctatttatcacaccaagacctctgcgtgtgcatgcgcgtgtgtagaacctggaaccgttggtgctgtgataaaaggctgtggacccgaattgacctaaaccattgcaaatcaatcacgccgctgatgcttagcggaatcatcaggcgccagccagtcagcctagatctttcttggactaatatcagcaaaaaacagctgtcctggctcattaatcgtctgcccggccttagagatctcgttctttcaggctgctcttggattgcagtttcagccctgtgtagctcaagctgccccctgctgaggacgctcgacgtgcaatgggtggagggtctcaaagatgcacagatgcgcgacttgttgtcgccccctactgacaatcgacccgggcaaatggacaaccgttccaagctgcgcaacatcgtggagctgcgtctggcgggtttagacatcacagacgcgagcctgagactcatcattcgccacatgcccctattatctaaactccatttgtcctactgtaatcacgtgacagaccagtctatcaatttacttacagccgtggggaccaccactagggattccctgactgaaataaatctgtccgactgcaacaaggtgaccgatcagtgcctgagtttctttaagaggtgtggcaatatatgtcacattgacctccgttactgcaaacaggtgacaaaagagggttgtgagcagtttatcgcggaaatgagttcatttcaggggcgctcatgttctaccacacgcctcggcgatgagtag

SEQ ID NO: 21505 - DNA, 3798 bp, Artificial Sequence
  derived and/or modified sequence
atggaggctgaaaaagactccgggagacgtttacgcccaattgaccgccagcgatatgacgagaacgaagatctgtccgatgttgaagagattgtctccgttcgcggatttagcttagaagaaaagctgcgttcgcagctgtatcagggcgattttgtccacgctatggaaggtaaagatttcaattacgaatacgtccagagagaagccctgagggtgccattaatatttcgggaaaaggatggcctcggcatcaagatgcctgatccagacttcactgtccgcgacgtaaaactactcgtgggcagtcggagactggttgatgtaatggacgtcaacacacaaaaagggactgaaatgtcgatgtctcagtttgtgaggtattatgagacgccagaggcacaacgagacaaattgtataatgtaataagtctggagttttctcacaccaagctggaacatttggttaaacgccctaccgtcgtggacttggtcgattgggtcgataacatgtggccccagcacttaaaagagaaacagacggaggccaccaacgcaatagcggagatgaagtaccccaaggtgaagaaatactgcctcatgtccgttaaaggatgcttcacagatttccatattgacttcggtgggacttctgtgtggtaccacgtcttcaggggaggtaagatcttttggctgatcccccctaccctgcacaatctcgcactttacgaagagtgggtcctgtctggaaaacagagcgacattttcctgggcgatagggtagaacggtgccagcggattgagctcaaacagggttataccttttttattcccagcggctggattcacgcagtgtatactcctgtagactccctggtgtttggcggaaacattctccacagctttaatgtcccaatgcagctgagaatatatgagattgaggatagaacaagagttcaaccaaaattccgctatccattttattacgagatgtgctggtatgtcctcgaacggtacgtgtactgcgtcacacaaagatctcatctaacgcaagagtaccagcgagaaagcatgttaatcgacgctcccagaaagccaagcatcgatggcttttcatccgacagttggttggaaatggaagaggaagcctgtgaccagcaacctcaggaagaagaggagaaggatgaagaaggggagggcagagacagagccccaaagcctccaacagatggcagtactagtcctacgtccactccctcagaagatcaggaggcactgggtaagaagcctaaagcacccgctttaaggtttttgaagcgcacactgtctaatgaatctgaagaatctgtgaaatctacgacactggctgttgattaccccaagacgccgactggtagtcccgctacagaggtatctgccaaatggacccacctgaccgagtttgagctgaaaggattgaaggccctggtggagaagctcgagtccctgcctgagaacaaaaagtgtgtccctgagggcatcgaggaccctcaggcactcttagagggtgtgaagaacgtcttaaaggaacacgccgacgatgaccctagtctggccatcaccggggtccctgtggtgacctggcccaaaaagactcctaagaatcgcgctgttggacggccaaagggtaagctgggacctgcatccgccgtcaagttagccgctaatcggactacagccggagccaggagacggaggacccgctgccgcaagtgtgaggcctgtctccggaccgagtgcggcgagtgtcacttttgcaaggacatgaaaaagttcggaggtcccggacgcatgaaacaaagttgcattatgaggcagtgcattgccccagtattgccacacaccgccgtgtgcctggtctgcggcgaagcgggtaaggaggacaccgtggaggaggaggaaggcaaattcaatttgatgctgatggagtgtagtatctgcaacgagattatccaccccggatgcctgaagataaaggaatcggagggagtggtgaatgacgaattgccgaattgctgggaatgtcccaaatgtaatcacgcgggaaagacaggcaaacagaagaggggaccaggtttcaaatacgcaagcaatctgccgggatctttgctcaaggagcagaaaatgaacagagataataaagaagggcaagagccagcgaaacgccgatcagagtgcgaggaagcacccaggagaaggtcagacgaacactcaaagaaggttccaccggatgggctgctcagacggaagtcagacgacgtgcatctacggaaaaagcggaaatacgaaaagccacaagagctttccggcagaaagcgcctcaagcctgggaaagaggataagcttttccgaaagaaacggaggtcatggaaaaatgccgaagaccgaatggctttggccaataagcctttacggaggtttaaacaggagcccgaagacgagcttcctgaagcacctccgaagacccgagagtcagatcactcccgcagtagctcaccaacagcaggaccctccactgaaggcgctgaagggccagaggagaagaagaaggtgaaaatgagacgaaagaggagactccccaacaaggagctgagtcgtgaactcagcaaggaactcaatcatgagattcagagaacggagaatagcctcgccaatgaaaaccaacagccaatcaaatccgagccagaatccgagggagaagaacctaagagacctccgggaatttgcgagaggcctcaccgcttcagtaaaggtctcaacgggacccctagggagctccgccaccagttaggtccaagtcttagatctcctccgagggtaatttcccgtccacctccctcggtttcccccccaaaatgcatacagatggaaagacacgttatacggccacccccaatctcgccaccacccgactccttgccccttgatgacggcgctgcacacgtcatgcacagagaggtgtggatggcagtcttttcatatctgtcacatcaggatctgtgcgtgtgtatgagagtctgcagaacatggaaccgctggtgttgtgacaagaggctgtggacgagaattgatctaaatcattgcaagagtatcactccgctcatgctgagtgggattattaggaggcagcccgttagtcttgatctctcttggactaatatttcaaaaaagcagctgagctggctgataaatcgactcccaggccttagggacctggtgcttagtggttgttcctggattgcggtttcagcactgtgctcatccagctgccctctgctgaggacactcgacgttcaatgggtggaggggctgaaagacgcccaaatgagggacctcctctcaccccctaccgacaataggcccggacagatggataatcggagtaagttgaggaacatcgtcgaactcagactcgcaggtctcgatatcactgacgctagtttaagattgatcattcggcacatgccgcttctctccaaactgcacttaagttactgcaatcacgtgaccgaccagagtattaatctactgaccgcggttggaacgaccacacgagattctttaactgagattaacctcagcgattgtaacaaagtcaccgatcagtgcctgtccttcttcaagaggtgtgggaacatctgtcatatcgatctgcggtactgtaaacaggtgacgaaggaaggatgtgagcagttcattgccgagatgagctccttccaaggcagatcctgctccactactcgccttggggatgaatag

SEQ ID NO: 21506 - DNA, 3798 bp, Artificial Sequence
  derived and/or modified sequence
atggaggccgagaaggacagcggcagaagactgagacccatcgacagacagagatacgacgagaacgaggacctgagcgacgtggaggagatcgtgagcgtgagaggcttcagcctggaggagaagctgagaagccagctgtaccagggcgacttcgtgcacgccatggagggcaaggacttcaactacgagtacgtgcagagagaggccctgagagtgcccctgatcttcagagagaaggacggcctgggcatcaagatgcccgaccccgacttcaccgtgagagacgtgaagctgctggtgggcagcagaagactggtggacgtgatggacgtgaacacccagaagggcaccgagatgagcatgagccagttcgtgagatactacgagacccccgaggcccagagagacaagctgtacaacgtgatcagcctggagttcagccacaccaagctggagcacctggtgaagagacccaccgtggtggacctggtggactgggtggacaacatgtggccccagcacctgaaggagaagcagaccgaggccaccaacgccatcgccgagatgaagtaccccaaggtgaagaagtactgcctgatgagcgtgaagggctgcttcaccgacttccacatcgacttcggcggcaccagcgtgtggtaccacgtgttcagaggcggcaagatcttctggctgatcccccccaccctgcacaacctggccctgtacgaggagtgggtgctgagcggcaagcagagcgacatcttcctgggcgacagagtggagagatgccagagaatcgagctgaagcagggctacaccttcttcatccccagcggctggatccacgccgtgtacacccccgtggacagcctggtgttcggcggcaacatcctgcacagcttcaacgtgcccatgcagctgagaatctacgagatcgaggacagaaccagagtgcagcccaagttcagataccccttctactacgagatgtgctggtacgtgctggagagatacgtgtactgcgtgacccagagaagccacctgacccaggagtaccagagagagagcatgctgatcgacgcccccagaaagcccagcatcgacggcttcagcagcgacagctggctggagatggaggaggaggcctgcgaccagcagccccaggaggaggaggagaaggacgaggagggcgagggcagagacagagcccccaagccccccaccgacggcagcaccagccccaccagcacccccagcgaggaccaggaggccctgggcaagaagcccaaggcccccgccctgagattcctgaagagaaccctgagcaacgagagcgaggagagcgtgaagagcaccaccctggccgtggactaccccaagacccccaccggcagccccgccaccgaggtgagcgccaagtggacccacctgaccgagttcgagctgaagggcctgaaggccctggtggagaagctggagagcctgcccgagaacaagaagtgcgtgcccgagggcatcgaggacccccaggccctgctggagggcgtgaagaacgtgctgaaggagcacgccgacgacgaccccagcctggccatcaccggcgtgcccgtggtgacctggcccaagaagacccccaagaacagagccgtgggcagacccaagggcaagctgggccccgccagcgccgtgaagctggccgccaacagaaccaccgccggcgccagaagaagaagaaccagatgcagaaagtgcgaggcctgcctgagaaccgagtgcggcgagtgccacttctgcaaggacatgaagaagttcggcggccccggcagaatgaagcagagctgcatcatgagacagtgcatcgcccccgtgctgccccacaccgccgtgtgcctggtgtgcggcgaggccggcaaggaggacaccgtggaggaggaggagggcaagttcaacctgatgctgatggagtgcagcatctgcaacgagatcatccaccccggctgcctgaagatcaaggagagcgagggcgtggtgaacgacgagctgcccaactgctgggagtgccccaagtgcaaccacgccggcaagaccggcaagcagaagagaggccccggcttcaagtacgccagcaacctgcccggcagcctgctgaaggagcagaagatgaacagagacaacaaggagggccaggagcccgccaagagaagaagcgagtgcgaggaggcccccagaagaagaagcgacgagcacagcaagaaggtgccccccgacggcctgctgagaagaaagagcgacgacgtgcacctgagaaagaagagaaagtacgagaagccccaggagctgagcggcagaaagagactgaagcccggcaaggaggacaagctgttcagaaagaagagaagaagctggaagaacgccgaggacagaatggccctggccaacaagcccctgagaagattcaagcaggagcccgaggacgagctgcccgaggccccccccaagaccagagagagcgaccacagcagaagcagcagccccaccgccggccccagcaccgagggcgccgagggccccgaggagaagaagaaggtgaagatgagaagaaagagaagactgcccaacaaggagctgagcagagagctgagcaaggagctgaaccacgagatccagagaaccgagaacagcctggccaacgagaaccagcagcccatcaagagcgagcccgagagcgagggcgaggagcccaagagaccccccggcatctgcgagagaccccacagattcagcaagggcctgaacggcacccccagagagctgagacaccagctgggccccagcctgagaagcccccccagagtgatcagcagacccccccccagcgtgagcccccccaagtgcatccagatggagagacacgtgatcagacccccccccatcagccccccccccgacagcctgcccctggacgacggcgccgcccacgtgatgcacagagaggtgtggatggccgtgttcagctacctgagccaccaggacctgtgcgtgtgcatgagagtgtgcagaacctggaacagatggtgctgcgacaagagactgtggaccagaatcgacctgaaccactgcaagagcatcacccccctgatgctgagcggcatcatcagaagacagcccgtgagcctggacctgagctggaccaacatcagcaagaagcagctgagctggctgatcaacagactgcccggcctgagagacctggtgctgagcggctgcagctggatcgccgtgagcgccctgtgcagcagcagctgccccctgctgagaaccctggacgtgcagtgggtggagggcctgaaggacgcccagatgagagacctgctgagcccccccaccgacaacagacccggccagatggacaacagaagcaagctgagaaacatcgtggagctgagactggccggcctggacatcaccgacgccagcctgagactgatcatcagacacatgcccctgctgagcaagctgcacctgagctactgcaaccacgtgaccgaccagagcatcaacctgctgaccgccgtgggcaccaccaccagagacagcctgaccgagatcaacctgagcgactgcaacaaggtgaccgaccagtgcctgagcttcttcaagagatgcggcaacatctgccacatcgacctgagatactgcaagcaggtgaccaaggagggctgcgagcagttcatcgccgagatgagcagcttccagggcagaagctgcagcaccaccagactgggcgacgagtag

SEQ ID NO: 21507 - protein, 460 aa, Artificial Sequence
  derived and/or modified sequence
MGAPPGYRPSAWVHLLHQLPRADFQLRPVPSVFAPQEQEYQQALLLVAALAGLGLGLSLIFIAVYLIRFCCCRPPEPPGSKIPSPGGGCVTWSCIVALLAGCTGIGIGFYGNSETSDGVSQLSSALLHANHTLSTIDHLVLETVERLGEAVRTELTTLEEVLEPRTELVAAARGARRQAEAAAQQLQGLAFWQGVPLSPLQVAENVSFVEEYRWLAYVLLLLLELLVCLFTLLGLAKQSKWLVIVMTVMSLLVLVLSWGSMGLEAATAVGLSDFCSNPDPYVLNLTQEETGLSSDILSYYLLCNRAVSNPFQQRLTLSQRALANIHSQLLGLEREAVPQFPSAQKPLLSLEETLNVTEGNFHQLVALLHCRSLHKDYGAALRGLCEDALEGLLFLLLFSLLSAGALATALCSLPRAWALFPPRNPSALCSGSRLSEPLLPAGLEPGSPLRSFPGCRRRPH

SEQ ID NO: 21508 - DNA, 1383 bp, Artificial Sequence
  derived and/or modified sequence
atgggcgccccccccggctacagacccagcgcctgggtgcacctgctgcaccagctgcccagagccgacttccagctgagacccgtgcccagcgtgttcgccccccaggagcaggagtaccagcaggccctgctgctggtggccgccctggccggcctgggcctgggcctgagcctgatcttcatcgccgtgtacctgatcagattctgctgctgcagaccccccgagccccccggcagcaagatccccagccccggcggcggctgcgtgacctggagctgcatcgtggccctgctggccggctgcaccggcatcggcatcggcttctacggcaacagcgagaccagcgacggcgtgagccagctgagcagcgccctgctgcacgccaaccacaccctgagcaccatcgaccacctggtgctggagaccgtggagagactgggcgaggccgtgagaaccgagctgaccaccctggaggaggtgctggagcccagaaccgagctggtggccgccgccagaggcgccagaagacaggccgaggccgccgcccagcagctgcagggcctggccttctggcagggcgtgcccctgagccccctgcaggtggccgagaacgtgagcttcgtggaggagtacagatggctggcctacgtgctgctgctgctgctggagctgctggtgtgcctgttcaccctgctgggcctggccaagcagagcaagtggctggtgatcgtgatgaccgtgatgagcctgctggtgctggtgctgagctggggcagcatgggcctggaggccgccaccgccgtgggcctgagcgacttctgcagcaaccccgacccctacgtgctgaacctgacccaggaggagaccggcctgagcagcgacatcctgagctactacctgctgtgcaacagagccgtgagcaaccccttccagcagagactgaccctgagccagagagccctggccaacatccacagccagctgctgggcctggagagagaggccgtgccccagttccccagcgcccagaagcccctgctgagcctggaggagaccctgaacgtgaccgagggcaacttccaccagctggtggccctgctgcactgcagaagcctgcacaaggactacggcgccgccctgagaggcctgtgcgaggacgccctggagggcctgctgttcctgctgctgttcagcctgctgagcgccggcgccctggccaccgccctgtgcagcctgcccagagcctgggccctgttcccccccagaaaccccagcgccctgtgcagcggcagcagactgagcgagcccctgctgcccgccggcctggagcccggcagccccctgagaagcttccccggctgcagaagaagaccccactag

SEQ ID NO: 21509 - DNA, 1383 bp, Artificial Sequence
  derived and/or modified sequence
atgggcgccccccctgggtaccgcccatccgcgtgggtgcacttgctccaccagctcccgcgggccgactttcagctgcggccagtaccttccgtgtttgcacctcaggaacaggagtatcagcaagctcttctcctggtggccgcactagctggtctcggccttggtttatctctcattttcatcgcagtttacctcatccgtttctgctgttgcaggccccctgagccgccaggtagtaaaattccctctcctggcggcgggtgtgtcacctggagctgcattgtggccttgctagccgggtgcaccggaattgggattggattttatggcaacagcgaaacttctgatggagtctctcaactgtcttctgctctcctgcacgcaaaccatacattaagcacaatcgaccacctcgtactggagacagtggagagacttggggaagctgtccgtacggaactcacgaccctcgaggaagtcctagagccccgcaccgagttagtggcggccgcccgcggagccagacgccaggctgaagcagccgcacagcagctgcaggggctcgctttctggcagggcgtgcccctgtctccactccaagtggccgaaaacgtatctttcgtggaggagtataggtggcttgcatacgtgctcctacttcttcttgaactcctggtgtgtctgtttacattactggggcttgctaagcagtccaaatggctcgtgatcgtaatgaccgttatgagtctccttgtgctagtcctcagctggggaagcatgggactggaggctgcaaccgccgtcggactgagcgacttttgtagtaaccccgacccctatgtgctaaacctcacacaggaagagaccggcctgagctccgacattttgtcttattatcttctgtgtaatagggccgtgtccaatccattccagcagcgcctcacactctcgcaacgcgccttggctaatatccattcccaactcctggggctcgagagagaggccgtcccccagttcccttctgcccagaaacctcttctctccctagaggaaactcttaatgtcactgagggcaatttccaccagctggtagcgctgttacactgccggtcactgcacaaagattacggagccgcactgcgcgggctgtgtgaagatgcccttgaaggtctgctgttccttttgctcttctctctgttgagcgcaggcgccttagccacagctctttgctccttgccccgcgcatgggcactgtttccacctaggaaccccagtgctctgtgcagtggttcgcgcctgtctgagcccctgttgccagctgggcttgaaccagggtcacccttgagaagctttcccgggtgcagaagaaggccccactag

SEQ ID NO: 21510 - DNA, 1383 bp, Artificial Sequence
  derived and/or modified sequence
atgggcgcccctcctggctaccggcccagcgcctgggtgcacctgctgcaccagctgcccagggctgacttccagctgcggcctgtgcccagcgtgtttgccccccaggagcaggagtaccagcaggccctgctgctggtggccgccctggccggcctgggcctgggcctgagcctcatcttcatcgctgtgtacctgatccgcttctgctgctgccggcccccagagcccccaggcagcaagatccccagccctgggggcggctgtgtgacctggagctgcatcgtggccctgctggccggctgcacaggaattggaattggcttctacggcaacagcgagaccagtgatggagtgtcccagctgagcagcgccctgctgcacgccaaccacaccctgagcaccatcgaccacctggtgctggagaccgtggagcggctgggggaggccgtgaggacagagctgaccaccctggaggaggtgctggagcccaggacagagctggtggccgccgcccggggggcccggcggcaggccgaggccgccgcccagcagctgcagggcctggccttctggcagggcgtgcccctgagccccctgcaggtggccgagaatgtgtcctttgtggaggagtaccgctggctggcctacgtgctgctgctgctgctggagctgctggtgtgcctcttcaccctgctgggcctggccaagcagagcaagtggctggtgattgtgatgacagtgatgagcctgctggtgctggtgctgtcctggggctccatgggcctggaggccgccacagctgtgggcctgagtgacttctgcagcaacccagacccctacgtgctgaacctgacccaggaggagaccggcctgagcagtgacatcctgagctactacctgctgtgcaacagagctgtgagcaaccccttccagcagaggctgaccctgagccagagggccctggccaacatccacagccagctgctgggcctggagcgggaggccgtgccccagttccccagcgcccagaagcccctgctgagcctggaggagaccctgaatgtgacagagggcaacttccaccagctggtggccctgctgcactgccgcagcctgcacaaggactatggagctgccctgcggggcctgtgtgaagatgccctggagggcctgctcttcctgctgctcttcagcctgctgtctgctggggccctggccacagccctgtgcagcctgccccgggcctgggccctcttccccccaagaaaccccagcgccctgtgcagcggcagccggctgtctgagcccctgctgcctgctggcctggagcccggcagccccctgcgctccttccctggctgcagaagaagaccccactag

SEQ ID NO: 21511 - DNA, 1383 bp, Artificial Sequence
  derived and/or modified sequence
atgggcgccccccccggctaccggcccagcgcctgggtgcacctgcttcatcagctgccaagagcagacttccaactcaggccagttcccagcgtgtttgccccacaggagcaggaatatcagcaagccctcctactcgtggccgctctggcggggttagggcttggacttagcctcatctttatcgctgtgtacttaatccgattttgttgttgtaggcccccggagcctcccggttctaagattccatctcctggaggcggctgcgtaacctggtcctgcattgtggctctgctggccggctgcacggggatagggatcgggttttacggcaactccgaaaccagcgacggcgtctcgcaactgagtagcgccctgcttcatgccaaccacaccttgagtaccatcgaccacctagtactggaaaccgttgaacggttgggcgaggcagttcggactgagttgacaactctggaagaggttcttgagccaaggactgagctggtggctgctgctaggggcgcacgacgacaggcagaagccgcagctcagcagctgcaggggttggcattctggcaaggggtgccgttgtccccactccaggtggccgagaacgtgagtttcgtggaggagtaccggtggctagcctacgtgctgctgttattgctcgagttgctcgtatgcttattcaccctgctgggtctcgctaaacagtcaaaatggcttgtcatagttatgaccgtgatgagcctgctggtccttgtcttaagttggggctcaatgggcctcgaagccgctacagccgtggggttgagcgatttctgctctaacccagatccatacgtcttgaatctgacccaggaagaaactgggttatccagcgatattctgtcctactacctcctttgtaatcgggcagtgtcaaatcccttccagcagcgactgactctgagccaaagagcgctggccaacatccactctcagctgctcggactcgaacgtgaggcggtcccccagtttcccagcgcccagaagcccctcctctcccttgaggagaccttgaatgttaccgaaggcaacttccaccagctcgtcgccttactgcactgcaggtctctccacaaagattatggggctgccctgagggggctgtgcgaggacgcgctggaaggactgctcttccttttgttatttagtctcctgtctgccggggcacttgcgaccgcgctgtgttccttgccacgggcgtgggcgttatttcctcctcgaaatccaagtgctttatgctcaggctcacggctcagtgagccccttcttccggccggcctggaacccggcagccctctgcggtcttttcccggctgtcgtcggcggccgcattag

SEQ ID NO: 21512 - DNA, 1383 bp, Artificial Sequence
  derived and/or modified sequence
atgggtgcaccacccggatacaggccgtctgcatgggtccaccttctgcatcagctcccccgtgccgacttccagttaaggcctgtcccttctgtgttcgccccacaggagcaagaataccagcaggctttgctcctggtagccgcattggcaggccttggtcttggacttagcctaatttttatagctgtgtatcttattcggttctgttgttgtcgcccaccagaacctcccggatcaaagatcccaagtcccggagggggttgtgtgacttggtcctgtattgtggcccttctcgcaggatgcactgggattggtatcggattttatggtaattccgagaccagtgacggtgtcagccaactctctagcgccctgctgcatgccaatcatacactttccacaatagatcacctggtgttagagaccgttgaacggttaggcgaggctgtcaggaccgagctgacgactctggaggaggtgttggaaccacgtacagaactggtagctgccgcacgtggtgcgaggagacaagcagaggcggcagctcagcagttacaagggctcgctttttggcagggcgtgccgctgtctcctctgcaggtggctgaaaatgtcagctttgtggaggagtacagatggctcgcctacgtcctgttactgctgctggagctgttagtctgcctttttacgttgctaggactggccaaacagtctaagtggctcgtgattgtcatgaccgttatgtccctgctggtactggtgctttcatggggtagcatgggactggaggccgcaactgcagtcggactgtctgatttctgtagcaacccagatccctatgtgctgaacttaacccaggaagaaaccggactgtcaagtgacatcctgagctattatctcctgtgcaatcgcgctgtgtctaacccattccaacaaaggttgacgctgagtcagcgcgctctcgcaaacattcattcccagttactgggcctggagagagaggcagtgcctcagttcccatcagcgcaaaaacctttgctgtccctggaggaaaccctaaatgtcacagagggcaattttcaccagctcgtcgccctcctccactgccggtcactccataaagattacggggcagcgctgcgcggtctctgcgaggacgccctggagggactgttgttccttctcctgttcagtctactgtcagccggagctctcgccacagccctgtgttctctccctcgagcgtgggccctattccccccacgcaatcccagtgctctgtgctctgggagccggttaagcgagccgctgctgcccgctgggctggagccgggaagtccactgaggtccttccctggatgccggcgacgtccacactag

SEQ ID NO: 21513 - DNA, 1763 bp, Artificial Sequence
  derived and/or modified sequence
gccccgctgccccctcccccgggggccatgggggcgcccccgggctaccggccctcagcttgggtgcatctcctccaccagctgccccgcgccgacttccagctccgcccggtgcccagcgttttcgcgccccaagagcaggaataccagcaggccttgttgctggtggcggccttggcgggcctgggcttgggcctgagcctcattttcatcgctgtctacctcatccgcttctgctgctgccggccccccgagccccccgggtccaagatcccctcgcccgggggaggctgcgtcacctggagctgcattgtcgcccttctcgccggctgcactggcattggcatcggtttctatggcaacagtgagaccagtgatggggtgtcccagctcagctctgcgctgctgcacgccaaccacacactcagcaccattgaccacctggtgttggagacggtggagaggctgggcgaggcggtgaggacagagctgaccaccctggaggaggtgctcgagccgcgcacggagctggtggctgccgcccgaggggctcgacggcaggcggaggctgcggcccagcagctgcaggggctggccttctggcagggagtgcccctgagccccctgcaggtggctgaaaatgtgtcctttgtggaggagtacaggtggctggcctacgtcctcctgctgctcctggagctgctggtctgcctcttcaccctcctgggcctggcgaagcagagcaagtggctggtgatcgtgatgacagtcatgagtctcctggttctcgtcctgagctggggctccatgggcctggaggcagccacggccgtgggcctcagtgacttctgctccaatccagacccttatgttctgaacctgacccaggaggagacagggctcagctcagacatcctgagctattatctcctctgcaaccgggccgtctccaaccccttccaacagaggctgactctgtcccagcgagctctggccaacatccactcccagctgctgggcctggagcgagaagctgtgcctcagttcccttcagcgcagaagcctctgctgtccttggaggagactctgaatgtgacagaaggaaatttccaccagttggtggcactgctacactgccgcagcctgcacaaggactatggtgcagccctgcggggcctgtgcgaagacgccctggaaggcctgctcttcctgctactcttctccctgctgtctgcaggagcgctggccactgccctctgcagcctgccccgagcctgggccctcttcccacccaggaatccaagcgctttgtgcagtggcagtcgtctatctgagcccctcctcccggctggactggagcctggctcccctcttcgttccttccctggctgccggaggagaccccactaacccagcctgcctgggctctgaccactaacactcttggccatggacagcctgcacaggaccgcctccctgctcttggccactgtgctcccatttctgtccttggccttgggagtagctgagggggcagactagggagtagggctggcaggggagggggcagacagcctcgcctcgcacccttcatccctggctgccggtcccatccttggagggactaagctgggggtgggggacatgagtccccctgctgcccctgccacatcccagtgggctctgaccccctgatctcaactcgtggcactaacttggaaaagggttgatttaaaataaaagggaagactattttacaagca

SEQ ID NO: 21514 - protein, 273 aa, Artificial Sequence
  derived and/or modified sequence
MFGFPTATLLDCHGRYAQNVAFFNVMTEAHHKYDHSEATGSSSWDIQNSFRREKLEQKSPDSKTLQEDSPGVRQRVYECQECGKSFRQKGSLTLHERIHTGQKPFECTHCGKSFRAKGNLVTHQRIHTGEKPYQCKECGKSFSQRGSLAVHERLHTGQKPYECAICQRSFRNQSNLAVHRRVHSGEKPYRCDQCGKAFSQKGSLIVHIRVHTGLKPYACTQCRKSFHTRGNCILHGKIHTGETPYLCGQCGKSFTQRGSLAVHQRSCSQRLTL

SEQ ID NO: 21515 - DNA, 1176 bp, Artificial Sequence
  derived and/or modified sequence
gtccattccgccggcgccggcgctggcgctgctgcgggctcggcgccggcctttgtctgcgggcacgcgccgctgcggtgctcaggaacagcccatggaagaatcatatgaagaggtggtgactgaggtcgtaagcaggagtggacatgtttggatttccaacagctaccctgctggactgtcatggaagatatgcccagaatgtagcgttcttcaatgtgatgactgaagcccaccacaaatatgaccactctgaggctacaggatcctcaagctgggatatccaaaattctttcagaagagagaagctggaacaaaaatccccagattcgaagacactacaggaagattcacctggagtgagacaaagggtctatgagtgccaggagtgtggaaaatccttccggcaaaaaggtagtctaacgttacatgagagaatccacactggtcaaaagccttttgagtgcacccactgtggaaaaagcttcagggccaaaggcaatcttgttacacatcaacggatacacacgggagagaagccttatcagtgcaaggagtgtgggaaaagcttcagtcaacgaggtagtctcgctgtccacgagagactccacactggacagaaaccctacgagtgtgctatttgtcagagaagcttcaggaatcagagtaaccttgctgttcacaggagagttcacagtggtgagaagccctatagatgtgatcagtgtggaaaagccttcagtcagaaaggaagcttaattgttcacatcagagtccacacaggcctgaagccctatgcctgtacccagtgcaggaagagtttccacaccagggggaattgtattctgcatggcaaaatccacacaggagagacaccctatctgtgcggccagtgtggaaaaagcttcacccagagagggagtctggctgtgcaccagcgaagctgctcacagaggctcaccctttgaccactttcctgaagagaagttctctttatgaattaagagtacaaaatcctctgagatgaagcaacctatccagttctatggaatgaatggagaatctttcagaaagaccatcattgggtagggcaaactgatttttttcctttcccccaaaagagtatgaaaaataaatgtcttgtttattatcattatcaaaaaaaaaaaaaaaaaa

SEQ ID NO: 21516 - DNA, 822 bp, Artificial Sequence
  derived and/or modified sequence
atgttcggcttccccaccgccaccctgctggactgccacggcagatacgcccagaacgtggccttcttcaacgtgatgaccgaggcccaccacaagtacgaccacagcgaggccaccggcagcagcagctgggacatccagaacagcttcagaagagagaagctggagcagaagagccccgacagcaagaccctgcaggaggacagccccggcgtgagacagagagtgtacgagtgccaggagtgcggcaagagcttcagacagaagggcagcctgaccctgcacgagagaatccacaccggccagaagcccttcgagtgcacccactgcggcaagagcttcagagccaagggcaacctggtgacccaccagagaatccacaccggcgagaagccctaccagtgcaaggagtgcggcaagagcttcagccagagaggcagcctggccgtgcacgagagactgcacaccggccagaagccctacgagtgcgccatctgccagagaagcttcagaaaccagagcaacctggccgtgcacagaagagtgcacagcggcgagaagccctacagatgcgaccagtgcggcaaggccttcagccagaagggcagcctgatcgtgcacatcagagtgcacaccggcctgaagccctacgcctgcacccagtgcagaaagagcttccacaccagaggcaactgcatcctgcacggcaagatccacaccggcgagaccccctacctgtgcggccagtgcggcaagagcttcacccagagaggcagcctggccgtgcaccagagaagctgcagccagagactgaccctgtag

SEQ ID NO: 21517 - DNA, 822 bp, Artificial Sequence
  derived and/or modified sequence
atgtttgggttcccaacggccacgctgctggactgtcacgggcggtacgctcaaaacgttgcattcttcaatgtcatgaccgaggcccaccacaagtacgatcactctgaggctacggggagctcttcctgggacatccagaactcttttcgacgcgagaaacttgaacagaagagtcccgactctaagaccctgcaagaggactcaccaggcgttcgccagcgcgtctacgagtgtcaggaatgcggcaagagctttcgtcagaagggcagtctcacccttcacgaacggattcacaccggtcaaaaaccctttgagtgtacacattgcggaaaaagctttagggctaaaggcaatctggtgacccaccagaggatacacaccggcgagaaaccctaccagtgcaaagagtgtggtaagtctttctctcagcgggggagcctggccgtacatgaaaggcttcacacaggacagaagccatacgagtgcgctatatgccagcggtcctttcgtaaccagagcaatttggcagtgcaccggcgtgttcactctggagaaaagccttatcggtgtgatcagtgtggcaaagcctttagccagaaaggttcactgattgtacacattcgggtgcatacgggactcaagccatatgcgtgcacacagtgccgcaagtccttccacacgaggggcaactgtatcttacacggtaagatacataccggcgaaacaccttatctctgcggacagtgcggcaagtctttcacacagagaggctctttggcggtccatcagcggtcttgttcacagaggctgaccctgtag

SEQ ID NO: 21518 - DNA, 822 bp, Artificial Sequence
  derived and/or modified sequence
atgtttggttttcccaccgccacactgctggattgccatggaagatatgcccaaaatgtggcattttttaacgttatgaccgaggcacaccataagtatgatcatagcgaggctacaggaagcagctcgtgggacattcagaacagttttagacgtgagaagctagagcaaaaaagccctgactctaagacactgcaggaggatagtccaggggtgagacagagagtttacgagtgtcaggagtgcgggaagagctttcggcagaaaggctctctgaccttgcacgaacggattcatacaggccagaaaccattcgaatgtacgcactgtggaaagtcctttcgggccaaaggcaatctggtcactcatcaacggatccacacgggagagaagccataccagtgcaaggagtgcggaaagtcattctctcagcgaggcagtctggctgtccacgaaagattgcatactgggcagaaaccgtatgagtgcgccatttgccagcgctccttccgcaatcaaagtaacctcgcagtccatagaagggtacacagcggcgagaaaccctataggtgcgatcagtgcggaaaggccttctctcaaaagggttccctgatagtgcacatcagagtacacaccggcctaaagccatatgcctgcacacagtgtcgcaagtctttccatacacggggcaattgtatcctacatggtaaaatccacacaggagagactccctacctgtgcgggcagtgcggtaagtcctttactcagaggggttccctggcggtccatcagcgctcctgttcacagcgcttgactctttag

SEQ ID NO: 21519 - DNA, 822 bp, Artificial Sequence
  derived and/or modified sequence
atgtttggcttccccacagccaccctgctggactgccacggccgctatgcccagaatgtggccttcttcaacgtgatgacagaggcccaccacaagtatgaccacagcgaggccaccggcagcagctcctgggacatccagaacagcttcagaagagagaagctggagcagaagagcccagacagcaagaccctgcaggaggacagccctggggtgcggcagagggtgtatgagtgccaggagtgtgggaagagcttccggcagaagggcagcctgaccctgcacgagcgcatccacacaggccagaagccctttgagtgcacccactgtgggaagagcttccgggccaagggcaacctggtgacccaccagaggatccacactggagagaagccctaccagtgcaaggaatgtgggaagagcttcagccagaggggcagcctggccgtgcatgagcggctgcacacaggccagaagccctatgaatgtgccatctgccagaggagcttcaggaaccagagcaacctggccgtgcaccggcgggtgcacagcggggagaagccctaccgctgtgaccagtgtgggaaggccttcagccagaagggcagcctgattgtgcacatccgggtgcacacaggcctgaagccctatgcctgcacccagtgcaggaagagcttccacacccggggcaactgcatcctgcacggcaagatccacactggagagaccccctacctgtgtggccagtgtgggaagagcttcacccagaggggcagcctggccgtgcaccagaggagctgcagccagaggctgaccctgtag

SEQ ID NO: 21520 - DNA, 822 bp, Artificial Sequence
  derived and/or modified sequence
atgttcggcttccccaccgccaccctgctggactgccacggccggtacgcccaaaacgtggccttcttcaacgttatgaccgaggcacaccacaagtacgatcactctgaggctaccggcagctcttcatgggacatccagaactcattccgaagagaaaagctagagcagaaatcacctgacagcaaaactctacaggaggattcaccaggcgtcagacagcgcgtgtacgagtgccaggagtgtgggaagtcgttccggcagaagggctctttgaccctccacgagaggatacacactggccagaagccatttgagtgcacccattgcggaaagagcttccgggccaaaggcaatcttgttacacaccaacgcatccacactggggagaagccttatcagtgcaaagagtgcggtaagtcgttttctcagcgcggctccttggcagtacatgagcggctccataccggtcagaaaccttacgaatgtgccatatgccagaggtcatttcggaaccaatcaaacttggcagtccatagacgagtccattctggcgagaaaccgtaccgctgcgatcagtgtggcaaggcgttcagtcaaaagggttccctgatcgtacatatcagagtgcacaccggtctgaagccctatgcatgtacccagtgccgaaaaagttttcacacacgcgggaactgtattcttcatgggaagatccataccggagagactccttacctgtgcggccaatgcggcaagtccttcactcagcgtggatctcttgccgtacatcaaaggtcctgctcccagcgtctcaccttatag

SEQ ID NO: 21521 - DNA, 822 bp, Artificial Sequence
  derived and/or modified sequence
atgttcggcttccccaccgccaccctgctggactgccacggccggtacgcacaaaatgttgctttctttaacgtgatgacggaggctcatcataagtacgatcacagtgaggcaaccggtagctcttcctgggacattcagaatagttttaggcgcgagaaactggagcagaaatcaccagactcaaaaaccctccaggaagattcacctggcgtacgccagagggtgtacgagtgccaagagtgtggcaagtcctttcgtcagaagggcagcctgaccctgcacgagcgaattcacactgggcagaagccctttgagtgcacccattgcggcaagtcctttagggccaagggcaaccttgtgacgcatcagcggatccacacaggagagaaaccttaccaatgtaaagagtgcggtaagagttttagccagcgaggatccctcgctgtacacgagaggctgcacaccggacagaaaccctacgagtgtgctatctgccagcgcagtttcagaaaccaatcaaaccttgccgttcatcggagagttcactctggggaaaagccataccgctgcgaccagtgcggcaaagcattttcacagaagggaagcctcatagtgcatatccgtgttcacactggtcttaagccatacgcctgcacccagtgcagaaagagctttcatacccggggcaattgcattttgcatgggaagatacacactggtgaaaccccttatctctgtggccagtgtggcaagagtttcacacagaggggctctctcgccgttcaccagagaagttgtagccaaagactgactctctag

SEQ ID NO: 21522 - DNA, 822 bp, Artificial Sequence
  derived and/or modified sequence
atgtttggatttcctacagctaccttgctagattgccacgggagatacgcccagaatgttgccttctttaatgtgatgaccgaggctcatcacaagtatgaccatagtgaggcaactggttcaagttcttgggacatccagaatagcttccgacgagaaaagctggaacagaagagtccggatagcaaaacactccaagaggactctcccggagtgcgccaacgtgtgtacgagtgtcaggagtgtgggaaatccttccgtcagaaaggatcattaacccttcacgaacgcatccacacaggtcaaaagcccttcgagtgtacacactgtggtaaaagtttccgggctaaaggcaatttggtcacacaccaaagaatacacactggggagaaaccctatcagtgcaaggagtgcggcaagagctttagccaacgtgggtctctggctgttcacgagcgtttacatacagggcagaagccttatgagtgtgctatatgtcagaggtccttccgcaaccagagtaacctcgctgtccaccggagggttcacagtggcgagaagccataccggtgcgaccagtgtgggaaagcgttctctcaaaagggatcccttatcgttcatatccgcgtgcacaccggactgaagccttacgcttgcacgcagtgccgcaagtcattccacacacgcggtaactgtattctgcatgggaagatacacacaggggagaccccctacttatgtggtcagtgtggcaagtccttcactcagcggggatcgcttgcggtgcatcagaggtcctgcagtcaacggctgacgctgtag

SEQ ID NO: 21523 - DNA, 822 bp, Artificial Sequence
  derived and/or modified sequence
atgttcggcttcccaacagcaaccctactcgactgtcacggtcggtatgcccaaaacgtcgcattcttcaatgtgatgactgaggcgcaccataagtacgaccactccgaagccactggctcctccagttgggacatacaaaattccttccggagagagaagctggaacagaagtcccctgactcaaaaacactgcaggaagattcacccggagtcaggcagagggtgtacgaatgtcaagaatgcgggaagtctttcagacaaaaggggagcctgaccttacacgaacggatccacacaggccagaagccgtttgaatgcacacattgcggaaagtcattccgtgccaaggggaaccttgtgacacaccaaagaattcatacaggtgaaaagccttaccagtgcaaggagtgtggtaagtcattctctcagcggggttcactggccgtgcacgagcgcctccatactgggcagaagccctacgaatgcgccatttgccagcggtctttcaggaaccaaagtaatctcgctgtccatcggagggtccattcaggagaaaaaccctacagatgcgaccagtgtggaaaagccttctcccagaaaggatctctgatcgtacacatcagagtgcacacaggtttgaagccatatgcatgtactcagtgtcgaaaatctttccacacacgcggtaactgcatactgcacggaaaaattcacacaggagaaactccgtacctctgtgggcagtgtggaaagtcgttcacacagcgaggctctttggccgtgcaccagcgttcctgctctcagagactgactctctag

SEQ ID NO: 21524 - DNA, 1137 bp, Artificial Sequence
  derived and/or modified sequence
ctggcgctgctgcgggctcggcgccggcctttgtctgcgggcacgcgccgctgcggtgctcaggaacagcccatggaagaatcatatgaagaggtggtgactgaggtcgtaagcaggagtggacatgtttggatttccaacagctaccctgctggactgtcatggaagatatgcccagaatgtagcgttcttcaatgtgatgactgaagcccaccacaaatatgaccactctgaggctacaggatcctcaagctgggatatccaaaattctttcagaagagagaagctggaacaaaaatccccagattcgaagacactacaggaagattcacctggagtgagacaaagggtctatgagtgccaggagtgtggaaaatccttccggcaaaaaggtagtctaacgttacatgagagaatccacactggtcaaaagccttttgagtgcacccactgtggaaaaagcttcagggccaaaggcaatcttgttacacatcaacggatacacacgggagagaagccttatcagtgcaaggagtgtgggaaaagcttcagtcaacgaggtagtctcgctgtccacgagagactccacactggacagaaaccctacgagtgtgctatttgtcagagaagcttcaggaatcagagtaaccttgctgttcacaggagagttcacagtggtgagaagccctatagatgtgatcagtgtggaaaagccttcagtcagaaaggaagcttaattgttcacatcagagtccacacaggcctgaagccctatgcctgtacccagtgcaggaagagtttccacaccagggggaattgtattctgcatggcaaaatccacacaggagagacaccctatctgtgcggccagtgtggaaaaagcttcacccagagagggagtctggctgtgcaccagcgaagctgctcacagaggctcaccctttgaccactttcctgaagagaagttctctttatgaattaagagtacaaaatcctctgagatgaagcaacctatccagttctatggaatgaatggagaatctttcagaaagaccatcattgggtagggcaaactgatttttttcctttcccccaaaagagtatgaaaaataaatgtcttgtttattatcattatca

SEQ ID NO: 21525 - DNA, 1201 bp, Artificial Sequence
  derived and/or modified sequence
gcggccgccaaggaaatgagcaggcctggccggcccgggccccgagggaggccagccgcgagcggagaggtcggcggtccgcagagcagggtcccgtggaccggagagcgggatgccgaggtgctcaggaacagcccatggaagaatcatatgaagaggtggtgactgaggtcgtaagcaggagtggacatgtttggatttccaacagctaccctgctggactgtcatggaagatatgcccagaatgtagcgttcttcaatgtgatgactgaagcccaccacaaatatgaccactctgaggctacaggatcctcaagctgggatatccaaaattctttcagaagagagaagctggaacaaaaatccccagattcgaagacactacaggaagattcacctggagtgagacaaagggtctatgagtgccaggagtgtggaaaatccttccggcaaaaaggtagtctaacgttacatgagagaatccacactggtcaaaagccttttgagtgcacccactgtggaaaaagcttcagggccaaaggcaatcttgttacacatcaacggatacacacgggagagaagccttatcagtgcaaggagtgtgggaaaagcttcagtcaacgaggtagtctcgctgtccacgagagactccacactggacagaaaccctacgagtgtgctatttgtcagagaagcttcaggaatcagagtaaccttgctgttcacaggagagttcacagtggtgagaagccctatagatgtgatcagtgtggaaaagccttcagtcagaaaggaagcttaattgttcacatcagagtccacacaggcctgaagccctatgcctgtacccagtgcaggaagagtttccacaccagggggaattgtattctgcatggcaaaatccacacaggagagacaccctatctgtgcggccagtgtggaaaaagcttcacccagagagggagtctggctgtgcaccagcgaagctgctcacagaggctcaccctttgaccactttcctgaagagaagttctctttatgaattaagagtacaaaatcctctgagatgaagcaacctatccagttctatggaatgaatggagaatctttcagaaagaccatcattgggtagggcaaactgatttttttcctttcccccaaaagagtatgaaaaataaatgtcttgtttattatcattatc

SEQ ID NO: 21526 - protein, 727 aa, Artificial Sequence
  derived and/or modified sequence
MNQKLLKLENLLRFHTIYRQLHSLCQRRALRQWRHGFSSAYPVWTAQLCAWPWPTDVLTGAALSQYRLLVTKKEEGPWKSQLSSTKSKKVVEVWIGMTIEELARAMEKNTDYVYEALLNTDIDIDSLEADSHLDEVWIKEVITKAGMKLKWSKLKQDKVRKNKDAVRRPQADPALLTPRSPVVTIMGHVDHGKTTLLDKFRKTQVAAVETGGITQHIGAFLVSLPSGEKITFLDTPGHAAFSAMRARGAQVTDIVVLVVAADDGVMKQTVESIQHAKDAQVPIILAVNKCDKAEADPEKVKKELLAYDVVCEDYGGDVQAVPVSALTGDNLMALAEATVALAEMLELKADPNGPVEGTVIESFTDKGRGLVTTAIIQRGTLRKGSVLVAGKCWAKVRLMFDENGKTIDEAYPSMPVGITGWRDLPSAGEEILEVESEPRAREVVDWRKYEQEQEKGQEDLKIIEEKRKEHKEAHQKAREKYGHLLWKKRSILRFLERKEQIPLKPKEKRERDSNVLSVIIKGDVDGSVEAILNIIDTYDASHECELELVHFGVGDVSANDVNLAETFDGVIYGFNVNAGNVIQQSAAKKGVKIKLHKIIYRLVEDLQEELSSRLPCAVEEHPVGEASILATFSVTEGKKKVPVAGCRVQKGQLEKQKKFKLTRNGHVIWKGSLTSLKHHKDDISIVKTGMDCGLSLDEDNMEFQVGDRIVCYEEKQIQAKTSWDPGF

SEQ ID NO: 21527 - protein, 72 aa, Artificial Sequence
  derived and/or modified sequence
MNQKLLKLENLLRFHTIYRQLHSLCQRRALRQWRHGFSSAYPVWTAQLCAWPWPTDVLTGAALSQYRLLVTK

SEQ ID NO: 21528 - protein, 70 aa, Artificial Sequence
  derived and/or modified sequence
MNQKLLKLENLLRFHTIYRQLHSLCQRRALRQWRHGFSSAYPVWTAQLCAWPWPTDVLTGAALSQYRLLV

SEQ ID NO: 21529 - protein, 26 aa, Artificial Sequence
  derived and/or modified sequence
MNQKLLKLENLLRFHTIYRQLHSLCQ

SEQ ID NO: 21530 - protein, 71 aa, Artificial Sequence
  derived and/or modified sequence
MNQKLLKLENLLRFHTIYRQLHSLCQRRALRQWRHGFSSAYPVWTAQLCAWPWPTDVLTGAALSQYRLLVT

SEQ ID NO: 21531 - protein, 465 aa, Artificial Sequence
  derived and/or modified sequence
MNQKLLKLENLLRFHTIYRQLHSLCQRRALRQWRHGFSSAYPVWTAQLCAWPWPTDVLTGAALSQYRLLVTKKEEGPWKSQLSSTKSKKVVEVWIGMTIEELARAMEKNTDYVYEALLNTDIDIDSLEADSHLDEVWIKEVITKAGMKLKWSKLKQDKVRKNKDAVRRPQADPALLTPRSPVVTIMGHVDHGKTTLLDKFRKTQVAAVETGGITQHIGAFLVSLPSGEKITFLDTPGHAAFSAMRARGAQVTDIVVLVVAADDGVMKQTVESIQHAKDAQVPIILAVNKCDKAEADPEKVKKELLAYDVVCEDYGGDVQAVPVSALTGDNLMALAEATVALAEMLELKADPNGPVEGTVIESFTDKGRGLVTTAIIQRGTLRKGSVLVAGKCWAKVRLMFDENGKTIDEAYPSMPVGITGWRDLPSAGEEILEVESEPRAREVVDWRKYEQEQEKGQEDLKKEKN

SEQ ID NO: 21532 - DNA, 2184 bp, Artificial Sequence
  derived and/or modified sequence
atgaatcagaagctgttaaagctggagaacctcctgagatttcatactatctaccgccagctgcactccctgtgtcagagacgtgccttgcggcagtggcgccatggcttctcgagcgcgtatccagtgtggacagcacagctttgtgcttggccttggccaactgatgttctgaccggggcggcactctctcagtacagacttttggtcacaaaaaaagaggagggtccctggaagtctcagctcagcagtactaagagcaaaaaggtagtagaggtctggatcggcatgactattgaggagctggcaagagccatggaaaaaaacaccgattatgtatacgaggctctgttgaacaccgacattgacattgacagcttggaagccgatagtcacttagatgaggtttggataaaggaggtgattacaaaagcagggatgaagttgaagtggagtaagctcaagcaggacaaagtgcgcaagaataaggacgcggtcagacggccacaggccgatccagccctcctcaccccacggagcccagtcgtaaccatcatgggacacgtggatcacggaaaaaccaccttgctagataaattccgaaagacgcaggtggctgctgtagagacgggcggcatcacacagcatataggtgctttcctcgtgagccttcctagtggggagaagataacttttctggatactccaggacatgcagccttttcagccatgagagcccgcggcgcacaagtaacagatatcgtcgtgcttgtcgtagccgccgacgacggggtgatgaagcaaactgtggagagcattcagcacgctaaggacgctcaggtcccaatcatactggcagtgaataagtgcgataaggcagaagctgatcccgaaaaagtcaagaaggagttgctcgcctacgatgtagtgtgcgaagattatggaggcgacgtgcaggcagttcctgtaagcgccctgaccggggataacctgatggctttggccgaggcaacagtggctctggctgaaatgttagagcttaaagccgatcccaacggccctgtagaaggaacggtcatcgagtctttcacagacaaaggccgcggactggttaccactgctattattcaacggggaaccctacgcaaaggctctgttctagttgcaggcaagtgttgggcaaaggttcgccttatgttcgacgagaatggtaagactatcgacgaagcgtatccctcaatgcctgtcgggatcaccggatggagggacctgcccagtgctggggaggagatattagaggtggagtcagagcctcgcgcccgagaagtcgtggactggaggaagtacgagcaagagcaggaaaagggacaagaggacttgaagatcatcgaggaaaaaaggaaggagcataaggaggcacatcagaaggctcgggaaaaatatggacatttgctctggaaaaagcgcagtatcctgaggttcctggaacgcaaagagcaaatacccctaaagcccaaagagaaaagagagcgagattctaacgtactgagcgtgattatcaagggagacgtggatggcagcgttgaggctatactgaacattatcgacacatacgacgcatcacacgaatgcgaactggagttagttcactttggcgtaggagatgtgagtgcaaatgacgtgaacttggccgagaccttcgatggcgtcatctatggtttcaacgtcaacgccggtaacgtcatacaacagtctgcagctaaaaagggcgtgaaaattaagttacataaaattatttataggctcgtggaggatctgcaggaggagctcagttcaagactcccatgtgccgtggaggagcatccggtgggcgaggcctccattttggccacatttagcgttacagaaggcaagaaaaaggttcctgtggccggctgtagggtgcagaaggggcagctggagaagcagaagaagttcaagttaacgcggaacggccatgtcatctggaaggggagcttgacatctttgaagcaccacaaagacgacatttctattgtgaaaacagggatggactgcggcctcagtctcgatgaggataacatggaattccaggtgggagatcggatcgtgtgttatgaggagaagcagatccaggccaaaacctcttgggaccccggattttag

SEQ ID NO: 21533 - DNA, 219 bp, Artificial Sequence
  derived and/or modified sequence
atgaatcagaagttgctgaagctggagaacttgctcaggtttcacaccatttatcggcagctccactcgctgtgtcagagaagagcactgcgccagtggaggcacgggtttagtagcgcctacccagtgtggaccgctcagctgtgtgcctggccctggcctaccgatgtgctgactggagccgcgctgagtcagtaccgattactggttacgaagtag

SEQ ID NO: 21534 - DNA, 2184 bp, Artificial Sequence
  derived and/or modified sequence
atgaaccagaagctattaaagctggagaatctgctgcgtttccatacaatctaccgacagctgcacagcctctgtcagcgcagagccctcagacaatggagacacgggttcagtagcgcttaccctgtatggaccgctcagctctgtgcgtggccctggcccaccgatgtgcttacaggcgccgctctgagtcagtaccgcctcctggtgacaaagaaggaggaggggccctggaaatcccagctgtcatccaccaaatctaaaaaagtggtggaagtgtggattggaatgactatcgaagagctggccagagcaatggaaaaaaatacagactatgtctacgaagccctgctgaacacagacattgatatcgatagtctcgaggctgatagtcacctagacgaggtctggatcaaggaagtcattaccaaggcagggatgaagctgaagtggagtaagctcaagcaggataaagtccgtaagaacaaggacgccgttcgaagaccccaggcggacccggccctgttaaccccccggtctccagttgttacaatcatgggccacgtggatcacggaaaaacaaccctgctggataaattcagaaaaacacaagtggccgcagtcgaaaccggcgggatcacacagcatattggcgccttcctcgtgtccctgccctctggtgagaagatcacttttttggatacccccggacacgcagcattctcagccatgagggcacgaggggcccaagtcactgacatcgtcgtgttggttgtcgccgctgacgacggtgttatgaagcagactgttgagagtatccagcacgccaaagacgcacaggtgcccattattctcgccgtcaacaaatgcgataaggccgaggcagacccagagaaggttaaaaaggagctactggcatatgacgtggtctgcgaggactacggcggggatgtgcaggccgtgccagtgtcagcactaacaggcgataatctcatggctttagccgaggctactgttgctctggcagaaatgctggagctgaaggcggaccccaacggcccagttgaaggcactgtcattgaaagtttcaccgataaaggacgaggtttagtgactaccgccatcattcagagggggaccctgagaaagggaagtgtcctggtggccgggaaatgctgggcgaaagtgagactcatgtttgacgaaaatggaaaaacaattgacgaagcctatccaagcatgcctgtcgggatcaccggatggagggatttgccgtccgccggcgaagaaatactcgaagtagagtcggagcccagagccagggaggtcgtggactggcggaagtacgaacaggaacaggagaagggccaagaagacttgaagatcatcgaagagaagcggaaggagcacaaggaagctcaccagaaggctagagaaaagtatgggcacctcctctggaaaaagcgcagtatactaagatttttggaacggaaggagcagatccctttgaaaccaaaagaaaaacgtgagcgagactcgaatgttctgagtgtaatcatcaagggagacgtagacggtagcgtggaagccatcttgaatatcatcgatacctatgacgcttctcacgaatgtgaactcgaattggtacattttggtgtgggggacgtgagtgcaaacgacgtgaatttagctgagacgtttgacggcgtcatctacgggtttaacgtcaatgcaggcaatgtcattcagcagtctgctgcaaagaaaggcgtgaaaatcaaattgcataaaataatctatcgcctagtagaagatctccaggaggaattatctagtaggttaccgtgtgccgtggaagagcaccccgttggtgaagcctctatactggctacgtttagtgtgacagagggaaagaaaaaagtgcctgtggccgggtgccgtgtgcagaagggccagctggaaaaacagaaaaaatttaagttgactcgcaatggacacgtgatttggaaaggttcacttacatccctgaaacaccacaaggacgatatcagcattgtgaagaccggaatggattgcggactgagtctggacgaagacaacatggagtttcaggtcggagaccgcattgtgtgctatgaagagaagcagattcaagctaaaacatcatgggatccgggattttag

SEQ ID NO: 21535 - DNA, 2184 bp, Artificial Sequence
  derived and/or modified sequence
atgaatcagaagctgctgaagctggagaacctgctccggttccacacaatctaccgacaactgcactctttatgccagagacgggcattacggcagtggcggcatgggttctcttccgcctacccggtctggaccgcccagctgtgtgcttggccttggcccaccgacgtacttacgggggctgccttgtcccagtaccgactcctggttaccaagaaggaggaaggaccctggaagtcacaattaagtagcacaaaatcaaagaaggtcgttgaggtttggattggtatgacaatagaggaactggctcgtgcaatggagaagaacaccgattacgtctacgaggctctcctgaacaccgacatcgacatcgacagcctggaggccgactcacatctggacgaggtatggatcaaagaagtgattactaaggccgggatgaaattaaaatggtcaaagctgaagcaggacaaggtaaggaaaaacaaggacgctgtgaggcgaccacaggctgaccccgctttattgacccctagatcccctgtcgtgaccatcatgggacatgtcgaccatggaaagaccacgcttctggacaaattccgtaagacacaggtagctgcagtggagaccggcggaatcacacagcatattggcgctttcttagtgagcttgccctccggtgaaaaaatcaccttcctggacactcctggccatgctgcgtttagtgctatgcgggccaggggcgctcaagtcacagacattgtcgtcctcgtcgtggccgcagatgacggcgtgatgaagcaaaccgttgagtccatccagcacgctaaggacgcccaagtgcctatcattctggccgtgaacaaatgtgacaaagccgaagctgaccctgagaaagttaagaaagaattattagcctacgatgtcgtctgcgaagattacggtggagatgtccaggctgtgcccgtttcagctctcacaggtgacaacctgatggcactggccgaggccacagtggctctagccgagatgctggagctcaaggctgaccccaacggcccagtcgagggtacagtgattgagagcttcacagacaagggcagagggctagtgacaaccgcaatcatccagaggggaacacttaggaagggctcagtgctggttgccggaaaatgttgggccaaagtgcgattaatgttcgatgagaatggaaaaacaatcgatgaggcataccccagcatgcccgtgggcattacagggtggcgggacctcccttcagcgggagaggagatcttggaagttgagagcgagccacgagctcgcgaggtggtggactggcggaaatacgaacaagaacaggaaaaggggcaggaggacttgaaaatcatcgaagagaaaagaaaagagcacaaggaggctcatcagaaagcaagggaaaaatacggtcacctcctttggaagaaaaggagcattctcaggtttttagagcggaaagagcagatccctctcaagcctaaggaaaagcgcgaacgcgacagtaatgtcctctcagtgatcataaaaggcgatgtagacggcagtgtcgaggcgatactaaacatcatcgacacctacgacgctagccatgagtgtgagctggaactcgttcacttcggtgttggggatgtgtcagcaaatgacgttaatctggccgagaccttcgatggagtgatctacggctttaacgtaaatgccggcaacgtcatccagcagtctgcggccaagaagggcgtgaaaattaagctgcacaaaattatctaccggctggtagaggatctgcaggaggaactttctagccgcctgccatgcgcagtggaggagcatccagtgggagaggcttctatcttagcaacattcagcgtcaccgagggaaaaaaaaaagtccccgtggcaggctgtagagtgcaaaaaggtcagcttgagaagcagaagaaattcaaacttactcgtaacgggcacgtcatttggaagggctctctgacttcactcaagcaccataaagacgacataagcatagtaaagacaggcatggactgtgggctgtcacttgatgaagataacatggagttccaggtgggagatcggattgtttgttacgaggagaagcagatccaggcaaagacatcctgggatcccgggttttag

SEQ ID NO: 21536 - DNA, 213 bp, Artificial Sequence
  derived and/or modified sequence
atgaatcagaaactactgaaactggagaatcttttgagatttcatacgatttatagacaattacatagcctctgccagcgccgtgccctacggcagtggcgccacggcttttcgtcggcctatcccgtatggacggctcagctgtgtgcttggccatggcccacagatgttctgacgggcgcagctctctcacagtacagattgctcgtctag

SEQ ID NO: 21537 - DNA, 33 bp, Artificial Sequence
  derived and/or modified sequence
atgaatcaaaagctgctgaagcttgagaactag

SEQ ID NO: 21538 - DNA, 81 bp, Artificial Sequence
  derived and/or modified sequence
atgaatcaaaaactgcttaaattagagaatcttcttagattccataccatttatcggcaactgcactccctctgccagtag

SEQ ID NO: 21539 - DNA, 216 bp, Artificial Sequence
  derived and/or modified sequence
atgaaccaaaaattgctaaaactggagaatctccttagattccatacaatttatcgtcagctgcactctctgtgccagcggcgcgcgctccggcaatggcgacacgggttctcttcggcatacccagtgtggactgcacaattgtgtgcctggccttggccaaccgacgtgctgaccggagccgccctgtcacagtatcgcctcctcgtcacatag

SEQ ID NO: 21540 - DNA, 1398 bp, Artificial Sequence
  derived and/or modified sequence
atgaatcagaagctgctgaagctggagaacttactccgctttcacacgatctatagacaactccacagtctctgccagaggcgggccctccgccaatggcggcacggcttttcttcggcctacccagtgtggacagcccaactgtgcgcttggccatggcccaccgacgtgttaaccggcgcagcgttgtctcagtacaggctcttggtgaccaaaaaagaggagggaccctggaaatctcagctgtcttcaacgaagagcaaaaaagtggtggaggtgtggataggcatgacaatcgaagaactcgcgagggctatggagaaaaacaccgattacgtgtatgaggccttactcaatacagatatcgacatcgactctttggaggccgattctcatctcgatgaagtgtggattaaggaggtcataaccaaggccggaatgaagcttaagtggagtaagctgaaacaggataaagtccgaaaaaacaaagacgctgtaagacgcccacaggcggacccagccctcctgactccacgctcacccgtcgtcaccattatgggccacgtcgatcacggcaagacaactctcctggacaagttcagaaagacccaggtggccgccgtggaaaccggcgggattacccaacacattggggcatttttggtgtcacttccttccggagagaaaatcacgtttctggacacacccggacacgctgctttctctgctatgcgtgctaggggggcgcaagtgactgatattgttgtgttagtcgtggccgccgacgacggggtgatgaagcagaccgtggaatctattcagcatgccaaagacgcccaggtccccataattctggcagtcaacaagtgcgataaagccgaagctgacccggagaaagtgaagaaggagctcctggcctacgacgtagtgtgtgaagattatggtggagacgtccaagccgtgccggtgagcgcactgacaggggataatcttatggccctcgctgaggctacagtggccctggccgaaatgctcgaactgaaggcggaccctaatggtccggtggagggtacagtgattgaatctttcactgacaagggccgggggttagtgaccaccgcaattatccaacgggggactctcaggaagggctctgtcttggtcgccggaaaatgctgggctaaggtccgtctaatgttcgacgagaacggcaaaactatcgatgaggcgtacccgagtatgcctgtcggaataacggggtggcgggatctccccagcgcaggagaggaaattttggaagttgagagtgaaccacgagcccgagaggttgtggattggaggaagtatgagcaggaacaggagaagggccaggaggatttgaaaaaggaaaaaaactag

SEQ ID NO: 21541 - DNA, 2184 bp, Artificial Sequence
  derived and/or modified sequence
atgaaccagaagctgctgaagctggagaacctgctgcgcttccacaccatctaccggcagctgcacagcctgtgccagaggcgggccctgcggcagtggaggcatggcttcagcagcgcctaccctgtgtggacagcccagctgtgtgcctggccctggcccacagatgtgctgactggagctgccctgagccagtaccgcctgctggtgaccaagaaggaggagggcccctggaagagccagctgagcagcaccaagagcaagaaggtggtggaggtgtggattggcatgaccatcgaggagctggcccgggccatggagaagaacacagattatgtgtatgaggccctgctgaacacagacatcgacatcgacagcctggaggccgacagccacctggatgaggtgtggatcaaggaggtgatcaccaaggccggcatgaagctgaagtggagcaagctgaagcaggacaaggtgaggaagaacaaggatgctgtgagaagaccccaggccgaccctgccctgctgacccccaggagccctgtggtgaccatcatgggccacgtggaccacggcaagaccaccctgctggacaagttcaggaagacccaggtggccgctgtggagaccggcggcatcacccagcacatcggggccttcctggtgtccctgcccagcggggagaagatcaccttcctggacaccccaggccatgctgccttcagcgccatgagggcccggggggcccaggtgacagacatcgtggtgctggtggtggccgcagatgatggagtgatgaagcagacagtggagagcatccagcacgccaaggatgcccaggtgcccatcatcctggccgtgaacaagtgtgacaaggccgaggccgaccctgagaaggtgaagaaggagctgctggcctatgatgtggtgtgtgaggactatggaggagatgtgcaggccgtgcctgtgtctgccctgactggagacaacctgatggccctggccgaggccaccgtggccctggccgagatgctggagctgaaggctgaccccaacggccctgtggagggcaccgtcatcgagagcttcacagacaagggccggggcctggtgaccacagccatcatccagaggggcaccctgaggaaaggatctgtgctggtggccggcaagtgctgggccaaggtgcggctgatgtttgatgaaaatggcaagaccattgatgaggcctaccccagcatgcctgtgggcatcaccggctggagggacctgcccagcgctggggaggagatcctggaggtggagagcgagccccgggcccgggaggtggtggactggaggaaatatgagcaggagcaggagaagggccaggaggacctgaagatcatcgaggagaagaggaaggagcacaaggaggcccaccagaaggcccgggagaagtatggccacctgctgtggaagaagaggagcatcctgcgcttcctggagaggaaggagcagatccccctgaagcccaaggagaagcgggagcgggacagcaatgtgctgagcgtcatcatcaagggagatgtggatggctctgtggaggccatcctgaacatcatcgacacctatgatgccagccatgaatgtgagctggagctggtgcactttggagtgggagatgtgtctgccaatgatgtgaacctggccgagacctttgatggagtcatctacggcttcaacgtgaatgctggaaatgtcatccagcagagcgctgccaagaagggcgtgaagatcaagctgcacaagatcatctaccgcctggtggaggacctgcaggaggagctgagcagccggctgccctgtgctgtggaggagcaccctgtgggggaggccagcatcctggccaccttctctgtgacagagggcaagaagaaggtgcctgtggccggctgccgggtgcagaagggccagctggagaagcagaagaagttcaagctgaccagaaatggccacgtgatctggaagggcagcctgaccagcctgaagcaccacaaggatgacatcagcatcgtgaagacaggcatggactgtggcctgagcctggatgaggacaacatggagttccaggtgggggacagaattgtgtgctatgaggagaagcagatccaggccaagacctcctgggaccccggcttctag

SEQ ID NO: 21542 - DNA, 219 bp, Artificial Sequence
  derived and/or modified sequence
atgaaccagaagctgctgaagctggagaacctgctgcgcttccacaccatctaccggcagctgcacagcctgtgccagaggcgggccctgcggcagtggaggcatggcttcagcagcgcctaccctgtgtggacagcccagctgtgtgcctggccctggcccacagatgtgctgactggagctgccctgagccagtaccgcctgctggtgaccaagtag

SEQ ID NO: 21543 - DNA, 213 bp, Artificial Sequence
  derived and/or modified sequence
atgaaccagaagctgctgaagctggagaacctgctgcgcttccacaccatctaccggcagctgcacagcctgtgccagaggcgggccctgcggcagtggaggcatggcttcagcagcgcctaccctgtgtggacagcccagctgtgtgcctggccctggcccacagatgtgctgactggagctgccctgagccagtaccgcctgctggtgtag

SEQ ID NO: 21544 - DNA, 81 bp, Artificial Sequence
  derived and/or modified sequence
atgaaccagaagctgctgaagctggagaacctgctgcgcttccacaccatctaccggcagctgcacagcctgtgccagtag

SEQ ID NO: 21545 - DNA, 216 bp, Artificial Sequence
  derived and/or modified sequence
atgaaccagaagctgctgaagctggagaacctgctgcgcttccacaccatctaccggcagctgcacagcctgtgccagaggcgggccctgcggcagtggaggcatggcttcagcagcgcctaccctgtgtggacagcccagctgtgtgcctggccctggcccacagatgtgctgactggagctgccctgagccagtaccgcctgctggtgacctag

SEQ ID NO: 21546 - DNA, 1398 bp, Artificial Sequence
  derived and/or modified sequence
atgaaccagaagctgctgaagctggagaacctgctgcgcttccacaccatctaccggcagctgcacagcctgtgccagaggcgggccctgcggcagtggaggcatggcttcagcagcgcctaccctgtgtggacagcccagctgtgtgcctggccctggcccacagatgtgctgactggagctgccctgagccagtaccgcctgctggtgaccaagaaggaggagggcccctggaagagccagctgagcagcaccaagagcaagaaggtggtggaggtgtggattggcatgaccatcgaggagctggcccgggccatggagaagaacacagattatgtgtatgaggccctgctgaacacagacatcgacatcgacagcctggaggccgacagccacctggatgaggtgtggatcaaggaggtgatcaccaaggccggcatgaagctgaagtggagcaagctgaagcaggacaaggtgaggaagaacaaggatgctgtgagaagaccccaggccgaccctgccctgctgacccccaggagccctgtggtgaccatcatgggccacgtggaccacggcaagaccaccctgctggacaagttcaggaagacccaggtggccgctgtggagaccggcggcatcacccagcacatcggggccttcctggtgtccctgcccagcggggagaagatcaccttcctggacaccccaggccatgctgccttcagcgccatgagggcccggggggcccaggtgacagacatcgtggtgctggtggtggccgcagatgatggagtgatgaagcagacagtggagagcatccagcacgccaaggatgcccaggtgcccatcatcctggccgtgaacaagtgtgacaaggccgaggccgaccctgagaaggtgaagaaggagctgctggcctatgatgtggtgtgtgaggactatggaggagatgtgcaggccgtgcctgtgtctgccctgactggagacaacctgatggccctggccgaggccaccgtggccctggccgagatgctggagctgaaggctgaccccaacggccctgtggagggcaccgtcatcgagagcttcacagacaagggccggggcctggtgaccacagccatcatccagaggggcaccctgaggaaaggatctgtgctggtggccggcaagtgctgggccaaggtgcggctgatgtttgatgaaaatggcaagaccattgatgaggcctaccccagcatgcctgtgggcatcaccggctggagggacctgcccagcgctggggaggagatcctggaggtggagagcgagccccgggcccgggaggtggtggactggaggaaatatgagcaggagcaggagaagggccaggaggacctgaagaaggagaagaactag

SEQ ID NO: 21547 - DNA, 2528 bp, Artificial Sequence
  derived and/or modified sequence
ggactgacctaccgaccattcttccgggtccagaaggtgatctccgcccgtgctcagaatccaggggcccggggctgtagattccttgacaaggatatcctagcggcgaaacaacaccgtactgggagtcagaacgtctgggttctagtcttgactgccattaactagcggtatgacattggagaagcttttttgacccttctggatttccgtttccttttctgtaaaatgaggagcttggaagatccggaaaatgaggcccataggaaacaagtgacttgctgagtccagataacactgactgtcagagagaaacatgaaccagaagctactgaagttggagaacttgctacgatttcacactatttataggcaactgcacagtctgtgtcaaagaagagcattaagacagtggaggcatgggttttcatctgcttaccctgtgtggacagctcaactgtgtgcctggccctggccaacagatgtgctcactggggctgctttatctcagtataggcttctagtaacaaaaaaggaagaaggaccatggaaatctcagttatcttcaacaaaatctaaaaaggtggtagaagtatggattggaatgactattgaggaactggccagggcaatggaaaaaaacacagattatgtatatgaagctttattgaacactgatattgacatagattcactggaagcagactcacatttagatgaagtctggatcaaagaagtgataacgaaggcagggatgaagttaaagtggagtaaattaaaacaggacaaagtcagaaaaaataaagatgctgtaagaaggccccaggcagatccagctttattaaccccaaggtccccagttgttactataatgggccatgttgatcacgggaaaacgacattacttgacaaatttcgaaaaactcaagtggcagcagtggaaactggaggcatcactcagcacattggtgcctttcttgtctctctgccttctggggaaaagataacttttcttgatactccaggacatgctgctttctcagcaatgagagccagaggtgctcaggtcactgacattgtcgtattggttgtagctgcagatgatggagtgatgaaacaaactgtagaatctattcagcatgccaaagatgcacaggttcctattatccttgccgtaaataaatgtgacaaagctgaggctgatcctgagaaagtgaaaaaagagctgctggcttacgatgtggtatgtgaagattatggaggtgatgttcaagcagtgcctgtctccgcacttacgggcgataatctgatggctttggcagaagcaacagttgctcttgcagaaatgttagaattgaaagcagatcccaatggtccagtggaaggaacagtaatagagtctttcacagacaaaggaagaggtcttgttactacagctataattcaaagaggaactttaagaaaaggctctgttctggttgctggaaaatgttgggcaaaagtacgcttaatgtttgatgaaaatggaaaaacaattgatgaggcctatcccagcatgccagtgggaattacaggctggagagaccttccttctgcaggagaagaaattcttgaagtagaatctgagccaagggcacgtgaagttgttgactggaggaaatatgaacaagaacaggagaaaggtcaggaggatctgaaaataatagaagaaaagcgaaaggaacacaaagaagcacatcagaaagcccgtgagaagtatggccatctactgtggaagaagagatcaattctacggtttttagaaagaaaagaacaaatacccttaaagccaaaagagaaaagggaaagagattcaaatgtactttctgtgattattaaaggtgatgttgatggttctgttgaggccattttgaacattatagatacctatgatgcttcacacgagtgtgaactagaattagtacattttggagtgggtgatgtaagtgcaaatgatgttaaccttgctgaaacatttgatggtgttatatatggctttaatgtgaatgcaggcaatgttatccaacagtcagctgcaaaaaaaggagtaaaaattaaacttcacaaaataatttaccgtcttgttgaagatttgcaagaggaactgagcagcagattaccctgtgctgtggaagagcacccagtaggtgaggcatctatactagctaccttctctgtaacagaagggaagaaaaaagttcctgtggctggctgcagagtccaaaagggacagttagaaaaacaaaaaaaatttaaactaacccgtaatggacatgtaatttggaagggctcattaacctcattgaaacaccataaagatgacatttcaattgtcaaaacgggaatggattgtggtctcagtttagatgaagacaatatggaatttcaagtgggagacagaattgtttgttatgaagaaaagcaaattcaagccaagacttcttgggatccaggattttaaaattacattaaaaatgtaaataactcaa

SEQ ID NO: 21548 - DNA, 955 bp, Artificial Sequence
  derived and/or modified sequence
cggggctgtaggtaggagttaagtgggtaggatcccttaaccagggttgtccggtgcaggtggtgtgtgttgtttcgcctaacgtgtcagtggcacaaatcacgcgaacttcataaacattgtgcgttcggaagcctttccaagatgcatttaatccctgcgtgagcccacgttaggcattcacgaaggcatgtgcactgttctctcggaagcggctggccggcttcccctcctcgcgcgcggctgtgggtgcaggtcctcacttcccagcctcccatgggcccaaggccttctgggctccaatttgaggcgagccaccccagatccgtaatttttctgcagtgatttatttttacctttctgattccttgacaaggatatcctagcggcgaaacaacaccgtactgggagtcagaacgtctgggttctagtcttgactgccattaactagcggtatgacattggagaagcttttttgacccttctggatttccgtttccttttctgtaaaatgaggagcttggaagatccggaaaatgaggcccataggaaacaagtgacttgctgagtccagataacactgactgtcagaagtctcgctctgtctccccggctggagtgcagtggcgtgatcttggctcactgcaacctctgtctcccgggttcaagaaattctcctgcctcagcctcccaagtagctgggactacaggcatgtgccaccacgcccaggagaaacatgaaccagaagctactgaagttggagaacttgctacgatttcacactatttataggcaactgcacagtctgtgtcaaagaagagcattaagacagtggaggcatgggttttcatctgcttaccctgtgtggacagctcaactgtgtgcctggccctggccaacagatgtgctcactggggctgctttatctcagtataggcttctagtaacaaaaaa

SEQ ID NO: 21549 - DNA, 2947 bp, Artificial Sequence
  derived and/or modified sequence
cggggctgtaggtaggagttaagtgggtaggatcccttaaccagggttgtccggtgcaggtggtgtgtgttgtttcgcctaacgtgtcagtggcacaaatcacgcgaacttcataaacattgtgcgttcggaagcctttccaagatgcatttaatccctgcgtgagcccacgttaggcattcacgaaggcatgtgcactgttctctcggaagcggctggccggcttcccctcctcgcgcgcggctgtgggtgcaggtcctcacttcccagcctcccatgggcccaaggccttctgggctccaatttgaggcgagccaccccagatccgtaatttttctgcagtgatttatttttacctttctgattccttgacaaggatatcctagcggcgaaacaacaccgtactgggagtcagaacgtctgggttctagtcttgactgccattaactagcggtatgacattggagaagcttttttgacccttctggatttccgtttccttttctgtaaaatgaggagcttggaagatccggaaaatgaggcccataggaaacaagtgacttgctgagtccagataacactgactgtcagaagtctcgctctgtctccccggctggagtgcagtggcgtgatcttggctcactgcaacctctgtctcccgggttcaagaaattctcctgcctcagcctcccaagtagctgggactacaggcatgtgccaccacgcccaggagaaacatgaaccagaagctactgaagttggagaacttgctacgatttcacactatttataggcaactgcacagtctgtgtcaaagaagagcattaagacagtggaggcatgggttttcatctgcttaccctgtgtggacagctcaactgtgtgcctggccctggccaacagatgtgctcactggggctgctttatctcagtataggcttctagtaacaaaaaaggaagaaggaccatggaaatctcagttatcttcaacaaaatctaaaaaggtggtagaagtatggattggaatgactattgaggaactggccagggcaatggaaaaaaacacagattatgtatatgaagctttattgaacactgatattgacatagattcactggaagcagactcacatttagatgaagtctggatcaaagaagtgataacgaaggcagggatgaagttaaagtggagtaaattaaaacaggacaaagtcagaaaaaataaagatgctgtaagaaggccccaggcagatccagctttattaaccccaaggtccccagttgttactataatgggccatgttgatcacgggaaaacgacattacttgacaaatttcgaaaaactcaagtggcagcagtggaaactggaggcatcactcagcacattggtgcctttcttgtctctctgccttctggggaaaagataacttttcttgatactccaggacatgctgctttctcagcaatgagagccagaggtgctcaggtcactgacattgtcgtattggttgtagctgcagatgatggagtgatgaaacaaactgtagaatctattcagcatgccaaagatgcacaggttcctattatccttgccgtaaataaatgtgacaaagctgaggctgatcctgagaaagtgaaaaaagagctgctggcttacgatgtggtatgtgaagattatggaggtgatgttcaagcagtgcctgtctccgcacttacgggcgataatctgatggctttggcagaagcaacagttgctcttgcagaaatgttagaattgaaagcagatcccaatggtccagtggaaggaacagtaatagagtctttcacagacaaaggaagaggtcttgttactacagctataattcaaagaggaactttaagaaaaggctctgttctggttgctggaaaatgttgggcaaaagtacgcttaatgtttgatgaaaatggaaaaacaattgatgaggcctatcccagcatgccagtgggaattacaggctggagagaccttccttctgcaggagaagaaattcttgaagtagaatctgagccaagggcacgtgaagttgttgactggaggaaatatgaacaagaacaggagaaaggtcaggaggatctgaaaataatagaagaaaagcgaaaggaacacaaagaagcacatcagaaagcccgtgagaagtatggccatctactgtggaagaagagatcaattctacggtttttagaaagaaaagaacaaatacccttaaagccaaaagagaaaagggaaagagattcaaatgtactttctgtgattattaaaggtgatgttgatggttctgttgaggccattttgaacattatagatacctatgatgcttcacacgagtgtgaactagaattagtacattttggagtgggtgatgtaagtgcaaatgatgttaaccttgctgaaacatttgatggtgttatatatggctttaatgtgaatgcaggcaatgttatccaacagtcagctgcaaaaaaaggagtaaaaattaaacttcacaaaataatttaccgtcttgttgaagatttgcaagaggaactgagcagcagattaccctgtgctgtggaagagcacccagtaggtgaggcatctatactagctaccttctctgtaacagaagggaagaaaaaagttcctgtggctggctgcagagtccaaaagggacagttagaaaaacaaaaaaaatttaaactaacccgtaatggacatgtaatttggaagggctcattaacctcattgaaacaccataaagatgacatttcaattgtcaaaacgggaatggattgtggtctcagtttagatgaagacaatatggaatttcaagtgggagacagaattgtttgttatgaagaaaagcaaattcaagccaagacttcttgggatccaggattttaaaattacattaaaaatgtaaataactc

SEQ ID NO: 21550 - DNA, 2386 bp, Artificial Sequence
  derived and/or modified sequence
gacctaccgaccattcttccgggtccagaaggtgatctccgcccgtgctcagaatccaggggcccggggctgtagagatccggaaaatgaggcccataggaaacaagtgacttgctgagtccagataacactgactgtcagagagaaacatgaaccagaagctactgaagttggagaacttgctacgatttcacactatttataggcaactgcacagtctgtgtcaaagaagagcattaagacagtggaggcatgggttttcatctgcttaccctgtgtggacagctcaactgtgtgcctggccctggccaacagatgtgctcactggggctgctttatctcagtataggcttctagtaacaaaaaaggaagaaggaccatggaaatctcagttatcttcaacaaaatctaaaaaggtggtagaagtatggattggaatgactattgaggaactggccagggcaatggaaaaaaacacagattatgtatatgaagctttattgaacactgatattgacatagattcactggaagcagactcacatttagatgaagtctggatcaaagaagtgataacgaaggcagggatgaagttaaagtggagtaaattaaaacaggacaaagtcagaaaaaataaagatgctgtaagaaggccccaggcagatccagctttattaaccccaaggtccccagttgttactataatgggccatgttgatcacgggaaaacgacattacttgacaaatttcgaaaaactcaagtggcagcagtggaaactggaggcatcactcagcacattggtgcctttcttgtctctctgccttctggggaaaagataacttttcttgatactccaggacatgctgctttctcagcaatgagagccagaggtgctcaggtcactgacattgtcgtattggttgtagctgcagatgatggagtgatgaaacaaactgtagaatctattcagcatgccaaagatgcacaggttcctattatccttgccgtaaataaatgtgacaaagctgaggctgatcctgagaaagtgaaaaaagagctgctggcttacgatgtggtatgtgaagattatggaggtgatgttcaagcagtgcctgtctccgcacttacgggcgataatctgatggctttggcagaagcaacagttgctcttgcagaaatgttagaattgaaagcagatcccaatggtccagtggaaggaacagtaatagagtctttcacagacaaaggaagaggtcttgttactacagctataattcaaagaggaactttaagaaaaggctctgttctggttgctggaaaatgttgggcaaaagtacgcttaatgtttgatgaaaatggaaaaacaattgatgaggcctatcccagcatgccagtgggaattacaggctggagagaccttccttctgcaggagaagaaattcttgaagtagaatctgagccaagggcacgtgaagttgttgactggaggaaatatgaacaagaacaggagaaaggtcaggaggatctgaaaataatagaagaaaagcgaaaggaacacaaagaagcacatcagaaagcccgtgagaagtatggccatctactgtggaagaagagatcaattctacggtttttagaaagaaaagaacaaatacccttaaagccaaaagagaaaagggaaagagattcaaatgtactttctgtgattattaaaggtgatgttgatggttctgttgaggccattttgaacattatagatacctatgatgcttcacacgagtgtgaactagaattagtacattttggagtgggtgatgtaagtgcaaatgatgttaaccttgctgaaacatttgatggtgttatatatggctttaatgtgaatgcaggcaatgttatccaacagtcagctgcaaaaaaaggagtaaaaattaaacttcacaaaataatttaccgtcttgttgaagatttgcaagaggaactgagcagcagattaccctgtgctgtggaagagcacccagtaggtgaggcatctatactagctaccttctctgtaacagaagggaagaaaaaagttcctgtggctggctgcagagtccaaaagggacagttagaaaaacaaaaaaaatttaaactaacccgtaatggacatgtaatttggaagggctcattaacctcattgaaacaccataaagatgacatttcaattgtcaaaacgggaatggattgtggtctcagtttagatgaagacaatatggaatttcaagtgggagacagaattgtttgttatgaagaaaagcaaattcaagccaagacttcttgggatccaggattttaaaattacattaaaaatgtaaataactcaacgtgttgtttgtttgaaggtagaaa

SEQ ID NO: 21551 - DNA, 437 bp, Artificial Sequence
  derived and/or modified sequence
atcctcaaagcttataagcgagtatcaagacatgtgatatggttttaaaatagctgatgataaagtatatacatcatctcattttctcctcttagtcttgtaataggaaggacagatattcaaacacttatttatttatttatttttaacagagatccggaaaatgaggcccataggaaacaagtgacttgctgagtccagataacactgactgtcagagagaaacatgaaccagaagctactgaagttggagaacttgctacgatttcacactatttataggcaactgcacagtctgtgtcaaagaagagcattaagacagtggaggcatgggttttcatctgcttaccctgtgtggacagctcaactgtgtgcctggccctggccaacagatgtgctcactggggctgctttatctcagtataggcttctagtaa

SEQ ID NO: 21552 - DNA, 517 bp, Artificial Sequence
  derived and/or modified sequence
agaatccaggggcccggggctgtaggtaggagttaagtgggtaggatcccttaaccagggttgtccggtgcaggtggtgtgtgttgtttcgcctaacgtgtcagtggcacaaatcacgcgaacttcataaacattgtgcgttcggaagcctttccaagatgcatttaatccctgcgtgagcccacgttaggcattcacgaagattccttgacaaggatatcctagcggcgaaacaacaccgtactgggagtcagaacgtctgggttctagtcttgactgccattaactagcggtatgacattggagaagcttttttgacccttctggatttccgtttccttttctgtaaaatgaggagcttggaagatccggaaaatgaggcccataggaaacaagtgacttgctgagtccagataacactgactgtcagagagaaacatgaaccagaagctactgaagttggagaacttgctacgatttcacactatttataggcaactgcacagtctgtgtcaaa

SEQ ID NO: 21553 - DNA, 583 bp, Artificial Sequence
  derived and/or modified sequence
gcagacagtcccacccccagcggcgacagcaactctctgaattccggaaagaaccttttccagcgggaccggaagcccggcggggaccgtagcggggacggactgacctaccgaccattcttccgggtccagaagattccttgacaaggatatcctagcggcgaaacaacaccgtactgggagtcagaacgtctgggttctagtcttgactgccattaactagcggtatgacattggagaagcttttttgacccttctggatttccgtttccttttctgtaaaatgaggagcttggaagatccggaaaatgaggcccataggaaacaagtgacttgctgagtccagataacactgactgtcagagagaaacatgaaccagaagctactgaagttggagaacttgctacgatttcacactatttataggcaactgcacagtctgtgtcaaagaagagcattaagacagtggaggcatgggttttcatctgcttaccctgtgtggacagctcaactgtgtgcctggccctggccaacagatgtgctcactggggctgctttatctcagtataggcttctagtaac

SEQ ID NO: 21554 - DNA, 1675 bp, Artificial Sequence
  derived and/or modified sequence
gtgatctccgcccgtgctcagaatccaggggcccggggctgtagattccttgacaaggatatcctagcggcgaaacaacaccgtactgggagtcagaacgtctgggttctagtcttgactgccattaactagcggtatgacattggagaagcttttttgacccttctggatttccgtttccttttctgtaaaatgaggagcttggaagatccggaaaatgaggcccataggaaacaagtgacttgctgagtccagataacactgactgtcagagagaaacatgaaccagaagctactgaagttggagaacttgctacgatttcacactatttataggcaactgcacagtctgtgtcaaagaagagcattaagacagtggaggcatgggttttcatctgcttaccctgtgtggacagctcaactgtgtgcctggccctggccaacagatgtgctcactggggctgctttatctcagtataggcttctagtaacaaaaaaggaagaaggaccatggaaatctcagttatcttcaacaaaatctaaaaaggtggtagaagtatggattggaatgactattgaggaactggccagggcaatggaaaaaaacacagattatgtatatgaagctttattgaacactgatattgacatagattcactggaagcagactcacatttagatgaagtctggatcaaagaagtgataacgaaggcagggatgaagttaaagtggagtaaattaaaacaggacaaagtcagaaaaaataaagatgctgtaagaaggccccaggcagatccagctttattaaccccaaggtccccagttgttactataatgggccatgttgatcacgggaaaacgacattacttgacaaatttcgaaaaactcaagtggcagcagtggaaactggaggcatcactcagcacattggtgcctttcttgtctctctgccttctggggaaaagataacttttcttgatactccaggacatgctgctttctcagcaatgagagccagaggtgctcaggtcactgacattgtcgtattggttgtagctgcagatgatggagtgatgaaacaaactgtagaatctattcagcatgccaaagatgcacaggttcctattatccttgccgtaaataaatgtgacaaagctgaggctgatcctgagaaagtgaaaaaagagctgctggcttacgatgtggtatgtgaagattatggaggtgatgttcaagcagtgcctgtctccgcacttacgggcgataatctgatggctttggcagaagcaacagttgctcttgcagaaatgttagaattgaaagcagatcccaatggtccagtggaaggaacagtaatagagtctttcacagacaaaggaagaggtcttgttactacagctataattcaaagaggaactttaagaaaaggctctgttctggttgctggaaaatgttgggcaaaagtacgcttaatgtttgatgaaaatggaaaaacaattgatgaggcctatcccagcatgccagtgggaattacaggctggagagaccttccttctgcaggagaagaaattcttgaagtagaatctgagccaagggcacgtgaagttgttgactggaggaaatatgaacaagaacaggagaaaggtcaggaggatctgaaaaaagaaaagaac

SEQ ID NO: 21555 - DNA, 2184 bp, Artificial Sequence
  derived and/or modified sequence
atgaaccagaagctgctgaagctggagaacctgctgcggttccacactatatacagacagctgcacagtctctgccaacgaagggcactgcgtcagtggcgtcatgggttttcttccgcctaccccgtctggacagcccaactttgtgcctggccctggccaaccgacgttctcactggcgcagctttatcccaatacagactcctcgttaccaagaaagaagaaggcccatggaagtctcagctgagctccacgaagagcaagaaagtggtcgaggtgtggattgggatgactatcgaagagctcgctcgtgcgatggagaagaataccgactatgtctacgaagccctcttaaacactgacattgacatcgattcgttggaagcagacagtcacttggacgaagtctggattaaggaagtcatcactaaggccggtatgaagcttaaatggtctaagttgaaacaagacaaggtcagaaagaacaaagatgcagtaagaagaccccaggctgaccccgctttactaacacccaggtcaccagtggtgactattatgggacacgttgaccatggcaagacaacactcctcgacaagttcaggaagacacaggtggctgccgttgaaacaggaggaatcacgcagcacattggcgccttccttgtgtctcttcctagtggggagaagataacctttcttgatacccctggtcatgctgcattttctgcaatgagagcccggggggcacaggtcactgatattgttgtacttgtggttgcagccgacgacggggtaatgaagcagactgtggaaagtattcagcacgccaaagatgcccaggtgcctatcattctcgccgtgaataagtgtgataaagcagaggctgaccctgaaaaggtcaaaaaggaactacttgcttatgatgttgtctgtgaggactatggtggcgatgtgcaggccgttcctgtgtccgctcttacaggcgataacctgatggctcttgctgaagcaacagtcgccctggccgaaatgttggaactgaaggcagaccccaacgggcccgtcgagggaactgttattgagagcttcaccgacaaggggagggggctggttacgacggccatcattcagagaggaacgctcagaaaggggagcgtccttgtcgcggggaagtgctgggcaaaggtgaggctgatgttcgacgagaacgggaagactattgatgaggcttaccccagcatgccggtgggtatcacgggctggagggacctgccctctgccggggaggagattctggaggtggaatccgaaccacgggcaagggaagtagtggattggaggaaatatgagcaagaacaagaaaaaggccaggaagacctcaaaattattgaagagaaacggaaggaacataaggaagcccatcaaaaagcccgggagaagtacggtcatcttctgtggaagaaacggagcatccttagatttctggaacggaaagagcagatcccgctaaagccaaaagaaaaacgggagagagactcaaacgtcttaagcgtgataataaagggtgatgttgacggatccgtcgaagccattctgaacatcatagatacatacgatgcatcccacgagtgtgagctcgagttggtccactttggagttggcgatgttagcgcgaatgacgtgaatctggcggagacattcgacggtgtgatttacggttttaatgtgaacgccggcaacgtgattcagcagtcagcagcgaagaagggcgtgaaaataaaactccataaaattatctacagactcgtcgaggatcttcaggaggaactgagtagccgcctaccttgcgcagtggaggagcatcctgtcggtgaggcctctatcctcgcgaccttttccgtgacggaagggaaaaagaaggtgcctgtcgccgggtgtcgcgttcaaaagggccagctagaaaaacaaaaaaagtttaagttgacaaggaatggtcacgtgatctggaaggggtccttgacctccctgaagcatcataaggacgacattagtattgttaaaaccgggatggactgcgggctgagcctggacgaggacaacatggagttccaggtgggcgatcgaattgtgtgttatgaggagaaacaaatccaggccaagacatcctgggatcccggcttctag

SEQ ID NO: 21556 - DNA, 219 bp, Artificial Sequence
  derived and/or modified sequence
atgaaccagaagctgctgaagctggagaacctgctgcggttccacaccatctaccggcagttgcatagcctgtgccaaagacgggcactcaggcagtggcgacatggtttcagttcagcttaccccgtgtggaccgctcagctttgcgcatggccttggccaaccgatgttttgaccggcgctgctctaagccagtaccggttgcttgtcaccaaatag

SEQ ID NO: 21557 - DNA, 2184 bp, Artificial Sequence
  derived and/or modified sequence
atgaaccagaagctgctgaagctggagaacctgctgcggttccacaccatctaccgccaactgcattccctgtgccagcgacgtgctctcaggcagtggcggcacggcttctctagcgcatatccagtttggaccgcgcagctgtgtgcatggccttggcctaccgatgttctgaccggcgccgctctgtcacaatacaggctgctggtcactaagaaagaagaagggccttggaagtcacagctgtctagtacaaaatctaagaaagtcgtcgaggtctggattggtatgacaattgaggaattggcccgagcaatggaaaagaacaccgattatgtgtatgaagcactgctaaataccgacatcgatatagactccttagaggccgattctcacctcgatgaagtatggattaaagaggttattacaaaggccggaatgaagctgaagtggtcgaagctcaaacaggataaggtccgaaagaataaggatgctgtccgcagacctcaagctgatcctgcccttctaaccccaaggtctcctgtggtcactatcatggggcatgtggaccatgggaaaactacactgctggataaatttcgcaagacacaggtagccgctgtcgagacaggtggcattacccagcacataggggctttccttgtttcccttcctagcggagaaaaaatcacattcctcgacacacctggccacgcagccttctcagctatgcgcgcccgcggcgctcaggtaaccgacatcgttgtcctcgtggtcgccgctgatgacggtgtgatgaaacaaacagtggaatcaattcagcacgctaaagacgcacaggtgcctattatcctggccgttaacaagtgtgacaaggccgaagcagacccggaaaaggtcaaaaaggaactgttggcctacgatgtggtctgtgaagactatggcggggatgtacaggcagtccctgtgtccgccctcacaggtgacaacctcatggccctcgccgaagcaactgtggctctagccgagatgttagagcttaaagctgaccctaatggccccgtagagggcacagtgattgagtcgttcactgataaggggcgaggtctggtgacaaccgctatcatccaaaggggaactctaaggaagggaagtgtcctggtcgcagggaagtgttgggccaaagtccgcctgatgttcgacgaaaatgggaaaactattgacgaggcttatccttccatgcctgtcggaattactggatggagagacctgccaagcgccggcgaagagatcctggaagtcgagtctgagcctagggcccgtgaggtagtggattggagaaagtatgagcaggaacaggagaagggccaagaagaccttaaaatcatcgaggagaagagaaaggaacataaagaggcccatcaaaaggccagagagaaatatggacacctgctgtggaagaagaggtcaattttgcggtttctggagaggaaggaacagatacctctcaagcctaaagaaaaaagagagcgcgatagtaacgtgctcagcgtgatcattaagggcgacgtggatggttccgtcgaagctattctgaatatcatcgatacctacgacgctagccatgaatgcgaattagaactggtgcacttcggggtaggagatgtatccgctaatgatgtcaatctcgctgagacattcgatggcgttatttacgggttcaacgtaaacgcgggcaacgtgatccagcagtcagccgcgaaaaagggagtaaaaatcaaactccacaaaattatctaccgactcgtagaggacctccaagaagagctctcttccagacttccatgtgcggtggaggagcaccccgtgggggaggcctcaatcctcgccacgtttagtgtcaccgaggggaagaagaaggttccggttgctggatgtcgggtgcaaaagggacaattggagaagcagaagaagttcaagttgaccagaaatggccatgtaatatggaaagggagcttgaccagcctcaagcatcacaaagacgatatctccatagttaagactggtatggactgtggcctgagcctggatgaggacaacatggagttccaggtgggtgacaggatcgtgtgttacgaggagaaacagattcaggctaaaactagctgggatcctggcttctag

SEQ ID NO: 21558 - DNA, 2184 bp, Artificial Sequence
  derived and/or modified sequence
atgaaccagaagctgctgaagctggagaacctgctgcggttccacaccatctaccggcagctacacagcctctgtcagcgcagggcccttcgtcagtggcggcacggtttttcttcagcatatccagtgtggaccgcccaactctgcgcctggccgtggcccacagacgtgctgacaggggcagccctaagtcagtacaggttgcttgtaacaaaaaaggaagagggcccttggaagtcacagctgagttctactaagtctaaaaaggtggtggaggtgtggatcgggatgacaatcgaagagcttgcgagggccatggagaaaaacactgactacgtatacgaggccctgttgaacactgatatagacatcgactcacttgaagctgattcccacctggacgaagtttggattaaggaagtgattactaaagctggtatgaagctgaagtggagcaagctgaagcaagacaaagtgaggaagaataaggatgccgtgcggcgcccacaggcagatcccgccctgctgaccccccgatctccagtggtcactatcatgggtcacgtggatcacggcaaaactacactgttagataaattccgcaaaacacaggtggcggctgtggagacaggaggcattacgcagcacattggagccttcctggtcagtcttcctagtggggagaagataacttttctggacacccccggacacgccgctttcagtgcaatgagggctcgtggagctcaggtcaccgacatcgtggtgcttgtggtggctgccgatgatggggtgatgaagcagaccgtggagtccattcaacatgccaaagacgcccaggtgccaatcatcctggcggtgaataaatgtgataaagccgaagcagaccccgagaaagtaaaaaaagaactgcttgcctatgatgtggtttgcgaggattacggcggtgacgtacaggcagtgcctgtgtctgccctcacgggtgacaatctgatggctttggccgaggcaaccgtggccctagccgagatgctggagctgaaggccgatccaaacgggcctgtagagggcacagtcattgaatcattcaccgataaaggccggggcctcgtcacaacggctattatacagagagggacccttcgcaaggggagcgtgctggtggccggcaaatgttgggcgaaagtcagactgatgttcgacgaaaacggaaagacaatcgacgaagcttacccgagcatgcccgtggggatcaccggatggcgagacctgccttctgcaggagaggagattctcgaggtggaaagtgaaccaagggccagggaagtggttgattggcgaaaatacgagcaggagcaggagaagggtcaggaggacctgaagatcatcgaagaaaaaaggaaggaacataaagaagcacatcaaaaggcgcgggagaagtatggccacttgctctggaagaagcgctcaatcctgaggttcttagagaggaaagaacagatcccgctcaaacctaaggagaagcgggagcgagacagcaacgtgctgtcagtgattatcaagggtgacgtggacgggtctgtagaggcaatcctgaacattattgatacatacgacgcttcacacgagtgtgagctggagctagtccattttggggtcggggacgtgtcggcgaacgacgtcaatttggccgaaacctttgatggggttatttacggcttcaacgtgaacgctgggaatgttatacagcaaagcgcggcgaaaaagggagtgaagataaaactgcacaagatcatttaccgtctcgtcgaggacttgcaggaagagctttcttcccgcctgccctgcgcagtagaagagcacccggtgggtgaggcaagcattctggccacattttctgtcacagaaggaaagaagaaggtgccggtggctgggtgtcgagtgcagaaaggccagctcgaaaagcagaagaagttcaagttaacccgcaatgggcatgttatctggaaaggctccctgacctccttgaagcaccacaaggacgatatttctatagtcaaaaccggcatggactgcggcctttctttagacgaggacaatatggagttccaggtgggggaccgcatagtttgttatgaggaaaagcagattcaggccaagacgtcatgggatcctggtttttag

SEQ ID NO: 21559 - DNA, 213 bp, Artificial Sequence
  derived and/or modified sequence
atgaaccagaagctgctgaagctggagaacctgctgcggttccacacaatttacaggcagctgcactccctatgccaaaggagggcgctcaggcagtggagacatggttttagttccgcctatcccgtgtggaccgcccagctgtgtgcttggccctggcccacagacgtgctcactggagcagcactgtcccagtatcgcctgctcgtttag

SEQ ID NO: 21560 - DNA, 81 bp, Artificial Sequence
  derived and/or modified sequence
atgaaccagaagctgctgaagctggagaacctgctgcggttccacactatctaccgacagttgcactccctttgccaatag

SEQ ID NO: 21561 - DNA, 216 bp, Artificial Sequence
  derived and/or modified sequence
atgaaccagaagctgctgaagctggagaacctgctgcggttccacaccatatatagacagctgcactcgctctgtcagagaagggcactgaggcaatggcggcatggcttctcgtcggcctaccctgtctggacagcgcagctctgcgcctggccatggcccacagatgtgttgaccggtgccgccctgagccagtacagactattggtgacatag

SEQ ID NO: 21562 - DNA, 1398 bp, Artificial Sequence
  derived and/or modified sequence
atgaaccagaagctgctgaagctggagaacctgctgcggttccacactatttaccggcagcttcattctttgtgccaacgcagagcgctcaggcagtggaggcatgggtttagtagtgcctaccctgtctggaccgcccagctatgcgcctggccttggccgacagacgtcttgactggggccgcactgtctcagtacaggctcctcgtaacaaagaaagaggagggaccttggaaatctcagttgtccagcaccaaatctaaaaaagtggtagaagtatggataggcatgacaatcgaggaactggcccgagcgatggagaaaaacactgattacgtttacgaggctctgctgaacaccgacatagatattgattcactagaggctgatagccatttagacgaggtgtggatcaaagaggtgatcaccaaagcaggtatgaaactcaagtggagcaagctgaaacaagacaaagtccgtaagaataaggacgcagtgcgtcggccacaagctgaccccgctctgctcacccccaggtccccagtcgtaaccattatggggcatgtggatcacggcaagacaacactgctcgacaagttccgtaaaacacaggtcgcggccgtcgagaccggagggattacacagcacatcggcgcctttctcgtgtccctcccctctggggaaaagatcacctttctggacacaccaggacacgccgcctttagcgctatgagagccaggggggcccaggtgacagatatcgtggtcctggtggtggccgctgacgatggtgtaatgaaacagaccgttgaatcaattcaacacgcaaaggacgcccaggtgccaataatccttgccgtgaataagtgcgataaagcggaggccgacccggagaaggtgaaaaaggagctacttgcctacgacgttgtctgcgaggactatggaggggacgtgcaggcagtccccgtgagcgccctgacgggagacaatcttatggccctcgccgaggcaacagtggcactcgccgagatgctggagcttaaagccgacccgaacggccctgtagaaggcacagtcatcgaaagttttaccgataaggggagagggttagtgactaccgcaataatccagaggggaacactgagaaagggcagcgttctggttgcaggaaagtgttgggccaaggtgcgactgatgttcgatgagaacggaaagacaattgacgaggcgtaccctagcatgcccgttggcattactggctggcgtgacctaccttctgccggcgaagaaatactggaggtcgaaagtgaaccaagggctcgcgaggtggtcgattggcgaaagtatgagcaggagcaggagaaagggcaggaagacctgaaaaaagaaaagaattag

SEQ ID NO: 21563 - DNA, 2184 bp, Artificial Sequence
  derived and/or modified sequence
atgaaccaaaaactcctgaaactcgaaaacctgctgcgatttcataccatttacagacagttgcacagcctgtgtcaacggagggcacttagacagtggcgccacggattcagctcagcctaccctgtgtggaccgcccagctgtgcgcgtggccttggcctaccgacgtcctgacaggggcagccttgagccagtaccgcctgctggtcactaagaaagaagaaggcccatggaaatcccagttgtcaagtactaagtctaagaaggtggtggaagtgtggattggcatgaccatcgaggaattggcccgtgctatggagaagaatactgattatgtttatgaggctttgctgaacactgatattgacatcgattctttggaagcagactctcacctcgacgaggtgtggatcaaagaggtgattaccaaagctggaatgaagctgaagtggagtaagttgaagcaggacaaggtgcgtaaaaacaaggacgccgtcaggagaccccaggctgaccccgcacttcttacaccaagatccccagtggttaccattatgggccatgtcgatcacggcaagacaactctactcgataagtttcgcaaaactcaggtggctgcagtggagaccggcggaattacacagcacattggagcgtttctggttagcctgcctagcggggagaagattacttttctggatacccccggtcacgctgcatttagcgcaatgagagcacgcggagctcaagtcaccgacatagtggttttggtcgtcgctgccgacgatggggttatgaagcaaactgtggaatctatccaacatgccaaagacgctcaggttcccattattcttgccgtgaacaagtgcgacaaagctgaggccgaccctgagaaagttaaaaaggagttgctcgcttatgacgtggtgtgcgaagactacgggggtgatgtgcaggccgtgcctgtctctgccctcacgggagacaatttgatggccctggccgaagcaaccgttgccctcgccgaaatgctggaattgaaagccgatccaaatgggcctgtggaaggaacagtgatcgaatcctttaccgataaaggcaggggcctggtcacaaccgctattatccagcgaggtactctgagaaaaggaagtgtgctggtggccggaaagtgctgggccaaagtgagacttatgtttgacgaaaatggaaagactattgacgaggcgtatccatccatgccagtgggtatcactgggtggcgcgatcttccatccgcgggtgaagagatactggaagtcgagagtgaacccagagcaagagaggttgtcgattggcgaaagtacgagcaggagcaagagaagggtcaggaggacttaaaaattatcgaggagaagcgcaaggagcataaggaagcccatcagaaggccagggagaaatacggccacctgctctggaagaaacgaagcattcttcgttttctcgaaagaaaagaacagatccctctgaagcccaaagagaaaagggagcgcgacagtaacgtgttgagtgtaatcatcaaaggggacgtcgacgggagcgtagaagctatactgaacattatagacacatacgatgccagccacgagtgtgaactggagctggtgcactttggagttggcgacgtctcagccaacgacgtgaacttggccgagactttcgatggggtgatatacggcttcaacgtgaatgcgggtaatgttattcagcagagtgcggcaaagaaaggagtcaaaattaagttgcataagatcatctatcggctggtggaggacttacaggaggagttatcctcacggctcccttgtgctgtagaagaacatccagtgggtgaagcttctatcctggctacctttagtgtgaccgaaggaaaaaagaaggtcccggttgctggctgtagggtccagaaagggcaattggagaaacagaaaaagtttaagctgactcgcaatggccatgtgatttggaaaggatccctgacaagcctgaagcaccataaggatgatattagcattgtcaaaactgggatggattgcgggttatccttagacgaggacaatatggaattccaggttggggaccgcattgtgtgttatgaagaaaaacagattcaagcgaagacttcctgggacccaggtttttag

SEQ ID NO: 21564 - DNA, 219 bp, Artificial Sequence
  derived and/or modified sequence
atgaatcaaaagttgctgaaattggagaatctgctccggtttcatacaatctaccgtcaattacactctctctgtcagcggcgtgctttaagacagtggcgacatgggttctcctcagcctaccccgtgtggaccgcgcagctgtgtgcttggccatggcccacggacgtcctgacaggagccgctctatcccagtatcggctattagtgacaaaatag

SEQ ID NO: 21565 - DNA, 2184 bp, Artificial Sequence
  derived and/or modified sequence
atgaaccagaagctgctgaaattagagaacctcctgaggtttcacactatctatagacagctccacagcctgtgccagagacgggctttaagacagtggaggcacggattctcttcggcataccctgtctggacagctcagctgtgtgcctggccctggccaacggatgtcttaaccggggcagctctgtcccagtacaggctgctggtgacaaagaaggaggaggggccttggaaaagtcaactgtccagtaccaagagcaagaaggtggttgaggtatggataggtatgaccatcgaagaattagccagagccatggaaaaaaacaccgactatgtgtacgaagccttactgaatacggatattgacattgatagcctcgaggccgattctcacctggacgaagtttggatcaaggaagtaataacaaaagccggtatgaagctgaagtggtctaaactgaagcaggacaaggtaaggaagaacaaagatgccgtgaggcggcctcaggctgatccagccttacttactcccaggtcacccgtcgtgacaatcatgggccacgttgaccatgggaagacgactctcctcgacaagtttcggaagacccaggtggccgctgttgagaccggaggaattactcaacatatcggtgctttcctggtatcactcccgtccggcgagaaaataacattcctcgatacaccgggtcatgcagccttctccgctatgcgtgcccgaggggcacaggtgaccgatattgtcgtgctggttgtggctgctgacgacggtgtgatgaagcagactgtggagagtatccagcatgccaaagatgcccaggttccaattatcctggccgtcaacaagtgtgacaaggctgaggccgatcccgagaaagttaagaaagagctgctcgcctatgacgtggtttgtgaggattacggcggagatgtgcaggccgtgcctgttagtgcactgacaggggataatcttatggccctggccgaggcgaccgtcgctctggccgagatgctggaattgaaagctgaccctaatggcccagtcgaaggaacagtgattgagagttttactgacaagggacgtggattggtgacaactgcaatcatccagcgcggtaccttgagaaaaggtagcgtactggtcgctgggaagtgttgggcaaaggttagactgatgtttgacgagaacggaaagactatcgatgaagcctatccatccatgccagtcgggattacagggtggcgcgatctgcctagtgcaggcgaagaaattctggaagtcgagtctgaacctcgcgcacgcgaggtcgtggactggaggaaatacgagcaggaacaggaaaagggccaggaggatctgaaaattattgaagaaaagagaaaggagcataaagaagcacatcaaaaagcaagggagaaatacgggcacctactttggaagaaaaggtccatcctacgattcttagaacgcaaagaacagatccccctgaagccaaaggaaaaacgggagcgtgacagtaacgtgctctcggtaattattaaaggcgacgttgacgggtctgttgaagcaatcctcaatataatcgacacttacgacgcttctcacgaatgtgagcttgagttggtgcatttcggagtcggcgatgtgagcgcaaatgatgtgaatctggccgaaacatttgacggtgtgatctacggtttcaacgtgaacgccggaaatgttattcagcaatccgccgcaaaaaaaggtgttaagattaaactgcataagatcatttaccgtctggtggaagaccttcaggaggagttgagctcgagactcccttgtgcggtggaagaacaccccgtcggcgaggcgagcattctcgctactttttctgtgaccgaaggcaaaaagaaagtccccgttgccggatgcagagttcagaagggccagctggagaaacagaaaaaatttaaattaacccgcaacggccacgtgatctggaaaggcagtctcacctccttgaagcatcacaaagatgacatttcaatcgtgaagactggcatggactgcggactgtctctcgatgaggacaacatggagtttcaggtaggggacaggatcgtgtgctatgaagaaaagcagattcaggccaagacaagctgggacccaggcttctag

SEQ ID NO: 21566 - DNA, 2184 bp, Artificial Sequence
  derived and/or modified sequence
atgaaccagaagctgcttaaactcgagaatctactacgctttcacaccatctatagacaattgcactccctctgtcagcggagggcgctgcgacagtggcggcacgggttcagctcagcatacccagtctggaccgctcagttgtgcgcttggccatggccaaccgacgtactaacgggagccgcactgagccagtacaggctgctcgtgactaaaaaagaagagggaccctggaagtcccagctgagcagcaccaagagtaaaaaggttgtcgaggtttggatcggcatgactattgaggagctcgctcgagctatggagaaaaatacagactatgtttacgaagcactcctcaatacagacatcgatatcgatagtttagaggcagactcacatctggacgaggtatggattaaggaggttataaccaaggcgggtatgaaattgaagtggtccaagttaaagcaagacaaagttagaaagaacaaggacgctgttcgaaggcctcaagcagatccagccctactgacccccaggagcccggtggtgaccattatgggacatgtggatcacggaaaaactacgttgctcgataaattccgaaagactcaagtcgctgcagtggagaccggcggaatcactcagcacatcggggcattcctggtgagtttgccttctggagaaaaaataacgttcctggatactccaggccacgccgctttttccgccatgcgcgcaagaggagcccaagtgaccgacatcgtggtcctcgtggtggccgcagatgacggtgtgatgaagcaaactgttgaatcaattcagcacgcaaaggacgcccaggtgcccattattctggcggttaataaatgcgacaaggcagaggccgatcccgaaaaagtaaagaaagagctcctggcctacgacgtggtatgcgaggattacggaggcgatgttcaggctgtccctgtaagcgccctcacgggggacaacctgatggccctggctgaggcgaccgtggctctggctgagatgctggaacttaaagccgatcctaacggccctgttgagggcactgtgatagagtcgtttacagacaagggcagaggcttggtcacaaccgccataattcaaaggggcactctgagaaaagggagcgtactggtggccggaaaatgttgggctaaagtgaggttgatgtttgatgaaaacggaaagacaatagatgaggcctacccaagcatgcctgtgggaatcaccggatggcgcgatctcccatccgccggagaagaaatcctcgaagtggagagtgagcccagagcaagggaggtcgtggattggcggaagtatgaacaggagcaggagaagggccaggaggaccttaaaatcattgaagaaaagcgaaaagaacacaaagaagctcatcagaaggctagagaaaagtatggccacctcctgtggaagaagcgaagtatcctcaggttcctggaaaggaaggagcagatccccctgaagccgaaagaaaagcgggagagagatagcaacgttctgtcagtcataataaaaggagacgttgacggcagcgtggaagcaatcctcaatattatcgacacctatgacgcctcccatgagtgcgaactggagcttgtgcacttcggcgttggcgacgtgtccgccaacgacgtgaaccttgccgaaactttcgatggcgtgatctatggattcaatgtgaatgcgggtaacgttattcaacagtcagccgcaaaaaaaggagtaaaaatcaagctccacaaaattatttatcgactggttgaggatctgcaggaggagctaagcagtcgtctgccttgtgctgtcgaggaacacccggtgggggaagcttctattctggcgaccttcagcgtaactgagggcaagaagaaggtccctgttgctggatgtcgcgtgcaaaaagggcagctggaaaaacagaaaaaattcaagttgacccgcaacgggcatgttatttggaaaggttccttgactagcctcaaacaccataaagatgatatcagtattgtaaaaacaggaatggactgcggactctctctggacgaagacaatatggagtttcaagtgggtgaccgaattgtgtgttatgaggaaaaacagatacaagctaaaacttcatgggatccagggttctag

SEQ ID NO: 21567 - DNA, 213 bp, Artificial Sequence
  derived and/or modified sequence
atgaaccagaagttactgaaactagagaatttgcttcgcttccacacaatttacaggcagctacactctctgtgtcaacgcagagccttacgccagtggcgccatgggttctcgtcagcatatcctgtttggacagctcaattatgcgcttggccatggcccaccgacgtgttgaccggcgcagccttgtctcagtacaggctgctggtatag

SEQ ID NO: 21568 - DNA, 33 bp, Artificial Sequence
  derived and/or modified sequence
atgaaccagaaattactgaagttagaaaattag

SEQ ID NO: 21569 - DNA, 81 bp, Artificial Sequence
  derived and/or modified sequence
atgaaccaaaagctgcttaagttggagaaccttctgagattccacacaatttatcgtcagctgcattcactctgccaatag

SEQ ID NO: 21570 - DNA, 216 bp, Artificial Sequence
  derived and/or modified sequence
atgaaccagaagttgctgaaattggagaacctgttgagatttcacacgatttatagacagctgcactccctgtgccagaggcgagcactgcggcagtggcgacacggcttttcaagtgcttaccctgtgtggactgcacagctatgtgcgtggccttggcccacggacgtgcttacgggcgcagctctgagtcagtacaggcttttagtcacgtag

SEQ ID NO: 21571 - DNA, 1398 bp, Artificial Sequence
  derived and/or modified sequence
atgaaccagaagctcctcaagttggagaacctcctacgctttcacacgatctaccgtcaactccactccctgtgtcagagaagggctcttagacagtggcgccatggcttctctagcgcgtatcccgtgtggacagcacaactgtgcgcctggccctggcccaccgatgtgttgacgggcgctgctctgtcacaatatagattactcgtaaccaagaaggaggagggaccttggaaaagccagttatcttctacgaagtctaagaaggtagtggaggtctggataggtatgactatcgaggagttggcccgagccatggaaaaaaacactgactatgtctacgaagctttgctgaatactgacatagacatcgacagtttggaagctgattcccacttagacgaagtgtggattaaagaggttattacaaaggctggaatgaaactgaaatggtccaaactgaagcaagacaaagtccgaaagaacaaagacgctgtgaggcgccctcaggcggatcccgctctgcttacacccaggtcacccgtggtaactattatgggccacgtcgaccacggcaagaccacattgttagacaagtttcgcaagacacaggtggccgctgtcgagaccggcggtattacacagcacattggtgcatttttggtgtctctccccagtggcgaaaagattaccttcctggacactccagggcatgcagcgttctcagcgatgagggcgcgtggcgctcaagtgacagatatagtcgtgcttgtcgttgccgctgatgatggagttatgaaacagactgtcgaaagtatacagcacgctaaagacgcacaggtgccaattattctggccgtcaacaagtgcgacaaggccgaagccgatccagaaaaggtaaagaaggagcttctggcttacgatgtggtgtgcgaggattacgggggtgatgtgcaagccgttcctgtttctgcgctcacaggggataacctcatggccctggcggaggccactgtggccttagccgagatgctggagctaaaggcagatcctaatggtcctgtagaaggaacagtgatcgagtctttcactgacaagggcagaggcttggtcaccactgcgataatacaacgaggaacactccgtaaaggatctgtacttgtcgccggaaaatgttgggccaaagtgagactgatgtttgacgagaatggaaaaacaatcgatgaggcataccccagcatgcctgttggaatcaccgggtggagagatttaccttcggccggtgaggagattctggaagtggaaagtgaaccgcgagcgcgagaggtcgtcgactggcggaaatatgagcaagagcaagagaagggtcaggaagacctcaagaaggaaaaaaactag

SEQ ID NO: 21572 - DNA, 2184 bp, Artificial Sequence
  derived and/or modified sequence
atgaaccagaagctgctgaagctggagaacctgctgagattccacaccatctacagacagctgcacagcctgtgccagagaagagccctgagacagtggagacacggcttcagcagcgcctaccccgtgtggaccgcccagctgtgcgcctggccctggcccaccgacgtgctgaccggcgccgccctgagccagtacagactgctggtgaccaagaaggaggagggcccctggaagagccagctgagcagcaccaagagcaagaaggtggtggaggtgtggatcggcatgaccatcgaggagctggccagagccatggagaagaacaccgactacgtgtacgaggccctgctgaacaccgacatcgacatcgacagcctggaggccgacagccacctggacgaggtgtggatcaaggaggtgatcaccaaggccggcatgaagctgaagtggagcaagctgaagcaggacaaggtgagaaagaacaaggacgccgtgagaagaccccaggccgaccccgccctgctgacccccagaagccccgtggtgaccatcatgggccacgtggaccacggcaagaccaccctgctggacaagttcagaaagacccaggtggccgccgtggagaccggcggcatcacccagcacatcggcgccttcctggtgagcctgcccagcggcgagaagatcaccttcctggacacccccggccacgccgccttcagcgccatgagagccagaggcgcccaggtgaccgacatcgtggtgctggtggtggccgccgacgacggcgtgatgaagcagaccgtggagagcatccagcacgccaaggacgcccaggtgcccatcatcctggccgtgaacaagtgcgacaaggccgaggccgaccccgagaaggtgaagaaggagctgctggcctacgacgtggtgtgcgaggactacggcggcgacgtgcaggccgtgcccgtgagcgccctgaccggcgacaacctgatggccctggccgaggccaccgtggccctggccgagatgctggagctgaaggccgaccccaacggccccgtggagggcaccgtgatcgagagcttcaccgacaagggcagaggcctggtgaccaccgccatcatccagagaggcaccctgagaaagggcagcgtgctggtggccggcaagtgctgggccaaggtgagactgatgttcgacgagaacggcaagaccatcgacgaggcctaccccagcatgcccgtgggcatcaccggctggagagacctgcccagcgccggcgaggagatcctggaggtggagagcgagcccagagccagagaggtggtggactggagaaagtacgagcaggagcaggagaagggccaggaggacctgaagatcatcgaggagaagagaaaggagcacaaggaggcccaccagaaggccagagagaagtacggccacctgctgtggaagaagagaagcatcctgagattcctggagagaaaggagcagatccccctgaagcccaaggagaagagagagagagacagcaacgtgctgagcgtgatcatcaagggcgacgtggacggcagcgtggaggccatcctgaacatcatcgacacctacgacgccagccacgagtgcgagctggagctggtgcacttcggcgtgggcgacgtgagcgccaacgacgtgaacctggccgagaccttcgacggcgtgatctacggcttcaacgtgaacgccggcaacgtgatccagcagagcgccgccaagaagggcgtgaagatcaagctgcacaagatcatctacagactggtggaggacctgcaggaggagctgagcagcagactgccctgcgccgtggaggagcaccccgtgggcgaggccagcatcctggccaccttcagcgtgaccgagggcaagaagaaggtgcccgtggccggctgcagagtgcagaagggccagctggagaagcagaagaagttcaagctgaccagaaacggccacgtgatctggaagggcagcctgaccagcctgaagcaccacaaggacgacatcagcatcgtgaagaccggcatggactgcggcctgagcctggacgaggacaacatggagttccaggtgggcgacagaatcgtgtgctacgaggagaagcagatccaggccaagaccagctgggaccccggcttctag

SEQ ID NO: 21573 - DNA, 219 bp, Artificial Sequence
  derived and/or modified sequence
atgaaccagaagctgctgaagctggagaacctgctgagattccacaccatctacagacagctgcacagcctgtgccagagaagagccctgagacagtggagacacggcttcagcagcgcctaccccgtgtggaccgcccagctgtgcgcctggccctggcccaccgacgtgctgaccggcgccgccctgagccagtacagactgctggtgaccaagtag

SEQ ID NO: 21574 - DNA, 213 bp, Artificial Sequence
  derived and/or modified sequence
atgaaccagaagctgctgaagctggagaacctgctgagattccacaccatctacagacagctgcacagcctgtgccagagaagagccctgagacagtggagacacggcttcagcagcgcctaccccgtgtggaccgcccagctgtgcgcctggccctggcccaccgacgtgctgaccggcgccgccctgagccagtacagactgctggtgtag

SEQ ID NO: 21575 - DNA, 33 bp, Artificial Sequence
  derived and/or modified sequence
atgaaccagaagctgctgaagctggagaactag

SEQ ID NO: 21576 - DNA, 81 bp, Artificial Sequence
  derived and/or modified sequence
atgaaccagaagctgctgaagctggagaacctgctgagattccacaccatctacagacagctgcacagcctgtgccagtag

SEQ ID NO: 21577 - DNA, 216 bp, Artificial Sequence
  derived and/or modified sequence
atgaaccagaagctgctgaagctggagaacctgctgagattccacaccatctacagacagctgcacagcctgtgccagagaagagccctgagacagtggagacacggcttcagcagcgcctaccccgtgtggaccgcccagctgtgcgcctggccctggcccaccgacgtgctgaccggcgccgccctgagccagtacagactgctggtgacctag

SEQ ID NO: 21578 - DNA, 1398 bp, Artificial Sequence
  derived and/or modified sequence
atgaaccagaagctgctgaagctggagaacctgctgagattccacaccatctacagacagctgcacagcctgtgccagagaagagccctgagacagtggagacacggcttcagcagcgcctaccccgtgtggaccgcccagctgtgcgcctggccctggcccaccgacgtgctgaccggcgccgccctgagccagtacagactgctggtgaccaagaaggaggagggcccctggaagagccagctgagcagcaccaagagcaagaaggtggtggaggtgtggatcggcatgaccatcgaggagctggccagagccatggagaagaacaccgactacgtgtacgaggccctgctgaacaccgacatcgacatcgacagcctggaggccgacagccacctggacgaggtgtggatcaaggaggtgatcaccaaggccggcatgaagctgaagtggagcaagctgaagcaggacaaggtgagaaagaacaaggacgccgtgagaagaccccaggccgaccccgccctgctgacccccagaagccccgtggtgaccatcatgggccacgtggaccacggcaagaccaccctgctggacaagttcagaaagacccaggtggccgccgtggagaccggcggcatcacccagcacatcggcgccttcctggtgagcctgcccagcggcgagaagatcaccttcctggacacccccggccacgccgccttcagcgccatgagagccagaggcgcccaggtgaccgacatcgtggtgctggtggtggccgccgacgacggcgtgatgaagcagaccgtggagagcatccagcacgccaaggacgcccaggtgcccatcatcctggccgtgaacaagtgcgacaaggccgaggccgaccccgagaaggtgaagaaggagctgctggcctacgacgtggtgtgcgaggactacggcggcgacgtgcaggccgtgcccgtgagcgccctgaccggcgacaacctgatggccctggccgaggccaccgtggccctggccgagatgctggagctgaaggccgaccccaacggccccgtggagggcaccgtgatcgagagcttcaccgacaagggcagaggcctggtgaccaccgccatcatccagagaggcaccctgagaaagggcagcgtgctggtggccggcaagtgctgggccaaggtgagactgatgttcgacgagaacggcaagaccatcgacgaggcctaccccagcatgcccgtgggcatcaccggctggagagacctgcccagcgccggcgaggagatcctggaggtggagagcgagcccagagccagagaggtggtggactggagaaagtacgagcaggagcaggagaagggccaggaggacctgaagaaggagaagaactag

SEQ ID NO: 21579 - protein, 579 aa, Artificial Sequence
  derived and/or modified sequence
MSAANPETPNSTISREASTQSSSAAASQGWVLPEGKIVPNTVFVGGIDARMDETEIGSCFGRYGSVKEVKIITNRTGVSKGYGFVSFVNDVDVQKIVGSQIHFHGKKLKLGPAIRKQKLCARHVQPRPLVVNPPPPPQFQNVWRNPNTETYLQPQITPNPVTQHVQSAANPETPNSTISREASTQSSSAAASQGWVLPEGKIVPNTVFVGGIDARMDETEIGSCFGRYGSVKEVKIITNRTGVSKGYGFVSFVNDVDVQKIVGSQIHFHGKKLKLGPAIRKQKLCARHVQPRPLVVNPPPPPQFQNVWRNPNTETYLQPQITPNPVTQHVQAYSAYPHSPGQVITGCQLLVYNYQEYPTYPDSAFQVTTGYQLPVYNYQPFPAYPRSPFQVTAGYQLPVYNYQAFPAYPNSPFQVATGYQFPVYNYQPFPAYPSSPFQVTAGYQLPVYNYQAFPAYPNSPFQVATGYQFPVYNYQAFPAYPNSPVQVTTGYQLPVYNYQAFPAYPSSPFQVTTGYQLPVYNYQAFPAYPNSAVQVTTGYQFHVYNYQMPPQCPVGEQRRNLWTEAYKWWYLVCLIQRRD

SEQ ID NO: 21580 - DNA, 1740 bp, Artificial Sequence
  derived and/or modified sequence
atgagcgccgccaaccccgagacccccaacagcaccatcagcagagaggccagcacccagagcagcagcgccgccgccagccagggctgggtgctgcccgagggcaagatcgtgcccaacaccgtgttcgtgggcggcatcgacgccagaatggacgagaccgagatcggcagctgcttcggcagatacggcagcgtgaaggaggtgaagatcatcaccaacagaaccggcgtgagcaagggctacggcttcgtgagcttcgtgaacgacgtggacgtgcagaagatcgtgggcagccagatccacttccacggcaagaagctgaagctgggccccgccatcagaaagcagaagctgtgcgccagacacgtgcagcccagacccctggtggtgaacccccccccccccccccagttccagaacgtgtggagaaaccccaacaccgagacctacctgcagccccagatcacccccaaccccgtgacccagcacgtgcagagcgccgccaaccccgagacccccaacagcaccatcagcagagaggccagcacccagagcagcagcgccgccgccagccagggctgggtgctgcccgagggcaagatcgtgcccaacaccgtgttcgtgggcggcatcgacgccagaatggacgagaccgagatcggcagctgcttcggcagatacggcagcgtgaaggaggtgaagatcatcaccaacagaaccggcgtgagcaagggctacggcttcgtgagcttcgtgaacgacgtggacgtgcagaagatcgtgggcagccagatccacttccacggcaagaagctgaagctgggccccgccatcagaaagcagaagctgtgcgccagacacgtgcagcccagacccctggtggtgaacccccccccccccccccagttccagaacgtgtggagaaaccccaacaccgagacctacctgcagccccagatcacccccaaccccgtgacccagcacgtgcaggcctacagcgcctacccccacagccccggccaggtgatcaccggctgccagctgctggtgtacaactaccaggagtaccccacctaccccgacagcgccttccaggtgaccaccggctaccagctgcccgtgtacaactaccagcccttccccgcctaccccagaagccccttccaggtgaccgccggctaccagctgcccgtgtacaactaccaggccttccccgcctaccccaacagccccttccaggtggccaccggctaccagttccccgtgtacaactaccagcccttccccgcctaccccagcagccccttccaggtgaccgccggctaccagctgcccgtgtacaactaccaggccttccccgcctaccccaacagccccttccaggtggccaccggctaccagttccccgtgtacaactaccaggccttccccgcctaccccaacagccccgtgcaggtgaccaccggctaccagctgcccgtgtacaactaccaggccttccccgcctaccccagcagccccttccaggtgaccaccggctaccagctgcccgtgtacaactaccaggccttccccgcctaccccaacagcgccgtgcaggtgaccaccggctaccagttccacgtgtacaactaccagatgcccccccagtgccccgtgggcgagcagagaagaaacctgtggaccgaggcctacaagtggtggtacctggtgtgcctgatccagagaagagactag

SEQ ID NO: 21581 - DNA, 1740 bp, Artificial Sequence
  derived and/or modified sequence
atgtccgcggccaacccagagactccgaactcgaccatctctcgcgaagccagcactcagtccagtagcgccgcggcgagtcagggttgggtccttccggagggcaagatcgtccctaatactgtgttcgtcggaggcattgacgcacgaatggatgaaactgaaatcgggagctgctttggcagatacggatccgtgaaggaggtgaagatcataaccaacagaaccggcgtttctaaaggctatggattcgtgtctttcgtcaacgacgtggatgtgcagaagatcgtcgggagtcagatccactttcacgggaaaaaactcaaactgggccccgccataaggaaacagaagctttgtgcaagacacgtccagccccgaccactggtagtgaacccccccccccccccgcagttccagaacgtttggcgcaatcctaacacagagacttacctgcagccccagatcacgcctaaccccgtaacccagcatgtgcagagtgctgcgaatcccgaaacaccaaactccaccatcagccgtgaagcttcgacacaaagcagcagcgctgctgcctcccaaggttgggtcctgccggaaggcaagatcgtgcccaatacggtcttcgttggtggtatcgatgctagaatggacgaaacggagatcggatcctgcttcgggcgatatggttctgtcaaggaagtgaagatcatcactaatagaactggagtaagcaagggttatggattcgtgtcttttgtgaacgacgttgacgtccagaagattgttggttcccaaatacacttccacggcaagaaactcaaactcggacctgccatcaggaaacagaagctctgtgccaggcatgtgcagccgaggccattagtggttaaccccccgcccccacctcagttccaaaacgtgtggcgaaatccaaacaccgaaacctacttacagcctcagattactcccaacccggtgacacagcacgtccaggcttactctgcttaccctcattctcctggccaggtgataaccggttgccagctccttgtttataattaccaagaataccccacctatccggattccgctttccaggtcactactggataccagttgcccgtctataattaccaaccctttcccgcctatccccgtagtccatttcaagtcaccgccgggtatcagctaccggtgtacaactaccaagcatttccagcctatccaaactccccattccaagtggccacaggataccagttccccgtctataactatcagccattccctgcttaccccagttcaccgttccaagtaacggcgggctaccagttaccagtatacaactatcaggcgtttcccgcttatccgaactctccatttcaggtcgctacgggataccaatttcccgtttataactatcaggcattccctgcatatcctaatagccccgtacaggtgaccaccggatatcaattgccagtatacaactatcaggcattcccggcatacccaagcagcccgttccaggtcacaaccggctatcagctgcccgtttacaactaccaggccttccccgcttaccctaactctgcagtgcaggtgaccacaggctaccagtttcatgtgtacaactaccaaatgccccctcagtgtcccgtgggggaacagcgccgaaacctatggaccgaggcctataagtggtggtacctggtttgtcttatccagagacgggactag

SEQ ID NO: 21582 - DNA, 1740 bp, Artificial Sequence
  derived and/or modified sequence
atgagcgccgccaaccccgagacacctaatagcacaattagtcgggaagcttccactcaatccagttcagctgccgcgagtcaggggtgggttctgcctgagggcaaaatcgtacccaacactgttttcgtgggagggatcgacgcccgcatggatgaaaccgaaatcggatcctgctttggacgctacggttcagtaaaagaggtgaagatcattactaaccgaaccggcgtgtctaaaggttatggattcgtgagcttcgtcaatgacgttgatgtacagaagatcgtcggatcacagatccacttccatggcaaaaaactgaagcttgggccggctatacgtaagcagaaactgtgcgcgagacacgtccagccacgcccgctcgtggttaatccaccgccccctccccagtttcaaaatgtttggcgcaacccaaacactgaaacctatctccagcctcagattacccctaaccctgtaactcagcacgttcagtcagcggcgaaccccgagacccctaattctactatctctagagaagccagcactcagagctcgtcggcggccgcaagccaggggtgggttctacccgaaggcaagattgtgcctaatacagtttttgtcggtggtatcgacgctcggatggatgagaccgagatcggcagttgcttcggaaggtacggcagtgtcaaggaggttaaaattattacgaaccgcacaggagtgagcaaggggtacggttttgtcagtttcgtgaatgacgtagacgtgcaaaaaatcgtgggatcccagattcactttcacggtaagaagctcaagttgggccccgcgatccgcaaacagaaactgtgcgccagacatgtccagcccagacctcttgttgtcaatccaccaccaccaccacaattccaaaatgtctggcgcaatccaaacaccgagacctacttacagccgcagatcacaccaaaccctgtgacccagcacgtgcaagcctacagcgcttatccccactcccccgggcaggtgattacagggtgccagctccttgtctacaattatcaggaataccccacctatccagactctgcgtttcaggttacgaccggataccaactccctgtgtataactaccagcccttccccgcatatccaagaagcccattccaagtcaccgccgggtatcaacttccagtttacaactatcaagcctttccagcctaccctaatagccctttccaggtggccacaggataccagttccctgtttacaattatcaacccttccccgcctaccctagttctcccttccaggttactgccggttatcagctccctgtgtataactatcaggcttttcccgcctaccctaatagtccatttcaggttgccactggctaccagttccctgtttacaattaccaggcctttcccgcctaccccaatagccctgtgcaggtaacaactggctatcagttaccggtttataactatcaggcgttcccagcctacccaagcagcccgtttcaggtgacaacaggatatcaacttccagtgtacaactatcaggcattcccagcttaccctaattccgcagtgcaagtaacaactggttaccagttccatgtgtacaattaccagatgccaccccagtgtccagtcggagagcaaaggaggaatctgtggaccgaagcttataagtggtggtacctggtatgccttattcagaggagggattag

SEQ ID NO: 21583 - DNA, 1740 bp, Artificial Sequence
  derived and/or modified sequence
atgtctgctgccaaccctgagacccccaacagcaccatcagccgggaggccagcacccagagcagcagcgctgctgccagccagggctgggtgctgcctgagggcaagatcgtgcccaacacagtgtttgtgggcggcattgatgccaggatggatgaaacagagatcggcagctgcttcggccgctatggctctgtgaaggaggtgaagatcatcaccaacagaactggagtgtccaagggctacggctttgtgtcctttgtgaatgatgtggatgtgcagaagatcgtgggcagccagatccacttccacggcaagaagctgaagctgggccctgccatcaggaagcagaagctgtgtgcccggcacgtgcagccccggcccctggtggtgaaccccccacctccaccccagttccagaatgtgtggaggaaccccaacacagagacctacctgcagccccagatcacccccaaccctgtgacccagcacgtgcagagcgctgccaaccctgagacccccaacagcaccatcagccgggaggccagcacccagagcagcagcgctgctgccagccagggctgggtgctgcctgagggcaagatcgtgcccaacacagtgtttgtgggcggcattgatgccaggatggatgaaacagaaattggcagctgcttcggccgctatggctctgtgaaggaggtgaagatcatcaccaacagaactggagtgtccaagggctacggctttgtgtcctttgtgaatgatgtggatgtgcagaagatcgtgggcagccagatccacttccacggcaagaagctgaagctgggccctgccatcaggaagcagaagctgtgtgcccggcacgtgcagccccggcccctggtggtgaaccccccacctccaccccagttccagaatgtgtggaggaaccccaacacagagacctacctgcagccccagatcacccccaaccctgtgacccagcacgtgcaggcctacagcgcctacccccacagccctggccaggtgatcaccggctgccagctgctggtgtacaactaccaggagtaccccacctacccagattctgccttccaggtgaccaccggctaccagctgcctgtgtacaactaccagcccttccctgcctaccccaggagccccttccaggtgacagctggctaccagctgcctgtgtacaactaccaggccttccctgcctaccccaacagccccttccaggtggccaccggctaccagtttcctgtgtacaactaccagcccttccctgcctaccccagcagccccttccaggtgacagctggctaccagctgcctgtgtacaactaccaggccttccctgcctaccccaacagccccttccaggtggccaccggctaccagtttcctgtgtacaactaccaggccttccctgcctaccccaacagccctgtgcaggtgaccaccggctaccagctgcctgtgtacaactaccaggccttccctgcctaccccagcagccccttccaggtgaccaccggctaccagctgcctgtgtacaactaccaggccttccctgcctaccccaacagcgctgtgcaggtgaccaccggctaccagttccacgtgtacaactaccagatgccaccccagtgccctgtgggggagcagaggaggaacctgtggacagaggcctacaagtggtggtacctggtgtgcctgatccagaggcgggactag

SEQ ID NO: 21584 - DNA, 1740 bp, Artificial Sequence
  derived and/or modified sequence
atgagcgccgccaaccccgagacccccaacagcaccatcagccgggaagcttcaacgcaatccagctcagctgcagctagtcaagggtgggtcctgccagaaggcaaaattgtgccaaacactgtatttgtgggaggaattgatgctcgcatggatgaaacagagatcggttcgtgtttcggacgctatggcagtgtaaaagaggtgaagatcatcacaaatagaaccggcgtaagcaaaggttacgggtttgtgtctttcgtgaatgacgttgatgttcaaaagatagtcggcagccagattcattttcacggcaagaagttgaaactcggcccggctattcgcaagcagaagctgtgtgcgcgccacgtgcagccccgtcctctggttgtgaatcccccccctcccccccaatttcagaacgtctggaggaaccctaacacagagacataccttcaaccacagatcacccccaatcccgtgacacaacatgtacaaagtgccgccaatcccgaaacaccgaactctaccattagtagagaagcgtcgactcagagttcatccgccgcggcatcccaaggttgggtcttgcccgagggtaaaatcgttcccaatacagtgtttgtagggggaatcgacgcaagaatggatgaaacagagatcggatcttgtttcggccgttacgggtctgtcaaagaagtaaagatcattacgaataggacaggggtaagcaaggggtacggatttgtgtcttttgtgaatgatgttgatgtgcagaaaatcgttggctcgcagattcatttccacggcaaaaagctaaagttgggccccgcaatccgaaagcagaagttgtgtgcccggcatgtgcaacctagacccctcgtagtaaatcctcccccacctccacagtttcagaatgtgtggaggaatcccaacacagagacttacctgcaaccgcagattacgccgaatcccgtgacacaacacgtgcaggcatattctgcatacccccactctccaggccaggtcattaccgggtgccagcttcttgtgtacaattaccaggaatacccaacttacccagattcagcattccaggttacgaccggatatcagctgcccgtgtataattaccagcctttccccgcttaccctaggtccccctttcaagtgaccgccggatatcaattacccgtatacaattaccaggctttccccgcatatcctaactctccattccaggttgccaccgggtatcaattcccagtgtataactaccagcctttccccgcctacccttctagtccatttcaggtgacagctggctaccagcttccagtctataattatcaagctttccccgcgtatcccaactctcctttccaagttgccactggctaccagtttccagtgtataactatcaggcattccccgcttacccaaactctcctgtgcaggtaactacaggataccagctgccggtgtataactaccaggcctttcctgcttatccctccagcccctttcaggttaccacagggtatcaattgcccgtgtacaattaccaggccttcccagcttaccccaacagtgccgtgcaggtgacaacaggatatcagttccacgtgtacaactatcagatgccacctcagtgtcccgtgggggagcaacggagaaatctgtggactgaagcctataaatggtggtacctcgtgtgtcttatacagcgccgcgactag

SEQ ID NO: 21585 - DNA, 1740 bp, Artificial Sequence
  derived and/or modified sequence
atgagcgccgccaaccccgagacccccaacagcaccatcagccgggaggcctctactcagtcaagcagtgcagctgccagccaagggtgggtgctgcctgaggggaagatcgtccccaataccgtattcgtcggcggtattgacgcccggatggatgaaacagaaatcggttcttgttttggtcgttacggcagtgtcaaagaggtcaaaattatcaccaaccgcacgggggtgagcaaagggtatggattcgtaagctttgtgaatgacgtcgatgtacagaaaatagtgggctcacagattcactttcacggcaaaaaactgaaactaggcccagcaatcaggaagcaaaagctgtgtgccagacacgttcaacccagaccactggttgtgaatccccctcccccccctcagtttcaaaacgtgtggcgcaatccgaatacagagacctatctgcaaccacagatcacaccaaaccctgtgactcaacatgtccaatcggctgccaatccggagactcccaatagtaccatctctcgcgaggctagcacgcagtcgagttccgcggccgcctctcaggggtgggtcttgcccgaaggaaagatcgtccccaatactgtgtttgtcggtgggatcgatgcccggatggatgagactgagattggctcttgtttcggccgatacgggtcggtgaaagaggtgaaaattatcacgaatagaactggggtgagtaaaggatatggatttgtgtccttcgtaaacgacgtggacgttcaaaagatcgtagggagccagatccacttccacgggaaaaaacttaaactgggacccgccatcaggaagcagaagctctgtgcacgtcatgtacagcccagaccgttggtagtcaatccaccgccaccccctcagtttcaaaacgtgtggcgaaacccaaatactgagacctatctgcagccccaaattacacctaacccggtcactcaacatgtccaagcatatagtgcttacccccattcaccaggtcaggtgattaccggctgtcagttattggtctataactatcaggagtaccctacctatccagactccgctttccaggtgacaaccggataccaactgcctgtttacaattaccagccctttccagcttaccccagaagtccattccaggttacagccgggtatcagctgcctgtgtacaattatcaagccttccctgcttacccaaactctccttttcaagttgcaacaggctaccagttcccggtgtataactatcagccttttccagcctatccatctagcccgttccaggtgaccgctgggtaccaattgccggtgtataattaccaggcgttcccagcctatccaaactccccatttcaagtggcaacagggtatcaattcccagtgtacaattatcaagcttttcccgcctatcctaacagtcccgttcaagtgacgacaggatatcagctccccgtgtacaattatcaggccttccccgcctatccgtcatcacctttccaagtaacaactggctaccaactgcctgtgtacaattatcaggcttttccggcctatccaaattctgcagttcaagtgaccaccggataccagttccatgtttacaattaccaaatgcctccccagtgtcccgtgggggaacagcgccgcaatctctggacagaggcctataagtggtggtacctggtttgtctcatccagaggcgcgattag

SEQ ID NO: 21586 - DNA, 3821 bp, Artificial Sequence
  derived and/or modified sequence
ctcagcctggcggttctacctccgagggttcgcccgcccttggttttccttacaccttagcctttggctcctttgaccactcgaagccccacagcgtgttccagcggacttcaccagcagacccagaagtggtgggtgaaacactgcctctgttcctccttgagcctgtcgggagctgctgcctgccaccaccatgtctgctgcaaatcctgagactccaaactcaaccatctccagagaggccagcacccagtcttcatcagctgcagctagccaaggctgggtgttaccagaaggcaaaatcgtgccaaacactgtttttgttggtggaattgatgctaggatggatgaaactgagattggaagctgctttggtagatacggttcagtgaaagaagtgaagataatcacgaatcgaactggtgtgtccaaaggctatggatttgtttcgtttgttaatgacgtggatgtccagaagatagtaggatcacagatacatttccatggtaaaaagctgaagctgggccctgcaatcaggaaacaaaagttatgtgctcgtcatgtgcagccacgtcctttggtagttaatcctcctcctccaccacagtttcagaacgtctggcggaatccaaacactgaaacctacctgcagccccaaatcacgccgaatcctgtaactcagcacgttcagtctgctgcaaatcctgagactccaaactcaaccatctccagagaggccagcacccagtcttcatcagctgcagctagccaaggctgggtgttaccagaaggcaaaatcgtgccaaacactgtttttgttggtggaattgatgctaggatggatgaaactgagattggaagctgctttggtagatacggttcagtgaaagaagtgaagataatcacgaatcgaactggtgtgtccaaaggctatggatttgtttcgtttgttaatgacgtggatgtccagaagatagtaggatcacagatacatttccatggtaaaaagctgaagctgggccctgcaatcaggaaacaaaagttatgtgctcgtcatgtgcagccacgtcctttggtagttaatcctcctcctccaccacagtttcagaacgtctggcggaatccaaacactgaaacctacctgcagccccaaatcacgccgaatcctgtaactcagcacgttcaggcttactctgcttatccacattcaccaggtcaggtcatcactggatgtcagttgcttgtatataattatcaggaatatcctacttatcccgattcagcatttcaggtcaccactggatatcagttgcctgtatataattatcagccatttcctgcttatccaagatcaccatttcaggtcactgctggatatcagttgcctgtatataattatcaggcatttcctgcttatccaaattcaccatttcaagtcgccactggatatcagttccctgtatacaattatcagccatttcctgcttatccaagttcaccatttcaggtcactgctggatatcagttgcctgtatataattatcaggcatttcctgcttatccaaattcaccatttcaagtcgccactggatatcagttccctgtatacaattatcaggcatttcctgcttatccaaattcaccagttcaggtcaccactggatatcagttgcctgtatacaattatcaggcatttcctgcttatccaagttcaccatttcaggtcaccactggatatcagttgcctgtatataattatcaggcatttcctgcttatccaaattcagcagttcaggtcaccactggatatcagttccatgtatacaattaccagatgccaccgcagtgccctgttggggagcaaaggagaaatctgtggaccgaagcatacaaatggtggtatcttgtctgtttaatccagagaagagactgataaattccgttgttactcaagatgactgcttcaagggtaaaagagtgcatcgctttagaagaagtttggcagtatttaaatctgttggatcctctcagctatctagtttcatgggaagttgctggttttgaatattaagctaaaagttttccactattacagaaattctgaattttggtaaatcacactgaaactttctgtataacttgtattattagactctctagttttatcttaacactgaaactgttcttcattagatgtttatttagaacctggttctgtgtttaatatatagtttaaagtaacaaataatcgagactgaaagaatgttaagatttatctgcaaggatttttaaaaaattgaaacttgcattttaagtgtttaaaagcaaatactgactttcaaaaaagtttttaaaacctgatttgaaagctaacaattttgatagtctgaacacaagcatttcacttctccaagaagtacctgtgaacagtacaatatttcagtattgagctttgcatttatgatttatctagaaatttacctcaaaagcagaatttttaaaactgcatttttaatcagtggaactcaatgtatagttagctttattgaagtcttatccaaacccagtaaaacagattctaagcaaacagtccaatcagtgagtcataatgtttattcaaagtattttatcttttatctagaatccacatatgtatgtccaatttgattgggatagtagttaggataactaaaattctgggcctaattttttaaagaatccaagacaaactaaactttactgggtatataaccttctcaatgagttaccattcttttttataaaaaaaattgttccttgaaatgctaaacttaatggctgtatgtgaaatttgcaaaatactggtattaaagaacgctgcagcttttttatgtcactcaaaggttaatcggagtatctgaaaggaattgtttttataaaaacattgaagtattagttacttgctataaatagatttttatttttgttttttagcctgttatatttccttctgtaaaataaaatatgtccagaagaggcatgttgtttctagattaggtagtgtcctcattttatattgtgaccacacagctagagcaccagagcccttttgctatactcacagtcttgttttcccagcctcttttactagtctttcaggaggtttgctcttagaactggtgatgtaaagaatggaagtagctgtatgagcagttcaaaggccaagccgtggaatggtagcaatgggatataatacctttctaagggaaacatttgtatcagtatcatttgatctgccatggacatgtgtttaaagtggctttctggcccttctttcaatggcttcttccctaaaacgtggagactctaagttaatgtcgttactatgggccatattactaatgcccactggggtctatgatttctcaaaattttcattcggaatccgaaggatacagtctttaaactttagaattcccaagaaggctttattacacctcagaaattgaaagcaccatgactttgtccattaaaaaattatccatagtttttttagtgcttttaacattccgacatacatcattctgtgattaaatctccagatttctgtaaatgatacctacattctaaagagttaattctaattattccgatatgaccttaaggaaaagtaaaggaataaatttttgtctttgttgaagtatttaatagagtaaggtaaagaagatattaagtccctttcaaaatggaaaattaattctaaactgagaaaaatgttcctactacctattgctgatactgtctttgcataaatgaataaaaataaactttttttcttcaaa

SEQ ID NO: 21587 - DNA, 1740 bp, Artificial Sequence
  derived and/or modified sequence
atgagcgcggcaaatcccgagacacctaacagcaccatttcacgcgaagctagtacccagagttcgtctgccgcagcctcacaggggtgggtcttgccggagggaaagatcgtcccgaacacagtcttcgtcggaggcatcgacgccagaatggacgaaaccgagatcggttcttgctttggaagatatggcagtgtcaaggaggtgaaaataatcactaacaggaccggtgtatcaaaaggctatggctttgtgagctttgtgaacgatgtggatgttcagaagatcgtcggttctcagattcacttccacggcaaaaagctgaagctcggcccagcaatccggaagcagaagctgtgcgcacgccacgtacaaccacgacccttggtagttaacccaccaccacctccccagtttcagaatgtttggagaaaccccaacaccgaaacatacttacagccacagataacaccaaatcctgtgactcagcatgtgcagtccgccgctaaccctgaaactcccaatagcaccatctcccgagaagcatctacgcagtccagcagcgcggcagcaagccagggctgggttcttcccgaagggaagattgtgccaaacactgtgttcgtgggagggattgacgccagaatggacgaaactgaaatcggatcctgcttcggtcggtatgggagcgtgaaggaagtgaaaataattaccaaccggactggagtcagtaagggatatggcttcgtgagttttgtgaacgatgtggacgtgcagaaaatagtggggtcccagatacacttccacggcaagaaacttaagctcggacccgctatcaggaaacaaaagctttgcgcccgtcacgtgcagcctcggcctcttgtggtcaacccaccccctcccccacaattccaaaacgtgtggcgcaaccccaacactgagacatatttgcagcctcagattacacctaacccagttacccaacacgtgcaggcatattccgcttatccgcatagccccggacaagtaatcaccggttgtcagctactggtctacaactatcaggagtatcctacctatcccgacagcgccttccaggtgaccactggttaccaactgcctgtgtataattatcagccatttccggcatatccccgatccccctttcaggtgacggcaggttaccaactgcctgtatacaactatcaggcattccctgcttatcccaattctccatttcaggtagccacgggataccaatttcccgtgtataactatcagcccttcccagcctaccctagctcaccgttccaggtaaccgcaggttaccagctgccagtgtataactaccaggcattccccgcatatccgaattcaccatttcaggtagctaccggctaccagtttcctgtgtacaattaccaggcctttcctgcttatccgaatagcccagttcaggttacaacgggttaccagcttcccgtctacaactaccaagccttcccagcttacccaagctcgcccttccaggtaacaacaggttatcagctccccgtgtacaactaccaggcatttcctgcatatcctaactcggcggtccaggttacgaccggttatcagtttcatgtttacaattaccagatgccgcctcagtgtcccgtgggcgagcagagacggaacttgtggaccgaagcgtacaaatggtggtacctggtgtgcctgatccaacggagggactag

SEQ ID NO: 21588 - DNA, 1740 bp, Artificial Sequence
  derived and/or modified sequence
atgtcagctgctaatcctgagacgcccaacagcacaatttctcgggaagcttccacacaaagttccagcgccgctgcttctcagggctgggtcctgcctgagggaaagatcgtgccaaacacagttttcgtcggtgggatcgacgcaaggatggacgaaactgagatcggatcctgtttcgggaggtatggctccgtcaaggaggtgaagatcatcactaaccgaaccggagtcagcaaagggtatggctttgtgtccttcgtcaacgacgtggacgttcagaaaatagtggggtctcaaattcatttccacgggaaaaaactgaagctcggccctgcaattcgcaagcagaagctgtgcgctagacatgttcaaccgaggcctctcgtagtgaatcccccacctccccctcagttccagaacgtttggagaaatccaaacacagagacttatctgcagcctcagattacacctaaccctgtaacacagcatgtccaatctgccgctaatcccgaaacccccaattctaccatctctcgcgaggcaagcacccaatcttcaagcgctgcagccagccagggctgggtgctccctgaaggtaagatcgtgccgaacaccgttttcgtagggggaattgatgccaggatggatgagaccgaaatcggaagctgtttcgggagatatggtagcgtgaaggaggttaaaatcattactaatcgtaccggcgtcagcaagggttacggttttgtatccttcgtcaatgatgttgatgtgcagaagattgtcggatctcagattcacttccacggaaaaaagctcaagctggggcctgctattcgcaagcaaaaactttgtgcccgtcacgtccagccacgcccactcgtagtgaacccccctccccctccacaattccagaatgtttggagaaaccccaacacagaaacctacctgcagccacagattacacccaaccctgtgacacagcacgtgcaggcctacagcgcgtaccctcactctcccggacaggtgataaccgggtgtcagttactggtatataactaccaagaatatccgacctatccagacagtgcctttcaggttactacgggataccaactgccagtgtataactaccagccattcccggcttacccgaggtcccccttccaggtgactgctggctatcagctccctgtgtataactatcaggctttccctgcatacccaaacagtcccttccaggtcgctactggataccagtttccggtttacaattaccaaccgttccctgcgtacccatcgtcgcctttccaggtgaccgcgggttaccaactgcctgtgtacaattatcaagccttccctgcctatccaaattcccctttccaggtggcgactggttaccagtttccagtgtacaactaccaggctttcccagcgtacccaaattcacccgtccaggtgactaccggctaccaactgcctgtttataactaccaggcttttcctgcctatccgtcgtcacctttccaggtgactacaggttaccagctccccgtgtataactaccaggccttccccgcttacccaaactctgctgtgcaggtaactacaggttatcaattccatgtgtacaattaccagatgccccctcagtgtccagttggagagcaaagaagaaatctctggactgaggcatataaatggtggtatctggtctgcttgatccagaggcgcgattag

SEQ ID NO: 21589 - protein, 281 aa, Artificial Sequence
  derived and/or modified sequence
MGHPPLLPLLLLLHTCVPASWGLRCMQCKTNGDCRVEECALGQDLCRTTIVRLWEEGEELELVEKSCTHSEKTNRTLSYRTGLKITSLTEVVCGLDLCNQGNSGRAVTYSRSRYLECISCGSSDMSCERGRHQSLQCRSPEEQCLDVVTHWIQEGEEGRPKDDRHLRGCGYLPGCPGSNGFHNNDTFHFLKCCNTTKCNEGPILELENLPQNGRQCYSCKGNSTHGCSSEETFLIDCRGPMNQCLVATGTHERSLWGSWLPCKSTTALRPPCCEEAQATHV

SEQ ID NO: 21590 - DNA, 846 bp, Artificial Sequence
  derived and/or modified sequence
atgggccacccccccctgctgcccctgctgctgctgctgcacacctgcgtgcccgccagctggggcctgagatgcatgcagtgcaagaccaacggcgactgcagagtggaggagtgcgccctgggccaggacctgtgcagaaccaccatcgtgagactgtgggaggagggcgaggagctggagctggtggagaagagctgcacccacagcgagaagaccaacagaaccctgagctacagaaccggcctgaagatcaccagcctgaccgaggtggtgtgcggcctggacctgtgcaaccagggcaacagcggcagagccgtgacctacagcagaagcagatacctggagtgcatcagctgcggcagcagcgacatgagctgcgagagaggcagacaccagagcctgcagtgcagaagccccgaggagcagtgcctggacgtggtgacccactggatccaggagggcgaggagggcagacccaaggacgacagacacctgagaggctgcggctacctgcccggctgccccggcagcaacggcttccacaacaacgacaccttccacttcctgaagtgctgcaacaccaccaagtgcaacgagggccccatcctggagctggagaacctgccccagaacggcagacagtgctacagctgcaagggcaacagcacccacggctgcagcagcgaggagaccttcctgatcgactgcagaggccccatgaaccagtgcctggtggccaccggcacccacgagagaagcctgtggggcagctggctgccctgcaagagcaccaccgccctgagacccccctgctgcgaggaggcccaggccacccacgtgtag

SEQ ID NO: 21591 - DNA, 846 bp, Artificial Sequence
  derived and/or modified sequence
atggggcatcctccactgttgcccttactgctgctcctccacacttgtgttccggccagctgggggctgagatgtatgcaatgtaagacgaacggcgactgtagagtggaggaatgcgccttgggccaggatctctgtcgtactacaatcgttagactatgggaagagggagaagagctcgagctggtagaaaagtcatgcacccactccgagaaaactaacaggaccctgtcatacaggactggtctcaagattacctcgctaacagaagtggtttgtgggctcgacctctgtaatcagggtaacagtggacgtgctgtcacctattccagatccagatacctggagtgcatctcttgtggaagctccgacatgtcatgcgagagaggccggcaccaaagtctgcagtgccgctcccctgaagaacagtgtctggacgttgtgacgcactggattcaagaaggtgaagagggtcggcccaaagacgaccggcacctgcgcggatgcggataccttccaggttgtcctggcagtaacggattccataataatgacacttttcattttctgaagtgctgtaacacaacaaagtgtaacgaaggccctatcttagagttggaaaatctgccccaaaatggcagacagtgttacagctgtaagggcaacagcacacatggttgctccagcgaggagacctttttaattgattgcaggggccccatgaatcagtgcctggtggcgaccggtacccacgaacggtctctgtggggtagctggctcccatgcaagagcactacagccctgcgacctccttgctgcgaggaggcgcaggctacccacgtatag

SEQ ID NO: 21592 - DNA, 846 bp, Artificial Sequence
  derived and/or modified sequence
atgggccacccccccctgctgcccctgctgctgctgctgcacacctgtgtgcctgcctcctggggcctgcgctgcatgcagtgcaagaccaatggagactgccgggtggaggagtgtgccctgggccaggacctgtgcaggaccaccatcgtgcggctgtgggaggagggggaggagctggagctggtggagaagagctgcacccacagcgagaagaccaacagaaccctgagctacagaacaggcctgaagatcaccagcctgacagaggtggtgtgtggcctggacctgtgcaaccagggcaacagcggccgggctgtgacctacagccgcagccgctacctggagtgcatcagctgtggcagcagtgacatgagctgtgagcggggccgccaccagagcctgcagtgccgcagccctgaggagcagtgcctggatgtggtgacccactggatccaggagggggaggagggccggcccaaggatgacagacacctgcggggctgcggctacctgcccggctgccccggcagcaatggcttccacaacaatgacaccttccacttcctgaagtgctgcaacaccaccaagtgcaatgaaggccccatcctggagctggagaacctgccccagaatggccggcagtgctacagctgcaagggcaacagcacccacggctgcagcagcgaggagaccttcctgattgactgccggggccccatgaaccagtgcctggtggccaccggcacccatgagaggagcctgtggggctcctggctgccctgcaagagcaccacagccctgcggcccccctgctgtgaggaggcccaggccacccacgtgtag

SEQ ID NO: 21593 - DNA, 846 bp, Artificial Sequence
  derived and/or modified sequence
atgggccacccccccctgctgcccctgctgctgctgctgcacacctgcgtaccggcaagttggggtttgcgctgtatgcagtgtaaaactaatggagactgtagagtcgaagagtgcgcacttgggcaagacctgtgtaggactactattgtgcggctgtgggaggagggggaagaacttgaactggtcgaaaagtcatgcacacattcggagaagactaataggacactgagctaccgaaccgggctgaaaatcacttcactgacagaagtggtgtgcggccttgatttgtgcaatcagggtaattcaggtcgggccgttacatacagcagatcaaggtacctcgagtgtatctcttgtggtagcagtgatatgagctgtgaacgtggcagacatcagagcctgcaatgtcggagccccgaggagcagtgcctcgatgtggtgacccactggattcaggagggcgaggaaggccggcccaaagacgaccgacacttgcgagggtgcggctatttacctgggtgtccaggatcaaatggatttcacaacaacgacacctttcattttctgaagtgctgtaacacgaccaaatgtaatgagggtccgatccttgagctggaaaacctgccccagaacggcaggcagtgttacagctgtaagggtaactcgacccacggctgttcctctgaggagactttcctgattgattgccggggccccatgaatcagtgcttagtggccaccgggacccacgagcgctcactttggggttcctggctcccctgcaagagtaccacagctctgcgccccccctgttgtgaggaggcacaggccacacacgtctag

SEQ ID NO: 21594 - DNA, 846 bp, Artificial Sequence
  derived and/or modified sequence
atgggccatccaccactattacccctgctgctgctccttcatacatgtgtacctgcttcctggggacttcggtgcatgcagtgtaaaacaaatggggactgcagagtggaggagtgcgccctgggtcaggatctgtgtaggactacaattgtcaggctgtgggaagagggcgaggaactggagctcgttgaaaaaagctgcacacacagcgaaaagactaatcgaactctgtcctatcggaccggtcttaagattacaagccttactgaagtggtctgcggtctcgatctgtgcaatcagggcaattccggccgtgccgtcacgtatagcagatccaggtacctcgagtgcattagctgcggtagctctgacatgagctgtgagagagggcgacaccagagcctgcagtgcaggtctccagaagaacagtgcttggacgtggtgacacactggattcaggaaggcgaagaggggcgacctaaagatgatcgtcatttgagaggttgcggctaccttccaggctgtcctggatcaaacggctttcacaataatgacaccttccattttctcaaatgttgtaacaccacaaaatgtaacgaggggcctattctagaactggagaacttaccacagaatggtcgacagtgttactcatgcaaaggtaactccacacacggatgttcctctgaagaaacttttttgatcgactgcaggggaccaatgaaccagtgtctcgtggccaccggaacccacgagaggtctctgtggggctcttggctgccctgtaagtctactacagcactgcgcccaccatgctgcgaggaggcccaggcgacccacgtctag

SEQ ID NO: 21595 - DNA, 1414 bp, Artificial Sequence
  derived and/or modified sequence
cagggccgagccagccccttcaccaccagccggccgcgccccgggaagggaagtttgtggcggaggaggttcgtacgggaggagggggaggcgcccacgcatctggggctgactcgctctttcgcaaaacgtctgggaggagtccctggggccacaaaactgcctccttcctgaggccagaaggagagaagacgtgcagggaccccgcgcacaggagctgccctcgcgacatgggtcacccgccgctgctgccgctgctgctgctgctccacacctgcgtcccagcctcttggggcctgcggtgcatgcagtgtaagaccaacggggattgccgtgtggaagagtgcgccctgggacaggacctctgcaggaccacgatcgtgcgcttgtgggaagaaggagaagagctggagctggtggagaaaagctgtacccactcagagaagaccaacaggaccctgagctatcggactggcttgaagatcaccagccttaccgaggttgtgtgtgggttagacttgtgcaaccagggcaactctggccgggctgtcacctattcccgaagccgttacctcgaatgcatttcctgtggctcatcagacatgagctgtgagaggggccggcaccagagcctgcagtgccgcagccctgaagaacagtgcctggatgtggtgacccactggatccaggaaggtgaagaagggcgtccaaaggatgaccgccacctccgtggctgtggctaccttcccggctgcccgggctccaatggtttccacaacaacgacaccttccacttcctgaaatgctgcaacaccaccaaatgcaacgagggcccaatcctggagcttgaaaatctgccgcagaatggccgccagtgttacagctgcaaggggaacagcacccatggatgctcctctgaagagactttcctcattgactgccgaggccccatgaatcaatgtctggtagccaccggcactcacgaacgctcactctggggaagctggttgccatgtaaaagtactactgccctgagaccaccatgctgtgaggaagcccaagctactcatgtataaatgccatgtggagatagagccccagatgtttcagccatctcagcccaggcaccagacaagtgggtgaagaagccaccttggacatgtagccccagcagatgtgatatagagaagaaacaggaaacttggctatattagtttcctagggctgcctgtgataaattattacaaactttataaactaacacattgtgtgcctatatcaaaacatcatggaaggacaggcacagtggctcatgcctgtagtcctagcactttgggagggtgagaaaggaagatctcttgagctcaggagttcaagatcagcctgggcaacacagtgagacctcatctccact

SEQ ID NO: 21596 - protein, 290 aa, Artificial Sequence
  derived and/or modified sequence
MGHPPLLPLLLLLHTCVPASWGLRCMQCKTNGDCRVEECALGQDLCRTTIVRLWEEGEELELVEKSCTHSEKTNRTLSYRTGLKITSLTEVVCGLDLCNQGNSGRAVTYSRSRYLECISCGSSDMSCERGRHQSLQCRSPEEQCLDVVTHWIQEGEEVLELENLPQNGRQCYSCKGNSTHGCSSEETFLIDCRGPMNQCLVATGTHEPKNQSYMVRGCATASMCQHAHLGDAFSMNHIDVSCCTKSGCNHPDLDVQYRSGAAPQPGPAHLSLTITLLMTARLWGGTLLWT

SEQ ID NO: 21597 - DNA, 873 bp, Artificial Sequence
  derived and/or modified sequence
atgggccacccccccctgctgcccctgctgctgctgctgcacacctgcgtgcccgccagctggggcctgagatgcatgcagtgcaagaccaacggcgactgcagagtggaggagtgcgccctgggccaggacctgtgcagaaccaccatcgtgagactgtgggaggagggcgaggagctggagctggtggagaagagctgcacccacagcgagaagaccaacagaaccctgagctacagaaccggcctgaagatcaccagcctgaccgaggtggtgtgcggcctggacctgtgcaaccagggcaacagcggcagagccgtgacctacagcagaagcagatacctggagtgcatcagctgcggcagcagcgacatgagctgcgagagaggcagacaccagagcctgcagtgcagaagccccgaggagcagtgcctggacgtggtgacccactggatccaggagggcgaggaggtgctggagctggagaacctgccccagaacggcagacagtgctacagctgcaagggcaacagcacccacggctgcagcagcgaggagaccttcctgatcgactgcagaggccccatgaaccagtgcctggtggccaccggcacccacgagcccaagaaccagagctacatggtgagaggctgcgccaccgccagcatgtgccagcacgcccacctgggcgacgccttcagcatgaaccacatcgacgtgagctgctgcaccaagagcggctgcaaccaccccgacctggacgtgcagtacagaagcggcgccgccccccagcccggccccgcccacctgagcctgaccatcaccctgctgatgaccgccagactgtggggcggcaccctgctgtggacctag

SEQ ID NO: 21598 - DNA, 873 bp, Artificial Sequence
  derived and/or modified sequence
atggggcacccaccactcctaccactgcttttgctcctgcatacctgtgtgccggcctcatggggattgcgttgcatgcagtgcaagactaacggagactgtagggttgaggaatgtgccctgggtcaggatctctgcagaactacaatcgtccggctatgggaagagggggaagaattggaacttgttgaaaagtcctgtactcactctgaaaagaccaataggaccttgagctatcgtacaggattaaaaatcacgtcactgaccgaagtggtttgtgggctggatctctgtaatcagggcaatagtggccgggccgtgacgtattccagatctcggtatcttgagtgcattagttgcgggagtagcgatatgtcttgtgagagaggccggcaccagtctctgcaatgtaggtcccccgaggagcaatgtttagacgtggtgacgcattggatccaagagggcgaagaagttctggagctggaaaacctcccccagaacgggagacagtgttatagctgtaaaggaaattcgacacacggctgcagcagcgaggaaactttcctaatcgattgtcgagggccaatgaatcaatgcctagtcgcgactggcacccacgaacctaagaatcagtcatatatggtcaggggttgtgcaacagccagcatgtgccagcatgcacatctcggggacgcgttctcaatgaatcacatcgacgtgagttgctgcactaagagcggatgtaatcaccccgacctagatgtccagtaccgctctggcgccgctccacagcctggcccagcccacctgtcgctcaccatcaccttgctgatgacagcccgtctctggggtggcacattgttgtggacatag

SEQ ID NO: 21599 - DNA, 873 bp, Artificial Sequence
  derived and/or modified sequence
atgggccacccccccctgctgcccctgctgctgctgctgcacacctgtgtgcctgcctcctggggcctgcgctgcatgcagtgcaagaccaatggagactgccgggtggaggagtgtgccctgggccaggacctgtgcaggaccaccatcgtgcggctgtgggaggagggggaggagctggagctggtggagaagagctgcacccacagcgagaagaccaacagaaccctgagctacagaacaggcctgaagatcaccagcctgacagaggtggtgtgtggcctggacctgtgcaaccagggcaacagcggccgggctgtgacctacagccgcagccgctacctggagtgcatcagctgtggcagcagtgacatgagctgtgagcggggccgccaccagagcctgcagtgccgcagccctgaggagcagtgcctggatgtggtgacccactggatccaggagggggaggaggtgctggagctggagaacctgccccagaatggccggcagtgctacagctgcaagggcaacagcacccacggctgcagcagcgaggagaccttcctgattgactgccggggccccatgaaccagtgcctggtggccaccggcacccatgagcccaagaaccagagctacatggtgcggggctgtgccacagcctccatgtgccagcacgcccacctgggagatgccttctccatgaaccacattgatgtgtcctgctgcaccaagagcggctgcaaccacccagacctggatgtgcagtacagaagtggagctgccccccagcccggccctgcccacctgagcctgaccatcaccctgctgatgacagcccggctgtggggcggcaccctgctgtggacctag

SEQ ID NO: 21600 - DNA, 873 bp, Artificial Sequence
  derived and/or modified sequence
atgggccacccccccctgctgcccctgctgctgctgctgcacacctgtgtcccggcatcttggggccttcgatgtatgcaatgtaagaccaatggagattgtcgggttgaggaatgcgccctggggcaggacctatgccgcaccacaattgtccggctttgggaggaaggcgaagagctggagctcgttgagaaaagctgcactcatagcgagaaaactaaccgaaccttaagttaccgcacagggctcaagattacaagcttgaccgaagtagtgtgtggcttagacctttgcaatcagggcaatagtggtcgggccgtgacctactctcggagccggtacctggaatgtatctcgtgtggttcttccgatatgtcgtgtgagagaggacgtcaccaaagtctgcagtgccgctcaccagaggagcagtgtctggatgtggtgacacattggatacaggagggggaggaggtcctggagctggaaaatttgccccaaaacgggcgccagtgttatagctgtaaaggaaacagcacccatggctgcagctctgaggagaccttccttatagattgtcgcggcccaatgaatcaatgcttggtcgctaccggaacacacgagcctaagaaccagtcctacatggtgaggggctgcgctaccgcaagcatgtgccagcacgcgcacctgggagacgcctttagcatgaaccacattgatgtaagttgttgtactaagtcaggatgcaaccacccagacctggatgtccaatatcgcagtggtgctgcccctcagcccgggcccgctcacctatccttgacaataactctgctgatgacagcacgcctgtggggcgggaccttgctctggacctag

SEQ ID NO: 21601 - DNA, 873 bp, Artificial Sequence
  derived and/or modified sequence
atgggccaccctcctcttctgccactgctgttactcctgcacacgtgtgttcccgctagctgggggctgagatgcatgcagtgcaagacgaatggcgactgtagagtagaggaatgcgcactggggcaggacctttgccggactacaatcgtgcgactgtgggaggaaggagaagagctggaactggtcgagaagagctgcactcactcagagaagaccaacaggacattgagttatcggactgggctgaagataacgagcctcaccgaggtagtatgtggcttagacctctgcaatcagggaaattcaggtcgtgcggttacgtatagtcgctcccggtatctggaatgtataagctgtggcagctcagacatgtcgtgtgaacgtggaaggcaccagtctttgcaatgtcggtctcctgaggagcagtgtctggacgtcgtcacccattggatccaggagggcgaggaggtgctagagcttgagaaccttccccagaatggtcgacagtgttattcgtgcaagggcaacagcactcacggatgtagttccgaggagacattcctgatagactgccggggaccaatgaaccagtgtcttgttgctacaggaacacacgagcccaagaatcaatcctacatggtgaggggctgtgctaccgcctcaatgtgccagcacgcccacttgggcgacgctttttccatgaaccacatcgacgttagctgctgcacgaaaagtgggtgtaaccatcctgacttagacgtacagtatcgcagtggagctgctccccagccgggaccggcacatctgagcttgaccattacattactgatgacagcgaggctgtgggggggtactctcttgtggacctag

SEQ ID NO: 21602 - DNA, 1413 bp, Artificial Sequence
  derived and/or modified sequence
cagggccgagccagccccttcaccaccagccggccgcgccccgggaagggaagtttgtggcggaggaggttcgtacgggaggagggggaggcgcccacgcatctggggctgactcgctctttcgcaaaacgtctgggaggagtccctggggccacaaaactgcctccttcctgaggccagaaggagagaagacgtgcagggaccccgcgcacaggagctgccctcgcgacatgggtcacccgccgctgctgccgctgctgctgctgctccacacctgcgtcccagcctcttggggcctgcggtgcatgcagtgtaagaccaacggggattgccgtgtggaagagtgcgccctgggacaggacctctgcaggaccacgatcgtgcgcttgtgggaagaaggagaagagctggagctggtggagaaaagctgtacccactcagagaagaccaacaggaccctgagctatcggactggcttgaagatcaccagccttaccgaggttgtgtgtgggttagacttgtgcaaccagggcaactctggccgggctgtcacctattcccgaagccgttacctcgaatgcatttcctgtggctcatcagacatgagctgtgagaggggccggcaccagagcctgcagtgccgcagccctgaagaacagtgcctggatgtggtgacccactggatccaggaaggtgaagaagtcctggagcttgaaaatctgccgcagaatggccgccagtgttacagctgcaaggggaacagcacccatggatgctcctctgaagagactttcctcattgactgccgaggccccatgaatcaatgtctggtagccaccggcactcacgaaccgaaaaaccaaagctatatggtaagaggctgtgcaaccgcctcaatgtgccaacatgcccacctgggtgacgccttcagcatgaaccacattgatgtctcctgctgtactaaaagtggctgtaaccacccagacctggatgtccagtaccgcagtggggctgctcctcagcctggccctgcccatctcagcctcaccatcaccctgctaatgactgccagactgtggggaggcactctcctctggacctaaacctgaaatccccctctctgccctggctggatccgggggacccctttgcccttccctcggctcccagccctacagacttgctgtgtgacctcaggccagtgtgccgacctctctgggcctcagttttcccagctatgaaaacagctatctcacaaagttgtgtgaagcagaagagaaaagctggaggaaggccgtgggccaatgggagagctcttgttattattaatattgttgccgctgttgtgttgttgttattaattaatattcatattatttattttatacttacataaagattttgtaccagtgg

SEQ ID NO: 21603 - protein, 399 aa, Artificial Sequence
  derived and/or modified sequence
MDSQGRKVVVCDNGTGFVKCGYAGSNFPEHIFPALVGRPIIRSTTKVGNIEIKNNKKMDLMVGDEASELRSMLEVNYPMENGIVRNWDDMKHLWDYTFGPEKLNIDTRNCKILLTEPPMNPTKNREKIVEVMFETYQFSGVYVAIQAVLTLYAQGLLTGVVVDSGDGVTHICPVYEGFSLPHLTRRLDIAGRDITRYLIKLLLLRGYAFNHSADFETVRMIKEKLCYVGYNIEQEQKLALETTVLVESYTLPDGRIIKVGGERFEAPEALFQPHLINVEGVGVAELLFNTIQAADIDTRSEFYKHIVLSGGSTMYPGLPSRLERELKQLYLERVLKGDVEKLSKFKIRIEDPPRRKHMVFLGGAVLADIMKDKDNFWMTRQEYQEKGVRVLEKLGVTVR

SEQ ID NO: 21604 - protein, 339 aa, Artificial Sequence
  derived and/or modified sequence
MVGDEASELRSMLEVNYPMENGIVRNWDDMKHLWDYTFGPEKLNIDTRNCKILLTEPPMNPTKNREKIVEVMFETYQFSGVYVAIQAVLTLYAQGLLTGVVVDSGDGVTHICPVYEGFSLPHLTRRLDIAGRDITRYLIKLLLLRGYAFNHSADFETVRMIKEKLCYVGYNIEQEQKLALETTVLVESYTLPDGRIIKVGGERFEAPEALFQPHLINVEGVGVAELLFNTIQAADIDTRSEFYKHIVLSGGSTMYPGLPSRLERELKQLYLERVLKGDVEKLSKFKIRIEDPPRRKHMVFLGGAVLADIMKDKDNFWMTRQEYQEKGVRVLEKLGVTVR

SEQ ID NO: 21605 - protein, 305 aa, Artificial Sequence
  derived and/or modified sequence
MVGDEASELRSMLEVNYPMENGIVRNWDDMKHLWDYTFGPEKLNIDTRNCKILLTEPPMNPTKNREKIVEVMFETYQFSGVYVAIQAVLTLYAQGLLTGVVVDSGDGVTHICPVYEGFSLPHLTRRLDIAGRDITRYLIKLLLLRGYAFNHSADFETVRMIKEKLCYVGYNIEQEQKLALETTVLVESYTLPDGRIIKVGGERFEAPEALFQPHLINVEGVGVAELLFNTIQAADIDTRSEFYKHIVLSGGSTMYPGLPSRLERELKQLYLERVLKGDVEKLSVSISKSTITNILLKGYTVVCES

SEQ ID NO: 21606 - DNA, 1200 bp, Artificial Sequence
  derived and/or modified sequence
atggattctcagggcaggaaggtcgtggtatgcgacaacgggacagggtttgtaaagtgtggctacgccggttctaatttccccgagcacatctttccggccctcgttgggcggcctattatccgatcaactaccaaggtcggaaacatcgagataaaaaataataagaaaatggaccttatggtcggagatgaggcgagtgagctccggtcgatgctcgaagtgaattatcccatggagaacggcatcgtccgcaactgggatgacatgaaacacctctgggattatacttttggccccgagaagctcaacatcgacactcgtaattgcaaaattctactcacagagcctcctatgaaccctactaagaacagagaaaaaatagtggaagttatgttcgagacataccaattctcaggggtgtatgtcgcaatccaggctgtgctgaccctgtacgcccagggtctgctgaccggagtagtggtagattccggtgatggtgtcacacacatttgccccgtgtatgaagggttctccctccctcacctcacccgccggctggacattgccggcagagacataacccgctatcttattaagcttctattactgagaggctatgctttcaaccacagcgctgattttgagactgtgaggatgatcaaagaaaaactgtgctacgtgggatacaacatcgaacaagaacaaaaactcgccctggagacgacggtactggtggaatcctatacacttcctgatgggcgcataatcaaagtgggcggtgaaaggtttgaggcacccgaagcacttttccagccacacctgattaatgtagaaggcgtgggagtggccgagctgttatttaacacgattcaggcggcagacatcgacactcggagtgagttttataagcatatcgtgctgtctggaggtagtaccatgtaccccggcctgccatcaaggctggaacgcgagctcaagcagctgtatctcgaaagagtcctgaagggcgatgtcgagaaactgagcaagtttaagatccggattgaggacccgccaaggaggaaacacatggtctttctgggcggggcggtcctcgctgatattatgaaagacaaagataacttctggatgaccagacaggaataccaggagaaaggtgtccgcgttctcgagaagctgggcgtgaccgttcgctag

SEQ ID NO: 21607 - DNA, 1200 bp, Artificial Sequence
  derived and/or modified sequence
atggacagccagggcaggaaggtggtggtgtgtgacaatggaactggatttgtgaagtgtggctacgccggcagcaacttccctgagcacatcttccctgccctggtgggccggcccatcatccgcagcaccaccaaggtgggcaacatcgagatcaagaacaacaagaagatggacctgatggtgggagatgaggccagcgagctgcgctccatgctggaggtgaactaccccatggagaatggaattgtgaggaactgggatgacatgaagcacctgtgggactacaccttcggccctgagaagctgaacatcgacaccaggaactgcaagatcctgctgacagagccccccatgaaccccaccaagaaccgggagaagatcgtggaggtgatgtttgagacctaccagttctctggagtgtatgtggccatccaggccgtgctgaccctgtatgcccagggcctgctgactggagtggtggtggacagcggagatggagtgacccacatctgccctgtgtatgagggcttcagcctgccccacctgacccggcggctggacattgctggccgggacatcacccgctacctgatcaagctgctgctgctgcggggctacgccttcaaccacagcgctgactttgaaacagtgaggatgatcaaggagaagctgtgctacgtgggctacaacatcgagcaggagcagaagctggccctggagaccaccgtgctggtggagagctacaccctgcctgatggccgcatcatcaaggtgggcggggagagatttgaggcccctgaggccctcttccagccccacctgatcaacgtggagggcgtgggcgtggccgagctgctcttcaacaccatccaggccgctgacatcgacaccaggtctgagttctacaagcacatcgtgctgagcggcggcagcaccatgtacccaggcctgcccagccggctggagcgggagctgaagcagctgtacctggagcgggtgctgaagggagatgtggagaagctgagcaagttcaagatcagaattgaggacccccccaggaggaagcacatggtgttcctgggcggcgctgtgctggccgacatcatgaaggacaaggacaacttctggatgacccggcaggagtaccaggagaagggcgtgcgggtgctggagaagctgggcgtgacagtgaggtag

SEQ ID NO: 21608 - DNA, 1200 bp, Artificial Sequence
  derived and/or modified sequence
atggacagccagggccggaaggtggtggtgtgcgacaacggcaccgggttcgttaagtgtggctatgccggctctaattttcctgagcatatttttcctgctctcgttgggaggccgattatacgatcaactaccaaggttggaaacatagagatcaagaataataaaaagatggatcttatggtcggagatgaggccagtgagttgcgttccatgttagaagtcaattaccccatggaaaatggtatcgtgaggaattgggatgatatgaaacacctgtgggactatacattcggccccgagaaactgaatatcgacactaggaattgcaagatactcctcaccgagccaccgatgaacccgacaaaaaatagagagaagattgtggaggtgatgtttgagacttatcaattcagcggcgtgtacgttgctattcaggctgtgctaactctatacgctcagggcctgctgaccggagttgtggtggactcaggcgatggagttacgcacatatgtccagtgtacgagggattctcgctgccacatcttacacggcgactcgacattgccgggagggatataacgcggtatctaatcaagctgctactgcttaggggatatgcctttaatcatagcgccgattttgaaacagtgagaatgatcaaagagaaactgtgctatgttggttataatatagaacaggaacaaaaattggcattagaaactaccgtgttagtggaatcctacacgctgccagatgggcggataattaaggtgggcggcgaacgcttcgaagcgcctgaggcccttttccaaccccatttgattaatgtggaaggcgtgggggtggcagagctgctgtttaatacgattcaggcggccgacattgataccaggtcagagttttataagcatattgtgttgagcggcggctctaccatgtacccaggcttaccttcccggctggagagagagctcaagcagctctacttggagagagtgcttaaaggagacgttgagaagctgagcaagtttaaaatccgcatagaggaccctccccgtaggaagcacatggtgttccttgggggtgcagtactggccgacatcatgaaggacaaggataacttctggatgacgcggcaggagtatcaggagaagggagttagggtgttagaaaaacttggagtgacggtccgttag

SEQ ID NO: 21609 - DNA, 1200 bp, Artificial Sequence
  derived and/or modified sequence
atggactcccagggcagaaaggtggtcgtgtgtgataatggaaccggatttgttaagtgtggctacgccggttccaatttcccagagcatatctttcccgcactagtggggaggcctatcatccgatcgaccaccaaagtggggaatatcgaaatcaagaacaataagaagatggatctaatggtgggcgatgaagcaagtgaattgcggagtatgctagaggttaattatccaatggagaatggaattgtccgaaactgggacgatatgaaacacctgtgggattacacgttcggcccagaaaagctcaatattgacactcggaactgcaagattcttctgacagagcctccaatgaacccaacgaagaaccgggagaaaatcgttgaggtaatgttcgaaacctatcaatttagcggagtgtacgtagcaattcaggccgtcctgactctgtacgctcagggactgctcaccggtgtggtcgtggatagtggggacggggtaacccacatttgtccagtgtatgagggcttttccctgccccaccttacaagacggctcgatatagcagggagggatatcacgcgctacctgataaaacttctgttgctcagaggatacgctttcaaccacagcgcagatttcgaaaccgtacgcatgataaaggaaaaactctgctatgtgggctataatatagaacaagaacagaagttagctctggagacgaccgtccttgtggagagctacactctcccagacggtagaataattaaggtcgggggagaacgttttgaagccccagaggccctgttccagccacatcttattaatgttgaaggggtcggggtggctgagctcctgttcaacaccattcaagccgctgacatcgataccagatccgagttctacaaacatattgtcttgagtggcggatctaccatgtatccgggactacctagtcggctagaaagggagctgaagcagctttatctggagcgggtactgaaaggggacgtggagaagctgagtaaatttaaaatcaggattgaggatcccccacgcagaaagcatatggtctttctgggaggtgctgtgctggcggacattatgaaggacaaagataacttctggatgaccaggcaggagtatcaggagaaaggggtgagagtgctagaaaagctgggcgtcacagtgagatag

SEQ ID NO: 21610 - DNA, 2685 bp, Artificial Sequence
  derived and/or modified sequence
ggaagaagagaaaacggccgggcggcggtggctgtaggttgtgcggctgcagcggctcttccctgggcggacgatggacagccagggcaggaaggtggtggtgtgcgacaacggcaccgggtttgtgaagtgtggatatgcaggctctaactttccagaacacatcttcccagctttggttggaagacctattatcagatcaaccaccaaagtgggaaacattgaaatcaagaataacaaaaagatggatcttatggttggtgatgaggcaagtgaattacgatcaatgttagaagttaactaccctatggaaaatggcatagtacgaaattgggatgacatgaaacacctgtgggactacacatttggaccagagaaacttaatatagataccagaaattgtaaaatcttactcacagaacctcctatgaacccaaccaaaaacagagagaagattgtagaggtaatgtttgaaacttaccagttttccggtgtatatgtagccatccaggcagttctgactttgtacgctcaaggtttattgactggtgtagtggtagactctggagatggtgtgactcacatttgcccagtatatgaaggcttttctctccctcatcttaccaggagactggatattgctgggagggatataactagatatcttatcaagctacttctgttgcgaggatacgccttcaaccactctgctgattttgaaacggttcgcatgattaaagaaaaactgtgttacgtgggatataatattgagcaagagcagaaactggccttagaaaccacagtattagttgaatcttatacactcccagatggacgtatcatcaaagttgggggagagagatttgaagcaccagaagctttatttcagcctcacttgatcaatgttgaaggagttggtgttgctgaattgctttttaacacaattcaggcagctgacattgataccagatctgaattctacaaacacattgtgctttctggagggtctactatgtatcctggcctgccatcacggttggaacgagaacttaaacagctttacttagaacgagttttgaagggtgatgtggaaaaactttctaaatttaagatccgcattgaagacccaccccgcagaaagcacatggtattcctgggtggtgcagttctagcggatatcatgaaagacaaagacaacttttggatgacccgacaagagtaccaagaaaagggtgtccgtgtgctagagaaacttggtgtgactgttcgataaactccaaagcttgttcccgtcatacccgtaatgctttcttttttcctttattgccaatctttgaactcattcaactccaggacatggaagaggcctctctctgccctttgactggaaaggtcaagttttattctggtgtcttggggaagctttgttaaatttttgttaatgtgggtaaatctgagtttaattcaactgcttccctacatagactagagggctaaggattctgtctgctgctttgtttcttctaagtaggcatttagatcattcctataggcttcctattttcactttactgctctaatgctgctagtcgtagtctttagcacactaggtggtatgcctttattagcataaaacaaaaaaaactttaacaggagcttttacatattactgggatggggggtggttcgggatgggtgggcagctgctgaaccctttagggcatttcctctgtaatgtggcgctttcaactgtactgctgcagctttaagtaccttaaagcttctcctgtgaacttcttagggaaatgttaggttcagaactaaagtgttttgggtgggttttgttgcgggggggagggtaacaatgggtggtcttctgatttttatttttgaggttttgtcaactggagtacgtagaggaactttatttacagtactttgatttggcaggttttcttctacttgtgctctgcctggagctgtttccatatgatataaaaagcaagtgtagtattccattactatgtggcttagggatttatttgttttttaaaatcaaccatgttagctgggattagactccctacagtccttcaatggaaaagtaacatttaaaaatcctttgggtaattcgaattacagatttaaaagagcttaagatctggtgttttgttaatgcttctgtttattccagaagcattaaggtaacccattgccaagtatcattcttgcaaattattcttttatataactgaccagtgcttaataaaacaagcaggtacttacaaataattactggcagtaggttataattggtggtttaaaaataacattggaatacaggacttgttgccaattgggtaattttcattagttgttttgtttgttttgatttgaaacctggaaatacagtaaaatttgactgtttaaaatgttggccaaaaaaatcaagatttaatttttttatttgtactgaaaaactaatcataactgttaattctcagccatctttgaagcttgaaagaagagtctttggtattttgtaaacgttagcagactttcctgccagtgtcagaaaatcctatttatgaatcctgtcggtattccttggtatctgaaaaaaataccaaatagtaccatacatgagttatttctaagtttgaaaaataaaaagaaattgcatca

SEQ ID NO: 21611 - DNA, 1406 bp, Artificial Sequence
  derived and/or modified sequence
aagaggaagaagagaaaacggccgggcggcggtggctgtaggttgtgcggctgcagcggctcttccctgggcggacgatggacagccagggcaggaaggtggtggtgtgcgacaacggcaccgggtttgtgaagtgtggatatgcaggctctaactttccagaacacatcttcccagctttggttggaagacctattatcagatcaaccaccaaagtgggaaacattgaaatcaaggccttattttttgaacaattgagcaaaagaaacagatgaaacctcatacaaaaccctccaaaatatgaaaatgtggggtttatttgtgctaatgctcttcttttggaaacatttgtgttaaaggatcttatggttggtgatgaggcaagtgaattacgatcaatgttagaagttaactaccctatggaaaatggcatagtacgaaattgggatgacatgaaacacctgtgggactacacatttggaccagagaaacttaatatagataccagaaattgtaaaatcttactcacagaacctcctatgaacccaaccaaaaacagagagaagattgtagaggtaatgtttgaaacttaccagttttccggtgtatatgtagccatccaggcagttctgactttgtacgctcaaggtttattgactggtgtagtggtagactctggagatggtgtgactcacatttgcccagtatatgaaggcttttctctccctcatcttaccaggagactggatattgctgggagggatataactagatatcttatcaagctacttctgttgcgaggatacgccttcaaccactctgctgattttgaaacggttcgcatgattaaagaaaaactgtgttacgtgggatataatattgagcaagagcagaaactggccttagaaaccacagtattagttgaatcttatacactcccagatggacgtatcatcaaagttgggggagagagatttgaagcaccagaagctttatttcagcctcacttgatcaatgttgaaggagttggtgttgctgaattgctttttaacacaattcaggcagctgacattgataccagatctgaattctacaaacacattgtgctttctggagggtctactatgtatcctggcctgccatcacggttggaacgagaacttaaacagctttacttagaacgagttttgaagggtgatgtggaaaaactttctgtaagtattagtaaatcaactattactaacattcttttaaaaggctatacagtagtttgtgaatcttgacaaccaccagagggagcaagacgtcttccaaaacaaattcctactgcagtcaagtgcatcctggaaatgatagcaagaaggaaatagttcaagataagctctggtcacctctatagagttggt

SEQ ID NO: 21612 - DNA, 1200 bp, Artificial Sequence
  derived and/or modified sequence
atggacagccagggcagaaaggtggtggtgtgcgacaacggcaccggcttcgtgaagtgcggctacgccggcagcaacttccccgagcacatcttccccgccctggtgggcagacccatcatcagaagcaccaccaaggtgggcaacatcgagatcaagaacaacaagaagatggacctgatggtgggcgacgaggccagcgagctgagaagcatgctggaggtgaactaccccatggagaacggcatcgtgagaaactgggacgacatgaagcacctgtgggactacaccttcggccccgagaagctgaacatcgacaccagaaactgcaagatcctgctgaccgagccccccatgaaccccaccaagaacagagagaagatcgtggaggtgatgttcgagacctaccagttcagcggcgtgtacgtggccatccaggccgtgctgaccctgtacgcccagggcctgctgaccggcgtggtggtggacagcggcgacggcgtgacccacatctgccccgtgtacgagggcttcagcctgccccacctgaccagaagactggacatcgccggcagagacatcaccagatacctgatcaagctgctgctgctgagaggctacgccttcaaccacagcgccgacttcgagaccgtgagaatgatcaaggagaagctgtgctacgtgggctacaacatcgagcaggagcagaagctggccctggagaccaccgtgctggtggagagctacaccctgcccgacggcagaatcatcaaggtgggcggcgagagattcgaggcccccgaggccctgttccagccccacctgatcaacgtggagggcgtgggcgtggccgagctgctgttcaacaccatccaggccgccgacatcgacaccagaagcgagttctacaagcacatcgtgctgagcggcggcagcaccatgtaccccggcctgcccagcagactggagagagagctgaagcagctgtacctggagagagtgctgaagggcgacgtggagaagctgagcaagttcaagatcagaatcgaggacccccccagaagaaagcacatggtgttcctgggcggcgccgtgctggccgacatcatgaaggacaaggacaacttctggatgaccagacaggagtaccaggagaagggcgtgagagtgctggagaagctgggcgtgaccgtgagatag

SEQ ID NO: 21613 - protein, 1240 aa, Artificial Sequence
  derived and/or modified sequence
MARQPPPPWVHAAFLLCLLSLGGAIEIPMDPSIQNELTQPPTITKQSAKDHIVDPRDNILIECEAKGNPAPSFHWTRNSRFFNIAKDPRVSMRRRSGTLVIDFRSGGRPEEYEGEYQCFARNKFGTALSNRIRLQVSKSPLWPKENLDPVVVQEGAPLTLQCNPPPGLPSPVIFWMSSSMEPITQDKRVSQGHNGDLYFSNVMLQDMQTDYSCNARFHFTHTIQQKNPFTLKVLTTRGVAERTPSFMYPQGTASSQMVLRGMDLLLECIASGVPTPDIAWYKKGGDLPSDKAKFENFNKALRITNVSEEDSGEYFCLASNKMGSIRHTISVRVKAAPYWLDEPKNLILAPGEDGRLVCRANGNPKPTVQWMVNGEPLQSAPPNPNREVAGDTIIFRDTQISSRAVYQCNTSNEHGYLLANAFVSVLDVPPRMLSPRNQLIRVILYNRTRLDCPFFGSPIPTLRWFKNGQGSNLDGGNYHVYENGSLEIKMIRKEDQGIYTCVATNILGKAENQVRLEVKDPTRIYRMPEDQVARRGTTVQLECRVKHDPSLKLTVSWLKDDEPLYIGNRMKKEDDSLTIFGVAERDQGSYTCVASTELDQDLAKAYLTVLADQATPTNRLAALPKGRPDRPRDLELTDLAERSVRLTWIPGDANNSPITDYVVQFEEDQFQPGVWHDHSKYPGSVNSAVLRLSPYVNYQFRVIAINEVGSSHPSLPSERYRTSGAPPESNPGDVKGEGTRKNNMEITWTPMNATSAFGPNLRYIVKWRRRETREAWNNVTVWGSRYVVGQTPVYVPYEIRVQAENDFGKGPEPESVIGYSGEDLPSAPRRFRVRQPNLETINLEWDHPEHPNGIMIGYTLKYVAFNGTKVGKQIVENFSPNQTKFTVQRTDPVSRYRFTLSARTQVGSGEAVTEESPAPPNEATPTAAPPTLPPTTVGATGAVSSTDATAIAATTEATTVPIIPTVAPTTIATTTTVATTTTTTAAATTTTESPPTTTSGTKIHESAPDEQSIWNVTVLPNSKWANITWKHNFGPGTDFVVEYIDSNHTKKTVPVKAQAQPIQLTDLYPGMTYTLRVYSRDNEGISSTVITFMTSTAYTNNQADIATQGWFIGLMCAIALLVLILLIVCFIKRSRGGKYPVREKKDVPLGPEDPKEEDGSFDYSDEDNKPLQGSQTSLDGTIKQQESDDSLVDYGEGGEGQFNEDGSFIGQYTVKKDKEETEGNESSEATSPVNAIYSLA

SEQ ID NO: 21614 - DNA, 3723 bp, Artificial Sequence
  derived and/or modified sequence
atggccagacagcccccccccccctgggtgcacgccgccttcctgctgtgcctgctgagcctgggcggcgccatcgagatccccatggaccccagcatccagaacgagctgacccagccccccaccatcaccaagcagagcgccaaggaccacatcgtggaccccagagacaacatcctgatcgagtgcgaggccaagggcaaccccgcccccagcttccactggaccagaaacagcagattcttcaacatcgccaaggaccccagagtgagcatgagaagaagaagcggcaccctggtgatcgacttcagaagcggcggcagacccgaggagtacgagggcgagtaccagtgcttcgccagaaacaagttcggcaccgccctgagcaacagaatcagactgcaggtgagcaagagccccctgtggcccaaggagaacctggaccccgtggtggtgcaggagggcgcccccctgaccctgcagtgcaaccccccccccggcctgcccagccccgtgatcttctggatgagcagcagcatggagcccatcacccaggacaagagagtgagccagggccacaacggcgacctgtacttcagcaacgtgatgctgcaggacatgcagaccgactacagctgcaacgccagattccacttcacccacaccatccagcagaagaaccccttcaccctgaaggtgctgaccaccagaggcgtggccgagagaacccccagcttcatgtacccccagggcaccgccagcagccagatggtgctgagaggcatggacctgctgctggagtgcatcgccagcggcgtgcccacccccgacatcgcctggtacaagaagggcggcgacctgcccagcgacaaggccaagttcgagaacttcaacaaggccctgagaatcaccaacgtgagcgaggaggacagcggcgagtacttctgcctggccagcaacaagatgggcagcatcagacacaccatcagcgtgagagtgaaggccgccccctactggctggacgagcccaagaacctgatcctggcccccggcgaggacggcagactggtgtgcagagccaacggcaaccccaagcccaccgtgcagtggatggtgaacggcgagcccctgcagagcgccccccccaaccccaacagagaggtggccggcgacaccatcatcttcagagacacccagatcagcagcagagccgtgtaccagtgcaacaccagcaacgagcacggctacctgctggccaacgccttcgtgagcgtgctggacgtgccccccagaatgctgagccccagaaaccagctgatcagagtgatcctgtacaacagaaccagactggactgccccttcttcggcagccccatccccaccctgagatggttcaagaacggccagggcagcaacctggacggcggcaactaccacgtgtacgagaacggcagcctggagatcaagatgatcagaaaggaggaccagggcatctacacctgcgtggccaccaacatcctgggcaaggccgagaaccaggtgagactggaggtgaaggaccccaccagaatctacagaatgcccgaggaccaggtggccagaagaggcaccaccgtgcagctggagtgcagagtgaagcacgaccccagcctgaagctgaccgtgagctggctgaaggacgacgagcccctgtacatcggcaacagaatgaagaaggaggacgacagcctgaccatcttcggcgtggccgagagagaccagggcagctacacctgcgtggccagcaccgagctggaccaggacctggccaaggcctacctgaccgtgctggccgaccaggccacccccaccaacagactggccgccctgcccaagggcagacccgacagacccagagacctggagctgaccgacctggccgagagaagcgtgagactgacctggatccccggcgacgccaacaacagccccatcaccgactacgtggtgcagttcgaggaggaccagttccagcccggcgtgtggcacgaccacagcaagtaccccggcagcgtgaacagcgccgtgctgagactgagcccctacgtgaactaccagttcagagtgatcgccatcaacgaggtgggcagcagccaccccagcctgcccagcgagagatacagaaccagcggcgccccccccgagagcaaccccggcgacgtgaagggcgagggcaccagaaagaacaacatggagatcacctggacccccatgaacgccaccagcgccttcggccccaacctgagatacatcgtgaagtggagaagaagagagaccagagaggcctggaacaacgtgaccgtgtggggcagcagatacgtggtgggccagacccccgtgtacgtgccctacgagatcagagtgcaggccgagaacgacttcggcaagggccccgagcccgagagcgtgatcggctacagcggcgaggacctgcccagcgcccccagaagattcagagtgagacagcccaacctggagaccatcaacctggagtgggaccaccccgagcaccccaacggcatcatgatcggctacaccctgaagtacgtggccttcaacggcaccaaggtgggcaagcagatcgtggagaacttcagccccaaccagaccaagttcaccgtgcagagaaccgaccccgtgagcagatacagattcaccctgagcgccagaacccaggtgggcagcggcgaggccgtgaccgaggagagccccgccccccccaacgaggccacccccaccgccgccccccccaccctgccccccaccaccgtgggcgccaccggcgccgtgagcagcaccgacgccaccgccatcgccgccaccaccgaggccaccaccgtgcccatcatccccaccgtggcccccaccaccatcgccaccaccaccaccgtggccaccaccaccaccaccaccgccgccgccaccaccaccaccgagagcccccccaccaccaccagcggcaccaagatccacgagagcgcccccgacgagcagagcatctggaacgtgaccgtgctgcccaacagcaagtgggccaacatcacctggaagcacaacttcggccccggcaccgacttcgtggtggagtacatcgacagcaaccacaccaagaagaccgtgcccgtgaaggcccaggcccagcccatccagctgaccgacctgtaccccggcatgacctacaccctgagagtgtacagcagagacaacgagggcatcagcagcaccgtgatcaccttcatgaccagcaccgcctacaccaacaaccaggccgacatcgccacccagggctggttcatcggcctgatgtgcgccatcgccctgctggtgctgatcctgctgatcgtgtgcttcatcaagagaagcagaggcggcaagtaccccgtgagagagaagaaggacgtgcccctgggccccgaggaccccaaggaggaggacggcagcttcgactacagcgacgaggacaacaagcccctgcagggcagccagaccagcctggacggcaccatcaagcagcaggagagcgacgacagcctggtggactacggcgagggcggcgagggccagttcaacgaggacggcagcttcatcggccagtacaccgtgaagaaggacaaggaggagaccgagggcaacgagagcagcgaggccaccagccccgtgaacgccatctacagcctggcctag

SEQ ID NO: 21615 - DNA, 3723 bp, Artificial Sequence
  derived and/or modified sequence
atggcacggcagcctccccctccttgggtgcatgctgcatttcttctttgtttgttgtccttgggcggagccattgaaatcccaatggacccttcaatccagaatgagctgacccagcctccgactatcactaaacaaagcgcaaaagaccacatagtggatccgcgggataatattctgatcgaatgcgaggcaaaaggaaatccagcaccctcttttcactggacccggaacagccggttcttcaacatagccaaagatccgcgagtgtcaatgcggagacgcagcggaactcttgtgattgacttccgaagtggaggtagacctgaagaatatgagggggaatatcaatgtttcgcaaggaacaaattcggaaccgcgttatccaaccgaatccgtttacaggtcagcaaatcccctctgtggcctaaggagaatttggatccagtggttgtccaggagggagctccgctgaccctgcagtgtaacccccccccagggctgccctcccccgttattttttggatgagctcttccatggaacccatcacccaggacaagcgagtctctcagggccacaacggcgacctgtacttctccaatgttatgctgcaagacatgcaaaccgactactcatgcaacgcccgtttccacttcacgcatactatccagcagaaaaatccattcaccctgaaagttctgactacccggggcgtggcagaaagaaccccctcctttatgtaccctcagggcactgcttcctcccagatggtgctcagaggtatggatctcctgctggagtgtatcgcgtcaggcgtgcccactccagatattgcttggtataagaaggggggggacttgccaagcgacaaggccaagttcgaaaacttcaacaaagcactgcgcataactaacgttagtgaagaggattcaggggaatatttttgcctggcttcaaataaaatgggctctattagacacactatctcagtgcgtgtgaaagctgccccttactggctggatgaaccaaaaaatctcatcctagcccctggcgaagatggaaggctggtctgccgggcgaatggcaatcctaagcctacagttcaatggatggtgaatggggagcctctgcagagcgcgccacctaatcccaatagagaggtcgcaggggataccatcatctttcgtgacacccagatttcgtcccgggccgtttatcaatgcaacacatcaaatgagcatgggtatcttcttgctaatgccttcgtttctgtgttggatgtcccgccacggatgttgagtccaaggaaccaactcatccgtgtgatcctgtacaatcggacccggctagactgtccattcttcggcagtcccatccctacccttagatggtttaagaacggccaaggctccaatctggacggtggaaactaccacgtgtacgagaacgggtcactggagatcaagatgattcggaaagaagatcaaggcatatatacgtgtgtcgcaacaaatattttaggaaaagccgagaatcaagttaggctcgaagtgaaggaccctacaagaatttatcggatgcccgaggaccaagtggccaggcgaggaacaacagtgcagcttgagtgcagggtcaaacacgacccgtcgttgaaactgaccgtctcctggctcaaagacgacgagccactctacatcggcaatagaatgaagaaggaggatgactctctgactattttcggtgtggctgagcgtgatcagggtagttatacctgcgttgcttctaccgagctcgatcaagacctggccaaagcataccttacagttcttgctgaccaggccactcccaccaaccggttagccgccctgcccaagggcagacccgaccgcccccgcgacctcgagctgacggacctagccgagagatcagttcggttgacttggatcccaggtgacgcaaataactcgccgatcacggactacgtagtgcagttcgaagaagaccagtttcaacctggggtctggcatgatcactccaaatatccaggatctgtcaattccgctgtactgaggctctccccctacgttaactaccaattcagggtgatcgccatcaatgaggtgggaagctcccacccttcactgccatcggagagataccgaacatcgggcgctcccccagaatcgaaccccggggacgttaagggagagggaacaagaaaaaacaatatggaaatcacatggacacccatgaacgccacatctgcttttggtcccaatctgaggtacattgtgaagtggcgcaggagagagacccgggaagcctggaataatgtcacagtctgggggtctaggtacgtcgtcggacagactcctgtgtacgtgccctacgagatccgagttcaggccgaaaacgacttcggtaagggtccagagcctgaatccgttataggatattccggcgaagacctgcctagtgccccaagacggtttcgcgtgcgccagcccaatctcgagacgattaatttggagtgggaccatcctgaacaccctaacggaattatgatcggttatactttgaagtatgttgcctttaatggtacaaaggtcggtaagcagatcgtcgagaatttcagccctaatcagactaagttcacagtacaacggaccgacccagttagtagatacagatttactttgtctgccagaacacaggtgggatccggcgaggcagtgaccgaggagtcgcccgcaccccccaatgaggcaacaccaaccgctgctccccccaccttacccccaacaacagtgggtgctacgggtgctgttagcagcaccgatgctactgccattgccgcgaccaccgaggccacaacagtgcccattatacccactgtcgcaccaaccacaatcgccacaaccacaactgtggcgaccaccacaactaccaccgctgctgcaactacaaccaccgagagcccgcccactacaacttccgggaccaagatccatgaatcggccccagacgaacaaagtatttggaatgtcactgtgctaccaaatagtaaatgggctaatataacctggaagcataactttggcccagggacagattttgtggtcgaatatatcgatagcaaccacactaaaaagaccgttcccgtgaaggctcaggctcagcctattcagttgactgatctttacccaggcatgacctacaccctgcgtgtgtactcacgggacaatgaagggatcagtagtaccgtgatcactttcatgaccagtacagcatacacaaataaccaggcggacatagcgacccaaggctggtttatcgggctcatgtgtgctatagcgttgctggtgttgattctgctgattgtgtgtttcattaagcgcagccggggcgggaagtaccctgttcgtgagaaaaaggacgttcccctgggacctgaggatcctaaagaagaagacgggagttttgattattccgacgaggataataagccactccaggggtcacagacaagtctggacgggacaattaagcagcaggagagcgacgattccctcgtggactacggcgagggaggggagggccagtttaacgaagacggatcattcatcgggcagtacaccgtgaaaaaagataaagaagaaaccgaaggcaatgagtcctccgaagccacgtcgcctgtgaacgcgatatacagtttggcctag

SEQ ID NO: 21616 - DNA, 3723 bp, Artificial Sequence
  derived and/or modified sequence
atggcacggcagccaccccccccttgggtgcatgctgccttcctactgtgcctccttagtctcggaggggccatcgagattcccatggaccctagtattcagaacgagcttacccaacctcccaccatcacaaagcagtctgccaaagaccacatcgttgacccacgcgacaacattctgatcgagtgcgaagccaagggaaatcctgcacccagttttcactggacccgtaactcccgcttttttaacattgcgaaggacccaagggtgtcgatgaggcgccgcagtggtaccttagtaatcgacttccgatccggcggcagaccagaggagtatgagggtgaataccagtgttttgccaggaacaaattcggtaccgccctctccaatcgtatcaggctgcaggtgtcgaaaagcccgctttggcctaaagagaatctcgatcctgtggtcgtccaggagggggcccctctgacccttcaatgcaacccccctcctggcctgcctagtccggtgatattttggatgtcttcatctatggagcctattacacaggataaaagggtatcacaagggcataacggggatctgtatttcagtaatgtgatgcttcaagacatgcagaccgactatagttgcaatgctagatttcattttacccacaccattcaacaaaagaaccccttcactctcaaggttttgacaaccagaggagtggccgaaagaacgccatccttcatgtatcctcagggcactgctagcagccagatggtgcttagaggaatggaccttctcctcgaatgcatcgcctccggggttccgactccagacatcgcatggtacaaaaagggaggggacctcccaagcgataaagctaaatttgagaatttcaataaggctctgaggataacaaacgtgtccgaagaagattcgggtgagtacttctgtcttgcctccaacaaaatgggtagcatccgacatacaatctctgttagagttaaagcagctccatactggctcgatgaacctaagaacctgatcctggcccccggcgaggatggtagattggtttgccgagctaatggcaaccccaagccgaccgtgcagtggatggtgaatggcgagccattgcagagcgcacctccaaatcctaatcgagaagtggcaggcgataccataatctttagagatactcaaatctcaagccgggccgtttatcagtgcaacactagcaacgagcatgggtacttgttggccaatgctttcgtgtctgtgctcgatgtgcctcctcgcatgcttagccccagaaaccaattaattcgggtaatactgtataatcgaacccgactggactgtccgttctttgggtctcccataccaacacttcggtggttcaagaatgggcaaggatccaaccttgacggtgggaactaccatgtgtacgagaacggctccttagaaatcaaaatgatccgcaaggaagaccagggcatatacacatgcgttgcaacaaatatcctgggcaaggcggagaatcaggtgcgcctggaggtcaaagaccctaccagaatttaccgcatgccggaagaccaggtggctcgcaggggcacaacagtccagttggaatgtcgtgttaagcacgacccatcgctcaaactgaccgtttcttggctcaaggatgatgaacccctctacatagggaatcgcatgaaaaaagaggacgactctttaacgatcttcggcgtggcagaaagggaccagggctcttatacgtgtgtagcctcgacagagctcgaccaggacctggctaaggcatatctcactgttctcgcagaccaggccactcctactaaccggctcgctgcccttcctaaaggacgccctgatcgtccccgggatctggaactgacagatctggctgaacgatccgtgcgcttgacgtggatccctggagacgccaacaactcccctatcactgactatgtggtgcagtttgaggaggatcagtttcaacccggcgtgtggcacgatcacagcaaatacccaggctcagtaaactccgctgtcctcaggttgtccccttatgtgaattaccagttcagagttatcgctataaatgaagtggggtctagccaccctagccttccaagtgaacgctaccgcacctccggcgcccccccggaaagtaacccaggcgacgttaaaggggagggaacgagaaaaaacaacatggagatcacatggacacctatgaatgcaaccagcgctttcggtcctaatctccgatatattgtaaagtggagacgaagagagaccagggaagcatggaacaacgtaacggtttggggttccagatacgttgtgggacagacacccgtttatgtcccatatgaaattagggtccaggccgagaacgattttgggaaaggtccggagccagaaagcgttataggctatagtggggaagacctcccctccgctcctaggagatttcgcgtgagacagccaaacctcgagacaatcaacctggaatgggatcacccggaacaccctaatggcataatgattggttacaccctaaagtacgtcgccttcaatgggaccaaagttggtaagcagattgtggaaaatttttctcctaaccagaccaagtttacagtgcagcggaccgatcccgtatcccgatatagattcacattatccgcccgcactcaggtggggtctggagaagccgtgaccgaggagtcgcctgccccacctaatgaggctacaccaaccgccgcccctcccaccctcccccccacgacagttggcgcgacgggcgccgtgtcctccacagacgcaacagccattgctgccacaactgaagccacaaccgtgccaatcatccccacagttgcaccgacgacaattgctacgacaactactgtggcaacaaccaccaccacaacagcggccgccaccacaacgacggagtctccacctacaacaacttctggcacaaagatacacgagtctgccccagatgagcaatcaatttggaatgtaacagtcctgcccaatagcaagtgggctaacattacctggaagcacaacttcggtcccgggacggattttgtggtggagtacattgattctaaccacactaagaagacagtcccggtcaaggctcaggctcagccaatccagttaaccgacctataccccgggatgacctacaccctgcgagtttatagcagagataatgagggtatttcaagcacagtcattacttttatgaccagcaccgcctacacaaataatcaggctgatatcgccacccaggggtggttcatcgggcttatgtgcgccatcgctttgctcgttcttatcttgctgatcgtatgcttcatcaaaaggtctcgcgggggtaaatatcccgtgagagagaagaaggatgtgcccttggggccggaggatcccaaggaagaagacgggagtttcgattatagtgacgaagacaataagcctctgcaggggagccagacatcactggatggtacgatcaagcagcaggagtccgatgattccttggtcgactacggggagggcggggagggccagtttaacgaggatggctcttttattggacaatacaccgtcaagaaggataaggaggaaactgagggtaacgagtcgagcgaagccacctcccctgttaacgcaatctacagcctcgcctag

SEQ ID NO: 21617 - DNA, 3723 bp, Artificial Sequence
  derived and/or modified sequence
atggcccggcagcccccaccaccctgggtgcacgccgccttcctgctgtgcctgctgagcctgggcggggccatcgagatccccatggaccccagcatccagaatgagctgacccagccccccaccatcaccaagcagagcgccaaggaccacatcgtggacccccgggacaacatcctgattgaatgtgaggccaagggcaacccagcccccagcttccactggaccaggaacagccgcttcttcaacatcgccaaggacccccgggtgtccatgagaagaagaagtggcaccctggtgattgacttccgcagcggcggccggcctgaggagtatgaaggagagtaccagtgctttgccaggaacaagtttggaacagccctgagcaaccgcatccggctgcaggtgtccaagagccccctgtggcccaaggagaacctggaccctgtggtggtgcaggagggcgcccccctgaccctgcagtgcaaccccccacctggcctgcccagccctgtgatcttctggatgagcagctccatggagcccatcacccaggacaagagggtgtcccagggccacaacggggacctgtacttcagcaatgtgatgctgcaggacatgcagacagactacagctgcaatgcccgcttccacttcacccacaccatccagcagaagaaccccttcaccctgaaggtgctgaccacccggggcgtggccgagaggacccccagcttcatgtacccccagggcacagccagcagccagatggtgctgcggggcatggacctgctgctggagtgcatcgccagcggcgtgcccaccccagacatcgcctggtacaagaagggcggggacctgcccagcgacaaggccaagtttgagaacttcaacaaggccctgcgcatcaccaacgtgtctgaagaagattctggagagtacttctgcctggccagcaacaagatgggcagcatccgccacaccatctctgtgcgggtgaaggccgccccctactggctggatgagcccaagaacctgatcctggcccctggagaagatggccgcctggtgtgccgggccaatggaaaccccaagcccaccgtgcagtggatggtgaatggagagcccctgcagagcgccccacccaaccccaaccgggaggtggccggggacaccatcatcttccgggacacccagatcagcagcagagctgtgtaccagtgcaacaccagcaatgagcacggctacctgctggccaatgcctttgtgtctgtgctggatgtgccccccaggatgctgagccccaggaaccagctgatccgggtcatcctgtacaacagaacccggctggactgccccttcttcggcagccccatccccaccctgcgctggttcaagaatggccagggcagcaacctggatggcggcaactaccacgtgtatgaaaatggcagcctggagatcaagatgatcaggaaggaggaccagggcatctacacctgtgtggccaccaacatcctgggcaaggccgagaaccaggtgcggctggaggtgaaggaccccacccgcatctacaggatgcctgaggaccaggtggcccggcggggcaccaccgtgcagctggagtgccgggtgaagcatgaccccagcctgaagctgactgtgtcctggctgaaggatgatgagcccctgtacatcggcaacaggatgaagaaggaggatgacagcctgaccatcttcggcgtggccgagcgggaccagggcagctacacctgtgtggccagcacagagctggaccaggacctggccaaggcctacctgactgtgctggccgaccaggccacccccaccaaccggctggccgccctgcccaagggccgcccagaccggccccgggacctggagctgacagacctggccgagaggtctgtgcggctgacctggatccctggagatgccaacaacagccccatcacagattatgtggtgcagtttgaggaggaccagttccagcccggggtgtggcatgaccacagcaagtacccaggctctgtgaacagcgctgtgctgcggctgagcccctacgtgaactaccagttccgggtgattgccatcaatgaggtgggcagcagccaccccagcctgcccagcgagcgctaccgcaccagcggggcccctcctgagagcaaccctggagatgtgaagggggagggcaccaggaagaacaacatggagatcacctggacccccatgaatgccaccagcgccttcggccccaacctgcgctacatcgtgaagtggaggagaagagagacccgggaggcctggaacaacgtgacagtgtggggcagccgctacgtggtgggccagacccctgtgtatgtgccctatgagatccgggtgcaggccgagaatgactttggaaaaggacctgagcctgagagcgtgattggctacagcggggaggacctgcccagcgccccccggcgcttccgggtgcggcagcccaacctggagaccatcaacctggagtgggaccaccctgagcaccccaacggcatcatgattggctacaccctgaagtatgtggccttcaacggcaccaaggtgggcaagcagatcgtggagaacttcagccccaaccagaccaagttcaccgtgcagaggacagatcctgtgagccgctaccgcttcaccctgagcgcccggacccaggtgggcagcggggaggccgtgacagaggagagccctgcccccccaaatgaggccacccccacagctgccccacccaccctgccccccaccaccgtgggcgccaccggggctgtgagcagcacagatgccacagccatcgccgccaccacagaggccaccaccgtgcccatcatccccaccgtggcccccaccaccatcgccaccaccaccaccgtggccaccaccaccaccaccacagctgctgccaccaccaccacagagagcccccccaccaccaccagcggcaccaagatccacgagagcgccccagatgagcagagcatctggaatgtgacagtgctgcccaacagcaagtgggccaacatcacctggaagcacaactttggacctggaacagactttgtggtggagtacatcgacagcaaccacaccaagaagacagtgcctgtgaaggcccaggcccagcccatccagctgacagacctgtacccaggcatgacctacaccctgcgggtgtacagccgggacaatgaaggcatcagcagcaccgtcatcaccttcatgaccagcacagcctacaccaacaaccaggccgacatcgccacccagggctggttcatcggcctgatgtgtgccatcgccctgctggtgctgatcctgctgattgtgtgcttcatcaagaggagccggggcggcaagtaccctgtgcgggagaagaaggatgtgcccctgggccctgaggaccccaaggaggaggatggcagctttgactacagtgatgaggacaacaagcccctgcagggcagccagaccagcctggatggcaccatcaagcagcaggagagtgatgacagcctggtggactatggagagggcggggagggccagttcaatgaagatggcagcttcatcggccagtacacagtgaagaaggacaaggaggagacagagggcaatgaatcttctgaggccaccagccctgtgaatgccatctacagcctggcctag

SEQ ID NO: 21618 - DNA, 3723 bp, Artificial Sequence
  derived and/or modified sequence
atggcccggcagcccccccccccctgggtgcacgccgccttcctgctctgcctgctgtccctgggcggagccatagagattcctatggacccgtcgattcagaacgaattgactcagcctcctaccatcactaagcagtccgctaaggatcacatagtcgatccaagagacaatattctgattgagtgtgaggctaagggaaatcctgcaccatcctttcactggacacgcaacagccgctttttcaatatcgcaaaggatccaagggtgtcaatgcggagaagatccggaaccttggtgatagattttcgctccggagggagaccagaggaatatgaaggcgaataccagtgtttcgcgaggaacaagtttggcacagccctctctaatagaattcgccttcaggtgtccaaaagcccgctctggcccaaggaaaacctggaccctgttgtggtccaggagggcgcgcccctgactctgcagtgcaaccctcccccaggtctgcccagtcccgtgattttctggatgtcctcaagcatggagcccatcacccaggacaaacgtgtgtctcagggccacaacggcgacctatatttttctaacgtcatgctgcaggatatgcagactgactattcctgcaacgcgcggttccactttactcacactattcaacaaaagaacccttttactctcaaagtgcttactacacggggtgtagctgagcgcaccccctcattcatgtatccgcagggcactgcctcctctcagatggtcctgagagggatggacttgctactggagtgcattgcttccggcgtccctaccccagacatcgcctggtacaaaaagggtggtgatctcccgagcgacaaggccaaatttgaaaacttcaacaaggccctccgcatcacaaatgttagcgaggaggatagcggcgagtatttttgtttggccagtaacaagatggggtccatcagacataccatcagcgttagagtcaaagctgccccttactggctggacgagcccaagaacctgattttggctcccggggaagatgggcgacttgtctgtcgcgcaaacggcaatcccaaaccgacagtacagtggatggtgaacggagaaccgctacagagtgctcctcctaatccaaatcgtgaagtcgctggggacaccattatctttcgagacacccagataagtagtagggcagtgtatcagtgcaatactagtaatgaacacggatatctccttgcgaatgcctttgtgtccgtgctggacgtgcctccccgtatgctcagtccgagaaaccagctgattcgggtaatactgtataataggacgcgcttagactgtccattctttggctccccaattccaacccttaggtggttcaagaacggtcagggttctaacctggacggaggaaattaccatgtctacgaaaatggaagccttgagataaagatgatccgcaaggaagaccaagggatctatacctgcgttgctacaaatattctgggcaaagctgagaatcaggtcagattagaagtgaaagatccgaccaggatctatcgcatgcccgaagaccaggtcgctcgaagagggaccaccgtgcagttggaatgccgggtcaagcatgacccaagccttaagcttactgtgtcttggttgaaggacgacgagcccctgtatatcggtaatcgtatgaaaaaggaggacgacagcctgactatttttggagtcgcagagagagaccagggctcttatacttgtgtagcgagcacggagctggatcaagatcttgccaaggcttacctgaccgtgctggccgaccaggccacacccactaatcggctagccgccctacccaagggacgccccgatcgtccccgcgatttggaactgacagatctagcagaacggagcgtgagactgacatggatcccaggggatgccaacaactcacctatcacagactacgtcgtccagttcgaagaggaccagtttcaacctggcgtttggcatgaccattccaagtacccgggctccgtgaatagcgccgttctgagactgtctccgtacgtcaactatcagttcagagtgatcgcaattaatgaggtggggtcatcacatcccagcctgccaagtgagcgataccggacaagtggggccccacctgagagcaatcccggagatgtgaaaggtgaaggaacgaggaaaaacaacatggagattacctggacccctatgaatgccacaagcgcttttggtcccaacctccggtacattgttaagtggcggagacgcgaaacccgagaggcctggaataacgtcacagtgtggggcagcagatacgtcgtagggcaaactccggtatacgtcccctacgagataagagtacaggctgagaacgacttcgggaaaggcccagagccagagtccgttattggctacagtggggaagatctacctagtgcgccacgtaggttcagagtgcggcagcccaacctggagaccataaacctcgagtgggaccacccagagcatccaaacggtattatgatcggttatacgttgaagtacgtcgccttcaatggtactaaagtcggcaaacagatcgtggaaaacttctctcctaatcagactaaatttacggttcagcgcaccgatcctgtgtcgcgatatcgatttactctcagcgcacggacacaggtaggatccggggaagctgtaactgaagaatcaccagccccgcctaatgaggccactccaactgcagcccctcccacattacccccaaccaccgtgggtgctactggggcagtttcatccaccgatgccactgccatcgccgccaccacagaggctaccaccgtcccaatcatccccaccgtggccccgaccacgattgctacaacgaccactgtcgcgacaaccacaacgacaactgcggcggctaccaccaccactgagtcccctcccaccaccacttcaggaacaaagatccacgaaagtgcaccagatgagcaatccatctggaacgttaccgtcctgccaaatagtaagtgggcaaacattacgtggaaacacaattttggacccggtacggacttcgttgtggaatatattgacagtaaccataccaaaaagactgtaccagtcaaggcccaggctcagcccatccagctgacggatctctaccccggtatgacttatactctccgtgtatactctcgggataatgaaggtatttctagcacagtgatcactttcatgacaagcacagcttacaccaacaatcaggctgatatcgccactcagggatggttcatcggcctcatgtgcgcaatcgccctgttagtactgattttgttaattgtgtgctttatcaagcgcagccgtgggggaaaatatcctgtgcgcgaaaagaaggacgtaccactcgggcctgaggaccccaaagaggaggacggaagctttgactactcggacgaggacaacaagccactgcaaggttctcagaccagccttgatggaaccatcaaacagcaggaaagcgatgacagtctggtggattatggcgaaggcggcgaagggcaattcaatgaggacgggtcattcatcgggcagtacacggtcaagaaagataaggaggaaaccgaaggcaatgagagtagcgaggccaccagcccagtgaacgcgatttactccctggcttag

SEQ ID NO: 21619 - DNA, 3723 bp, Artificial Sequence
  derived and/or modified sequence
atggcccggcagcccccccccccctgggtgcacgccgccttcctgctatgcctcctgtcactcgggggtgccatcgaaattcccatggaccctagcattcagaacgagctgactcagcctcccaccattactaaacagagcgccaaggaccacatcgtggacccccgtgacaatattctgattgaatgtgaggccaaaggtaaccctgcaccctctttccattggacccgcaactcacggttctttaatattgctaaagatcctcgggtatcaatgagaagaaggagcggtacgctcgtgatcgatttccgctctggtggccggccagaagaatacgagggtgagtatcagtgcttcgccaggaataagttcggcaccgcattgtctaacagaattcgtctccaagtctcaaaatccccactttggcccaaggaaaatcttgaccccgtagtggttcaggagggagcaccgctaacactgcagtgtaacccaccccctggtctgcccagccccgtcatattttggatgtcttccagcatggaacctattacccaggataaacgggtcagccaggggcacaacggcgacctttactttagtaatgtaatgctgcaggatatgcagacggactattcttgcaacgccagatttcacttcacccacaccattcaacagaaaaaccctttcaccctgaaagtgctgacaacccgaggcgttgcagagcggaccccgtcttttatgtatcctcaggggaccgcatcctcccaaatggtgctcagaggcatggacctgctcctggaatgcatagcatctggagtgccaactccagatatcgcgtggtataagaaaggaggcgacttgccaagcgataaggctaagttcgaaaacttcaacaaagcactgagaattactaatgtgtctgaagaggattccggggaatatttctgtctggccagtaataaaatgggatctatcagacataccattagtgtgcgggtcaaagctgccccctactggctggacgagcccaaaaacctcatattggctcctggcgaggacggcaggctggtctgcagggccaatggaaatcctaagccaacagttcagtggatggtgaacggcgagcctctgcagagcgccccacctaatcccaacagagaggtggccggcgatactattattttccgggatacacagatttcatcacgcgctgtgtatcagtgcaacacatccaacgagcacggttacctgctggcaaatgcttttgtgagcgtgctcgacgtgcctccccgcatgctgtcccctagaaaccagttaattcgggtgattttgtataaccgaacaagactggactgcccattctttggatctccaattccgaccctgcggtggtttaagaacggtcagggatcaaacctggacggcggaaattaccatgtgtatgaaaacggctctctggagataaagatgatcaggaaggaagatcaggggatctacacatgcgtggccactaacatcctggggaaagccgagaaccaagtgagattagaagtcaaagacccgactcgcatttatcgaatgcctgaagatcaggtggctaggagggggacgaccgtgcagctggaatgtcgcgtcaagcacgatcctagtctgaaactgacagtgtcttggctgaaggatgatgagcctctgtatattggaaaccgcatgaaaaaagaggacgacagccttacgatttttggtgtcgcggagcgagatcaaggaagctatacttgcgtggcctccaccgagttggaccaagacctcgctaaggcatacctgaccgtcttggcggaccaggctacacccacaaatcgacttgcagccctgcccaagggtcggcctgaccgtcccagggatctggagctaacagacctggcggagcgctcagtccgtttaacctggatccccggagacgctaacaactcacctatcactgattatgtagtccagttcgaggaggatcagtttcagcccggggtgtggcatgaccactccaaatatccaggctctgtcaattccgctgtcttacgcctgagtccatacgtcaactatcagttcagagtgatcgccatcaatgaagtcgggtccagccacccatctctaccatccgaacggtaccgcaccagtggagcgccaccggaaagcaatccaggagacgtaaagggcgaaggaactcgtaagaacaacatggaaatcacttggaccccaatgaatgccacctcagcctttggacctaatttgcggtatattgttaagtggaggcgaagagaaaccagggaagcctggaataatgtgactgtgtgggggtcccgctatgtagtgggtcagactcccgtgtacgtgccttacgaaattcgcgtgcaggccgaaaatgatttcggaaaaggtcctgagcccgaatcggtcattggctactccggagaagacctacctagcgccccgcgcagattccgagtgcgtcagcctaatttggaaacaatcaacctcgagtgggaccatcctgaacaccctaacggcattatgatcggatatacactcaaatacgtggcctttaatggcaccaaggtcggtaaacagatagtagaaaattttagccccaaccagaccaaatttaccgtgcaacgcactgacccggtcagccgataccggttcacgctgtcagcccggacacaggtagggtccggggaggcagtgacagaagagtcccccgctcccccaaacgaagctaccccaacggccgccccgcctaccctcccacctacaacagtgggtgcaaccggagctgtgagctcaactgatgccactgccattgccgccacaaccgaggcgacgaccgtgcccatcatcccgacagtagcaccaactaccatcgcaaccactaccacagtagcgaccactacaaccactactgcggccgcgacaaccaccactgaatctcctcccactaccacttccgggacaaaaattcatgaatccgccccagatgagcagagcatctggaacgtcacagtactgcctaactctaaatgggctaatataacctggaaacacaacttcggccccggcacagatttcgtggtagaatacatagacagtaatcatacgaaaaagactgtccccgtaaaggcccaggcccagcctatccaactaactgatttatatcccgggatgacctacaccctgagggtctacagccgcgataacgagggaatctcgtccacagtgataaccttcatgacttcaacggcatacaccaacaaccaggcagatatcgcaactcaaggctggtttattggattgatgtgtgccatagccctgttggtgctcatactgctgatagtgtgttttattaaaagatcacgcggggggaaatatcctgtccgcgagaaaaaagatgtcccacttggtcctgaggacccgaaggaagaagacggatccttcgactattctgacgaggataacaagcccctacaagggtctcagacatctctggacggcacaatcaagcagcaggagtctgatgattctctggtggattatggggaggggggagaggggcagttcaatgaagacgggagctttatcggccagtatactgtgaagaaggacaaagaggagacggagggtaatgagagctctgaagccaccagccccgtgaatgccatctactcactcgcttag

SEQ ID NO: 21620 - DNA, 10333 bp, Artificial Sequence
  derived and/or modified sequence
gcacgggctggtctctgccctaatgcggcggctggcggcgagaggcgctgcaggggacgcgggggaagtggcggcgccggcagcggacagctcggacagcgcccagggccggagcccgagcccttggaggttgattgacttatgtgcaatttgggacgctggagtttaccttccctccgcagcctggaacagagcctcctctggtgttgcaaggaagaggctgaatgaggcagagaagctgagtgctgtccaggaggcccagttaaagcggctcgaggtgacaagaccccgagtgctggggagcagggagcagggccaggtgccgaggatggccaggcagccaccgccgccctgggtccatgcagccttcctcctctgcctcctcagtcttggcggagccatcgaaattcctatggatccaagcattcagaatgagctgacgcagccgccaaccatcaccaagcagtcagcgaaggatcacatcgtggacccccgtgataacatcctgattgagtgtgaagcaaaagggaaccctgcccccagcttccactggacacgaaacagcagattcttcaacatcgccaaggacccccgggtgtccatgaggaggaggtctgggaccctggtgattgacttccgcagtggcgggcggccggaggaatatgagggggaatatcagtgcttcgcccgcaacaaatttggcacggccctgtccaataggatccgcctgcaggtgtctaaatctcctctgtggcccaaggaaaacctagaccctgtcgtggtccaagagggcgctcctttgacgctccagtgcaaccccccgcctggacttccatccccggtcatcttctggatgagcagctccatggagcccatcacccaagacaaacgtgtctctcagggccataacggagacctatacttctccaacgtgatgctgcaggacatgcagaccgactacagttgtaacgcccgcttccacttcacccacaccatccagcagaagaaccctttcaccctcaaggtcctcaccacccgaggagttgcagaaagaacaccaagcttcatgtatccccagggcaccgcgagcagccagatggtgcttcgtggcatggacctcctgctggaatgcatcgcctccggggtcccaacaccagacatcgcatggtacaagaaaggtggggacctcccatctgataaggccaagtttgagaactttaataaggccctgcgtatcacaaatgtctctgaggaagactccggggagtatttctgcctggcctccaacaagatgggcagcatccggcacacgatctcggtgagagtaaaggctgctccctactggctggacgaacccaagaaccttattctggctcctggcgaggatgggagactggtgtgtcgagccaatggaaaccccaaacccactgtccagtggatggtgaatggggaacctttgcaatcggcaccacctaacccaaaccgtgaggtggccggagacaccatcatcttccgggacacccagatcagcagcagggctgtgtaccagtgcaacacctccaacgagcatggctacctgctggccaacgcctttgtcagtgtgctggatgtgccgcctcggatgctgtcgccccggaaccagctcattcgagtgattctttacaaccggacgcggctggactgccctttctttgggtctcccatccccacactgcgatggtttaagaatgggcaaggaagcaacctggatggtggcaactaccatgtttatgagaacggcagtctggaaattaagatgatccgcaaagaggaccagggcatctacacctgtgtcgccaccaacatcctgggcaaagctgaaaaccaagtccgcctggaggtcaaagaccccaccaggatctaccggatgcccgaggaccaggtggccagaaggggcaccacggtgcagctggagtgtcgggtgaagcacgacccctccctgaaactcaccgtctcctggctgaaggatgacgagccgctctatattggaaacaggatgaagaaggaagacgactccctgaccatctttggggtggcagagcgggaccagggcagttacacgtgtgtcgccagcaccgagctagaccaagacctggccaaggcctacctcaccgtgctagctgatcaggccactccaactaaccgtttggctgccctgcccaaaggacggccagaccggccccgggacctggagctgaccgacctggccgagaggagcgtgcggctgacctggatccccggggatgctaacaacagccccatcacagactacgtcgtccagtttgaagaagaccagttccaacctggggtctggcatgaccattccaagtaccccggcagcgttaactcagccgtcctccggctgtccccgtatgtcaactaccagttccgtgtcattgccatcaacgaggttgggagcagccaccccagcctcccatccgagcgctaccgaaccagtggagcaccccccgagtccaatcctggtgacgtgaagggagaggggaccagaaagaacaacatggagatcacgtggacgcccatgaatgccacctcggcctttggccccaacctgcgctacattgtcaagtggaggcggagagagactcgagaggcctggaacaacgtcacagtgtggggctctcgctacgtggtggggcagaccccagtctacgtgccctatgagatccgagtccaggctgaaaatgacttcgggaagggccctgagccagagtccgtcatcggttactccggagaagatttacccagtgcccctaggcgtttccgagtccggcagcccaacctggagacaatcaacctggaatgggatcatcctgagcatccaaatgggatcatgattggatacactctcaaatatgtggcctttaacgggaccaaagtaggaaagcagatagtggaaaacttctctcccaatcagaccaagttcacggtgcaaagaacggaccccgtgtcacgctaccgctttaccctcagcgccaggacgcaggtgggctctggggaagccgtcacagaggagtcaccagcacccccgaatgaagctactccaaccgcagctcctcccacattgcccccgactaccgtgggtgcgacgggcgctgtgagcagtaccgatgctactgccattgctgccaccaccgaagccacaacagtccccatcatcccaactgtcgcacctaccaccatcgccaccaccaccaccgtcgccacaactactacaaccactgctgccgccaccaccaccacggagagtcctcccaccaccacctccgggactaagatacacgaatccgcccctgatgagcagtccatatggaacgtcacggtgctccccaacagtaaatgggccaacatcacctggaagcacaatttcgggcccggaactgactttgtggttgagtacatcgacagcaaccatacgaaaaaaactgtcccagttaaggcccaggctcagcctatacagctgacagacctctatcccgggatgacatacacgttgcgggtttattcccgggacaacgagggcatcagcagtaccgtcatcacctttatgaccagtacagcttacaccaacaaccaagcggacatcgccacccagggctggttcattgggcttatgtgcgccatcgccctcctggtgctgatcctgctcatcgtctgtttcatcaagaggagtcgcggcggcaagtacccagtacgagaaaagaaggatgttccccttggccctgaagaccccaaggaagaggatggctcatttgactatagtgatgaggacaacaagcccctgcagggcagtcagacatctctggacggcaccatcaagcagcaggagagtgacgacagcctggtggactatggcgagggtggcgagggtcagttcaatgaagacggctccttcatcggccagtacacggtcaaaaaggacaaggaggaaacagagggcaacgaaagctcagaggccacgtcacctgtcaatgctatctactctctggcctaacggagcccacccaggcacagccaccactttgcaagtgggaggaggggagaaggggagacaaaaccactgcagacctaccacgaagccaccaccaccttcagtaacaagggtacgatatgggggtctgccaagctgtgaggaccagtagccaccaagccacccacaagccccctcccaatgaccccccttcagccccgggtgccaccagtgtgggagagctggagccgtggctgagctcagctggagggagcctggccccttgcccggtctcgcagccaccccgagcgttccaccacactgtccgcccttggcctcggcacacgctcaccttttctgttggttacgggacttctcattgtcttaatttcgctttgtgcatcttcccctccagacccaatgtctctgttttcttttccttttgaaaaagagtccctggaaaagaaagaataagtggattctcccccaggagaatcctttttgcaaagataggcaaaaaggattgaatccataccagaacacgtagacaggctgtaatattcaaaccacctctgggccaatgcatttccaaaggatgcctttctcgccatatgcctcccctggcccccagcccctctgcctcggccttgtcagttgctgagctgggcttggctcctttctggaaaatgacagtatttttggcagggagaaggtgcgcaggcctccttgctgctctctggtttggttgggaggtgtgtttacctcttgctcctcattcctcccctgcccttttctctggaatatctaagatgtgagctgcattgactctgaagacgtttgaggaacaggagtgggcactgatagaaaggacttcaacgccagtgactgtgtacctccagcagaagaaaatcaggtgtctggtcttgggggcactgtgctcacttctagagagaagaaaaaggctgggtttggacttcatgcctcctcactggtgaaacccaggatgtagatagagggccacacccaccctgtccagagtagagggcacctgtccacgtggccagggcccatgctgccaccctcgaggagatggaaccctgtgatgcaaaagctttgctggtgtgtttggggcataaggcactgctccccttccatctctagcagatatcatcttctcagccaattctgtaggacactgaggctcttgtttgacatggtgtgtggatggggacttgccccaagactgagcaggtctgccctttcattggggtgtatacatatcaggggaccctgaggtggcaccgtactcagtgttgtgatgcccccacctagggaggactcaatgctctttgtatgccttatgcagcgctgatctgtccctggagttcccaggttcccagctccccccctgcaagccttgaagcctccagcaacgtctatctccaggagagcagggcagcctatgcaagtgttccggcaggaccagaagtggccactcaacacacgtcctcaccagtcaccccaaatggagacactcgcagacctgcagttctcagaccgaaggtgctgccttcatcctccccacctaatgcatttttgaaaccaaaggtacctagcctcagagacagagaaggagagggggagatcttgagtctaagaggaaccctttagctgtttctgcagctgaggtcagtttcaggagggtgaagctgatccccaggaatggatcagctgccatgggcacagcctccgatttgagcctctccggctgccagccagggggcctgggccagaccagggctctgtccttccgtgactttattaaagcaacatttgccacatgtttaagccgcaaaggtattagcaatgcttgcatcattaataatcattcagttgaaggtcaagcccatagacacacactctctgctggtaagaaaccatagcccagaactgagccaataaggttgtttgaacctgagagtgtgtaatggtcatttgggccaagcctcagctagggctgctgcctggacgcctgaggggcagcttatcacagtgcaaggggacagggtaaacagcagggggtggggtgtgagcttggagggcccctcccctggatttcctccaacacctgcttggatactaggcccactgtccctgaagggaatgtcagggaagtgtgcctgtgagctgaattaaaggactggcctttccagaaaacgctttggatctgagcagagtagtcagtttctcagacactcattccatactgcaccgtacatgccagcgtacccattgcaccgaaagcaggcccttagggcaggaagggacgatgagcaagtctgccacaccacctggtgactgggaagggctgcttctctcgtaagggtcttggggagaagtaagcccgcagcctgcctctgcacctcgttccagtgtcctgccaggctctgtactgtcctttgtgtatgaagaaaatgctgttagccctctctcaggctgctgttctgtgggtgctgagagctgccccccatcaccacgccatcacacccctctgagcagaagcaaatctgaggctgaagaattaagttttccccaagcaaggaaggcaggtggtcagagagatcaaacgctgaggcgtggggattgcaggattcaggaggcagcccctttggggaagaggagggtgcattttccatggagcccatgtcagagtccactccagctcagcaggaaagtggaattgcccagtactgcctgccagctgggtctcccaagcaactaccccaagacataccaacagtgaagccaggacagcaccatgccatcggcgctccagtctgtctggctgggaggaaagtgctgggcatcttacagtaactctagaagttcctttgactaggctgcaatcccacctatatgctcagccctaagagctgtggtttcctgtgctctcatttgtccattcattcattcattcattcattcagcaaataatctgaaatccagtctgaactaaggcctgagctgtggataccatggcgcgtgagttagatgtggtccctgccctcatggggctgacagtcctaaaatcaagtgctaggacacagtggccattgagctgggagcattcttccctctaccgcttaagccactgatggctgcgagcttgaagagagggattctgagggagagcttggtccatctggtcaccaaggctgggcgggacagagcagtcaagaaccacggtgtggcttgagaaacagtcctgcttcctgagcctctttgctctgcctcttggggcaagctccttaacctgtctgtatttttatgcctctgtctcccattcagttcctccttgaatacctctttctacagagaggcacgggctcccctgaaggattgtcgaggccagggttcgggaagtacactgccatcggtcaggggacagctgcctcccaccttgcctgggtgatggtgaatgggactcatcttttcctgccttgcttttgaggagatggttgaatttaagctaacaggaaagccaaaccagcaccctcctttgtgctctgagaggttggagacatctggtccaccccattgcccctgcccctggcaagccctgaagtcgggagaggtgaccacaggtctgaaaatcagccagtgccaacattgcttgccctgcaaggtgcaactgagcccacatagcgcattcatagtttccctgaccacagccttgggaagacggtggaaacccgaggatgtgtgggtttcccagctaacggacaagctcccctgccacacccagtgcccacgcatgctcacatacatacagcagaccacaaccctgttgccaagcagtgcttccaagggatagcgatccagattccaacattgtcttggagagggttagtccacatccaagttgcgtgagataagatgcaaagggctctgtgtggatgaggaacgcaccttagaggagtgggaaaggccaccagggttgggccctgtttaggtaattcctgttggcagcacctagagagagcatctgagctgaaggagtgggaaactttgcccaagcaatggcacgggcagcgggctctttctggcgccctgtgctggagcagggccaagtcttagggcatcacaaacagcccatttgatggagggagcagggacatagcacatttttgtctgtctttgtgaggctgctttgctaactctctgaggagaggaagcctctcgggctttccgtcggctggggctagtgccagagaatcccttctcagtggccagcaggttcctgggaggccggcacaaggcaccgctccccactcatgacaccttggtgcagagtgacctcctgcccagtcaccactccggccagccccagccaaacacacaaaagcccatggttgcggttgcatctacaccgttagttggcaaaggatcctgcttgagctctgcgtggtggccaaggagtagcatggaggagggccctgattttaaaaaggaaaaatagagaggcctcaaaacaatgaaacaaagagcttgatatgtcaagaggagaccaaggccctgggaggcataggcaagccgggcagagtcagaccagtgccctcccttgaccatctcctagcattccttaacctagacaggggctaccccatgtgagtccaagccagactttgtggctgtccccagcctgcacagcccaagcccagggaagtgtcctttctttcccttccttactaataatgggccttcctgagacacattcagagaaggatcagagagaaaggagaaccatccaggagagccacaagcgtccaccaaacagtgtctcaggcctcacctgaagctgctgttcctcctatcagcacactagtattaaatgggtgttccataatgaggagaatggaaataggtacaaggcatctagcttaggacagaatcggatttcggcatgtgaaggaatcccagagctgatctcattgaaatgatctatcgtacagacaaggatatgcaaatccacagaagtgaagggatttttgctcaagatcacatagctggtaaactaaggtaaggttagggcttgaacttgggccttctgactccttgtccagtcagtgttctttcatctcaccacagctgcctcctttgaaacagaggtattaagatctgtccttctggttcaccctctcatacctctttactgcgtctcccacatcccccacatgcctcccaaaatgaaagacaaacaggattgtttctgagaccaagatcagtctgtctgtgatcagcctgtgtgtggttcacccagtcatgcaattaagggcagatctgggccagtggaataggatagctgattggtgtttgttactgtgaaccctagaccgtaccccgtagaatggtgtctcttgctttgtaacacatcgggccttcagtgtgctgtattcctcagaagtgagggcatctcggtccattctgcccatggccacagggtgcagagaggcagcagggcccatgcaagctgccaccctgggatttgctgggctggagttcaacagatgtaaagacttcagtgaagcaataaacacaaaactctgggagaagatatccagaattttgtacattactctgtttctttttcaaaaatgaggcagatcagatgcccctgagctgcccctttttttctgattcccaactgcaatgtcctcagtcagtgttgtccctctgcccggctccccagctctttgccaacctcttcacactccccttgagctgagcatcagtcgcctgtgacgtggccaccttctgtcctgctcccactcccgacccatgctggaccccggaggacctcctgccccgcccccaccacacacccatatcccccaccattccaatttgttctttcccgtggggaattttttttcccagcgtctccatcccttcctacatatccacacacacacaaattggtctgatcttttttccattggttaaacatttaactccatgccagaccttgttttaacccctctcacatcatgttctttccttttttgcgagttattttgcattaaccaactttgtcagtgacagatgcgtatctgagggtgtcacacacgaccttcagcagggaagacttctgggccatggagggccgtctaatacatggacttataaactgactgcatgagcaatgaaaaggccaaattattctgaattttttttgaatcactgtaaaaaaactgatttcttttgtatagagaacactaaacgtataataaaagttgttcaaaatgg

SEQ ID NO: 21621 - DNA, 10205 bp, Artificial Sequence
  derived and/or modified sequence
gttgattgacttatgtgcaatttgggacgctggagtttaccttccctccgcagcctggaacagagcctcctctggtgttgcaaggaagaggctgaatgaggcagagaagctgagtgctgtccaggaggcccagttaaagcggctcgaggtgacaagaccccgagtgctggggagcagggagcagggccaggtgccgaggatggccaggcagccaccgccgccctgggtccatgcagccttcctcctctgcctcctcagtcttggcggagccatcgaaattcctatggatccaagcattcagaatgagctgacgcagccgccaaccatcaccaagcagtcagcgaaggatcacatcgtggacccccgtgataacatcctgattgagtgtgaagcaaaagggaaccctgcccccagcttccactggacacgaaacagcagattcttcaacatcgccaaggacccccgggtgtccatgaggaggaggtctgggaccctggtgattgacttccgcagtggcgggcggccggaggaatatgagggggaatatcagtgcttcgcccgcaacaaatttggcacggccctgtccaataggatccgcctgcaggtgtctaaatctcctctgtggcccaaggaaaacctagaccctgtcgtggtccaagagggcgctcctttgacgctccagtgcaaccccccgcctggacttccatccccggtcatcttctggatgagcagctccatggagcccatcacccaagacaaacgtgtctctcagggccataacggagacctatacttctccaacgtgatgctgcaggacatgcagaccgactacagttgtaacgcccgcttccacttcacccacaccatccagcagaagaaccctttcaccctcaaggtcctcaccacccgaggagttgcagaaagaacaccaagcttcatgtatccccagggcaccgcgagcagccagatggtgcttcgtggcatggacctcctgctggaatgcatcgcctccggggtcccaacaccagacatcgcatggtacaagaaaggtggggacctcccatctgataaggccaagtttgagaactttaataaggccctgcgtatcacaaatgtctctgaggaagactccggggagtatttctgcctggcctccaacaagatgggcagcatccggcacacgatctcggtgagagtaaaggctgctccctactggctggacgaacccaagaaccttattctggctcctggcgaggatgggagactggtgtgtcgagccaatggaaaccccaaacccactgtccagtggatggtgaatggggaacctttgcaatcggcaccacctaacccaaaccgtgaggtggccggagacaccatcatcttccgggacacccagatcagcagcagggctgtgtaccagtgcaacacctccaacgagcatggctacctgctggccaacgcctttgtcagtgtgctggatgtgccgcctcggatgctgtcgccccggaaccagctcattcgagtgattctttacaaccggacgcggctggactgccctttctttgggtctcccatccccacactgcgatggtttaagaatgggcaaggaagcaacctggatggtggcaactaccatgtttatgagaacggcagtctggaaattaagatgatccgcaaagaggaccagggcatctacacctgtgtcgccaccaacatcctgggcaaagctgaaaaccaagtccgcctggaggtcaaagaccccaccaggatctaccggatgcccgaggaccaggtggccagaaggggcaccacggtgcagctggagtgtcgggtgaagcacgacccctccctgaaactcaccgtctcctggctgaaggatgacgagccgctctatattggaaacaggatgaagaaggaagacgactccctgaccatctttggggtggcagagcgggaccagggcagttacacgtgtgtcgccagcaccgagctagaccaagacctggccaaggcctacctcaccgtgctagctgatcaggccactccaactaaccgtttggctgccctgcccaaaggacggccagaccggccccgggacctggagctgaccgacctggccgagaggagcgtgcggctgacctggatccccggggatgctaacaacagccccatcacagactacgtcgtccagtttgaagaagaccagttccaacctggggtctggcatgaccattccaagtaccccggcagcgttaactcagccgtcctccggctgtccccgtatgtcaactaccagttccgtgtcattgccatcaacgaggttgggagcagccaccccagcctcccatccgagcgctaccgaaccagtggagcaccccccgagtccaatcctggtgacgtgaagggagaggggaccagaaagaacaacatggagatcacgtggacgcccatgaatgccacctcggcctttggccccaacctgcgctacattgtcaagtggaggcggagagagactcgagaggcctggaacaacgtcacagtgtggggctctcgctacgtggtggggcagaccccagtctacgtgccctatgagatccgagtccaggctgaaaatgacttcgggaagggccctgagccagagtccgtcatcggttactccggagaagatttacccagtgcccctaggcgtttccgagtccggcagcccaacctggagacaatcaacctggaatgggatcatcctgagcatccaaatgggatcatgattggatacactctcaaatatgtggcctttaacgggaccaaagtaggaaagcagatagtggaaaacttctctcccaatcagaccaagttcacggtgcaaagaacggaccccgtgtcacgctaccgctttaccctcagcgccaggacgcaggtgggctctggggaagccgtcacagaggagtcaccagcacccccgaatgaagctactccaaccgcagctcctcccacattgcccccgactaccgtgggtgcgacgggcgctgtgagcagtaccgatgctactgccattgctgccaccaccgaagccacaacagtccccatcatcccaactgtcgcacctaccaccatcgccaccaccaccaccgtcgccacaactactacaaccactgctgccgccaccaccaccacggagagtcctcccaccaccacctccgggactaagatacacgaatccgcccctgatgagcagtccatatggaacgtcacggtgctccccaacagtaaatgggccaacatcacctggaagcacaatttcgggcccggaactgactttgtggttgagtacatcgacagcaaccatacgaaaaaaactgtcccagttaaggcccaggctcagcctatacagctgacagacctctatcccgggatgacatacacgttgcgggtttattcccgggacaacgagggcatcagcagtaccgtcatcacctttatgaccagtacagcttacaccaacaaccaagcggacatcgccacccagggctggttcattgggcttatgtgcgccatcgccctcctggtgctgatcctgctcatcgtctgtttcatcaagaggagtcgcggcggcaagtacccagtacgagaaaagaaggatgttccccttggccctgaagaccccaaggaagaggatggctcatttgactatagtgatgaggacaacaagcccctgcagggcagtcagacatctctggacggcaccatcaagcagcaggagagtgacgacagcctggtggactatggcgagggtggcgagggtcagttcaatgaagacggctccttcatcggccagtacacggtcaaaaaggacaaggaggaaacagagggcaacgaaagctcagaggccacgtcacctgtcaatgctatctactctctggcctaacggagcccacccaggcacagccaccactttgcaagtgggaggaggggagaaggggagacaaaaccactgcagacctaccacgaagccaccaccaccttcagtaacaagggtacgatatgggggtctgccaagctgtgaggaccagtagccaccaagccacccacaagccccctcccaatgaccccccttcagccccgggtgccaccagtgtgggagagctggagccgtggctgagctcagctggagggagcctggccccttgcccggtctcgcagccaccccgagcgttccaccacactgtccgcccttggcctcggcacacgctcaccttttctgttggttacgggacttctcattgtcttaatttcgctttgtgcatcttcccctccagacccaatgtctctgttttcttttccttttgaaaaagagtccctggaaaagaaagaataagtggattctcccccaggagaatcctttttgcaaagataggcaaaaaggattgaatccataccagaacacgtagacaggctgtaatattcaaaccacctctgggccaatgcatttccaaaggatgcctttctcgccatatgcctcccctggcccccagcccctctgcctcggccttgtcagttgctgagctgggcttggctcctttctggaaaatgacagtatttttggcagggagaaggtgcgcaggcctccttgctgctctctggtttggttgggaggtgtgtttacctcttgctcctcattcctcccctgcccttttctctggaatatctaagatgtgagctgcattgactctgaagacgtttgaggaacaggagtgggcactgatagaaaggacttcaacgccagtgactgtgtacctccagcagaagaaaatcaggtgtctggtcttgggggcactgtgctcacttctagagagaagaaaaaggctgggtttggacttcatgcctcctcactggtgaaacccaggatgtagatagagggccacacccaccctgtccagagtagagggcacctgtccacgtggccagggcccatgctgccaccctcgaggagatggaaccctgtgatgcaaaagctttgctggtgtgtttggggcataaggcactgctccccttccatctctagcagatatcatcttctcagccaattctgtaggacactgaggctcttgtttgacatggtgtgtggatggggacttgccccaagactgagcaggtctgccctttcattggggtgtatacatatcaggggaccctgaggtggcaccgtactcagtgttgtgatgcccccacctagggaggactcaatgctctttgtatgccttatgcagcgctgatctgtccctggagttcccaggttcccagctccccccctgcaagccttgaagcctccagcaacgtctatctccaggagagcagggcagcctatgcaagtgttccggcaggaccagaagtggccactcaacacacgtcctcaccagtcaccccaaatggagacactcgcagacctgcagttctcagaccgaaggtgctgccttcatcctccccacctaatgcatttttgaaaccaaaggtacctagcctcagagacagagaaggagagggggagatcttgagtctaagaggaaccctttagctgtttctgcagctgaggtcagtttcaggagggtgaagctgatccccaggaatggatcagctgccatgggcacagcctccgatttgagcctctccggctgccagccagggggcctgggccagaccagggctctgtccttccgtgactttattaaagcaacatttgccacatgtttaagccgcaaaggtattagcaatgcttgcatcattaataatcattcagttgaaggtcaagcccatagacacacactctctgctggtaagaaaccatagcccagaactgagccaataaggttgtttgaacctgagagtgtgtaatggtcatttgggccaagcctcagctagggctgctgcctggacgcctgaggggcagcttatcacagtgcaaggggacagggtaaacagcagggggtggggtgtgagcttggagggcccctcccctggatttcctccaacacctgcttggatactaggcccactgtccctgaagggaatgtcagggaagtgtgcctgtgagctgaattaaaggactggcctttccagaaaacgctttggatctgagcagagtagtcagtttctcagacactcattccatactgcaccgtacatgccagcgtacccattgcaccgaaagcaggcccttagggcaggaagggacgatgagcaagtctgccacaccacctggtgactgggaagggctgcttctctcgtaagggtcttggggagaagtaagcccgcagcctgcctctgcacctcgttccagtgtcctgccaggctctgtactgtcctttgtgtatgaagaaaatgctgttagccctctctcaggctgctgttctgtgggtgctgagagctgccccccatcaccacgccatcacacccctctgagcagaagcaaatctgaggctgaagaattaagttttccccaagcaaggaaggcaggtggtcagagagatcaaacgctgaggcgtggggattgcaggattcaggaggcagcccctttggggaagaggagggtgcattttccatggagcccatgtcagagtccactccagctcagcaggaaagtggaattgcccagtactgcctgccagctgggtctcccaagcaactaccccaagacataccaacagtgaagccaggacagcaccatgccatcggcgctccagtctgtctggctgggaggaaagtgctgggcatcttacagtaactctagaagttcctttgactaggctgcaatcccacctatatgctcagccctaagagctgtggtttcctgtgctctcatttgtccattcattcattcattcattcattcagcaaataatctgaaatccagtctgaactaaggcctgagctgtggataccatggcgcgtgagttagatgtggtccctgccctcatggggctgacagtcctaaaatcaagtgctaggacacagtggccattgagctgggagcattcttccctctaccgcttaagccactgatggctgcgagcttgaagagagggattctgagggagagcttggtccatctggtcaccaaggctgggcgggacagagcagtcaagaaccacggtgtggcttgagaaacagtcctgcttcctgagcctctttgctctgcctcttggggcaagctccttaacctgtctgtatttttatgcctctgtctcccattcagttcctccttgaatacctctttctacagagaggcacgggctcccctgaaggattgtcgaggccagggttcgggaagtacactgccatcggtcaggggacagctgcctcccaccttgcctgggtgatggtgaatgggactcatcttttcctgccttgcttttgaggagatggttgaatttaagctaacaggaaagccaaaccagcaccctcctttgtgctctgagaggttggagacatctggtccaccccattgcccctgcccctggcaagccctgaagtcgggagaggtgaccacaggtctgaaaatcagccagtgccaacattgcttgccctgcaaggtgcaactgagcccacatagcgcattcatagtttccctgaccacagccttgggaagacggtggaaacccgaggatgtgtgggtttcccagctaacggacaagctcccctgccacacccagtgcccacgcatgctcacatacatacagcagaccacaaccctgttgccaagcagtgcttccaagggatagcgatccagattccaacattgtcttggagagggttagtccacatccaagttgcgtgagataagatgcaaagggctctgtgtggatgaggaacgcaccttagaggagtgggaaaggccaccagggttgggccctgtttaggtaattcctgttggcagcacctagagagagcatctgagctgaaggagtgggaaactttgcccaagcaatggcacgggcagcgggctctttctggcgccctgtgctggagcagggccaagtcttagggcatcacaaacagcccatttgatggagggagcagggacatagcacatttttgtctgtctttgtgaggctgctttgctaactctctgaggagaggaagcctctcgggctttccgtcggctggggctagtgccagagaatcccttctcagtggccagcaggttcctgggaggccggcacaaggcaccgctccccactcatgacaccttggtgcagagtgacctcctgcccagtcaccactccggccagccccagccaaacacacaaaagcccatggttgcggttgcatctacaccgttagttggcaaaggatcctgcttgagctctgcgtggtggccaaggagtagcatggaggagggccctgattttaaaaaggaaaaatagagaggcctcaaaacaatgaaacaaagagcttgatatgtcaagaggagaccaaggccctgggaggcataggcaagccgggcagagtcagaccagtgccctcccttgaccatctcctagcattccttaacctagacaggggctaccccatgtgagtccaagccagactttgtggctgtccccagcctgcacagcccaagcccagggaagtgtcctttctttcccttccttactaataatgggccttcctgagacacattcagagaaggatcagagagaaaggagaaccatccaggagagccacaagcgtccaccaaacagtgtctcaggcctcacctgaagctgctgttcctcctatcagcacactagtattaaatgggtgttccataatgaggagaatggaaataggtacaaggcatctagcttaggacagaatcggatttcggcatgtgaaggaatcccagagctgatctcattgaaatgatctatcgtacagacaaggatatgcaaatccacagaagtgaagggatttttgctcaagatcacatagctggtaaactaaggtaaggttagggcttgaacttgggccttctgactccttgtccagtcagtgttctttcatctcaccacagctgcctcctttgaaacagaggtattaagatctgtccttctggttcaccctctcatacctctttactgcgtctcccacatcccccacatgcctcccaaaatgaaagacaaacaggattgtttctgagaccaagatcagtctgtctgtgatcagcctgtgtgtggttcacccagtcatgcaattaagggcagatctgggccagtggaataggatagctgattggtgtttgttactgtgaaccctagaccgtaccccgtagaatggtgtctcttgctttgtaacacatcgggccttcagtgtgctgtattcctcagaagtgagggcatctcggtccattctgcccatggccacagggtgcagagaggcagcagggcccatgcaagctgccaccctgggatttgctgggctggagttcaacagatgtaaagacttcagtgaagcaataaacacaaaactctgggagaagatatccagaattttgtacattactctgtttctttttcaaaaatgaggcagatcagatgcccctgagctgcccctttttttctgattcccaactgcaatgtcctcagtcagtgttgtccctctgcccggctccccagctctttgccaacctcttcacactccccttgagctgagcatcagtcgcctgtgacgtggccaccttctgtcctgctcccactcccgacccatgctggaccccggaggacctcctgccccgcccccaccacacacccatatcccccaccattccaatttgttctttcccgtggggaattttttttcccagcgtctccatcccttcctacatatccacacacacacaaattggtctgatcttttttccattggttaaacatttaactccatgccagaccttgttttaacccctctcacatcatgttctttccttttttgcgagttattttgcattaaccaactttgtcagtgacagatgcgtatctgagggtgtcacacacgaccttcagcagggaagacttctgggccatggagggccgtctaatacatggacttataaactgactgcatgagcaatgaaaaggccaaattattctgaattttttttgaatcactgtaaaaaaactgatttcttttgtatagagaacactaaacgtataataaaagttgttcaaaatgga

SEQ ID NO: 21622 - DNA, 3723 bp, Artificial Sequence
  derived and/or modified sequence
atggccaggcagccaccaccaccctgggtgcatgccgctttcctgctttgccttctcagtttagggggagccattgagatcccgatggacccctcgattcagaacgaactgacccagcccccaaccattacgaagcagagcgcaaaagatcatatcgtggatcccagggacaacattttaatcgaatgtgaggctaaaggaaaccccgcaccgagctttcactggaccaggaacagtcgtttttttaatatagctaaagacccacgcgtgtccatgaggagacggtccggtacactcgtcattgatttccgctctggcggtcgcccagaagagtacgagggggaataccaatgttttgctagaaacaagttcggcacggcactctcaaataggattcggttacaggtttccaagtctcccctttggccgaaagagaacctggacccagtagtagtgcaggaaggcgcacctctcacgcttcagtgcaaccccccaccagggctacctagccctgtgatattctggatgtcttcatctatggagccaatcacacaagacaaacgcgtgagccaggggcataatggggacctgtatttttcaaacgtaatgctgcaggatatgcaaacagattactcctgcaatgcaaggttccatttcacacatacaatccagcagaagaacccattcacgctgaaagtgctcacaaccagaggcgtggccgagcggactccaagtttcatgtacccccagggtacggcttcttcccagatggtactccggggaatggatctgctcctggagtgtatcgcatccggagtgccaacgcccgacatcgcctggtataaaaagggcggagaccttccctccgataaggccaaattcgagaacttcaacaaagcacttcgaattaccaacgttagcgaagaagattccggggagtacttctgtctggcctccaataagatgggctctattcgtcataccataagcgtgagggtgaaggccgcaccttattggctagacgagcctaagaaccttattctggcccctggcgaggacggacggttggtctgccgggcaaacgggaaccctaaaccgaccgtgcagtggatggtcaacggtgaaccactgcaatctgccccacctaaccctaaccgtgaagtcgcgggtgacacgatcattttcagggacacacaaatttcatcccgcgcagtgtaccagtgcaacaccagcaacgaacatggctacctgctcgctaacgccttcgtgagcgtcctggacgtcccccctagaatgcttagcccaaggaatcaactcatcagagtcattctctacaataggactcgtctggattgtcctttcttcggctcgccaataccaaccctgcgttggttcaaaaacgggcagggttccaatctcgacgggggaaactaccacgtgtacgagaacggctctcttgagataaaaatgataagaaaggaagaccagggtatttacacgtgtgtcgcaactaacatcctgggcaaagctgagaatcaggtgcgtctggaggtgaaagatcctactcgcatctacaggatgccagaggatcaagtggcaaggagaggcacaacagtgcaattagagtgtagggtgaagcatgatccaagtctgaaacttactgtgagctggctgaaggatgacgagcctctttatataggcaacaggatgaaaaaggaagatgattcgctgactatctttggcgttgccgagcgcgatcaggggtcgtacacctgcgtagcatcaactgaactggaccaagatctggctaaagcctaccttaccgttctggccgatcaggctacaccaactaacagactggcggctctacctaagggtaggccagataggcccagagacttagagctgaccgatctggctgagagatcagtccggctgacatggattcccggtgacgctaacaattcgccaattaccgactatgtggttcagttcgaggaggatcagtttcagcccggagtttggcacgatcacagcaaataccctggaagtgtcaattccgcggtgctgagactgagtccatatgtaaactatcagtttcgggtaatcgcgataaacgaagtcggcagctcacatccatctcttccatcagaacgctatcgaactagtggagcaccacccgaatctaaccccggagacgtgaagggtgaaggaaccagaaagaataatatggaaatcacatggactcccatgaacgccacatctgccttcggacctaacctgcgctacatcgtcaagtggaggaggcgcgagacccgcgaggcatggaataacgtcactgtgtggggaagccgttacgtcgttgggcagacacctgtctacgtgccctatgagatacgggttcaggctgagaacgattttggtaaggggccagagccagagagcgtgatcggttacagtggggaagatctgccatccgctccgaggcggttccgggtgcggcaacctaatcttgagactatcaatctggaatgggaccacccggaacatccaaacgggatcatgatcggctataccttgaagtatgtggcctttaacggtacaaaggtgggcaagcagatcgttgagaactttagtccaaaccagaccaaattcaccgtgcaacgcaccgatcctgtgagcaggtatcggtttacattgagtgccagaacccaggtggggtcaggtgaagccgtgaccgaagagagccctgccccaccaaatgaagccactcctaccgctgccccaccaactcttccaccaactaccgtcggcgcaaccggcgctgtcagcagcacagatgcaaccgcgatagctgcaactacggaggctactaccgtgcccattattccgacagtggcccctacaaccatcgccaccacaacaaccgttgcaacaaccaccacaacaaccgcggcagcaaccaccactactgaaagccctcctaccacaacatctggaacgaagattcacgagagtgcaccagacgaacaaagtatctggaacgttaccgtactgccaaacagtaagtgggccaacatcacttggaaacacaatttcggtcctggtacggacttcgtggtggagtatatcgattcgaaccacacgaagaaaaccgtgccagtgaaagcacaagcgcaacccatacagctcacagatctgtaccctggcatgacatatacactgcgcgtgtattcacgagacaacgaaggcatatctagtactgtgattaccttcatgacatctaccgcctacaccaataaccaggccgacatagctacacagggatggttcataggacttatgtgtgcgatcgctttactcgtactgatacttctgatcgtatgcttcatcaagcggtcccgaggcggaaaatacccagttcgggagaagaaggacgtccccctcggacccgaggaccctaaagaggaggatggctcattcgactactctgacgaagataataagccactccagggctcccaaacatctctggacggcacgatcaagcagcaagaaagcgatgattcccttgtggattacggtgaaggaggcgaaggccagttcaatgaagacggatccttcatcggacagtatacagtgaaaaaggacaaagaggagacagagggtaacgagtcctccgaagccaccagccccgtcaacgctatttacagtctggcttag

SEQ ID NO: 21623 - DNA, 3723 bp, Artificial Sequence
  derived and/or modified sequence
atggcaaggcagcctccccctccatgggtccacgcagccttcttgctgtgtttactctccctaggtggtgctatcgaaatccccatggaccccagcatacagaacgaactaacccagcctcccactatcacaaagcaaagcgcaaaagatcacatagtggacccaagggataacatcctgatcgaatgtgaagctaagggaaatcctgctcccagcttccactggacgagaaatagtaggttctttaacatagcgaaggacccacgggtgagcatgcgcaggcgatcaggaactctggtgatcgactttaggtccggtggtcgcccagaggagtatgaaggggaataccagtgctttgctaggaataaattcggcacagccctcagtaaccgcattcggttacaagtgagcaagtccccactctggcctaaggagaatttagatccagtggtcgtacaggaaggtgcgcctcttactctccagtgtaatccaccgcctgggcttccatcacccgtcattttttggatgagctcttcaatggagccgatcacacaggacaaacgagtcagtcagggtcataacggagatctgtacttttcaaatgtgatgctgcaggatatgcagacagattattcatgcaatgcaagattccacttcacccataccatccaacagaagaatcccttcacactaaaggttctgacaactagaggtgtcgccgaacgaacaccgtcctttatgtatccccagggcactgcatcctctcagatggtactaaggggcatggatcttctgcttgaatgtatcgcctctggcgtgcccacccctgacattgcatggtacaaaaaggggggtgacctccccagcgacaaggcgaagttcgaaaattttaataaagcccttagaattaccaacgtttctgaagaagattctggagaatacttttgcttggcctcaaacaaaatggggagtattcgacacaccatttccgtgcgagtcaaagctgcgccttattggctcgatgaacccaagaacctaatattggcccctggggaggatggcagactggtgtgtagggccaacggcaaccctaagcctaccgtgcagtggatggtcaacggagagcctctccagtctgccccaccaaaccctaaccgggaggtggctggggataccattatatttcgggacacgcagatttcatccagggcagtgtaccagtgcaacacctcaaacgagcatggataccttctcgctaacgcctttgtctcagtgctggacgtgccccctagaatgctgtctcccaggaaccagttaatcagggtgatactttataacagaactaggctggattgtccatttttcggttccccaattcccacgctacgctggtttaaaaatggccaaggatcaaacctcgacggaggcaactatcacgtgtatgaaaatgggtcacttgagatcaagatgattcgcaaagaggatcagggaatctacacatgtgttgcaacaaatatcctcggcaaggccgagaatcaggtaagacttgaggtcaaggatccaacccggatttaccgaatgccggaggatcaggttgccagaagggggacaacagtccagcttgagtgcagagttaagcatgatccctccttgaagctgacagtgtcttggctcaaggacgatgagcccctctacattggtaatagaatgaaaaaggaagacgatagcctcactatcttcggagtggccgaaagggaccaggggagctacacctgtgttgcaagtactgagctggaccaggacttggccaaagcgtacctcacagtactcgcggaccaggctacgccaaccaacagactcgccgcactccccaaaggcagacccgaccggccaagagacctggagctgactgacttggcagaacgaagcgtgcggcttacttggattccaggcgacgccaacaattctcccattactgattatgtggttcagttcgaagaggaccagtttcagccaggggtatggcatgatcactccaaataccctggtagcgtgaattctgcagtgctgagactttctccctacgtgaactaccaatttcgcgtcatcgctatcaatgaagtcggctcctctcacccttcccttccatctgagagataccggacaagcggtgctccaccggagagtaaccctggcgatgtgaaaggagaggggactaggaagaataacatggagatcacttggactcctatgaacgctacttccgctttcggaccaaatcttcgctatatagtgaaatggcgcagaagggagacacgggaggcatggaataacgtgacggtgtggggtagccgatacgtggtggggcagacccccgtttatgtcccttacgagattcgggtccaggccgagaatgattttggtaaaggcccagagcctgagtccgtcatcgggtactccggagaggacttgccttctgccccaaggagattcagggtacggcagcctaacttagagaccataaatctggaatgggaccatccagagcaccctaatggaatcatgatcggatataccctcaagtatgtggccttcaacggtactaaagttggtaaacagattgttgagaacttctcccctaatcagaccaagtttaccgtacagcggactgatccagtgtctaggtaccgtttcaccctctcagctcggacccaggttggttccggtgaggcagtgacagaggagagcccggcaccaccaaatgaagctacccccaccgcggctccacccaccctgcccccaactaccgttggagccactggagccgtaagctctactgatgccacggccatcgccgcaaccacagaagccacgactgtgcccatcatcccaacggttgccccaacgacaatcgcaactacgacgactgttgccacaactaccactaccaccgcggctgcgactactactaccgaaagtccccctaccactacatcggggactaaaatccacgagtcggcacctgatgagcagagcatctggaacgtgaccgtgctgcctaacagtaagtgggccaatattacttggaaacacaactttggccctgggaccgattttgtggttgagtacatcgatagtaaccacacaaagaaaaccgtgccggtgaaagctcaggctcaacccatccagttgacagacctataccccggaatgacctacacactccgcgtctattcccgggataatgagggcataagcagtaccgttataactttcatgactagcactgcttatactaacaaccaggcagacattgctactcaggggtggtttatcgggctcatgtgtgccattgcgctactggtactcattttgctaatagtttgcttcatcaagagaagcaggggaggcaaatatcccgtacgcgagaaaaaggatgtgcctctgggacccgaagaccccaaggaagaggacgggagtttcgattattcagacgaggacaataagcccttacagggatctcagacaagcttggacgggacgatcaaacagcaagaatccgatgattctctggtggactatggcgaaggcggagagggccagttcaacgaagatggtagcttcattggacaatacacagtcaagaaagataaggaggagaccgaggggaacgagtctagtgaggccacttcccccgtgaacgcaatctattcactcgcttag

SEQ ID NO: 21624 - protein, 619 aa, Artificial Sequence
  derived and/or modified sequence
MARQPPPPWVHAAFLLCLLSLGGAIEIPMDPSIQNELTQPPTITKQSAKDHIVDPRDNILIECEAKGNPAPSFHWTRNSRFFNIAKDPRVSMRRRSGTLVIDFRSGGRPEEYEGEYQCFARNKFGTALSNRIRLQVSKSPLWPKENLDPVVVQEGAPLTLQCNPPPGLPSPVIFWMSSSMEPITQDKRVSQGHNGDLYFSNVMLQDMQTDYSCNARFHFTHTIQQKNPFTLKVLTTRGVAERTPSFMYPQGTASSQMVLRGMDLLLECIASGVPTPDIAWYKKGGDLPSDKAKFENFNKALRITNVSEEDSGEYFCLASNKMGSIRHTISVRVKAAPYWLDEPKNLILAPGEDGRLVCRANGNPKPTVQWMVNGEPLQSAPPNPNREVAGDTIIFRDTQISSRAVYQCNTSNEHGYLLANAFVSVLDVPPRMLSPRNQLIRVILYNRTRLDCPFFGSPIPTLRWFKNGQGSNLDGGNYHVYENGSLEIKMIRKEDQGIYTCVATNILGKAENQVRLEVKDPTRIYRMPEDQVARRGTTVQLECRVKHDPSLKLTVSWLKDDEPLYIGNRMKKEDDSLTIFGVAERDQGSYTCVASTELDQDLAKAYLTVLGNCPCSPWH

SEQ ID NO: 21625 - DNA, 1860 bp, Artificial Sequence
  derived and/or modified sequence
atggccagacagcccccccccccctgggtgcacgccgccttcctgctgtgcctgctgagcctgggcggcgccatcgagatccccatggaccccagcatccagaacgagctgacccagccccccaccatcaccaagcagagcgccaaggaccacatcgtggaccccagagacaacatcctgatcgagtgcgaggccaagggcaaccccgcccccagcttccactggaccagaaacagcagattcttcaacatcgccaaggaccccagagtgagcatgagaagaagaagcggcaccctggtgatcgacttcagaagcggcggcagacccgaggagtacgagggcgagtaccagtgcttcgccagaaacaagttcggcaccgccctgagcaacagaatcagactgcaggtgagcaagagccccctgtggcccaaggagaacctggaccccgtggtggtgcaggagggcgcccccctgaccctgcagtgcaaccccccccccggcctgcccagccccgtgatcttctggatgagcagcagcatggagcccatcacccaggacaagagagtgagccagggccacaacggcgacctgtacttcagcaacgtgatgctgcaggacatgcagaccgactacagctgcaacgccagattccacttcacccacaccatccagcagaagaaccccttcaccctgaaggtgctgaccaccagaggcgtggccgagagaacccccagcttcatgtacccccagggcaccgccagcagccagatggtgctgagaggcatggacctgctgctggagtgcatcgccagcggcgtgcccacccccgacatcgcctggtacaagaagggcggcgacctgcccagcgacaaggccaagttcgagaacttcaacaaggccctgagaatcaccaacgtgagcgaggaggacagcggcgagtacttctgcctggccagcaacaagatgggcagcatcagacacaccatcagcgtgagagtgaaggccgccccctactggctggacgagcccaagaacctgatcctggcccccggcgaggacggcagactggtgtgcagagccaacggcaaccccaagcccaccgtgcagtggatggtgaacggcgagcccctgcagagcgccccccccaaccccaacagagaggtggccggcgacaccatcatcttcagagacacccagatcagcagcagagccgtgtaccagtgcaacaccagcaacgagcacggctacctgctggccaacgccttcgtgagcgtgctggacgtgccccccagaatgctgagccccagaaaccagctgatcagagtgatcctgtacaacagaaccagactggactgccccttcttcggcagccccatccccaccctgagatggttcaagaacggccagggcagcaacctggacggcggcaactaccacgtgtacgagaacggcagcctggagatcaagatgatcagaaaggaggaccagggcatctacacctgcgtggccaccaacatcctgggcaaggccgagaaccaggtgagactggaggtgaaggaccccaccagaatctacagaatgcccgaggaccaggtggccagaagaggcaccaccgtgcagctggagtgcagagtgaagcacgaccccagcctgaagctgaccgtgagctggctgaaggacgacgagcccctgtacatcggcaacagaatgaagaaggaggacgacagcctgaccatcttcggcgtggccgagagagaccagggcagctacacctgcgtggccagcaccgagctggaccaggacctggccaaggcctacctgaccgtgctgggcaactgcccctgcagcccctggcactag

SEQ ID NO: 21626 - DNA, 909 bp, Artificial Sequence
  derived and/or modified sequence
atggccagacagcccccccccccctgggtgcacgccgccttcctgctgtgcctgctgagcctgggcggcgccatcgagatccccatggaccccagcatccagaacgagctgacccagccccccaccatcaccaagcagagcgccaaggaccacatcgtggaccccagagacaacatcctgatcgagtgcgaggccaagggcaaccccgcccccagcttccactggaccagaaacagcagattcttcaacatcgccaaggaccccagagtgagcatgagaagaagaagcggcaccctggtgatcgacttcagaagcggcggcagacccgaggagtacgagggcgagtaccagtgcttcgccagaaacaagttcggcaccgccctgagcaacagaatcagactgcaggtgagcaagagccccctgtggcccaaggagaacctggaccccgtggtggtgcaggagggcgcccccctgaccctgcagtgcaaccccccccccggcctgcccagccccgtgatcttctggatgagcagcagcatggagcccatcacccaggacaagagagtgagccagggccacaacggcgacctgtacttcagcaacgtgatgctgcaggacatgcagaccgactacagctgcaacgccagattccacttcacccacaccatccagcagaagaaccccttcaccctgaaggtgctgaccaccagaggcgtggccgagagaacccccagcttcatgtacccccagggcaccgccagcagccagatggtgctgagaggcatggacctgctgctggagtgcatcgccagcggcgtgcccacccccgacatcgcctggtacaagaagggcggcgacctgcccagcgacaaggccaagttcgagaacttcaacaaggccctgagatag

SEQ ID NO: 21627 - DNA, 390 bp, Artificial Sequence
  derived and/or modified sequence
atggccagacagcccccccccccctgggtgcacgccgccttcctgctgtgcctgctgagcctgggcggcgccatcgagatccccatggaccccagcatccagaacgagctgacccagccccccaccatcaccaagcagagcgccaaggaccacatcgtggaccccagagacaacatcctgatcgagtgcgaggccaagggcaaccccgcccccagcttccactggaccagaaacagcagattcttcaacatcgccaaggaccccagagtgagcatgagaagaagaagcggcaccctggtgatcgacttcagaagcggcggcagacccgaggagtacgagggcgagtaccagtgcttcgccagaaacaagttcggcaccgccctgagctag

SEQ ID NO: 21628 - DNA, 1860 bp, Artificial Sequence
  derived and/or modified sequence
atggccaggcagcccccccctccgtgggtgcacgcggcatttctcctctgtctcttgagcttgggcggggcaatcgagattcctatggacccctccatccaaaacgaactgacccagcctccaacaattactaaacagagtgctaaggaccatatagtggatccacgtgataatatcctgattgagtgcgaggcaaaaggtaacccagccccctcttttcactggactaggaatagccgattctttaacatcgcaaaggatccacgagtgtctatgcgtcgcaggtcaggtactctagtgatagactttcgttccggcggcagacctgaagagtatgaaggggagtatcagtgtttcgcacggaacaaatttggaacggctttatctaacagaatccgtctgcaagtttccaaaagtcccttgtggccaaaagaaaatctcgacccagtggttgttcaggaaggggctcccttaactctgcagtgcaacccgcccccagggctgccgtcccccgtgattttctggatgtccagctccatggagccgatcacgcaagacaaacgtgtaagccagggtcacaatggagatctatacttctcaaatgtcatgctgcaggatatgcagacagactattcttgcaatgcccgctttcactttacccacactatacaacagaaaaatccttttacccttaaagtgctgaccaccagaggggtggcagaacgcacgcctagcttcatgtatccccagggaaccgctagctctcagatggtgctgcgtggcatggatctgttgttggagtgtattgcatcaggcgtgcccacgcctgacattgcttggtataagaaggggggcgatctgccaagcgacaaagcaaaattcgaaaattttaacaaggccttgcgaattacgaacgtaagcgaagaggattccggtgagtatttttgcctggcaagcaataaaatgggttccattcgacacaccatcagtgtacgggttaaagcagctccttattggcttgacgaacccaaaaacctgatcctcgctcccggcgaggacggaaggctggtatgtcgagccaatggcaaccctaaacccaccgtgcagtggatggtgaatggtgagcctctgcagtccgcccccccaaatcccaatagggaagtggccggcgacaccatcattttccgcgacacccagataagcagtcgggcagtgtatcagtgtaatacaagtaatgagcatggctatctgctggctaatgcttttgtgtctgttctggacgttccgcccagaatgctgagccctcgcaatcagttgatcagagttatcctctacaaccggactcgcttggactgtccattctttggttcaccaattcctactctccgctggttcaaaaatggacaggggagtaatctcgatgggggcaactatcacgtgtacgagaatggtagtctggagattaaaatgatcagaaaggaagaccagggtatttacacatgtgtggcgactaacatcttggggaaggccgagaaccaagtacgcctcgaagttaaggaccctaccagaatctatcggatgcctgaggaccaagttgcccgcagaggtacaaccgtgcaactggaatgcagagtgaaacacgacccctcactcaagttgacagtctcttggttgaaggacgatgaaccactgtacataggcaatcgtatgaaaaaggaggacgacagtctgactatcttcggtgtcgcagagagagaccaaggatcatacacctgcgtggcgtccactgagctggaccaggatctggcgaaggcctacctcactgttctcggtaattgcccctgtagtccttggcactag

SEQ ID NO: 21629 - DNA, 909 bp, Artificial Sequence
  derived and/or modified sequence
atggcccgacagcccccacccccctgggtgcacgccgcctttctgctctgtctgctgtcattgggcggagcgatcgaaatccccatggaccccagcattcaaaacgagctgactcagcctccaacgatcacaaaacaatccgcgaaagatcatattgttgatcctagagacaacattttgatcgagtgcgaggctaaagggaacccagcacccagcttccactggacaaggaatagcaggtttttcaatatagctaaagatcctcgcgtgtctatgcgacgcaggtccggcacgctcgtaatcgactttcgtagcggtggtcggccagaagaatatgagggcgagtaccagtgttttgctcgcaacaaatttggtaccgccctatcgaatcgaatcagactgcaggtctccaaatcacctttgtggcctaaggagaatcttgatcctgtggtcgtgcaggaaggggctcccctgaccctccagtgcaaccccccaccaggcctccccagtcctgtgatattctggatgtcctcgtctatggagcccatcactcaggataagagggtgtctcagggacataatggtgatctatatttcagtaatgttatgctgcaagatatgcagaccgactatagctgtaacgccagatttcacttcacacataccatccagcaaaaaaatcccttcacattgaaagtcctgactactcggggcgtggcagaaagaactccatccttcatgtacccacagggcacggcctcttcccaaatggtgctccgcggaatggaccttttgcttgaatgcattgcctccggcgtacctacaccagatatcgcatggtataaaaaaggaggggatctgccttcagacaaagctaaattcgagaattttaacaaggcattgcgttag

SEQ ID NO: 21630 - DNA, 390 bp, Artificial Sequence
  derived and/or modified sequence
atggctaggcagcctccccctccttgggtccatgcggcatttctcctgtgtctcttaagtctagggggcgctattgaaatccctatggacccgtctatacagaatgaacttacacagccaccgacaattacgaaacaatcagccaaagaccatattgtggaccctcgtgacaatattctcattgaatgtgaagccaagggaaaccccgccccctcctttcactggactcggaattcccgcttctttaacatcgccaaggatcccagggtgagtatgcggcgcagatccgggaccctcgtgatcgactttagaagcggcggaagacccgaggagtacgaaggcgaatatcagtgcttcgcccggaacaagtttggtactgcactgagctag

SEQ ID NO: 21631 - DNA, 1860 bp, Artificial Sequence
  derived and/or modified sequence
atggcccggcagcccccaccaccctgggtgcacgccgccttcctgctgtgcctgctgagcctgggcggggccatcgagatccccatggaccccagcatccagaatgagctgacccagccccccaccatcaccaagcagagcgccaaggaccacatcgtggacccccgggacaacatcctgattgaatgtgaggccaagggcaacccagcccccagcttccactggaccaggaacagccgcttcttcaacatcgccaaggacccccgggtgtccatgagaagaagaagtggcaccctggtgattgacttccgcagcggcggccggcctgaggagtatgaaggagagtaccagtgctttgccaggaacaagtttggaacagccctgagcaaccgcatccggctgcaggtgtccaagagccccctgtggcccaaggagaacctggaccctgtggtggtgcaggagggcgcccccctgaccctgcagtgcaaccccccacctggcctgcccagccctgtgatcttctggatgagcagctccatggagcccatcacccaggacaagagggtgtcccagggccacaacggggacctgtacttcagcaatgtgatgctgcaggacatgcagacagactacagctgcaatgcccgcttccacttcacccacaccatccagcagaagaaccccttcaccctgaaggtgctgaccacccggggcgtggccgagaggacccccagcttcatgtacccccagggcacagccagcagccagatggtgctgcggggcatggacctgctgctggagtgcatcgccagcggcgtgcccaccccagacatcgcctggtacaagaagggcggggacctgcccagcgacaaggccaagtttgagaacttcaacaaggccctgcgcatcaccaacgtgtctgaagaagattctggagagtacttctgcctggccagcaacaagatgggcagcatccgccacaccatctctgtgcgggtgaaggccgccccctactggctggatgagcccaagaacctgatcctggcccctggagaagatggccgcctggtgtgccgggccaatggaaaccccaagcccaccgtgcagtggatggtgaatggagagcccctgcagagcgccccacccaaccccaaccgggaggtggccggggacaccatcatcttccgggacacccagatcagcagcagagctgtgtaccagtgcaacaccagcaatgagcacggctacctgctggccaatgcctttgtgtctgtgctggatgtgccccccaggatgctgagccccaggaaccagctgatccgggtcatcctgtacaacagaacccggctggactgccccttcttcggcagccccatccccaccctgcgctggttcaagaatggccagggcagcaacctggatggcggcaactaccacgtgtatgaaaatggcagcctggagatcaagatgatcaggaaggaggaccagggcatctacacctgtgtggccaccaacatcctgggcaaggccgagaaccaggtgcggctggaggtgaaggaccccacccgcatctacaggatgcctgaggaccaggtggcccggcggggcaccaccgtgcagctggagtgccgggtgaagcatgaccccagcctgaagctgactgtgtcctggctgaaggatgatgagcccctgtacatcggcaacaggatgaagaaggaggatgacagcctgaccatcttcggcgtggccgagcgggaccagggcagctacacctgtgtggccagcacagagctggaccaggacctggccaaggcctacctgactgtgctgggcaactgcccctgcagcccctggcactag

SEQ ID NO: 21632 - DNA, 909 bp, Artificial Sequence
  derived and/or modified sequence
atggcccggcagcccccaccaccctgggtgcacgccgccttcctgctgtgcctgctgagcctgggcggggccatcgagatccccatggaccccagcatccagaatgagctgacccagccccccaccatcaccaagcagagcgccaaggaccacatcgtggacccccgggacaacatcctgattgaatgtgaggccaagggcaacccagcccccagcttccactggaccaggaacagccgcttcttcaacatcgccaaggacccccgggtgtccatgagaagaagaagtggcaccctggtgattgacttccgcagcggcggccggcctgaggagtatgaaggagagtaccagtgctttgccaggaacaagtttggaacagccctgagcaaccgcatccggctgcaggtgtccaagagccccctgtggcccaaggagaacctggaccctgtggtggtgcaggagggcgcccccctgaccctgcagtgcaaccccccacctggcctgcccagccctgtgatcttctggatgagcagctccatggagcccatcacccaggacaagagggtgtcccagggccacaacggggacctgtacttcagcaatgtgatgctgcaggacatgcagacagactacagctgcaatgcccgcttccacttcacccacaccatccagcagaagaaccccttcaccctgaaggtgctgaccacccggggcgtggccgagaggacccccagcttcatgtacccccagggcacagccagcagccagatggtgctgcggggcatggacctgctgctggagtgcatcgccagcggcgtgcccaccccagacatcgcctggtacaagaagggcggggacctgcccagcgacaaggccaagtttgagaacttcaacaaggccctgaggtag

SEQ ID NO: 21633 - DNA, 390 bp, Artificial Sequence
  derived and/or modified sequence
atggcccggcagcccccaccaccctgggtgcacgccgccttcctgctgtgcctgctgagcctgggcggggccatcgagatccccatggaccccagcatccagaatgagctgacccagccccccaccatcaccaagcagagcgccaaggaccacatcgtggacccccgggacaacatcctgattgaatgtgaggccaagggcaacccagcccccagcttccactggaccaggaacagccgcttcttcaacatcgccaaggacccccgggtgtccatgagaagaagaagtggcaccctggtgattgacttccgcagcggcggccggcctgaggagtatgaaggagagtaccagtgctttgccaggaacaagtttggaacagccctgtcctag

SEQ ID NO: 21634 - DNA, 1860 bp, Artificial Sequence
  derived and/or modified sequence
atggcccggcagcccccccccccctgggtgcacgccgccttcctgctctgtttgcttagtctcggtggcgcaatcgaaattccaatggacccatccatccagaatgaactgacacagccccccaccatcaccaaacagagcgctaaggatcatattgtggacccaagagacaacatattgatagagtgtgaagcaaagggcaatccggccccttccttccattggactcgaaactctagattctttaatatcgcaaaggaccccagagttagcatgcgcaggagaagcggtaccctggtcatagatttccgctcgggaggcagacccgaagaatatgagggggagtaccagtgttttgcccgaaacaaattcgggactgcattgtccaaccgcatccgactacaggtctctaaatcacccctgtggccaaaagagaaccttgaccccgtggtggttcaagaaggggctcctttgacccttcagtgcaatcccccacccggtctgccttctcctgtgattttctggatgagttctagcatggaacccatcacccaggacaaacgggtgagccaggggcacaacggagacctatatttttctaacgtgatgctgcaggatatgcagaccgattactcctgcaacgccaggtttcatttcacgcatacgatccaacagaagaacccttttaccttgaaggtcctgactactcgaggtgtggccgagcgcaccccttccttcatgtatccacagggaactgctagttcccagatggtgctcagagggatggatctcctgctggagtgtatcgcgtcaggcgtccctacccctgacatcgcttggtataagaaaggaggcgatctcccaagcgataaggctaaatttgagaacttcaacaaggccctccggatcaccaacgtaagcgaggaggatagcggtgaatatttctgtttggcctctaataagatgggcagcattcgccacaccatctcggttcgagtgaaggccgcgccatactggcttgatgaacccaagaacctgattctagcgcccggcgaggacggtaggctcgtctgcagggccaatggtaatccaaagcctaccgttcagtggatggtcaacggggaacctctgcagagcgccccccctaacccaaacagggaagtagctggggacacgatcatatttagggacacacaaatcagttctagggctgtttatcagtgtaataccagtaatgaacatggttacctcctggctaatgctttcgtgtcagtgttggatgtaccccctagaatgctctcaccccgcaaccagcttatccgcgttatcctatacaatagaactagactggattgccctttcttcggctctcccatcccaacattgaggtggtttaagaacggccagggttctaatctggacgggggcaactaccatgtatacgaaaatgggagcctggagatcaaaatgattaggaaggaagaccaagggatttatacttgcgtcgctaccaacatcctcgggaaagctgagaaccaggtgcgcctggaggtgaaagacccaacacgcatttatcggatgcctgaggatcaagtggcaaggcggggcaccactgtccagttagagtgcagagttaagcatgatccaagcctgaaactgacagtgagctggttaaaagacgacgagcccctgtatatagggaatcggatgaagaaagaagacgatagcctgacgatcttcggagtggccgaacgggaccagggaagctatacgtgcgtggctagtaccgagttggatcaggacctcgccaaggcctatctgacggtcctgggcaattgtccctgttcaccctggcattag

SEQ ID NO: 21635 - DNA, 909 bp, Artificial Sequence
  derived and/or modified sequence
atggcccggcagcccccccccccctgggtgcacgccgccttcctgttatgtttgctctcactcgggggagccatcgagattccaatggacccctctattcaaaatgagttgactcaacctccaaccataaccaaacagtcagctaaggaccacatcgtagacccacgggacaacattctaatcgaatgcgaagctaagggaaaccctgctccgtcatttcactggactagaaactccaggtttttcaatattgccaaggatccacgggtctctatgaggcggagaagcggcacattagtgattgattttaggagcggcggtcggccagaggaatatgagggcgagtaccagtgtttcgccagaaataaattcggcaccgcactaagcaatagaatacggctgcaggtgagtaaaagcccgctgtggccaaaggagaatctcgatccggtggtcgtacaggagggggcccctttgaccctgcagtgcaatccgccaccaggactgccctcacccgtgatcttctggatgtctagctctatggagccaattacccaagataaacgggtgagccaaggacacaacggagatctatacttcagtaacgtgatgttgcaggacatgcagaccgactacagttgtaatgccaggtttcacttcacgcacaccattcagcagaaaaatcctttcactttgaaagtgttaacaactcggggagtggcggagcggacaccaagttttatgtatccacaaggcacagccagttctcagatggtcctgagagggatggacctgctccttgagtgcatcgcatccggcgtacctactcccgatattgcctggtacaaaaagggcggtgacctgccatcagataaagccaaattcgagaactttaataaggccttaagatag

SEQ ID NO: 21636 - DNA, 390 bp, Artificial Sequence
  derived and/or modified sequence
atggcccggcagcccccccccccctgggtgcacgccgccttcctgctctgtctgttgagtcttggtggcgctattgagatacccatggacccttctattcagaatgaacttactcagccaccaaccatcactaaacaatccgccaaggaccatatcgtcgaccctcgggacaacatcctgattgaatgtgaggcaaagggcaatcccgccccttccttccactggaccaggaactcccgattttttaacatcgcaaaggacccacgcgtgagcatgcgacggcgctccgggactctggtgatcgactttcgcagcggaggaaggccggaggagtatgagggcgagtaccaatgctttgccagaaataagttcgggacagccctgagctag

SEQ ID NO: 21637 - DNA, 1860 bp, Artificial Sequence
  derived and/or modified sequence
atggcacggcaacctcctccaccttgggttcatgcagcttttttgctttgtctcttgtctttgggcggagctattgagatcccgatggatccatctatccagaacgagctaacccaaccccctaccattacaaaacagagtgctaaagaccatatcgtagaccccagggacaatatacttattgaatgcgaggccaaagggaatccagcgccatcgtttcactggacccgcaacagcagattctttaatatagccaaggacccacgggtcagcatgcggagaaggtccggaacactcgtgattgactttcggagtggcggtaggcctgaggagtacgaaggcgaataccagtgctttgctagaaacaaattcggaaccgccctatcaaacaggatccgactgcaggtaagtaagagccccctgtggcctaaggaaaacctcgatcctgtcgttgtacaggagggtgcccctctgacgttacaatgtaacccgcctcccggactcccatcgccagtcattttctggatgtctagttccatggagcctatcacacaagacaagcgagtgagtcagggacacaacggggatctgtattttagtaatgtgatgctgcaggacatgcagactgattatagttgtaatgcaaggtttcatttcactcacactattcagcagaaaaatcctttcactctgaaggtgcttaccacccgcggtgtggcagagcgcacacccagtttcatgtacccccagggtacagcaagttctcaaatggttctccgtggaatggatcttctgctagaatgtatcgctagcggggtgccaaccccagacatcgcctggtacaaaaaaggaggggacttgccatctgacaaggccaagtttgagaacttcaacaaagctctgagaattactaacgtgagcgaagaggattcaggagagtacttctgtctagcatctaacaagatgggatccatacgccatacgatctccgtccgggtgaaggccgctccatattggctggatgagcctaagaacctcatccttgcccctggtgaggacgggaggctggtctgccgggcaaacgggaatccaaaacctacagtgcagtggatggtgaatggcgaaccactccagagtgctcctcctaatccgaacagagaggtggccggtgatactattatcttcagggatacacagatcagtagtcgtgccgtctatcagtgcaacacctcaaacgaacacgggtatctgttggccaatgcctttgtcagcgttctggatgtgccaccccgaatgttgagcccacgcaatcagttaatccgggtcatcctgtacaatcgcaccagacttgattgtcctttctttggcagccctattcccactctgaggtggtttaagaacggacagggatcaaacctggacggaggtaattatcacgtgtacgagaacggcagcctagagataaagatgatcaggaaagaggatcaggggatttacacatgtgtggccactaacatactggggaaggccgagaaccaagtgcgcctggaagtgaaagacccaaccaggatctacagaatgccagaggaccaggtggcacgacggggaactactgttcagctggaatgccgggttaagcatgaccctagtttgaagttaacagtgtcttggctgaaggacgacgagcctctctacataggcaatcgaatgaagaaggaggacgatagcctgacaattttcggggtcgccgaacgggatcagggttcttatacctgtgtggcttctacggagctggatcaagatctggccaaggcctatttaaccgtcctcgggaactgtccctgcagcccttggcactag

SEQ ID NO: 21638 - DNA, 909 bp, Artificial Sequence
  derived and/or modified sequence
atggccagacaaccccctccaccctgggtacacgcagcttttcttctgtgcctcctgtcactcgggggtgctatagagatcccgatggacccctctattcagaatgagctgactcagccgcctactataaccaagcaaagtgcgaaggaccacatcgtagaccccagggataacattcttattgaatgtgaggcgaagggaaacccggcacctagctttcattggacaagaaactcacgctttttcaatatcgccaaggacccacgggtgtcaatgaggcggagatcaggcacgcttgtgatagatttccgtagcgggggacgcccagaggagtatgaaggggaatatcaatgcttcgcacgcaataagtttggcactgcgctgtcaaacagaataagacttcaggttagcaagagccccctgtggcctaaggaaaacctggaccccgtagttgttcaggagggcgctcctctgacactgcagtgcaatccgccacctggattacctagcccagttatcttctggatgtcaagcagtatggagccgattacgcaggacaagcgtgtaagtcagggacacaacggagacttatatttttctaacgtaatgctccaggatatgcaaaccgactattcatgtaatgcccgattccactttacacataccattcagcagaaaaaccctttcaccctcaaagtgctgaccacacggggtgtggctgagcgaacccccagcttcatgtaccctcagggaaccgccagcagccagatggtgctacggggaatggatctgctcttggagtgtatcgcttccggcgtgccgacccccgatatcgcttggtacaagaagggaggcgacttaccctccgacaaagcaaagttcgagaactttaacaaggcactgcgatag

SEQ ID NO: 21639 - DNA, 390 bp, Artificial Sequence
  derived and/or modified sequence
atggctcgccagcccccacccccatgggtgcatgccgcatttctactgtgtctactcagcttaggaggagctatcgaaatccccatggatccttcaatccaaaacgagctcactcagcctcccacaatcactaaacagagtgcaaaagaccatatcgtggatcctagagacaatatcctgattgaatgcgaagcaaagggtaatcctgcaccttcgttccactggacacggaactcacgatttttcaatattgccaaagatccaagggtgagcatgcgtaggcggtcaggaaccctggtgattgacttccgatccggcggacggccagaagaatatgagggtgagtatcagtgcttcgctcgcaacaagttcggtacggccctttcctag

SEQ ID NO: 21640 - protein, 119 aa, Artificial Sequence
  derived and/or modified sequence
MVKMTRSKTFQAYLPSCHRTYSCIHCRAHLANHDELISKSFQGSQGRAYLFNSVVNVGCGPAEERVLLTGLHAVADIYCENCKTTLGWKYEHAFESSQKYKEGKYIIELAHMIKDNGWD

SEQ ID NO: 21641 - DNA, 360 bp, Artificial Sequence
  derived and/or modified sequence
atggtgaagatgaccagaagcaagaccttccaggcctacctgcccagctgccacagaacctacagctgcatccactgcagagcccacctggccaaccacgacgagctgatcagcaagagcttccagggcagccagggcagagcctacctgttcaacagcgtggtgaacgtgggctgcggccccgccgaggagagagtgctgctgaccggcctgcacgccgtggccgacatctactgcgagaactgcaagaccaccctgggctggaagtacgagcacgccttcgagagcagccagaagtacaaggagggcaagtacatcatcgagctggcccacatgatcaaggacaacggctgggactag

SEQ ID NO: 21642 - DNA, 360 bp, Artificial Sequence
  derived and/or modified sequence
atggtcaagatgacacgctcaaagacttttcaggcttatctcccatcatgtcatagaacgtactcctgcatccactgccgcgctcacctggctaatcacgatgagctgatttctaaatcctttcaggggagtcaggggcgagcttatctgttcaattccgtcgtcaacgtgggttgcggccctgccgaggagagggtgctgctgacaggtcttcatgccgtggccgacatttattgtgaaaactgcaagaccacgctggggtggaaatacgaacatgcctttgaaagcagccaaaagtacaaagaagggaagtatatcattgagctagctcacatgatcaaggataacggatgggattag

SEQ ID NO: 21643 - DNA, 360 bp, Artificial Sequence
  derived and/or modified sequence
atggtgaagatgaccaggagcaagaccttccaggcctacctgcccagctgccacaggacctacagctgcatccactgccgggcccacctggccaaccatgatgagctgatcagcaagagcttccagggcagccagggccgggcctacctgttcaacagcgtggtgaatgtgggctgcggccctgctgaggagcgggtgctgctgaccggcctgcatgctgtggccgacatctactgtgagaactgcaagaccaccctgggctggaagtatgagcacgcctttgagagcagccagaagtacaaggagggcaagtacatcatcgagctggcccacatgatcaaggacaatggctgggactag

SEQ ID NO: 21644 - DNA, 360 bp, Artificial Sequence
  derived and/or modified sequence
atggtgaagatgacccggagcaagaccttccaggcctacctgcccagctgccaccggacctacagctgtattcactgccgcgcccacctggccaaccatgacgagctgatttccaagtcattccagggcagtcagggtagggcgtatttattcaattcagtggtcaacgtaggttgtggccccgctgaggagagggtgctcctgactggactgcacgccgttgcagacatctactgcgagaactgcaagacaacattgggatggaagtatgagcacgctttcgaatcctcccagaagtacaaggagggtaagtatatcatcgaattggcccacatgattaaagacaacgggtgggactag

SEQ ID NO: 21645 - DNA, 360 bp, Artificial Sequence
  derived and/or modified sequence
atggtaaagatgactcggtccaaaaccttccaggcatacctgccttcatgccatcgcacatattcatgcatccattgtcgagcccacctggctaaccacgatgaacttattagtaagtctttccagggtagtcaaggccgagcctatctcttcaactcagtggtcaacgtcggatgcgggcctgccgaagagcgtgtgttgttgactggtctacacgctgttgccgatatctactgcgaaaattgcaaaactaccctaggatggaaatatgaacatgcgttcgaaagttcacaaaagtacaaggaagggaaatatattatcgagctggcgcacatgatcaaggataacggctgggattag

SEQ ID NO: 21646 - DNA, 5232 bp, Artificial Sequence
  derived and/or modified sequence
gccgcggcggtggcggagactgtggctttaagagcgtgccgggagcccgagccccagccgggccgcgcttcgccgctgcgcaccccagcggagccaagccccacgctggccggacagggccgcctgtcgccgggctgctgagaactagccctagacctctgcgtgagggttcttctgccgaagacatcaccagtgtgtggagcctgccacacccacccgctgccaaaccacggcctttacctgtgtcttccggtgtttcccgtgcgacccatcctgtgggagtgcctcgtgggctgccccagagttcaccccacactcagcagcaccaatggtgaagatgacaagatcgaagactttccaggcatatctgccctcctgccaccggacctacagctgcattcactgcagagctcacttggccaatcatgatgaactaatttccaagtcattccaaggaagtcaaggacgagcatacctctttaactcagtagttaatgtgggctgtgggcctgcagaagagcgagtgttgctaacaggactgcatgcagtcgcagacatttactgtgaaaactgcaaaaccactctgggctggaaatacgaacatgcttttgaaagcagccagaaatataaagaaggcaaatacatcattgaactagcacacatgatcaaggacaatggctgggactgattggacagcatctacccaacccagtgtccacgtgaacgccattcaaccgaacattcttcccaagcgtgagagagtgactgacacttggttccatccatttaggggccttgccatccggggcatcctcccaccctgacgccatctttctggtgaccggcctctaaatcgctgtctctctgtctctttgctttgtatctgtttgtgagttgatcctggcttctctctctgttctagttttggctgaaaacaaaacaacaaaaggaacagatccttgaccgcatggcggcagcccaccttggtaagggccccagggcccatgcgagagctgcctgatggcctcttgtcaggagagcagtggcacgggggcgtgaggaagagggaaaggggaaactctaagggtcctggcgcggggaaggggtggaagggtggaggtaggaacaaaattgcgccgctcctggagacctgataacttaggcttgaaataattgacttgtctaaaaggacaaagagaaaaaaaaaatacctcatgactgcattctctctgactagaagcttctgttcctgacaccaaatgtgccaggttagcaaatgagcacaagatgtggccctgattctagttggtggggcaagggcctggttctcctgggctgagtgggggagtgtcctggcagcagcgagtgacctgggcagtggccaggtgggtgcgatgactctgatgcctcactcagtctctgggcaatcatcatctttgcctctagccaccgtagataaggtgtgaagggactgctgtttgcaatgggcttaccatccaaatatcccaaaggctttgaccagcaaccaagtaaaatcagtaattgaggagagcagggcacaaaggggctgcagtttgggagctcctgaagaaatggctcagatattgagtcagagaaataaaaagtaggatcagttagcaattctaactgcccttccttctgacccctcataagaggagtgtggtgagggaggggactgggtaggggtcatcccaggaggaggggtttacattggaaccagttcaggttcggtgcatctttcctcttcggttttacagtggcttccgtgggatcgtcaatttcttgttcttagagtttcgggtgtttttctccagtcttgttactgtagactgtagaaagcacgggccccaggctctgagcttagtaataacctggctggtagattcctcatgcccctaattgtcccacttaggcctgaatgtcttgcatggagagaaatctcctgtcagtgtggtccagcagcagggaggagttctgcccaaattccgatatcaccccttcccccatccaagcatccttcgattagggaagtggagagcacatccctgtaaggcccataagagaaagaggagtttgttacatttaatcaacactgtgaagtctgttctacagcaattcagccattacacagtatatgactgaaactcatttaactgggttaatttcatttcttagactgaatatattattgttaagatacgtgtgcgtgttaggtaattctcagcatctcctccaagtaggccgaccttctcggaaaattcaccctaaaagtctcacaaaagaatgagttcatggggagattctgtaaagtgatgaactgagatgaaagcagccaacagcccaggagcttttcagaatagcgtctgcagcagaaccagtttccattcagagcgcgtccttggtggaaatgcttttttgtgtgtctccacgcgctgatggtggaatgggagccccaagacgtgtgggcttagaaatcaacttttgttccccaaggcttcttgtccagatctttccagtgctttcatagccctgggagatcaagttgttctccccactttactgcaaggtagactgaagttcagaagaaatactgaatttctgctcccagaagaatagtttctctggctcacaggcccaagttctcaatgaaatcgttttttaactttcacattcctaagctggcttcccggcacagaagccatggatttcccctctctcccttccccctcctcaaggaaatagtcttcctttatggattttcattggactctttcctcagcgattgtcctggctgtttattgatagtccttcccataagaaaatggggttaaacatggggtaggtattttgtctttcaaactacaaatggaatgtggtgacataaactagacatggggtgccctcaagtttccaaggggaccaatgtgccactgttcttccttggggatgaggcctttgactgttggatggatcagagcaggctccagtcagaccctggttctgaatgttttttttttcggtgactatccagtgagccttcagtgggtgcaaggcgccatacttgctgtgagagagctgagtagagtgttggtttttccataactacagggggaaaaaaagtcattaggctttccctttgtgtcagtgaaaccaaaagtgcttcttacaacgttcgctctgttcatgggttgtctatctaacattgagcagcattggagaggccacagctgagctatggagatgctaaattaactcatggcctcagtcagttcattctttaatttcctcaccaaattattgacttagagcataaccaaagacctcattcattcaccccaggtgggttggggtaattggagtttgttggtgaagtttgggggcggggtgttgggagtagagacagggtaaggggacgtgagaaaggaaaaggcatgaagttctatacctcagccagcagctgccttcgtttggaactgaagtccagccagcagactctctagctccatctcccctgtgccaccctaggtcatatgaccttggccaccttggagtagacccagacccctcgggacccgggacattagtctcaggctgctgatggattgatttgacatgaaccaaacacagccaaactcgatacccacaagctgtcagctgaacctgactgagtgttcttcctgagttcacgaggataggctagagtgcatttttactggtggatcagtgtgtgcgaaagagatgaccctttataaagagattttcaagtggatatatataaaagaaacagttgcttgtaaaatatacttttgtaaataatatttaattttttaaataatatatttggtgctgttttctcagatcccctgagagcactttttattttccttttaaattctatggtttcctttgcatttcttgaagtatattttaagggaaacagtgatcaccaatacatgttttcagttttttttttttttaaggtctctatcactttaatctggatcaaggctttgaagcaatgcctctctgcattttttccccagtggaacagactctgcagtacattaatcaggttgagaattgaaatattttcttgcatcagtattggctagaaaagaaaataaataaaaccaagttaatttagtagtaacaacttacagtgattcttcctgttggaagaatttccaacaaatcagaatcacgtttttagttgtgcgtgtgcgcgcacacgtgtgtaaaaagcactttcgattgtgcctcctgttttctcgagtggggacactttaactacagtttacacctcgggcgcataaagtttttcttctctttctctctggttgtttctgtttctgagtggaccaacagcagaacccacgaggatttgttttgagtatggagctgttgcgggtttgctcctttttcttgctttgcgtgctcagtttttacagactgtaaaggagatgtgttgtttgtgaagatggagcagagtcaaatctgtgcttctaactgagatgagagtgtattaatcacgtatcgcagggctccagctgttttagaagccacatcatgttaaacattaactggtttggattaaaagaacattaatattataatacacatatcttagtggtaaacagctttttttttttaaggtcagattgcctcaggtttagaaagaggctgagaaatcaaatcttgaacacaatcaacttacatattttaaaggaatctgcctcaaatgagaaaatatgctagttatctagatagaggaaagagatatttacttttttaaaaattaaaatagttatgaaatctggcagaaaaggtaaagcctagaagaaactatgaaagctattctcatgttaccaaattctatctgcgcatatgtttttgtataacatttcggtgacagtgggagtcggttccctttcccaacctgcagagactatcttccaatacagaatctgtctatttatgcttgtgtttacaaactgtatttgttgggtttgggtttttgttttctttggtggcatttttcaggtcactttgcttctataacaaaggtaattgttttcaaataatttgtcttcaccttttcctgtatttgtacatagtgattcagtattagagaaaagtgcattgtttctgtcatatttccaatctgtgttggtgctcatttgagaaaataaaagttttcaaatattaactctt

SEQ ID NO: 21647 - protein, 2347 aa, Artificial Sequence
  derived and/or modified sequence
MTEGARAADEVRVPLGAPPPGPAALVGASPESPGAPGREAERGSELGVSPSESPAAERGAELGADEEQRVPYPALAATVFFCLGQTTRPRSWCLRLVCNPWFEHVSMLVIMLNCVTLGMFRPCEDVECGSERCNILEAFDAFIFAFFAVEMVIKMVALGLFGQKCYLGDTWNRLDFFIVVAGMMEYSLDGHNVSLSAIRTVRVLRPLRAINRVPSMRILVTLLLDTLPMLGNVLLLCFFVFFIFGIVGVQLWAGLLRNRCFLDSAFVRNNNLTFLRPYYQTEEGEENPFICSSRRDNGMQKCSHIPGRRELRMPCTLGWEAYTQPQAEGVGAARNACINWNQYYNVCRSGDSNPHNGAINFDNIGYAWIAIFQVITLEGWVDIMYYVMDAHSFYNFIYFILLIIVGSFFMINLCLVVIATQFSETKQRESQLMREQRARHLSNDSTLASFSEPGSCYEELLKYVGHIFRKVKRRSLRLYARWQSRWRKKVDPSAVQGQGPGHRQRRAGRHTASVHHLVYHHHHHHHHHYHFSHGSPRRPGPEPGACDTRLVRAGAPPSPPSPGRGPPDAESVHSIYHADCHIEGPQERARVAHAAATAAASLRLATGLGTMNYPTILPSGVGSGKGSTSPGPKGKWAGGPPGTGGHGPLSLNSPDPYEKIPHVVGEHGLGQAPGHLSGLSVPCPLPSPPAGTLTCELKSCPYCTRALEDPEGELSGSESGDSDGRGVYEFTQDVRHGDRWDPTRPPRATDTPGPGPGSPQRRAQQRAAPGEPGWMGRLWVTFSGKLRRIVDSKYFSRGIMMAILVNTLSMGVEYHEQPEELTNALEISNIVFTSMFALEMLLKLLACGPLGYIRNPYNIFDGIIVVISVWEIVGQADGGLSVLRTFRLLRVLKLVRFLPALRRQLVVLVKTMDNVATFCTLLMLFIFIFSILGMHLFGCKFSLKTDTGDTVPDRKNFDSLLWAIVTVFQILTQEDWNVVLYNGMASTSSWAALYFVALMTFGNYVLFNLLVAILVEGFQAEGDANRSDTDEDKTSVHFEEDFHKLRELQTTELKMCSLAVTPNGHLEGRGSLSPPLIMCTAATPMPTPKSSPFLDAAPSLPDSRRGSSSSGDPPLGDQKPPASLRSSPCAPWGPSGAWSSRRSSWSSLGRAPSLKRRGQCGERESLLSGEGKGSTDDEAEDGRAAPGPRATPLRRAESLDPRPLRPAALPPTKCRDRDGQVVALPSDFFLRIDSHREDAAELDDDSEDSCCLRLHKVLEPYKPQWCRSREAWALYLFSPQNRFRVSCQKVITHKMFDHVVLVFIFLNCVTIALERPDIDPGSTERVFLSVSNYIFTAIFVAEMMVKVVALGLLSGEHAYLQSSWNLLDGLLVLVSLVDIVVAMASAGGAKILGVLRVLRLLRTLRPLRVISRAPGLKLVVETLISSLRPIGNIVLICCAFFIIFGILGVQLFKGKFYYCEGPDTRNISTKAQCRAAHYRWVRRKYNFDNLGQALMSLFVLSSKDGWVNIMYDGLDAVGVDQQPVQNHNPWMLLYFISFLLIVSFFVLNMFVGVVVENFHKCRQHQEAEEARRREEKRLRRLERRRRKAQRRPYYADYSPTRRSIHSLCTSHYLDLFITFIICVNVITMSMEHYNQPKSLDEALKYCNYVFTIVFVFEAALKLVAFGFRRFFKDRWNQLDLAIVLLSLMGITLEEIEMSAALPINPTIIRIMRVLRIARVLKLLKMATGMRALLDTVVQALPQVGNLGLLFMLLFFIYAALGVELFGRLECSEDNPCEGLSRHATFSNFGMAFLTLFRVSTGDNWNGIMKDTLRECSREDKHCLSYLPALSPVYFVTFVLVAQFVLVNVVVAVLMKHLEESNKEAREDAELDAEIELEMAQGPGSARRVDADRPPLPQESPGARDAPNLVARKVSVSRMLSLPNDSYMFRPVVPASAPHPRPLQEVEMETYGAGTPLGSVASVHSPPAESCASLQIPLAVSSPARSGEPLHALSPRGTARSPSLSRLLCRQEAVHTDSLEGKIDSPRDTLDPAEPGEKTPVRPVTQGGSLQSPPRSPRPASVRTRKHTFGQRCVSSRPAAPGGEEAEASDPADEEVSHITSSACPWQPTAEPHGPEASPVAGGERDLRRLYSVDAQGFLDKPGRADEQWRPSAELGSGEPGEAKAWGPEAEPALGARRKKKMSPPCISVEPPAEDEGSARPSAAEGGSTTLRRRTPSCEATPHRDSLEPTEGSGAGGDPAAKGERWGQASCRAEHLTVPSFAFEPLDLGVPSGDPFLDGSHSVTPESRASSSGAIVPLEPPESEPPMPVGDPPEKRRGLYLTVPQCPLEKPGSPSATPAPGGGADDPV

SEQ ID NO: 21648 - DNA, 7044 bp, Artificial Sequence
  derived and/or modified sequence
atgactgagggagctagagctgcagacgaggtccgggtcccccttggcgcccccccacccgggcccgcagccttagtcggggcctcccctgagtctccaggcgctccggggcgagaagctgaaagaggctctgagcttggagtgtcacctagtgaaagccctgccgctgagagaggcgctgagttgggtgccgatgaggagcagcgggtcccctatccagccctcgccgcaaccgtgttcttttgcctagggcaaaccactaggcccaggtcgtggtgcctacgattggtgtgcaatccttggtttgagcacgtaagtatgctggtaatcatgttgaactgcgtgactttagggatgttcaggccctgcgaagatgtcgagtgcggttccgagcgttgcaacatactggaggcctttgacgccttcatctttgcctttttcgccgttgagatggtcattaagatggtagccctggggttgttcggacagaagtgttacctgggcgacacgtggaataggttagatttttttattgttgtggccggcatgatggagtattccctcgatggccataatgtttcactgtccgccatccgaacagtgcgtgtgctgaggcctctccgggccataaaccgggttccatccatgaggatcctagttacactgttgctggacactcttccaatgctaggaaacgtgttactcctttgtttttttgtgtttttcattttcggcattgtaggagtgcaactttgggcggggctgctccgaaaccggtgtttcctagattctgcgtttgttcggaataataacctaacatttttgcgcccatactatcagacagaggagggggaagaaaacccctttatttgctcatccagacgcgacaacggcatgcagaagtgctcccacatcccaggacggcgagagttgcggatgccctgcacactcggctgggaggcatatacccagccgcaggccgagggtgtgggtgcggcccggaatgcctgcatcaattggaaccagtactacaatgtgtgccggtccggcgactctaaccctcataacggcgcgattaactttgacaatattggatacgcatggatagctattttccaggtgattactcttgagggatgggttgacattatgtactacgttatggacgctcacagcttttataatttcatctactttattttgctcatcattgttggctctttctttatgataaatctctgtttggtagtgatcgcgacccagtttagcgaaactaagcagagggagtcccaactgatgagggagcagcgcgcccgccacttgtccaacgattcgacgctagcatccttcagcgaacccggatcgtgttacgaggagctgctgaagtacgtcgggcacatcttccgcaaggtaaagagacgcagcctccgtctgtacgctagatggcagtcccgatggcggaaaaaagttgacccctcagccgtccagggccaaggccctgggcataggcaacggagggcaggccgacatactgcctccgtgcaccacttggtgtaccatcaccatcaccatcaccatcatcactaccacttcagtcacgggtcccctcgaagacccggcccagaacccggcgcgtgcgacactagactcgttcgggcaggcgcaccaccctctcccccctcccctggcagaggaccacccgacgctgaatccgtccactccatttatcatgctgattgccacatcgaaggccctcaggaacgagcacgggtcgcacatgctgcggctactgctgccgcctctttgaggctggccactggccttggcaccatgaattatcctactatcctgccctcaggtgtggggtccggtaagggttctactagcccagggcctaaggggaaatgggcagggggccctccaggcaccggtggccatggaccactcagcctgaacagccccgacccatatgagaagatccctcatgttgtaggcgaacacggcctggggcaggcccccgggcacctgagcggcctaagtgtgccttgtccacttccatccccgccggctggcacgctcacgtgcgaacttaaaagctgcccatactgtaccagagcactggaggatcctgagggagagctcagtggcagcgagtccggagacagcgatggcagaggggtctacgagttcacccaggatgtaaggcatggagaccggtgggatcccacccgcccacctagagcgacagatacccccggtccggggcctggatcccctcaacggcgcgcccagcagagggcggccccaggcgaacctggatggatgggtcgtctgtgggtcacttttagcggaaagctgaggcgcatcgtcgactctaagtatttctcccgcggaattatgatggcaattttggttaacacgctctccatgggcgtcgagtaccatgaacagcctgaagagctcaccaacgccctcgaaatctctaacattgtattcaccagtatgtttgctctagagatgttgttgaagctgctcgcatgcgggcccctggggtatatccgcaacccctacaatatcttcgacgggattatagtagtgatttcggtgtgggaaattgttgggcaggctgatggcggcttgagtgtactgcgaacctttaggctcttgcgagttctgaagctggtgaggttcctgccagcactgcgcaggcagctagttgtgctggttaagaccatggataatgtagccaccttctgcactttgttgatgctctttatattcatatttagtatcctcgggatgcacctcttcgggtgtaaattctccctaaagactgacacaggagataccgtccccgacagaaaaaactttgatagtctgctgtgggctatcgtgactgtcttccaaatcctcacgcaagaggattggaatgttgttctgtacaatggaatggcatctacgtcctcttgggccgcattatattttgttgcactcatgacttttggaaactacgtgctatttaacctcctggttgcgattctggtcgaaggctttcaggctgagggtgatgccaaccgcagtgataccgatgaagacaagacaagcgttcacttcgaagaggatttccataaactccgggaacttcagacaacagaactgaagatgtgttccctagcagttactcccaacgggcatctggaaggccgtggcagcttaagtcctccactgatcatgtgtactgcggctaccccgatgccaactcctaagtcaagcccctttctggatgctgccccaagccttcctgactcaaggagaggcagcagctcttccggggacccacccctcggtgaccagaaaccacccgcctcgcttaggtcctctccctgtgccccttggggccctagcggggcatggtcctcaaggcggagctcctggagctctcttgggcgggccccatcccttaaacgccgcggtcaatgcggggagagagaatctttgctgtctggagaaggaaagggctccacagacgacgaggccgaggatggtcgggcggcgcctggcccacgagcaacccctctgaggagggcggagagcctggacccacgtcctcttcgtcccgcggcactgccacctaccaagtgtcgcgatagggacggtcaggtggttgcactcccgtccgatttttttctacgcattgattcccatcgtgaggacgctgctgagctggacgacgattccgaggactcctgctgtttaaggctccacaaggtgcttgaaccctacaaaccacaatggtgcagatcgagggaagcttgggcactttacctctttagtccccaaaacaggtttcgtgtatcttgtcaaaaggtgattacgcataagatgtttgatcacgtggttctcgtcttcatctttttgaactgcgtcactatagcgcttgagcgacccgatattgatccgggatctaccgaaagagttttcctgtcggtgagtaactatatcttcacagccatctttgtggctgaaatgatggtcaaggtcgtggctcttggtctcctgtctggggaacatgcctacctgcagagcagctggaacttactggacggactgctggtgcttgtgtctctcgttgacatagtggtcgctatggcatctgctggaggagcgaagatacttggtgtgttacgggtgctccgactactgcggactctgcgaccgctgagagtaatcagccgagcacctggattgaagctggtcgtcgagacccttataagcagtctacgccctattggcaatatcgtgctcatctgctgcgccttttttattatcttcggcatcctcggcgtgcagttgtttaaaggaaagttttactactgtgagggcccagatactagaaatatctccacaaaggcacagtgtcgcgcggcccattatagatgggtgcgaagaaaatataactttgacaatctgggacaggctctgatgtctctgtttgtcctgtcttccaaggatggatgggtcaacatcatgtatgacggccttgacgccgtcggtgtagaccaacagccagtgcaaaatcacaacccctggatgttactctattttattagcttcctgctgattgtgtctttcttcgtcctcaacatgtttgtaggggtggtggtagagaattttcacaaatgtaggcagcatcaagaagccgaagaggcccgtagaagggaggaaaaacgtctccgaaggctggagcggcgcagaagaaaggcccagagacgtccatattatgcagattacagccccactaggagatccattcactctctgtgcactagccactacctcgatctcttcataacctttatcatctgcgtcaatgttatcactatgtcaatggagcattacaaccagcccaaatctttggacgaggccctaaagtactgtaactacgtttttaccattgtattcgttttcgaggctgcactcaaactcgtggccttcggcttccggcgcttcttcaaagacagatggaaccaactcgacctagccatcgttctcctttctctgatggggattactctggaagagatcgagatgtccgccgccctccctatcaaccccacaatcattaggataatgagagtgctaaggattgcacgggttctgaagctgctgaagatggccaccggcatgagggcgcttctagataccgtagtgcaggcactgccacaggtaggcaatttgggtttactgtttatgttgctcttctttatttatgcagccctaggggtggagctcttcggacgactggagtgcagcgaagacaacccttgcgaaggattatcccgacatgctaccttttctaattttggcatggccttccttaccctttttcgggtttctaccggagacaactggaatggcattatgaaggatacgctgcgggagtgctctcgtgaggacaaacattgtctgtcatatctgccagccctgtcgcctgtatatttcgtgacctttgtcctggtggctcagttcgttttggtaaatgtggtcgtcgcagtgctaatgaagcacttagaggaatctaacaaggaagcacgggaagacgcagagttggatgccgagatcgagctagagatggcacagggaccaggctcagccaggcgtgtggatgccgacaggccccccttgccacaggagtctcccggagcgagagacgctcccaacttggttgcacggaaagtcagcgtatcgagaatgctgagcctcccaaatgattcttatatgttcagaccggtggtaccggcttccgcaccacatccccgtcctttacaggaagtagagatggaaacctatggggcagggacccctctcggcagcgttgcctccgtgcatagtccgcctgctgagagttgcgcgtccttgcaaatccctttagccgtgtcaagcccagcccggtcaggggaacctttgcacgcactgagcccacgaggtaccgcccgatccccttcactgtcacgtctattatgccggcaggaggccgtccatacggactctctcgaaggtaaaattgatagcccgcgcgacacacttgatccggcagagcctggtgagaaaacccctgtgcgcccggtgacccagggaggctctctgcagtccccaccccgaagccctcgaccagcatcagttcgaacgaggaaacacacttttggacagaggtgtgtgtccagccgccccgctgcccccggaggagaggaggcggaagcttccgacccagccgacgaagaagtctctcacatcacaagctcggcctgtccttggcaacctactgctgagccccatgggcccgaagcaagtccagtggctgggggagaacgtgacctaaggcgtctctattccgttgatgcacagggattcttggacaagccgggcagggccgacgagcaatggcggccctccgccgagctcggctctggcgagcccggggaggccaaagcatggggacccgaggcagagcccgcactgggcgctcgccggaaaaaaaagatgtctcctccctgcatttctgtcgagccccctgccgaggatgaaggaagcgctcgaccgagtgcagctgaaggaggctctactactctccggcgtagaacgcccagctgcgaggcgaccccccaccgtgattctctcgaacctaccgagggttcaggtgctgggggagatcctgcagccaagggggagcgctgggggcaagctagttgccgggccgagcatttgacagttccgtcttttgctttcgaacccctcgatctgggcgttccatctggagacccattcctcgacggttcccacagcgttaccccggaatctcgggcgagcagtagtggcgccatcgtgccattagagccacccgaaagcgagccacctatgcccgtcggcgaccctccagagaagcgtagaggcctgtacttgacagtgccgcagtgcccgctggagaaaccaggcagcccctcagcaactcccgcaccaggaggcggagccgacgacccagtgtag

SEQ ID NO: 21649 - DNA, 7044 bp, Artificial Sequence
  derived and/or modified sequence
atgacagagggcgcccgggcagcagatgaggtgcgggtgcccctgggcgcccctcctcctggccctgctgccctggtgggcgccagccctgagagccctggggcccctggccgggaggccgagcggggcagcgagctgggcgtgagccccagcgagagccctgctgctgagagaggagctgagctgggcgcagatgaggagcagagggtgccctacccagccctggccgccaccgtcttcttctgcctgggccagaccacccggcccaggtcctggtgcctgcggctggtgtgcaacccctggtttgagcacgtgtccatgctggtgatcatgctgaactgtgtgaccctgggcatgttccggccctgtgaagatgtggagtgtggcagcgagcgctgcaacatcctggaggcctttgatgccttcatctttgccttctttgctgtggagatggtgatcaagatggtggccctgggcctgtttggccagaagtgctacctgggggacacctggaaccggctggacttcttcatcgtggtggccggcatgatggagtacagcctggatggccacaacgtgtccctgagcgccatcagaacagtgcgggtgctgcggcccctgcgggccatcaacagagtgcccagcatgaggatcctggtgaccctgctgctggacaccctgcccatgctgggcaatgtgctgctgctgtgcttctttgtgttcttcatcttcggcatcgtgggcgtgcagctgtgggccggcctgctgaggaaccgctgcttcctggacagcgcctttgtgaggaacaacaacctgaccttcctgcggccctactaccagacagaggagggggaggagaaccccttcatctgcagcagccggcgggacaatggcatgcagaagtgcagccacatccctggccggcgggagctgaggatgccctgcaccctgggctgggaggcctacacccagccccaggccgagggcgtgggcgccgccagaaatgcctgcatcaactggaaccagtactacaacgtgtgccgcagcggggacagcaacccccacaacggggccatcaactttgacaacatcggctacgcctggatcgccatcttccaggtgatcaccctggagggctgggtggacatcatgtactacgtgatggatgcccacagcttctacaacttcatctacttcatcctgctgatcatcgtgggcagcttcttcatgatcaacctgtgcctggtggtgattgccacccagttcagcgagaccaagcagcgggagagccagctgatgagggagcagagggcccggcacctgagcaatgacagcaccctggccagcttcagcgagcccggcagctgctatgaggagctgctgaagtatgtgggccacatcttcaggaaggtgaagagaagaagcctgcggctgtatgcccgctggcagagccgctggaggaagaaggtggaccccagcgctgtgcagggccagggccctggccaccggcagaggagagctggccgccacacagcctctgtgcaccacctggtgtaccaccaccaccaccaccaccaccaccactaccacttcagccacggcagccccaggaggcctggccctgagcccggggcctgtgacacccggctggtgcgggccggggccccacccagcccccccagccctggccggggccccccagatgctgagagcgtgcacagcatctaccacgccgactgccacatcgagggcccccaggagcgggcccgggtggcccacgccgccgccacagctgctgccagcctgcggctggccaccggcctgggcaccatgaactaccccaccatcctgcccagcggcgtgggcagcggcaagggcagcaccagccctggccccaagggcaagtgggccggcggccccccaggcactggaggccacggccccctgagcctgaacagcccagacccctatgagaagatcccccacgtggtgggggagcacggcctgggccaggcccctggccacctgagcggcctgtctgtgccctgccccctgcccagccccccagctggcaccctgacctgtgagctgaagagctgcccctactgcacccgggccctggaggaccctgagggggagctgagcggcagcgagagcggggacagtgatggccggggcgtgtatgagttcacccaggatgtgcgccacggggaccgctgggaccccaccaggcctccccgggccacagacaccccaggccctggccctggcagcccccagaggcgggcccagcagagagctgcccctggagagcccggctggatgggccgcctgtgggtgaccttcagcggcaagctgcggagaattgtggacagcaagtacttcagccggggcatcatgatggccatcctggtgaacaccctgtccatgggcgtggagtaccacgagcagcctgaggagctgaccaatgccctggagatcagcaacatcgtgttcacctccatgtttgccctggagatgctgctgaagctgctggcctgtggccccctgggctacatccggaacccctacaacatctttgatggcatcatcgtggtgatctctgtgtgggagatcgtgggccaggctgatggcggcctgtctgtgctgcggaccttccggctgctgcgggtgctgaagctggtgcgcttcctgcctgccctgcggcggcagctggtggtgctggtgaagaccatggacaacgtggccaccttctgcaccctgctgatgctgttcatcttcatcttcagcatcctgggcatgcacctgtttggctgcaagttcagcctgaagacagacacaggagacacagtgcctgacaggaagaactttgacagcctgctgtgggccatcgtgaccgtcttccagatcctgacccaggaggactggaatgtggtgctgtacaacggcatggccagcaccagctcctgggccgccctgtactttgtggccctgatgacctttggaaactacgtgctcttcaacctgctggtggccatcctggtggagggcttccaggccgagggagatgccaacagaagtgacacagatgaggacaagacctctgtgcactttgaggaggacttccacaagctgcgggagctgcagaccacagagctgaagatgtgcagcctggccgtgaccccaaatggccacctggagggccggggcagcctgagccccccactcatcatgtgcacagctgccacccccatgcccacccccaagagcagccccttcctggatgctgcccccagcctgcctgacagccggcggggcagcagcagcagcggggacccccccctgggggaccagaagcccccagccagcctgcggagcagcccctgtgccccctggggccccagcggggcctggagcagcagaagaagctcctggagcagcctgggccgggcccccagcctgaagaggcggggccagtgtggggagcgggagagcctgctgagcggggagggcaagggcagcacagatgatgaagcagaagatggccgggccgcccctggcccccgggccacccccctgcggcgggcagagagcctggacccccggcccctgcggcctgctgccctgccccccaccaagtgccgggacagagatggccaggtggtggccctgcccagcgacttcttcctgagaattgacagccacagagaagatgctgctgagctggatgatgacagcgaggacagctgctgcctgcggctgcacaaggtgctggagccctacaagccccagtggtgccgcagccgggaggcctgggccctgtacctgttcagcccccagaaccgcttccgggtgtcctgccagaaggtgatcacccacaagatgtttgaccacgtggtgctggtgttcatcttcctgaactgtgtgaccatcgccctggagaggccagacatcgaccccggcagcacagagagggtcttcctgtctgtgagcaactacatcttcaccgccatctttgtggccgagatgatggtgaaggtggtggccctgggcctgctgagcggggagcacgcctacctgcagagctcctggaacctgctggatggcctgctggtgctggtgtccctggtggacatcgtggtggccatggccagcgctgggggcgccaagatcctgggcgtgctgcgggtgctgcggctgctgcggaccctgcggcccctgcgggtcatcagccgggcccctggcctgaagctggtggtggagaccctcatcagcagcctgcggcccatcggcaacatcgtgctgatctgctgtgccttcttcatcatcttcggcatcctgggcgtgcagctgttcaagggcaagttctactactgtgagggccctgacaccaggaacatcagcaccaaggcccagtgcagagctgcccactaccgctgggtgcggaggaagtacaactttgacaacctgggccaggccctgatgagcctgtttgtgctgagcagcaaggatggctgggtgaacatcatgtatgatggcctggatgctgtgggcgtggaccagcagcctgtgcagaaccacaacccctggatgctgctgtacttcatctccttcctgctgattgtgtccttctttgtgctgaacatgtttgtgggcgtggtggtggagaacttccacaagtgccggcagcaccaggaggccgaggaggcccggcggcgggaggagaagaggctgcggcggctggagaggagaagaaggaaggcccagaggcggccctactatgctgactacagccccaccaggaggagcatccacagcctgtgcaccagccactacctggacctcttcatcaccttcatcatctgtgtgaatgtcatcaccatgtccatggagcactacaaccagcccaagagcctggatgaggccctgaagtactgcaactacgtgttcaccatcgtgtttgtgtttgaggccgccctgaagctggtggccttcggcttccgccgcttcttcaaggaccgctggaaccagctggacctggccatcgtgctgctgagcctgatgggcatcaccctggaggagattgagatgtctgctgccctgcccatcaaccccaccatcatccgcatcatgagggtgctgcgcatcgcccgggtgctgaagctgctgaagatggccaccggcatgagggccctgctggacacagtggtgcaggccctgccccaggtgggcaacctgggcctgctcttcatgctgctcttcttcatctatgctgccctgggcgtggagctgtttggccgcctggagtgcagcgaggacaacccctgtgagggcctgagcagacatgccaccttcagcaactttggcatggccttcctgaccctcttccgggtgtccactggagacaactggaatggcatcatgaaggacaccctgcgggagtgcagccgggaggacaagcactgcctgagctacctgcctgccctgagccctgtgtactttgtgacctttgtgctggtggcccagtttgtgctggtgaatgtggtggtggccgtgctgatgaagcacctggaggagagcaacaaggaggcccgggaggatgctgagctggatgctgagattgagctggagatggcccagggccctggcagcgcccggcgggtggatgctgacaggcctcccctgccccaggagagccctggggccagagatgcccccaacctggtggccaggaaggtgtctgtgtccaggatgctgagcctgcccaatgacagctacatgttccggcctgtggtgcctgccagcgccccccacccccggcccctgcaggaggtggagatggagacctacggggccggcacccccctgggctctgtggcctctgtgcacagccccccagctgagagctgtgccagcctgcagatccccctggccgtgagcagccctgcccggtctggagagcccctgcacgccctgagcccccggggcacagcccggagccccagcctgagccggctgctgtgccggcaggaggccgtgcacacagacagcctggagggcaagattgacagcccccgggacaccctggaccctgctgagcccggggagaagacccctgtgcggcctgtgacccagggcggcagcctgcagagcccccccaggagccccaggcctgcctctgtgaggaccaggaagcacaccttcggccagagatgtgtgagcagcaggcctgctgcccctggaggagaggaggccgaggccagtgaccctgcagatgaggaggtgagccacatcaccagcagcgcctgcccctggcagcccacagctgagccccacggccctgaggccagccctgtggccggcggggagcgggacctgcggcggctgtacagcgtggatgcccagggcttcctggacaagccaggccgggcagatgagcagtggaggccttctgctgagctgggcagcggggagcctggagaggccaaggcctggggccctgaggccgagcccgccctgggcgcccggaggaagaagaagatgagccccccctgcatctctgtggagcccccagcagaagatgagggcagcgcccggcccagcgctgctgagggcggcagcaccaccctgcggcggaggacccccagctgtgaggccaccccccaccgggacagcctggagcccacagagggcagcggggccggcggggaccctgctgccaagggggagcgctggggccaggccagctgcagagctgagcacctgactgtgcccagctttgcctttgagcccctggacctgggcgtgcccagcggggaccccttcctggatggcagccacagcgtgaccccagagagccgggccagcagcagcggggccatcgtgcccctggagcccccagagagcgagccccccatgcctgtgggggaccccccagagaagagaagaggcctgtacctgactgtgccccagtgccccctggagaagccaggcagccccagcgccaccccagcccctgggggcggcgcagatgatcctgtgtag

SEQ ID NO: 21650 - DNA, 7044 bp, Artificial Sequence
  derived and/or modified sequence
atgaccgagggcgcccgggccgccgacgaggtgcgggtgcccctgggtgcaccaccgcccggccctgctgcactcgtgggcgcctctcccgaatcgcctggggcacctggacgcgaggccgaacggggcagcgaactaggagtgtctccttctgagagccccgcagcagaaagaggcgcggagctcggagccgacgaagagcagagggtcccatatccggcactggcggccacagtctttttctgcctcggacagacgacacgtccacgctcatggtgcctgaggttggtatgcaatccttggtttgagcatgtgtctatgctcgtgataatgcttaactgtgtcacccttggcatgtttcggccatgcgaggacgtcgagtgtgggtccgaaagatgcaatatcctggaggcctttgacgcttttatatttgcgttttttgccgtggaaatggtcattaaaatggtggcattaggcctgttcggtcaaaagtgttacctcggagatacttggaataggctggacttctttatcgttgtggccggtatgatggaatactccctggacggtcacaatgtaagtctgagcgctatcagaacagtgcgggtcctgcgccccctgcgagctatcaatcgggtgccaagtatgcgaattttggtgacacttctgctggacactctgcccatgctcggaaatgtcctgttactttgtttttttgtgttcttcatctttggtatagtaggggtgcagctgtgggctgggttactgcggaatagatgcttcttggacagcgcctttgtgcgcaataacaatctgacttttttgcgcccatactatcaaactgaggagggagaggaaaatccttttatctgcagtagccggagggacaatgggatgcagaagtgctcccatatcccaggcagaagagaattacgtatgccctgcaccctgggctgggaagcctacactcagccacaggcagagggcgtgggagccgccagaaatgcttgtatcaattggaaccagtactataacgtctgtaggagtggggattcgaatccccataacggcgcaatcaattttgataacatcggctacgcctggatagccattttccaggttataactctggagggatgggtggacattatgtactacgtgatggacgcacacagtttctacaactttatttactttatcttgctgatcattgtaggaagtttttttatgattaatttgtgcctggtggtgatcgcaactcagtttagtgagacaaagcagcgggagtctcagctcatgcgtgagcaaagagcacgacatctttcaaatgactccacacttgcctctttctcagagcccggctcttgttacgaagagcttcttaaatacgtcggccatatcttcagaaaggtcaaacgacgtagcctccgattatacgctcgctggcagagtagatggcggaagaaggtggacccatccgcagtccagggccagggacccgggcataggcaaaggagagccggccgccataccgccagtgtacaccatctggtttaccatcatcatcaccatcaccaccaccattatcatttttctcatggcagcccccgacggccaggacctgagccaggcgcttgcgataccaggctggtgagagcgggagccccccccagcccaccaagcccgggccgggggcctccagacgctgagtctgtccactcaatctatcatgcggattgccatatagaaggccctcaggaaagagctcgcgtggcgcatgccgcggctaccgctgccgcctcacttaggctggcgactggactgggaacaatgaactatccaacaattctacctagcggggtggggtctgggaaggggtctacatctcctgggccgaaaggtaaatgggctggcggcccacccgggaccggtggacatggtcctctgagccttaactccccagatccctacgagaagatcccccacgtagtcggagaacacgggttggggcaggcacccgggcacctgtcaggcctgagtgtgccatgcccccttccgagtccaccagccgggacacttacgtgcgaattaaaaagttgcccgtactgcacacgggccctggaagatccggagggcgagctgagcgggtccgagtcgggagactctgatggccgcggcgtgtatgagtttacacaggatgtgagacatggggaccggtgggatcccacacgccccccacgggcaaccgatacgccaggaccaggccccggcagcccacagagaagggcacaacaacgtgctgcccctggcgagcccgggtggatgggcagactttgggtgaccttttccggaaagttgcgtcggatcgtagactccaaatatttttcacgcggaattatgatggccatcctagtcaatactctctcaatgggagtagagtatcatgaacagccggaagaattaacaaacgcgctcgaaatctccaacatcgtgtttacttcaatgttcgctctcgagatgctgctgaaactcctggcctgcgggccgctgggctacatcagaaacccatacaacatttttgatggcataatcgttgtgatatccgtgtgggaaatcgtcgggcaagccgacggtggtttgtcagtgctacggactttccgccttctccgggtgctgaaactggtccgattccttcccgcccttcggaggcagctggtggtgctggtaaaaactatggataacgtagctactttctgcacactcctgatgttgttcatcttcatcttcagcatcctgggcatgcatctttttggctgcaaattttcattaaagacagacacaggggataccgtacctgaccgaaaaaatttcgactcattgctctgggcaatcgtgaccgtctttcaaattctgactcaggaagattggaatgtggtgttgtacaacggaatggcaagcactagtagttgggccgctctgtattttgtcgcccttatgaccttcggcaattacgtgctgttcaacctactggtggcaatcctagtagagggtttccaggcagagggcgacgccaatcgttccgataccgacgaggacaaaacatccgttcacttcgaagaagatttccataagctgcgtgaactccagaccacagaactcaaaatgtgcagcctggcagtgacgcccaatggccatctggagggacgggggtctctgtcaccccctttaataatgtgtacagctgccacgcctatgccgaccccaaagtcctcgccattcctggatgccgcaccctcgctcccagattctcgacgtgggtcatcctcctctggggacccccctctgggagatcagaagcctcccgcgtctctacggtcctcaccatgcgcaccctgggggcccagcggggcgtggtcttcgcgccgcagttcttggtccagcctgggaagggcacctagccttaaacgcagaggccagtgtggcgagcgcgaaagcctcctgagtggagaaggtaagggatcaacagatgacgaggctgaagacggcagagctgcccccggtcctagagcgactccactgaggagagctgaatctctcgatccccggcccctgaggcctgccgctctgccacccacaaaatgtcgtgatcgtgacggacaggtcgtggctctgccatctgactttttcctaaggattgacagtcaccgggaggatgctgcggagctcgacgacgactccgaagactcctgttgcctcaggctgcataaggtactcgagccatacaagcctcagtggtgcagatcccgcgaggcctgggccctgtatctcttttcacctcagaatagatttagagtatcatgtcaaaaggtgatcactcacaaaatgtttgaccacgtagtattagtctttatttttctgaattgcgtcacaatcgctttggagaggccggacattgatcccggtagcaccgagcgtgtttttctaagtgtctccaactatatctttactgccatattcgtggcagaaatgatggtgaaagtcgtggctttggggttgctttctggtgagcatgcttacctccaaagctcctggaacctgttggatggtcttctggttttggtgagcctggtcgacatcgtagtcgcaatggctagcgctggtggtgctaaaattctgggtgttctcagagtgctgagattgttgcggactctgcggcctctacgtgtgatatctcgcgcgcctggcttaaagctggtggtggagactctcatcagttccctgcggcccatcggcaatatagtcctgatatgctgcgccttcttcatcatcttcggcatcctgggtgtacagctgttcaaggggaagttctattactgtgagggtccggatacccggaacataagtaccaaggctcagtgccgcgccgcccactatcgttgggtgcggagaaaatacaatttcgataatctggggcaggccctgatgtccctgtttgtgctttcatccaaagacggctgggtgaacattatgtacgatggactggatgccgttggcgtagaccaacaacccgttcagaatcacaatccctggatgctgttatactttatttcgtttctcctaattgtgtccttttttgtgctgaacatgttcgtgggagtagtggttgagaactttcataaatgtcgacaacaccaggaggccgaagaggctaggcggcgggaggagaagagacttaggcgtcttgaaagaagacgacgcaaggcccaaaggagaccatactatgctgactattctcctacaaggagaagcatccactcactatgtactagtcactacttggacctgttcatcacctttattatttgtgtaaacgtcattactatgagtatggaacactacaatcagccaaagtctctcgacgaagctctcaagtactgcaactacgtgtttactatcgtcttcgtctttgaggcggccctcaaactggttgccttcggttttcgaagatttttcaaggataggtggaaccaacttgacttggcgatcgtgctactaagtctaatgggaattaccctggaggaaatcgagatgtccgcagcacttcctattaaccctaccattattcggatcatgcgggtcttgcgcatcgcaagggtgttgaagctgctgaagatggccactgggatgcgcgcactgctggataccgtggtgcaggccctgccacaggtaggtaatcttggactgttattcatgctgttatttttcatctatgccgccctcggcgtggagctcttcggcagactggaatgcagcgaagacaatccttgcgagggccttagtaggcatgccactttttctaatttcggcatggcatttctgactctcttccgggtgagcactggcgacaactggaacggcattatgaaggataccttgcgggagtgctctcgcgaggataagcactgcctcagttacctcccagcccttagcccagtgtacttcgtgacctttgtgctggtggctcaatttgtcctggtgaacgtggtcgtcgctgtgctgatgaagcacttagaggagtcgaacaaggaagcacgtgaagacgcggaactggacgctgaaatcgaattggaaatggcccagggtccaggaagtgccagaagggtagacgctgatcggcccccactcccccaagaaagccctggcgcccgggacgcccccaacctggtggccagaaaggtcagtgtgagccgaatgctgtccctcccaaatgacagttatatgtttcgccccgtggtacccgcctccgccccgcaccctagaccccttcaggaagtggagatggagacgtatggcgcaggcacccctctgggctctgtagccagcgtgcattcacccccggcagagtcgtgcgcctcactgcagatcccactcgccgttagcagcccagctcggagcggggagccgctccacgcgctgtccccacgtggaactgccaggtctcccagtctcagtagactgctttgtcggcaggaggccgtgcacacagattctctcgaggggaaaattgactcaccaagagacactttggaccccgccgagccaggggaaaagacgccagttcgacctgtgacccaggggggcagtctgcagagcccaccacgatctcctaggcctgcttccgtccgcacccgcaagcatacattcggacagcgctgcgtgtcatcacgcccagccgctcctggaggtgaggaggctgaagcaagtgatccggcggacgaggaggttagccacattacaagcagtgcatgcccctggcagcccacggccgagccgcatggcccggaggctagtcctgtggcaggaggcgagcgcgacctgcggagactgtattctgttgacgcccagggattccttgacaagcctggcagagctgacgagcagtggaggccaagtgcagaactagggtccggagagccaggtgaagctaaagcatggggcccagaagccgagcccgccctcggggcacgcaggaagaagaagatgagtcctccgtgcatttcagttgagcccccagccgaggacgagggcagtgcacgtccttccgccgcagaaggcggaagcactaccctgagacgaagaactccctcctgtgaggctaccccacatcgagactccctagaacccaccgagggcagcggggcaggaggagacccggccgctaagggggaacggtggggacaggcctcttgtcgtgccgagcatctgactgttccaagctttgcatttgagccactcgatttgggcgtgcccagtggagatcctttcctggatgggtcacattctgttacacccgagagtcgcgcttcttcatcaggcgcaattgttccgctagagcctcccgaatcagaaccacctatgccggttggggatccaccggagaaacggcgaggactttacctcaccgtcccacagtgtcccctggagaagccaggaagtccttctgccacaccagctcctggaggaggtgcagacgacccagtgtag

SEQ ID NO: 21651 - DNA, 7043 bp, Artificial Sequence
  derived and/or modified sequence
atgaccgaaggtgccagggccgctgatgaggtgcgtgtgccgctgggcgctccgcctccgggtcccgcagcactagtaggcgcatccccggagagcccaggagcccctgggagagaagccgaacgagggtccgaactgggcgtgagccccagcgagtcgccagccgcagagcggggagcagagctgggggctgacgaggaacagcgcgtgccttatcccgctctagccgcaacagtctttttctgcctcgggcaaaccacacgaccacgctcttggtgcctccgcctcgtttgtaacccctggtttgaacacgtctctatgctggtgatcatgctgaattgcgtgactctgggcatgttcaggccctgcgaggacgttgagtgtgggtcagagaggtgtaatatactggaagccttcgacgctttcatttttgcattctttgccgtcgaaatggtaattaaaatggttgccctaggcctttttggtcagaagtgctacttgggtgatacttggaaccgtctggacttttttattgtggtcgccggtatgatggaatattcgctcgacggacataatgtatctctgtcggctatccggacagtacgcgtgctgcgtcctctccgcgcaatcaacagggttccttccatgaggatcctggtcactctcttgctggacaccttaccaatgcttggtaatgttttgttactctgcttctttgtattttttatctttggcatcgttggcgtgcagttatgggccggactcctaagaaacagatgtttcctcgactccgctttcgtgcgaaataataacttgacgtttctgcgcccatactaccaaacggaggagggcgaggagaatccgtttatatgcagcagtcgcagagataatggtatgcaaaagtgctcgcacattcctgggaggagggaattgcgaatgccttgcacccttggttgggaggcctatacacagccacaagccgagggagtcggggcagctcgtaatgcctgtatcaattggaatcagtactacaacgtctgtagatccggggacagcaacccccacaacggcgcaattaacttcgacaatatcggatacgcctggattgctatatttcaggtgataactcttgagggatgggttgatattatgtattacgtgatggatgctcacagtttttataactttatctattttattctgctgatcatcgtggggtccttctttatgatcaatctttgtttagtggtcatcgcgacccaattcagcgagaccaagcagagggagagccagctgatgagagaacagcgcgctcggcacttgtctaatgattctaccctagcctctttttccgagcccggtagttgttacgaggaactgttgaagtacgtcggacacatattccggaaagtaaaaagaagaagtctgagactctacgctcgatggcagtcccgctggcgtaaaaaggtagatccaagcgccgtccagggacagggccctgggcatcggcagaggcgagcgggtagacacactgccagtgtgcatcaccttgtgtaccatcatcaccatcaccatcaccaccattaccatttcagccacggcagtcctagaagacccggtccggaaccaggagcctgcgataccaggctggtgagggccggagcacccccttcacccccaagccccggacggggacctccagacgccgaaagcgtccacagcatctatcacgcagactgccacatcgaggggcctcaggaacgggcacgggtggctcacgccgctgcaaccgctgccgcaagtctgcgactagcgacaggccttggcacaatgaattatcctacaatcctgccgtctggtgtgggaagcggcaaaggttccacctcaccgggtccgaagggaaagtgggcaggcggtccgccagggaccggaggacatggcccacttagcctgaattctccggatccttatgagaagatccctcacgtagtcggagagcacggactgggccaggctcccggacacctgagtggactctcagtgccttgtccactgccttcccctcctgccggtaccctgacctgtgagctcaaatcgtgcccttactgcacccgcgctcttgaagatcccgaaggtgagctgtccggttccgagtctggggactcagatggcaggggggtgtatgaattcacccaagacgtgaggcacggagaccggtgggaccccacccggccacccagggcaactgatactcccggacccggtccaggcagcccccagaggcgggctcagcagagggccgctccaggagagcctggttggatgggccgtttgtgggtcacattttcagggaaactgcggagaatcgtggactcaaaatatttttcacgcggaattatgatggccattctggtcaacacccttagcatgggagtggagtatcacgaacagcccgaggagttgacaaacgccttggagatctccaacattgtgttcacttctatgttcgcgttagaaatgctcctgaagctgctcgcgtgcgggccattgggatatattagaaacccctataacattttcgacggcatcatcgtggtgatttcagtgtgggagatcgtgggacaggctgacgggggactgtctgttctgaggacattccggctgcttcgtgtcctgaaactggtccggtttttacctgccctccgcagacagcttgtggtgttggttaaaacaatggacaacgtagcgaccttctgcacactgctgatgctgttcatctttatattctcaatcctcggcatgcacctcttcggatgcaagttttccctaaagacagacacgggcgacaccgtcccagacaggaaaaattttgacagtcttctctgggccatagtgactgttttccagatacttacacaggaggattggaacgtggtactttataatggcatggcctcaacaagctcctgggcagccctctatttcgtcgcactaatgactttcgggaactatgtcctgttcaacctgctggtcgcgattctagtggaaggctttcaggctgagggggacgccaatcgttcagacaccgacgaagataaaacttcggttcacttcgaggaggatttccacaaacttcgggagcttcaaactactgaactcaagatgtgctctttagcggtaactcctaatggacacctagagggtcggggttcactgtcaccaccactgattatgtgcaccgctgctactcctatgccaacacctaaaagtagcccgtttctcgacgctgcaccctcactgcccgattctcgacgcggatcctctagctcaggagaccccccactaggcgatcagaagccgccagcgtctcttagaagcagtccctgcgccccatggggtcctagcggcgcttggagcagtcgcaggtcctcctggagctccctgggccgagctcccagtcttaagagacgcggtcaatgcggagaaagagagtctttgctgtccggggaaggcaagggaagcaccgatgacgaagccgaagatgggagggcagcaccaggcccacgggctactcccctgcggcgtgctgagtccttagaccctcggccattacgcccagccgcacttccacccaccaaatgtcgcgatagagacggccaggtcgtcgccctgccatccgatttcttccttaggatcgacagtcaccgtgaggatgccgcagaactcgatgacgacagcgaggactcttgttgtcttcgcctgcacaaggtactcgagccttataaaccccagtggtgtagatctcgcgaagcctgggcattgtatcttttctccccacagaaccggtttcgggtctcttgccaaaaggtcattacacataagatgtttgaccatgtggtgttagtgtttatctttctcaattgcgtcaccatcgcgttagagcggccagatattgatccaggcagtaccgagcgggtattccttagcgttagcaattacatttttactgcgatttttgttgccgaaatgatggtaaaggtggttgccctcggcctcctgtcgggtgaacacgcgtatcttcagagttcttggaacctgctggacggcctgttggtgctggtgagtctcgtcgatattgtcgtagctatggcatccgcgggaggagctaagatactaggggtgctgagagtgctgagacttctgcgcacccttcgccctctgagagtaatatccagggccccaggtttgaagctagttgtggaaactcttatctcgtccctgagacctattggtaatattgttttaatctgttgcgccttctttatcattttcggaattttaggggtacagctttttaagggcaagttctactactgcgaagggcctgatacacgaaatatttctaccaaggcccagtgccgtgcggctcactaccgatgggtgaggcgcaaatataacttcgacaacctgggccaggcactgatgtcattgttcgtgctgtccagtaaggatggctgggtgaatatcatgtacgatggtctggacgcagtaggggtcgatcagcagccggtccaaaatcataacccctggatgctgctgtactttatctcctttttactcattgtgtctttctttgtccttaatatgttcgttggtgtggtggtggagaatttccacaaatgcagacagcatcaggaggccgaggaggcacggcgacgcgaagaaaagcgattgcggagattggaacgacgccgaaggaaagcacagcgccgtccatactacgccgactatagtccaacccgtaggagtatccatagtttatgtacttcacattacttggacctgtttatcactttcattatttgcgtcaacgtaatcacaatgtccatggaacactacaatcaacctaaaagtctcgatgaggccctgaagtactgtaattacgtattcaccattgtgtttgtattcgaggctgctctgaagttggtggccttcggcttccggagatttttcaaagaccggtggaatcagttggatttggccattgtgctgctcagcctgatggggatcacccttgaggagatcgagatgtctgccgctcttcctataaaccccacaatcatacgaattatgcgtgtgctgaggattgctagagtattaaaacttctgaaaatggccaccggcatgcgcgcactcctggacaccgttgtgcaagcccttcctcaggtgggcaatctagggctgctgtttatgttgcttttttttatctacgccgctctcggggtggaattgttcggtcggctcgaatgctctgaagataacccatgcgagggcctttccagacacgccaccttttctaatttcggcatggcctttcttaccctgtttagagtgtcaaccggcgacaattggaacgggattatgaaggatactctcagggaatgttcccgagaggataaacactgcctttcttatcttcctgctcttagtcccgtttatttcgtaaccttcgtgctagtcgctcagttcgtcttggtgaacgtggttgttgccgtgctgatgaagcacctcgaagaaagcaacaaagaggccagagaggatgcagagctggacgccgagatcgagttggagatggcccagggccctggatccgcacgccgtgtggacgctgaccgacccccacttccacaggaaagcccaggcgcacgcgacgctccaaatttggttgcaagaaaagtgtcggtgagccgcatgctgtcactcccaaacgacagctacatgttcaggcctgtggtgcctgccagtgccccacacccacgaccattgcaagaggtggagatggagacctacggagccggaacccccctggggtccgttgctagcgtgcatagtcctcccgcagaaagctgcgcatctctgcagatcccgctagccgtctcctcccctgccaggtctggcgaacctcttcacgctctgtccccacggggaactgcccgttcaccgagcctgtccagactcctgtgtcgccaggaagcggtgcatacagattccctggagggaaagattgattcgccgagagataccttggatcccgctgagccgggtgaaaaaaccccagtgcggcctgttactcagggtggctccctgcagagcccacccaggtccccgcgaccagcgagcgtgagaaccagaaagcacacttttggacagagatgcgtgtcatcccgcccagctgccccaggcggtgaagaagccgaagcatctgatccggctgatgaagaagtgagccatataacctcgtccgcttgtccctggcagcccaccgccgagccccacggcccagaagcctcccccgtggcaggtggggagcgcgatcttcgccgattgtactcggtggacgcccaagggtttctggacaagcccggtagagccgatgagcagtggagaccatctgccgagctaggctctggggaacctggtgaagccaaagcatgggggcctgaggcggagcctgctctgggggcaaggagaaagaaaaaaatgtctcccccttgcatctccgttgaacctccagcggaagatgagggttcagcgcgtcccagtgctgcggaaggaggaagtacgaccttaaggcgaagaacaccgtcttgtgaagcaactcctcacagggattcactggagccaactgaaggaagtggagcaggaggcgatcccgctgcaaagggggagaggtggggccaggcatcttgtcgggcagagcatctcacagtgccatcatttgcatttgaaccactagacctgggtgtcccgtcaggtgatcccttcctcgacggtagccatagtgtgacccccgagtctcgcgcaagctctagtggcgctattgtgcctcttgagccacccgagagcgagccaccaatgccagtgggcgatccgccagaaaaaagacggggtctgtacctgaccgtccctcagtgcccccttgaaaagcctggctccccgagcgctactccagctcctggaggtggcgctgatgacccagtgta

SEQ ID NO: 21652 - DNA, 8069 bp, Artificial Sequence
  derived and/or modified sequence
cgaggccgccgccgtcgcctccgccgggcgagccggagccggagtcgagccgcggccgggagccgggcgggctggggacgcgggccgggggcggaggcgctgggggccggggccggggccgggggcggaggcgctgggggccggggccggggccgggcgccgagcggggtccgcggtgaccgcgccgcccgggcgatgcccgcggggacgccgccggccagcagagcgaggtgctgccggccgccaccatgaccgagggcgcacgggccgccgacgaggtccgggtgcccctgggcgcgccgccccctggccctgcggcgttggtgggggcgtccccggagagccccggggcgccgggacgcgaggcggagcgggggtccgagctcggcgtgtcaccctccgagagcccggcggccgagcgcggcgcggagctgggtgccgacgaggagcagcgcgtcccgtacccggccttggcggccacggtcttcttctgcctcggtcagaccacgcggccgcgcagctggtgcctccggctggtctgcaacccatggttcgagcacgtgagcatgctggtaatcatgctcaactgcgtgaccctgggcatgttccggccctgtgaggacgttgagtgcggctccgagcgctgcaacatcctggaggcctttgacgccttcattttcgccttttttgcggtggagatggtcatcaagatggtggccttggggctgttcgggcagaagtgttacctgggtgacacgtggaacaggctggatttcttcatcgtcgtggcgggcatgatggagtactcgttggacggacacaacgtgagcctctcggctatcaggaccgtgcgggtgctgcggcccctccgcgccatcaaccgcgtgcctagcatgcggatcctggtcactctgctgctggatacgctgcccatgctcgggaacgtccttctgctgtgcttcttcgtcttcttcattttcggcatcgttggcgtccagctctgggctggcctcctgcggaaccgctgcttcctggacagtgcctttgtcaggaacaacaacctgaccttcctgcggccgtactaccagacggaggagggcgaggagaacccgttcatctgctcctcacgccgagacaacggcatgcagaagtgctcgcacatccccggccgccgcgagctgcgcatgccctgcaccctgggctgggaggcctacacgcagccgcaggccgagggggtgggcgctgcacgcaacgcctgcatcaactggaaccagtactacaacgtgtgccgctcgggtgactccaacccccacaacggtgccatcaacttcgacaacatcggctacgcctggattgccatcttccaggtgatcacgctggaaggctgggtggacatcatgtactacgtcatggacgcccactcattctacaacttcatctatttcatcctgctcatcatcgtgggctccttcttcatgatcaacctgtgcctggtggtgattgccacgcagttctcggagacgaagcagcgggagagtcagctgatgcgggagcagcgggcacgccacctgtccaacgacagcacgctggccagcttctccgagcctggcagctgctacgaagagctgctgaagtacgtgggccacatattccgcaaggtcaagcggcgcagcttgcgcctctacgcccgctggcagagccgctggcgcaagaaggtggaccccagtgctgtgcaaggccagggtcccgggcaccgccagcgccgggcaggcaggcacacagcctcggtgcaccacctggtctaccaccaccatcaccaccaccaccaccactaccatttcagccatggcagcccccgcaggcccggccccgagccaggcgcctgcgacaccaggctggtccgagctggcgcgcccccctcgccaccttccccaggccgcggaccccccgacgcagagtctgtgcacagcatctaccatgccgactgccacatagaggggccgcaggagagggcccgggtggcacatgccgcagccactgccgctgccagcctcagactggccacagggctgggcaccatgaactaccccacgatcctgccctcaggggtgggcagcggcaaaggcagcaccagccccggacccaaggggaagtgggccggtggaccgccaggcaccggggggcacggcccgttgagcttgaacagccctgatccctacgagaagatcccgcatgtggtcggggagcatggactgggccaggcccctggccatctgtcgggcctcagtgtgccctgccccctgcccagccccccagcgggcacactgacctgtgagctgaagagctgcccgtactgcacccgtgccctggaggacccggagggtgagctcagcggctcggaaagtggagactcagatggccgtggcgtctatgaattcacgcaggacgtccggcacggtgaccgctgggaccccacgcgaccaccccgtgcgacggacacaccaggcccaggcccaggcagcccccagcggcgggcacagcagagggcagccccgggcgagccaggctggatgggccgcctctgggttaccttcagcggcaagctgcgccgcatcgtggacagcaagtacttcagccgtggcatcatgatggccatccttgtcaacacgctgagcatgggcgtggagtaccatgagcagcccgaggagctgactaatgctctggagatcagcaacatcgtgttcaccagcatgtttgccctggagatgctgctgaagctgctggcctgcggccctctgggctacatccggaacccgtacaacatcttcgacggcatcatcgtggtcatcagcgtctgggagatcgtggggcaggcggacggtggcttgtctgtgctgcgcaccttccggctgctgcgtgtgctgaagctggtgcgctttctgccagccctgcggcgccagctcgtggtgctggtgaagaccatggacaacgtggctaccttctgcacgctgctcatgctcttcattttcatcttcagcatcctgggcatgcaccttttcggctgcaagttcagcctgaagacagacaccggagacaccgtgcctgacaggaagaacttcgactccctgctgtgggccatcgtcaccgtgttccagatcctgacccaggaggactggaacgtggtcctgtacaacggcatggcctccacctcctcctgggccgccctctacttcgtggccctcatgaccttcggcaactatgtgctcttcaacctgctggtggccatcctcgtggagggcttccaggcggagggcgatgccaacagatccgacacggacgaggacaagacgtcggtccacttcgaggaggacttccacaagctcagagaactccagaccacagagctgaagatgtgttccctggccgtgacccccaacgggcacctggagggacgaggcagcctgtcccctcccctcatcatgtgcacagctgccacgcccatgcctacccccaagagctcaccattcctggatgcagcccccagcctcccagactctcggcgtggcagcagcagctccggggacccgccactgggagaccagaagcctccggccagcctccgaagttctccctgtgccccctggggccccagtggcgcctggagcagccggcgctccagctggagcagcctgggccgtgcccccagcctcaagcgccgcggccagtgtggggaacgtgagtccctgctgtctggcgagggcaagggcagcaccgacgacgaagctgaggacggcagggccgcgcccgggccccgtgccaccccactgcggcgggccgagtccctggacccacggcccctgcggccggccgccctcccgcctaccaagtgccgcgatcgcgacgggcaggtggtggccctgcccagcgacttcttcctgcgcatcgacagccaccgtgaggatgcagccgagcttgacgacgactcggaggacagctgctgcctccgcctgcataaagtgctggagccctacaagccccagtggtgccggagccgcgaggcctgggccctctacctcttctccccacagaaccggttccgcgtctcctgccagaaggtcatcacacacaagatgtttgatcacgtggtcctcgtcttcatcttcctcaactgcgtcaccatcgccctggagaggcctgacattgatcccggcagcaccgagcgggtcttcctcagcgtctccaattacatcttcacggccatcttcgtggcggagatgatggtgaaggtggtggccctggggctgctgtccggcgagcacgcctacctgcagagcagctggaacctgctggatgggctgctggtgctggtgtccctggtggacattgtcgtggccatggcctcggctggtggcgccaagatcctgggtgttctgcgcgtgctgcgtctgctgcggaccctgcggcctctgagggtcatcagccgggccccgggcctcaagctggtggtggagacgctgatatcatcactcaggcccattgggaacatcgtcctcatctgctgcgccttcttcatcatttttggcattttgggtgtgcagctcttcaaagggaagttctactactgcgagggccccgacaccaggaacatctccaccaaggcacagtgccgggccgcccactaccgctgggtgcgacgcaagtacaacttcgacaacctgggccaggccctgatgtcgctgttcgtgctgtcatccaaggatggatgggtgaacatcatgtacgacgggctggatgccgtgggtgtcgaccagcagcctgtgcagaaccacaacccctggatgctgctgtacttcatctccttcctgctcatcgtcagcttcttcgtgctcaacatgttcgtgggcgtcgtggtcgagaacttccacaagtgccggcagcaccaggaggcggaggaggcgcggcggcgagaggagaagcggctgcggcgcctagagaggaggcgcaggaaggcccagcgccggccctactatgccgactactcgcccacgcgccgctccattcactcgctgtgcaccagccactatctcgacctcttcatcaccttcatcatctgtgtcaacgtcatcaccatgtccatggagcactataaccaacccaagtcgctggacgaggccctcaagtactgcaactacgtcttcaccatcgtgtttgtcttcgaggctgcactgaagctggtagcatttgggttccgtcggttcttcaaggacaggtggaaccagctggacctggccatcgtgctgctgtcactcatgggcatcacgctggaggagatagagatgagcgccgcgctgcccatcaaccccaccatcatccgcatcatgcgcgtgcttcgcattgcccgtgtgctgaagctgctgaagatggctacgggcatgcgcgccctgctggacactgtggtgcaagctctcccccaggtggggaacctgggccttcttttcatgctcctgttttttatctatgctgcgctgggagtggagctgttcgggaggctggagtgcagtgaagacaacccctgcgagggcctgagcaggcacgccaccttcagcaacttcggcatggccttcctcacgctgttccgcgtgtccacgggggacaactggaacgggatcatgaaggacacgctgcgcgagtgctcccgtgaggacaagcactgcctgagctacctgccggccctgtcgcccgtctacttcgtgaccttcgtgctggtggcccagttcgtgctggtgaacgtggtggtggccgtgctcatgaagcacctggaggagagcaacaaggaggcacgggaggatgcggagctggacgccgagatcgagctggagatggcgcagggccccgggagtgcacgccgggtggacgcggacaggcctcccttgccccaggagagtccgggcgccagggacgccccaaacctggttgcacgcaaggtgtccgtgtccaggatgctctcgctgcccaacgacagctacatgttcaggcccgtggtgcctgcctcggcgccccacccccgcccgctgcaggaggtggagatggagacctatggggccggcacccccttgggctccgttgcctctgtgcactctccgcccgcagagtcctgtgcctccctccagatcccattggctgtgtcgtccccagccaggagcggcgagcccctccacgccctgtcccctcggggcacagcccgctcccccagtctcagccggctgctctgcagacaggaggctgtgcacaccgattccttggaagggaagattgacagccctagggacaccctggatcctgcagagcctggtgagaaaaccccggtgaggccggtgacccaggggggctccctgcagtccccaccacgctccccacggcccgccagcgtccgcactcgtaagcataccttcggacagcgctgcgtctccagccggccggcggccccaggcggagaggaggccgaggcctcggacccagccgacgaggaggtcagccacatcaccagctccgcctgcccctggcagcccacagccgagccccatggccccgaagcctctccggtggccggcggcgagcgggacctgcgcaggctctacagcgtggatgctcagggcttcctggacaagccgggccgggcagacgagcagtggcggccctcggcggagctgggcagcggggagcctggggaggcgaaggcctggggccctgaggccgagcccgctctgggtgcgcgcagaaagaagaagatgagccccccctgcatctcggtggaaccccctgcggaggacgagggctctgcgcggccctccgcggcagagggcggcagcaccacactgaggcgcaggaccccgtcctgtgaggccacgcctcacagggactccctggagcccacagagggctcaggcgccgggggggaccctgcagccaagggggagcgctggggccaggcctcctgccgggctgagcacctgaccgtccccagctttgcctttgagccgctggacctcggggtccccagtggagaccctttcttggacggtagccacagtgtgaccccagaatccagagcttcctcttcaggggccatagtgcccctggaacccccagaatcagagcctcccatgcccgtcggtgaccccccagagaagaggcgggggctgtacctcacagtcccccagtgtcctctggagaaaccagggtccccctcagccacccctgccccagggggtggtgcagatgaccccgtgtagctcggggcttggtgccgcccacggctttggccctggggtctgggggccccgctggggtggaggcccaggcagaaccctgcatggaccctgacttgggtcccgtcgtgagcagaaaggcccggggaggatgacggcccaggccctggttctctgcccagcgaagcaggagtagctgccgggccccacgagcctccgtccgttctggttcgggtttctccgagttttgctaccagccgaggctgtgcgggcaactgggtcagcctcccgtcaggagagaagccgcgtctgtgggacgaagaccgggcacccgccagagaggggaaggtaccaggttgcgtcctttcaggccccgcgttgttacaggacactcgctgggggccctgtgcccttgccggcggcaggttgcagccaccgcggcccaatgtcaccttcactcacagtctgagttcttgtccgcctgtcacgccctcaccaccctccccttccagccaccaccctttccgttccgctcgggccttcccagaagcgtcctgtgactctgggagaggtgacacctcactaaggggccgaccccatggagtaacgcgcccggccccgatgcgaatcaggcctcccctacatctgggggcgttggccgcgagattcccattgacacctttgtttcgtgtgcttttaaattcaggttaaatgttgcaataatctgatgcagaagactcagcttctcaagggagagggagggggcggagcggaataaatagtaacttatttaagaaatgc

SEQ ID NO: 21653 - DNA, 7044 bp, Artificial Sequence
  derived and/or modified sequence
atgaccgagggcgccagagccgccgacgaggtgagagtgcccctgggcgcccccccccccggccccgccgccctggtgggcgccagccccgagagccccggcgcccccggcagagaggccgagagaggcagcgagctgggcgtgagccccagcgagagccccgccgccgagagaggcgccgagctgggcgccgacgaggagcagagagtgccctaccccgccctggccgccaccgtgttcttctgcctgggccagaccaccagacccagaagctggtgcctgagactggtgtgcaacccctggttcgagcacgtgagcatgctggtgatcatgctgaactgcgtgaccctgggcatgttcagaccctgcgaggacgtggagtgcggcagcgagagatgcaacatcctggaggccttcgacgccttcatcttcgccttcttcgccgtggagatggtgatcaagatggtggccctgggcctgttcggccagaagtgctacctgggcgacacctggaacagactggacttcttcatcgtggtggccggcatgatggagtacagcctggacggccacaacgtgagcctgagcgccatcagaaccgtgagagtgctgagacccctgagagccatcaacagagtgcccagcatgagaatcctggtgaccctgctgctggacaccctgcccatgctgggcaacgtgctgctgctgtgcttcttcgtgttcttcatcttcggcatcgtgggcgtgcagctgtgggccggcctgctgagaaacagatgcttcctggacagcgccttcgtgagaaacaacaacctgaccttcctgagaccctactaccagaccgaggagggcgaggagaaccccttcatctgcagcagcagaagagacaacggcatgcagaagtgcagccacatccccggcagaagagagctgagaatgccctgcaccctgggctgggaggcctacacccagccccaggccgagggcgtgggcgccgccagaaacgcctgcatcaactggaaccagtactacaacgtgtgcagaagcggcgacagcaacccccacaacggcgccatcaacttcgacaacatcggctacgcctggatcgccatcttccaggtgatcaccctggagggctgggtggacatcatgtactacgtgatggacgcccacagcttctacaacttcatctacttcatcctgctgatcatcgtgggcagcttcttcatgatcaacctgtgcctggtggtgatcgccacccagttcagcgagaccaagcagagagagagccagctgatgagagagcagagagccagacacctgagcaacgacagcaccctggccagcttcagcgagcccggcagctgctacgaggagctgctgaagtacgtgggccacatcttcagaaaggtgaagagaagaagcctgagactgtacgccagatggcagagcagatggagaaagaaggtggaccccagcgccgtgcagggccagggccccggccacagacagagaagagccggcagacacaccgccagcgtgcaccacctggtgtaccaccaccaccaccaccaccaccaccactaccacttcagccacggcagccccagaagacccggccccgagcccggcgcctgcgacaccagactggtgagagccggcgccccccccagcccccccagccccggcagaggcccccccgacgccgagagcgtgcacagcatctaccacgccgactgccacatcgagggcccccaggagagagccagagtggcccacgccgccgccaccgccgccgccagcctgagactggccaccggcctgggcaccatgaactaccccaccatcctgcccagcggcgtgggcagcggcaagggcagcaccagccccggccccaagggcaagtgggccggcggcccccccggcaccggcggccacggccccctgagcctgaacagccccgacccctacgagaagatcccccacgtggtgggcgagcacggcctgggccaggcccccggccacctgagcggcctgagcgtgccctgccccctgcccagcccccccgccggcaccctgacctgcgagctgaagagctgcccctactgcaccagagccctggaggaccccgagggcgagctgagcggcagcgagagcggcgacagcgacggcagaggcgtgtacgagttcacccaggacgtgagacacggcgacagatgggaccccaccagaccccccagagccaccgacacccccggccccggccccggcagcccccagagaagagcccagcagagagccgcccccggcgagcccggctggatgggcagactgtgggtgaccttcagcggcaagctgagaagaatcgtggacagcaagtacttcagcagaggcatcatgatggccatcctggtgaacaccctgagcatgggcgtggagtaccacgagcagcccgaggagctgaccaacgccctggagatcagcaacatcgtgttcaccagcatgttcgccctggagatgctgctgaagctgctggcctgcggccccctgggctacatcagaaacccctacaacatcttcgacggcatcatcgtggtgatcagcgtgtgggagatcgtgggccaggccgacggcggcctgagcgtgctgagaaccttcagactgctgagagtgctgaagctggtgagattcctgcccgccctgagaagacagctggtggtgctggtgaagaccatggacaacgtggccaccttctgcaccctgctgatgctgttcatcttcatcttcagcatcctgggcatgcacctgttcggctgcaagttcagcctgaagaccgacaccggcgacaccgtgcccgacagaaagaacttcgacagcctgctgtgggccatcgtgaccgtgttccagatcctgacccaggaggactggaacgtggtgctgtacaacggcatggccagcaccagcagctgggccgccctgtacttcgtggccctgatgaccttcggcaactacgtgctgttcaacctgctggtggccatcctggtggagggcttccaggccgagggcgacgccaacagaagcgacaccgacgaggacaagaccagcgtgcacttcgaggaggacttccacaagctgagagagctgcagaccaccgagctgaagatgtgcagcctggccgtgacccccaacggccacctggagggcagaggcagcctgagcccccccctgatcatgtgcaccgccgccacccccatgcccacccccaagagcagccccttcctggacgccgcccccagcctgcccgacagcagaagaggcagcagcagcagcggcgacccccccctgggcgaccagaagccccccgccagcctgagaagcagcccctgcgccccctggggccccagcggcgcctggagcagcagaagaagcagctggagcagcctgggcagagcccccagcctgaagagaagaggccagtgcggcgagagagagagcctgctgagcggcgagggcaagggcagcaccgacgacgaggccgaggacggcagagccgcccccggccccagagccacccccctgagaagagccgagagcctggaccccagacccctgagacccgccgccctgccccccaccaagtgcagagacagagacggccaggtggtggccctgcccagcgacttcttcctgagaatcgacagccacagagaggacgccgccgagctggacgacgacagcgaggacagctgctgcctgagactgcacaaggtgctggagccctacaagccccagtggtgcagaagcagagaggcctgggccctgtacctgttcagcccccagaacagattcagagtgagctgccagaaggtgatcacccacaagatgttcgaccacgtggtgctggtgttcatcttcctgaactgcgtgaccatcgccctggagagacccgacatcgaccccggcagcaccgagagagtgttcctgagcgtgagcaactacatcttcaccgccatcttcgtggccgagatgatggtgaaggtggtggccctgggcctgctgagcggcgagcacgcctacctgcagagcagctggaacctgctggacggcctgctggtgctggtgagcctggtggacatcgtggtggccatggccagcgccggcggcgccaagatcctgggcgtgctgagagtgctgagactgctgagaaccctgagacccctgagagtgatcagcagagcccccggcctgaagctggtggtggagaccctgatcagcagcctgagacccatcggcaacatcgtgctgatctgctgcgccttcttcatcatcttcggcatcctgggcgtgcagctgttcaagggcaagttctactactgcgagggccccgacaccagaaacatcagcaccaaggcccagtgcagagccgcccactacagatgggtgagaagaaagtacaacttcgacaacctgggccaggccctgatgagcctgttcgtgctgagcagcaaggacggctgggtgaacatcatgtacgacggcctggacgccgtgggcgtggaccagcagcccgtgcagaaccacaacccctggatgctgctgtacttcatcagcttcctgctgatcgtgagcttcttcgtgctgaacatgttcgtgggcgtggtggtggagaacttccacaagtgcagacagcaccaggaggccgaggaggccagaagaagagaggagaagagactgagaagactggagagaagaagaagaaaggcccagagaagaccctactacgccgactacagccccaccagaagaagcatccacagcctgtgcaccagccactacctggacctgttcatcaccttcatcatctgcgtgaacgtgatcaccatgagcatggagcactacaaccagcccaagagcctggacgaggccctgaagtactgcaactacgtgttcaccatcgtgttcgtgttcgaggccgccctgaagctggtggccttcggcttcagaagattcttcaaggacagatggaaccagctggacctggccatcgtgctgctgagcctgatgggcatcaccctggaggagatcgagatgagcgccgccctgcccatcaaccccaccatcatcagaatcatgagagtgctgagaatcgccagagtgctgaagctgctgaagatggccaccggcatgagagccctgctggacaccgtggtgcaggccctgccccaggtgggcaacctgggcctgctgttcatgctgctgttcttcatctacgccgccctgggcgtggagctgttcggcagactggagtgcagcgaggacaacccctgcgagggcctgagcagacacgccaccttcagcaacttcggcatggccttcctgaccctgttcagagtgagcaccggcgacaactggaacggcatcatgaaggacaccctgagagagtgcagcagagaggacaagcactgcctgagctacctgcccgccctgagccccgtgtacttcgtgaccttcgtgctggtggcccagttcgtgctggtgaacgtggtggtggccgtgctgatgaagcacctggaggagagcaacaaggaggccagagaggacgccgagctggacgccgagatcgagctggagatggcccagggccccggcagcgccagaagagtggacgccgacagaccccccctgccccaggagagccccggcgccagagacgcccccaacctggtggccagaaaggtgagcgtgagcagaatgctgagcctgcccaacgacagctacatgttcagacccgtggtgcccgccagcgccccccaccccagacccctgcaggaggtggagatggagacctacggcgccggcacccccctgggcagcgtggccagcgtgcacagcccccccgccgagagctgcgccagcctgcagatccccctggccgtgagcagccccgccagaagcggcgagcccctgcacgccctgagccccagaggcaccgccagaagccccagcctgagcagactgctgtgcagacaggaggccgtgcacaccgacagcctggagggcaagatcgacagccccagagacaccctggaccccgccgagcccggcgagaagacccccgtgagacccgtgacccagggcggcagcctgcagagcccccccagaagccccagacccgccagcgtgagaaccagaaagcacaccttcggccagagatgcgtgagcagcagacccgccgcccccggcggcgaggaggccgaggccagcgaccccgccgacgaggaggtgagccacatcaccagcagcgcctgcccctggcagcccaccgccgagccccacggccccgaggccagccccgtggccggcggcgagagagacctgagaagactgtacagcgtggacgcccagggcttcctggacaagcccggcagagccgacgagcagtggagacccagcgccgagctgggcagcggcgagcccggcgaggccaaggcctggggccccgaggccgagcccgccctgggcgccagaagaaagaagaagatgagccccccctgcatcagcgtggagccccccgccgaggacgagggcagcgccagacccagcgccgccgagggcggcagcaccaccctgagaagaagaacccccagctgcgaggccaccccccacagagacagcctggagcccaccgagggcagcggcgccggcggcgaccccgccgccaagggcgagagatggggccaggccagctgcagagccgagcacctgaccgtgcccagcttcgccttcgagcccctggacctgggcgtgcccagcggcgaccccttcctggacggcagccacagcgtgacccccgagagcagagccagcagcagcggcgccatcgtgcccctggagccccccgagagcgagccccccatgcccgtgggcgacccccccgagaagagaagaggcctgtacctgaccgtgccccagtgccccctggagaagcccggcagccccagcgccacccccgcccccggcggcggcgccgacgaccccgtgtag

SEQ ID NO: 21654 - protein, 230 aa, Artificial Sequence
  derived and/or modified sequence
MEAAETEAEAAALEVLAEVAGILEPVGLQEEAELPAKILVEFVVDSQKKDKLLCSQLQVADFLQNILAQEDTAKGLDPLASEDTSRQKAIAAKEQWKELKATYREHVEAIKIGLTKALTQMEEAQRKRTQLREAFEQLQAKKQMAMEKRRAVQNQWQLQQEKHLQHLAEVSAEGKLLFPEAEAEAENLPDDKPQQPTRPQEQSTGDTMGRDPGVSFKAVGLQPAGDVNLP

SEQ ID NO: 21655 - DNA, 693 bp, Artificial Sequence
  derived and/or modified sequence
atggaggccgccgagaccgaggccgaggccgccgccctggaggtgctggccgaggtggccggcatcctggagcccgtgggcctgcaggaggaggccgagctgcccgccaagatcctggtggagttcgtggtggacagccagaagaaggacaagctgctgtgcagccagctgcaggtggccgacttcctgcagaacatcctggcccaggaggacaccgccaagggcctggaccccctggccagcgaggacaccagcagacagaaggccatcgccgccaaggagcagtggaaggagctgaaggccacctacagagagcacgtggaggccatcaagatcggcctgaccaaggccctgacccagatggaggaggcccagagaaagagaacccagctgagagaggccttcgagcagctgcaggccaagaagcagatggccatggagaagagaagagccgtgcagaaccagtggcagctgcagcaggagaagcacctgcagcacctggccgaggtgagcgccgagggcaagctgctgttccccgaggccgaggccgaggccgagaacctgcccgacgacaagccccagcagcccaccagaccccaggagcagagcaccggcgacaccatgggcagagaccccggcgtgagcttcaaggccgtgggcctgcagcccgccggcgacgtgaacctgccctag

SEQ ID NO: 21656 - DNA, 372 bp, Artificial Sequence
  derived and/or modified sequence
atggaggccgccgagaccgaggccgaggccgccgccctggaggtgctggccgaggtggccggcatcctggagcccgtgggcctgcaggaggaggccgagctgcccgccaagatcctggtggagttcgtggtggacagccagaagaaggacaagctgctgtgcagccagctgcaggtggccgacttcctgcagaacatcctggcccaggagagaccctggtgcgtgctgcagggctgctggagcaccacctgctggagatgcaagttcgccatgaccagctggagaaccgccgcctggagaaagatcctggagaaggccagcgacttcccccacctgcccaccatcatcaccggcaagaccgtgaacagctag

SEQ ID NO: 21657 - DNA, 693 bp, Artificial Sequence
  derived and/or modified sequence
atggaggccgcggaaacagaagccgaagcagctgccttagaggtcctagctgaagtggctggaatcttagagccagttggcttgcaggaggaggctgaactgccagcaaagatcttggttgaattcgtagttgatagccagaagaaggacaaattgctttgtagccaactgcaagtagcggatttcttacagaatattctggcccaggaagataccgccaagggtctagatccgctagcttctgaggatacttcaagacagaaggccattgctgctaaagagcagtggaaagaactgaaagctacttacagggagcacgtggaggccatcaaaatcggcctgaccaaagctctaactcagatggaagaagcacagcggaaaaggacccagctgcgggaagctttcgaacagctgcaagccaaaaagcagatggcaatggagaaaaggcgggctgttcagaaccagtggcaactgcaacaggagaaacatttacaacacctcgccgaggtgtccgcagagggcaaactgctattccccgaagctgaagccgaggctgagaacctccctgacgacaaaccccagcagccaaccagaccgcaggaacagagtactggcgacaccatgggcagagatcccggcgtaagctttaaggccgtgggcttacagccagccggcgatgtgaatctcccttag

SEQ ID NO: 21658 - DNA, 807 bp, Artificial Sequence
  derived and/or modified sequence
ggaaggcagctgaactcggcgcctggaaagatggaggcagcggagacagaggcggaagctgcagccctagaggtcctggctgaggtggcaggcatcttggaacctgtaggcctgcaggaggaggcagaactgccagccaagatcctggttgagtttgtggtggactctcagaagaaagacaagctgctctgcagccagcttcaggtagcggatttcctgcagaacatcctggctcaggaggacactgctaagggtctcgaccccttggcttctgaagacacgagccgacagaaggcaattgcagctaaggaacaatggaaagagctgaaggccacctacagggagcacgtagaggccatcaaaattggcctcaccaaggccctgactcagatggaggaagcccagaggaaacggacacaactccgggaagcctttgagcagctccaggccaagaaacaaatggccatggagaaacgcagagcagtccagaaccagtggcagctacaacaggagaagcatctgcagcatctggcggaggtttctgcagagggtaagctgttgttccctgaggctgaggctgaggcagagaatcttccagatgataaaccccagcagccgactcgaccccaggagcagagtacaggagacaccatggggagagaccctggtgtgtccttcaaggctgttggtctacaacctgctggagatgtaaatttgccatgacttcctggaggacagcagcatggagaaagatcctagaaaaggcctctgacttccctcacctcccaaccatcattacaggaaaga

SEQ ID NO: 21659 - DNA, 372 bp, Artificial Sequence
  derived and/or modified sequence
atggaggcagctgagacagaagcagaggccgccgctctggaagtcctcgcggaagtcgctggtatcctggagcccgtcggcctccaagaagaggccgaactccccgctaaaattctcgtggagttcgtggtagatagccagaagaaggacaaactgctttgctctcagctgcaggtcgctgactttctccaaaacattctggcacaagagcggccatggtgcgtccttcagggctgttggagtaccacatgttggaggtgcaaatttgctatgacctcatggcgcaccgctgcttggcgcaaaatccttgagaaggctagcgattttcctcatcttccaaccataatcacaggaaagacagtgaactcttag

SEQ ID NO: 21660 - DNA, 663 bp, Artificial Sequence
  derived and/or modified sequence
ggaaagatggaggcagcggagacagaggcggaagctgcagccctagaggtcctggctgaggtggcaggcatcttggaacctgtaggcctgcaggaggaggcagaactgccagccaagatcctggttgagtttgtggtggactctcagaagaaagacaagctgctctgcagccagcttcaggtagcggatttcctgcagaacatcctggctcaggagagaccctggtgtgtccttcaaggctgttggtctacaacctgctggagatgtaaatttgccatgacttcctggaggacagcagcatggagaaagatcctagaaaaggcctctgacttccctcacctcccaaccatcattacaggaaagactgtgaactcctgagttcagcttgatttctgactacatcccagcaagctctggcatctgtggattaaaatccctggatctctctcagttgtgtatttgttcatcttcatatgctggcaggaacaactattaatacagatactcagaagccaataacatgacaggagctgggactggtttgaacacagggtgtgcagatggggagggggtactggccttgggcctcctatgatgcagacatggtgaatttaattcaaggaggaggagaatgttttaggcaggtggttatatgtgggaaga

SEQ ID NO: 21661 - DNA, 693 bp, Artificial Sequence
  derived and/or modified sequence
atggaggccgctgagacagaggccgaggccgccgccctggaggtgctggccgaggtggccggcatcctggagcctgtgggcctgcaggaggaggccgagctgcctgccaagatcctggtggagtttgtggtggacagccagaagaaggacaagctgctgtgcagccagctgcaggtggccgacttcctgcagaacatcctggcccaggaggacacagccaagggcctggaccccctggccagcgaggacaccagccggcagaaggccatcgccgccaaggagcagtggaaggagctgaaggccacctaccgggagcacgtggaggccatcaagattggcctgaccaaggccctgacccagatggaggaggcccagaggaagaggacccagctgcgggaggcctttgagcagctgcaggccaagaagcagatggccatggagaagagaagagctgtgcagaaccagtggcagctgcagcaggagaagcacctgcagcacctggccgaggtgtctgctgagggcaagctgctcttccctgaggccgaggccgaggccgagaacctgcctgatgacaagccccagcagcccacccggccccaggagcagagcactggagacaccatgggccgggaccccggggtgtccttcaaggctgtgggcctgcagcctgctggagatgtgaacctgccctag

SEQ ID NO: 21662 - DNA, 372 bp, Artificial Sequence
  derived and/or modified sequence
atggaggccgctgagacagaggccgaggccgccgccctggaggtgctggccgaggtggccggcatcctggagcctgtgggcctgcaggaggaggccgagctgcctgccaagatcctggtggagtttgtggtggacagccagaagaaggacaagctgctgtgcagccagctgcaggtggccgacttcctgcagaacatcctggcccaggagcggccctggtgtgtgctgcagggctgctggagcaccacctgctggcgctgcaagtttgccatgacctcctggaggacagctgcctggaggaagatcctggagaaggccagtgacttcccccacctgcccaccatcatcaccgggaagacagtgaacagctag

SEQ ID NO: 21663 - DNA, 693 bp, Artificial Sequence
  derived and/or modified sequence
atggaggccgccgagaccgaggccgaggccgccgccctggaggtgctggccgaggttgctgggatcctcgaacccgtgggattgcaggaggaggccgaactgccggccaagatccttgtggagtttgtggtggacagccagaagaaggacaagctgctttgctcgcagctgcaggtcgcggatttcctccagaatatcctggctcaagaagatacagccaaggggttagaccccctcgcatctgaagatacctcacggcagaaagccatagccgccaaagaacaatggaaagagttgaaggcaacatatcgggagcacgtggaggccatcaagatcggcttgaccaaggccctaacccagatggaagaggctcagcggaagaggacccagctgagagaggccttcgaacagctgcaagccaaaaaacagatggcaatggaaaagagaagggcagtgcagaatcagtggcagttgcagcaggagaaacacctccaacacctggcagaggtgagtgctgaagggaaacttctcttccctgaggccgaggcggaagcagaaaatctgcccgatgataagcctcaacagcccacgcgcccccaagaacagagcacgggtgacaccatgggacgggatccaggagtttcattcaaggctgtcggacttcagccggcaggggacgtaaatttaccgtag

SEQ ID NO: 21664 - DNA, 372 bp, Artificial Sequence
  derived and/or modified sequence
atggaggccgccgagaccgaggccgaggccgccgccctggaggtgctggccgaagtcgcgggcatcttagagcctgtcggcctccaagaagaggccgaactgcctgcaaagattctggtggaatttgtcgtggactcgcaaaagaaagacaagctgctgtgcagccagctccaagtagccgatttcctccaaaacatcttggcccaagaacgcccttggtgcgtgctccagggctgctggtctacaacttgctggcgatgcaagttcgccatgacttcgtggagaaccgcagcctggaggaagatcctggagaaggcctctgacttcccacatcttccaacaataatcactggaaaaaccgtcaattcgtag

SEQ ID NO: 21665 - DNA, 693 bp, Artificial Sequence
  derived and/or modified sequence
atggaggccgctgagaccgaggccgaagctgctgccctggaggtgctggccgaggtcgccggtattctggagcccgtggggctccaggaagaggcagagctgcccgcaaagattttagttgaatttgttgtggatagtcaaaagaaggacaagctgttatgctcccaacttcaggttgcggattttctacagaatatacttgcccaggaagacaccgccaaggggctggacccacttgcatctgaagacaccagtcgccaaaaggcaattgctgctaaagaacaatggaaagagctgaaggcaacataccgcgagcacgtggaagcaatcaagatcgggctgactaaggcattgacccagatggaggaggcccagagaaaacggacacagctccgtgaggcatttgagcagctgcaagctaagaaacagatggctatggagaaacggcgtgcagtacagaatcagtggcaactacagcaagagaaacatctgcaacatctggcagaagtgagcgcagagggtaagctgctattcccagaagccgaagctgaggccgagaatttgcctgacgacaagccgcagcagcccacaaggccacaggaacagagcacaggggacaccatgggccgagatccaggcgtttcattcaaagctgtcggtctccagccagctggcgacgttaacctgccctag

SEQ ID NO: 21666 - DNA, 372 bp, Artificial Sequence
  derived and/or modified sequence
atggaagccgctgaaactgaagctgaagccgctgcgctggaggtcctcgccgaggttgcgggaatactggagcccgttgggctccaggaagaggccgagctgcccgctaaaattctggtggaatttgttgtcgactcgcagaagaaagacaagcttctgtgctctcaacttcaggttgcagacttccttcaaaatattctggctcaggagagaccctggtgtgtgctgcagggctgttggtctactacttgctggcgctgtaagttcgccatgacgagctggcgtaccgccgcttggagaaaaatactcgagaaagcaagcgatttcccacacctgcctacaatcatcactggaaagaccgtcaatagctag

SEQ ID NO: 21667 - protein, 246 aa, Artificial Sequence
  derived and/or modified sequence
MTTGDCCHLPGSLCDCSGSPAFSKVVEATGLGPPQYVAQVTSRDGRLLSTVIRALDTPSDGPFCRICHEGANGECLLSPCGCTGTLGAVHKSCLEKWLSSSNTSYCELCHTEFAVEKRPRPLTEWLKDPGPRTEKRTLCCDMVCFLFITPLAAISGWLCLRGAQDHLRLHSQLEAVGLIALTIALFTIYVLWTLVSFRYHCQLYSEWRKTNQKVRLKIREADSPEGPQHSPLAAGLLKKVAEETPV

SEQ ID NO: 21668 - DNA, 741 bp, Artificial Sequence
  derived and/or modified sequence
atgaccactggagactgttgccatctgccgggatctttatgcgactgctctggctcccctgctttctctaaagtggtcgaggctactggacttgggccgcctcagtacgttgcacaggtaaccagtcgtgatggtagactcttgagcactgtgatccgggccttggacactccaagcgatggtcctttttgccggatttgtcatgaaggggcaaatggagaatgcttgctctctccatgcggatgtactggaaccctgggcgctgtccacaagagctgtcttgaaaaatggctttcatccagtaatactagttactgcgagctgtgccataccgagttcgccgtagagaagcggcctcgccccctaactgagtggctgaaggatcctggtccaaggacagagaagagaaccctgtgttgtgacatggtatgtttcttgttcattactcctctcgccgctatcagtggatggctgtgcctcagaggggcacaggatcatcttcgactgcattcacagctggaggctgtgggcctgatagcattaacaatagccttatttacaatttacgttctgtggaccctggtttcttttagatatcattgtcaactgtacagtgaatggagaaaaaccaatcaaaaggtgagattaaagatcagagaggccgacagccccgaaggcccccagcattcacccctggccgcggggcttttgaaaaaggtggcggaggaaactcctgtatag

SEQ ID NO: 21669 - DNA, 741 bp, Artificial Sequence
  derived and/or modified sequence
atgactactggggattgttgccatcttcctggatcactttgtgactgcagcgggtcacccgcctttagtaaagtggttgaggccacgggactgggcccaccccaatatgttgcacaagtcacttcgagggacggccgcctcctttccacggttattcgcgctctggacacaccatccgacgggcccttttgccgcatctgccacgagggcgctaatggggagtgcctcctgagcccatgcggatgcacaggtactctcggcgcagtgcacaagtcttgtctggagaaatggctgtccagcagcaacacaagctattgtgagctgtgccacactgagttcgccgtggaaaaaagacctaggcccctgacggagtggctcaaggatcccgggcctcgaacagagaagcgtaccctttgctgcgatatggtctgcttcctttttataacccctttagccgcaatctcaggctggctttgcctacgtggcgcgcaggaccacctgcggttgcactcccaactcgaggctgtcggcctgattgcactgactatcgccctatttactatttacgtgctgtggacactcgtgtcatttaggtaccattgccaactgtattcagagtggcgcaaaacaaatcagaaggtgcgcctgaagatcagagaggccgactcccctgaggggccgcaacactctccgctggctgctgggctgcttaagaaggtggccgaagaaactccagtgtag

SEQ ID NO: 21670 - DNA, 741 bp, Artificial Sequence
  derived and/or modified sequence
atgaccactggagactgctgccacctgcccggcagcctgtgtgactgcagcggcagccctgccttcagcaaggtggtggaggccaccggcctgggccccccccagtatgtggcccaggtgaccagcagagatggccgcctgctgagcaccgtcatccgggccctggacacccccagtgatggccccttctgccgcatctgccacgagggcgccaacggggagtgcctgctgagcccctgtggctgcaccggcaccctgggcgctgtgcacaagagctgcctggagaagtggctgagcagcagcaacaccagctactgtgagctgtgccacacagaatttgctgtggagaagaggccccggcccctgacagagtggctgaaggaccccggccccaggacagagaagaggaccctgtgctgtgacatggtgtgcttcctgttcatcacccccctggccgccatcagcggctggctgtgcctgcggggggcccaggaccacctgcggctgcacagccagctggaggccgtgggcctgattgccctgaccatcgccctcttcaccatctacgtgctgtggaccctggtgtccttccgctaccactgccagctgtacagcgagtggaggaagaccaaccagaaggtgcggctgaagatccgggaggccgacagccctgagggcccccagcacagccccctggccgccggcctgctgaagaaggtggccgaggagacccctgtgtag

SEQ ID NO: 21671 - DNA, 1376 bp, Artificial Sequence
  derived and/or modified sequence
ccggacgcaggtgccggccggagcggagctagtggcgccgacgggccgggccgggccgggaccggggccgaggcgaaccgaggggcctgtgcggccgcccggcccggccgcggatcaggctcctggaaccatgggcctcaggccctgaggatacggggctcccggtggccatgacgacgggtgactgctgccacctccccggctccctgtgtgactgctccggcagccctgccttctccaaggtcgtggaggctacgggcctcggaccgccccagtatgtggcacaggtgacttcaagggatggccggctcctctccaccgtcatccgtgccttggacacaccgagtgatggtcctttctgccggatctgccatgagggagcgaacggggagtgcttgctgtccccgtgtggctgcaccggcacgctgggtgccgtgcataagagctgtctggagaagtggctttcctcatctaacaccagctactgcgagctgtgccacacggagtttgcagtggagaaacggcctcgacccctcacagagtggctgaaggacccggggccgcggacggagaagcggacactgtgctgcgacatggtgtgtttcctgttcatcacaccgctggccgccatctcaggctggttgtgcctgcgcggggcccaggaccacctccggctccacagccagctggaggccgtgggtctcattgccctcaccatcgccctcttcaccatctatgtcctctggacgctggtctccttccgctaccactgccagctgtactccgagtggagaaagaccaaccagaaagttcgcctgaagatccgggaggcggacagccccgagggcccccagcattctccactggcagctggactcctgaagaaggtggcagaggagacaccagtatgaatgctgggctctccggaccctgcagcagagaggccagaggtagctggtgataccctgtcctgtggaaggacttccacttcaacacttccacttcaacagttcccgcacggcctgaacgcttcttaggccaagagacaccatgcagagcctagtctgtgatcctgtgtgaagatattttcagggtttttttttttttttttttgcatatggaggacaggtggacatggtcctgagctctggacggagcaggcaccctgatctcattctgaggtccacatggcaccttctgggccagcagctgtggccggtgtatcaagggcgcccttaaagctggaacattccagcaagcttcttgcgcttctctgcacccggcaggcccactttcctggcaccctcgactttatataaaagttgcactgcgtttcaaaaacccacccctgaatgaataaaaggagccctggctgg

SEQ ID NO: 21672 - DNA, 1647 bp, Artificial Sequence
  derived and/or modified sequence
ccggacgcaggtgccggccggagcggagctagtggcgccgacgggccgggccgggccgggaccggggccgaggcgaaccgaggggcctgtgcggccgcccggcccggccgcggatcagagactggagactgggtcttgctctgttacccaggctggagtgcagtggtgtgatcatagctcactacagccttgaactcctgggctcaagaggttgaggctccctcctcagcctcccaagtagctgggactacaggctttcagcaccatgcctggctaattcaaaaaaaccttcagagagatagggtctctctatgttgccctagctcgtctcaaactcctggcctcaagtgatcctcctgcttggacctcccaaagcgctgggattacaggctcctggaaccatgggcctcaggccctgaggatacggggctcccggtggccatgacgacgggtgactgctgccacctccccggctccctgtgtgactgctccggcagccctgccttctccaaggtcgtggaggctacgggcctcggaccgccccagtatgtggcacaggtgacttcaagggatggccggctcctctccaccgtcatccgtgccttggacacaccgagtgatggtcctttctgccggatctgccatgagggagcgaacggggagtgcttgctgtccccgtgtggctgcaccggcacgctgggtgccgtgcataagagctgtctggagaagtggctttcctcatctaacaccagctactgcgagctgtgccacacggagtttgcagtggagaaacggcctcgacccctcacagagtggctgaaggacccggggccgcggacggagaagcggacactgtgctgcgacatggtgtgtttcctgttcatcacaccgctggccgccatctcaggctggttgtgcctgcgcggggcccaggaccacctccggctccacagccagctggaggccgtgggtctcattgccctcaccatcgccctcttcaccatctatgtcctctggacgctggtctccttccgctaccactgccagctgtactccgagtggagaaagaccaaccagaaagttcgcctgaagatccgggaggcggacagccccgagggcccccagcattctccactggcagctggactcctgaagaaggtggcagaggagacaccagtatgaatgctgggctctccggaccctgcagcagagaggccagaggtagctggtgataccctgtcctgtggaaggacttccacttcaacacttccacttcaacagttcccgcacggcctgaacgcttcttaggccaagagacaccatgcagagcctagtctgtgatcctgtgtgaagatattttcagggtttttttttttttttttttgcatatggaggacaggtggacatggtcctgagctctggacggagcaggcaccctgatctcattctgaggtccacatggcaccttctgggccagcagctgtggccggtgtatcaagggcgcccttaaagctggaacattccagcaagcttcttgcgcttctctgcacccggcaggcccactttcctggcaccctcgactttatataaaagttgcactgcgtttcaaaaacccacccctgaatgaataaaaggagccctggctgg

SEQ ID NO: 21673 - DNA, 741 bp, Artificial Sequence
  derived and/or modified sequence
atgaccaccggcgactgctgccacctgcccggcagcctgtgcgactgttctggaagccccgccttttctaaggttgtggaagcaaccggtcttgggcctccccagtacgtcgcgcaggtgacatcacgcgatggcaggttgctctccacagtaatcagagccttggacacacccagtgacggaccattctgccggatttgccacgagggcgcaaatggcgaatgcctgctctctccatgtgggtgcacgggcaccctaggagccgtgcataagtcttgcctggagaagtggctctccagttcaaacactagctactgtgaattatgccacacagagttcgcagttgagaaaaggccgcgaccactcacagaatggttgaaggatccaggaccacgtacggagaagagaaccctttgctgcgatatggtatgtttcttgttcataacccctctggctgccatctctggatggctgtgccttcgtggggctcaagaccatctgcgtctccacagccagctggaagccgtgggcctcatcgctctcacaattgcactttttaccatatacgtgctttggaccttggtatcctttagatatcactgtcagttatactccgagtggagaaagactaatcaaaaagtgaggctgaaaatcagggaggcagacagccctgaggggcctcaacatagtccattggccgccggcctgctgaagaaggtggctgaggagacccctgtgtag

SEQ ID NO: 21674 - DNA, 741 bp, Artificial Sequence
  derived and/or modified sequence
atgaccaccggcgactgctgccacctgcccggcagcctgtgcgactgcagcggctcccctgcattcagtaaagtggtcgaggctacagggctcggacccccccagtacgtggcccaagttaccagtcgggatggccggctgctctctacagtcattagagccctcgatacgccgagtgatggcccattttgcaggatttgccatgagggagctaatggagaatgtctgctctctccatgtggatgcacagggaccttgggggcggtgcacaagtcttgcttggagaaatggctttcttctagtaataccagttactgtgagctctgccacacggaattcgctgtggaaaagcggccacgaccattaacagaatggttgaaggatcccgggccacggactgagaagcgtaccttgtgctgcgacatggtctgcttcctgtttattacacccttagccgctatcagcgggtggttgtgtttgcggggggcccaggatcacctcaggctgcacagccagttagaagcagtgggtctgatagcattaaccatcgccctcttcacaatctatgtactgtggacactcgtgagttttcgctatcattgtcagctctattcagaatggcggaaaacaaaccagaaagtaaggttaaaaatccgggaagcagattcacccgagggcccccagcattcccctctagcagccgggctgcttaaaaaggtcgctgaggagacacccgtgtag

SEQ ID NO: 21675 - DNA, 741 bp, Artificial Sequence
  derived and/or modified sequence
atgactactggggattgttgtcatctccccggtagcctgtgcgattgttctggaagtcccgctttctctaaagtggtcgaagctaccggcctcgggccaccacaatacgtggctcaggtgaccagtcgcgacgggagactgttatctacagtgattagagccctggataccccatcagatggccctttctgcaggatatgtcatgaaggtgccaatggagaatgcttgttgtccccatgcggctgtacagggaccctcggcgcagtgcacaagtcctgtctcgagaagtggctttccagctctaacacaagctactgcgagctgtgtcacacagagtttgctgtggagaagcgtcctcgccctctgaccgaatggctgaaggatccagggccaaggacagaaaaacgcacgctctgttgcgatatggtgtgttttctgtttataaccccacttgctgccatctctggctggttatgtcttaggggagctcaggatcacttgcgtctgcattcccagctagaagccgtgggtctgatcgccctcacaatcgcactatttaccatttatgtgctatggactctggtctcatttcggtaccattgtcagctgtattcggagtggcggaagaccaatcagaaggtgcgactgaaaatacgggaggctgatagccccgagggccctcaacattcaccactcgctgctggactcctcaaaaaagtggctgaggaaactcccgtctag

SEQ ID NO: 21676 - DNA, 741 bp, Artificial Sequence
  derived and/or modified sequence
atgaccacgggggattgctgccacttgcctgggtccctgtgcgactgctccggctctccggctttctcaaaggtggtggaggctaccgggttggggcctccgcaatacgtagcacaagtgacatcacgtgatggcagactgctgtcaactgtaatcagggctcttgacacaccgagtgatggcccattttgcaggatctgtcacgagggagctaatggggagtgcctgctgtccccttgcggctgcacagggacactaggagcagtccacaaatcctgcctggaaaagtggctctcaagttctaacacttcatattgtgagttgtgtcataccgaattcgccgtggagaaacgacctagacctctaaccgaatggttaaaagaccctgggcctcggacagaaaagcgcaccttgtgctgtgacatggtctgttttctttttatcactcctctagcagctattagcggatggttgtgcttgagaggcgctcaggatcatttgcggctgcattcccagcttgaggccgtcggcctgattgctttgaccatcgcattgttcaccatctacgttctgtggacactggtgagtttccgatatcactgtcagttatattctgagtggaggaaaaccaaccagaaggttcgactcaaaattagagaggccgactcaccagagggcccacaacactcacctctggccgctggactcctgaagaaggtggccgaagagacgcccgtttag

SEQ ID NO: 21677 - DNA, 741 bp, Artificial Sequence
  derived and/or modified sequence
atgaccaccggcgactgctgccacctgcccggcagcctgtgcgactgcagcggcagccccgccttcagcaaggtggtggaggccaccggcctgggccccccccagtacgtggcccaggtgaccagcagagacggcagactgctgagcaccgtgatcagagccctggacacccccagcgacggccccttctgcagaatctgccacgagggcgccaacggcgagtgcctgctgagcccctgcggctgcaccggcaccctgggcgccgtgcacaagagctgcctggagaagtggctgagcagcagcaacaccagctactgcgagctgtgccacaccgagttcgccgtggagaagagacccagacccctgaccgagtggctgaaggaccccggccccagaaccgagaagagaaccctgtgctgcgacatggtgtgcttcctgttcatcacccccctggccgccatcagcggctggctgtgcctgagaggcgcccaggaccacctgagactgcacagccagctggaggccgtgggcctgatcgccctgaccatcgccctgttcaccatctacgtgctgtggaccctggtgagcttcagataccactgccagctgtacagcgagtggagaaagaccaaccagaaggtgagactgaagatcagagaggccgacagccccgagggcccccagcacagccccctggccgccggcctgctgaagaaggtggccgaggagacccccgtgtag

SEQ ID NO: 21678 - protein, 176 aa, Artificial Sequence
  derived and/or modified sequence
MTTGDCCHLPGSLCDCSGSPAFSKVVEATGLGPPQYVAQVTSRDGRLLSTVIRALDTPSDGPFCRICHEGANGECLLSPCGCTGTLGAVHKSCLEKWLSSSNTSYCELCHTEFAVEKRPRPLTEVSFRYHCQLYSEWRKTNQKVRLKIREADSPEGPQHSPLAAGLLKKVAEETPV

SEQ ID NO: 21679 - DNA, 531 bp, Artificial Sequence
  derived and/or modified sequence
atgactactggggactgctgtcacttgcctggcagcctgtgtgactgttctgggagccccgccttttctaaggtggtggaggcaactggcctcgggcccccgcagtatgtcgctcaggtaacatcccgtgacggcagactcctctcgactgtcatccgggcgctggacacaccctcagacggccccttttgtcggatatgccacgagggcgcgaatggggagtgtcttcttagcccatgcgggtgtactggcaccctgggtgccgtgcacaagtcttgcctggagaagtggctgtcgagctctaatacttcttattgcgaactgtgtcacactgaattcgccgttgagaaacgacctcggcctttaactgaagtgtccttccgatatcactgtcagttatacagcgagtggcgcaagactaatcagaaggtcagactgaagattcgcgaggcggactccccagaggggccacagcactcgccactggccgccggactgctgaagaaagtggccgaagagaccccagtgtag

SEQ ID NO: 21680 - DNA, 531 bp, Artificial Sequence
  derived and/or modified sequence
atgaccactggagactgctgccacctgcccggcagcctgtgtgactgcagcggcagccctgccttcagcaaggtggtggaggccaccggcctgggccccccccagtatgtggcccaggtgaccagcagagatggccgcctgctgagcaccgtcatccgggccctggacacccccagtgatggccccttctgccgcatctgccacgagggcgccaacggggagtgcctgctgagcccctgtggctgcaccggcaccctgggcgctgtgcacaagagctgcctggagaagtggctgagcagcagcaacaccagctactgtgagctgtgccacacagaatttgctgtggagaagaggccccggcccctgacagaggtgtccttccgctaccactgccagctgtacagcgagtggaggaagaccaaccagaaggtgcggctgaagatccgggaggccgacagccctgagggcccccagcacagccccctggccgccggcctgctgaagaaggtggccgaggagacccctgtgtag

SEQ ID NO: 21681 - DNA, 1166 bp, Artificial Sequence
  derived and/or modified sequence
ccggacgcaggtgccggccggagcggagctagtggcgccgacgggccgggccgggccgggaccggggccgaggcgaaccgaggggcctgtgcggccgcccggcccggccgcggatcaggctcctggaaccatgggcctcaggccctgaggatacggggctcccggtggccatgacgacgggtgactgctgccacctccccggctccctgtgtgactgctccggcagccctgccttctccaaggtcgtggaggctacgggcctcggaccgccccagtatgtggcacaggtgacttcaagggatggccggctcctctccaccgtcatccgtgccttggacacaccgagtgatggtcctttctgccggatctgccatgagggagcgaacggggagtgcttgctgtccccgtgtggctgcaccggcacgctgggtgccgtgcataagagctgtctggagaagtggctttcctcatctaacaccagctactgcgagctgtgccacacggagtttgcagtggagaaacggcctcgacccctcacagaggtctccttccgctaccactgccagctgtactccgagtggagaaagaccaaccagaaagttcgcctgaagatccgggaggcggacagccccgagggcccccagcattctccactggcagctggactcctgaagaaggtggcagaggagacaccagtatgaatgctgggctctccggaccctgcagcagagaggccagaggtagctggtgataccctgtcctgtggaaggacttccacttcaacacttccacttcaacagttcccgcacggcctgaacgcttcttaggccaagagacaccatgcagagcctagtctgtgatcctgtgtgaagatattttcagggtttttttttttttttttttgcatatggaggacaggtggacatggtcctgagctctggacggagcaggcaccctgatctcattctgaggtccacatggcaccttctgggccagcagctgtggccggtgtatcaagggcgcccttaaagctggaacattccagcaagcttcttgcgcttctctgcacccggcaggcccactttcctggcaccctcgactttatataaaagttgcactgcgtttcaaaaacccacccctgaatgaataaaaggagccctggctgg

SEQ ID NO: 21682 - DNA, 531 bp, Artificial Sequence
  derived and/or modified sequence
atgaccaccggcgactgctgccacctgcccggcagcctgtgcgactgctcaggctcacctgctttcagcaaggtcgtcgaagcgaccggactgggccctccacaatatgttgcacaggtaacttcgcgagacggtaggctcttgagcaccgtgatccgggccttggatacaccttccgatggccccttctgtcgtatttgccacgaaggggcaaacggggagtgcctgctgtcaccatgcggatgtaccggcactctgggcgccgtgcacaaatcatgcctggagaaatggcttagcagctctaatacaagctactgtgaactctgccacaccgagtttgctgtggaaaaacggcctcgaccactaactgaggtcagcttcagatatcactgtcagctatacagtgagtggcggaagactaatcagaaagtgcggctcaaaattagagaagctgactcaccagagggcccccagcacagtcctctcgcagctggtttactcaagaaggtggctgaggaaactcccgtatag

SEQ ID NO: 21683 - DNA, 531 bp, Artificial Sequence
  derived and/or modified sequence
atgacgactggcgactgctgccatcttcccggaagcctgtgcgactgctcgggaagcccggcattctctaaggtcgtggaagctaccggtctcggccctccacagtatgtggcccaggtaacctcacgggacggccgactactgtctactgttatccgagctctcgacaccccatcggacggccctttctgtcggatttgtcacgaaggtgccaatggggaatgcctgctcagtccgtgcggctgcaccggaactctgggcgcagtgcacaagagctgtctggaaaagtggctcagtagtagcaacacgtcttactgcgagctgtgtcacacagagttcgcggtggagaagaggcctcgccctctaactgaagtaagctttcgataccattgccagttatatagcgagtggagaaagacaaatcagaaggtaaggttaaaaatccgagaggctgattcacccgaggggcctcagcacagcccgttggcggctggtctgctcaagaaagttgctgaggaaacgcccgtctag

SEQ ID NO: 21684 - DNA, 531 bp, Artificial Sequence
  derived and/or modified sequence
atgaccaccggcgactgctgccacctgcccggcagcctgtgcgactgcagcggcagccccgccttcagcaaggtggtggaggccaccggcctgggccccccccagtacgtggcccaggtgaccagcagagacggcagactgctgagcaccgtgatcagagccctggacacccccagcgacggccccttctgcagaatctgccacgagggcgccaacggcgagtgcctgctgagcccctgcggctgcaccggcaccctgggcgccgtgcacaagagctgcctggagaagtggctgagcagcagcaacaccagctactgcgagctgtgccacaccgagttcgccgtggagaagagacccagacccctgaccgaggtgagcttcagataccactgccagctgtacagcgagtggagaaagaccaaccagaaggtgagactgaagatcagagaggccgacagccccgagggcccccagcacagccccctggccgccggcctgctgaagaaggtggccgaggagacccccgtgtag

SEQ ID NO: 21685 - protein, 551 aa, Artificial Sequence
  derived and/or modified sequence
MFGIQENIPRGGTTMKEEPLGSGMNPVRSWMHTAGVVDANTAAQSGVGLARAHFEKQPPSNLRKSNFFHFVLALYDRQGQPVEIERTAFVDFVEKEKEPNNEKTNNGIHYKLQLLYSNGVRTEQDLYVRLIDSMTKQAIVYEGQDKNPEMCRVLLTHEIMCSRCCDKKSCGNRNETPSDPVIIDRFFLKFFLKCNQNCLKNAGNPRDMRRFQVVVSTTVNVDGHVLAVSDNMFVHNNSKHGRRARRLDPSEATPCIKAISPSEGWTTGGATVIIIGDNFFDGLQVVFGTMLVWSELITPHAIRVQTPPRHIPGVVEVTLSYKSKQFCKGAPGRFVYTALNEPTIDYGFQRLQKVIPRHPGDPERLPKEVLLKRAADLVEALYGMPHNNQEIILKRAADIAEALYSVPRNHNQIPTLGNNPAHTGMMGVNSFSSQLAVNVSETSQANDQVGYSRNTSSVSPRGYVPSSTPQQSNYNTVSTSMNGYGSGAMASLGVPGSPGFLNGSSANSPYGMKQKSAFAPVVRPQASPPPSCTSANGNGLQAMSGLVVPPM

SEQ ID NO: 21686 - DNA, 1656 bp, Artificial Sequence
  derived and/or modified sequence
atgttcggaattcaggaaaacataccgcgcggtgggacaaccatgaaggaggagccactcggatcaggaatgaatcccgtaagatcctggatgcatactgcaggagtggtcgacgccaacactgcagctcaatctggagtcgggctggctcgggcgcatttcgaaaagcaaccaccttcaaatctaagaaaatcgaacttcttccactttgttctcgcactctacgacaggcagggccagcccgtggagatcgaaaggaccgccttcgtcgattttgtggagaaagagaaagaacccaataacgaaaaaaccaataacggtatacactacaagctgcagctcctctattccaatggagttaggaccgaacaggatttgtacgttcggttaattgatagtatgacgaagcaggccatcgtatatgaaggccaggataagaacccggaaatgtgtcgcgtcctgctcacacacgagatcatgtgttcaaggtgctgcgataagaagtcatgcgggaaccgaaacgagaccccctcagaccctgttatcatagacagattctttttgaaattcttcctcaagtgtaatcaaaattgtctgaagaatgcagggaatcccagagatatgagaaggttccaggtggtagtcagcacaacggttaacgtggacgggcatgtactggcggtttctgataacatgttcgttcataataactctaaacatgggcggcgggcaagaaggcttgatccttcagaagccaccccctgcatcaaggcgatatccccatcagagggctggactaccggaggcgctactgtcatcatcatcggagacaacttcttcgatggtctgcaagttgtcttcggcactatgctggtctggtccgagctcatcactccccacgctattcgcgtccaaaccccaccccggcacattccgggggtggttgaggtcaccctgtcatataaaagcaagcagttttgcaaaggagccccaggccgttttgtttataccgccctgaacgaacccaccattgactatgggttccagcggctgcagaaggtgatcccgcgccatccaggggaccctgagaggctgccaaaggaggtgcttttaaaacgcgctgcggacctcgtggaagccttgtatgggatgccccacaataatcaggagatcattttgaagagggcagcagacatagctgaggccctttactccgtgccgcgaaatcataaccagattccaactttaggaaataatccggctcacactgggatgatgggcgtgaattccttcagtagccagctcgccgtgaacgtatcagaaactagtcaggccaatgaccaggtgggctatagtcgcaacacgagctctgtgagtcccagggggtatgtgcccagctccactccccagcaatccaattataatacggtgtcaactagcatgaacggttacggcagcggtgcaatggcctcccttggggtcccaggaagcccaggttttctgaatgggagcagcgcaaacagtccctacggaatgaagcagaagtccgcttttgcccccgtggtcagacctcaagcgagtccaccccctagctgtacttcagcgaatggcaatggcctacaagctatgtctgggctagtggttccccccatgtag

SEQ ID NO: 21687 - DNA, 1656 bp, Artificial Sequence
  derived and/or modified sequence
atgtttggcatccaggagaacatcccccggggcggcaccaccatgaaggaggagcccctgggcagcggcatgaaccctgtgcgctcctggatgcacacagctggggtggtggatgccaacacagctgcccagagcggcgtgggcctggcccgggcccactttgagaagcagccccccagcaacctgaggaagagcaacttcttccactttgtgctggccctgtatgaccggcagggccagcctgtggagattgaaagaacagcctttgtggactttgtggagaaggagaaggagcccaacaatgagaagaccaacaacggcatccactacaagctgcagctgctgtacagcaatggagtgaggacagagcaggacctgtatgtgcggctgattgacagcatgaccaagcaggccatcgtgtatgagggccaggacaagaaccctgagatgtgccgggtgctgctgacccatgagatcatgtgcagccgctgctgtgacaagaagagctgtggcaacagaaatgagacccccagcgaccccgtcatcatcgaccgcttcttcctgaagttcttcctgaagtgcaaccagaactgcctgaagaatgccggcaacccccgggacatgaggcgcttccaggtggtggtgtccaccaccgtgaatgtggatggccacgtgctggccgtgtctgacaacatgtttgtgcacaacaacagcaagcacggccggcgggcccggcggctggaccccagcgaggccaccccctgcatcaaggccatcagccccagcgagggctggaccactggaggagccaccgtcatcatcattggagacaacttctttgatggcctgcaggtggtgtttggcaccatgctggtgtggagcgagctgatcaccccccacgccatccgggtgcagaccccacccaggcacatccctggggtggtggaggtgaccctgagctacaagagcaagcagttctgcaagggggcccctggccgctttgtgtacacagccctgaatgagcccaccatcgactatggcttccagaggctgcagaaggtgatccccaggcaccctggggaccctgagcggctgcccaaggaggtgctgctgaagagagctgctgacctggtggaggccctgtatggcatgccccacaacaaccaggagatcatcctgaagagagctgctgacattgctgaggccctgtacagcgtgcccaggaaccacaaccagatccccaccctgggcaacaacccagcccacacaggcatgatgggcgtgaacagcttcagcagccagctggccgtgaatgtgtctgagaccagccaggccaatgaccaggtgggctacagcaggaacaccagctctgtgagcccccggggctacgtgcccagcagcaccccccagcagagcaactacaacacagtgtccacctccatgaatggctacggcagcggggccatggccagcctgggcgtgcccggcagccctggcttcctgaatggcagcagcgccaacagcccctacggcatgaagcagaagagcgcctttgcccctgtggtgcggccccaggccagccccccacccagctgcaccagcgccaatggaaatggcctgcaggccatgagcggcctggtggtgccccccatgtag

SEQ ID NO: 21688 - DNA, 1656 bp, Artificial Sequence
  derived and/or modified sequence
atgttcggcatccaggagaacatcccccggggcggcaccaccatgaaggaagagcccctgggtagcgggatgaatcccgtgcgaagctggatgcataccgcaggggtggtcgacgccaacacagccgcccagtctggtgtgggactggcgcgggcgcacttcgagaaacagccaccaagtaatttgcggaagagcaacttctttcactttgtgctggcactttatgaccgacagggtcagcccgtagagattgaaaggacagctttcgtggactttgtcgagaaagagaaggagcccaataatgagaaaacgaacaacggaattcactataaactgcaactgttgtacagcaacggtgtcaggaccgaacaggacctgtacgtgaggctaatcgattccatgacaaaacaggccatcgtatacgagggacaagacaaaaaccccgagatgtgccgagtgctacttacccacgagatcatgtgcagcaggtgctgcgacaaaaagtcatgcggaaataggaatgagacaccatcagatcccgtcatcatcgaccgcttcttcctgaagtttttccttaaatgtaaccaaaattgtctgaagaatgctgggaatccccgggacatgcgtaggtttcaagtagtggtctccacaaccgttaatgtggacggtcacgtgctcgctgtgagcgacaacatgttcgtccataacaactcaaagcatgggaggcgagcaaggcggctggatcctagtgaagctactccatgtatcaaagctatttctccatccgagggatggacaacagggggagccaccgttattattattggcgacaacttcttcgatggactgcaggtggtcttcggcactatgctggtgtggagcgaactgattacacctcacgctatccgtgtgcagacacccccccggcacattcccggggtggtggaggtgaccttatcctataagagcaagcagttttgtaagggggcccccggacgcttcgtatacaccgctctgaacgagcctacaattgactatgggtttcagaggctgcaaaaagtaattcctcggcatccaggcgatccagaaaggctcccaaaagaagtgctccttaagcgagccgctgatctggtagaggcactgtatggcatgccacacaacaatcaggagatcatcttgaaaagggccgccgatatagccgaggccctttactcagtgccccgaaatcacaatcagatccccacattgggtaataaccctgcacacaccgggatgatgggagtgaatagcttttctagccaacttgccgtcaacgtgagtgagacaagccaggccaatgaccaggtgggctactcccgaaacactagtagcgtatccccaagaggatacgtgcctagctctaccccacaacagagtaactacaatactgtatctacaagcatgaatggttatgggtccggtgccatggcctccctgggagttcccggcagccctggatttttgaatggcagtagtgcaaacagcccctacggcatgaagcaaaagtctgccttcgcgcccgtcgttcgccctcaggcgtctccgccgccatcttgcacaagcgccaatggcaatggactgcaggcgatgagtggactcgttgtgccacccatgtag

SEQ ID NO: 21689 - DNA, 1656 bp, Artificial Sequence
  derived and/or modified sequence
atgtttggaattcaggagaatatccccagagggggtacaactatgaaagaggagcctctcggaagcgggatgaaccctgtgagatcgtggatgcatacggccggagtggtcgacgccaacacagcagctcaatccggagttggccttgctagagcccacttcgaaaaacagccaccatccaaccttagaaagtcaaatttcttccactttgttctcgcactctatgatcgacagggtcagccggttgaaattgaacgtaccgctttcgtggattttgtagaaaaagagaaggagccaaacaatgagaagacaaataacggtattcattacaaactgcaactcttgtactccaatggtgtgcgcacagaacaagacctctacgtcagactgatcgacagcatgactaagcaagctattgtatacgaaggacaagataagaatcctgaaatgtgtcgcgtattactcacccacgaaatcatgtgttcgaggtgctgtgacaagaagtcttgcggaaaccggaacgagacacccagcgaccccgtcattattgatagatttttcctcaagttcttcctcaagtgcaaccagaactgtctgaaaaatgctggcaatccaagagacatgcggagatttcaggtcgtcgtcagcacgactgtgaatgtcgacggacacgttctagcagtctctgataacatgttcgtgcataataattcgaagcatggtaggcgcgctagacgcctggaccctagcgaggcaaccccctgtattaaggctatatctccgagcgaggggtggaccacaggaggtgctacagtgattataattggcgataatttcttcgacggacttcaggtcgtgttcggaaccatgcttgtgtggtcagaacttatcacccctcatgccattcgcgtacaaactcccccacggcatattccaggtgttgtggaagttactctttcttacaaaagtaagcagttttgcaaaggcgctcccggtcggtttgtgtacacagccttgaatgaaccaactatcgactatggctttcaaaggctgcaaaaggtgatccctcgacatccgggagacccagagcggctcccaaaagaggtcctgctcaagagggccgctgacctcgtggaagccctgtacggtatgcctcataataaccaggaaataatattgaaaagagcagcggatattgctgaagcactgtatagtgtgcctcggaatcataaccagatacccactttgggcaacaaccccgcacacacaggcatgatgggcgttaattccttttcttcacagctggcagtgaacgtctccgagacgtctcaggctaacgaccaagttggctacagcaggaacacttctagcgtgagtcctagaggatatgtgccctcaagcacgccccaacaaagtaattataatactgtgagcacttctatgaatggctatggaagcggagccatggccagcctcggtgtgccagggagcccaggctttctcaatggcagttcagcaaattctccatatggcatgaaacaaaaaagcgcctttgccccagttgtgaggccacaggcttctcctccgccaagttgtacatctgccaatgggaacgggctgcaggccatgtcggggctcgtggtgcccccaatgtag

SEQ ID NO: 21690 - DNA, 1656 bp, Artificial Sequence
  derived and/or modified sequence
atgttcggcatccaggagaacatccccagaggcggcaccaccatgaaggaggagcccctgggcagcggcatgaaccccgtgagaagctggatgcacaccgccggcgtggtggacgccaacaccgccgcccagagcggcgtgggcctggccagagcccacttcgagaagcagccccccagcaacctgagaaagagcaacttcttccacttcgtgctggccctgtacgacagacagggccagcccgtggagatcgagagaaccgccttcgtggacttcgtggagaaggagaaggagcccaacaacgagaagaccaacaacggcatccactacaagctgcagctgctgtacagcaacggcgtgagaaccgagcaggacctgtacgtgagactgatcgacagcatgaccaagcaggccatcgtgtacgagggccaggacaagaaccccgagatgtgcagagtgctgctgacccacgagatcatgtgcagcagatgctgcgacaagaagagctgcggcaacagaaacgagacccccagcgaccccgtgatcatcgacagattcttcctgaagttcttcctgaagtgcaaccagaactgcctgaagaacgccggcaaccccagagacatgagaagattccaggtggtggtgagcaccaccgtgaacgtggacggccacgtgctggccgtgagcgacaacatgttcgtgcacaacaacagcaagcacggcagaagagccagaagactggaccccagcgaggccaccccctgcatcaaggccatcagccccagcgagggctggaccaccggcggcgccaccgtgatcatcatcggcgacaacttcttcgacggcctgcaggtggtgttcggcaccatgctggtgtggagcgagctgatcaccccccacgccatcagagtgcagaccccccccagacacatccccggcgtggtggaggtgaccctgagctacaagagcaagcagttctgcaagggcgcccccggcagattcgtgtacaccgccctgaacgagcccaccatcgactacggcttccagagactgcagaaggtgatccccagacaccccggcgaccccgagagactgcccaaggaggtgctgctgaagagagccgccgacctggtggaggccctgtacggcatgccccacaacaaccaggagatcatcctgaagagagccgccgacatcgccgaggccctgtacagcgtgcccagaaaccacaaccagatccccaccctgggcaacaaccccgcccacaccggcatgatgggcgtgaacagcttcagcagccagctggccgtgaacgtgagcgagaccagccaggccaacgaccaggtgggctacagcagaaacaccagcagcgtgagccccagaggctacgtgcccagcagcaccccccagcagagcaactacaacaccgtgagcaccagcatgaacggctacggcagcggcgccatggccagcctgggcgtgcccggcagccccggcttcctgaacggcagcagcgccaacagcccctacggcatgaagcagaagagcgccttcgcccccgtggtgagaccccaggccagccccccccccagctgcaccagcgccaacggcaacggcctgcaggccatgagcggcctggtggtgccccccatgtag

SEQ ID NO: 21691 - DNA, 4375 bp, Artificial Sequence
  derived and/or modified sequence
ccgccaagccccgagcgccgctgctcgaggaaacgctttcggccgggagctgcggccgccgccagcagttttcatgtttgggattcaggagaatattccgcgcggggggacgaccatgaaggaggagccgctgggcagcggcatgaacccggtgcgctcgtggatgcacacggcgggcgtggtggacgccaacacggccgcccagagcggcgtggggctggcgcgggcgcacttcgagaagcagccgccttccaacctccggaaatccaatttcttccacttcgtgctggcgctctacgataggcaggggcagccggtggagattgaaaggaccgcttttgtggactttgtggagaaagagaaagagccaaacaacgagaaaaccaacaacggcatccactataaactccagttattgtacagcaacggagtcagaacagagcaagatctgtatgttcgcctcatagattcaatgaccaaacaggccatcgtctacgagggccaggacaagaacccggagatgtgccgtgtgctgctgacccacgagatcatgtgcagccggtgctgtgacaagaaaagttgtggcaatagaaacgaaacgccctcagaccctgtaatcattgacagattctttctaaagtttttcctcaagtgcaatcagaactgtttgaagaatgcaggcaaccctcgagatatgcggagattccaggttgttgtatcgacaacagtcaacgtggacggccacgtgctggccgtgtcagacaacatgtttgtgcacaacaattccaaacacgggaggcgggcccgccgcctagacccgtcagaagccactccgtgcatcaaggccatcagtcccagtgaaggctggaccacggggggtgccaccgtcatcataattggcgacaacttctttgacgggctgcaagttgtattcggaactatgttggtgtggagcgagctgataactccccatgccatccgagtccagaccccgccgaggcacattcctggcgtcgtcgaagtgaccctctcctacaaatccaagcagttctgcaaaggtgctcctgggcgctttgtctacaccgcccttaatgaaccaaccatagattacggctttcagaggttgcagaaagtgatcccaagacatccgggtgatcccgaaaggttacccaaggaggtgttactgaagcgggcggcggacctggtggaagccttatacggaatgcctcacaacaaccaggagatcatcttgaagcgagcggcggacatcgccgaggcgctgtacagcgttccccgcaatcacaaccagatccccaccctgggcaacaaccctgcacacacgggcatgatgggcgtcaactccttcagcagccagctagccgtcaacgtgtcagagacgtcacaagccaacgaccaagtcggctacagtcgcaatacaagcagcgtgtccccgcgaggctacgtccccagcagtactccccagcagtccaattacaacacagtcagcactagcatgaatggatatggaagtggcgccatggccagtctaggggtccctggctcgcctggatttcttaatggctcctccgctaactctccctacggcatgaaacagaagagcgccttcgcgcccgtggtccggccccaagcctctcctcctccttcctgcaccagcgccaacgggaatggactgcaagctatgtctgggctggtagtcccgccaatgtgagggacttctgtttaccttccgcagcacccagcatcaaaggacggacttcaggggacacgtttagtatattaagacatgctgatggaaacagtatcttcaaaaaaatcagcagcaattgaaatgctacaaaagactttgtttaaagattttatttaaactattaagaatcaacatgcaaacagcctacttcttcatgaacaattccattttattgactgaacttttctcatattttcacatttctcagtcctgaagaataaggaaaacaaagcgacgcctattttgtataaagtttccgactccgtcttggccatgtctagtaattgctatgtgttgggagaaactttgtgaatgcaccattttgatgatcatgaaacgctgatgaaaaatgcctccaaacatttttctgtactcatacttagattcacaatggttgtgtatctctataatgtgaaatatttttttgtggtgataaaaagagggccaaggaggtatgagccatcagactggaaaaaaggatgactatatgatgaggagaaactggggtggcagggagggagggagggtttatcactgcttaacttcatcttcatgaaatgaaactttgtaacttattgtagttagaaattgtaactttgatattgaattctcttgccttcaacaagcacactgacagagaaaaaatgctactgtctgttggttccaatattctcccactgctagagcttcctgttaagcaagtgtgatctgcaacattttttcaacttttgctagcactgtatactattgcattcttaggctactgtgaggtctatgtttcttgtaccagaaattgtccttttgacttctagatccttcttccctaatgtgttttgtatgtggttataaaattgtagacttttgtgattttgccaaagttgtagctaaatatttatacacttgtcttgaatttttttcagatccacttaaaatatttagaaaaacaagttttattccttatgtgtcttataaggaataaaatggtcttcatttgacacttactttcccatgaacacttgcagttgctaagggactttattttgtaacatatcaattataaatattgtatttatctttgaaattttgtacattgcttttcccaccttttcctttttcttctttcttgtctgtattggtttttgatcacggcctggtgttgtgatactgggaagagcattagccaagaacttgtctctttgatctgtttcgttaagctgaaccagtgtctttacatttcatttgtacttcaaaaaatatgctattgtttagactttccatcctttttttttttattttgaggaaaagtcaaattcattgtttatttttatattatttttaagttatctgaacaaatacttttgaaaaaaaagtttgttgtatagtcaaaacaaatcggtgccacccggccgtgacaaatcctagtagattctgtgcatgtggagcggccgcgaagaggtgacaccgtttggggctgtgtccttattttattttatttttttgtagaatgtaaaaagtcattttagatgccacccattgactttgccacatagctgaactgtgtttactggaaaaattcagaggcctaaagtttaaaataaaatttacttctgatgttttaattaaaatgtttgccacattaacttttctgatgccttaaaagtgaacttctttaaagaacctttgtgctattttatcacaggcttacactacaattgttaataaatacttcatttggagatgtatggtgtaaaacacacaaacacacacaaaaaagcacaagcccgctgcatgacccgtctctcctttctgggactatttctgctgcgtcctgcaccctcctgggcccacctccgattcacagaggtttcagggggacccaaatcactgctggttttcaatttttttttaacaatacatttttgtggtcagttccaacagcactgtccgtacttttaaaactggaatgacctccttcagatatcgtgcctcttagtgccaaacccacagtgagaccaaaagtgtcaggtgtttttttttttttctttctcctttgcactaagtgctttgcagacacggcacagcaaacattttgcaaactgcagcagaaatcgaatttaaaacaaaaaggagggactttaaaataccttcttgacaaaaatcaacaatgcacaacttacaaagtgttcattctagggacaaaattaaataaacagaatgtccccaggagtcagcaggtcacagtctggctttgtgatggttgacaaggtctagctacatgggaaagcctgagaagtcactttggaactaaattgcctccattttattttgtacgagtaagggtttgatctacaaaagagctcacatggacgcactgagaacgcctgccagcttccccatgccctcacttggtttgtgttttaggttaagtagtcaatgcccacatcacttcactgtctcaagactgagcacttcactaaatggtagattttactgttaaagaccctacaataagattgttttatctgtacattttttcagatatttaactgtataaaaatgttcattttacacaatatttaattaaagtatttcttgtctgtgaatttc

SEQ ID NO: 21692 - protein, 321 aa, Artificial Sequence
  derived and/or modified sequence
MASSQGKNELKLADWMATLPESMHSIPLTNLAIPGSHDSFSFYIDEASPVGPEQPETVQNFVSVFGTVAKKLMRKWLATQTMNFTGQLGAGIRYFDLRISTKPRDPDNELYFAHGLFSAKVNEGLEEINAFLTDHHKEVVFLDFNHFYGMQKYHHEKLVQMLKDIYGNKMCPAIFAQEVSLKYLWEKDYQVLVFYHSPVALEVPFLWPGQMMPAPWANTTDPEKLIQFLQASITERRKKGSFFISQVVLTPKASTVVKGVASGLRETITERALPAMMQWVRTQKPGESGINIVTADFVELGDFISTVIKLNYVFDEGEANT

SEQ ID NO: 21693 - DNA, 966 bp, Artificial Sequence
  derived and/or modified sequence
atggccagcagccagggcaagaacgagctgaagctggccgactggatggccaccctgcccgagagcatgcacagcatccccctgaccaacctggccatccccggcagccacgacagcttcagcttctacatcgacgaggccagccccgtgggccccgagcagcccgagaccgtgcagaacttcgtgagcgtgttcggcaccgtggccaagaagctgatgagaaagtggctggccacccagaccatgaacttcaccggccagctgggcgccggcatcagatacttcgacctgagaatcagcaccaagcccagagaccccgacaacgagctgtacttcgcccacggcctgttcagcgccaaggtgaacgagggcctggaggagatcaacgccttcctgaccgaccaccacaaggaggtggtgttcctggacttcaaccacttctacggcatgcagaagtaccaccacgagaagctggtgcagatgctgaaggacatctacggcaacaagatgtgccccgccatcttcgcccaggaggtgagcctgaagtacctgtgggagaaggactaccaggtgctggtgttctaccacagccccgtggccctggaggtgcccttcctgtggcccggccagatgatgcccgccccctgggccaacaccaccgaccccgagaagctgatccagttcctgcaggccagcatcaccgagagaagaaagaagggcagcttcttcatcagccaggtggtgctgacccccaaggccagcaccgtggtgaagggcgtggccagcggcctgagagagaccatcaccgagagagccctgcccgccatgatgcagtgggtgagaacccagaagcccggcgagagcggcatcaacatcgtgaccgccgacttcgtggagctgggcgacttcatcagcaccgtgatcaagctgaactacgtgttcgacgagggcgaggccaacacctag

SEQ ID NO: 21694 - DNA, 966 bp, Artificial Sequence
  derived and/or modified sequence
atggcaagcagtcaggggaagaacgaactgaaactcgcagattggatggccacactacccgaatcaatgcactctattcccttgacaaatctggccattccgggatctcacgattccttctctttctatatcgatgaggccagcccagttgggcccgaacagccagagactgtccagaatttcgtcagcgtctttggtacggtggccaagaaacttatgaggaaatggctggccacacagaccatgaatttcacgggtcagctcggcgctggaatcaggtactttgacttaagaatctctacaaaaccccgcgatcccgataacgagctgtattttgcccatggcctcttctccgccaaggtaaacgagggcctggaggaaattaatgccttcctcaccgatcaccataaagaggtggtcttcttggacttcaaccatttctatggcatgcagaaatatcatcatgagaaattagtccaaatgctgaaagatatctacgggaacaagatgtgtcctgccatcttcgcccaggaagttagtctgaagtatctgtgggagaaggattatcaagtactggtcttctatcattccccagttgcgcttgaagtgcccttcctgtggcccggacagatgatgcccgccccctgggccaatacaacagatccagagaagctgatacagttcttgcaggccagcatcaccgaacgccgcaaaaaggggagcttttttatctcacaggtcgtcctgacacctaaggcttccaccgtcgtgaaaggggtcgctagcggtctgcgagagacaattaccgagcgggccctccccgctatgatgcagtgggtcagaacccaaaaacctggagaatccggcataaacatcgtgaccgctgattttgttgaactgggcgattttatctccactgtgatcaaactgaattatgtattcgacgagggagaggctaatacatag

SEQ ID NO: 21695 - DNA, 966 bp, Artificial Sequence
  derived and/or modified sequence
atggcctcctcacagggcaaaaatgagctgaagttagcggattggatggctacactcccggagagcatgcactcaatcccgttgacaaatttggccatcccagggagccatgactcatttagtttttatatcgatgaagcctcacctgtgggccccgagcagcccgagacagtccagaattttgtgtccgtatttgggactgtggcaaaaaagctaatgcggaagtggctggctacccagactatgaactttactggccagcttggagctgggatccgatacttcgacttacgaatttcgacaaagcctcgcgaccccgacaacgaactttacttcgcacacgggttattttccgccaaggtgaacgaagggctggaggagatcaacgcattcctgacagaccaccataaggaagtagtatttttggatttcaaccatttttacggaatgcagaaataccaccacgaaaaactggtgcagatgctgaaggatatttatggtaacaagatgtgtcctgcaatattcgcacaagaggtttctttgaagtatctgtgggaaaaggactatcaggtcctggtcttttatcattcacccgtcgccttggaggttcccttcctgtggcctggtcaaatgatgcctgcaccctgggctaacactaccgaccctgagaaacttattcagtttcttcaggccagcatcacagagcgacgcaaaaaaggatccttctttataagtcaggtggtgctgacccctaaagctagcactgtggttaaaggtgtggcttctggcttgcgggagaccattaccgagcgtgctcttccagctatgatgcagtgggttagaacacagaagcccggtgagagcggtatcaatatagtgacggctgatttcgttgagctaggcgattttatcagcacggtcattaagctgaactacgtttttgacgaaggggaggcaaatacatag

SEQ ID NO: 21696 - DNA, 966 bp, Artificial Sequence
  derived and/or modified sequence
atggccagcagccagggcaagaatgagctgaagctggccgactggatggccaccctgcctgagagcatgcacagcatccccctgaccaacctggccatccctggcagccatgacagcttctccttctacattgatgaggccagccctgtgggccctgagcagcctgagaccgtgcagaactttgtgtctgtgtttggaacagtggccaagaagctgatgaggaagtggctggccacccagaccatgaacttcaccggccagctgggcgccggcatccgctactttgacctgcgcatcagcaccaagccccgggaccctgacaatgagctgtactttgcccacggcctcttcagcgccaaggtgaatgaaggcctggaggagatcaatgccttcctgacagaccaccacaaggaggtggtgttcctggacttcaaccacttctacggcatgcagaagtaccaccacgagaagctggtgcagatgctgaaggacatctacggcaacaagatgtgcccagccatctttgcccaggaggtgtccctgaagtacctgtgggagaaggactaccaggtgctggtgttctaccacagccctgtggccctggaggtgcccttcctgtggccaggccagatgatgcctgccccctgggccaacaccacagatcctgagaagctgatccagttcctgcaggccagcatcacagagaggaggaagaagggcagcttcttcatcagccaggtggtgctgacccccaaggccagcacagtggtgaagggcgtggccagcggcctgcgggagaccatcacagagcgggccctgcctgccatgatgcagtgggtgaggacccagaagccaggagagagcggcatcaacatcgtgacagctgactttgtggagctgggggacttcatcagcaccgtcatcaagctgaactacgtgtttgatgaaggagaggccaacacctag

SEQ ID NO: 21697 - DNA, 966 bp, Artificial Sequence
  derived and/or modified sequence
atggccagcagccagggcaagaacgagctgaagctggccgactggatggcaacattgccagagagcatgcactcgattcctctcacaaacctggccatcccgggctcacatgattccttcagcttctatatagacgaggcttctcccgtcggaccggagcagcctgaaacggtgcagaacttcgtgagcgtgtttggcaccgttgccaagaagctgatgcgaaagtggctggcgacccaaacgatgaatttcaccggccagcttggagcggggattcggtacttcgacctgcggatttctacaaagcctcgggatccagacaacgagctgtacttcgctcatggtttattttccgcaaaagtgaacgagggcctagaggagataaatgcttttctgacggaccaccacaaggaggttgtgtttctggacttcaaccacttttatgggatgcaaaagtatcatcatgaaaaactcgttcagatgttgaaagacatctatggcaacaagatgtgccctgccatctttgcccaggaagtgtccctaaaatatctctgggagaaggactaccaggtcctcgtgttctatcattcgcctgtagcgctggaggtaccctttttgtggccgggacagatgatgcccgctccttgggctaacaccactgaccctgagaagctgatccaattcttgcaagcctccatcactgaacgccgtaaaaagggatcctttttcatcagccaggttgtcctgacccctaaggcgtctaccgtggtaaagggagtggctagcggcctgagggaaactatcactgaaagggccttgccggccatgatgcaatgggtccggacccagaaacctggagagtcagggatcaatatcgttactgccgacttcgttgagctaggagacttcatatcgactgtgataaagctaaattatgtttttgatgagggagaggctaacacctag

SEQ ID NO: 21698 - DNA, 966 bp, Artificial Sequence
  derived and/or modified sequence
atggccagcagccagggcaagaacgagctgaagctggccgactggatggccaccctgccagaaagcatgcattccatcccactgactaacctggccatcccgggctcccatgattcatttagtttttacatagacgaagcctcacctgtgggtccagaacagcccgagacggttcaaaatttcgttagcgtgtttggtacagttgctaaaaagcttatgcggaaatggctggctactcaaacaatgaattttactggtcagttgggagcaggcatccgatacttcgatttgaggatcagcaccaagcctcgcgatcctgataatgagctgtatttcgcacacgggcttttcagtgctaaggtaaatgaagggctggaagagatcaacgccttcttaaccgaccaccataaagaggttgtcttcttagatttcaatcatttttacggcatgcagaaataccatcatgaaaagctggtacagatgctgaaggacatctacggaaataaaatgtgccctgccatctttgcacaggaagtaagtttaaaatatctgtgggaaaaggactatcaggttcttgtcttttaccactctcccgttgctcttgaggtgccgtttctctggccaggtcaaatgatgcccgcaccctgggccaataccacagaccctgagaagcttattcagtttctgcaggcctcaattacggagcgtcggaagaagggcagtttctttatcagccaggttgtcctgacacccaaagcctcaacggtcgtcaagggcgtcgcctcagggcttcgggaaaccatcactgagcgcgcattgcccgccatgatgcagtgggtgcgaacccagaaaccaggcgaatccggaatcaatattgtgacagctgacttcgtggaattaggggactttataagtaccgtaatcaagttgaattacgtcttcgacgagggggaagcaaacacctag

SEQ ID NO: 21699 - DNA, 7538 bp, Artificial Sequence
  derived and/or modified sequence
gtaaactctagcggggctagagcaaacattggattagcggcagcagcctgccagcctgcccgaggagtgctgggaccagcgcgctgcacgccgactggcacgatggcctcgtctcaggggaaaaacgagctgaaattagccgactggatggcaactctgccggagagcatgcacagcatccccctcaccaatttagccattccagggtctcatgattccttcagcttctacattgatgaagcctctccagtaggtcctgagcagccagaaactgtccagaattttgtctctgtgtttggaactgtggccaaaaagctcatgcggaaatggttagccactcagacaatgaattttactggccagctaggagctggaattcgttattttgatcttcgaatttccaccaagcccagagaccccgacaatgaactctattttgctcatggtttgttcagtgccaaagtcaatgaaggccttgaggagatcaatgcattcctcacagatcaccataaggaggtagtgttcttggacttcaaccacttttatgggatgcagaaatatcaccatgaaaaactggtccaaatgctgaaagacatctatggaaataaaatgtgcccagcgatttttgcccaggaagttagtttaaagtacctgtgggagaaggactatcaagtgctggtcttctaccatagtccagtggctctggaagtgccctttctctggcctgggcagatgatgccagcaccctgggccaacaccacagaccccgagaaactgatccagtttcttcaagcatccatcactgagagaagaaagaagggatcgttttttatatctcaggtggtgctgacccccaaagctagcactgtggtcaaaggggtggcaagtggcctcagagaaacaatcacagaaagagctcttcctgccatgatgcagtgggtccgcacgcagaagccaggagagagtggcatcaatattgtcactgccgattttgtagaacttggtgactttatcagcactgtcataaagctcaactatgtctttgatgaaggagaagccaacacttgatagcactacttggagtttccatgaataagatggagaaagctcattgtattagggcatactatctgtaaacactctgatcttcctattccactgagtctctgaagggaatagggctggtagtgggtgggaaaaggggaaaaactgtttcttcagtgattacaatcatactcttcattactataaatatttcatttcccatttgatgagcaaaatctacttctagtgttaggaataaaaaaaaaagaccagtaactttgtttttcaaaattagtctttgtaacatagaattcatgagtgtttacttgattaggttctctatttccagcctatgactcctacgctgtctataccctgcaacctttctgctccctctcttgctcgctctttttaatcagatgctgtatgggaatcaaaacaattgaatgcccaacattttgtgtattacattgttgtcttaaaacttactagttttgtgggacttgttataatgctctatagtcatccacagttgggcaatcatagctaatttttggtcatagaaaatctgcatcaaatcagtttccatgcatcagtaatattgaaggtcataatcagtgatttttgttatatgaaaataatagtgtttcacagtatttctatttaaggcagctataaatataggagaaaaatgtttttggagagctgtgaatgccaatttcagagggaaaaatggttgaggggtgaaagagatgtatggcattttaatttggcaatctcttaaataatattgccctgcaagtacccagtaaatggtaaggtacaagtgtgttaaaattgaaaactctgaaaataactctttaaaaagccctcttaatgatgctcttgatgaaagaaaaagacagaaggaaggaagaagaaaaagactgcaagctttcctgccaatttgggattttcaaatatttaattctaaattccagattttaaggaagatttttcaagaaactgcaagtttttgacttgaaggaaagaaagaggaaggctggtagaagcagttagagcaatgtgtttgaaattatgtccatgaaatcacagggatctctgaaatatctttaggaaacttgaaatttatgaggtctgaatggacttgtttaaaattggctctgactcctcacttctgagtttcatcctatccgagggatgagattaaggcagaggcaaaagtttcacacaaagtttctgcaacctaacgtttaatagtccgggtctacagggaagaacaatgacacagcttgagcgttacttcctccttcgtgtcattgtgatatttgacaactctaaaaaataaaaaaaaaaaacttagagcacaataatccttgcctatgtacttcacaggaatattgtgaggtgtttataaaattataaaatttgatgaaattcttacaattattaattattttattttcatgtttagaaataatcacaccccaatagtttcctaggataatacagtccatgcaaagtagggtcatagagaaataaaagcatgccctcagcttttaatgaacttaaatgtagcacatatggcttaatctcttagacttagataagggagttcaattcaaaaccatatatgtcaagaccacaaataatcaagagttgatttcaagattataaatactcatgatcagaaaatagtacttattagcaattaaagggaggaaaagaaattgtttatactgaagagaatgtttatgaggagtgtgtatgtacctgtggtataccaaatagcatacatgtacacacaaaaatgtgtgtatacatttgggttgtgtgtatacatcttgccatatacaatatacaaacatatgcccattcctgtgatagcatacaaattcaaacatacagaaacacacacagatatggacacagtacaattcttcttttcaaatgaagacattgataatattaaataatttaattttaagactgaaacccttaatattgtgtgaaaaagagtaataaaacctttgaaagtagagtagatgatcacatcaaagtatttttgtaaaagaattctagtgtaggacttaattatttttaaaatatatttcttctcttctttccattttcccttcccttgtagttttattatctttctgtcttttacacctgctctttatgtgaaaatgtatatgaatccttttaaaatgattaggattattgaaatgtatgtcccgtaaatttggtttttgggcagactttctctctaactggctattcattcatccttcaggaggatcttagccaagaatatttgcaatgacacatgaatttaattttataaatataatggaaaacagatttttcatcatatcatgaataaaatatagaggtaactatgttgtattttcttgaacctagatactttctcatagtgtttgcttagaattaactttgtcctatttgtcaactgggttctggaaaaaaacaaacatgatgaagcttttgaataattgtgcagttttttaactagggaaagctttgtactgctgctaatgatatgcacccagaaaccttgttagacaaaaggcagtttcaagccaatgctatggtttccatgtggacatacagtgcctatgtagcaggcacttagagtaaatggacttgccttaatttataaaggagggaagaggtagaagggaaccatgggtcctccagctagagggggagtttactaaaagggagtccttggaaaggggaatggagagaaggtgcctttgactgtcttctatccattagttctgccctggagcacactggggaagcaggctgcgggccttccaaaagtaaaaaatggtgatatgcaatcgaagcttatccttagcctatgcacatttgtctcagctgggcattgtcttttcagagagcttgtagcacaagggctacacatgggcgccaagatggtggtagatacaccttggtgcactttttgttttacttgtttcttaagactatttcacaagtcctgtgaggcaaaaaaacaaaacaaaacaaaacaaccaaacaaatacaatctaacttttacccaatctacagcaggaaatcaaaggagtgggtggaatgagagaaaatatgcaaagagatcatttttaagtttgatttcctgtctgtaattttcaaggactaatatagcaaatttttcttctgccattatcatttatgtctccctatttaccacacaataatgtaaatgcagagaatgaggaggcatcttttaaaagccttaggatattctatatgatgacctcaatattgactttcagccatactgggaaaacttacttttcatggagtgccacctaacagtgaatgtattagagtataaaatgtttgccatgtatacacctgtatgtgcacatacacacattacacacacacacagaatgcacatttcacacacatatacttattattcaagttgaaactgcactctaatcaatctgagtctattgctgtttcaactcttaaaatcaatatctcctacattagtagatataaacataattcaaatatttaaatatttaagaggagaaaagtaactagaaaaccaatgaaaagtgaggccatcagaaatagaaaatgcctggcacgaacagtctatctaaattctcaatttcacttcaaattagagaatccataatggactagaatataaattacaaacacatacacacatcttcacttaaagttgttttaagttctttgaagttctgacatgtttttagccagggttatttgttcaggttcttccttgttaggattccagactggaaagttggaagtctcaggaaatgcatgtttccatgagttttttagtttcacagttttacagatccaacgacacaatcttttaatctttggtcactcaaccaaacaggagttccgtaggcagagtgctcactttgaattgctaatagaaaataatgcacagtgtcctcaggatatgctaaacaaggtttttaagagcattttattttacagcactttagtcttttcagctagatttcagtgacactatggtgtaaatgctatatctgccataacttattggtggctcctgtgttacatacagttttaaataatgctctaaattgtttgttttcccaatgataatgataaagtgttctgtagaatttgtaaaacatgtcaattgaatctgttgaaaattgtgtaattgttatttcaattgtgatactattttgtaggtaatagttttaaacgtatatttgtatgagtcaaaagtatgtgcttgtatgtggtatgtgtgtgtaagtatataatatcttatcaaaaatcaaacttatcctaaagaaaaagggcacattgtgaccagccttaatttattaacacttttttgttgtttttgcaatttggatttaaaattgaaacagaaattaagtttttgttaaaaatggtgtcttttaattttgtgaggaatgggctttagaacctatctgagttcccacaagcaaactgtccaccttgtgaggtaccccattgcttttcgtaataatcaaacatcaattcatatattaacttcattttcatacagactaatttgttttcatcaacaatagaaccagtacacctttaaagttgaccttcccaacatggcacccatttttctttaatgataaattttccatgaaaaattgtttctccaaaccattactttttaaaattcaatcttcccaagtaagatgaactgccttggtgttaggagagcttttaaaggcccatccatactaggtggttccaacatggttctcttctcgagaaaacaagcatgcaacccacacacttttctggtctgccccacgtgtagaattagtctagcaatagaaaactcatgactgacaaggatctacacatgtggtcatgcttgaagcaaaaattctgtgaccttctttgggcttggatctgattacagaatattaattaactttcttatttcctttctttctccatccttagttattccttttcaatatttagagttgccaggtaaaatacaggatatccagtgaaatttaaatttcagataaacagtatttctttagcatatttctcatatatttaatcagacatactttcactttaaaaaaagtttatctgaaattcaaatgtaactgggtatgtcctatatattttttcctaaatctcacaattctatccacactgcctttctatctttttcagctgggctatctataaggggcgagatctacctccctccatacccttgtgttcagacaccttatgaatatctgcagtcataatgtccttcaagaaagaaaacattggtcagctctaggtcctgcaaatgctttttgaaggacgaactcaaatacagatgggataatcaagtaaatatcttcataggatcaatgccaccatgttcaacacttccctttgccagcctgttgtgaggtccaagtttccccattaatcccttatatagcatttcccagtaactgggacaaccaaaaacacaccgacatattagaaatgctcctgaaaagtggcaacaccgcctaactcagtaccaggacctcttttaaattcaatttcttttttctttcagagagataacaaacgaattcattatttcccccattcacatcttaccacaaattatttttatcaggttaaaactggtcatctacggaattgtagaaaggtgacataggaactgtcttcactgctggaagaataaaagagtctgaggtatagacactgccctggtgacaccttctcagaacattgttgggggacaggggaggcaggcgcaagtaggggatagaatctgaccctgacatgcagctatcacctggcagagagactcgtcaaagcaaattataacgaccagtactatttttttttggaattgaaaacccaagaagccctaaaataagaacagtgagatcaaaggctggtttctaaaacaatgcagaaaatagaaccatgttggaattcctaaattctagctttcaaatactactgtttccaacagtgaatccttgacagagactgaatgcagatggaattttgaaacattttcagtagctacctcctctcctgaaattcctataagtggcagaggaaaatccaaatcctttaatataacatgtccatctcatgactcctgcttacacacatttgtgttgatttgcttcatttctggaggatgggaatttgcagagctggtgacatttccttcattagacaccagaaattcaccagagagagacagatctgtgccttctctttttaggatctggttattgatactttaataaatgtggtgtaaagaaaatccatggctacagtctgtatagaaaatgtgaattttttaaataagattgtgttcttaatgtaaaaaataaaagtttatttgtattcagtgaaatgcctaataaagtcctggtacc

SEQ ID NO: 21700 - DNA, 7704 bp, Artificial Sequence
  derived and/or modified sequence
attggattagcggcagcagcctgccagcctgcccgaggagtgctgggaccagcgcgctgcacgccgactggcacgatggcctcgtctcaggggaaaaacgagctgaaattagccgactggatggcaactctgccggagagcatgcacagcatccccctcaccaatttagccattccagggtctcatgattccttcagcttctacattgatgaagcctctccagtaggtcctgagcagccagaaactgtccagaattttgtctctgtgtttggaactgtggccaaaaagctcatgcggaaatggttagccactcagacaatgaattttactggccagctaggagctggaattcgttattttgatcttcgaatttccaccaagcccagagaccccgacaatgaactctattttgctcatggtttgttcagtgccaaagtcaatgaaggccttgaggagatcaatgcattcctcacagatcaccataaggaggtagtgttcttggacttcaaccacttttatgggatgcagaaatatcaccatgaaaaactggtccaaatgctgaaagacatctatggaaataaaatgtgcccagcgatttttgcccaggaagttagtttaaagtacctgtgggagaaggactatcaagtgctggtcttctaccatagtccagtggctctggaagtgccctttctctggcctgggcagatgatgccagcaccctgggccaacaccacagaccccgagaaactgatccagtttcttcaagcatccatcactgagagaagaaagaagggatcgttttttatatctcaggtggtgctgacccccaaagctagcactgtggtcaaaggggtggcaagtggcctcagagaaacaatcacagaaagagctcttcctgccatgatgcagtgggtccgcacgcagaagccaggagagagtggcatcaatattgtcactgccgattttgtagaacttggtgactttatcagcactgtcataaagctcaactatgtctttgatgaaggagaagccaacacttgatagcactacttggagtttccatgaataagatggagaaagctcattgtattagggcatactatctgtaaacactctgatcttcctattccactgagtctctgaagggaatagggctggtagtgggtgggaaaaggggaaaaactgtttcttcagtgattacaatcatactcttcattactataaatatttcatttcccatttgatgagcaaaatctacttctagtgttaggaataaaaaaaaaagaccagtaactttgtttttcaaaattagtctttgtaacatagaattcatgagtgtttacttgattaggttctctatttccagcctatgactcctacgctgtctataccctgcaacctttctgctccctctcttgctcgctctttttaatcagatgctgtatgggaatcaaaacaattgaatgcccaacattttgtgtattacattgttgtcttaaaacttactagttttgtgggacttgttataatgctctatagtcatccacagttgggcaatcatagctaatttttggtcatagaaaatctgcatcaaatcagtttccatgcatcagtaatattgaaggtcataatcagtgatttttgttatatgaaaataatagtgtttcacagtatttctatttaaggcagctataaatataggagaaaaatgtttttggagagctgtgaatgccaatttcagagggaaaaatggttgaggggtgaaagagatgtatggcattttaatttggcaatctcttaaataatattgccctgcaagtacccagtaaatggtaaggtacaagtgtgttaaaattgaaaactctgaaaataactctttaaaaagccctcttaatgatgctcttgatgaaagaaaaagacagaaggaaggaaggaaggaaggaaggaaggaaggaaggaaggaaggaaggaaaggaagaaaggaagggagggaggaagggagggaagaagggagggaaggacagaaggaaggacgggaggaaggaaggaagggaggaaggaaggaaggaagagagggagggagggaggaagagagggagggagggaggaagagaggaaggaagaagaaaaagactgcaagctttcctgccaatttgggattttcaaatatttaattctaaattccagattttaaggaagatttttcaagaaactgcaagtttttgacttgaaggaaagaaagaggaaggctggtagaagcagttagagcaatgtgtttgaaattatgtccatgaaatcacagggatctctgaaatatctttaggaaacttgaaatttatgaggtctgaatggacttgtttaaaattggctctgactcctcacttctgagtttcatcctatccgagggatgagattaaggcagaggcaaaagtttcacacaaagtttctgcaacctaacgtttaatagtccgggtctacagggaagaacaatgacacagcttgagcgttacttcctccttcgtgtcattgtgatatttgacaactctaaaaaataaaaaaaaaaaacttagagcacaataatccttgcctatgtacttcacaggaatattgtgaggtgtttataaaattataaaatttgatgaaattcttacaattattaattattttattttcatgtttagaaataatcacaccccaatagtttcctaggataatacagtccatgcaaagtagggtcatagagaaataaaagcatgccctcagcttttaatgaacttaaatgtagcacatatggcttaatctcttagacttagataagggagttcaattcaaaaccatatatgtcaagaccacaaataatcaagagttgatttcaagattataaatactcatgatcagaaaatagtacttattagcaattaaagggaggaaaagaaattgtttatactgaagagaatgtttatgaggagtgtgtatgtacctgtggtataccaaatagcatacatgtacacacaaaaatgtgtgtatacatttgggttgtgtgtatacatcttgccatatacaatatacaaacatatgcccattcctgtgatagcatacaaattcaaacatacagaaacacacacagatatggacacagtacaattcttcttttcaaatgaagacattgataatattaaataatttaattttaagactgaaacccttaatattgtgtgaaaaagagtaataaaacctttgaaagtagagtagatgatcacatcaaagtatttttgtaaaagaattctagtgtaggacttaattatttttaaaatatatttcttctcttctttccattttcccttcccttgtagttttattatctttctgtcttttacacctgctctttatgtgaaaatgtatatgaatccttttaaaatgattaggattattgaaatgtatgtcccgtaaatttggtttttgggcagactttctctctaactggctattcattcatccttcaggaggatcttagccaagaatatttgcaatgacacatgaatttaattttataaatataatggaaaacagatttttcatcatatcatgaataaaatatagaggtaactatgttgtattttcttgaacctagatactttctcatagtgtttgcttagaattaactttgtcctatttgtcaactgggttctggaaaaaaacaaacatgatgaagcttttgaataattgtgcagttttttaactagggaaagctttgtactgctgctaatgatatgcacccagaaaccttgttagacaaaaggcagtttcaagccaatgctatggtttccatgtggacatacagtgcctatgtagcaggcacttagagtaaatggacttgccttaatttataaaggagggaagaggtagaagggaaccatgggtcctccagctagagggggagtttactaaaagggagtccttggaaaggggaatggagagaaggtgcctttgactgtcttctatccattagttctgccctggagcacactggggaagcaggctgcgggccttccaaaagtaaaaaatggtgatatgcaatcgaagcttatccttagcctatgcacatttgtctcagctgggcattgtcttttcagagagcttgtagcacaagggctacacatgggcgccaagatggtggtagatacaccttggtgcactttttgttttacttgtttcttaagactatttcacaagtcctgtgaggcaaaaaaacaaaacaaaacaaaacaaccaaacaaatacaatctaacttttacccaatctacagcaggaaatcaaaggagtgggtggaatgagagaaaatatgcaaagagatcatttttaagtttgatttcctgtctgtaattttcaaggactaatatagcaaatttttcttctgccattatcatttatgtctccctatttaccacacaataatgtaaatgcagagaatgaggaggcatcttttaaaagccttaggatattctatatgatgacctcaatattgactttcagccatactgggaaaacttacttttcatggagtgccacctaacagtgaatgtattagagtataaaatgtttgccatgtatacacctgtatgtgcacatacacacattacacacacacacagaatgcacatttcacacacatatacttattattcaagttgaaactgcactctaatcaatctgagtctattgctgtttcaactcttaaaatcaatatctcctacattagtagatataaacataattcaaatatttaaatatttaagaggagaaaagtaactagaaaaccaatgaaaagtgaggccatcagaaatagaaaatgcctggcacgaacagtctatctaaattctcaatttcacttcaaattagagaatccataatggactagaatataaattacaaacacatacacacatcttcacttaaagttgttttaagttctttgaagttctgacatgtttttagccagggttatttgttcaggttcttccttgttaggattccagactggaaagttggaagtctcaggaaatgcatgtttccatgagttttttagtttcacagttttacagatccaacgacacaatcttttaatctttggtcactcaaccaaacaggagttccgtaggcagagtgctcactttgaattgctaatagaaaataatgcacagtgtcctcaggatatgctaaacaaggtttttaagagcattttattttacagcactttagtcttttcagctagatttcagtgacactatggtgtaaatgctatatctgccataacttattggtggctcctgtgttacatacagttttaaataatgctctaaattgtttgttttcccaatgataatgataaagtgttctgtagaatttgtaaaacatgtcaattgaatctgttgaaaattgtgtaattgttatttcaattgtgatactattttgtaggtaatagttttaaacgtatatttgtatgagtcaaaagtatgtgcttgtatgtggtatgtgtgtgtaagtatataatatcttatcaaaaatcaaacttatcctaaagaaaaagggcacattgtgaccagccttaatttattaacacttttttgttgtttttgcaatttggatttaaaattgaaacagaaattaagtttttgttaaaaatggtgtcttttaattttgtgaggaatgggctttagaacctatctgagttcccacaagcaaactgtccaccttgtgaggtaccccattgcttttcgtaataatcaaacatcaattcatatattaacttcattttcatacagactaatttgttttcatcaacaatagaaccagtacacctttaaagttgaccttcccaacatggcacccatttttctttaatgataaattttccatgaaaaattgtttctccaaaccattactttttaaaattcaatcttcccaagtaagatgaactgccttggtgttaggagagcttttaaaggcccatccatactaggtggttccaacatggttctcttctcgagaaaacaagcatgcaacccacacacttttctggtctgccccacgtgtagaattagtctagcaatagaaaactcatgactgacaaggatctacacatgtggtcatgcttgaagcaaaaattctgtgaccttctttgggcttggatctgattacagaatattaattaactttcttatttcctttctttctccatccttagttattccttttcaatatttagagttgccaggtaaaatacaggatatccagtgaaatttaaatttcagataaacagtatttctttagcatatttctcatatatttaatcagacatactttcactttaaaaaaagtttatctgaaattcaaatgtaactgggtatgtcctatatattttttcctaaatctcacaattctatccacactgcctttctatctttttcagctgggctatctataaggggcgagatctacctccctccatacccttgtgttcagacaccttatgaatatctgcagtcataatgtccttcaagaaagaaaacattggtcagctctaggtcctgcaaatgctttttgaaggacgaactcaaatacagatgggataatcaagtaaatatcttcataggatcaatgccaccatgttcaacacttccctttgccagcctgttgtgaggtccaagtttccccattaatcccttatatagcatttcccagtaactgggacaaccaaaaacacaccgacatattagaaatgctcctgaaaagtggcaacaccgcctaactcagtaccaggacctcttttaaattcaatttcttttttctttcagagagataacaaacgaattcattatttcccccattcacatcttaccacaaattatttttatcaggttaaaactggtcatctacggaattgtagaaaggtgacataggaactgtcttcactgctggaagaataaaagagtctgaggtatagacactgccctggtgacaccttctcagaacattgttgggggacaggggaggcaggcgcaagtaggggatagaatctgaccctgacatgcagctatcacctggcagagagactcgtcaaagcaaattataacgaccagtactatttttttttggaattgaaaacccaagaagccctaaaataagaacagtgagatcaaaggctggtttctaaaacaatgcagaaaatagaaccatgttggaattcctaaattctagctttcaaatactactgtttccaacagtgaatccttgacagagactgaatgcagatggaattttgaaacattttcagtagctacctcctctcctgaaattcctataagtggcagaggaaaatccaaatcctttaatataacatgtccatctcatgactcctgcttacacacatttgtgttgatttgcttcatttctggaggatgggaatttgcagagctggtgacatttccttcattagacaccagaaattcaccagagagagacagatctgtgccttctctttttaggatctggttattgatactttaataaatgtggtgtaaagaaaatccatggctacagtctgtatagaaaatgtgaattttttaaataagattgtgttcttaatgtaaaaaataaaagtttatttgtattcagtgaaatgcctaataaagtcctggtaccaat

SEQ ID NO: 21701 - DNA, 966 bp, Artificial Sequence
  derived and/or modified sequence
atggcttccagccagggaaagaacgaattgaagttggccgattggatggctacactgcccgagagcatgcattccatcccgctaaccaacctcgccatcccaggctctcacgattctttctccttttatatcgacgaagcttcccctgtaggacctgaacaacctgagaccgtacagaacttcgtcagcgtttttggaaccgtggcaaagaagctgatgcgcaaatggctcgctacccagactatgaatttcactgggcagctgggagctggcatccggtacttcgatctacggatttccaccaagcccagggatcccgataacgagctctactttgcgcatggactgttttcagccaaagtaaacgagggcctggaggagatcaatgctttcctgactgatcaccacaaggaggtagtttttcttgatttcaaccatttttatggaatgcaaaagtatcaccatgaaaagctggtgcagatgctcaaggacatttacggtaacaaaatgtgtccagccatctttgcccaagaggtgtcgttgaagtacctttgggagaaggattatcaggtactcgtgttctaccactctccggtcgccctggaagtccctttcctgtggccagggcagatgatgcctgctccatgggcgaacactaccgaccctgaaaaactgattcagtttcttcaggcttccattaccgagagaagaaaaaagggaagcttctttatcagccaagtggtcttgactcctaaggcctcaacggtcgtcaagggcgtagcctcagggctccgtgagaccattaccgagagggcgctgccggctatgatgcagtgggttcggactcaaaaacccggagagagcggaattaacatcgttacagccgatttcgtggaactaggcgatttcatctccaccgtgattaagttgaattatgtctttgatgaaggtgaagccaatacctag

SEQ ID NO: 21702 - DNA, 966 bp, Artificial Sequence
  derived and/or modified sequence
atggccagctcacagggtaaaaatgagctgaaactcgctgattggatggccactttgcccgaaagcatgcactccatccccttaaccaatcttgctattcctggatcacacgacagtttcagcttctacattgatgaggcaagccctgtgggcccagaacaacctgaaactgtgcagaattttgtgagtgtgttcgggaccgttgcgaagaaactcatgagaaaatggctagccactcaaacaatgaacttcaccgggcaactgggagctggaatcaggtacttcgatctgcggatcagcaccaagccacgggatcctgataacgaactgtacttcgcccatggcctcttttctgcaaaagtgaacgaaggattggaagagatcaatgcttttctgaccgatcatcacaaagaggtcgtgtttctggatttcaaccacttctatggcatgcagaaatatcatcacgagaagctcgtgcaaatgctcaaagacatttatggcaataagatgtgtccggctatcttcgcccaggaagtcagcctgaagtatctttgggaaaaggactatcaggtgttggttttttatcacagcccagtagcactcgaagttcccttcctatggcccggtcagatgatgccggctccatgggctaacaccactgatccagaaaagctgatccaattcttgcaagccagtatcaccgagcgaaggaagaaaggcagcttctttatctctcaggttgtcctgacgcctaaagcctccaccgttgtaaagggggttgctagcggccttcgggagacgataacggagagggcgctgccggctatgatgcaatgggttaggactcagaaacccggagaaagcgggatcaacatcgtgaccgccgatttcgtcgaacttggggattttatcagtactgtgattaagctgaattacgtgtttgacgagggcgaggcaaacacatag

SEQ ID NO: 21703 - protein, 596 aa, Artificial Sequence
  derived and/or modified sequence
MIVDKLLDDSRGGEGLRDAAGGCGLMTSPLNLSYFYGASPPAAAPGACDASCSVLGPSAPGSPGSDSSDFSSASSVSSCGAVESRSRGGARAERQPVEPHMGVGRQQRGPFQGVRVKNSVKELLLHIRSHKQKASGQAVDDFKTQGVNIEQFRELKNTVSYSGKRKGPDSLSDGPACKRPALLHSQFLTPPQTPTPGESMEDVHLNEPKQESSADLLQNIINIKNECSPVSLNTVQTSSSVQQQNDAHLHSFSMMPSSACEAMVGHEMASDSSNTSLPFSNMGNPMNTTQLGKSLFQWQVEQEESKLANISQDQFLSKDADGDTFLHIAVAQGRRALSYVLARKMNALHMLDIKEHNGQSAFQVAVAANQHLIVQDLVNIGAQVNTTDCWGRTPLHVCAEKGHSQVLQAIQKGAVGSNQFVDLEATNYDGLTPLHCAVIAHNAVVHELQRNQQPHSPEVQELLLKNKSLVDTIKCLIQMGAAVEAKDRKSGRTALHLAAEEANLELIRLFLELPSCLSFVNAKAYNGNTALHVAASLQYRLTQLDAVRLLMRKGADPSTRNLENEQPVHLVPDGPVGEQIRRILKGKSIQQRAPPY

SEQ ID NO: 21704 - protein, 618 aa, Artificial Sequence
  derived and/or modified sequence
MGVGRQQRGPFQGVRVKNSVKELLLHIRSHKQKASGQAVDDFKTQGVNIEQFRELKNTVSYSGKRKGPDSLSDGPACKRPALLHSQFLTPPQTPTPGESMEDVHLNEPKQESSADLLQNIINIKNECSPVSLNTVQVSWLNPVVVPQSSPAEQCQDFHGGQVFSPPQKCQPFQVRGSQQMIDQASLYQYSPQNQHVEQQPHYTHKPTLEYSPFPIPPQSPAYEPNLFDGPESQFCPNQSLVSLLGDQRESENIANPMQTSSSVQQQNDAHLHSFSMMPSSACEAMVGHEMASDSSNTSLPFSNMGNPMNTTQLGKSLFQWQVEQEESKLANISQDQFLSKDADGDTFLHIAVAQGRRALSYVLARKMNALHMLDIKEHNGQSAFQVAVAANQHLIVQDLVNIGAQVNTTDCWGRTPLHVCAEKGHSQVLQAIQKGAVGSNQFVDLEATNYDGLTPLHCAVIAHNAVVHELQRNQQPHSPEVQELLLKNKSLVDTIKCLIQMGAAVEAKDRKSGRTALHLAAEEANLELIRLFLELPSCLSFVNAKAYNGNTALHVAASLQYRLTQLDAVRLLMRKGADPSTRNLENEQPVHLVPDGPVGEQIRRILKGKSIQQRAPPY

SEQ ID NO: 21705 - protein, 130 aa, Artificial Sequence
  derived and/or modified sequence
MGVGRQQRGPFQGVRVKNSVKELLLHIRSHKQKASGQAVDDFKTQGVNIEQFRELKNTVSYSGKRKGPDSLSDGPACKRPALLHSQFLTPPQTPTPGESMEDVHLNEPKQESSADLLQNIINIKNECSPV

SEQ ID NO: 21706 - DNA, 1791 bp, Artificial Sequence
  derived and/or modified sequence
atgatagttgacaagttgctggatgactccagaggtggcgaaggacttagggatgctgccggtggatgtgggctgatgacttccccactgaatctgagttacttctatggagcttcacctcccgcagctgccccgggcgcctgtgacgcctcctgcagcgttctgggccctagtgcccccggtagccctgggtctgatagctctgatttctcttctgctagcagcgtttcctcctgtggcgcagtcgagtccagaagcagggggggcgcacgcgcggagcgccagcccgtggaacctcacatgggcgttgggcggcagcaaaggggtcccttccagggagttcgggtcaaaaatagtgtgaaggagctcctgcttcacataaggagccacaagcagaaagcttcaggccaggctgtagacgacttcaagacccaaggcgtgaacattgagcaattcagagagctgaaaaatactgtctcttatagtgggaagagaaagggccccgattctctgtctgacgggccagcgtgcaagagacccgcactccttcattcgcagttccttaccccaccccagactcctacacctggcgagagtatggaggatgtacacctcaatgaaccgaagcaggagtcctcagccgacttgttacagaatatcatcaacattaagaacgagtgttcacctgtctcgctcaacacagtgcagacatctagttccgttcagcagcaaaacgatgctcatctgcacagctttagtatgatgccgtcttcagcttgtgaagcaatggtcggacatgagatggcatcagactcctctaatacaagcctccctttctcgaatatgggtaatccgatgaatacaactcagctggggaagtccttgtttcagtggcaggtggagcaagaagaatcgaagcttgccaatatcagccaggaccaatttctctctaaggatgcggatggtgacacatttctgcatattgccgtagctcagggtcgccgtgctctctcttacgtgctggcccgcaagatgaacgctttacatatgttggacataaaggaacataacgggcagtcagcctttcaggtcgcagtggctgccaaccaacaccttatagtccaagatcttgtcaacatcggggcacaggtcaatacgactgattgttggggccggacaccattacacgtgtgtgcagagaaaggccattcgcaagtcctgcaggccattcagaagggggccgtgggcagtaaccagtttgtcgacctggaggccaccaattacgatggattaacacccctgcactgtgccgttatcgcacacaacgctgttgtacatgagctgcagcgcaatcagcagccccattctcccgaggtgcaggagctcctcctgaaaaataaatctctagtcgatactatcaagtgtctcatccagatgggcgcagcagtggaggctaaagataggaaatctggcaggaccgccttgcacttggcagctgaggaagctaacctggagctaataaggctttttctcgagctcccttcttgtctctcttttgtgaacgccaaagcctataatgggaacacggctttacacgtcgccgcatccctgcaatatcggctaactcaacttgatgcagtgagactgctgatgagaaagggcgcagatccttcgaccagaaacttggagaatgagcagcctgttcatctcgtacccgacggccctgttggagagcagatccggcggatcctgaaaggtaagagcattcagcagagagcgcctccctactag

SEQ ID NO: 21707 - DNA, 1857 bp, Artificial Sequence
  derived and/or modified sequence
atgggtgttggccgacagcagagagggccttttcagggggtgcgcgtgaaaaactccgtgaaggagttgctcctccacatacgaagtcacaaacagaaagcctccgggcaggccgttgacgattttaagacacagggagtgaacatcgaacagttcagagagttgaaaaatacagtgtcctacagcggtaaacgcaagggacctgactccctgtccgatggacctgcgtgtaaaagacccgctctgttgcactcccagtttctcacccctccccagacacctacacctggggagtctatggaagatgtccatcttaacgaacctaaacaggaaagtagtgccgacttactccaaaatataatcaacatcaagaatgagtgcagcccagtgagcctcaatactgtccaggtgtcgtggttgaatccagttgttgtgcctcaatctagccccgccgagcagtgccaggattttcatggcggccaggtgttctcaccaccccagaaatgtcagccattccaagtgcgggggagccaacagatgatcgaccaagcctcgctataccagtacagtcctcagaaccagcacgtggagcagcagccacattatactcacaaaccaaccctggagtattcacccttcccaatccctccccagtctcctgcgtacgagcccaatctgtttgatgggcctgaatcacagttctgtcccaatcaatccctggtttccctcctgggggatcagcgcgagtcagaaaatatcgccaatccgatgcagacaagctcatccgtccagcagcaaaatgatgcccacctgcacagtttctctatgatgccgagtagtgcgtgcgaggccatggtcggacacgaaatggcttcggacagctcgaacacttccctgccatttagcaacatgggaaacccaatgaacaccacccaattgggaaagagtctctttcagtggcaagtggagcaggaggaaagcaagctggcaaacattagccaggatcagttcctcagcaaagacgccgacggcgacacattcctccacatcgcggtggcgcaaggaagacgagctttaagctacgtcctggctcgcaagatgaacgcgctccacatgctggacatcaaggagcataacgggcagtcagcctttcaagtcgcggtcgccgcaaatcagcaccttatcgtgcaggacttggtcaacatcggcgcccaagtgaacacgactgattgttggggtagaacccccctgcacgtgtgtgccgaaaagggacattctcaggtcctgcaggcaatacagaagggggccgtcggctccaatcagttcgtagacctggaagccaccaattatgatggcttaacacctctgcactgtgcggtgattgctcacaacgccgtggtgcatgagctacaaaggaatcaacagcctcacagccctgaagtgcaggagctgctgctaaaaaacaaatcactcgttgacactataaaatgtctgatccagatgggggcagccgtcgaagctaaggaccgcaaatcaggacggactgccttgcacctggcggccgaggaggccaacctggagttaatcagactgtttctggagctccccagctgcctcagtttcgtgaatgctaaggcctataacggaaataccgcccttcatgtggctgccagtctgcagtataggctcacacaattagacgccgttcggctcctcatgaggaagggcgcggacccttctactagaaacctcgagaacgagcaaccagttcatctggttcctgatggacccgtgggagagcagattcgacggatcctcaaaggcaagagcatccagcagagagctcctccatactag

SEQ ID NO: 21708 - DNA, 1806 bp, Artificial Sequence
  derived and/or modified sequence
atgggggtgggtcgccagcaacgaggcccatttcaaggagttagagtgaaaaactctgtgaaagaattacttctgcacattcgcagccataagcagaaggcctctggacaggccgttgatgacttcaagacacagggggtgaacatcgaacagtttcgggagttgaaaaacactgtgagctacagtgggaaaaggaaaggtcctgattcgctgtctgatggcccagcgtgcaaacgacctgccttactgcattcccagttcttgaccccaccacagacaccaactcccggtgagagcatggaggatgtgcacctcaatgaacctaaacaagaaagtagtgccgacctccttcagaacatcataaatattaaaaatgagtgcagccctgtcagtctcaacaccgtgcaggtctcctggctgaatcctgttgttgttccgcagtcaagcccagcagaacagtgccaagattttcatggagggcaggtcttcagccccccacagaaatgtcaaccgttccaggtccgtggttctcaacagatgattgaccaggcttccctgtaccaatattcgccccaaaaccagcatgtggagcagcagccccactatacacataaacctactctggagtacagcccgtttcccatacctcctcagtctcctgcctacgagcccaatctctttgacggcccagagtcccagttctgccccaaccagtcgctcgtatccctgctgggggaccaacgggagtccgaaaatattgccaacccaatgcaaacctccagtagcgtacagcagcagaatgacgctcatttgcattcattctcaatgatgccaagtagcgcatgcgaagcaatggtcgggcacgagatggcctctgactcatctaatacaagcctccccttctctaacatgggaaacccgatgaacacaactcaacttgggaaaagtctgttccagtggcaggtcgagcaggaagagtctaaactcgccaacatcagccaggatcagtttttaagcaaagatgcagacggcgataccttcttgcatatcgctgtagcccagggacggagggccttgagttatgtgttagcaagaaagatgaacgcactccacatgttggatatcaaagaacataacggtcagagcgctttccaagtcgccgtggcagcaaaccaacatctgatcgtgcaagacctagttaatataggggctcaagtgaatacaaccgactgctgggggcgaacacccctgcacgtatgcgcagagaagggacacagtcaggtcctgcaggctattcagaaaggtgcggttggcagcaatcagttcgtagacctggaggcaacgaattacgatgggctgactcccctccactgcgcagtaatcgcccacaatgcagtcgtgcacgagctgcagagaaaccaacagccccattcccccgaagttcaggagttacttctgaagaacaaatcactcgtggataccatcaaatgtctgatacagatgggagcagccgtggaggctaaggaccggaagagtgggaggaccgccttgcacctggccgcggaggaagctaatctggagctcattagactcttcctcgagctcccgtcttgtttgtcatttgtgaatgcaaaggcctacaacggaaacaccgcactgcacgtggcagcaagtttgcaataccgcctgactcagttagacgcagtgagactgcttatgagaaaaggtgcagacccttcaaccaggaatctcgaaaacgagcagccggtgcatttggtgccagacgggcctgtgggagagcaatag

SEQ ID NO: 21709 - DNA, 393 bp, Artificial Sequence
  derived and/or modified sequence
atgggcgtaggccgtcagcagcgcggcccatttcagggagtgagggttaaaaattccgtcaaggagctcctgttgcacatccgttcacacaagcagaaggcttccggccaagctgtcgacgacttcaaaacccaaggggtgaacattgagcagtttcgggagttaaagaataccgtgtcctattcaggaaagaggaagggaccggattccctgagtgacggcccagcctgcaagagacccgcccttcttcatagtcaattcctgacaccaccccagacacccacccctggcgagagcatggaagatgtgcacctgaatgaaccaaaacaggagagttctgctgatttacttcagaatatcatcaacatcaagaatgaatgttcacctgtgtag

SEQ ID NO: 21710 - DNA, 1791 bp, Artificial Sequence
  derived and/or modified sequence
atgattgtggacaagctgctggatgacagccggggcggggagggcctgagagatgctgctgggggctgcggcctgatgaccagccccctgaacctgagctacttctacggggccagccccccagctgctgcccctggggcctgtgatgccagctgcagcgtgctgggccccagcgcccctggcagccctggcagtgacagcagtgacttcagcagcgccagctctgtgagcagctgtggggctgtggagagccgcagccggggcggggcccgggcagagcggcagcctgtggagccccacatgggcgtgggccggcagcagaggggccccttccagggcgtgcgggtgaagaacagcgtgaaggagctgctgctgcacatccgcagccacaagcagaaggccagcggccaggccgtggatgacttcaagacccagggcgtgaacatcgagcagttccgggagctgaagaacacagtgtcctacagcggcaagaggaagggccctgacagcctgagtgatggccctgcctgcaagaggcctgccctgctgcacagccagttcctgaccccaccccagacccccaccccaggagagagcatggaggatgtgcacctgaatgagcccaagcaggagagcagcgctgacctgctgcagaacatcatcaacatcaagaatgaatgttctcctgtgtccctgaacacagtgcagaccagcagctctgtgcagcagcagaatgatgcccacctgcacagcttctccatgatgcccagcagcgcctgtgaggccatggtgggccacgagatggccagtgacagcagcaacaccagcctgcccttcagcaacatgggcaaccccatgaacaccacccagctgggcaagagcctcttccagtggcaggtggagcaggaggagagcaagctggccaacatcagccaggaccagttcctgagcaaggatgctgatggagacaccttcctgcacatcgctgtggcccagggccggcgggccctgtcctatgtgctggccaggaagatgaatgccctgcacatgctggacatcaaggagcacaacggccagagcgccttccaggtggccgtggccgccaaccagcacctgattgtgcaggacctggtgaacatcggggcccaggtgaacaccacagactgctggggccgcacccccctgcacgtgtgtgccgagaagggccacagccaggtgctgcaggccatccagaagggagctgtgggcagcaaccagtttgtggacctggaggccaccaactatgatggcctgacccccctgcactgtgctgtgattgcccacaatgctgtggtgcatgagctgcagaggaaccagcagccccacagccctgaggtgcaggagctgctgctgaagaacaagagcctggtggacaccatcaagtgcctgatccagatgggcgctgctgtggaggccaaggacaggaagagcggccgcacagccctgcacctggccgctgaggaggccaacctggagctgatccgcctcttcctggagctgcccagctgcctgagctttgtgaatgccaaggcctacaacggcaacacagccctgcacgtggccgccagcctgcagtaccgcctgacccagctggatgctgtgcggctgctgatgaggaaaggagctgaccccagcaccaggaacctggagaatgagcagcctgtgcacctggtgcctgatggccctgtgggggagcagatccgccgcatcctgaagggcaagagcatccagcagagggccccaccctactag

SEQ ID NO: 21711 - DNA, 1857 bp, Artificial Sequence
  derived and/or modified sequence
atgggcgtgggccggcagcagaggggccccttccagggcgtgcgggtgaagaacagcgtgaaggagctgctgctgcacatccgcagccacaagcagaaggccagcggccaggccgtggatgacttcaagacccagggcgtgaacatcgagcagttccgggagctgaagaacacagtgtcctacagcggcaagaggaagggccctgacagcctgagtgatggccctgcctgcaagaggcctgccctgctgcacagccagttcctgaccccaccccagacccccaccccaggagagagcatggaggatgtgcacctgaatgagcccaagcaggagagcagcgctgacctgctgcagaacatcatcaacatcaagaatgaatgttctcctgtgtccctgaacacagtgcaggtgtcctggctgaaccctgtggtggtgccccagagcagccctgctgagcagtgccaggacttccacggcggccaggtgttcagccccccccagaagtgccagcccttccaggtgcggggcagccagcagatgattgaccaggccagcctgtaccagtacagcccccagaaccagcacgtggagcagcagccccactacacccacaagcccaccctggagtacagccccttccccatccccccccagagccctgcctatgagcccaacctgtttgatggccctgagagccagttctgccccaaccagagcctggtgtccctgctgggggaccagcgggagagtgaaaatattgccaaccccatgcagaccagcagctctgtgcagcagcagaatgatgcccacctgcacagcttctccatgatgcccagcagcgcctgtgaggccatggtgggccacgagatggccagtgacagcagcaacaccagcctgcccttcagcaacatgggcaaccccatgaacaccacccagctgggcaagagcctcttccagtggcaggtggagcaggaggagagcaagctggccaacatcagccaggaccagttcctgagcaaggatgctgatggagacaccttcctgcacatcgctgtggcccagggccggcgggccctgtcctatgtgctggccaggaagatgaatgccctgcacatgctggacatcaaggagcacaacggccagagcgccttccaggtggccgtggccgccaaccagcacctgattgtgcaggacctggtgaacatcggggcccaggtgaacaccacagactgctggggccgcacccccctgcacgtgtgtgccgagaagggccacagccaggtgctgcaggccatccagaagggagctgtgggcagcaaccagtttgtggacctggaggccaccaactatgatggcctgacccccctgcactgtgctgtgattgcccacaatgctgtggtgcatgagctgcagaggaaccagcagccccacagccctgaggtgcaggagctgctgctgaagaacaagagcctggtggacaccatcaagtgcctgatccagatgggcgctgctgtggaggccaaggacaggaagagcggccgcacagccctgcacctggccgctgaggaggccaacctggagctgatccgcctcttcctggagctgcccagctgcctgagctttgtgaatgccaaggcctacaacggcaacacagccctgcacgtggccgccagcctgcagtaccgcctgacccagctggatgctgtgcggctgctgatgaggaaaggagctgaccccagcaccaggaacctggagaatgagcagcctgtgcacctggtgcctgatggccctgtgggggagcagatccgccgcatcctgaagggcaagagcatccagcagagggccccaccctactag

SEQ ID NO: 21712 - DNA, 1806 bp, Artificial Sequence
  derived and/or modified sequence
atgggcgtgggccggcagcagaggggccccttccagggcgtgcgggtgaagaacagcgtgaaggagctgctgctgcacatccgcagccacaagcagaaggccagcggccaggccgtggatgacttcaagacccagggcgtgaacatcgagcagttccgggagctgaagaacacagtgtcctacagcggcaagaggaagggccctgacagcctgagtgatggccctgcctgcaagaggcctgccctgctgcacagccagttcctgaccccaccccagacccccaccccaggagagagcatggaggatgtgcacctgaatgagcccaagcaggagagcagcgctgacctgctgcagaacatcatcaacatcaagaatgaatgttctcctgtgtccctgaacacagtgcaggtgtcctggctgaaccctgtggtggtgccccagagcagccctgctgagcagtgccaggacttccacggcggccaggtgttcagccccccccagaagtgccagcccttccaggtgcggggcagccagcagatgattgaccaggccagcctgtaccagtacagcccccagaaccagcacgtggagcagcagccccactacacccacaagcccaccctggagtacagccccttccccatccccccccagagccctgcctatgagcccaacctgtttgatggccctgagagccagttctgccccaaccagagcctggtgtccctgctgggggaccagcgggagagtgaaaatattgccaaccccatgcagaccagcagctctgtgcagcagcagaatgatgcccacctgcacagcttctccatgatgcccagcagcgcctgtgaggccatggtgggccacgagatggccagtgacagcagcaacaccagcctgcccttcagcaacatgggcaaccccatgaacaccacccagctgggcaagagcctcttccagtggcaggtggagcaggaggagagcaagctggccaacatcagccaggaccagttcctgagcaaggatgctgatggagacaccttcctgcacatcgctgtggcccagggccggcgggccctgtcctatgtgctggccaggaagatgaatgccctgcacatgctggacatcaaggagcacaacggccagagcgccttccaggtggccgtggccgccaaccagcacctgattgtgcaggacctggtgaacatcggggcccaggtgaacaccacagactgctggggccgcacccccctgcacgtgtgtgccgagaagggccacagccaggtgctgcaggccatccagaagggagctgtgggcagcaaccagtttgtggacctggaggccaccaactatgatggcctgacccccctgcactgtgctgtgattgcccacaatgctgtggtgcatgagctgcagaggaaccagcagccccacagccctgaggtgcaggagctgctgctgaagaacaagagcctggtggacaccatcaagtgcctgatccagatgggcgctgctgtggaggccaaggacaggaagagcggccgcacagccctgcacctggccgctgaggaggccaacctggagctgatccgcctcttcctggagctgcccagctgcctgagctttgtgaatgccaaggcctacaacggcaacacagccctgcacgtggccgccagcctgcagtaccgcctgacccagctggatgctgtgcggctgctgatgaggaaaggagctgaccccagcaccaggaacctggagaatgagcagcctgtgcacctggtgcctgatggccctgtgggggagcagtag

SEQ ID NO: 21713 - DNA, 393 bp, Artificial Sequence
  derived and/or modified sequence
atgggcgtgggccggcagcagaggggccccttccagggcgtgcgggtgaagaacagcgtgaaggagctgctgctgcacatccgcagccacaagcagaaggccagcggccaggccgtggatgacttcaagacccagggcgtgaacatcgagcagttccgggagctgaagaacacagtgtcctacagcggcaagaggaagggccctgacagcctgagtgatggccctgcctgcaagaggcctgccctgctgcacagccagttcctgaccccaccccagacccccaccccaggagagagcatggaggatgtgcacctgaatgagcccaagcaggagagcagcgctgacctgctgcagaacatcatcaacatcaagaatgaatgttctcctgtgtag

SEQ ID NO: 21714 - DNA, 1791 bp, Artificial Sequence
  derived and/or modified sequence
atgatcgtggacaagctgctggacgacagccggggcggcgagggccttagggatgcagctggaggctgtgggctgatgacaagccctctgaatctatcctacttctatggtgcttccccccctgcggctgcacctggagcttgcgatgcctcttgttccgtgctggggcccagtgcacccggatctcctggctccgacagctctgatttctcctcagcgagctctgtctctagttgtggagctgtcgagagccggtctagaggaggggccagagctgagcgacagcccgtcgaacctcacatgggcgtcggcagacagcagaggggtcccttccaaggagtgcgtgtgaagaactctgtgaaggagcttctgctccatattcggtcgcacaaacagaaagcctctgggcaggctgttgatgattttaaaacccagggtgtgaatattgagcagtttcgggagctgaagaatactgtctcctacagtgggaaacgtaagggacccgattcactcagtgacgggcctgcctgtaagcgacctgccttattgcatagccaattcttaacaccaccccagacacccacaccaggggagagtatggaggatgtgcatctgaatgagcctaagcaggaaagtagtgctgatctgctgcaaaatattatcaacattaagaatgaatgttcacctgtgagtcttaacacagtacaaactagctcgagtgtccagcagcagaacgatgcccatttgcatagcttttcaatgatgccttcatctgcttgtgaggccatggtgggacacgagatggcctctgattctagtaacacatccttgcctttctctaacatgggaaacccaatgaataccactcagctgggcaagtcactgtttcagtggcaggtggagcaggaagagagcaagcttgctaatatctcacaggaccagttcttgtcgaaggatgctgacggcgatacgttcctgcacatcgctgtcgctcagggtagacgggccctttcctacgttcttgcccggaagatgaacgccctgcacatgttggatataaaagagcataatggacagtctgcattccaggtggcagtggctgcaaaccagcatctcattgtccaagacttggttaacatcggagcccaggtgaacacaaccgactgctggggacgaacccctctgcacgtctgtgccgagaagggacactcccaggtgcttcaggctatccagaagggagccgtcggctctaatcaatttgtggacctggaggcaaccaactacgatggattgacaccattgcactgcgctgttatcgcccataacgccgtcgtccacgaactccaacgaaaccagcaaccccatagcccagaggtgcaggaattgctgctaaagaataaatcgttagtggataccatcaaatgcctgattcagatgggagcggccgtggaggccaaggataggaaaagcgggcgcacagcactccatctggctgccgaggaagccaatctggagctgatacggttgtttctggaactgccaagctgtctctctttcgtcaacgcaaaggcctacaacgggaatacagcgctgcacgtcgctgcaagccttcagtaccgcttgactcagctggacgctgttcgtctgctgatgcgtaagggggctgatccttctacccgaaatctggagaacgagcagccagttcacctggtgcccgatggcccggtgggggaacaaatccggcgcatcctcaaaggcaagagcatccagcagagagctccaccctactag

SEQ ID NO: 21715 - DNA, 1857 bp, Artificial Sequence
  derived and/or modified sequence
atgggcgtgggccggcagcagcggggccccttccagggcgtgcgggtgaagaactctgtgaaggaactgctcctgcacatcagatcccacaaacagaaagcctccggccaggccgtcgatgatttcaagacccagggtgtgaacattgagcagtttagggaattgaaaaacacggtgagctactcaggaaagcggaaaggtccagatagtctcagtgatggaccggcttgcaagagaccagcactactccacagccagtttcttactccacctcagacgcccacccccggcgaaagcatggaggatgtgcacctgaacgagccaaagcaggagtcctcggctgacctgctgcagaatataattaacattaaaaatgagtgttcaccggtttcgctgaacactgtgcaggtttcatggcttaatcccgttgtggtgccacagtcctctcccgccgaacaatgtcaggatttccacggtggacaggttttctccccaccacaaaagtgccagcctttccaagtcaggggatcccaacagatgatagaccaagcttctctgtatcaatactccccacagaatcagcacgtggaacagcagcctcactatactcataaaccaacattagagtattctcccttcccaatcccccctcaaagccctgcttatgagcccaacctctttgacgggcctgagagtcaattttgtcccaatcaatcactagtgtcccttctgggagatcaaagagagtccgaaaacatcgcaaaccccatgcagacttcttctagcgtgcaacaacagaacgatgcccacctccactcttttagtatgatgccgagcagtgcgtgtgaagctatggttggtcatgaaatggcctctgacagttcaaacactagtctaccatttagcaatatgggtaatcctatgaacactactcaactgggcaagagtctgtttcagtggcaggtggagcaagaggagagcaagcttgccaatattagccaggatcagtttctcagtaaggacgccgacggtgataccttcctgcatattgctgtagcccaaggcagaagagcattgtcctacgtcttggcccgaaaaatgaacgcacttcatatgctagatatcaaggagcacaacggacaatccgcattccaggtggccgtcgcggccaaccagcatctcattgtccaagatcttgtgaatattggagctcaggttaataccacagactgctgggggaggactccactccatgtatgtgccgagaaagggcactctcaggtgctccaggccatccagaaaggtgcggtggggtctaatcagtttgtggatctagaggcaacaaattacgacgggctgacgccgctgcactgtgccgttattgcacacaatgcagtggtacacgagttgcaacgtaatcagcagcctcatagtccagaggtccaagagctgcttctaaaaaacaaaagcctagtggacacaattaaatgtctgatccagatgggcgctgccgtggaggcaaaagacaggaaaagtggaaggactgccctccatctggcggcagaagaggcaaacttggagcttattagactgttcctggaactgccgagttgtctcagtttcgtaaacgcaaaggcctataacggcaacaccgccctgcacgtggccgcatccttacagtacagattaacccagcttgatgccgtgaggctactgatgcggaagggggccgacccatcgacgcggaatctcgaaaatgaacagcccgtgcatctggtaccagatggcccagtgggcgagcagatccgacggatcttaaagggtaaaagtatacagcagagggctccaccttattag

SEQ ID NO: 21716 - DNA, 1806 bp, Artificial Sequence
  derived and/or modified sequence
atgggcgtgggccggcagcagcggggccccttccagggcgtgcgggtcaagaactccgtgaaggagctcttactacatattaggagccacaaacagaaggcctcggggcaagctgttgacgactttaagacccaaggcgtgaacatagagcagttcagagaattgaagaataccgtttcctacagcggcaagcgaaagggtcctgacagtctctccgatggcccggcctgtaaacgccccgccctgttgcactcccagttcttaacaccacctcagacccctactcccggcgaatccatggaggatgtgcacctaaacgagcctaaacaagagtcttccgccgaccttctgcagaacattatcaacataaagaacgagtgttcaccagtaagcctgaacactgtccaagtctcctggctcaaccctgtcgtggtaccacagagctctcccgccgagcagtgccaggacttccatgggggacaagttttttcccctcctcagaaatgtcagcccttccaggtgagagggtcccagcagatgatcgatcaagcaagtttataccagtattcaccacagaaccagcacgtggagcagcagccacattatacacacaagccgacgcttgaatattccccattccccattcccccccagagcccggcgtacgagcctaacctgtttgatgggccagagagccagttctgtccaaatcagagcctagtctcccttctaggcgatcagcgggaatctgaaaacattgccaatcccatgcagacttctagttcggtgcagcagcaaaatgacgcacatctccattccttctctatgatgcccagttctgcatgcgaggcaatggtggggcacgagatggcctccgactcatctaacacatctctccccttttcgaacatgggaaacccaatgaatacgacacagctagggaagtcactattccagtggcaagtggaacaggaggagtctaagctggcaaatattagtcaggatcagttcctcagcaaggacgctgatggggacacgtttctgcatatagcagtcgcccagggcaggagggccctgagctacgtgctcgcccgaaaaatgaacgctttacacatgcttgatatcaaggagcacaatggacaaagtgccttccaggtcgccgtcgccgcgaaccagcatcttatcgtccaagacttagttaatattggagcacaggtgaacactacagattgctggggtcgtacccccttacacgtctgcgccgagaaaggccactcccaggtactgcaggcaattcagaagggagccgtgggtagtaaccagttcgttgatttagaagccacaaactacgatggcttgaccccgcttcattgcgccgtgatcgcacataacgcagttgtgcacgaactccagagaaatcagcagccccattctcctgaagtgcaagagctgctgctgaaaaacaagtccctggtggacactatcaagtgcctgattcaaatgggcgcagctgtggaggccaaggataggaaatcagggcggactgctctgcatttggctgctgaagaagctaatttggaactcattagactgttccttgagcttccctcatgtctctccttcgtgaacgccaaggcatataacgggaatactgccctccatgtggccgcctcgctacagtatcgcctgacccagcttgacgcggtgaggcttctaatgcgcaagggtgctgacccatccactcggaacctggagaacgaacagcctgtacatttagttcccgacgggcccgttggcgagcaatag

SEQ ID NO: 21717 - DNA, 393 bp, Artificial Sequence
  derived and/or modified sequence
atgggcgtgggccggcagcagcggggccccttccagggcgtgcgggtgaagaattccgtaaaagagttgctgcttcacatcagatctcataaacagaaagcttctggccaggccgtcgacgacttcaaaacgcagggcgttaacatcgagcagtttcgcgagttaaagaatacagtaagctatagcggcaagcgcaaaggtccggatagcctgtcggatggtcctgcctgcaagcgcccagccttgttacattcgcagtttctgacccccccccagactccaactcccggggagagcatggaggacgttcatctcaacgagccgaagcaggagtccagcgctgacttactgcagaacattatcaacatcaaaaacgagtgttcacccgtgtag

SEQ ID NO: 21718 - DNA, 2058 bp, Artificial Sequence
  derived and/or modified sequence
gtactggcccgcgccgtccgcccgccgacagctccctgagccagcccgggaggcagccgcgcgcagcgagccggtggcgcaggtgtcggggtcctcgagcgcccagcctgggagcatgattgtggacaagctgctggacgacagccgcggcggagaggggctgcgggacgcggcgggcggctgcggcctcatgaccagcccgctcaacctgagctacttctacggcgcgtcgccgcccgccgccgccccgggcgcctgcgacgccagctgctcggtcttgggcccctcggcgcccggctcgcccggctccgactcctccgacttctcctctgcctcgtcggtgtcctcctgcggcgccgtggagtcccggtcgagaggcggcgcccgcgccgagcgccagccagttgagccccatatgggggttggcaggcagcagagaggcccctttcaaggtgttcgggtaaagaactcagtgaaggaactcctgttgcacatccgaagtcataaacagaaggcttctggccaagctgtggatgattttaagacacaaggtgtgaacatagaacagttcagagaattgaagaacacagtatcatacagtgggaaaaggaaagggcccgattcgttgtctgatggacctgcttgcaaaaggccagctctgttgcattcccaatttttgacaccacctcaaacaccaacgcccggggagagcatggaagatgttcatctcaatgaacccaaacaggagagcagtgctgatctgcttcagaacattatcaacattaagaatgaatgcagccccgtttccctgaacacagttcaaacttcctccagtgttcagcagcaaaatgatgctcacttgcacagcttcagcatgatgcccagcagcgcctgtgaggccatggtggggcacgagatggcctctgactcttcaaacacttcactgccattctcaaacatgggaaatccaatgaacaccacacagttagggaaatcactttttcagtggcaggtggagcaggaagaaagcaaattggcaaatatttcccaagaccagtttctttcaaaggatgcagatggtgacacgttccttcatattgctgttgcccaagggagaagggcactttcctatgttcttgcaagaaagatgaatgcacttcacatgctggatattaaagagcacaatggacagagtgcctttcaggtggcagtggctgccaatcagcatctcattgtgcaggatctggtgaacatcggggcacaggtgaacaccacagactgctggggaagaacacctctgcatgtgtgtgctgagaagggccactcccaggtgcttcaggcgattcagaagggagcagtgggaagtaatcagtttgtggatcttgaggcaactaactatgatggcctgactccccttcactgtgcagtcatagcccacaatgctgtggtccatgaactccagagaaatcaacagcctcattcacctgaagttcaggagcttttactgaagaataagagtctggttgataccattaagtgcctaattcaaatgggagcagcggtggaagcgaaggatcgcaaaagtggccgcacagccctgcatttggcagctgaagaagcaaatctggaactcattcgcctctttttggagctgcccagttgcctgtcttttgtgaatgcaaaggcttacaatggcaacactgccctccatgttgctgccagcttgcagtatcggttgacacaattagatgctgtccgcctgttgatgaggaagggagcagacccaagtactcggaacttggagaacgaacagccagtgcatttggttcccgatggccctgtgggagaacagatccgacgtatcctgaagggaaagtccattcagcagagagctccaccgtattagctccattagcttggagcctggctagcaacactcactgtcagttaggcagtcctgatgtatctgtacatagaccatttgccttatattggcaaatgtaagttgtttctatgaaacaaacatatttagttcactattatatagtgggttatatt

SEQ ID NO: 21719 - DNA, 1791 bp, Artificial Sequence
  derived and/or modified sequence
atgatcgttgataagctgctggatgattcccggggtggagaggggttgagggacgcggcagggggttgcgggctcatgactagtccacttaatcttagttacttttacggagccagcccaccggcagcagctcctggcgcttgtgatgcatcttgttctgtactgggtcccagtgcccctggatctcctggaagcgatagctctgacttctcttcagcctcttcagtatcttcttgcggcgctgtggagtcaagatcccgaggaggggcaagagcagaaaggcagccagttgagccccacatgggcgttggcaggcagcagagggggccttttcagggcgtcagagttaaaaattcagtcaaggaactgctgctgcatataaggtcccacaaacagaaagcttccggacaggccgtcgatgatttcaaaacgcaaggggttaacatcgagcagtttcgtgagcttaaaaatactgtgagttactctggtaaaaggaaaggacccgactcactcagcgatggtcccgcttgcaagaggccagccctgctccactcccagtttctcaccccaccccaaacacccacacccggagagtctatggaggatgtccatctcaacgaacccaaacaagagagttcagccgatctcctgcagaacattatcaacattaagaatgagtgtagtccagtgtctctgaataccgtgcagacctcatcatctgttcagcagcaaaatgacgcgcatctgcactcattttctatgatgcccagcagcgcctgcgaggccatggtgggtcatgagatggctagcgactccagtaacacttccttgcctttctctaacatggggaaccccatgaacaccacacaattaggcaaatcgcttttccagtggcaagtggaacaggaagagtcaaagctggcgaatattagtcaagatcagttcttgagcaaggacgctgatggagacacctttctgcacattgccgtggctcagggcaggcgcgctttaagttatgtgctagctcgcaaaatgaacgccctgcacatgttggacattaaagagcataacggtcaatcagcttttcaggtggccgtagcagccaatcagcatctgattgtccaagacttggtgaacatcggggcacaagtcaacactacagattgctggggaaggacgccgttacatgtctgcgcagaaaagggccacagccaggtgctccaggctatccagaagggggctgtgggcagtaaccaatttgttgacctagaagcaacaaactacgatggactcacccctcttcattgtgctgttattgcgcataacgctgtggttcatgagttgcagaggaaccaacagccgcattcccctgaagtgcaggaactgctgctgaaaaacaaaagcctggttgacacaataaaatgtttaattcagatgggcgctgctgtcgaggcaaaggaccgaaaatcaggtaggactgctttgcacctcgccgctgaggaggccaatttggagctgatacgactcttcctcgagctcccgtcttgcttgtctttcgtgaacgctaaagcatataatggaaacactgctctgcacgtcgcagccagcctgcaatacagactgacacagttggatgccgtaaggttgctcatgcggaaaggcgctgatcctagcacacgaaacctggaaaatgagcaacccgtgcatctggtgccagatggcccagtgggcgagcaaatccgtcgcatcctgaaaggaaaatcaatccaacagagggctccgccatactag

SEQ ID NO: 21720 - DNA, 1857 bp, Artificial Sequence
  derived and/or modified sequence
atgggggttgggagacagcagcgaggaccttttcagggcgtacgcgtcaaaaactctgtaaaggaactgcttcttcacattcgtagtcataaacagaaagcgtccgggcaggcggtggatgatttcaaaacccaaggggttaatattgaacagtttcgcgaacttaagaataccgtatcctattcggggaagaggaaaggccctgacagcctcagcgacggaccagcatgcaagcggcctgccctcctccattcccagtttcttacacctccgcagactcctacacccggtgaatcaatggaagacgtacatctaaacgaaccgaaacaagagtcctctgctgatcttctgcagaacatcataaacatcaagaacgagtgctccccggtttctctcaacaccgtgcaggtgagttggcttaaccccgtcgtggtgccccagtcaagtcccgctgagcagtgccaggactttcatggtgggcaggtattctctcctccacagaagtgtcagccatttcaagtccgaggcagtcagcaaatgatcgaccaggccagcctctaccagtactcaccccaaaaccagcacgttgagcagcagccccattatacccacaaaccgacactcgagtattccccattccctatccctccacaaagtccagcttacgagcctaatctatttgacggcccagaatcccagttctgccccaatcagagccttgtttccctgctcggggatcagcgcgaatccgaaaacatcgcaaaccccatgcaaacgagctcttctgtccagcaacagaacgatgcccacttacattcctttagtatgatgccaagcagcgcctgcgaagcaatggtgggacacgagatggctagtgattcctctaacacaagtttgccattttcaaatatgggcaatcccatgaacaccacccaattagggaagagtctgttccagtggcaagtggagcaagaggagagcaagctcgcgaacatatcacaggaccagttcctcagcaaggacgcagacggagacaccttcttacatatagcggtggcacagggtagaagggcactcagctatgtgttagcgaggaagatgaacgcccttcacatgctggacattaaagagcacaacggacagagtgcttttcaggtcgctgtggccgctaaccaacatctgattgtacaagatctggtcaacattggagcacaggtaaatacgacggactgctggggcagaacgcctctgcacgtgtgcgctgagaaaggacatagtcaggtgttgcaagccattcaaaagggcgcagtggggagtaatcagtttgtggacttggaagccacgaactacgatggattgaccccactgcactgcgctgtgattgcccataacgccgtcgtccacgaactacagagaaaccaacagccgcatagccctgaagtacaggaacttttgctgaaaaataaatctctggttgacacgattaagtgcctgatccagatgggcgctgctgttgaggccaaggatcgcaagtcagggaggacagccctgcacttggccgcagaggaagccaaccttgaactgatacggttgtttctcgaactgccatcgtgtctcagtttcgtgaacgctaaagcctacaacgggaacaccgcactgcacgtcgcagcgagtttacagtaccgtctcactcaattggatgccgtgcggctcctcatgagaaagggggctgacccgtccaccagaaacctggagaatgaacagcctgttcacctggtgccagatggccctgttggggagcagatcaggcgcattttgaagggaaagtcaattcaacagagggccccaccgtactag

SEQ ID NO: 21721 - DNA, 1806 bp, Artificial Sequence
  derived and/or modified sequence
atgggcgtgggccgacaacagaggggcccatttcagggcgtcagagtgaaaaattccgtgaaagaacttctgcttcacatccgcagccacaaacagaaggcctcgggacaagctgtggacgacttcaaaacccaaggcgtgaatattgaacagttccgggagctgaaaaataccgtttcttacagcggtaagcgcaagggacccgatagcctgtccgatgggcctgcatgcaagcgccctgcgctcctccacagccagtttctgactcccccacagacgccaacaccaggagaaagcatggaggacgtgcatctgaatgagccaaaacaagagtcttccgcagacctcctacagaatatcataaatatcaaaaatgagtgttcccccgttagcctcaatacggtgcaggtgtcgtggttgaatccagttgtagtgccacaatcttcacccgcagagcagtgtcaggactttcatggcggtcaggtgttcagccctccccaaaaatgccagcctttccaggtcagaggaagtcagcagatgattgaccaggcatcactctaccagtactctccacaaaaccagcacgtggagcagcaaccacattacacacacaaaccgaccttggagtattccccttttcccataccacctcagtcacccgcttacgaaccaaacctattcgacgggcctgaatcccagttttgccccaatcagagccttgtgagcctcttgggggatcagagggagtcggagaacatcgctaatcccatgcagaccagttcttccgtgcaacagcagaatgacgctcaccttcacagcttttccatgatgccatctagtgcttgtgaggcgatggttggtcatgaaatggcttctgatagttccaatacaagcctccccttctccaacatgggtaatccaatgaatactacacagctggggaagtccctgtttcagtggcaggtggaacaggaagaatctaagctggctaatatctctcaggatcagtttctcagcaaagacgctgacggagacaccttcttgcatatcgccgtggcccaaggcagacgggctctttcctatgtcctggccagaaagatgaacgctttgcacatgctggacattaaagagcataatggacagtctgcattccaagtggcagttgctgccaatcagcatcttatcgtgcaggatctcgtgaatataggggcacaggtgaataccaccgactgctggggacgaactccactacacgtgtgtgctgaaaagggccattctcaggtgctgcaggccatacaaaaaggcgctgtcgggagcaatcagtttgtcgacctggaggcaaccaattacgatggactcacacctttgcattgtgccgtgatcgcccacaacgctgtagtgcacgagctgcagcggaatcaacaaccccattctccagaggtacaggagcttctgctcaagaacaagtctctggtcgacacgataaagtgtctgatacagatgggggcagcagtggaagccaaggatagaaagtccgggaggaccgccctacatctggccgcagaggaggccaacttagaactgataagactcttcctcgagctaccctcttgcttatcatttgtaaatgctaaggcatataacggcaatacggcactccatgtcgctgcatccctgcagtacagactgacacagctggacgcagtgcgcctgctcatgagaaagggagcagatccctccacccgcaatcttgaaaatgagcagcccgtgcacttggtgccagacggccctgtgggagaacagtag

SEQ ID NO: 21722 - DNA, 393 bp, Artificial Sequence
  derived and/or modified sequence
atgggggtgggcaggcagcagcggggacctttccagggcgtcagagtaaagaacagcgttaaagaactcctgctgcatatcagatcacacaaacagaaggcatcagggcaagctgtggatgatttcaagacacagggcgtgaacattgagcagttcagggaactgaaaaacacagttagctatagcggaaagcgtaaaggaccagattccctcagcgacggacctgcctgcaagcgccctgccttactgcatagtcaattcttgacaccaccgcagactccgacccccggagagagtatggaagatgtccacctcaatgagccaaagcaggaatctagcgctgacctcttgcagaacattatcaacattaagaacgagtgctctccagtttag

SEQ ID NO: 21723 - DNA, 1791 bp, Artificial Sequence
  derived and/or modified sequence
atgatcgtggacaagctgctggacgacagcagaggcggcgagggcctgagagacgccgccggcggctgcggcctgatgaccagccccctgaacctgagctacttctacggcgccagcccccccgccgccgcccccggcgcctgcgacgccagctgcagcgtgctgggccccagcgcccccggcagccccggcagcgacagcagcgacttcagcagcgccagcagcgtgagcagctgcggcgccgtggagagcagaagcagaggcggcgccagagccgagagacagcccgtggagccccacatgggcgtgggcagacagcagagaggccccttccagggcgtgagagtgaagaacagcgtgaaggagctgctgctgcacatcagaagccacaagcagaaggccagcggccaggccgtggacgacttcaagacccagggcgtgaacatcgagcagttcagagagctgaagaacaccgtgagctacagcggcaagagaaagggccccgacagcctgagcgacggccccgcctgcaagagacccgccctgctgcacagccagttcctgacccccccccagacccccacccccggcgagagcatggaggacgtgcacctgaacgagcccaagcaggagagcagcgccgacctgctgcagaacatcatcaacatcaagaacgagtgcagccccgtgagcctgaacaccgtgcagaccagcagcagcgtgcagcagcagaacgacgcccacctgcacagcttcagcatgatgcccagcagcgcctgcgaggccatggtgggccacgagatggccagcgacagcagcaacaccagcctgcccttcagcaacatgggcaaccccatgaacaccacccagctgggcaagagcctgttccagtggcaggtggagcaggaggagagcaagctggccaacatcagccaggaccagttcctgagcaaggacgccgacggcgacaccttcctgcacatcgccgtggcccagggcagaagagccctgagctacgtgctggccagaaagatgaacgccctgcacatgctggacatcaaggagcacaacggccagagcgccttccaggtggccgtggccgccaaccagcacctgatcgtgcaggacctggtgaacatcggcgcccaggtgaacaccaccgactgctggggcagaacccccctgcacgtgtgcgccgagaagggccacagccaggtgctgcaggccatccagaagggcgccgtgggcagcaaccagttcgtggacctggaggccaccaactacgacggcctgacccccctgcactgcgccgtgatcgcccacaacgccgtggtgcacgagctgcagagaaaccagcagccccacagccccgaggtgcaggagctgctgctgaagaacaagagcctggtggacaccatcaagtgcctgatccagatgggcgccgccgtggaggccaaggacagaaagagcggcagaaccgccctgcacctggccgccgaggaggccaacctggagctgatcagactgttcctggagctgcccagctgcctgagcttcgtgaacgccaaggcctacaacggcaacaccgccctgcacgtggccgccagcctgcagtacagactgacccagctggacgccgtgagactgctgatgagaaagggcgccgaccccagcaccagaaacctggagaacgagcagcccgtgcacctggtgcccgacggccccgtgggcgagcagatcagaagaatcctgaagggcaagagcatccagcagagagcccccccctactag

SEQ ID NO: 21724 - DNA, 1857 bp, Artificial Sequence
  derived and/or modified sequence
atgggcgtgggcagacagcagagaggccccttccagggcgtgagagtgaagaacagcgtgaaggagctgctgctgcacatcagaagccacaagcagaaggccagcggccaggccgtggacgacttcaagacccagggcgtgaacatcgagcagttcagagagctgaagaacaccgtgagctacagcggcaagagaaagggccccgacagcctgagcgacggccccgcctgcaagagacccgccctgctgcacagccagttcctgacccccccccagacccccacccccggcgagagcatggaggacgtgcacctgaacgagcccaagcaggagagcagcgccgacctgctgcagaacatcatcaacatcaagaacgagtgcagccccgtgagcctgaacaccgtgcaggtgagctggctgaaccccgtggtggtgccccagagcagccccgccgagcagtgccaggacttccacggcggccaggtgttcagccccccccagaagtgccagcccttccaggtgagaggcagccagcagatgatcgaccaggccagcctgtaccagtacagcccccagaaccagcacgtggagcagcagccccactacacccacaagcccaccctggagtacagccccttccccatccccccccagagccccgcctacgagcccaacctgttcgacggccccgagagccagttctgccccaaccagagcctggtgagcctgctgggcgaccagagagagagcgagaacatcgccaaccccatgcagaccagcagcagcgtgcagcagcagaacgacgcccacctgcacagcttcagcatgatgcccagcagcgcctgcgaggccatggtgggccacgagatggccagcgacagcagcaacaccagcctgcccttcagcaacatgggcaaccccatgaacaccacccagctgggcaagagcctgttccagtggcaggtggagcaggaggagagcaagctggccaacatcagccaggaccagttcctgagcaaggacgccgacggcgacaccttcctgcacatcgccgtggcccagggcagaagagccctgagctacgtgctggccagaaagatgaacgccctgcacatgctggacatcaaggagcacaacggccagagcgccttccaggtggccgtggccgccaaccagcacctgatcgtgcaggacctggtgaacatcggcgcccaggtgaacaccaccgactgctggggcagaacccccctgcacgtgtgcgccgagaagggccacagccaggtgctgcaggccatccagaagggcgccgtgggcagcaaccagttcgtggacctggaggccaccaactacgacggcctgacccccctgcactgcgccgtgatcgcccacaacgccgtggtgcacgagctgcagagaaaccagcagccccacagccccgaggtgcaggagctgctgctgaagaacaagagcctggtggacaccatcaagtgcctgatccagatgggcgccgccgtggaggccaaggacagaaagagcggcagaaccgccctgcacctggccgccgaggaggccaacctggagctgatcagactgttcctggagctgcccagctgcctgagcttcgtgaacgccaaggcctacaacggcaacaccgccctgcacgtggccgccagcctgcagtacagactgacccagctggacgccgtgagactgctgatgagaaagggcgccgaccccagcaccagaaacctggagaacgagcagcccgtgcacctggtgcccgacggccccgtgggcgagcagatcagaagaatcctgaagggcaagagcatccagcagagagcccccccctactag

SEQ ID NO: 21725 - DNA, 1806 bp, Artificial Sequence
  derived and/or modified sequence
atgggcgtgggcagacagcagagaggccccttccagggcgtgagagtgaagaacagcgtgaaggagctgctgctgcacatcagaagccacaagcagaaggccagcggccaggccgtggacgacttcaagacccagggcgtgaacatcgagcagttcagagagctgaagaacaccgtgagctacagcggcaagagaaagggccccgacagcctgagcgacggccccgcctgcaagagacccgccctgctgcacagccagttcctgacccccccccagacccccacccccggcgagagcatggaggacgtgcacctgaacgagcccaagcaggagagcagcgccgacctgctgcagaacatcatcaacatcaagaacgagtgcagccccgtgagcctgaacaccgtgcaggtgagctggctgaaccccgtggtggtgccccagagcagccccgccgagcagtgccaggacttccacggcggccaggtgttcagccccccccagaagtgccagcccttccaggtgagaggcagccagcagatgatcgaccaggccagcctgtaccagtacagcccccagaaccagcacgtggagcagcagccccactacacccacaagcccaccctggagtacagccccttccccatccccccccagagccccgcctacgagcccaacctgttcgacggccccgagagccagttctgccccaaccagagcctggtgagcctgctgggcgaccagagagagagcgagaacatcgccaaccccatgcagaccagcagcagcgtgcagcagcagaacgacgcccacctgcacagcttcagcatgatgcccagcagcgcctgcgaggccatggtgggccacgagatggccagcgacagcagcaacaccagcctgcccttcagcaacatgggcaaccccatgaacaccacccagctgggcaagagcctgttccagtggcaggtggagcaggaggagagcaagctggccaacatcagccaggaccagttcctgagcaaggacgccgacggcgacaccttcctgcacatcgccgtggcccagggcagaagagccctgagctacgtgctggccagaaagatgaacgccctgcacatgctggacatcaaggagcacaacggccagagcgccttccaggtggccgtggccgccaaccagcacctgatcgtgcaggacctggtgaacatcggcgcccaggtgaacaccaccgactgctggggcagaacccccctgcacgtgtgcgccgagaagggccacagccaggtgctgcaggccatccagaagggcgccgtgggcagcaaccagttcgtggacctggaggccaccaactacgacggcctgacccccctgcactgcgccgtgatcgcccacaacgccgtggtgcacgagctgcagagaaaccagcagccccacagccccgaggtgcaggagctgctgctgaagaacaagagcctggtggacaccatcaagtgcctgatccagatgggcgccgccgtggaggccaaggacagaaagagcggcagaaccgccctgcacctggccgccgaggaggccaacctggagctgatcagactgttcctggagctgcccagctgcctgagcttcgtgaacgccaaggcctacaacggcaacaccgccctgcacgtggccgccagcctgcagtacagactgacccagctggacgccgtgagactgctgatgagaaagggcgccgaccccagcaccagaaacctggagaacgagcagcccgtgcacctggtgcccgacggccccgtgggcgagcagtag

SEQ ID NO: 21726 - DNA, 393 bp, Artificial Sequence
  derived and/or modified sequence
atgggcgtgggcagacagcagagaggccccttccagggcgtgagagtgaagaacagcgtgaaggagctgctgctgcacatcagaagccacaagcagaaggccagcggccaggccgtggacgacttcaagacccagggcgtgaacatcgagcagttcagagagctgaagaacaccgtgagctacagcggcaagagaaagggccccgacagcctgagcgacggccccgcctgcaagagacccgccctgctgcacagccagttcctgacccccccccagacccccacccccggcgagagcatggaggacgtgcacctgaacgagcccaagcaggagagcagcgccgacctgctgcagaacatcatcaacatcaagaacgagtgcagccccgtgtag

SEQ ID NO: 21727 - protein, 1149 aa, Artificial Sequence
  derived and/or modified sequence
MPAPEQASLVEEGQPQTRQEAASTGPGMEPETTATTILASVKEQELQFQRLTRELEVERQIVASQLERCRLGAESPSIASTSSTEKSFPWRSTDVPNTGVSKPRVSDAVQPNNYLIRTEPEQGTLYSPEQTSLHESEGSLGNSRSSTQMNSYSDSGYQEAGSFHNSQNVSKADNRQQHSFIGSTNNHVVRNSRAEGQTLVQPSVANRAMRRVSSVPSRAQSPSYVISTGVSPSRGSLRTSLGSGFGSPSVTDPRPLNPSAYSSTTLPAARAASPYSQRPASPTAIRRIGSVTSRQTSNPNGPTPQYQTTARVGSPLTLTDAQTRVASPSQGQVGSSSPKRSGMTAVPQHLGPSLQRTVHDMEQFGQQQYDIYERMVPPRPDSLTGLRSSYASQHSQLGQDLRSAVSPDLHITPIYEGRTYYSPVYRSPNHGTVELQGSQTALYRTGSVGIGNLQRTSSQRSTLTYQRNNYALNTTATYAEPYRPIQYRVQECNYNRLQHAVPADDGTTRSPSIDSIQKDPREFAWRDPELPEVIHMLQHQFPSVQANAAAYLQHLCFGDNKVKMEVCRLGGIKHLVDLLDHRVLEVQKNACGALRNLVFGKSTDENKIAMKNVGGIPALLRLLRKSIDAEVRELVTGVLWNLSSCDAVKMTIIRDALSTLTNTVIVPHSGWNNSSFDDDHKIKFQTSLVLRNTTGCLRNLSSAGEEARKQMRSCEGLVDSLLYVIHTCVNTSDYDSKTVENCVCTLRNLSYRLELEVPQARLLGLNELDDLLGKESPSKDSEPSCWGKKKKKKKRTPQEDQWDGVGPIPGLSKSPKGVEMLWHPSVVKPYLTLLAESSNPATLEGSAGSLQNLSAGNWKFAAYIRAAVRKEKGLPILVELLRMDNDRVVSSVATALRNMALDVRNKELIGKYAMRDLVNRLPGGNGPSVLSDETMAAICCALHEVTSKNMENAKALADSGGIEKLVNITKGRGDRSSLKVVKAAAQVLNTLWQYRDLRSIYKKDGWNQNHFITPVSTLERDRFKSHPSLSTTNQQMSPIIQSGSSKPSPIYISSYSSPAREQNRRLQHQQLYYSQDDSNRKNFDAYRLYLQSPHSYEDPYFDDRVHFPASTDYSTQYGLKSTTNYVDFYSTKRPSYRAEQYPGSPDSWV

SEQ ID NO: 21728 - DNA, 3450 bp, Artificial Sequence
  derived and/or modified sequence
atgccggcaccagagcaggcatccctcgtcgaggaaggccagccacagactcgccaggaggccgcctccaccggaccgggcatggaaccagaaacgacggccacaacgatcttagccagtgtgaaggaacaggagctgcagtttcagcggctgacaagagagcttgaggttgagaggcagatcgtggcttcacagctggaaagatgtcgcttaggagccgagagtccatccatcgcaagtacaagctcaacagagaagtccttcccctggcgcagcaccgatgtacctaacactggggtcagcaagcctagagtgagtgacgcggtccaaccaaataactaccttatcaggaccgagccagaacaaggaactctgtactctccggaacaaacatccctgcacgagtccgagggcagtctcggaaattcgaggtctagcacccagatgaacagctacagtgattctggataccaggaagccggctcattccataactctcagaatgtcagcaaagctgacaatcgccagcagcactcttttataggcagtaccaacaatcacgtggtacgcaatagcagggctgagggacaaaccctggtccagccctcagtggcaaaccgtgcaatgaggcgggtaagcagcgtgccaagtcgggctcagtccccctcttacgtgatttcaacaggagtgtctccttcaaggggaagcctgagaacttcattaggcagcggtttcgggagtccttctgttacagacccccgaccgctgaacccttccgcatatagctccacaacacttccggcggccagggcggccagtccctatagccagcgtccggcttccccgacggctatccgtcggattggaagcgtgacctctaggcagacaagtaaccctaatggcccaaccccccaataccagaccaccgctcgtgtcgggtctcccctcactctgacagacgcccaaacccgtgtcgcgtctccaagtcaggggcaggttggaagctccagtccaaaaaggagcgggatgaccgcagtgccacagcatctgggtccgtctctccaaagaacagtacatgatatggagcagtttggacagcagcagtatgatatctatgagcgcatggtccctccacgccctgacagtttgacgggactcagatcaagttatgcttcgcagcactctcagcttgggcaggatctgcgcagcgccgtgtcacccgatctgcacatcacgccaatttacgaagggcgtacttactacagtcctgtttaccgcagcccaaaccatggcacggttgagcttcaaggctcccaaacagccctctatcggactgggtccgttggtatagggaatctgcagcgcacaagttctcagagatcaaccttaacataccagcgtaacaattatgcactgaacacaacagcaacttacgccgagccctaccgaccaatccaataccgtgttcaggagtgtaattacaataggctgcaacacgcggtaccagccgacgatggcaccaccagaagcccttccatcgacagcatccagaaagacccgagggagtttgcctggagagaccccgagctgcccgaggtgatccatatgctccagcatcagttcccgtcagtacaggctaatgccgccgcctacctgcagcacctttgctttggagacaataaagtgaaaatggaagtctgccggctgggagggattaagcatctggttgatctgttggatcaccgcgtgttggaggtgcagaagaacgcctgcggagccctaaggaacctggtttttggcaaaagcactgatgaaaataaaattgccatgaaaaacgtcgggggcatcccagcactcctccggctgcttagaaaatcgattgacgctgaagtccgcgagctggtgacaggcgtgctttggaacctcagctcctgtgatgctgtgaagatgacgataatcagggatgctctgtctactctcactaacactgtgatagtgcctcattccggctggaataattcttcctttgacgacgatcataagattaaatttcagacctccctggtgctgcgcaacacaaccgggtgtctccggaacctttctagcgcaggcgaggaggccagaaaacagatgcggagttgcgaaggactggttgatagtttactctatgtgatccacacatgcgtgaatactagcgattacgatagtaaaaccgtggagaactgcgtgtgtactcttagaaacctcagttacagactggagctggaagtacctcaagcaagacttctgggcttgaacgagcttgatgaccttctgggcaaggagtctccatccaaagattcggaaccatcttgctgggggaaaaaaaagaagaaaaaaaaaagaactccacaggaggaccagtgggatggagtaggccctatccccggccttagcaaaagtccaaaaggcgtcgaaatgctctggcatccgagtgttgtgaagccttatctcactttgttagcagagtccagcaatccggccaccctggagggatcagcggggagtcttcagaatctgtcagctggcaactggaaattcgctgcctacattcgtgccgctgtcaggaaggaaaaaggcctacctattttagtcgaacttctcaggatggataatgatcgggtggtttcttccgtggccaccgcgttaagaaacatggcactggatgtgcgcaacaaagagttgatcggtaagtatgctatgagagatctggtgaacagactgccaggtgggaacgggccttccgtgctgtcagatgaaaccatggcagcgatttgttgtgccttacacgaagtgacctcaaaaaacatggaaaatgctaaagctctcgccgatagtggcggaatcgagaagctggttaacataaccaaaggccggggcgatcggtcttccctcaaggtggtgaaggcggccgcacaggtgctgaatactctgtggcagtacagagacttgcggtctatatataaaaaggacggctggaatcagaatcacttcattacccccgtgtccactcttgagcgggatagattcaaaagtcatccctccttgagcaccaccaatcaacaaatgtcccccatcatacagagcggaagctctaaaccttcacccatctacatttctagttactcctcccccgccagagaacaaaaccgccggttacagcaccagcaattgtactatagtcaggatgacagcaacagaaaaaatttcgacgcgtaccgtctctacctccagtctccccacagctatgaggatccttattttgatgatcgcgtgcactttcccgctagtaccgactactcgactcaatatgggctgaaatccactacgaattacgtggatttttacagcactaagcggccaagctacagggctgaacaatacccagggagccccgattcctgggtatag

SEQ ID NO: 21729 - DNA, 3450 bp, Artificial Sequence
  derived and/or modified sequence
atgcctgcccctgagcaggccagcctggtggaggagggccagccccagacccggcaggaggccgccagcacaggccctggcatggagcctgagaccacagccaccaccatcctggcctctgtgaaggagcaggagctgcagttccagaggctgacccgggagctggaggtggagcggcagatcgtggccagccagctggagcgctgccgcctgggcgctgagagccccagcatcgccagcaccagcagcacagagaagagcttcccctggaggagcacagatgtgcccaacacaggagtgtccaagccccgggtgtctgatgctgtgcagcccaacaactacctgatcagaacagagcctgagcagggcaccctgtacagccctgagcagaccagcctgcacgagagcgagggcagcctgggcaacagccgcagcagcacccagatgaacagctacagcgacagcggctaccaggaggccggcagcttccacaacagccagaatgtgtccaaggctgacaaccggcagcagcacagcttcatcggcagcaccaacaaccacgtggtgaggaacagcagagctgagggccagaccctggtgcagcccagcgtggccaacagagccatgagaagagtgtcctctgtgcccagccgggcccagagccccagctatgtgatcagcactggagtgagccccagccggggcagcctgcggaccagcctgggcagcggcttcggcagccccagcgtgacagacccccggcccctgaaccccagcgcctacagcagcaccaccctgcctgctgcccgggccgccagcccctacagccagaggcctgccagccccacagccatccgccgcatcggctctgtgaccagccggcagaccagcaaccccaacggccccaccccccagtaccagaccacagcccgggtgggcagccccctgaccctgacagatgcccagaccagggtggccagccccagccagggccaggtgggcagcagcagccccaagaggagcggcatgacagctgtgccccagcacctgggccccagcctgcagaggacagtgcatgacatggagcagtttggccagcagcagtatgacatctatgaaagaatggtgccccccaggccagacagcctgaccggcctgcggagcagctatgccagccagcacagccagctgggccaggacctgcggtctgctgtgtccccagacctgcacatcacccccatctatgagggccgcacctactacagccctgtgtaccgcagccccaaccacggcaccgtggagctgcagggcagccagacagccctgtacagaactggatctgtgggcatcggcaacctgcagaggaccagcagccagaggagcaccctgacctaccagaggaacaactatgccctgaacaccacagccacctatgcagagccctaccggcccatccagtacagagtgcaggagtgcaactacaaccggctgcagcacgctgtgcctgcagatgatggcaccaccaggagccccagcattgacagcatccagaaggacccccgggagtttgcctggagggaccctgagctgcctgaggtgatccacatgctgcagcaccagttccccagcgtgcaggccaatgctgctgcctacctgcagcacctgtgctttggagacaacaaggtgaagatggaggtgtgccgcctgggcggcatcaagcacctggtggacctgctggaccaccgggtgctggaggtgcagaagaatgcctgtggggccctgaggaacctggtgtttgggaagagcacagatgagaacaagatcgccatgaagaatgtgggcggcatcccagccctgctgcggctgctgaggaagagcattgatgctgaggtgcgggagctggtgactggagtgctgtggaacctgagcagctgtgatgctgtgaagatgaccatcatcagagatgccctgagcaccctgaccaacacagtgattgtgccccacagcggctggaacaacagcagctttgatgatgaccacaagatcaagttccagaccagcctggtgctgaggaacaccaccggctgcctgaggaacctgagcagcgctggggaggaggccaggaagcagatgaggagctgtgagggcctggtggacagcctgctgtatgtgatccacacctgtgtgaacaccagtgactatgacagcaagacagtggagaactgtgtgtgcaccctgaggaacctgagctaccgcctggagctggaggtgccccaggcccggctgctgggcctgaatgagctggatgacctgctgggcaaggagagccccagcaaggacagcgagcccagctgctggggcaagaagaagaagaagaagaagaggaccccccaggaggaccagtgggatggagtgggccccatccctggcctgagcaagagccccaagggcgtggagatgctgtggcaccccagcgtggtgaagccctacctgaccctgctggccgagagcagcaacccagccaccctggagggcagcgctggcagcctgcagaacctgtctgctggcaactggaagtttgctgcctacatccgggctgctgtgaggaaggagaagggcctgcccatcctggtggagctgctgaggatggacaatgacagagtggtgtcctctgtggccacagccctgaggaacatggccctggatgtgaggaacaaggagctgattggcaagtatgccatgagggacctggtgaaccggctgcccggcggcaatggccccagcgtgctgagtgatgagaccatggccgccatctgctgtgccctgcacgaggtgaccagcaagaacatggagaatgccaaggccctggccgacagcggcggcatcgagaagctggtgaacatcaccaagggccgcggggacaggagcagcctgaaggtggtgaaggccgccgcccaggtgctgaacaccctgtggcagtacagagacctgcggagcatctacaagaaggatggctggaaccagaaccacttcatcacccctgtgtccaccctggagcgggaccgcttcaagagccaccccagcctgagcaccaccaaccagcagatgagccccatcatccagagcggcagcagcaagcccagccccatctacatcagcagctacagcagccctgcccgggagcagaacagaaggctgcagcaccagcagctgtactacagccaggatgacagcaacaggaagaactttgatgcctaccgcctgtacctgcagagcccccacagctatgaggacccctactttgatgacagagtgcacttccctgccagcacagactacagcacccagtatggcctgaagagcaccaccaactacgtggacttctacagcaccaagaggcccagctacagagctgagcagtacccaggcagcccagacagctgggtgtag

SEQ ID NO: 21730 - DNA, 3450 bp, Artificial Sequence
  derived and/or modified sequence
atgcccgcccccgagcaggccagcctggtggaggagggccagccccagactagacaagaagccgccagtacaggtccaggaatggagcccgaaactaccgcgaccactattcttgcaagtgtgaaggaacaggaactgcaatttcagcgactgactagggagctggaggtggaacgtcagatcgtagcctctcagctcgaaaggtgtcgccttggggcagagtccccgtcaatcgcaagcacttcgagcaccgagaagtccttcccctggcgctctaccgacgtacccaacaccggagtaagcaaaccgcgcgtgtcggacgctgtgcagcctaacaactacctgatcaggacggaacctgaacaaggtaccctctacagtcccgaacagaccagcctgcacgagtctgagggaagtttggggaactcgaggagtagcactcagatgaatagctattcagattcaggatatcaagaggccgggtcctttcataatagccagaacgtcagcaaggctgacaaccgccagcagcactcttttattgggagcacaaacaatcacgtggtgcgcaactcacgcgctgaaggccagactctggtgcagcccagcgtcgctaatagggccatgcggcgggtcagttctgttcctagtcgtgcgcagagccccagctatgtaatctccaccggcgttagccccagcagaggcagccttcggacctcactggggagcgggttcggcagtccctctgtgactgacccacgcccgctaaacccttccgcctattcgtctacaacattaccagctgcacgagccgccagcccgtatagtcagagacctgcttcaccgactgccataaggcgcattgggagtgtgacaagccggcaaacgagtaaccctaacggacctacaccccagtatcaaactacagctagggtgggcagcccgctcacgttgaccgatgcgcagacaagagtggcttcaccgagccaagggcaggtggggtcttccagccctaaacggagtggcatgaccgcggttcctcaacatctgggtccttcccttcagcgcactgtccatgatatggaacagttcggccaacagcaatacgatatctacgagcgcatggtgcctccgaggcctgatagcctgactggacttcgctcttcctacgcttcccagcattcccagctgggccaggatctcaggtccgcagtaagcccggacctgcacatcactcccatctatgaaggacgcacatactatagtcctgtgtaccgatcccccaaccacggtacagtggagctgcagggctctcaaaccgcactttacaggaccgggagtgtgggtattggcaatttgcaacggaccagcagtcaaagatcaaccctgacataccaacgaaataactacgccttgaatactaccgccacctatgcagagccctataggcctatacagtaccgtgtgcaggagtgtaactacaacagactgcagcatgcagtgcccgcagatgatggcaccactagatctccttccatcgactccatccagaaagacccccgggaatttgcttggagagacccagaactgcccgaggtcatccatatgctgcaacaccaatttccttctgtacaggcaaatgccgccgcatacctgcagcacctgtgtttcggagataacaaagtgaaaatggaggtctgtcgccttggcggcatcaagcacctggttgatctactagaccaccgggtgctggaggtccagaagaacgcgtgcggcgcccttcgtaacctcgtgtttggcaaaagcacagacgaaaacaaaatcgctatgaagaatgtgggaggcatccccgccctgttaagattgcttcgcaaatctattgacgccgaagtgcgggagcttgtgactggggtactgtggaatctcagctcatgtgacgccgtgaaaatgaccatcatcagagatgcactgtccacattgaccaataccgtgatcgtgccacatagtggttggaacaatagttccttcgacgacgatcacaagatcaagtttcagacctccttggttttaagaaatactaccggctgcttaagaaatctgagttcagccggggaagaggcaagaaagcaaatgcgcagctgtgagggactggtagatagcttactttacgttattcacacgtgtgttaacaccagcgactatgatagcaaaactgtggaaaattgcgtttgcacgctgcgtaacttgagctatcggttggagctggaggtgccacaggcgaggctacttggtctgaatgaattggacgacctgctcggaaaagagagcccatccaaagattcagagccttcatgttggggcaagaaaaaaaaaaagaaaaagcgaactcctcaggaggaccagtgggatggagtcggacccattcctgggctctcaaaatccccgaagggagtggaaatgctgtggcacccctcggtggtcaagccttatctgacgctgctcgctgagtcatctaatccagcaacactggagggttctgcaggatctctacaaaacttgtcagcaggcaactggaaattcgccgcatacattagagctgcagtgcggaaagaaaagggactgccaattctggtggagttattaaggatggacaatgaccgcgttgtttcttcggtcgctaccgcccttaggaatatggcactcgacgtgcgtaataaagaactcatagggaagtacgccatgcgagaccttgtgaatagactgcctggcggaaatggaccatcagttttgagcgacgaaactatggccgctatctgttgcgctctgcacgaagtcactagcaagaacatggaaaatgccaaggctctagctgactctggcgggattgaaaagttagtgaatataacgaagggcaggggggaccgatcatctctgaaagtggtgaaggctgctgcccaagtccttaacactctatggcaatatcgggatttacgctcaatatataaaaaagacggatggaaccagaatcattttatcacgcccgtctccaccctcgagcgggatcggttcaagtcccatccctccttatccacgacaaatcagcaaatgtctcctatcatccagagcggaagcagcaagcctagccccatttacatcagctcttactctagtcctgctagggagcagaatcgcaggctccaacatcagcaattgtactacagccaggacgattctaatcgaaaaaactttgatgcatatagactctacctgcaaagcccgcattcttatgaagatccctattttgatgaccgcgtgcattttccagcctccacggactacagcacacagtacggcttaaagagcaccaccaattacgtcgacttctactccactaaaaggccatcctaccgggccgagcaataccctggatcccccgatagctgggtctag

SEQ ID NO: 21731 - DNA, 5777 bp, Artificial Sequence
  derived and/or modified sequence
ggggcgggcagccgcgccgccgcggcacttttttaattttttcgggtgccgcagcggcgacccctcggcgccgatgtccctgatccctggagcgacgacggccgctgcctaagctggaaagaggaatgccagctcctgagcaggcctcattggtggaggaggggcaaccacagacccgccaggaagctgcctccactggcccaggcatggaacccgagaccacagccaccactattctagcatccgtgaaggagcaggagcttcagtttcagcgactcacccgagaactggaagtggaaaggcagattgttgccagtcagctagaaagatgtaggcttggagcagaatcaccaagcatcgccagcaccagctcaactgagaagtcatttccttggagatcaacagacgtgccaaatactggtgtaagcaaacctagagtttctgacgctgtccagcccaacaactatctcatcaggacagagccagaacaaggaaccctctattcaccagaacagacatctctccatgaaagtgagggatcattgggtaactcaagaagttcaacacaaatgaattcttattccgacagtggataccaggaagcagggagtttccacaacagccagaacgtgagcaaggcagacaacagacagcagcattcattcataggatcaactaacaaccatgtggtgaggaattcaagagctgaaggacaaacactggttcagccatcagtagccaatcgggccatgagaagagttagttcagttccatctagagcacagtctccttcttatgttatcagcacaggcgtgtctccttcaagggggtctctgagaacttctctgggtagtggatttggctctccgtcagtgaccgacccccgacctctgaaccccagtgcatattcctccaccacattacctgctgcacgggcagcctctccgtactcacagagacccgcctccccaacagctatacggcggattgggtcagtcacctcccggcagacctccaatcccaacggaccaacccctcaataccaaaccaccgccagagtggggtccccactgaccctgacggatgcacagactcgagtagcttccccatcccaaggccaggtggggtcgtcgtcccccaaacgctcagggatgaccgccgtaccacagcatctgggaccttcactgcaaaggactgttcatgacatggagcaattcggacagcagcagtatgacatttatgagaggatggttccacccaggccagacagcctgacaggcttacggagttcctatgctagtcagcatagtcagcttgggcaagaccttcgttctgccgtgtctcccgacttgcacattactcctatatatgaggggaggacctattacagcccagtgtaccgcagcccaaaccatggaactgtggagctccaaggatcgcagacggcgttgtatcgcacaggttcagtaggtattggaaatctacaaaggacatccagccaacgaagtacccttacataccaaagaaataattatgctctgaacacaacagctacctacgcggagccctacaggcctatacaataccgagtgcaagagtgcaattataacaggcttcagcatgcagtgccggctgatgatggcaccacaagatccccatcaatagacagcattcagaaggaccccagggagtttgcctggcgtgatcctgagttgcctgaggtcattcacatgcttcagcaccagttcccatctgttcaggcaaatgcagcggcctacctgcagcacctgtgctttggtgacaacaaagtgaagatggaggtgtgtaggttagggggaatcaagcatctggttgaccttctggaccacagagttttggaagttcagaagaatgcttgtggtgcccttcgaaacctcgtttttggcaagtctacagatgaaaataaaatagcaatgaagaatgttggtgggatacctgccttgttgcgactgttgagaaaatctattgatgcagaagtaagggagcttgttacaggagttctttggaatttatcctcatgtgatgctgtaaaaatgacaatcattcgagatgctctctcaaccttaacaaacactgtgattgttccacattctggatggaataactcttcttttgatgatgatcataaaattaaatttcagacttcactagttctgcgtaacacgacaggttgcctaaggaacctcagctccgcgggggaagaagctcggaagcaaatgcggtcctgcgaggggctggtagactcactgttgtatgtgatccacacgtgtgtgaacacatccgattacgacagcaagacggtggagaactgcgtgtgcaccctgaggaacctgtcctatcggctggagctggaggtgccccaggcccggttactgggactgaacgaattggatgacttactaggaaaagagtctcccagcaaagactctgagccaagttgctgggggaagaagaagaaaaagaaaaagaggactccgcaagaagatcaatgggatggagttggtcctatcccaggactgtcgaagtcccccaaaggggttgagatgctgtggcacccatcggtggtaaaaccatatctgactcttctagcagaaagttccaacccagccaccttggaaggctctgcagggtctctccagaacctctctgctggcaactggaagtttgcagcatatatccgggcggccgtccgaaaagaaaaggggctccccatccttgtggagcttctgagaatggataacgatagagttgtttcttccgtggcaacagccttgaggaatatggcactagatgttcgcaacaaggagctcataggcaaatacgccatgcgagacctggtcaaccggctccccggcggcaatggccccagtgtcttgtctgatgagaccatggcagccatctgctgtgctctgcacgaggtcaccagcaaaaacatggagaacgcaaaagccctggccgactcaggaggcatagagaagctggtgaacataaccaaaggcaggggcgacagatcatctctgaaagtggtgaaggcagcagcccaggtcttgaatacattatggcaatatcgggacctccggagcatttataaaaaggatgggtggaatcagaaccattttattacacctgtgtcgacattggagcgagaccgattcaaatcacatccttccttgtctaccaccaaccaacagatgtcacccatcattcagtcaggctccagcaaaccttcaccaatttacatcagttcctattcctcaccagcaagagaacaaaatagacggctacagcatcaacagctgtattatagtcaagatgactccaacagaaagaactttgatgcatacagattgtatttgcagtctcctcatagctatgaagatccttattttgatgaccgagttcactttccagcttctactgattactcaacacagtatggactgaaatcgaccacaaattatgtagacttttattccactaaacgaccttcttatagagcagaacagtacccagggtccccagactcatgggtgtagcatcaagatgcccaacagaggaactctttctttctaaccttgttcagattgaggtgaaaagtccatcttgctgatttgatgattgaaatgtgaaagtgaagtggaaggaatgaatgaagtgtgttttttttttcttttttgaggaattatcagggaagtgaggaaatgtttgggagaggactttctaagctctatttaggtgttagatctaattacttatagattctgtagtctggtgaaggtgtgggtgacgtgatgagaggtttgagaaatgggtgaaatgaaatgggggatatgtaggtcaaatcaaattaaagatgatttttttaatgtgaataaagttatgttctgatagtttgtacagaaaaaataaaatggatgcccatgttttattgctattactaaatgtcaagattgtatgctattatgtcttgtaaatttcttttgttggtgtaaatatggaaatgccacattggttaagtgccatcatttgtaatgcaatgtgtcacttgaaaagagatttgaagaaactgacaacttcaaaaacaaatgagaagcccaaggaactgtgagcaattaaaagcaaaccgcgacaccctttgtctccaccacacatagtgtactttggaagcacaacgtccaggctggtaccgcagcgccatgcccattcctcgcctcattcataggacacttcactgccattttctattcacataaaagaaaaataaatgtggaaatttcatccttggaaatgtgttctctattctttttaaattttctgtatgtatatggaaaagcagatttaataaacacaaatctaactgcatgttggaaacagcttaaatatatccaactattttggacttttcctagttttatatatactttgtgagatggaccacaccaaagaattaagctatgaactttccttctctgacaatctaggtatttttatttcttggaatctatttcaaatctagtacccttcacagttttatcatgtttttctatatggcagcccggccataactaaattgatataactaaattgataccttttttaggcatcatttttaagaactcagtaacttcataagaacagtggttgggcatttatttggttggcaccaatataataaaacaaattctaaattatgatcttgttgagtaattcctggattaggaatggggtaggggaaagaagccccacagtagggtaggcagaggtccccatagcaccacacagcattacttgggagcttttctccatctgtggaggcaatgagggacaccaggcccaaagtctgaggccttctcaggtcttgcagtttccacccttcagtcctagctcctggatctttgttggtgtaaatatggaaatgccacattggttaagtgccatcatggaaaactaggaactagtttacctgtagctgtactaggaaaactaggaactaacgcccatggcaagtcaaacccagaagtgttgtcttagctcaatataccctgcaagtgtaatacaaatcgcagattaaaacatttgtacttatatttgtgagtatatggaaagacacccaagagaaaactgcgttttcttgccgaatggacagcagcccaagatgagcatccaaagtgaaatggaaataccagtgcgagcatgaaagttcctaagatctgcaagccgggagcccttctggggtgccttctgaagaacactcgagccagcttgcggagtcgactgcccagctactgagccctggctgcctcatacctggcggagctcagcagacagcccttgttagatggcagaggtcgccagatgttcctgaggaactggcatcaggacttctgggacgtaaccacttcagtttccaatcactgacttccctgaacctggtatcttcagatctgggttgaagctgaaggctcagttggggaatcaggaaaacaagggaatcggagccagcccaagccaactgacaataactttcttttagtgactgcattagtttggggtaatgctgtaacaggcagcatttcaaaaacggatccaaatttgggttgaaaataactcacctgggtctccaatcagacctaacagagccagaaagaggcctgtacacggggactgggcagaagatctaatgccgtttaagactcctcccttgagaccagagaaaagaaactgcagacacagcctga

SEQ ID NO: 21732 - DNA, 3450 bp, Artificial Sequence
  derived and/or modified sequence
atgcctgccccagagcaggccagccttgtcgaggaaggacagcctcagacgaggcaggaagccgctagcacgggtcctggaatggagcccgaaacaactgccactaccatacttgcaagcgtcaaggagcaggagcttcaattccagagactgaccagagagctggaagttgagaggcagatcgtggcgtctcaacttgagcgctgcaggctcggagctgagtctccatctattgcctcaaccagttcgaccgagaagtcgttcccttggcgcagcactgatgtcccaaacaccggggtgagcaagccccgtgtgtcagatgccgttcaacctaacaattacttgatccggactgaacccgaacaggggaccttgtacagtcccgagcagacttcgctgcacgagagtgagggttccctgggcaactctagatcatcaactcagatgaactcctatagtgattccgggtatcaggaagcaggtagcttccacaactcacagaatgttagcaaggctgacaacaggcagcagcatagttttattggtagtacgaacaatcacgtagttaggaatagtagggcagagggacagaccttggttcaaccttcagtggcaaatcgggctatgcggcgagtatccagcgtgccatcacgcgctcagtctcccagttatgtgatttcaacgggggtgtccccaagtagggggagccttcggactagcttggggagtggctttggttcaccctccgtgacagatcctaggcctctgaaccccagtgcctactcttcaacgactctgcctgctgccagggccgcttctccttattctcagcggccagccagccccacggccatccgccgtatcggatcagtgacctccagacagacttccaaccccaatgggccaactccacagtaccaaacgaccgcaagagtcggctcaccactgacacttactgacgcccagactcgtgttgctagcccatctcagggacaggtggggtcttctagcccgaagcgttcagggatgacagcagtgccccagcaccttgggccttctctgcagaggacagtgcacgacatggagcagtttggacagcagcagtatgacatctatgagaggatggtcccccctcgacccgattccctcaccggtttgaggtctagctacgccagtcagcactcccagctagggcaggatttgagatcagctgtgtcccccgaccttcatatcacccctatctatgaaggcagaacctactactcccccgtctaccgaagtccgaatcacggaaccgtagaactgcaaggatcccagactgccctctaccgtaccggaagcgtgggaataggaaacttgcagcggacatctagtcagcgatcaacactgacgtatcaacggaacaattatgctttgaatacgacagccacttacgcagagccttaccgtccaattcagtatcgagtgcaggagtgtaattataacaggctgcagcacgccgtgccagcagatgacggtactacccgttcacctagcattgactcgattcagaaggaccccagagaattcgcatggcgcgacccagagcttccggaggtgattcacatgctgcaacaccagtttcccagtgtgcaggccaatgccgctgcctacctgcagcacctgtgtttcggggataacaaggtcaaaatggaggtgtgtaggttggggggaattaagcatctcgttgacctgctggaccaccgcgttttggaagtgcagaagaatgcgtgcggcgctctgcgaaacttggtgttcggaaagtctaccgatgagaacaagattgcgatgaaaaacgttgggggtatccccgcactgctcaggcttctccgcaagtctatagatgccgaggtgagagagttggtcactggggtgttatggaacttgtcctcctgcgatgcagtgaaaatgactatcatccgggacgcactatctacgctcactaacaccgtgatagtgccacacagtggctggaacaactcgtctttcgatgatgatcacaaaattaagtttcagacaagcctcgtgctcagaaataccaccgggtgtttgcgcaatctctcctcagctggcgaggaagctcgcaagcagatgagatcatgtgagggtctcgttgactcacttctttatgttattcatacctgcgtgaatacatctgactacgactctaagactgtggagaattgcgtctgtaccctgcgtaatcttagctatcggctcgaactcgaagttccccaggcccgtctactgggccttaatgagctggatgatctactcggcaaggagtccccaagtaaagattccgaaccctcctgctggggcaagaagaagaagaagaagaaaaggacccctcaagaagaccaatgggatggagtcggacccattcccggtctgagtaagtcaccaaagggcgtcgagatgctatggcatccctctgtggtaaaaccttacttgacactgctggcagagtcttcaaacccagcaaccctcgaaggctccgcagggagccttcagaacctaagcgccggaaactggaaatttgcggcttacatcagagctgccgtgcggaaggagaaggggctgcctattctggtcgagctcctcagaatggacaacgaccgggtagtgtcgagcgtggccactgcgctccggaacatggccctcgatgtgcgtaacaaggagctaattggaaagtacgcaatgcgagacctggtcaataggctacctggtggaaatgggccatcagtgctgagcgacgagacaatggccgctatctgctgtgccctgcacgaagtgacttccaagaacatggaaaacgcaaaggctttggctgacagcgggggaatcgagaagctcgtaaacatcacaaagggtcgtggcgatcgcagcagtctcaaagtggttaaggcagcagcccaagtgttgaatactttatggcagtaccgcgacctgagaagtatttacaaaaaggacggctggaatcaaaaccactttatcacccccgtttccaccttggaaagagaccggttcaaatcccacccgagcctcagtacgaccaatcaacagatgtcgccgataatccagagcggctccagcaaaccctccccaatttatatctcaagttacagttctcccgctagggaacagaatcgcagacttcagcatcagcagctgtattactctcaagatgactccaacaggaaaaatttcgacgcataccgattgtatctccagagcccccattcatacgaggacccctactttgacgatagggtgcatttccccgcatccacggattacagcacgcagtacggattaaagtctactactaactatgtggatttctacagcacaaaaaggccatcctaccgtgcagaacagtaccccggttcgcctgacagttgggtgtag

SEQ ID NO: 21733 - DNA, 3450 bp, Artificial Sequence
  derived and/or modified sequence
atgcccgcccccgagcaggccagcctggtggaggagggccagccccagaccagacaggaggccgccagcaccggccccggcatggagcccgagaccaccgccaccaccatcctggccagcgtgaaggagcaggagctgcagttccagagactgaccagagagctggaggtggagagacagatcgtggccagccagctggagagatgcagactgggcgccgagagccccagcatcgccagcaccagcagcaccgagaagagcttcccctggagaagcaccgacgtgcccaacaccggcgtgagcaagcccagagtgagcgacgccgtgcagcccaacaactacctgatcagaaccgagcccgagcagggcaccctgtacagccccgagcagaccagcctgcacgagagcgagggcagcctgggcaacagcagaagcagcacccagatgaacagctacagcgacagcggctaccaggaggccggcagcttccacaacagccagaacgtgagcaaggccgacaacagacagcagcacagcttcatcggcagcaccaacaaccacgtggtgagaaacagcagagccgagggccagaccctggtgcagcccagcgtggccaacagagccatgagaagagtgagcagcgtgcccagcagagcccagagccccagctacgtgatcagcaccggcgtgagccccagcagaggcagcctgagaaccagcctgggcagcggcttcggcagccccagcgtgaccgaccccagacccctgaaccccagcgcctacagcagcaccaccctgcccgccgccagagccgccagcccctacagccagagacccgccagccccaccgccatcagaagaatcggcagcgtgaccagcagacagaccagcaaccccaacggccccaccccccagtaccagaccaccgccagagtgggcagccccctgaccctgaccgacgcccagaccagagtggccagccccagccagggccaggtgggcagcagcagccccaagagaagcggcatgaccgccgtgccccagcacctgggccccagcctgcagagaaccgtgcacgacatggagcagttcggccagcagcagtacgacatctacgagagaatggtgccccccagacccgacagcctgaccggcctgagaagcagctacgccagccagcacagccagctgggccaggacctgagaagcgccgtgagccccgacctgcacatcacccccatctacgagggcagaacctactacagccccgtgtacagaagccccaaccacggcaccgtggagctgcagggcagccagaccgccctgtacagaaccggcagcgtgggcatcggcaacctgcagagaaccagcagccagagaagcaccctgacctaccagagaaacaactacgccctgaacaccaccgccacctacgccgagccctacagacccatccagtacagagtgcaggagtgcaactacaacagactgcagcacgccgtgcccgccgacgacggcaccaccagaagccccagcatcgacagcatccagaaggaccccagagagttcgcctggagagaccccgagctgcccgaggtgatccacatgctgcagcaccagttccccagcgtgcaggccaacgccgccgcctacctgcagcacctgtgcttcggcgacaacaaggtgaagatggaggtgtgcagactgggcggcatcaagcacctggtggacctgctggaccacagagtgctggaggtgcagaagaacgcctgcggcgccctgagaaacctggtgttcggcaagagcaccgacgagaacaagatcgccatgaagaacgtgggcggcatccccgccctgctgagactgctgagaaagagcatcgacgccgaggtgagagagctggtgaccggcgtgctgtggaacctgagcagctgcgacgccgtgaagatgaccatcatcagagacgccctgagcaccctgaccaacaccgtgatcgtgccccacagcggctggaacaacagcagcttcgacgacgaccacaagatcaagttccagaccagcctggtgctgagaaacaccaccggctgcctgagaaacctgagcagcgccggcgaggaggccagaaagcagatgagaagctgcgagggcctggtggacagcctgctgtacgtgatccacacctgcgtgaacaccagcgactacgacagcaagaccgtggagaactgcgtgtgcaccctgagaaacctgagctacagactggagctggaggtgccccaggccagactgctgggcctgaacgagctggacgacctgctgggcaaggagagccccagcaaggacagcgagcccagctgctggggcaagaagaagaagaagaagaagagaaccccccaggaggaccagtgggacggcgtgggccccatccccggcctgagcaagagccccaagggcgtggagatgctgtggcaccccagcgtggtgaagccctacctgaccctgctggccgagagcagcaaccccgccaccctggagggcagcgccggcagcctgcagaacctgagcgccggcaactggaagttcgccgcctacatcagagccgccgtgagaaaggagaagggcctgcccatcctggtggagctgctgagaatggacaacgacagagtggtgagcagcgtggccaccgccctgagaaacatggccctggacgtgagaaacaaggagctgatcggcaagtacgccatgagagacctggtgaacagactgcccggcggcaacggccccagcgtgctgagcgacgagaccatggccgccatctgctgcgccctgcacgaggtgaccagcaagaacatggagaacgccaaggccctggccgacagcggcggcatcgagaagctggtgaacatcaccaagggcagaggcgacagaagcagcctgaaggtggtgaaggccgccgcccaggtgctgaacaccctgtggcagtacagagacctgagaagcatctacaagaaggacggctggaaccagaaccacttcatcacccccgtgagcaccctggagagagacagattcaagagccaccccagcctgagcaccaccaaccagcagatgagccccatcatccagagcggcagcagcaagcccagccccatctacatcagcagctacagcagccccgccagagagcagaacagaagactgcagcaccagcagctgtactacagccaggacgacagcaacagaaagaacttcgacgcctacagactgtacctgcagagcccccacagctacgaggacccctacttcgacgacagagtgcacttccccgccagcaccgactacagcacccagtacggcctgaagagcaccaccaactacgtggacttctacagcaccaagagacccagctacagagccgagcagtaccccggcagccccgacagctgggtgtag

SEQ ID NO: 21734 - protein, 325 aa, Artificial Sequence
  derived and/or modified sequence
MFLYLCFIFQRTCSEEMEEENATLLTEFVLTGFLHQPDCKIPLFLAFLVIYLITIMGNLGLIVLIWKDPHLHIPMYLFLGSLAFVDASLSSTVTPKMLINFLAKSKMISLSECMVQFFSLVTTVTTECFLLATMAYDRYVAICKALLYPVIMTNELCIQLLVLSFIGGLLHALIHEAFSFRLTFCNSNIIQHFYCDIIPLLKISCTDSSINFLMVFIFAGSVQVFTIGTILISYTIILFTILEKKSIKGIRKAVSTCGAHLLSVSLYYGPLTFKYLGSASPQADDQDMMESLFYTVIVPLLNPMIYSLRNKQVIASFTKMFKSNV

SEQ ID NO: 21735 - DNA, 978 bp, Artificial Sequence
  derived and/or modified sequence
atgttcctgtatttgtgtttcatctttcagcgaacgtgctccgaagagatggaagaagaaaacgcgaccttattaacagagttcgtgctcactgggtttcttcaccagcccgattgcaaaattccattattcctggccttcctggtaatctatcttatcactattatgggaaatcttggcctgattgtgttaatctggaaggaccctcatttacacatccctatgtatctgttcctgggaagcctggcattcgtcgatgcctccctctcatccaccgtgacgcccaaaatgctcatcaactttttagccaaaagcaagatgatttctctgtccgagtgcatggtacaattcttttcgctggtgacaaccgtcacgactgagtgttttctgctggcaacaatggcctatgacagatatgttgcaatttgcaaggctctcctatacccggtgattatgactaatgagctgtgtatccagcttttagtgctgagttttattggaggactccttcacgccctgattcacgaggctttttcttttcgccttactttttgtaactccaatatcattcagcatttctattgtgacatcattccgctgctcaagattagctgtaccgacagcagtataaatttcctgatggtctttatcttcgcagggagcgtgcaggtcttcacaatcgggaccattctgatatcctataccattatccttttcacaatcctggaaaagaaatcaatcaaaggcattcgtaaggccgtgtcgacgtgtggagcacacttattgtcggtttccctctattatgggccgttaacatttaagtatcttgggtcagcctccccccaggccgatgatcaggatatgatggaatcacttttctacaccgtgatagtgccgttgttgaatcccatgatttatagcctgaggaacaaacaggttatcgcgtctttcacaaagatgtttaagtcgaacgtctag

SEQ ID NO: 21736 - DNA, 978 bp, Artificial Sequence
  derived and/or modified sequence
atgttcctgtacctgtgcttcatcttccagaggacctgcagcgaggagatggaggaggagaatgccaccctgctgacagaatttgtgctgaccggcttcctgcaccagcctgactgcaagatccccctcttcctggccttcctggtgatctacctgatcaccatcatgggcaacctgggcctcatcgtgctgatctggaaggacccccacctgcacatccccatgtacctgttcctgggcagcctggcctttgtggatgccagcctgagcagcacagtgacccccaagatgctgatcaacttcctggccaagagcaagatgatcagcctgtctgagtgcatggtgcagttcttcagcctggtgaccaccgtgaccacagagtgcttcctgctggccaccatggcctatgacagatatgtggccatctgcaaggccctgctgtaccctgtgatcatgaccaatgagctgtgcatccagctgctggtgctgtccttcatcggcggcctgctgcacgccctgattcatgaggccttctccttccggctgaccttctgcaacagcaacatcatccagcacttctactgtgacatcatccccctgctgaagatcagctgcacagacagcagcatcaacttcctgatggtgttcatctttgctggctctgtgcaggtgttcaccatcggcaccatcctgatctcctacaccatcatcctcttcaccatcctggagaagaagagcatcaagggcatcaggaaggctgtgtccacctgtggggcccacctgctgtctgtgtccctgtactacggccccctgaccttcaagtacctgggcagcgccagcccccaggctgatgaccaggacatgatggagagcctcttctacacagtgattgtgcccctgctgaaccccatgatctacagcctgaggaacaagcaggtgattgccagcttcaccaagatgttcaagagcaatgtgtag

SEQ ID NO: 21737 - DNA, 978 bp, Artificial Sequence
  derived and/or modified sequence
atgttcctgtacctgtgcttcatcttccagcggacctgcagcgaggaaatggaggaggaaaacgccacacttctgaccgagttcgtgttaaccggattcctgcaccaacctgattgtaaaattcctctgttcctggcgttcctggtgatttacctgataacaattatgggcaacttaggactcatcgttttgatatggaaggacccccatctgcacattcccatgtacctgttccttggaagcctggcattcgtggacgcaagtctctcttccacagtcacacctaagatgttgattaacttcctcgcgaagagcaaaatgattagtcttagcgagtgcatggttcagttttttagcctggtgacaaccgtgaccacggagtgctttctgttagccaccatggcttacgacagatacgttgccatttgcaaggctctgctctacccggtcatcatgacaaacgagctgtgcatacagctgctagtattaagttttattggcggcctgctgcatgccctgatccatgaggcctttagttttagattaaccttttgcaatagcaacatcattcagcacttctattgtgacatcataccattactaaaaatcagttgtacagattctagcatcaactttctcatggtgttcattttcgccggtagcgtccaagtgtttaccattgggacgatcttaattagttacacaataatcctgttcaccatcttggagaaaaaatcgattaaggggattcggaaagcagtttccacatgcggcgctcatctgctgagcgtgtcactttattacgggcccctgaccttcaagtatctggggtccgcatcaccccaagcggacgatcaggacatgatggagagcctcttttatacagtgatcgtgcccctcttgaatccaatgatatacagcctgaggaataagcaggttatagcctccttcaccaagatgtttaagtccaatgtttag

SEQ ID NO: 21738 - DNA, 1113 bp, Artificial Sequence
  derived and/or modified sequence
caacacctcttccccaatttcaactcacaattccattgcaaatgttcctttacctttgcttcatttttcagaggacatgcagtgaggagatggaagaggaaaatgcaacattgctgacagagtttgttctcacaggatttttacatcaacctgactgtaaaataccgctcttcctggcattcttggtaatatatctcatcaccatcatggggaatcttggtctaattgttctcatctggaaagaccctcaccttcatatcccaatgtacttattccttgggagtttagcctttgtggatgcttcgttatcatccacagtgactccgaagatgctgatcaacttcttagctaagagtaagatgatatctctctctgaatgcatggtacaatttttttcccttgtaaccactgtaaccacagaatgttttctcttggcaacaatggcatatgatcgctatgtagccatttgcaaagctttactttatccagtcattatgaccaatgaactatgcattcagctattagtcttgtcatttataggtggccttcttcatgctttaatccatgaagctttttcattcagattaaccttctgtaattccaacataatacaacacttttactgtgacattatcccattgttaaagatttcctgtactgattcctctattaactttctaatggtttttattttcgcaggttctgttcaagtttttaccattggaactattcttatatcttatacaattatcctctttacaatcttagaaaagaagtctatcaaagggatacgaaaagctgtctccacctgtggggctcatctcttatctgtatctttatactatggccccctcaccttcaaatatctgggctctgcatctccgcaagcagatgaccaagatatgatggagtctctattttacactgtcatagttcctttattaaatcccatgatctacagcctgagaaacaagcaagtaatagcttcattcacaaaaatgttcaaaagcaatgtttagatctcatacaatctctcttctctatttactaaaattgtcccaagattgtgcaagttagaggtgtctatgtcttgccagcattcaaagatgatgc

SEQ ID NO: 21739 - DNA, 978 bp, Artificial Sequence
  derived and/or modified sequence
atgttcctctacttgtgttttatattccagcggacgtgctctgaagagatggaagaggagaatgcaacccttttaaccgaatttgtcctcaccggcttcttacaccagccggactgtaaaataccgctgtttctggccttcctggtaatatacctcatcaccataatgggcaacttaggccttatcgttctgatctggaaagaccctcatctacacatacctatgtatttattcctgggctcactcgcttttgtggacgcctcactcagctctaccgtgactcctaagatgctgatcaacttcttggccaaatccaaaatgatcagcttgtctgaatgcatggtgcaattttttagcctggtcaccaccgtcactacggagtgcttcctgctcgctacgatggcatatgaccgttatgtggccatttgcaaagcactcctgtacccggttattatgactaacgagttatgtattcagctgctggtcctgtcgtttattggaggcctgctgcatgctttgatccatgaggccttcagttttagactcacattttgtaactcaaacatcattcaacatttctactgtgacattattccacttctcaaaatctcctgtacggactcgtctatcaacttcctgatggtctttatcttcgctggatcggtgcaggtgtttaccatcggtaccatcctcattagttatacaattattttgtttaccatattagagaagaagtccatcaaggggatccggaaggctgtatcaacctgtggggcacaccttctgtcagtgtccctttactatggaccattgacattcaagtatctcggatctgcctcgccccaggccgacgaccaggatatgatggagagtctgttttatacagtgattgtgccgttgttgaaccctatgatttacagcctgaggaataagcaggtcatcgcttcattcacaaaaatgtttaagtccaacgtgtag

SEQ ID NO: 21740 - DNA, 978 bp, Artificial Sequence
  derived and/or modified sequence
atgttcctgtacctgtgcttcatcttccagagaacctgcagcgaggagatggaggaggagaacgccaccctgctgaccgagttcgtgctgaccggcttcctgcaccagcccgactgcaagatccccctgttcctggccttcctggtgatctacctgatcaccatcatgggcaacctgggcctgatcgtgctgatctggaaggacccccacctgcacatccccatgtacctgttcctgggcagcctggccttcgtggacgccagcctgagcagcaccgtgacccccaagatgctgatcaacttcctggccaagagcaagatgatcagcctgagcgagtgcatggtgcagttcttcagcctggtgaccaccgtgaccaccgagtgcttcctgctggccaccatggcctacgacagatacgtggccatctgcaaggccctgctgtaccccgtgatcatgaccaacgagctgtgcatccagctgctggtgctgagcttcatcggcggcctgctgcacgccctgatccacgaggccttcagcttcagactgaccttctgcaacagcaacatcatccagcacttctactgcgacatcatccccctgctgaagatcagctgcaccgacagcagcatcaacttcctgatggtgttcatcttcgccggcagcgtgcaggtgttcaccatcggcaccatcctgatcagctacaccatcatcctgttcaccatcctggagaagaagagcatcaagggcatcagaaaggccgtgagcacctgcggcgcccacctgctgagcgtgagcctgtactacggccccctgaccttcaagtacctgggcagcgccagcccccaggccgacgaccaggacatgatggagagcctgttctacaccgtgatcgtgcccctgctgaaccccatgatctacagcctgagaaacaagcaggtgatcgccagcttcaccaagatgttcaagagcaacgtgtag

SEQ ID NO: 21741 - protein, 314 aa, Artificial Sequence
  derived and/or modified sequence
MSNEDMEQDNTTLLTEFVLTGLTYQPEWKMPLFLVFLVIYLITIVWNLGLIALIWNDPQLHIPMYFFLGSLAFVDAWISSTVTPKMLVNFLAKNRMISLSECMIQFFSFAFGGTTECFLLATMAYDRYVAICKPLLYPVIMNNSLCIRLLAFSFLGGFLHALIHEVLIFRLTFCNSNIIHHFYCDIIPLFMISCTDPSINFLMVFILSGSIQVFTIVTVLNSYTFALFTILKKKSVRGVRKAFSTCGAHLLSVSLYYGPLIFMYLRPASPQADDQDMIDSVFYTIIIPLLNPIIYSLRNKQVIDSFTKMVKRNV

SEQ ID NO: 21742 - DNA, 945 bp, Artificial Sequence
  derived and/or modified sequence
atgagcaacgaggacatggagcaggacaacaccaccctgctgaccgagttcgtgctgaccggcctgacctaccagcccgagtggaagatgcccctgttcctggtgttcctggtgatctacctgatcaccatcgtgtggaacctgggcctgatcgccctgatctggaacgacccccagctgcacatccccatgtacttcttcctgggcagcctggccttcgtggacgcctggatcagcagcaccgtgacccccaagatgctggtgaacttcctggccaagaacagaatgatcagcctgagcgagtgcatgatccagttcttcagcttcgccttcggcggcaccaccgagtgcttcctgctggccaccatggcctacgacagatacgtggccatctgcaagcccctgctgtaccccgtgatcatgaacaacagcctgtgcatcagactgctggccttcagcttcctgggcggcttcctgcacgccctgatccacgaggtgctgatcttcagactgaccttctgcaacagcaacatcatccaccacttctactgcgacatcatccccctgttcatgatcagctgcaccgaccccagcatcaacttcctgatggtgttcatcctgagcggcagcatccaggtgttcaccatcgtgaccgtgctgaacagctacaccttcgccctgttcaccatcctgaagaagaagagcgtgagaggcgtgagaaaggccttcagcacctgcggcgcccacctgctgagcgtgagcctgtactacggccccctgatcttcatgtacctgagacccgccagcccccaggccgacgaccaggacatgatcgacagcgtgttctacaccatcatcatccccctgctgaaccccatcatctacagcctgagaaacaagcaggtgatcgacagcttcaccaagatggtgaagagaaacgtgtag

SEQ ID NO: 21743 - DNA, 945 bp, Artificial Sequence
  derived and/or modified sequence
atgtctaatgaggacatggagcaggataacacaacattgttgaccgagttcgtactgaccgggctcacttaccagcctgagtggaagatgcctctgtttcttgtatttctggtcatttatctgattactattgtgtggaatctgggcctgatcgccctaatctggaatgacccacagctgcacattcccatgtactttttcttggggagtttggcattcgtggatgcctggatctccagtactgtgacccccaaaatgcttgtcaatttcttggcaaagaaccggatgatttccctgtccgaatgcatgatccagtttttctcctttgccttcggcggtacaaccgagtgctttttgctggccaccatggcctatgatcgctatgtggccatctgcaagccccttctctacccagtgataatgaacaattccctgtgcattcgactacttgccttctccttccttgggggtttcctccacgctctgattcacgaggtactgatctttagactgaccttttgtaattcgaatatcatccaccatttctactgtgacattatcccattgtttatgatatcctgtacagaccctagtattaattttctaatggtcttcatcttgagtgggtccattcaagtgttcaccatagtcacagttctgaattcatatactttcgctcttttcactattctgaaaaagaagagtgtcaggggcgttaggaaagcattctctacttgtggagcccacctactatctgtgtccctctactacggccctttgatcttcatgtatttgagacctgccagcccacaggccgatgatcaggacatgattgattccgtcttctacaccatcatcatcccgctgctgaacccaattatttactccctaaggaataagcaggtgatcgattcctttacaaagatggtgaaaagaaatgtgtag

SEQ ID NO: 21744 - DNA, 945 bp, Artificial Sequence
  derived and/or modified sequence
atgagcaatgaagacatggagcaggacaacaccaccctgctgacagaatttgtgctgaccggcctgacctaccagcctgagtggaagatgcccctcttcctggtgttcctggtgatctacctgatcaccatcgtgtggaacctgggcctgattgccctgatctggaatgacccccagctgcacatccccatgtacttcttcctgggcagcctggcctttgtggatgcctggatcagcagcacagtgacccccaagatgctggtgaacttcctggccaagaacaggatgatcagcctgtctgagtgcatgatccagttcttctcctttgcctttggaggcaccacagagtgcttcctgctggccaccatggcctatgaccgctacgtggccatctgcaagcccctgctgtaccctgtgatcatgaacaacagcctgtgcatccggctgctggccttctccttcctgggcggcttcctgcacgccctgatccacgaggtgctgatcttccggctgaccttctgcaacagcaacatcatccaccacttctactgtgacatcatccccctcttcatgatcagctgcacagaccccagcatcaacttcctgatggtgttcatcctgagcggcagcatccaggtgttcaccatcgtgacagtgctgaacagctacacctttgccctcttcaccatcctgaagaagaagtctgtgcggggcgtgaggaaggccttcagcacctgtggggcccacctgctgtctgtgtccctgtactacggccccctcatcttcatgtacctgcggcctgccagcccccaggctgatgaccaggacatgattgacagcgtcttctacaccatcatcatccccctgctgaaccccatcatctacagcctgaggaacaagcaggtgattgacagcttcaccaagatggtgaagagaaatgtgtag

SEQ ID NO: 21745 - DNA, 945 bp, Artificial Sequence
  derived and/or modified sequence
atgagcaacgaggacatggagcaggacaacaccaccctgctgaccgaattcgtgctcaccgggctgacatatcagcctgagtggaaaatgccgctctttctcgtctttctagtgatttaccttattactatagtctggaacctgggtctgatcgcactgatttggaatgatccccagctccatattccgatgtatttctttctcggctccttagccttcgtagatgcctggatttcctccacagtgacccctaagatgctcgtgaacttcctggcaaaaaacagaatgataagccttagcgagtgcatgatccagtttttctcatttgcctttgggggaacaactgaatgcttcttattggcaactatggcttatgatagatatgtggcaatatgtaagccactgctgtaccccgtgatcatgaataactccctgtgtattaggctgctagccttcagttttctgggaggcttcctgcatgcactgatacacgaagttctgattttccgattgacattttgcaactccaacatcatacaccacttctattgtgatataatccctctttttatgattagctgcactgatccctccataaatttcctaatggtgttcattttgagtgggtccatccaggtgtttaccattgtgaccgtgctgaactcttacaccttcgccctcttcaccatcctgaagaaaaaatccgtgagaggagttagaaaagcgtttagcacttgcggtgcccatttactctctgtttctctctactatggtcccctgatattcatgtacttgcgaccggcctctccccaggcagacgaccaagacatgatcgattctgtcttctacactataattatcccgctacttaatcctatcatatattctctccggaacaaacaggtgatcgacagcttcacaaagatggttaagaggaatgtgtag

SEQ ID NO: 21746 - DNA, 945 bp, Artificial Sequence
  derived and/or modified sequence
atgtcgaatgaggacatggaacaggataatacaacattgctgacagagtttgttctcacaggacttacatatcagccagagtggaaaatgcccctgttcttggtgttcttggtgatctatctcatcactattgtgtggaaccttggtctgattgctcttatctggaatgacccacaacttcacatccccatgtacttttttcttgggagtttagcctttgttgatgcttggatatcttccacagtaactcccaaaatgttggttaatttcttggccaaaaacaggatgatatctctgtctgaatgcatgattcaatttttttcctttgcatttggtggaactacagaatgttttctcttggcaacaatggcatatgatcgctatgtagccatatgcaaacctttactatatccagtgattatgaacaattcactatgcatacggctgttagccttctcatttttaggtggcttcctccatgccttaattcatgaagtccttatattcagattaaccttctgcaattctaacataatacatcatttttactgtgatattataccactgtttatgatttcctgtactgacccttctattaattttctaatggtttttattttgtctggctcaattcaggtattcaccattgtgacagttcttaattcttacacatttgctcttttcacaatcctaaaaaagaagtctgttagaggcgtaaggaaagccttttccacctgtggagcccatctcttatctgtctctttatattatggcccacttatcttcatgtatttgcgccctgcatctccacaagcagatgaccaagatatgatagactctgtcttttatacaatcataattcctttgctaaatcccattatctacagtctgagaaataaacaagtaatagattcattcacaaaaatggtaaaaagaaatgtttag

SEQ ID NO: 21747 - DNA, 945 bp, Artificial Sequence
  derived and/or modified sequence
atgagtaatgaggacatggagcaggacaatacgacattgctgacagagttcgtacttaccgggctcacataccagcccgagtggaaaatgccattgtttctggtgttcctggtgatttatcttatcacaatcgtgtggaacctaggactgatcgcgctgatttggaacgatcctcagctgcacatccccatgtacttctttctgggatcactagcgtttgttgatgcatggatcagctccacggtcacccccaagatgcttgttaatttcctcgccaaaaatagaatgattagcctctccgagtgtatgatccagtttttctcctttgcgttcggcggaactacggagtgtttcctgctggccaccatggcatatgatcgctatgtggctatctgtaagccgctcctgtaccctgtgataatgaacaactcactctgcatacgactgctggcgttttcctttcttgggggattcctgcatgcactgatccacgaggtgctgatctttaggttaactttttgcaattccaacataatccatcacttctactgcgatattattcccctgtttatgatttcctgcaccgatccgagcataaattttcttatggtgttcatactgtcagggagcatacaagtgttcacaatcgtcaccgtcctcaactcttacaccttcgcgctgttcactatcctgaagaagaagagcgtcaggggcgtaaggaaggctttcagcacctgcggagcccaccttttgtccgtcagcctctactacggacctctgatatttatgtacctcaggccagcctctccccaggctgacgatcaggatatgatagacagcgttttttacacaattatcattcccctgcttaacccaatcatctactcactgaggaataaacaggtcatagactcttttacaaaaatggttaaaagaaatgtgtag

SEQ ID NO: 21748 - protein, 307 aa, Artificial Sequence
  derived and/or modified sequence
MNHSVVTEFIILGLTKKPELQGIIFLFFLIVYLVAFLGNMLIIIAKIYNNTLHTPMYVFLLTLAVVDIICTTSIIPKMLGTMLTSENTISYAGCMSQLFLFTWSLGAEMVLFTTMAYDRYVAICFPLHYSTIMNHHMCVALLSMVMAIAVTNSWVHTALIMRLTFCGPNTIDHFFCEIPPLLALSCSPVRINEVMVYVADITLAIGDFILTCISYGFIIVAILRIRTVEGKRKAFSTCSSHLTVVTLYYSPVIYTYIRPASSYTFERDKVVAALYTLVTPTLNPMVYSFQNREMQAGIRKVFAFLKH

SEQ ID NO: 21749 - DNA, 924 bp, Artificial Sequence
  derived and/or modified sequence
atgaaccattccgtcgtgacagaatttatcatcttggggctgaccaaaaagccggaacttcagggcatcattttcctgttctttcttatcgtatacctggtagcatttctgggcaacatgttgattatcattgcaaagatctataataataccctccacacacccatgtatgtctttcttcttaccctggccgtggtggacatcatctgcacaacaagtattatccctaagatgttgggcactatgctcacctccgaaaatacaatctcctacgcgggttgcatgtcacagctatttttgttcacttggagtctcggagcagaaatggtcctttttaccaccatggcgtacgataggtacgttgcaatctgtttccctcttcattactcaaccatcatgaaccaccacatgtgcgtggctctccttagcatggttatggctattgcggtcaccaatagctgggtacatacggcccttattatgagactaactttctgtgggcccaataccatcgaccatttcttttgtgagatccctcccctgttggccctgtcctgctcccccgtcaggatcaacgaggtcatggtgtacgtagccgacattaccttggccatcggcgattttatcctgacctgcattagttacggctttatcatcgtggccatcctgcggattaggacggttgagggcaagcggaaggcattcagtacttgttcatcacacctgaccgtggttacactgtattattccccggttatctatacctacattcgtcccgcatcctcctacacctttgaacgtgacaaggtggtggctgccctatataccctcgtgacgcccacgcttaatcccatggtgtactcttttcagaaccgtgaaatgcaggccggaatccgcaaggtttttgccttcctgaaacactag

SEQ ID NO: 21750 - DNA, 924 bp, Artificial Sequence
  derived and/or modified sequence
atgaaccacagcgtggtgacagagttcatcatcctgggcctgaccaagaagccagagctgcagggcatcatcttcctgttcttcctgattgtgtacctggtggccttcctgggcaacatgctgatcatcatcgccaagatctacaacaacaccctgcacacccccatgtatgtgttcctgctgaccctggccgtggtggacatcatctgcaccaccagcatcatccccaagatgctgggcaccatgctgaccagcgagaacaccatctcctatgccggctgcatgagccagctgttcctgttcacctggagcctgggcgctgagatggtgctcttcaccaccatggcctatgaccgctacgtggccatctgcttccccctgcactacagcaccatcatgaaccaccacatgtgtgtggccctgctgtccatggtgatggccatcgctgtgaccaacagctgggtgcacacagccctgatcatgaggctgaccttctgtggccccaacaccatcgaccacttcttctgtgagatcccccccctgctggccctgagctgcagccctgtgcgcatcaatgaggtgatggtgtatgtggccgacatcaccctggccatcggggacttcatcctgacctgcatctcctatggcttcatcatcgtggccatcctgcgcatcagaacagtggagggcaagaggaaggccttcagcacctgcagcagccacctgactgtggtgaccctgtactacagccctgtgatctacacctacatccggcctgccagcagctacacctttgagcgggacaaggtggtggccgccctgtacaccctggtgacccccaccctgaaccccatggtgtacagcttccagaaccgggagatgcaggccggcatcaggaaggtgtttgccttcctgaagcactag

SEQ ID NO: 21751 - DNA, 924 bp, Artificial Sequence
  derived and/or modified sequence
atgaaccacagcgtggtgaccgagttcatcatcctgggcctgaccaaaaagccagagctgcagggaatcatctttttgttcttcttgatagtgtaccttgtcgcttttctgggaaacatgttgatcattatcgctaaaatctacaataacacccttcatactcccatgtacgtgtttcttttgacattggccgttgtcgatatcatctgcacaacatctattatcccaaaaatgcttggaaccatgctcacctcagagaataccatctcctatgctggttgcatgtcccagctgtttctgttcacttggtccctgggggcggagatggtcttattcaccacaatggcttacgaccgctacgtagctatctgctttcctctgcactattccacgattatgaaccatcacatgtgcgtcgcgcttttgtcaatggtcatggcaattgcagtgaccaactcatgggtccacaccgcactcataatgcgactgaccttctgtggcccgaataccatcgatcacttcttttgcgagatcccaccacttcttgcgctaagttgcagtcccgtacgaattaacgaagttatggtgtatgttgctgatataaccctggctataggagattttattctgacgtgtatctcctatggcttcatcatcgtggcaatccttcgtatccggactgtcgaaggaaaaaggaaggccttctcaacttgctcaagccatttaaccgtagtgactctgtactactcacccgtgatctacacatacatccggcctgcctcctcttatacttttgagcgtgataaggtagtggccgccctgtacaccttggtgacgccaacactgaatcctatggtttactcttttcagaatcgtgaaatgcaggctggaatccggaaagtgtttgctttcttaaagcactag

SEQ ID NO: 21752 - DNA, 1046 bp, Artificial Sequence
  derived and/or modified sequence
gccattcaatcacccaagcaggatgaatcacagcgttgtaactgagttcattattctgggcctcaccaaaaagcctgaactccagggaattatcttcctcttttttctcattgtctatcttgtggcttttctcggcaacatgctcatcatcattgccaaaatctataacaacaccttgcatacgcccatgtatgttttccttctgacactggctgttgtggacatcatctgcacaacaagcatcataccgaagatgctggggaccatgctaacatcagaaaataccatttcatatgcaggctgcatgtcccagctcttcttgttcacatggtctctgggagctgagatggttctcttcaccaccatggcctatgaccgctatgtggccatttgtttccctcttcattacagtactattatgaaccaccatatgtgtgtagccttgctcagcatggtcatggctattgcagtcaccaattcctgggtgcacacagctcttatcatgaggttgactttctgtgggccaaacaccattgaccacttcttctgtgagatacccccattgctggctttgtcctgtagccctgtaagaatcaatgaggtgatggtgtatgttgctgatattaccctggccataggggactttattcttacctgcatctcctatggttttatcattgttgctattctccgtatccgcacagtagaaggcaagaggaaggccttctcaacatgctcatctcatctcacagtggtgaccctttactattctcctgtaatctacacctatatccgccctgcttccagctatacatttgaaagagacaaggtggtagctgcactctatactcttgtgactcccacattaaacccgatggtgtacagcttccagaatagggagatgcaggcaggaattaggaaggtgtttgcatttctgaaacactagtagtttcaacatgcaacatcacttctgtactccagaaccatcttctagagcatctcagattttactggtttttcatacttacctccactccaattttccc

SEQ ID NO: 21753 - DNA, 924 bp, Artificial Sequence
  derived and/or modified sequence
atgaatcactcagtcgtcacagaattcatcattcttggtctcactaaaaaacccgaattgcaaggcatcatttttttgtttttcctgatagtgtatctagtcgccttcctgggaaatatgttgataattatcgcaaaaatatataacaatactctgcacacccctatgtatgtgttcctgttgacactcgccgtggtggatattatttgcacgacgagtattattcctaagatgttaggcaccatgctgacatctgagaatacaatcagttacgccggatgtatgtctcagctttttctgtttacatggagcctgggagcagaaatggttctgttcacaactatggcatacgatagatatgtagccatttgcttccctcttcactacagcaccatcatgaaccaccacatgtgcgtggctttactgtccatggttatggctatagcggtcacaaactcctgggtgcacacagcattgatcatgcgactcaccttttgcggaccaaacaccatcgaccattttttctgcgagatacccccactgctggccctgtcatgctctccagtgcggattaatgaagtgatggtttatgtagctgacataacacttgctataggcgattttatacttacatgcatcagttatgggttcattatagtggccattctccggatcaggacagtggaaggcaaaaggaaggcgttttcgacttgctctagtcaccttacggtggtaaccctttactactcacctgtgatctacacttacatccggccagccagctcctacacgtttgagcgggataaagtcgtcgccgctctctacacgctagtcacccctacgctcaacccgatggtttacagtttccagaaccgcgagatgcaggccggtataagaaaggtgttcgcgttcctgaagcactag

SEQ ID NO: 21754 - DNA, 924 bp, Artificial Sequence
  derived and/or modified sequence
atgaaccacagcgtggtgaccgagttcatcatcctgggcctgaccaagaagcccgagctgcagggcatcatcttcctgttcttcctgatcgtgtacctggtggccttcctgggcaacatgctgatcatcatcgccaagatctacaacaacaccctgcacacccccatgtacgtgttcctgctgaccctggccgtggtggacatcatctgcaccaccagcatcatccccaagatgctgggcaccatgctgaccagcgagaacaccatcagctacgccggctgcatgagccagctgttcctgttcacctggagcctgggcgccgagatggtgctgttcaccaccatggcctacgacagatacgtggccatctgcttccccctgcactacagcaccatcatgaaccaccacatgtgcgtggccctgctgagcatggtgatggccatcgccgtgaccaacagctgggtgcacaccgccctgatcatgagactgaccttctgcggccccaacaccatcgaccacttcttctgcgagatcccccccctgctggccctgagctgcagccccgtgagaatcaacgaggtgatggtgtacgtggccgacatcaccctggccatcggcgacttcatcctgacctgcatcagctacggcttcatcatcgtggccatcctgagaatcagaaccgtggagggcaagagaaaggccttcagcacctgcagcagccacctgaccgtggtgaccctgtactacagccccgtgatctacacctacatcagacccgccagcagctacaccttcgagagagacaaggtggtggccgccctgtacaccctggtgacccccaccctgaaccccatggtgtacagcttccagaacagagagatgcaggccggcatcagaaaggtgttcgccttcctgaagcactag

SEQ ID NO: 21755 - protein, 827 aa, Artificial Sequence
  derived and/or modified sequence
MASADKNGGSVSSVSSSRLQSRKPPNLSITIPPPEKETQAPGEQDSMLPERKNPAYLKSVSLQEPRSRWQESSEKRPGFRRQASLSQSIRKGAAQWFGVSGDWEGQRQQWQRRSLHHCSMRYGRLKASCQRDLELPSQEAPSFQGTESPKPCKMPKIVDPLARGRAFRHPEEMDRPHAPHPPLTPGVLSLTSFTSVRSGYSHLPRRKRMSVAHMSLQAAAALLKGRSVLDATGQRCRVVKRSFAFPSFLEEDVVDGADTFDSSFFSKEEMSSMPDDVFESPPLSASYFRGIPHSASPVSPDGVQIPLKEYGRAPVPGPRRGKRIASKVKHFAFDRKKRHYGLGVVGNWLNRSYRRSISSTVQRQLESFDSHRPYFTYWLTFVHVIITLLVICTYGIAPVGFAQHVTTQLVLRNKGVYESVKYIQQENFWVGPSSIDLIHLGAKFSPCIRKDGQIEQLVLRERDLERDSGCCVQNDHSGCIQTQRKDCSETLATFVKWQDDTGPPMDKSDLGQKRTSGAVCHQDPRTCEEPASSGAHIWPDDITKWPICTEQARSNHTGFLHMDCEIKGRPCCIGTKGSCEITTREYCEFMHGYFHEEATLCSQVHCLDKVCGLLPFLNPEVPDQFYRLWLSLFLHAGVVHCLVSVVFQMTILRDLEKLAGWHRIAIIFILSGITGNLASAIFLPYRAEVGPAGSQFGLLACLFVELFQSWPLLERPWKAFLNLSAIVLFLFICGLLPWIDNIAHIFGFLSGLLLAFAFLPYITFGTSDKYRKRALILVSLLAFAGLFAALVLWLYIYPINWPWIEHLTCFPFTSRFCEKYELDQVLH

SEQ ID NO: 21756 - protein, 716 aa, Artificial Sequence
  derived and/or modified sequence
PGSSRSRHPLLLLIWSLGSSQGPHRQIRPPPPCRHAGTHVPSPLPHTQVHRRRQAYAHLSLVCFRRGAAQWFGVSGDWEGQRQQWQRRSLHHCSMRYGRLKASCQRDLELPSQEAPSFQGTESPKPCKMPKIVDPLARGRAFRHPEEMDRPHAPHPPLTPGVLSLTSFTSVRSGYSHLPRRKRMSVAHMSLQAAAALLKGRSVLDATGQRCRVVKRSFAFPSFLEEDVVDGADTFDSSFFSKEEMSSMPDDVFESPPLSASYFRGIPHSASPVSPDGVQIPLKEYGRAPVPGPRRGKRIASKVKHFAFDRKKRHYGLGVVGNWLNRSYRRSISSTVQRQLESFDSHRPYFTYWLTFVHVIITLLVICTYGIAPVGFAQHVTTQLVLRNKGVYESVKYIQQENFWVGPSSIDLIHLGAKFSPCIRKDGQIEQLVLRERDLERDSGCCVQNDHSGCIQTQRKDCSETLATFVKWQDDTGPPMDKSDLGQKRTSGAVCHQDPRTCEEPASSGAHIWPDDITKWPICTEQARSNHTGFLHMDCEIKGRPCCIGTKGSCEITTREYCEFMHGYFHEEATLCSQVHCLDKVCGLLPFLNPEVPDQFYRLWLSLFLHAGVVHCLVSVVFQMTILRDLEKLAGWHRIAIIFILSGITGNLASAIFLPYRAEVRMWRMGPLPHIGGQPCCSYSTHLGSARGTRCPSCTGLHSGGTANLGAYWLVS

SEQ ID NO: 21757 - DNA, 2484 bp, Artificial Sequence
  derived and/or modified sequence
atggcctccgcggataagaatggtggttcggtgtcatccgtttctagctctcgcctacagagccgaaaacccccgaacctgagcatcactataccccctcccgaaaaagagactcaggcacctggcgagcaagattccatgctccccgaaagaaaaaaccccgcgtatctgaaatcagtctctcttcaggaaccccgctccaggtggcaagagtcatctgagaaacggcccgggttccggaggcaggcttctctcagccagagtatccggaagggggccgcccagtggttcggtgtgagcggcgattgggaggggcagaggcagcagtggcagagacggtccctgcaccattgctcaatgagatatggtcgtctaaaagcatcatgccagcgcgacctggaactgccctctcaagaggctcccagtttccaagggaccgaatcgccaaagccctgcaagatgcccaagatagtggatccccttgccaggggccgcgcatttcgccaccctgaagagatggatagaccgcacgctccccacccccccctaacccccggggtgctgtccctaacctctttcacaagcgtccggtcaggatacagccacctgcccagaaggaaacgaatgtccgtggctcacatgtctttacaggcagcggcagccctgctgaagggcaggagtgtgttagatgcaactggccagcgatgcagggtggtgaaaaggtcctttgcttttcctagttttcttgaagaggacgtcgtggatggagcagacacgtttgatagctctttcttctctaaagaggaaatgtcctcaatgcccgacgacgtctttgagagccctcccctgtctgcctcttattttcgcggcatcccccacagtgctagccctgtctcccctgacggcgttcagatccctctcaaagagtacggccgtgcgcccgtgccagggcctaggcggggcaagcgcattgcttctaaagtgaaacattttgcatttgatagaaagaagcgccattatggactgggggttgttggcaattggcttaatcgttcctatcgcagatccattagtagtaccgttcagcgacagctcgagtccttcgactcacacagaccctatttcacctactggcttacttttgtgcacgtgataattactctcctggtcatttgcacatatggaatcgctcccgtgggcttcgctcagcatgttaccacacagttagtcctgcgcaataagggagtgtacgagtcagtgaaatatatccagcaggaaaatttctgggtcggcccgagcagcatagatttgattcacctcggtgccaagttctcaccgtgcataaggaaggacggtcagattgagcagttggtcttgcgggagagggatttggagcgagactccggctgttgtgtccagaacgaccatagtgggtgtatacagacacaaagaaaagactgctctgagaccttagcaactttcgtgaagtggcaggacgataccggtcctcccatggataagtctgacctgggccagaagcggacttcaggagccgtgtgtcatcaggaccccagaacctgtgaggagcctgcttcttctggcgcacatatatggccagacgatatcactaaatggcctatctgcacagaacaggcccgctcaaatcatacaggtttccttcacatggactgtgagatcaagggacgaccctgttgcatagggaccaaggggtcctgcgagattaccaccagagaatattgtgagtttatgcacggctacttccatgaagaggccactctttgcagccaggtccactgccttgacaaagtctgcggactcctgcctttcctgaacccagaggtaccggatcagttctatcgcctgtggttaagcctgtttctgcatgccggggtggttcattgcctggtatcagtagtgttccagatgacaatcctgcgcgacctcgaaaaactcgccgggtggcataggattgcaattatcttcatcctctcagggatcacgggcaacttagcctccgcgatttttcttccctatcgggccgaggtggggcctgctgggtcccagtttgggctgctggcttgcctctttgtggaactattccagtcctggccgttgctggagcgaccctggaaagcgttcctaaatttatctgcaatagtgctgtttctgttcatttgcggcctgctgccatggatcgataacattgctcatattttcggcttcttgagcggtctactccttgcatttgccttcctgccatatatcacttttggcaccagtgacaaatacaggaagagagctcttatccttgtatcactattagcttttgcagggctcttcgccgccttggtgctgtggctgtatatctatcctataaactggccctggatcgagcatcttacttgttttccctttaccagtcgcttctgtgagaagtacgagcttgaccaggtgctgcactag

SEQ ID NO: 21758 - DNA, 2151 bp, Artificial Sequence
  derived and/or modified sequence
cctggttcctctcgctcccgacaccccctcctgctgctgatttggtccctcggtagttctcagggcccgcatcgccagataagaccacccccaccctgccgtcatgccggcactcatgtgccctccccactgccgcacacccaagtccatcgccgacgccaagcgtatgcccatctcagcctggtgtgctttcggcggggcgccgcccaatggttcggggtaagcggtgattgggagggacaacgacaacagtggcaaagacgatccctccaccattgtagcatgagatacggaagattaaaggcatcttgtcagcgggacctggaactgccctcccaggaggcaccatcattccagggcactgaaagccccaaaccctgcaagatgccaaagattgtggacccattggcccgcggccgcgcctttcgccaccctgaggagatggaccgcccccacgccccccatccaccactgactcctggcgtgttatctctgacctcctttacttccgtgaggagcggatattctcatctcccgaggaggaagagaatgtcagtggctcacatgtccctccaggcggcagccgctctgttgaagggtagatcggtcctggacgctaccgggcaaaggtgcagggtggtgaagaggtctttcgcttttccatcctttcttgaagaggacgttgtcgatggggcagatacctttgatagctcatttttctccaaagaagagatgtcttcgatgcccgatgatgtgtttgaatcacctcctctgtccgcctcgtatttcagagggatcccccatagcgcctcccccgtctcccctgacggggtgcagattcctttaaaggagtatggcagagccccagtgcccgggcctcgccggggcaagagaattgcatccaaagttaaacatttcgccttcgatcgcaagaagcgtcattacggcctaggcgtggtaggtaattggctcaatcggagctacaggcgttcgatctcctctaccgttcagcgacagttggaaagcttcgactcacacaggccatatttcacctattggctcacattcgtccacgtcattataaccctcttggtgatctgcacttacgggattgctccggtgggtttcgctcaacatgtgacgacccaacttgtcctcaggaacaaaggagtgtatgaaagcgtcaaatatattcagcaagagaatttctgggtgggtccgtcctccatcgacctcatacacctaggcgccaaattttctccttgcatcagaaaagacggacagatcgaacagctcgttctccgcgagcgggacctggagcgcgattccggatgttgtgtgcagaatgaccattctggctgtatacagactcagaggaaggactgttcagagaccctagctacctttgtgaagtggcaggacgatactggcccccctatggataagtctgaccttggccagaaacggaccagtggagccgtttgccaccaagatccccgtacatgtgaggagcccgccagtagtggagcccatatttggccagatgacatcactaaatggcccatttgcacggagcaggccagatctaatcatactgggtttcttcacatggactgtgagatcaaaggcaggccgtgctgcatcggcactaaaggatcctgcgaaattactacgcgcgagtactgcgaatttatgcatgggtatttccacgaggaggccactctatgctcccaggtgcactgcttagacaaggtatgcgggctgctcccctttcttaatccggaggtccctgaccagttttacagattgtggctgagtcttttcctgcacgcgggggtggtgcactgcctcgtctccgttgtttttcagatgactattctccgcgatttagaaaaactggctgggtggcaccgcattgctattatattcatcttgtccgggatcaccgggaacctggcctcagctattttcctcccctaccgcgccgaagtgcgcatgtggcgcatgggcccattaccacacattgggggccagccttgttgcagctatagtactcatctgggctcagcccggggaacacgctgcccctcctgcaccggtttacattcagggggtacagcaaatctgggagcatactggctcgtgagctag

SEQ ID NO: 21759 - DNA, 2484 bp, Artificial Sequence
  derived and/or modified sequence
atggccagcgctgacaagaatggaggctctgtgtcctctgtgagcagcagccggctgcagagcaggaagccacccaacctgagcatcaccatccccccacctgagaaggagacccaggcccctggagagcaggacagcatgctgcctgagaggaagaacccagcctacctgaagtctgtgtccctgcaggagcccaggagccgctggcaggagagcagcgagaagaggcctggcttccggcggcaggccagcctgagccagagcatcagaaaaggagctgcccagtggtttggagtgtctggggactgggagggccagaggcagcagtggcagaggaggagcctgcaccactgcagcatgagatatggccgcctgaaggccagctgccagagggacctggagctgcccagccaggaggcccccagcttccagggcacagagagccccaagccctgcaagatgcccaagatcgtggaccccctggcccggggccgggccttccgccaccctgaggagatggaccggccccacgccccccacccccccctgaccccaggagtgctgagcctgaccagcttcacctctgtgcgcagcggctacagccacctgcccaggaggaagaggatgtctgtggcccacatgagcctgcaggccgccgccgccctgctgaagggccgctctgtgctggatgccaccggccagcgctgccgggtggtgaagaggagctttgccttccccagcttcctggaggaggatgtggtggatggagctgacacctttgacagcagcttcttcagcaaggaggagatgagctccatgccagatgatgtgtttgagagcccccccctgagcgccagctacttccggggcatcccccacagcgccagccctgtgtccccagatggagtgcagatccccctgaaggagtatggccgggcccctgtgcccggcccccggcggggcaagagaattgccagcaaggtgaagcactttgcctttgacaggaagaagaggcactacggcctgggcgtggtgggcaactggctgaacagaagctaccgccgcagcatcagcagcacagtgcagaggcagctggagagctttgacagccaccggccctacttcacctactggctgacctttgtgcacgtgatcatcaccctgctggtgatctgcacctacggcatcgcccctgtgggctttgcccagcacgtgaccacccagctggtgctgaggaacaagggcgtgtatgaatctgtgaagtacatccagcaggagaacttctgggtgggccccagcagcattgacctgatccacctgggcgccaagttcagcccctgcatcaggaaggatggccagatcgagcagctggtgctgcgggagcgggacctggagcgggacagcggctgctgcgtgcagaatgaccacagcggctgcatccagacccagaggaaggactgcagcgagaccctggccacctttgtgaagtggcaggatgacaccggcccccccatggacaagagtgacctgggccagaagaggaccagcggggctgtgtgccaccaggaccccaggacctgtgaggagcccgccagcagcggggcccacatctggccagatgacatcaccaagtggcccatctgcacagagcaggcccggagcaaccacacaggcttcctgcacatggactgtgagatcaagggccggccctgctgcatcggcaccaagggcagctgtgagatcaccacccgggagtactgtgagttcatgcacggctacttccacgaggaggccaccctgtgcagccaggtgcactgcctggacaaggtgtgtggcctgctgcccttcctgaaccctgaggtgcctgaccagttctaccgcctgtggctgagcctcttcctgcacgccggcgtggtgcactgcctggtgtctgtggtgttccagatgaccatcctgcgggacctggagaagctggccggctggcaccgcatcgccatcatcttcatcctgagcggcatcaccggcaacctggccagcgccatcttcctgccctacagagctgaggtgggccctgctggcagccagtttggcctgctggcctgcctgtttgtggagctgttccagagctggcccctgctggagcggccctggaaggccttcctgaacctgagcgccatcgtgctcttcctgttcatctgtggcctgctgccctggattgacaacatcgcccacatcttcggcttcctgagcggcctgctgctggcctttgccttcctgccctacatcaccttcggcaccagtgacaagtacaggaagagggccctgatcctggtgtccctgctggcctttgctggcctgtttgctgccctggtgctgtggctgtacatctaccccatcaactggccctggattgagcacctgacctgcttccccttcaccagccgcttctgtgagaagtatgagctggaccaggtgctgcactag

SEQ ID NO: 21760 - DNA, 2151 bp, Artificial Sequence
  derived and/or modified sequence
cctggcagcagccgcagccgccaccccctgctgctgctgatctggagcctgggcagcagccagggcccccaccggcagatccggcccccaccaccctgcagacatgctggcacccacgtgcccagccccctgccccacacccaggtgcacagaagacggcaggcctatgcccacctgagcctggtgtgcttcagaagaggagctgcccagtggtttggagtgtctggggactgggagggccagaggcagcagtggcagaggaggagcctgcaccactgcagcatgagatatggccgcctgaaggccagctgccagagggacctggagctgcccagccaggaggcccccagcttccagggcacagagagccccaagccctgcaagatgcccaagatcgtggaccccctggcccggggccgggccttccgccaccctgaggagatggaccggccccacgccccccacccccccctgaccccaggagtgctgagcctgaccagcttcacctctgtgcgcagcggctacagccacctgcccaggaggaagaggatgtctgtggcccacatgagcctgcaggccgctgctgccctgctgaagggccgctctgtgctggatgccaccggccagcgctgccgggtggtgaagaggagctttgccttccccagcttcctggaggaggatgtggtggatggagctgacacctttgacagcagcttcttcagcaaggaggagatgagctccatgccagatgatgtgtttgagagcccccccctgagcgccagctacttccggggcatcccccacagcgccagccctgtgtccccagatggagtgcagatccccctgaaggagtatggccgggcccctgtgcccggcccccggcggggcaagagaattgccagcaaggtgaagcactttgcctttgacaggaagaagaggcactacggcctgggcgtggtgggcaactggctgaacagaagctacagaagaagcatcagcagcacagtgcagaggcagctggagagctttgacagccaccggccctacttcacctactggctgacctttgtgcacgtgatcatcaccctgctggtgatctgcacctatggaattgcccctgtgggctttgcccagcacgtgaccacccagctggtgctgagaaataaaggagtgtatgagagcgtgaagtacatccagcaggagaacttctgggtgggccccagcagcattgacctgatccacctgggcgccaagttcagcccctgcatcaggaaggatggccagatcgagcagctggtgctgcgggagcgggacctggagcgggacagcggctgctgcgtgcagaatgaccacagcggctgcatccagacccagaggaaggactgcagcgagaccctggccacctttgtgaagtggcaggatgacaccggcccccccatggacaagagtgacctgggccagaagaggaccagcggggctgtgtgccaccaggaccccaggacctgtgaggagcccgccagcagcggggcccacatctggccagatgacatcaccaagtggcccatctgcacagagcaggcccggagcaaccacacaggcttcctgcacatggactgtgagatcaagggccggccctgctgcatcggcaccaagggcagctgtgagatcaccacccgggagtactgtgagttcatgcacggctacttccacgaggaggccaccctgtgcagccaggtgcactgcctggacaaggtgtgtggcctgctgcccttcctgaaccctgaggtgcctgaccagttctaccgcctgtggctgagcctcttcctgcatgctggggtggtgcactgcctggtgtctgtggtgttccagatgaccatcctgcgggacctggagaagctggccggctggcacagaattgccatcatcttcatcctgagcggcatcactggaaacctggccagcgccatcttcctgccctacagagctgaggtgaggatgtggaggatgggccccctgccccacatcggcggccagccctgctgcagctacagcacccacctgggcagcgcccggggcacccgctgccccagctgcaccggcctgcacagcggcggcacagccaacctgggcgcctactggctggtgtcctag

SEQ ID NO: 21761 - DNA, 2484 bp, Artificial Sequence
  derived and/or modified sequence
atggccagcgccgacaagaacggcggcagcgtgagcagcgtgagcagttcacgcctgcaaagtaggaagccgcccaacctgtccatcaccattcccccccccgaaaaagaaactcaggcccctggagaacaagatagtatgctgcctgagcggaagaatcccgcctacctaaaaagtgtttcactccaggagccacggagcaggtggcaggagtccagcgagaaaagacccggctttcgacgacaggctagcctgtcacagagtatcagaaagggagcagcacagtggtttggagtgagtggtgactgggaaggacagcgccagcagtggcagcggcggtcgctccatcattgttcgatgaggtacgggcgcctgaaagcttcctgccagcgggatctggaactcccctcacaggaggctccctccttccaggggacagagtcgccgaagccctgcaagatgccaaaaattgtggacccacttgctagagggcgcgctttcaggcaccctgaggaaatggatagaccccacgcacctcatccccctctcacccctggcgtgctgtcattaaccagctttactagcgtgaggagcggatatagccatctgccacgacgcaaacgcatgtccgtggcccatatgtccctgcaggctgctgccgctctgctcaaaggacggagtgtcctggacgccaccggtcagcggtgccgagtggttaaacgctccttcgctttccccagctttcttgaggaggatgttgttgatggtgcggatacttttgacagctctttcttttctaaggaggaaatgagctccatgccagacgatgtctttgagagtcccccattgtccgcgagttattttagagggattccccactctgcttcaccggtttcccctgatggagtccagattcccttaaaagaatatgggagagcacctgttccaggccccagaaggggcaaacggatagcttccaaggtaaagcactttgcgtttgatcgcaagaagaggcattatgggctcggcgtagtcggaaactggctgaacagatcctatcgccggtcaatatcttccactgtccagcgacagctcgagagctttgattcacacaggccatatttcacgtactggttgacattcgtccacgtaattatcacgttgctggtgatttgtacatatggaatcgctccagtgggattcgcccagcatgtgaccactcagctggtgctccgcaacaagggagtttacgagagtgtgaaatacatacagcaagagaatttctgggttggtccgagcagcatcgacctgatacacctgggtgctaaatttagcccctgtattcggaaagacggacaaatcgaacagcttgtactgagggagcgggacttagagagggactccggctgctgtgtccagaacgaccacagcggatgcatccagacacaaaggaaggattgcagcgagacactggcaaccttcgttaagtggcaggatgatacaggaccccccatggacaaatcagatctggggcagaaacggacttcaggtgcagtttgtcatcaggatcccagaacctgcgaggagcccgcatcatcgggcgcccacatttggccagacgacatcacaaaatggccaatctgtacagaacaggcgcgatcaaatcacacaggctttctgcacatggattgtgagatcaaaggtcgtccttgctgcatcgggactaaaggctcctgtgagattaccacccgcgagtattgtgagtttatgcacggatacttccatgaggaggcaacactgtgctcccaagtccattgcttggataaagtgtgtgggttgctgcctttcttgaatccagaagtacccgaccaattctatagactgtggctctctttgttccttcacgccggcgtcgtgcattgcctggtctcagtggtctttcagatgacaatcttgagggacttggagaaattggccggctggcacagaattgccataattttcattctgtccgggataacgggtaacctggcctcagcaatatttctgccttaccgggccgaagtgggccccgccgggagtcaatttggtttgctggcctgcctgtttgtggagctttttcaaagctggccactgcttgagagaccatggaaagcttttctgaatctgagtgccattgtgttgttcttatttatctgcggattgctcccttggattgataatatcgcccatatctttgggttcctatccggccttttgcttgcgttcgccttcttgccatacattacattcggcacttccgacaagtataggaaacgtgcccttattttagtgtcactgctggcatttgctggcctcttcgccgcattggtgttgtggctatacatctatcccatcaattggccctggatcgagcacctgacgtgtttccctttcaccagccgcttttgtgagaagtacgagttagatcaggtgctgcactag

SEQ ID NO: 21762 - DNA, 2151 bp, Artificial Sequence
  derived and/or modified sequence
cccggcagcagccggagccggcaccccctgctgctgctgatctggtccctggggtccagccagggccctcaccgccagattcgaccgccgcctccctgtaggcacgctggtacacatgtgccctctcccctgccccatacacaggtccatagaaggaggcaggcctatgcccatttatcattggtctgcttccgccgaggtgctgcccagtggtttggggtgtcaggagattgggagggccagcgtcagcagtggcagaggaggtctctccatcattgcagcatgaggtatgggcgcctaaaagcttcttgtcagcgggacctggaactgccatctcaggaggcaccatcctttcagggtactgaaagccccaagccatgcaagatgcctaagattgtcgatcccctggcccgcggcagggcctttagacatcccgaagaaatggatcggccgcatgctccacatccccctctgacccccggcgtgctctccctcacttcgtttactagtgttagatctggctatagccacctaccacggcgtaagcgcatgtccgttgcgcacatgagtctccaggctgccgctgctctgttgaaggggaggagcgtattagatgcaaccggccagcgctgcagggtagtaaagaggtcctttgcctttccatccttcctcgaagaggatgttgtagatggcgccgatacctttgattctagcttctttagtaaggaggagatgtcctcaatgccagacgacgtgtttgaatctccacccctgtcggcttcgtactttcgaggcattccgcattccgcttcccccgtttcacccgacggagtacagattcctctgaaggagtacggacgggctcccgtcccaggtcctaggaggggaaagcggattgccagcaaggtcaaacatttcgccttcgaccgaaagaagcgtcattacggtctgggcgtggtgggtaactggctaaatcgaagttacaggcggagcattagttcaaccgtccaacggcagcttgaatcatttgattcacataggccttatttcacctactggctgacatttgtccacgtgatcattaccctcctggtaatctgcacgtacgggatcgcgcctgtggggttcgcccagcacgtaaccactcagcttgtactacggaataagggcgtgtacgaatccgtgaaatacatccagcaggagaacttttgggtgggtccttccagtattgatctcatccacttgggggctaaattctcaccgtgcattagaaaagatggccaaatagaacaactggttctgagagaacgtgatttagagcgagactctggatgctgcgtccaaaatgatcacagcgggtgtatacagacccaaagaaaggactgcagtgaaacccttgcgaccttcgttaaatggcaggacgatacggggccgcccatggataagtcagacttaggacaaaaaagaacatccggtgccgtatgtcaccaagaccctcgcacttgcgaagagccagcctcatctggcgctcacatatggcccgacgatatcacgaagtggcctatttgcaccgagcaggctcgctccaatcacaccggctttctccatatggattgcgagatcaaagggcgcccttgttgtattggaacaaaggggtcctgcgagatcactacacgagaatactgcgagtttatgcacggctattttcacgaggaggcaacgctgtgctctcaagtgcactgcttagacaaggtttgcggcctcctaccctttctgaatcccgaagttcccgatcagttttatcgcctctggttgagtctcttccttcacgcgggagtggttcattgccttgtgagtgtcgtgtttcagatgacaatccttcgcgacctggagaagctcgccggctggcatcgtatagccataattttcatcttgtctgggataactggcaacttggcctctgccatttttctaccttaccgagctgaggtgagaatgtggaggatgggtccgctgcctcacattggtggacagccctgctgctcttatagcactcacttggggagcgcacggggcactcgctgtccctcatgtaccgggcttcacagtgggggaaccgccaacctcggagcctactggctcgtaagctag

SEQ ID NO: 21763 - DNA, 2484 bp, Artificial Sequence
  derived and/or modified sequence
atggcgtcggccgataagaatggtggatctgtctcctccgtttcctcaagtcgcctgcagtcccggaaaccccctaatctctctataacaattccgccacccgagaaagaaacacaggctcctggcgagcaggacagtatgctgcctgaaaggaaaaatccagcctatctcaaaagtgtgagcttacaagaacccaggtctagatggcaggagtcgagtgaaaagagacctggctttcggcgacaggccagtctgtcacagtcaattagaaaaggggctgcccaatggtttggggtgagcggggattgggagggacagcgccagcagtggcaacgccgttctctccatcactgcagtatgcggtatggacgcctgaaggctagctgccagcgcgatttggagttgccttctcaagaagccccaagttttcagggcacagaatcgcccaagccttgtaagatgccaaaaatcgtggatccactggcaaggggaagggcatttcggcatccggaagagatggaccgaccccacgcaccgcaccctcctctgactccgggagtcttaagtcttacaagctttaccagtgttcgtagtggctatagccacctgcctcggcgaaaacgcatgtcggtggctcacatgtcccttcaagctgccgctgccttattgaaggggcgatcagtgttagatgccaccggccagcgctgtcgcgttgtgaaaagatccttcgcgtttccctcttttctggaagaggacgtggtggatggcgctgatacttttgactcgtcgtttttcagcaaagaggagatgtcgagcatgcccgacgatgtatttgaaagccctcctctatctgctagctactttcgaggaatcccacatagcgcttccccagtgtctcccgacggtgttcagatccctctaaaagaatacggccgtgctccagtgcctgggcctcgaagggggaaacgcatcgcctccaaagtcaagcattttgctttcgatcggaaaaaacggcattatgggctgggggtggtgggcaactggctaaatagatcctatagaaggtccatttcctctacggtccaacggcagctggagtctttcgacagccacaggccctacttcacctactggctgacctttgtgcatgtcattataactctcttggtcatatgcacctatggtattgctcccgtgggctttgcacaacatgtgacaacgcagctggttctgaggaacaagggtgtttatgaatccgtcaaatacattcaacaggagaacttttgggtgggccctagcagcatcgatttaattcatttgggcgctaaattcagcccctgtatccgcaaagacggtcaaattgaacagctcgtgttgcgcgagcgcgacctggaaagggactcaggatgttgtgtgcagaacgaccatagcggatgtattcagacccagcggaaagattgtagcgaaaccctggctacgttcgtaaaatggcaggatgatacagggccacccatggataaaagcgacttgggccagaagagaacctcaggagcggtttgtcaccaggaccctcggacatgcgaagaaccggcttcctctggagcacatatctggcccgacgatatcacgaagtggccaatttgcacagaacaggctcgcagtaatcacacaggttttttacatatggactgcgaaataaagggcaggccatgctgcatcgggacaaagggatcctgtgagattacgactcgcgagtattgcgagtttatgcatggatatttccacgaagaagcaacactgtgcagtcaggtgcattgtcttgataaagtttgcggcctgttaccctttctgaatccggaggtgcctgatcagttttacaggctttggctgtctctttttctgcatgcaggagtggtccactgcctggtcagtgtggtatttcaaatgacaattctgagggatcttgaaaagttggccggatggcaccggattgccattatttttatcctctccggaataactggtaatctggcgtcggctatttttctgccttacagggccgaggtcggccctgccggttcgcagttcggtcttctggcctgtcttttcgtggaactgttccaaagctggccccttctggagcgcccatggaaagcttttctaaacctgtccgctatagtgctgttcctttttatctgcgggctgctcccttggattgacaatattgcccacatctttgggtttctgtctgggctgcttctcgccttcgctttcctaccctatatcacctttggcacttctgacaagtacaggaagagggccctaattttagtcagcttgctggccttcgcgggactatttgcagccctggtgctgtggctctacatatacccaatcaactggccgtggatcgagcatttgacatgtttccctttcaccagccgattttgcgaaaagtacgagctggaccaggtgcttcactag

SEQ ID NO: 21764 - DNA, 2151 bp, Artificial Sequence
  derived and/or modified sequence
cctggaagctcacggtccaggcacccacttttactgctgatctggtcccttggtagttctcagggtcctcatagacaaattcgccctccaccaccctgcagacacgccggaacacacgtgccgagtcctttgccccatacccaagtgcaccggaggcggcaagcgtacgcccacctgtcactggtgtgcttccggagaggggcagctcagtggtttggagtcagcggggactgggaaggacagaggcaacagtggcagcgacgctccctgcatcactgtagtatgcgatacggccgactgaaagcctcatgccagagggatttggaactgccatctcaagaggccccttcttttcaaggaaccgaaagtcctaaaccctgcaagatgcctaaaattgtagaccccttggcgaggggcagggcctttcggcatcctgaagaaatggaccgccctcacgcaccccacccccctcttacacccggagttcttagtttaacttccttcacatcagtccgcagcggctactcccacctgccgaggagaaagcgcatgagtgtggcgcacatgtcactgcaagccgctgccgcactgctgaagggacgctcagtgttggacgccaccggacagaggtgtcgggtagtgaagaggtcatttgctttccctagttttcttgaagaggacgtcgtggacggtgctgacacctttgactccagtttctttagcaaagaggagatgagctctatgccggacgacgtgttcgagagtcccccactgtccgcatcatatttccgcggtatcccgcattcagccagtcccgtcagccctgatggggtgcagattccccttaaagagtacggaagggcacctgtccccggtccaaggcgagggaagcgcatcgcctcaaaggtgaagcatttcgctttcgaccggaagaagagacattatggcctgggagtcgtcggaaactggcttaacaggtcttatcgccgttccattagctcaacagtacagcgtcagctggaatcatttgacagtcaccgaccttattttacctactggttgacattcgtgcacgttatcataacattattggtcatctgtacgtacggtatagcgcctgttggctttgcccagcacgtcacaactcaactcgttttaaggaacaaaggggtatacgaatcagttaagtatatccagcaggaaaacttctgggtagggccatcttcaatcgatctgattcacctaggcgcaaagttctcaccgtgcatccgcaaggacggtcaaatcgaacagctcgttctcagggaaagagatctagaaagggattctggttgttgcgtccagaacgatcacagcggttgtattcagacccagcggaaagactgtagtgaaacactagcaacattcgtgaagtggcaagatgacacaggccctccaatggataaatctgacctcggtcagaaaagaacgagcggggctgtgtgccaccaggatccgaggacttgcgaagaacccgcatcttctggcgcacacatctggcccgacgatattaccaagtggccaatatgcacagaacaagcgagaagcaaccataccggctttctccatatggactgtgagatcaagggtagaccctgttgcatcggtactaagggcagctgcgagataactacacgcgaatattgcgaattcatgcacggctacttccacgaggaggctactctgtgcagtcaggtgcactgtctggacaaagtctgtggactgcttcccttccttaaccccgaggtacccgaccagttctaccggctatggctgtccttgttcctacacgcaggtgtagtccattgtctggtctcagttgtctttcaaatgaccattctcagagaccttgagaaactggctggctggcatcggattgcgatcatttttatccttagcggtataaccggaaacctggcatcagcaatttttctgccctacagggcggaagtccgcatgtggagaatgggacctctccctcacattggaggacagccttgttgttcttactcaacccatctcggatcagctcgcggtacacgatgtccttcctgtaccggtctgcacagtggaggaactgccaacctgggtgcatattggctggtgtcatag

SEQ ID NO: 21765 - DNA, 3516 bp, Artificial Sequence
  derived and/or modified sequence
cccgaggagccaccgcccagccgctcgcaggcgccgcacggagttgcgtcccggggacttggggccgcagggagctgtgagtacccaggaagctgcaccgtgtggcctggagctgtctatctgtccttccagccacctgtctgtccagccacccttccacagactgaggcttgacaccggagcatctgtacagagcaaggagaagacaagaacatgctctaaagcccttcacagcaagacccaggaagccgcgggcaaactcagactcgaagccctcccgcctcctgcccacaatggcctctgctgacaagaatggcgggagcgtgtcctctgtgtccagcagccgcctgcagagccggaagccacccaacctctccatcaccatcccgccacccgagaaagagacccaggcccctggcgagcaggacagcatgctgcctgagaggaagaacccagcctacttgaagagcgtcagcctccaggagccacgcagccgatggcaggagagttcagagaagcgccctggcttccgccgccaggcctcactgtcccagagcatccgcaagggcgcagcccagtggtttggagtcagcggcgactgggaggggcagcggcagcagtggcagcgccgcagcctgcaccactgcagcatgcgctacggccgcctgaaggcctcgtgccagcgtgacctggagctccccagccaggaggcaccgtccttccagggcactgagtccccaaagccctgcaagatgcccaagattgtggatccgctggcccggggccgggccttccgccacccggaggagatggacaggccccacgccccgcacccaccgctgacccccggagtcctgtccctcacctccttcaccagtgtccgttctggctactcccacctgccacgccgcaagagaatgtctgtggcccacatgagcttgcaagctgccgctgccctcctcaaggggcgctcggtgctggatgccaccggacagcggtgccgggtggtcaagcgcagctttgccttcccgagcttcctggaggaggatgtggtcgatggggcagacacgtttgactcctccttttttagtaaggaagaaatgagctccatgcctgatgatgtctttgagtcccccccactctctgccagctacttccgagggatcccacactcagcctcccctgtctcccccgatggggtgcaaatccctctgaaggagtatggccgagccccagtccccgggccccggcgcggcaagcgcatcgcctccaaggtgaagcactttgcctttgatcggaagaagcggcactacggcctcggcgtggtgggcaactggctgaaccgcagctaccgccgcagcatcagcagcactgtgcagcggcagctggagagcttcgacagccaccggccctacttcacctactggctgaccttcgtccatgtcatcatcacgctgctggtgatttgcacgtatggcatcgcacccgtgggctttgcccagcacgtcaccacccagctggtgctgcggaacaaaggtgtgtacgagagcgtgaagtacatccagcaggagaacttctgggttggccccagctcgattgacctgatccacctgggggccaagttctcaccctgcatccggaaggacgggcagatcgagcagctggtgctgcgcgagcgagacctggagcgggactcaggctgctgtgtccagaatgaccactccggatgcatccagacccagcggaaggactgctcggagactttggccacttttgtcaagtggcaggatgacactgggccccccatggacaagtctgatctgggccagaagcggacttcgggggctgtctgccaccaggaccccaggacctgcgaggagccagcctccagcggtgcccacatctggcccgatgacatcactaagtggccgatctgcacagagcaggccaggagcaaccacacaggcttcctgcacatggactgcgagatcaagggccgcccctgctgcatcggcaccaagggcagctgtgagatcaccacccgggaatactgtgagttcatgcacggctatttccatgaggaagcaacactctgctcccaggtgcactgcttggacaaggtgtgtgggctgctgcccttcctcaaccctgaggtcccagatcagttctacaggctctggctgtctctcttcctacatgctggcgtggtgcactgcctcgtgtctgtggtctttcaaatgaccatcctgagggacctggagaagctggccggctggcaccgtatcgccatcatcttcatcctcagtggcatcacaggcaacctcgccagtgccatctttctcccataccgggcagaggtgggcccggccggctcacagttcggcctcctcgcctgcctcttcgtggagctcttccagagctggccgctgctggagaggccctggaaggccttcctcaacctctcggccatcgtgctcttcctgttcatctgtggcctcctgccctggatcgacaacatcgcccacatcttcggcttcctcagtggcctgctgctggccttcgccttcctgccctacatcaccttcggcaccagcgacaagtaccgcaagcgggcactcatcctggtgtcactgctggcctttgccggcctcttcgccgccctcgtgctgtggctgtacatctaccccattaactggccctggatcgagcacctcacctgcttccccttcaccagccgcttctgcgagaagtatgagctggaccaggtgctgcactgaccgctgggccacacggctgcccctcagccctgctggaacagggtctgcctgcgagggctgccctctgcagagcgctctctgtgtgccagagagccagagacccaagacagggcccgggctctggacctgggtgcccccctgccaggcgaggctgactccgcgtgagatggttggttaaggcggggtttttctggggcgtgaggcctgtgagatcctgacccaagctcaggcacacccaaggcacctgcctctctgagtcttgggtctcagttcctaatatcccgctccttgctgagaccatctcctggggcagggtccttttcttcccaggtcctcagcgctgcctctgctggtgccttctcccccactactactggagcgtgcccttgctggggacgtggctgtgccctcagttgcccccagggctgggtgcccaccatgccccttcctctttctcctcctacctctgccctgtgagcccatccataaggctctcagatgggacattgtgggaaaggctttggccatggtctgggggcagagaacaaggggggagacacaagtagacctcaggtagaacgacactgggcggagccaccccagggcctgctcccagggagtgctcgaggcgcatcaggcccgttttttaccagtttatatcacggtcttcatttttaaaagtaacgctaactttgtacggacgatgtctcatggattaaataatattctttatggcagt

SEQ ID NO: 21766 - DNA, 4539 bp, Artificial Sequence
  derived and/or modified sequence
gaaatctttgcattcatcaaaaaagacaagaggcctagggccgggtgtgctgggattacaggcgtgagccaccgcgcccagccgcccagagatgtttgaaccaactttaggcaagttggttcttggtctgggctgcgtgccctggcgtcagggtcctgacactgcgccaccccgcaccgcccaccgctgctctcccggtctccattccagccctcccgcctcctgcccacaatggcctctgctgacaagaatggcgggagcgtgtcctctgtgtccagcagccgcctgcagagccggaagccacccaacctctccatcaccatcccgccacccgagaaagagacccaggcccctggcgagcaggacagcatgctgcctgagaggaagaacccagcctacttgaagagcgtcagcctccaggagccacgcagccgatggcaggagagttcagagaagcgccctggcttccgccgccaggcctcactgtcccagagcatccgcaagtgagcccccctacacccaagcccagcaccccccacccagcaacctgtggattctcggggcctggacatgattgggcctggtccctgcgtcccctctctggaaggaggaggccggcattaatgagcaatgtctccctgtggcctattatcatggtatagatggggaaatgggtatgtgctttgcggaatatcacggtgtggaggctggggggcttcgaggagctgggtggatcagtgtgggggtgcctggggccctagcctggctcctcacgctcccgtcatcccctgcttctgctcatctggtcactgggctccagccaggggcctcacaggcagatccgccccccacctccctgtaggcacgcgggcacacacgtgccatcaccccttccacacactcaggtgcacaggcgtagacaagcgtatgcccacctgtcccttgtctgcttccgcaggggcgcagcccagtggtttggagtcagcggcgactgggaggggcagcggcagcagtggcagcgccgcagcctgcaccactgcagcatgcgctacggccgcctgaaggcctcgtgccagcgtgacctggagctccccagccaggaggcaccgtccttccagggcactgagtccccaaagccctgcaagatgcccaagattgtggatccgctggcccggggccgggccttccgccacccggaggagatggacaggccccacgccccgcacccaccgctgacccccggagtcctgtccctcacctccttcaccagtgtccgttctggctactcccacctgccacgccgcaagagaatgtctgtggcccacatgagcttgcaagctgccgctgccctcctcaaggggcgctcggtgctggatgccaccggacagcggtgccgggtggtcaagcgcagctttgccttcccgagcttcctggaggaggatgtggtcgatggggcagacacgtttgactcctccttttttagtaaggaagaaatgagctccatgcctgatgatgtctttgagtcccccccactctctgccagctacttccgagggatcccacactcagcctcccctgtctcccccgatggggtgcaaatccctctgaaggagtatggccgagccccagtccccgggccccggcgcggcaagcgcatcgcctccaaggtgaagcactttgcctttgatcggaagaagcggcactacggcctcggcgtggtgggcaactggctgaaccgcagctaccgccgcagcatcagcagcactgtgcagcggcagctggagagcttcgacagccaccggccctacttcacctactggctgaccttcgtccatgtcatcatcacgctgctggtgatttgcacgtatggcatcgcacccgtgggctttgcccagcacgtcaccacccagctggtgctgcggaacaaaggtgtgtacgagagcgtgaagtacatccagcaggagaacttctgggttggccccagctcgattgacctgatccacctgggggccaagttctcaccctgcatccggaaggacgggcagatcgagcagctggtgctgcgcgagcgagacctggagcgggactcaggctgctgtgtccagaatgaccactccggatgcatccagacccagcggaaggactgctcggagactttggccacttttgtcaagtggcaggatgacactgggccccccatggacaagtctgatctgggccagaagcggacttcgggggctgtctgccaccaggaccccaggacctgcgaggagccagcctccagcggtgcccacatctggcccgatgacatcactaagtggccgatctgcacagagcaggccaggagcaaccacacaggcttcctgcacatggactgcgagatcaagggccgcccctgctgcatcggcaccaagggcagctgtgagatcaccacccgggaatactgtgagttcatgcacggctatttccatgaggaagcaacactctgctcccaggtgcactgcttggacaaggtgtgtgggctgctgcccttcctcaaccctgaggtcccagatcagttctacaggctctggctgtctctcttcctacatgctggcgtggtgcactgcctcgtgtctgtggtctttcaaatgaccatcctgagggacctggagaagctggccggctggcaccgtatcgccatcatcttcatcctcagtggcatcacaggcaacctcgccagtgccatctttctcccataccgggcagaggtaaggatgtggaggatgggaccccttccgcacatagggggccagccctgctgctcctattccacccacctgggatctgccagagggacacggtgcccctcctgtactgggctccacagcggagggacagctaatctgggggcttactggctggtctcttaatcccagtgagagggaacagtgatgctcttgagtcaccctgtccctccaccgcctcatttatcttcctaaccgtgcccactgcctgacagtatgctaggtatctgcaggtcgagcggtaggaaatggcctccgtgcgccgtcggcagtctgatcagttccacctgactgatctagtttgttcagtgtccgtcctctccccaccgtgtgcggcctggaacaggcttgtctgtcttgcttattgctacggacccacaccaggcacgtacacagtaggcgctcagtgtttgctgaaagaatgggcggagcaggcccagctttggtccagcagctccagccgaccccctgcccctcagcctcaggggtccccatgcctgccagggaggagctgatcgatgggatgacccagggtgcaggcccggcccaggccacccacctgatgcctgaagccacgtctcccctgccccgccccaggtgggcccggccggctcacagttcggcctcctcgcctgcctcttcgtggagctcttccagagctggccgctgctggagaggccctggaaggccttcctcaacctctcggccatcgtgctcttcctgttcatctgtggcctcctgccctggatcgacaacatcgcccacatcttcggcttcctcagtggcctgctgctggccttcgccttcctgccctacatcaccttcggcaccagcgacaagtaccgcaagcgggcactcatcctggtgtcactgctggcctttgccggcctcttcgccgccctcgtgctgtggctgtacatctaccccattaactggccctggatcgagcacctcacctgcttccccttcaccagccgcttctgcgagaagtatgagctggaccaggtgctgcactgaccgctgggccacacggctgcccctcagccctgctggaacagggtctgcctgcgagggctgccctctgcagagcgctctctgtgtgccagagagccagagacccaagacagggcccgggctctggacctgggtgcccccctgccaggcgaggctgactccgcgtgagatggttggttaaggcggggtttttctggggcgtgaggcctgtgagatcctgacccaagctcaggcacacccaaggcacctgcctctctgagtcttgggtctcagttcctaatatcccgctccttgctgagaccatctcctggggcagggtccttttcttcccaggtcctcagcgctgcctctgctggtgccttctcccccactactactggagcgtgcccttgctggggacgtggctgtgccctcagttgcccccagggctgggtgcccaccatgccccttcctctttctcctcctacctctgccctgtgagcccatccataaggctctcagatgggacattgtgggaaaggctttggccatggtctgggggcagagaacaaggggggagacacaagtagacctcaggtagaacgacactgggcggagccaccccagggcctgctcccagggagtgctcgaggcgcatcaggcccgttttttaccagtttatatcacggtcttcatttttaaaagtaacgctaactttgtacggacgatgtctcatggattaaataatattctttatggc

SEQ ID NO: 21767 - DNA, 2484 bp, Artificial Sequence
  derived and/or modified sequence
atggccagcgccgacaagaacggcggcagcgtgagcagcgtgagcagcagcagactgcagagcagaaagccccccaacctgagcatcaccatccccccccccgagaaggagacccaggcccccggcgagcaggacagcatgctgcccgagagaaagaaccccgcctacctgaagagcgtgagcctgcaggagcccagaagcagatggcaggagagcagcgagaagagacccggcttcagaagacaggccagcctgagccagagcatcagaaagggcgccgcccagtggttcggcgtgagcggcgactgggagggccagagacagcagtggcagagaagaagcctgcaccactgcagcatgagatacggcagactgaaggccagctgccagagagacctggagctgcccagccaggaggcccccagcttccagggcaccgagagccccaagccctgcaagatgcccaagatcgtggaccccctggccagaggcagagccttcagacaccccgaggagatggacagaccccacgccccccacccccccctgacccccggcgtgctgagcctgaccagcttcaccagcgtgagaagcggctacagccacctgcccagaagaaagagaatgagcgtggcccacatgagcctgcaggccgccgccgccctgctgaagggcagaagcgtgctggacgccaccggccagagatgcagagtggtgaagagaagcttcgccttccccagcttcctggaggaggacgtggtggacggcgccgacaccttcgacagcagcttcttcagcaaggaggagatgagcagcatgcccgacgacgtgttcgagagcccccccctgagcgccagctacttcagaggcatcccccacagcgccagccccgtgagccccgacggcgtgcagatccccctgaaggagtacggcagagcccccgtgcccggccccagaagaggcaagagaatcgccagcaaggtgaagcacttcgccttcgacagaaagaagagacactacggcctgggcgtggtgggcaactggctgaacagaagctacagaagaagcatcagcagcaccgtgcagagacagctggagagcttcgacagccacagaccctacttcacctactggctgaccttcgtgcacgtgatcatcaccctgctggtgatctgcacctacggcatcgcccccgtgggcttcgcccagcacgtgaccacccagctggtgctgagaaacaagggcgtgtacgagagcgtgaagtacatccagcaggagaacttctgggtgggccccagcagcatcgacctgatccacctgggcgccaagttcagcccctgcatcagaaaggacggccagatcgagcagctggtgctgagagagagagacctggagagagacagcggctgctgcgtgcagaacgaccacagcggctgcatccagacccagagaaaggactgcagcgagaccctggccaccttcgtgaagtggcaggacgacaccggcccccccatggacaagagcgacctgggccagaagagaaccagcggcgccgtgtgccaccaggaccccagaacctgcgaggagcccgccagcagcggcgcccacatctggcccgacgacatcaccaagtggcccatctgcaccgagcaggccagaagcaaccacaccggcttcctgcacatggactgcgagatcaagggcagaccctgctgcatcggcaccaagggcagctgcgagatcaccaccagagagtactgcgagttcatgcacggctacttccacgaggaggccaccctgtgcagccaggtgcactgcctggacaaggtgtgcggcctgctgcccttcctgaaccccgaggtgcccgaccagttctacagactgtggctgagcctgttcctgcacgccggcgtggtgcactgcctggtgagcgtggtgttccagatgaccatcctgagagacctggagaagctggccggctggcacagaatcgccatcatcttcatcctgagcggcatcaccggcaacctggccagcgccatcttcctgccctacagagccgaggtgggccccgccggcagccagttcggcctgctggcctgcctgttcgtggagctgttccagagctggcccctgctggagagaccctggaaggccttcctgaacctgagcgccatcgtgctgttcctgttcatctgcggcctgctgccctggatcgacaacatcgcccacatcttcggcttcctgagcggcctgctgctggccttcgccttcctgccctacatcaccttcggcaccagcgacaagtacagaaagagagccctgatcctggtgagcctgctggccttcgccggcctgttcgccgccctggtgctgtggctgtacatctaccccatcaactggccctggatcgagcacctgacctgcttccccttcaccagcagattctgcgagaagtacgagctggaccaggtgctgcactag

SEQ ID NO: 21768 - DNA, 2151 bp, Artificial Sequence
  derived and/or modified sequence
cccggcagcagcagaagcagacaccccctgctgctgctgatctggagcctgggcagcagccagggcccccacagacagatcagacccccccccccctgcagacacgccggcacccacgtgcccagccccctgccccacacccaggtgcacagaagaagacaggcctacgcccacctgagcctggtgtgcttcagaagaggcgccgcccagtggttcggcgtgagcggcgactgggagggccagagacagcagtggcagagaagaagcctgcaccactgcagcatgagatacggcagactgaaggccagctgccagagagacctggagctgcccagccaggaggcccccagcttccagggcaccgagagccccaagccctgcaagatgcccaagatcgtggaccccctggccagaggcagagccttcagacaccccgaggagatggacagaccccacgccccccacccccccctgacccccggcgtgctgagcctgaccagcttcaccagcgtgagaagcggctacagccacctgcccagaagaaagagaatgagcgtggcccacatgagcctgcaggccgccgccgccctgctgaagggcagaagcgtgctggacgccaccggccagagatgcagagtggtgaagagaagcttcgccttccccagcttcctggaggaggacgtggtggacggcgccgacaccttcgacagcagcttcttcagcaaggaggagatgagcagcatgcccgacgacgtgttcgagagcccccccctgagcgccagctacttcagaggcatcccccacagcgccagccccgtgagccccgacggcgtgcagatccccctgaaggagtacggcagagcccccgtgcccggccccagaagaggcaagagaatcgccagcaaggtgaagcacttcgccttcgacagaaagaagagacactacggcctgggcgtggtgggcaactggctgaacagaagctacagaagaagcatcagcagcaccgtgcagagacagctggagagcttcgacagccacagaccctacttcacctactggctgaccttcgtgcacgtgatcatcaccctgctggtgatctgcacctacggcatcgcccccgtgggcttcgcccagcacgtgaccacccagctggtgctgagaaacaagggcgtgtacgagagcgtgaagtacatccagcaggagaacttctgggtgggccccagcagcatcgacctgatccacctgggcgccaagttcagcccctgcatcagaaaggacggccagatcgagcagctggtgctgagagagagagacctggagagagacagcggctgctgcgtgcagaacgaccacagcggctgcatccagacccagagaaaggactgcagcgagaccctggccaccttcgtgaagtggcaggacgacaccggcccccccatggacaagagcgacctgggccagaagagaaccagcggcgccgtgtgccaccaggaccccagaacctgcgaggagcccgccagcagcggcgcccacatctggcccgacgacatcaccaagtggcccatctgcaccgagcaggccagaagcaaccacaccggcttcctgcacatggactgcgagatcaagggcagaccctgctgcatcggcaccaagggcagctgcgagatcaccaccagagagtactgcgagttcatgcacggctacttccacgaggaggccaccctgtgcagccaggtgcactgcctggacaaggtgtgcggcctgctgcccttcctgaaccccgaggtgcccgaccagttctacagactgtggctgagcctgttcctgcacgccggcgtggtgcactgcctggtgagcgtggtgttccagatgaccatcctgagagacctggagaagctggccggctggcacagaatcgccatcatcttcatcctgagcggcatcaccggcaacctggccagcgccatcttcctgccctacagagccgaggtgagaatgtggagaatgggccccctgccccacatcggcggccagccctgctgcagctacagcacccacctgggcagcgccagaggcaccagatgccccagctgcaccggcctgcacagcggcggcaccgccaacctgggcgcctactggctggtgagctag

SEQ ID NO: 21769 - protein, 443 aa, Artificial Sequence
  derived and/or modified sequence
MDFPCLWLGLLLPLVAALDFNYHRQEGMEAFLKTVAQNYSSVTHLHSIGKSVKGRNLWVLVVGRFPKEHRIGIPEFKYVANMHGDETVGRELLLHLIDYLVTSDGKDPEITNLINSTRIHIMPSMNPDGFEAVKKPDCYYSIGRENYNQYDLNRNFPDAFEYNNVSRQPETVAVMKWLKTETFVLSANLHGGALVASYPFDNGVQATGALYSRSLTPDDDVFQYLAHTYASRNPNMKKGDECKNKMNFPNGVTNGYSWYPLQGGMQDYNYIWAQCFEITLELSCCKYPREEKLPSFWNNNKASLIEYIKQVHLGVKGQVFDQNGNPLPNVIVEVQDRKHICPYRTNKYGEYYLLLLPGSYIINVTVPGHDPHITKVIIPEKSQNFSALKKDILLPFQGQLDSIPVSNPSCPMIPLYRNLPDHSAATKPSLFLFLVSLLHIFFK

SEQ ID NO: 21770 - protein, 136 aa, Artificial Sequence
  derived and/or modified sequence
MDFPCLWLGLLLPLVAALDFNYHRQEGMEAFLKTVAQNYSSVTHLHSIGKSVKGRNLWVLVVGRFPKEHRIGIPEFKYVANMHGDETVGRELLLHLIDYLVTSDGKDPEITNLINSTRIHIMPSMNPDGFEAVKKP

SEQ ID NO: 21771 - protein, 249 aa, Artificial Sequence
  derived and/or modified sequence
MDFPCLWLGLLLPLVAALDFNYHRQEGMEAFLKTVAQNYSSVTHLHSIGKSVKGRNLWVLVVGRFPKEHRIGIPEFKYVANMHGDETVGRELLLHLIDYLVTSDGKDPEITNLINSTRIHIMPSMNPDGFEAVKKPDCYYSIGRENYNQYDLNRNFPDAFEYNNVSRQPETVAVMKWLKTETFVLSANLHGGALVASYPFDNGVQATGALYSRSLTPDDDVFQYLAHTYASRNPNMKKGDECKNKMNFP

SEQ ID NO: 21772 - DNA, 1332 bp, Artificial Sequence
  derived and/or modified sequence
atggattttccttgcctatggctgggcctcctcctgccgttggtggccgctctagattttaactaccacagacaagagggcatggaagcgttcctgaagaccgttgcccagaattactccagcgtgacccacctgcatagtattgggaagagtgttaaagggcgcaacctgtgggtgttggtggttggcaggttccccaaagagcatcgcatcggcattcccgagttcaagtacgttgctaacatgcacggggatgagacagtcgggcgcgagttgctactacatctcatcgattaccttgtaacctctgacgggaaggacccagaaattaccaatctgattaatagtaccaggattcatattatgccatctatgaaccctgatgggtttgaggcagtcaagaagcccgattgctattatagcatcggacgggagaactacaaccaatacgatcttaatcgaaacttccccgacgctttcgagtataacaatgtgtcgcgccagcccgaaacagtggcagtgatgaaatggttaaagaccgaaacattcgttctgagcgcgaatctgcatggaggggctcttgtggcctcctaccctttcgacaacggagtgcaggcgacaggggctctctactcacgatctctgacccctgatgatgacgtgttccaatacttggcacacacgtatgcatcccgcaatcccaatatgaagaagggcgacgagtgcaagaacaagatgaattttcctaacggagtaaccaacggctatagctggtacccactgcagggcgggatgcaagattataattatatttgggcccagtgttttgagattaccttggagctttcttgttgcaaataccctcgagaggaaaagttgccaagtttttggaacaacaacaaagcttctcttatagaatatataaagcaggtgcatctgggcgtgaagggccaggtgttcgatcagaacggtaaccctctcccgaacgtgatcgtggaggtccaagacagaaagcacatttgcccgtacaggacgaataagtacggagaatattatcttcttctgctgcctggctcctatatcatcaacgtcactgtgcctgggcatgacccccatattactaaggtgataatccccgagaaatcccagaatttcagtgctctcaaaaaggacatattgctccctttccagggccaattagacagtatcccagtaagtaatcccagttgtcccatgatccccctgtatcgcaacctgcctgatcactccgcagcaactaaaccttccctgtttctatttcttgtgagtcttctccatatattctttaagtag

SEQ ID NO: 21773 - DNA, 1332 bp, Artificial Sequence
  derived and/or modified sequence
atggacttcccatgcctgtggctgggcctgttgcttcctctcgtggccgccctggacttcaattatcacaggcaggagggaatggaggccttcctgaaaaccgtcgcacagaactacagcagtgtaactcacctacactcgattggtaagagcgtcaagggtcggaacctgtgggttctggtcgtgggcaggtttccaaaagaacacagaatcggcatacccgagtttaagtatgtagctaacatgcatggggatgaaacggtgggcagagagctcctgctacatcttattgattacctggtgacgtcagacgggaaggacccagaaattaccaatctcataaacagcacgagaatccatattatgccctcaatgaatccggacggatttgaggccgtcaagaaacctgactgttactactccatcggccgcgaaaactataaccaatacgacttgaacaggaatttccccgacgcgtttgagtacaacaacgtatctcgccagcctgaaactgttgccgtaatgaaatggctgaaaactgaaacatttgttctgagtgcaaatctccacggcggtgcacttgttgcaagctatccctttgataacggcgtgcaggcaacaggggcactctatagcaggtccctgacaccagacgatgacgtgtttcagtatttggcacatacctacgcttcaagaaacccaaacatgaagaagggggatgaatgtaagaataaaatgaactttcccaatggtgtgaccaatggatacagttggtatcccctccaagggggaatgcaagactataattacatctgggctcaatgtttcgaaattacattagaattaagttgctgtaagtatcccagggaagagaagctgccttctttctggaacaataacaaggcttctctgatcgaatatatcaaacaggtgcaccttggcgtaaaagggcaggttttcgatcagaatggcaacccacttccaaacgttattgtggaagtacaggacaggaaacatatctgcccgtacagaacaaataaatacggagaatattatctgttactgctccctgggagttacatcatcaatgtgactgtgccaggccacgaccctcatatcactaaggtgatcatcccggagaagtctcaaaacttttcagccctgaagaaggacatattactacctttccaaggccagctcgactcaatccccgtatccaacccttcatgtcccatgattccattgtatagaaatctccccgaccattctgccgcgaccaaaccatcactgtttctatttctcgtgagcctgctgcacatcttcttcaagtag

SEQ ID NO: 21774 - DNA, 1332 bp, Artificial Sequence
  derived and/or modified sequence
atggactttccatgcctgtggctaggtctcctcctgcctctcgtggcagccctggacttcaattatcatcgccaagaggggatggaggccttcctaaagacggtggcacagaactatagtagtgtcacccacttacactctatcgggaagtcagtgaaaggaaggaatctgtgggtgcttgtggtcggaaggttccctaaggaacacaggatcggaattcctgagttcaaatatgtcgctaacatgcacggagatgagacggtgggtcgagaactgctattgcacttgatagactatctcgtcactagtgacggcaaggaccccgaaatcacgaatctaatcaattcgacaagaattcacatcatgccgagcatgaaccctgacggattcgaagccgtgaaaaagcccgattgttattattcgatcggaagagaaaactacaaccaatacgatctgaacagaaatttcccagatgcctttgagtataataacgtgtcacgtcaacccgagaccgtagccgtcatgaaatggctgaaaactgagacgtttgtgctctctgcaaacctgcacggaggcgcccttgtagcatcatacccatttgataacggggtccaggcaacaggtgccctgtactcacgcagcctgactcccgacgacgacgtcttccagtacttagctcatacctacgccagcagaaatccaaacatgaagaagggtgatgaatgcaaaaacaagatgaactttcccaatggagtgacaaacggatactcctggtatcctctgcaggggggcatgcaagattataactacatatgggcccagtgcttcgaaattactctcgagctgagctgctgcaaataccctcgagaggagaaactgccctctttctggaacaacaataaggcatctcttatcgagtacatcaaacaagtccatcttggcgtgaaaggacaggtgttcgatcaaaatggcaatccgctccctaacgtgatcgttgaggtgcaggacaggaaacatatttgtccatatcgcactaacaagtatggggaatactatctgctgctcttgcccggctcatatatcattaatgttaccgtgcctggccacgatccccatattacaaaagtcattatccccgagaagagccaaaacttttccgccctcaagaaagatatcctgctcccatttcaaggacagctggattcaatccctgtttcgaacccttcctgtcccatgattcccctgtaccgcaacttgcctgaccacagtgccgcaacaaaaccctcattatttttgtttctggtcagtttactgcacatttttttcaagtag

SEQ ID NO: 21775 - DNA, 411 bp, Artificial Sequence
  derived and/or modified sequence
atggatttcccctgcctgtggttgggtttgttactcccccttgtggccgccctcgactttaactaccaccgtcaagaaggcatggaggcattcttgaagaccgtggctcagaactattcctcagttacgcacctccatagcatcggcaagtccgtgaagggaagaaatctctgggtgttagttgttgggaggtttcctaaggaacaccggatcggcattcccgaattcaaatatgtggctaacatgcatggcgatgaaacagtcggaagggaactgttgctgcatttgatcgactacctggtgacgagcgacgggaaagatcctgagattactaacctgattaactctactcgcatccatataatgccctccatgaacccagacggatttgaagctgtgaagaaaccatag

SEQ ID NO: 21776 - DNA, 750 bp, Artificial Sequence
  derived and/or modified sequence
atggacttcccctgcctgtggctcgggctgctcttaccactcgtagctgccctggatttcaactaccacagacaggaaggcatggaagcgtttctcaaaacagtggcccagaattattcttccgttacacatctacactccatcgggaagtcagtgaaggggcgaaacctgtgggtgctggttgtcggaagatttccgaaagagcacagaatcggtattccagaatttaagtatgtggcaaatatgcacggagatgaaacagtcgggcgagagctcctgctacacctgattgactacctcgtcacgtcggatggaaaagatccggagattacgaacctcattaactcaacacgcattcatatcatgccatctatgaatcctgatggctttgaagctgtcaagaaaccagattgctattactctatcggcagagaaaattacaaccagtacgatctcaacagaaactttcctgacgccttcgagtataataatgtttcaaggcagccagaaacggtagctgtgatgaagtggctgaagacagagacattcgtactgtcagcgaatctccacggtggggcgttggtggcttcttatcctttcgacaacggtgtccaggccacgggagcgctttactccaggtcgctcaccccagacgatgatgttttccagtatctcgcacacacatacgcctcacggaaccccaacatgaaaaagggcgacgaatgtaaaaacaagatgaactttccatag

SEQ ID NO: 21777 - DNA, 1332 bp, Artificial Sequence
  derived and/or modified sequence
atggactttccatgtctttggctaggtctcctcctgcctctggtcgccgccctcgacttcaattaccaccgacaagagggcatggaagcattcctgaaaacggtggctcagaactatagttccgtgacccacctacacagcatcggtaaaagcgtcaaggggcgcaacctgtgggtcctcgtcgtgggccgtttccctaaagaacacagaatcgggatacccgagtttaagtatgtcgctaacatgcatggcgatgaaactgtagggagagaactgttgttacacctcatcgactatcttgtaacttctgacggtaaggatccagagatcaccaatctgattaattcaacgcgaatccatattatgccatctatgaaccccgacggctttgaagcagtcaaaaagcctgactgctactattcgataggacgcgaaaactacaatcaatatgaccttaatcgcaactttccggacgctttcgaatacaacaatgtgagcagacagccagagactgtggccgtcatgaagtggctgaagaccgagaccttcgtcctctccgccaatctccatggtggggccttggtagcaagttatccatttgacaacggggtacaggccactggggctctttactcccgatcattgactcctgacgacgacgtattccaatatctcgctcacacttatgccagcaggaaccccaatatgaaaaagggcgatgagtgtaaaaataagatgaacttccctaacggagtcacaaacgggtacagctggtacccactgcaggggggaatgcaggattacaattacatctgggcacaatgtttcgagattaccctggagctgtcatgctgtaagtatccccgagaagaaaagcttcctagcttctggaacaataataaagccagcttgatagaatacattaagcaggtccatttgggagtcaaaggacaagtgttcgatcaaaatgggaaccctctgcctaacgtgatcgttgaagttcaggatcgcaagcacatctgcccgtacagaacaaacaagtatggggagtactacttgctgttgctgccaggcagttatatcatcaatgtcactgttccaggacacgaccctcacattacaaaggtcatcatacctgagaaatctcagaacttcagcgccctcaagaaggatattttactacctttccagggtcagctggattcgatccctgtatccaatccttcatgtccgatgatccccctgtacagaaacctgccagatcatagtgcagccacaaaacccagcctttttctcttcctggtgtccctactgcatatcttttttaagtag

SEQ ID NO: 21778 - DNA, 1332 bp, Artificial Sequence
  derived and/or modified sequence
atggacttcccctgcctgtggctgggcctgctgctgcccctggtggccgccctggacttcaactaccaccggcaggagggcatggaggccttcctgaagacagtggcccagaactacagctctgtgacccacctgcacagcatcggcaagtctgtgaagggcaggaacctgtgggtgctggtggtgggccgcttccccaaggagcacagaattggcatccctgagttcaagtatgtggccaacatgcatggagatgaaacagtgggccgggagctgctgctgcacctgattgactacctggtgaccagtgatggcaaggaccctgagatcaccaacctgatcaacagcacccgcatccacatcatgcccagcatgaacccagatggctttgaggccgtgaagaagccagactgctactacagcatcggccgggagaactacaaccagtatgacctgaacagaaacttcccagatgcctttgagtacaacaacgtgtcccggcagcctgagaccgtggccgtgatgaagtggctgaagacagagacctttgtgctgagcgccaacctgcacggcggggccctggtggccagctacccctttgacaacggggtgcaggccactggagccctgtacagccgcagcctgaccccagatgatgatgtgttccagtacctggcccacacctacgccagcaggaaccccaacatgaagaagggagatgagtgcaagaacaagatgaacttccccaacggggtgaccaacggctacagctggtaccccctgcagggcggcatgcaggactacaactacatctgggcccagtgctttgagatcaccctggagctgagctgctgcaagtacccccgggaggagaagctgcccagcttctggaacaacaacaaggccagcctgattgagtacatcaagcaggtgcacctgggcgtgaagggccaggtgtttgaccagaatggaaaccccctgcccaacgtgattgtggaggtgcaggacaggaagcacatctgcccctaccgcaccaacaagtacggggagtactacctgctgctgctgcccggcagctacatcatcaacgtgacagtgcccggccatgacccccacatcaccaaggtgatcatccctgagaagagccagaacttcagcgccctgaagaaggacatcctgctgcccttccagggccagctggacagcatccctgtgagcaaccccagctgccccatgatccccctgtacagaaacctgcctgaccacagcgctgccaccaagcccagcctcttcctgttcctggtgtccctgctgcacatcttcttcaagtag

SEQ ID NO: 21779 - DNA, 411 bp, Artificial Sequence
  derived and/or modified sequence
atggacttcccctgcctgtggctgggcctgctgctgcccctggtggccgccctggacttcaactaccaccggcaggagggcatggaggccttcctgaagacagtggcccagaactacagctctgtgacccacctgcacagcatcggcaagtctgtgaagggcaggaacctgtgggtgctggtggtgggccgcttccccaaggagcacagaattggcatccctgagttcaagtatgtggccaacatgcatggagatgaaacagtgggccgggagctgctgctgcacctgattgactacctggtgaccagtgatggcaaggaccctgagatcaccaacctgatcaacagcacccgcatccacatcatgcccagcatgaacccagatggctttgaggccgtgaagaagccctag

SEQ ID NO: 21780 - DNA, 750 bp, Artificial Sequence
  derived and/or modified sequence
atggacttcccctgcctgtggctgggcctgctgctgcccctggtggccgccctggacttcaactaccaccggcaggagggcatggaggccttcctgaagacagtggcccagaactacagctctgtgacccacctgcacagcatcggcaagtctgtgaagggcaggaacctgtgggtgctggtggtgggccgcttccccaaggagcacagaattggcatccctgagttcaagtatgtggccaacatgcatggagatgaaacagtgggccgggagctgctgctgcacctgattgactacctggtgaccagtgatggcaaggaccctgagatcaccaacctgatcaacagcacccgcatccacatcatgcccagcatgaacccagatggctttgaggccgtgaagaagccagactgctactacagcatcggccgggagaactacaaccagtatgacctgaacagaaacttcccagatgcctttgagtacaacaacgtgtcccggcagcctgagaccgtggccgtgatgaagtggctgaagacagagacctttgtgctgagcgccaacctgcacggcggggccctggtggccagctacccctttgacaacggggtgcaggccactggagccctgtacagccgcagcctgaccccagatgatgatgtgttccagtacctggcccacacctacgccagcaggaaccccaacatgaagaagggagatgagtgcaagaacaagatgaacttcccctag

SEQ ID NO: 21781 - DNA, 1332 bp, Artificial Sequence
  derived and/or modified sequence
atggacttcccctgcctgtggctgggcctgctgctgcccctggtggcggctctggatttcaattatcatagacaggaagggatggaggccttcctgaaaactgttgcacaaaattattcatccgtgactcacctgcatagcatcggcaagtccgtcaaaggccgtaatctgtgggtgttggttgtgggtcggtttccaaaagaacatcggattgggatcccagagtttaagtacgtcgcgaacatgcatggcgatgagaccgtgggaagagaactcttattgcacctaattgattaccttgtcacatcagatggcaaggaccctgaaatcacaaacctcattaactccacccgcatacatatcatgccgtccatgaatcccgacggcttcgaagctgtcaaaaaaccagattgctactactctatcgggagagaaaattacaaccagtatgacctcaaccgtaacttccccgacgccttcgagtacaataatgtcagtaggcagcctgagacagtagccgtaatgaaatggcttaaaacagaaaccttcgtgctatcagccaacctacacggcggggcgctggtcgcttcctacccattcgacaatggcgtgcaagccactggagccctctattccaggtctttaacacccgacgacgatgtctttcagtacctggcccatacatacgccagcagaaaccctaatatgaagaagggcgatgaatgtaagaacaaaatgaactttcctaatggcgtaaccaacgggtactcatggtaccctctgcagggtggaatgcaggactataattacatttgggcccagtgttttgagattactctcgaactctcctgttgcaagtatccgcgcgaagaaaaactgccctcgttttggaacaataataaggcttcactcatcgagtatataaagcaggtgcatcttggtgtcaagggccaggtattcgaccagaatggcaatccactcccaaacgttatcgtggaggtgcaggatcgcaagcacatttgcccataccgcacaaacaagtatggtgaatactacctgctgctgttacccggttcatacataattaacgtaactgtcccgggacacgatcctcacattaccaaagttatcattcccgagaaaagccagaacttctcagccctgaagaaagatatcctgttgccattccaaggccagttggactccatcccagtgtccaacccctcgtgcccgatgatccctctgtatcgcaatttacccgatcacagtgccgcaacaaagccttcccttttcctgttcctggtgagcctcttgcatatattttttaaatag

SEQ ID NO: 21782 - DNA, 1332 bp, Artificial Sequence
  derived and/or modified sequence
atggacttcccctgcctgtggctgggcctgctgctgcccctggtggcggctctggattttaactatcacagacaagaaggcatggaagcctttttgaaaactgttgcccagaactattccagcgtgacacatctgcacagtatcggtaaaagcgtcaagggcaggaacctctgggtgctggtcgttggccgcttcccaaaggaacatcggatcggcatcccagagttcaaatacgttgcaaacatgcatggtgacgaaacggtcggccgcgaattactgctccacctcatcgactacctggttacctcagacggcaaggatccagaaataactaacctaatcaactctacccggatccatatcatgccaagcatgaatccagacggcttcgaggctgtgaaaaagcccgattgttactactcaattgggcgtgagaattataaccagtacgacttaaaccgcaactttccggatgccttcgagtacaacaatgtttctcgccagcccgaaacagtagccgtcatgaaatggctcaagaccgagacatttgttctgagtgctaatttgcatggtggcgccttggtcgcctcttatccattcgacaacggggtgcaggccactggggcactttacagccgctcactgaccccagacgacgatgtgttccagtaccttgctcacacatacgccagtcgtaacccgaatatgaaaaaaggagatgagtgtaaaaacaagatgaacttccccaatggcgtgacaaacgggtactcttggtacccactgcagggcggaatgcaggattacaattacatctgggcgcagtgctttgagattacactggagctaagttgttgcaaatatccacgcgaggaaaagctaccctccttctggaacaataataaggcctctctcatcgagtatataaagcaggtgcacctgggtgtcaagggccaagtgtttgatcagaacggcaatccgctccccaacgtgatcgtggaagtgcaggatagaaaacatatttgcccatatcggacaaacaaatatggagaatactaccttctgttgctgcctgggtcctacattattaatgtgacggtgcctggtcatgacccacacattaccaaggtcatcatccctgaaaagtcgcagaatttcagtgcactgaagaaggacattctcctacccttccaggggcagctggacagtattccagtaagtaaccctagctgcccaatgatacccctgtaccgcaatcttccagaccattccgcggccacaaaaccatctctgtttctgtttctagtcagtttactacatatcttctttaaatag

SEQ ID NO: 21783 - DNA, 1332 bp, Artificial Sequence
  derived and/or modified sequence
atggacttcccctgcctgtggctgggcctgctgctgcccctggtggccgctctggactttaattaccacagacaggaagggatggaagcgtttctcaagacggtagcacagaattactccagcgtgacccacctccattccataggcaaatccgttaagggaagaaatctatgggttctggtggttggcagattcccgaaggaacatagaataggaattcccgaattcaagtatgtggctaacatgcatggagacgaaactgtgggtagggaattactactgcatctgatcgactatctggtaaccagtgacgggaaagatccggagatcactaacctcataaatagcacaaggatccacatcatgccatccatgaacccagacggattcgaagctgtgaagaagcccgactgctactactccatcggtcgcgaaaactataaccagtacgacctcaatcgaaacttccctgatgccttcgagtataacaacgtgtcacggcagccggagaccgtagccgttatgaaatggctgaagactgaaacgtttgtcctgagcgccaatcttcacggcggtgctctcgtggcttcctacccctttgacaacggcgtgcaagcaacgggcgccctctatagcagatcactcacacctgatgatgatgtttttcagtatttggctcacacatatgcttcaagaaatccaaatatgaaaaagggcgacgaatgcaagaacaaaatgaactttccaaacggggtcacaaacgggtactcatggtatcctttacaggggggcatgcaggattataattacatatgggcgcagtgctttgaaatcactctggaactttcctgctgcaagtaccctagagaggaaaaactgccctccttctggaacaacaataaagcctcccttattgagtatatcaagcaggttcatctcggagttaagggccaggtgtttgatcagaacgggaatcctcttccgaatgtgatcgtagaagttcaggatcggaagcacatctgtccctatagaacaaacaaatacggagagtattatctcctactcctccccggatcctatattataaatgttaccgtgccgggacacgatccacatatcaccaaagttatcatcccggagaaatcacagaatttttccgctctcaagaaagacattctgctcccttttcaggggcagctggatagtatcccggtgtccaatccctcttgtcctatgattcctctctatcggaatctgcccgatcacagtgccgctacaaaaccctcactgtttttattcctggtgtctctcctgcatattttcttcaaatag

SEQ ID NO: 21784 - DNA, 411 bp, Artificial Sequence
  derived and/or modified sequence
atggacttcccctgcctgtggctgggcctgctgctgcccctggtggccgccctcgattttaattaccatagacaagagggaatggaggctttcctgaaaaccgtggcgcagaactatagcagcgtgacccatctgcattccatcgggaagagtgtgaagggaagaaacttatgggtccttgtcgtggggagattccccaaagagcaccgcattgggattccggagtttaagtatgttgccaacatgcacggtgacgagactgtgggtagggagttactgctgcacttgatagattatctggtcactagcgatggtaaagatccagagatcacaaatctgattaatagcaccagaatccacatcatgccaagtatgaatccagacggattcgaggccgtcaaaaagccctag

SEQ ID NO: 21785 - DNA, 750 bp, Artificial Sequence
  derived and/or modified sequence
atggacttcccctgcctgtggctgggcctgctgctgcccctggtggccgccctggacttcaattaccaccggcaggagggtatggaggcatttctaaagacggtagcccagaattattcctccgtgactcacctgcattctattggaaagtccgtcaaaggccgcaacttgtgggtcctagtggtgggcaggttcccaaaggaacaccgaattggcatccctgaatttaagtatgtagctaacatgcacggcgatgaaaccgtggggagggaattgctgctgcatttgatagactacctggttacgtctgacggcaaggatcccgagattacaaatctgatcaacagcacccgcattcacattatgccatcaatgaaccctgacggcttcgaagctgtgaaaaagcccgattgctactattcaatcgggcgcgagaactataatcaatacgaccttaaccgtaacttccccgatgcttttgaatacaacaacgtttctcgccagccggaaacggttgccgttatgaaatggcttaaaacagagaccttcgtactgagtgccaatcttcacggaggcgcgctagtggcctcctaccccttcgacaatggggtgcaggctactggtgctttatactctcggagcttgacccccgatgacgacgtgtttcagtacttggcccatacttacgcaagtaggaatcccaacatgaagaagggcgacgagtgtaagaacaaaatgaatttcccatag

SEQ ID NO: 21786 - DNA, 1332 bp, Artificial Sequence
  derived and/or modified sequence
atggacttcccctgcctgtggctgggcctgctgctgcccctggtggccgccttagactttaactatcaccgccaggaaggaatggaggcttttctcaagaccgtggcccagaactactcgtctgtaacacatcttcatagtataggaaagtctgtgaaaggccgtaacctttgggtgctcgtggttggaaggttccccaaagaacatcgaattggcatcccagaattcaagtacgtggccaacatgcacggcgatgaaacagttgggcgtgaactgctccttcacttaatcgattatctggtgacttccgacgggaaggacccagagatcaccaacctgatcaattccacgcgcatccacatcatgcctagcatgaaccctgacggttttgaggctgtgaagaagccagattgttactacagtatcggacgggagaactacaaccaatatgatctgaatcgcaattttcctgatgcgttcgaatataataacgtgtccagacaacctgaaactgtggctgtcatgaagtggctgaaaaccgagacctttgtgctttcggcaaatctgcacggaggagccctcgtggcaagctacccctttgataacggagtgcaggccacaggcgccctttacagcagatcccttacaccagacgatgatgttttccagtacctggcccacacatacgcatcccggaacccaaatatgaaaaagggggacgaatgtaaaaacaagatgaacttcccaaacggggtgacaaatgggtatagctggtatccactccagggcggcatgcaggactacaattatatctgggcgcagtgcttcgaaatcacacttgagttatcttgctgtaagtacccgagggaggagaagcttcccagcttctggaataacaacaaggcgtccctgatcgagtatattaagcaagtgcacctgggggttaagggtcaggtctttgatcaaaatgggaatcctctgccaaacgtcatcgtggaagtgcaagatcggaaacacatttgcccttacagaaccaataagtacggcgagtattatctgctcctgctgccggggagctatatcatcaacgtgacagtaccaggacatgaccctcacatcactaaggtcatcatccctgaaaaatctcagaacttctcagccctcaaaaaggatatcctgctgccctttcaggggcagctagattctataccagtgtccaacccttcctgtcccatgattccactgtaccgaaacctacctgaccactctgcagccactaagccatcgttgttcttgtttctggtcagtctacttcatattttttttaaatag

SEQ ID NO: 21787 - DNA, 1332 bp, Artificial Sequence
  derived and/or modified sequence
atggatttcccttgtctctggctggggctgctgcttcccctggttgccgctcttgattttaattatcaccgccaggagggaatggaggccttcctcaagaccgttgcacagaactatagctcagtgacgcacctgcattccatagggaaatctgtgaaggggcgaaatctttgggtgttggtcgttgggagattccccaaggagcaccgaattggaattcctgagttcaaatatgtggctaatatgcatggggacgaaactgtgggtagagagctgttgttgcacctgatcgactacctggtgacaagtgacggtaaagatcccgaaattactaacttaataaatagcactagaatccacattatgccaagcatgaatcctgacggtttcgaggcagtaaaaaagcccgactgttattattctatagggagggagaactataatcagtatgatctcaaccgcaattttcctgatgcctttgagtacaataatgtctcccggcaacctgaaacagtggctgtgatgaaatggctaaagacggagacattcgtcctgtccgctaatctgcacggcggagcgctggtcgccagctaccctttcgataatggagtccaagccacaggcgctctgtactcccggagcttgacccccgatgacgacgtattccagtacctcgcccacacctacgcttcccgaaatccgaacatgaaaaaaggcgatgagtgcaaaaacaagatgaattttcccaatggcgtaactaacggctattcctggtatccacttcagggcggaatgcaggattataactatatctgggcccaatgttttgaaatcacactggagctgtcgtgttgtaagtaccccagagaagagaagctgccaagcttttggaacaacaacaaggccagtcttattgaatacattaaacaggtgcaccttggagtgaagggccaagtcttcgatcagaacggaaacccactccccaatgtcatcgtcgaagtccaagacagaaaacacatctgtccctataggacaaacaaatatggagaatactacctcctcctgctcccagggagttacatcataaacgttacggtacccggacatgatccccacatcactaaagtcattataccagaaaagtctcaaaacttctccgccctcaagaaagacatcctgctcccttttcagggacagttggattccatccccgtgagcaacccatcctgccctatgatccccctctatcggaacctgcctgatcatagcgccgctaccaaaccttctctgtttctgttcctcgtgtctctgcttcacattttcttcaaatag

SEQ ID NO: 21788 - DNA, 1332 bp, Artificial Sequence
  derived and/or modified sequence
atggatttcccttgcctctggctaggtttactgttgcctcttgtcgccgctctcgacttcaattatcacaggcaggaggggatggaggctttcctgaagaccgttgctcagaattacagcagcgtaacacatctgcacagtataggcaagtccgttaagggtcgcaacctgtgggtgctggtggtgggccgtttccccaaggagcaccgcatcgggatcccagagttcaaatatgtcgcaaacatgcatggagatgaaactgtaggtagagagcttctcctccatctaatcgactatttggtcacctccgacggaaaggatcccgagataaccaatttaattaatagcaccaggatccatatcatgccaagcatgaatccggacggttttgaggctgtgaaaaagccggattgctactacagtataggtcgagaaaactataaccagtacgatctgaatagaaatttcccagacgcattcgagtataacaacgttagtaggcaaccagagaccgtggccgttatgaaatggttgaaaaccgaaacctttgtgctgtctgcaaacctgcacggtggagcattagtggcctcttaccctttcgataatggggtacaggccacaggggcactctattcacgatctctgacgcccgacgatgatgttttccagtacctcgctcacacttatgcctccaggaaccctaatatgaaaaaaggagatgagtgcaaaaataagatgaacttcccaaatggggtgacaaatggttatagctggtaccctctgcagggagggatgcaggactacaattatatttgggcgcagtgcttcgagattacgctggagctgtcctgttgtaagtatccgagagaggaaaaactgccatccttttggaataacaacaaggcctctctcatagaatatatcaaacaggttcaccttggcgttaagggtcaagtgttcgatcagaatggaaaccccctgcccaatgtgattgtggaggtgcaggaccggaagcacatatgcccttaccggacgaataaatatggcgagtattacctgctcttacttcccggtagttacatcataaacgtgaccgtgcctggacacgatccccatataactaaggtgattatcccagaaaagagtcagaatttcagcgcactcaaaaaggatatcctcctgcccttccagggacagctggattcgatccccgtctctaacccctcttgtcccatgattccgctgtatcgcaatctgcctgaccattccgctgcaacaaagccttctctctttctgtttttggtgtcccttctccatatatttttcaaatag

SEQ ID NO: 21789 - DNA, 1332 bp, Artificial Sequence
  derived and/or modified sequence
atggacttcccctgtctatggctcggactgctacttccgctggtcgctgcattggactttaattatcaccgccaggaggggatggaagctttcctgaaaacagtggctcagaattactccagcgtgacgcacctgcattcaattggcaagtccgttaagggacggaacctgtgggtactcgtggtgggcagattcccaaaggagcaccgcatcggtatacctgaatttaagtacgtagcaaatatgcatggcgatgagacagtagggagagaactgttgctgcatctgatcgactatctcgtgacctccgatggaaaggaccccgagattacaaacctaatcaactccactcggatccatatcatgcccagcatgaaccctgacggcttcgaagctgtcaagaaaccagactgctattacagcataggaagagaaaactacaatcagtatgaccttaacaggaacttccccgatgcatttgaatacaacaacgtatctagacagcctgaaaccgtcgccgtcatgaagtggctgaagacagagacttttgtgcttagcgccaatttacacggcggagccttagtcgcttcctatcccttcgacaacggcgtccaggcaaccggagcgctttactcccgcagtctgacaccggacgatgacgttttccagtacctggcccatacatatgcgtcgcgtaacccaaacatgaagaaaggcgatgagtgcaaaaataaaatgaattttccaaacggtgttaccaatggttatagttggtatcccctgcagggaggtatgcaggattacaattacatttgggcccagtgctttgaaatcacattggagctgtcatgttgtaaataccctagggaagaaaaactccctagtttttggaacaacaataaagcatccttaattgagtatatcaagcaggtacacctcggtgtgaagggacaggtgtttgatcaaaacggcaacccgctacccaacgtgatcgtcgaggtccaagacagaaagcacatctgcccgtatcggactaataagtatggggagtattatctgctgctgctcccaggtagttacatcattaacgtcacggtaccaggtcatgacccccatataaccaaggtaattatccccgaaaagagccagaatttcagcgccctcaaaaaagatatcttgcttccttttcagggccaactagatagcatccctgttagtaatccatcatgcccaatgatccccctgtatcgaaaccttcccgatcactcagcagccaccaaaccgtcactgtttctgttcctggtgtccctgctacacatcttctttaaatag

SEQ ID NO: 21790 - DNA, 411 bp, Artificial Sequence
  derived and/or modified sequence
atggactttccttgtctctggctgggcctcttgcttcccctcgtggccgcactggactttaattaccaccggcaggaggggatggaagccttcctgaaaactgtggctcagaactacagcagcgtgacccacctgcattctataggaaagtcagtgaagggcagaaacctatgggttctggtggtcgggaggtttccaaaggagcacaggattggtatccccgaatttaagtacgtcgcgaacatgcatggcgacgagaccgttggcagagagcttcttctacatctgatcgactacctagtgacgtctgatgggaaagatccagagataaccaatctgataaacagcacccgcatccatattatgccctccatgaaccccgatggattcgaagccgtcaagaaaccctag

SEQ ID NO: 21791 - DNA, 750 bp, Artificial Sequence
  derived and/or modified sequence
atggacttcccttgcttatggctgggcttactgctgcccctcgtggcggctctggactttaactaccatcggcaagaaggtatggaagctttcctgaaaacggttgctcagaattatagcagcgttactcacttacactctatcgggaaatctgtgaagggcaggaatctgtgggtgctagtggtgggcagattccccaaggagcaccgaatcggaattcccgagttcaagtacgtggcaaacatgcatggggatgagacagtgggcagagagctgcttttgcacctgatagattacctggtaaccagcgacggaaaagacccagagatcaccaacctcatcaacagcacaaggattcacatcatgccgagtatgaaccctgacggctttgaagctgtgaagaagcccgactgttattactctattggccgagaaaattacaaccaatacgatctcaacagaaacttccccgatgctttcgagtataacaacgtgtccaggcaaccagagacggtagccgttatgaaatggctcaaaacggagacgttcgttctttccgcaaatctccacgggggtgcactcgtggccagttacccatttgacaatggtgtacaagctactggagccctgtattccaggagtctgacaccagatgacgacgtattccaatacctagcacatacatacgcttccagaaaccctaatatgaagaagggggatgagtgtaaaaataaaatgaactttccctag

SEQ ID NO: 21792 - DNA, 1332 bp, Artificial Sequence
  derived and/or modified sequence
atggacttcccatgtctgtggttagggttgctgctgcctctcgtcgctgctctggacttcaactaccataggcaggaagggatggaggcttttctcaaaacagtcgcccaaaactattcaagcgttactcacctccatagcatcggaaagtccgttaaaggacggaatctgtgggtacttgttgtcggaaggttcccaaaggagcatcgcatcggcatccccgagtttaagtatgtcgctaatatgcacggtgacgagaccgtcgggagagagttgctgctgcatctcatcgattatctggtgacgtcggatgggaaagacccagaaatcaccaacctgattaatagcacccgaatccacattatgcccagcatgaacccggacggtttcgaggcagtgaaaaagcccgattgctactattccatcggaagggaaaattacaatcaatacgacttaaaccgtaattttccagacgcctttgaatataacaacgtgtcaaggcagcccgaaacggtggcggtcatgaagtggctcaagactgagacctttgtcctcagcgcaaatctgcacggcggagcccttgttgcctcctacccattcgacaatggggtccaggccactggagccctttattctcgatctctaacacccgacgacgatgtcttccaatatctcgctcatacatatgccagtcgaaacccaaacatgaagaaaggtgatgagtgcaagaataaaatgaactttcccaacggagtgacaaatggctacagctggtaccccctccagggtggcatgcaggattacaattatatctgggcccagtgtttcgaaatcaccttagaactcagctgctgtaagtaccccagggaagaaaaactgccctcgttttggaacaataacaaggccagcctcatagaatacatcaaacaggtacacctgggtgttaagggacaggtgttcgaccaaaatggcaacccactgccaaatgtgatcgttgaggtacaggaccgtaaacatatttgcccttaccgaaccaataaatatggcgagtattatctactgcttcttcctggtagctatattatcaacgtaactgtgcccggtcacgacccacatataaccaaagtgattattcctgagaagagtcagaacttctcagccctgaagaaagatatcctcttgcccttccaggggcagctagattctattcccgtaagcaaccctagctgcccaatgatccctctgtataggaacctaccggaccactccgccgcaacgaagccctcgctgttcctctttcttgtctcactgctgcacattttctttaagtag

SEQ ID NO: 21793 - DNA, 6636 bp, Artificial Sequence
  derived and/or modified sequence
ccctcatgtgttctcaggttcttcttatttttattcatctctagaacatggacttcccgtgcctctggctagggctgttgctgcctttggtagctgcgctggatttcaactaccaccgccaggaagggatggaagcgtttttgaagactgttgcccaaaactacagttctgtcactcacttacacagtattgggaaatctgtgaaaggtagaaacctgtgggttcttgttgtggggcggtttccaaaggaacacagaattgggattccagagttcaaatacgtggcaaatatgcatggagatgagactgttgggcgggagctgctgctccatctgattgactatctcgtaaccagtgatggcaaagaccctgaaatcacaaatctgatcaatagtacccggatacacatcatgccttccatgaacccagatggatttgaagccgtcaaaaagcctgactgttattacagcatcggaagggaaaattataaccagtatgacttgaatcgaaatttccccgatgcttttgaatataataatgtctcaaggcagcctgaaactgtggcagtcatgaagtggctgaaaacagagacgtttgtcctctctgcaaacctccatggtggtgccctcgtggccagttacccatttgataatggtgttcaagcaactggggcattatactcccgaagcttaacgcctgatgatgatgtttttcaatatcttgcacatacctatgcttcaagaaatcccaacatgaagaaaggagacgagtgtaaaaacaaaatgaactttcctaatggtgttacaaatggatactcttggtatccactccaaggtggaatgcaagattacaactacatctgggcccagtgttttgaaattacgttggagctgtcatgctgtaaatatcctcgtgaggagaagcttccatccttttggaataataacaaagcctcattaattgaatatataaagcaggtgcacctaggtgtaaagggtcaagtttttgatcagaatggaaatccattacccaatgtaattgtggaagtccaagacagaaaacatatctgcccctatagaaccaacaaatatggagagtattatctccttctcttgcctgggtcttatataataaatgttacagtccctggacatgatccacacatcacaaaggtgattattccggagaaatcccagaacttcagtgctcttaaaaaggatattctacttccattccaagggcaattggattctatcccagtatcaaatccttcatgcccaatgattcctctatacagaaatttgccagaccactcagctgcaacaaagcctagtttgttcttatttttagtgagtcttttgcacatattcttcaaataaagtaaaatgtgaaactcaacccacatcaccacctggaatcagggattgctcactccaggttactgcaaccctaactcactctagtgggaccttgactggagaaactccacgatcttcctgaagaagagaaatggatgtttccaaattccacaataagcaatatgtggtgataatgaaaagaatgattcagtcttgacggtgaatggaagacacttacctaacaagtactgctcatttacactcaaattaatcttgaagtagtcttaaaatgtgtaagaagttaaaacttgagaagcaaaaaaatgcctgcaaaaagaagatcattttgtatacagagaaccggatgaatataagcaatgaagatgaacatttattgatcttctacatacaagacttcaccataaggccaggagcagtggctcacaccttgtaatcccagcactttgggaggccaaggtgggcggatcaccctgaggttaggagttcaaaaccagcctgaccaacatggtgaaaccctgtctctactaaatattagcggggtgtggtggcgggcacctgtaatcgcagcctttcaggaggctgagacaggagaatcgcttgaaccctagaggcggagtttgcagtgagccgagatagtgccattgtactccagcttgggcaacagagtaagactctgtctcaaaaaaaaaaaaacaaaaacaaacaaacaaaaaaaacacctcaccatgagtgctacatgtgaatagatattaagtgccatatataattagttctcagaagaagggagaaatgatcataggactgggaattgttttgcaaacgttctaggagatgtgagagaaaatatgtaaccacatcttagtggcccaagaaaatacaggcctgaagggataagattgtgtctctatagagcttcaaagcatacaggtcaattaagaaagcccctctctctccagagccgtttccctagcttttggcacctggatgccacagtcctccattaggctgatgactccaaagatgtaactctagcctcttgcctgagcttcagactcgcgtcccactgcccacaggacacatccacctggatgtgactcacaggtacctccaacccatcatgtggagatactcatcctgttccccctagagctgctcttcctgctgcattctctctctcaattactgggaccaccaagctaggaacctgggagtcatccttgatactttctcttcctccttaatcctgtgtattcagcaagtaactaaaggttggtgttggccaggcatggtggctcatgcctgtaatcccagcattttgggaggccaaggcgggcggatcacttgaggtcaggagctcaagaccagcctggccaacatggtgaaaccccatctctactaaaaaaaaaaaaaaaattagtcgggcgtggtggtgcatgcctgtaatcccagctactggggaggctgaggcaggagaatcgcttgaacctgggaggcagaggttgcagtgagccgggattgcgccattgtactccagcctgggtgaagaagtgagactctgtcttaaaaaaaaaaattggtgctgataaatattgatgaattctgctctctgctctctatggttgtcaacactgcagagttgaggcctcatatctcacctgcactgctgcaacagcttactggtcccttgctcccagccttctcctcttcagtccatcgtccacacagcactggggaaggggagccacttgaaacaaaagtcaacaactggttgtagttcataaacacagagctgtttgtgtcccctgtatctggaatgccattatgacccactacattttttctttcctacccctcttaaaactcagttcaggtagcagctccactaggaagccttggctgaccataatcccattcaattccatttcacctcttcgcaggcagtctggggttagggaccctttctctttgctccccaaaataaactggttatctctactattggatttacaacattgtattataatcttctccatgtgtgccttctctagtagaatgtgagctctttgaggccaaggtctatttaatttgtttgaaaaattcattgttatatcctcaaagcctagcacatagtaggtactgaatgaatgaatgaacaaggggtgccaggagactgctactcccagtccttcccagaaactgcctagggctttgagtcattttatgaagctaggtcttaatgcgtaggcaacctcccagctcactatgaacgctgacagaagagtgttttcatgtctataatcaagaattccagatacattccttttactgaaccttgaattgatcctaagattggtagtaaaggtattatgttacctcctaacagcactacaaagtacctttttttatcagaaaaaaattttaccattaggactcaatttgaagtactaatgcttctcaagttctccactatgagagttaccctgtattagaccgttacctataagaattaaggggtaaagcactaaacagaaaagaaaaaaaaaatagcaactctggtgagcagatttctttcctttcttccttccttctcctcttcctaccttcctccctcctttccctctcctccccttctctccctttccctccccttcccttccttttcttctttcctccgctcccctccccttccctccccttcccatccttctttctcttttttttacttaatccccagtgtgacagtaatataggctgatttctagaagtgtggtgtattactcatggaaagtgagttgccttggttattactttcaattgaaagttctatgggatctagaaatgagacatactggcatggagagtgagaacgacaaaggaatgaagagctacaggagcatttaggccatttctatgccaagcttattctacatgcacaaaatcatacatgttaataaatataaacaaattggaggcttatttaaaccaattatgaaatctggtaatttgtgcagcagcaatagatgataaccaaaaaaaactcataataatctgaatatcttgatcatttgtatttaaagaagcagtaattatatacttgaaagtacataatatagtattgcaaaaatgactttggtatattacaaattaaaagtatataagatgaaacttgatttgctatcaagccccaagcaatttttcaactgggcattgaattctaacttttctaagatagcaatttttgaagagacacgaacaaaaatctgaattagttcatgagccttaatgtaaatctcttgctgaaatagtttttaaaatcagaatttagttatctatcagactcaaaatcatttaaagactaacaaaacacaatcatgatattctaactgtggtcaaaccaggtacccaagccacctccctgcccaacgcctttccggcttttcccctccctcttgggctggtggttatgctcctccagctctagttcagctataattccttttatagagaaaccaacctgatacacactttcatgatgggagaaaaatgtgggagtgaaatggtatttagaaagcagcagtcaggcacggtggctcatgcctgtaatcccagcactttgggaggctgaggcaggcggatcacttgaggtcaggagctcgagaccagcctggccaacacggtgaaaccccatctctactaaaaaaaaatacaaaaattagccgggcgtggtggcaggcacctgtaatcccagctacttgggaggctgaggcaggagaaatcgcctgaacccagaaggcagaggttgcagtgagccaagatcacatcactgcactgcactccagccggggtgacagagcgaacctctgtctcaaaaaaaaaaaaagaaaaaagaaagaaagaaaaaaggcagaagccctggattcaaatccgccacacattcagtttctttatctgtaaaatggagaccaccccccgccacgctgaacggtgattctgtgactggtaagagatgctacatttttggtgcttgttcaggtggaggaaagatgatagttaacactcaggtaataagtattttgaaggcagtataatataccttcttaaagagtatacctactcaaatgttggtaaatgttgacatgattgaatctaaatggcaaagagtattttagaaaaacattaagtccctgcagataaatgacagtgttgatttggatgcttaattacattcagacatgaactgttggatgtatctgaaatgttaaaagctttttctcaacatttccaaaagtctttccaagaaatcaatgttatgttttgttccagaagcaaatttgcatttgtgatctgtttctaaaaatggtacaagttagctctgtttagaaagtaaaaatatctgatgttagattggaagtatctcttcctggggaatccagaaagataagcatagcatattgtcttactgcaatagataagttgcttattgagaagtctggttgttattctatatggtaacaatacagttgatgtatattttatgatagatcctttatattttcctcatgactttagaagggggaagggggagaaaattatgatgaccagactagttaaagagcattgaaagtccacagtactgtagctaaagtagaagtttgggtttgttatagactttacattatatcaactaataagcagatactgtacagtattgctcaccattttatcatacttttgcatatgaactactccattgccttttatagatgttttatagctgatcttaccagttttcctggtaactttttttatttcttttttttttttttgagacggagtctcgccctaacacccaggttggagtgcagtgccgtgatctcggctcactgcaacctctgcctcccgggttcaagcaattctcctgtctcagcctcccgagtacctgggactaccggtgcctgtctccacgcccggctaattttttgtatttgtagtagagacggggtttcaccgtgttagccaggatggtctcgatctcctgacctcatgatctgcctgcctctgcctggacctcccaaagtgctgggattacaggcgtgagcccccgcgcccagccactttctttaatactataactaagaatttattaaaatgcacaaattgtctaagactgtaaagtttattggggagaggccatgactacctctgaatttagtaaatttaaaatatttctgattctcaataaagaactaatatccat

SEQ ID NO: 21794 - DNA, 2116 bp, Artificial Sequence
  derived and/or modified sequence
gtctagattcttcttggcctctctgagcagcatttcttccttctgcgtatgggacaggaccctttctggaatgggggtcttatgacctacaatcaaacaagaacatggacttcccgtgcctctggctagggctgttgctgcctttggtagctgcgctggatttcaactaccaccgccaggaagggatggaagcgtttttgaagactgttgcccaaaactacagttctgtcactcacttacacagtattgggaaatctgtgaaaggtagaaacctgtgggttcttgttgtggggcggtttccaaaggaacacagaattgggattccagagttcaaatacgtggcaaatatgcatggagatgagactgttgggcgggagctgctgctccatctgattgactatctcgtaaccagtgatggcaaagaccctgaaatcacaaatctgatcaatagtacccggatacacatcatgccttccatgaacccagatggatttgaagccgtcaaaaagcctgactgttattacagcatcggaagggaaaattataaccagtatgacttgaatcgaaatttccccgatgcttttgaatataataatgtctcaaggcagcctgaaactgtggcagtcatgaagtggctgaaaacagagacgtttgtcctctctgcaaacctccatggtggtgccctcgtggccagttacccatttgataatggtgttcaagcaactggggcattatactcccgaagcttaacgcctgatgatgatgtttttcaatatcttgcacatacctatgcttcaagaaatcccaacatgaagaaaggagacgagtgtaaaaacaaaatgaactttcctaatggtgttacaaatggatactcttggtatccactccaaggtggaatgcaagattacaactacatctgggcccagtgttttgaaattacgttggagctgtcatgctgtaaatatcctcgtgaggagaagcttccatccttttggaataataacaaagcctcattaattgaatatataaagcaggtgcacctaggtgtaaagggtcaagtttttgatcagaatggaaatccattacccaatgtaattgtggaagtccaagacagaaaacatatctgcccctatagaaccaacaaatatggagagtattatctccttctcttgcctgggtcttatataataaatgttacagtccctggacatgatccacacatcacaaaggtgattattccggagaaatcccagaacttcagtgctcttaaaaaggatattctacttccattccaagggcaattggattctatcccagtatcaaatccttcatgcccaatgattcctctatacagaaatttgccagaccactcagctgcaacaaagcctagtttgttcttatttttagtgagtcttttgcacatattcttcaaataaagtaaaatgtgaaactcaacccacatcaccacctggaatcagggattgctcactccaggttactgcaaccctaactcactctagtgggaccttgactggagaaactccacgatcttcctgaagaagagaaatggatgtttccaaattccacaataagcaatatgtggtgataatgaaaagaatgattcagtcttgacggtgaatggaagacacttacctaacaagtactgctcatttacactcaaattaatcttgaagtagtcttaaaatgtgtaagaagttaaaacttgagaagcaaaaaaatgcctgcaaaaagaagatcattttgtatacagagaaccggatgaatataagcaatgaagatgaacatttattgatcttctacatacaagacttcaccataaggccaggagcagtggctcacaccttgtaatcccagcactttgggaggccaaggtgggcggatcaccctgaggttaggagttcaaaaccagcctgaccaacatggtgaaaccctgtctctactaaatattagcggggtgtggtggcgggcacctgtaatcgcagcctttcaggaggctgagacaggagaatcgcttgaaccctagaggcggagtttgcagtgagccgagatagtgccattgtactccagcttgggcaacagagtaagactctgtctc

SEQ ID NO: 21795 - DNA, 2196 bp, Artificial Sequence
  derived and/or modified sequence
gaacatggacttcccgtgcctctggctagggctgttgctgcctttggtagctgcgctggatttcaactaccaccgccaggaagggatggaagcgtttttgaagactgttgcccaaaactacagttctgtcactcacttacacagtattgggaaatctgtgaaaggtagaaacctgtgggttcttgttgtggggcggtttccaaaggaacacagaattgggattccagagttcaaatacgtggcaaatatgcatggagatgagactgttgggcgggagctgctgctccatctgattgactatctcgtaaccagtgatggcaaagaccctgaaatcacaaatctgatcaatagtacccggatacacatcatgccttccatgaacccagatggatttgaagccgtcaaaaagcctgactgttattacagcatcggaagggaaaattataaccagtatgacttgaatcgaaatttccccgatgcttttgaatataataatgtctcaaggcagcctgaaactgtggcagtcatgaagtggctgaaaacagagacgtttgtcctctctgcaaacctccatggtggtgccctcgtggccagttacccatttgataatggtgttcaagcaactggggcattatactcccgaagcttaacgcctgatgatgatgtttttcaatatcttgcacatacctatgcttcaagaaatcccaacatgaagaaaggagacgagtgtaaaaacaaaatgaactttcctaatggtgttacaaatggatactcttggtatccactccaaggtggaatgcaagattacaactacatctgggcccagtgttttgaaattacgttggagctgtcatgctgtaaatatcctcgtgaggagaagcttccatccttttggaataataacaaagcctcattaattgaatatataaagcaggtgcacctaggtgtaaagggtcaagtttttgatcagaatggaaatccattacccaatgtaattgtggaagtccaagacagaaaacatatctgcccctatagaaccaacaaatatggagagtattatctccttctcttgcctgggtcttatataataaatgttacagtccctggacatgatccacacatcacaaaggtgattattccggagaaatcccagaacttcagtgctcttaaaaaggatattctacttccattccaagggcaattggattctatcccagtatcaaatccttcatgcccaatgattcctctatacagaaatttgccagaccactcagctgcaacaaagcctagtttgttcttatttttagtgagtcttttgcacatattcttcaaataaagtaaaatgtgaaactcaacccacatcaccacctggaatcagggattgctcactccaggttactgcaaccctaactcactctagtgggaccttgactggagaaactccacgatcttcctgaagaagagaaatggatgtttccaaattccacaataagcaatatgtggtgataatgaaaagaatgattcagtcttgacggtgaatggaagacacttacctaacaagtactgctcatttacactcaaattaatcttgaagtagtcttaaaatgtgtaagaagttaaaacttgagaagcaaaaaaatgcctgcaaaaagaagatcattttgtatacagagaaccggatgaatataagcaatgaagatgaacatttattgatcttctacatacaagacttcaccataaggccaggagcagtggctcacaccttgtaatcccagcactttgggaggccaaggtgggcggatcaccctgaggttaggagttcaaaaccagcctgaccaacatggtgaaaccctgtctctactaaatattagcggggtgtggtggcgggcacctcaattctcctgtctcagcctcccgagtacctgggactaccggtgcctgtctccacgcccggctaattttttgtatttgtagtagagacggggtttcaccgtgttagccaggatggtctcgatctcctgacctcatgatctgcctgcctctgcctggacctcccaaagtgctgggattacaggcgtgagcccccgcgcccagccactttctttaatactataactaagaatttattaaaatgcacaaattgtctaagactgtaaagtttattggggagaggccatgactacctctgaatttagt

SEQ ID NO: 21796 - DNA, 454 bp, Artificial Sequence
  derived and/or modified sequence
gggtgggtagaggtgcgcgcctgggacctggtgaggctggggaacatggacttcccgtgcctctggctagggctgttgctgcctttggtagctgcgctggatttcaactaccaccgccaggaagggatggaagcgtttttgaagactgttgcccaaaactacagttctgtcactcacttacacagtattgggaaatctgtgaaaggtagaaacctgtgggttcttgttgtggggcggtttccaaaggaacacagaattgggattccagagttcaaatacgtggcaaatatgcatggagatgagactgttgggcgggagctgctgctccatctgattgactatctcgtaaccagtgatggcaaagaccctgaaatcacaaatctgatcaatagtacccggatacacatcatgccttccatgaacccagatggatttgaagccgtcaaaaagcctg

SEQ ID NO: 21797 - DNA, 794 bp, Artificial Sequence
  derived and/or modified sequence
gctataacacccggccccgccgggcggccgcgggtgggtagagaacatggacttcccgtgcctctggctagggctgttgctgcctttggtagctgcgctggatttcaactaccaccgccaggaagggatggaagcgtttttgaagactgttgcccaaaactacagttctgtcactcacttacacagtattgggaaatctgtgaaaggtagaaacctgtgggttcttgttgtggggcggtttccaaaggaacacagaattgggattccagagttcaaatacgtggcaaatatgcatggagatgagactgttgggcgggagctgctgctccatctgattgactatctcgtaaccagtgatggcaaagaccctgaaatcacaaatctgatcaatagtacccggatacacatcatgccttccatgaacccagatggatttgaagccgtcaaaaagcctgactgttattacagcatcggaagggaaaattataaccagtatgacttgaatcgaaatttccccgatgcttttgaatataataatgtctcaaggcagcctgaaactgtggcagtcatgaagtggctgaaaacagagacgtttgtcctctctgcaaacctccatggtggtgccctcgtggccagttacccatttgataatggtgttcaagcaactggggcattatactcccgaagcttaacgcctgatgatgatgtttttcaatatcttgcacatacctatgcttcaagaaatcccaacatgaagaaaggagacgagtgtaaaaacaaaatgaactttccta

SEQ ID NO: 21798 - DNA, 6655 bp, Artificial Sequence
  derived and/or modified sequence
ataacacccggccccgccgggcggccgcgggtgggtagaggtgcgcgcctgggacctgaacatggacttcccgtgcctctggctagggctgttgctgcctttggtagctgcgctggatttcaactaccaccgccaggaagggatggaagcgtttttgaagactgttgcccaaaactacagttctgtcactcacttacacagtattgggaaatctgtgaaaggtagaaacctgtgggttcttgttgtggggcggtttccaaaggaacacagaattgggattccagagttcaaatacgtggcaaatatgcatggagatgagactgttgggcgggagctgctgctccatctgattgactatctcgtaaccagtgatggcaaagaccctgaaatcacaaatctgatcaatagtacccggatacacatcatgccttccatgaacccagatggatttgaagccgtcaaaaagcctgactgttattacagcatcggaagggaaaattataaccagtatgacttgaatcgaaatttccccgatgcttttgaatataataatgtctcaaggcagcctgaaactgtggcagtcatgaagtggctgaaaacagagacgtttgtcctctctgcaaacctccatggtggtgccctcgtggccagttacccatttgataatggtgttcaagcaactggggcattatactcccgaagcttaacgcctgatgatgatgtttttcaatatcttgcacatacctatgcttcaagaaatcccaacatgaagaaaggagacgagtgtaaaaacaaaatgaactttcctaatggtgttacaaatggatactcttggtatccactccaaggtggaatgcaagattacaactacatctgggcccagtgttttgaaattacgttggagctgtcatgctgtaaatatcctcgtgaggagaagcttccatccttttggaataataacaaagcctcattaattgaatatataaagcaggtgcacctaggtgtaaagggtcaagtttttgatcagaatggaaatccattacccaatgtaattgtggaagtccaagacagaaaacatatctgcccctatagaaccaacaaatatggagagtattatctccttctcttgcctgggtcttatataataaatgttacagtccctggacatgatccacacatcacaaaggtgattattccggagaaatcccagaacttcagtgctcttaaaaaggatattctacttccattccaagggcaattggattctatcccagtatcaaatccttcatgcccaatgattcctctatacagaaatttgccagaccactcagctgcaacaaagcctagtttgttcttatttttagtgagtcttttgcacatattcttcaaataaagtaaaatgtgaaactcaacccacatcaccacctggaatcagggattgctcactccaggttactgcaaccctaactcactctagtgggaccttgactggagaaactccacgatcttcctgaagaagagaaatggatgtttccaaattccacaataagcaatatgtggtgataatgaaaagaatgattcagtcttgacggtgaatggaagacacttacctaacaagtactgctcatttacactcaaattaatcttgaagtagtcttaaaatgtgtaagaagttaaaacttgagaagcaaaaaaatgcctgcaaaaagaagatcattttgtatacagagaaccggatgaatataagcaatgaagatgaacatttattgatcttctacatacaagacttcaccataaggccaggagcagtggctcacaccttgtaatcccagcactttgggaggccaaggtgggcggatcaccctgaggttaggagttcaaaaccagcctgaccaacatggtgaaaccctgtctctactaaatattagcggggtgtggtggcgggcacctgtaatcgcagcctttcaggaggctgagacaggagaatcgcttgaaccctagaggcggagtttgcagtgagccgagatagtgccattgtactccagcttgggcaacagagtaagactctgtctcaaaaaaaaaaaaacaaaaacaaacaaacaaaaaaaacacctcaccatgagtgctacatgtgaatagatattaagtgccatatataattagttctcagaagaagggagaaatgatcataggactgggaattgttttgcaaacgttctaggagatgtgagagaaaatatgtaaccacatcttagtggcccaagaaaatacaggcctgaagggataagattgtgtctctatagagcttcaaagcatacaggtcaattaagaaagcccctctctctccagagccgtttccctagcttttggcacctggatgccacagtcctccattaggctgatgactccaaagatgtaactctagcctcttgcctgagcttcagactcgcgtcccactgcccacaggacacatccacctggatgtgactcacaggtacctccaacccatcatgtggagatactcatcctgttccccctagagctgctcttcctgctgcattctctctctcaattactgggaccaccaagctaggaacctgggagtcatccttgatactttctcttcctccttaatcctgtgtattcagcaagtaactaaaggttggtgttggccaggcatggtggctcatgcctgtaatcccagcattttgggaggccaaggcgggcggatcacttgaggtcaggagctcaagaccagcctggccaacatggtgaaaccccatctctactaaaaaaaaaaaaaaaattagtcgggcgtggtggtgcatgcctgtaatcccagctactggggaggctgaggcaggagaatcgcttgaacctgggaggcagaggttgcagtgagccgggattgcgccattgtactccagcctgggtgaagaagtgagactctgtcttaaaaaaaaaaattggtgctgataaatattgatgaattctgctctctgctctctatggttgtcaacactgcagagttgaggcctcatatctcacctgcactgctgcaacagcttactggtcccttgctcccagccttctcctcttcagtccatcgtccacacagcactggggaaggggagccacttgaaacaaaagtcaacaactggttgtagttcataaacacagagctgtttgtgtcccctgtatctggaatgccattatgacccactacattttttctttcctacccctcttaaaactcagttcaggtagcagctccactaggaagccttggctgaccataatcccattcaattccatttcacctcttcgcaggcagtctggggttagggaccctttctctttgctccccaaaataaactggttatctctactattggatttacaacattgtattataatcttctccatgtgtgccttctctagtagaatgtgagctctttgaggccaaggtctatttaatttgtttgaaaaattcattgttatatcctcaaagcctagcacatagtaggtactgaatgaatgaatgaacaaggggtgccaggagactgctactcccagtccttcccagaaactgcctagggctttgagtcattttatgaagctaggtcttaatgcgtaggcaacctcccagctcactatgaacgctgacagaagagtgttttcatgtctataatcaagaattccagatacattccttttactgaaccttgaattgatcctaagattggtagtaaaggtattatgttacctcctaacagcactacaaagtacctttttttatcagaaaaaaattttaccattaggactcaatttgaagtactaatgcttctcaagttctccactatgagagttaccctgtattagaccgttacctataagaattaaggggtaaagcactaaacagaaaagaaaaaaaaaatagcaactctggtgagcagatttctttcctttcttccttccttctcctcttcctaccttcctccctcctttccctctcctccccttctctccctttccctccccttcccttccttttcttctttcctccgctcccctccccttccctccccttcccatccttctttctcttttttttacttaatccccagtgtgacagtaatataggctgatttctagaagtgtggtgtattactcatggaaagtgagttgccttggttattactttcaattgaaagttctatgggatctagaaatgagacatactggcatggagagtgagaacgacaaaggaatgaagagctacaggagcatttaggccatttctatgccaagcttattctacatgcacaaaatcatacatgttaataaatataaacaaattggaggcttatttaaaccaattatgaaatctggtaatttgtgcagcagcaatagatgataaccaaaaaaaactcataataatctgaatatcttgatcatttgtatttaaagaagcagtaattatatacttgaaagtacataatatagtattgcaaaaatgactttggtatattacaaattaaaagtatataagatgaaacttgatttgctatcaagccccaagcaatttttcaactgggcattgaattctaacttttctaagatagcaatttttgaagagacacgaacaaaaatctgaattagttcatgagccttaatgtaaatctcttgctgaaatagtttttaaaatcagaatttagttatctatcagactcaaaatcatttaaagactaacaaaacacaatcatgatattctaactgtggtcaaaccaggtacccaagccacctccctgcccaacgcctttccggcttttcccctccctcttgggctggtggttatgctcctccagctctagttcagctataattccttttatagagaaaccaacctgatacacactttcatgatgggagaaaaatgtgggagtgaaatggtatttagaaagcagcagtcaggcacggtggctcatgcctgtaatcccagcactttgggaggctgaggcaggcggatcacttgaggtcaggagctcgagaccagcctggccaacacggtgaaaccccatctctactaaaaaaaaatacaaaaattagccgggcgtggtggcaggcacctgtaatcccagctacttgggaggctgaggcaggagaaatcgcctgaacccagaaggcagaggttgcagtgagccaagatcacatcactgcactgcactccagccggggtgacagagcgaacctctgtctcaaaaaaaaaaaaagaaaaaagaaagaaagaaaaaaggcagaagccctggattcaaatccgccacacattcagtttctttatctgtaaaatggagaccaccccccgccacgctgaacggtgattctgtgactggtaagagatgctacatttttggtgcttgttcaggtggaggaaagatgatagttaacactcaggtaataagtattttgaaggcagtataatataccttcttaaagagtatacctactcaaatgttggtaaatgttgacatgattgaatctaaatggcaaagagtattttagaaaaacattaagtccctgcagataaatgacagtgttgatttggatgcttaattacattcagacatgaactgttggatgtatctgaaatgttaaaagctttttctcaacatttccaaaagtctttccaagaaatcaatgttatgttttgttccagaagcaaatttgcatttgtgatctgtttctaaaaatggtacaagttagctctgtttagaaagtaaaaatatctgatgttagattggaagtatctcttcctggggaatccagaaagataagcatagcatattgtcttactgcaatagataagttgcttattgagaagtctggttgttattctatatggtaacaatacagttgatgtatattttatgatagatcctttatattttcctcatgactttagaagggggaagggggagaaaattatgatgaccagactagttaaagagcattgaaagtccacagtactgtagctaaagtagaagtttgggtttgttatagactttacattatatcaactaataagcagatactgtacagtattgctcaccattttatcatacttttgcatatgaactactccattgccttttatagatgttttatagctgatcttaccagttttcctggtaactttttttatttcttttttttttttttgagacggagtctcgccctaacacccaggttggagtgcagtgccgtgatctcggctcactgcaacctctgcctcccgggttcaagcaattctcctgtctcagcctcccgagtacctgggactaccggtgcctgtctccacgcccggctaattttttgtatttgtagtagagacggggtttcaccgtgttagccaggatggtctcgatctcctgacctcatgatctgcctgcctctgcctggacctcccaaagtgctgggattacaggcgtgagcccccgcgcccagccactttctttaatactataactaagaatttattaaaatgcacaaattgtctaagactgtaaagtttattggggagaggccatgactacctctgaatttagtaaatttaaaatatttctgattctcaataaagaactaatatccatataaa

SEQ ID NO: 21799 - DNA, 1332 bp, Artificial Sequence
  derived and/or modified sequence
atggacttcccctgcctgtggctgggcctgctgctgcccctggtggccgccctggacttcaactaccacagacaggagggcatggaggccttcctgaagaccgtggcccagaactacagcagcgtgacccacctgcacagcatcggcaagagcgtgaagggcagaaacctgtgggtgctggtggtgggcagattccccaaggagcacagaatcggcatccccgagttcaagtacgtggccaacatgcacggcgacgagaccgtgggcagagagctgctgctgcacctgatcgactacctggtgaccagcgacggcaaggaccccgagatcaccaacctgatcaacagcaccagaatccacatcatgcccagcatgaaccccgacggcttcgaggccgtgaagaagcccgactgctactacagcatcggcagagagaactacaaccagtacgacctgaacagaaacttccccgacgccttcgagtacaacaacgtgagcagacagcccgagaccgtggccgtgatgaagtggctgaagaccgagaccttcgtgctgagcgccaacctgcacggcggcgccctggtggccagctaccccttcgacaacggcgtgcaggccaccggcgccctgtacagcagaagcctgacccccgacgacgacgtgttccagtacctggcccacacctacgccagcagaaaccccaacatgaagaagggcgacgagtgcaagaacaagatgaacttccccaacggcgtgaccaacggctacagctggtaccccctgcagggcggcatgcaggactacaactacatctgggcccagtgcttcgagatcaccctggagctgagctgctgcaagtaccccagagaggagaagctgcccagcttctggaacaacaacaaggccagcctgatcgagtacatcaagcaggtgcacctgggcgtgaagggccaggtgttcgaccagaacggcaaccccctgcccaacgtgatcgtggaggtgcaggacagaaagcacatctgcccctacagaaccaacaagtacggcgagtactacctgctgctgctgcccggcagctacatcatcaacgtgaccgtgcccggccacgacccccacatcaccaaggtgatcatccccgagaagagccagaacttcagcgccctgaagaaggacatcctgctgcccttccagggccagctggacagcatccccgtgagcaaccccagctgccccatgatccccctgtacagaaacctgcccgaccacagcgccgccaccaagcccagcctgttcctgttcctggtgagcctgctgcacatcttcttcaagtag

SEQ ID NO: 21800 - DNA, 411 bp, Artificial Sequence
  derived and/or modified sequence
atggacttcccctgcctgtggctgggcctgctgctgcccctggtggccgccctggacttcaactaccacagacaggagggcatggaggccttcctgaagaccgtggcccagaactacagcagcgtgacccacctgcacagcatcggcaagagcgtgaagggcagaaacctgtgggtgctggtggtgggcagattccccaaggagcacagaatcggcatccccgagttcaagtacgtggccaacatgcacggcgacgagaccgtgggcagagagctgctgctgcacctgatcgactacctggtgaccagcgacggcaaggaccccgagatcaccaacctgatcaacagcaccagaatccacatcatgcccagcatgaaccccgacggcttcgaggccgtgaagaagccctag

SEQ ID NO: 21801 - DNA, 750 bp, Artificial Sequence
  derived and/or modified sequence
atggacttcccctgcctgtggctgggcctgctgctgcccctggtggccgccctggacttcaactaccacagacaggagggcatggaggccttcctgaagaccgtggcccagaactacagcagcgtgacccacctgcacagcatcggcaagagcgtgaagggcagaaacctgtgggtgctggtggtgggcagattccccaaggagcacagaatcggcatccccgagttcaagtacgtggccaacatgcacggcgacgagaccgtgggcagagagctgctgctgcacctgatcgactacctggtgaccagcgacggcaaggaccccgagatcaccaacctgatcaacagcaccagaatccacatcatgcccagcatgaaccccgacggcttcgaggccgtgaagaagcccgactgctactacagcatcggcagagagaactacaaccagtacgacctgaacagaaacttccccgacgccttcgagtacaacaacgtgagcagacagcccgagaccgtggccgtgatgaagtggctgaagaccgagaccttcgtgctgagcgccaacctgcacggcggcgccctggtggccagctaccccttcgacaacggcgtgcaggccaccggcgccctgtacagcagaagcctgacccccgacgacgacgtgttccagtacctggcccacacctacgccagcagaaaccccaacatgaagaagggcgacgagtgcaagaacaagatgaacttcccctag

SEQ ID NO: 21802 - protein, 1145 aa, Artificial Sequence
  derived and/or modified sequence
MAVPARTCGASRPGPARTARPWPGCGPHPGPGTRRPTSGPPRPLWLLLPLLPLLAAPGASAYSFPQQHTMQHWARRLEQEVDGVMRIFGGVQQLREIYKDNRNLFEVQENEPQKLVEKVAGDIESLLDRKVQALKRLADAAENFQKAHRWQDNIKEEDIVYYDAKADAELDDPESEDVERGSKASTLRLDFIEDPNFKNKVNYSYAAVQIPTDIYKGSTVILNELNWTEALENVFMENRRQDPTLLWQVFGSATGVTRYYPATPWRAPKKIDLYDVRRRPWYIQGASSPKDMVIIVDVSGSVSGLTLKLMKTSVCEMLDTLSDDDYVNVASFNEKAQPVSCFTHLVQANVRNKKVFKEAVQGMVAKGTTGYKAGFEYAFDQLQNSNITRANCNKMIMMFTDGGEDRVQDVFEKYNWPNRTVRVFTFSVGQHNYDVTPLQWMACANKGYYFEIPSIGAIRINTQEYLDVLGRPMVLAGKEAKQVQWTNVYEDALGLGLVVTGTLPVFNLTQDGPGEKKNQLILGVMGIDVALNDIKRLTPNYTLGANGYVFAIDLNGYVLLHPNLKPQTTNFREPVTLDFLDAELEDENKEEIRRSMIDGNKGHKQIRTLVKSLDERYIDEVTRNYTWVPIRSTNYSLGLVLPPYSTFYLQANLSDQILQVKYFEFLLPSSFESEGHVFIAPREYCKDLNASDNNTEFLKNFIELMEKVTPDSKQCNNFLLHNLILDTGITQQLVERVWRDQDLNTYSLLAVFAATDGGITRVFPNKAAEDWTENPEPFNASFYRRSLDNHGYVFKPPHQDALLRPLELENDTVGILVSTAVELSLGRRTLRPAVVGVKLDLEAWAEKFKVLASNRTHQDQPQKCGPNSHCEMDCEVNNEDLLCVLIDDGGFLVLSNQNHQWDQVGRFFSEVDANLMLALYNNSFYTRKESYDYQAACAPQPPGNLGAAPRGVFVPTVADFLNLAWWTSAAAWSLFQQLLYGLIYHSWFQADPAEAEGSPETRESSCVMKQTQYYFGSVNASYNAIIDCGNCSRLFHAQRLTNTNLLFVVAEKPLCSQCEAGRLLQKETHCPADGPEQCELVQRPRYRRGPHICFDYNATEDTSDCGRGASFPPSLGVLVSLQLLLLLGLPPRPQPQVLVHASRRL

SEQ ID NO: 21803 - protein, 1146 aa, Artificial Sequence
  derived and/or modified sequence
MAVPARTCGASRPGPARTARPWPGCGPHPGPGTRRPTSGPPRPLWLLLPLLPLLAAPGASAYSFPQQHTMQHWARRLEQEVDGVMRIFGGVQQLREIYKDNRNLFEVQENEPQKLVEKVAGDIESLLDRKVQALKRLADAAENFQKAHRWQDNIKEEDIVYYDAKADAELDDPESEDVERGSKASTLRLDFIEDPNFKNKVNYSYAAVQIPTDIYKGSTVILNELNWTEALENVFMENRRQDPTLLWQVFGSATGVTRYYPATPWRAPKKIDLYDVRRRPWYIQGASSPKDMVIIVDVSGSVSGLTLKLMKTSVCEMLDTLSDDDYVNVASFNEKAQPVSCFTHLVQANVRNKKVFKEAVQGMVAKGTTGYKAGFEYAFDQLQNSNITRANCNKMIMMFTDGGEDRVQDVFEKYNWPNRTVRVFTFSVGQHNYDVTPLQWMACANKGYYFEIPSIGAIRINTQEYLDVLGRPMVLAGKEAKQVQWTNVYEDALGLGLVVTGTLPVFNLTQDGPGEKKNQLILGVMGIDVALNDIKRLTPNYTLGANGYVFAIDLNGYVLLHPNLKPQTTNFREPVTLDFLDAELEDENKEEIRRSMIDGNKGHKQIRTLVKSLDERYIDEVTRNYTWVPIRSTNYSLGLVLPPYSTFYLQANLSDQILQVKYFEFLLPSSFESEGHVFIAPREYCKDLNASDNNTEFLKNFIELMEKVTPDSKQCNNFLLHNLILDTGITQQLVERVWRDQDLNTYSLLAVFAATDGGITRVFPNKAAEDWTENPEPFNASFYRRSLDNHGYVFKPPHQDALLRPLELENDTVGILVSTAVELSLGRRTLRPAVVGVKLDLEAWAEKFKVLASNRTHQDQPQKCGPNSHCEMDCEVNNEDLLCVLIDDGGFLVLSNQNHQWDQVGRFFSEVDANLMLALYNNSFYTRKESYDYQAACAPQPPGNLGAAPRGVFVPTVADFLNLAWWTSAAAWSLFQQLLYGLIYHSWFQADPAEAEGSPETRESSCVMKQTQYYFGSVNASYNAIIDCGNCSRLFHAQRLTNTNLLFVVAEKPLCSQCEAGRLLQKETHCCPADGPEQCELVQRPRYRRGPHICFDYNATEDTSDCGRGASFPPSLGVLVSLQLLLLLGLPPRPQPQVLVHASRRL

SEQ ID NO: 21804 - DNA, 3438 bp, Artificial Sequence
  derived and/or modified sequence
atggccgttcctgcacgcacgtgcggggccagcagaccagggcccgctaggaccgcccgaccgtggccagggtgcgggccacaccctggcccaggaacacggaggccaacgtctggaccgcctcgaccactgtggttgctccttcctctgctgccgttactcgcggcccccggagcctccgcgtatagctttcctcagcagcatacgatgcagcactgggcccggcggctcgagcaggaggtagacggcgttatgcgcatctttggcggcgtacaacagctgagagagatttataaagataatcgcaacctctttgaagttcaggagaacgaaccacagaaattagtggaaaaagttgctggcgacatagaaagcctgttggatcgcaaagtccaggctcttaaacgcctggccgatgctgcagagaatttccaaaaagcgcatcgctggcaagacaacatcaaggaagaggacatcgtgtattatgatgctaaagctgacgctgagctggacgaccccgagtccgaggatgtagagcgcggatctaaagcctcaaccttacggcttgactttattgaggatcccaactttaagaacaaagtcaattactcatacgctgcggtacaaattcccacagatatctataaaggaagtacagtaatcctgaacgaactcaactggacggaagctttagaaaacgtgttcatggagaataggaggcaggatccgacattgctctggcaggtgttcggtagcgctactggcgtgacacggtactatccagccaccccctggcgcgcccccaaaaagattgatctttatgatgtccgtcgaaggccttggtatatccaaggagcctcttcgcctaaagacatggtcatcatcgtagacgtgtccgggtcggtcagtgggttgacgctaaagcttatgaagacgagcgtgtgcgaaatgctcgatactctctccgacgatgattacgtaaacgttgcctcattcaacgagaaggcacagcctgtgtcatgttttacacacttggtgcaagctaatgttaggaataagaaggtgtttaaggaggcggtccagggaatggtcgctaaaggcaccacaggctacaaagcagggtttgagtacgcctttgatcagctccagaacagtaacattacaagagctaattgcaataaaatgataatgatgtttacagacggaggcgaggaccgcgtgcaggacgtgttcgagaagtataattggccgaatcggacggtgcgcgtctttaccttctccgtaggccaacacaactacgacgtgacaccactgcagtggatggcatgtgctaacaagggatactattttgagattccatctatcggtgcgatccgaattaatacccaggaataccttgatgtgctcgggcggcccatggtattggcaggaaaagaagctaaacaagtgcaatggaccaacgtgtatgaggacgcacttgggctaggtctggtagtcacaggcacactgcctgtctttaatctgactcaggatggccctggcgagaaaaaaaatcagttgatactcggagtgatgggcattgacgtggcgctgaacgacatcaagcgcctgacccctaattataccctgggcgcaaacgggtatgtctttgctatcgacctcaacggatatgttttgctgcaccctaacttgaaacctcaaacaaccaactttagggagcctgtgaccttagatttcctggatgccgaactggaggacgaaaacaaagaagaaattcggcggtcgatgatcgatggaaacaagggtcacaaacaaattcgcactctggtcaagtctttggacgagcgttatatcgatgaggtaactcgcaattacacttgggttcctatacggtccactaactacagcctgggcctggttctgccaccttactctaccttctatctgcaggccaatctaagcgatcagattctgcaggtgaaatattttgagttcctgctaccctcatccttcgagagcgaagggcacgtgttcattgccccacgcgagtattgcaaggacttgaacgcatccgataacaacaccgagtttctgaagaactttatagaacttatggagaaggtcacaccagattcaaaacagtgcaacaattttctgcttcacaatcttatcctggacacagggatcactcagcagctggttgaaagagtgtggcgggatcaggacctgaacacttacagcctactggccgtcttcgcagcaacggatggcggtattacccgagtcttcccgaacaaggcagccgaggactggaccgagaaccccgagcccttcaatgcttccttttatcgccgcagtctcgacaaccacggttacgtgtttaaaccacctcaccaggacgcgctgctccgaccactggagttggagaacgacactgtgggcatactggtctcgacagcagtagaactcagtctcggccgcaggacccttagacccgcggtggtgggggttaaactggacctggaggcttgggccgaaaaattcaaggtgctagcatctaacagaacccatcaagatcaaccgcagaagtgcggacccaattcccactgcgaaatggactgcgaagtcaataatgaggacctgctttgtgtactgattgacgacggtgggttcctcgtgctgtccaaccaaaaccaccagtgggaccaggttggacgctttttcagtgaagtcgatgctaacttgatgcttgctctatataataatagcttttacacccggaaggagagctacgactaccaagcagcctgtgcgccacaaccaccaggtaaccttggggccgcacctcgtggcgtatttgtccctaccgttgcggactttctcaatctggcatggtggacgtccgcagccgcttggtccctattccagcagctgttatacggccttatctaccactcatggtttcaggcggatccagctgaggctgaagggagtcctgagacacgtgagtcatcttgcgtgatgaaacagactcagtactattttggaagcgtgaacgcctcgtataacgccattattgattgcggaaattgttctagactcttccacgcacagcgtttaaccaacactaaccttctcttcgtagtcgccgagaaacctctctgctcccagtgcgaggccggaagactcctccagaaagagacacattgtccagcagatggacccgaacagtgcgaactagttcagaggccccgatatagacgcgggccacacatctgctttgattacaacgctacagaggataccagcgattgtggaagaggtgcatctttccccccttccctgggcgttctcgtaagtctgcagctgctcttgttgttggggctgccccccagaccacaaccccaagtgttggtacacgcaagcagaaggctgtag

SEQ ID NO: 21805 - DNA, 3441 bp, Artificial Sequence
  derived and/or modified sequence
atggcagtgccagctcgcacttgcggagcttctcgtcctggccccgctagaactgcgagaccctggcccggctgcgggccgcacccgggccctggaacccggcggccgacctccggccccccacgccccctgtggctgctgctgcctctgctgccactcctcgctgctcccggtgccagtgcctactccttccctcaacagcacacaatgcagcactgggcacgaaggctcgagcaggaggttgatggcgttatgagaatttttggaggggtgcagcagcttcgggaaatatacaaagacaaccgaaatctcttcgaggtacaggagaacgagccccagaaactcgtagagaaagtggcaggcgacatcgagtctctcttggaccggaaagttcaggctctcaaaaggttggccgatgccgccgagaatttccaaaaagctcatcgctggcaggataatataaaagaagaggatattgtctattacgacgccaaagccgatgccgagctcgatgacccagagtccgaagatgtggagagaggttcaaaagcatccacccttcggctcgactttatcgaagacccaaattttaagaataaagtgaattactcttatgccgctgtgcagatccccacagatatatataaggggagcaccgtgatcttgaacgaactcaactggacagaagccctggagaatgtattcatggaaaatagacggcaagacccaacccttctttggcaggtatttgggtctgctacgggggtgactcgttactaccccgccaccccgtggagagcaccaaaaaaaatcgatctatatgacgttaggagacgcccgtggtacatacagggggccagctctccgaaggacatggttattatcgtcgatgtctcgggctctgtgagcggtttgacactgaagctgatgaaaacctccgtttgtgagatgctagatactcttagtgatgacgattacgttaatgtggcttcctttaatgagaaggcccaacctgtcagctgtttcacacacctggtccaggccaatgtgcgtaataagaaagtgtttaaggaggctgtccagggcatggtggccaaggggacaaccggctacaaggcagggttcgagtacgcctttgaccagctccaaaactctaatattacacgagctaactgcaacaaaatgataatgatgtttaccgacggcggcgaggaccgcgtccaagacgtgtttgagaagtacaattggcccaacagaacggtcagggtctttaccttcagtgtaggacagcataattatgatgttactcccctgcagtggatggcatgcgccaacaagggatactattttgagatcccgagcattggtgctattcgcattaacacacaggaatatttagatgtgctggggagacctatggtgctcgccggaaaggaagcgaaacaggtccagtggaccaatgtgtacgaagatgctttgggtctgggtctagtcgtgactggcaccctgcccgtctttaacctgactcaagatggtcccggagaaaagaaaaatcagctgatcctgggcgttatgggaatcgacgtcgcgctcaatgacattaaacggctgacccccaactatacattaggtgcaaatggctacgtctttgcaattgatctcaacggctatgtcctactgcatcctaaccttaagcctcagacgacaaacttcagggagccagtgactctggactttttggacgctgaactggaggacgaaaataaagaagagataaggcggagcatgatagatggcaacaaaggccacaaacagatcagaacactcgtcaaatcattagatgaaaggtacattgatgaggtaacccgcaattacacctgggtccctataaggagcactaactacagcctgggccttgtcctgcccccttattctaccttctacctccaagcaaacctctcggatcagattctccaggtaaaatactttgagtttttgcttccgtcaagttttgagagcgaaggacacgttttcatcgctcctagggagtattgcaaggacctaaatgcatctgataacaatacagagtttctaaagaattttatcgaactgatggagaaagttactcccgacagcaagcagtgcaacaatttcctgctgcataatttaatacttgataccggaatcactcagcagttggtcgagcgggtgtggcgagatcaggatctcaatacttacagtctactcgccgtcttcgctgcgactgacggaggcatcactcgggtctttcccaataaagctgccgaggactggacagaaaacccagagccttttaatgcctccttctataggagatccttggacaatcatggctatgtattcaaaccgccacaccaagacgccctgctgaggcctttggagttggagaatgacacggtgggaattctggtgtcgacagccgtcgagctatccctcgggaggaggactctaagaccggccgtggtcggagtcaaattggatctggaagcatgggctgaaaaatttaaggtgttagccagcaaccgcacgcaccaggatcagcctcaaaagtgtgggcctaactcccattgcgagatggattgtgaagttaacaatgaagacttattatgtgtgctgatcgacgatgggggtttcctcgtcttatcgaatcagaaccatcagtgggaccaggtgggccgctttttttctgaggtagatgctaatttaatgcttgccctctacaacaattccttctacacccgaaaggaatcttacgactaccaggctgcgtgtgcccctcagcccccaggaaacttgggagccgcgccacggggggtgttcgtaccaactgttgcggattttctcaacttagcctggtggacctccgccgccgcttggtctctgttccagcagttgctgtatgggctaatttaccactcttggttccaggctgatcctgccgaagccgaaggcagccccgaaacacgagagtccagttgtgtgatgaagcagactcagtattacttcggatcagtcaatgcctcatataatgctataatcgattgtgggaactgcagccgcctgtttcacgcacaacggttgactaatactaacctgttgttcgtcgtcgctgagaaacccttgtgctcacaatgtgaggccggtcgtctgttgcagaaggagacccactgctgtcccgccgacggtcccgagcaatgtgaacttgttcagagacctagatataggcgcggcccacatatttgttttgactacaatgcgactgaagatacgtctgactgcggcagaggggcaagctttccccctagcctgggggttctggtgagtctacagctcttgctgcttctgggcctgcctccccggccccagccccaggtgctggtgcatgcctcacggcggttgtag

SEQ ID NO: 21806 - DNA, 3438 bp, Artificial Sequence
  derived and/or modified sequence
atggctgtgcctgcccggacctgtggggccagcaggcctggccctgccaggacagcccggccctggccaggctgcggcccccaccctggccctggcacccggcggcccaccagcggccccccccggcccctgtggctgctgctgcccctgctgcccctgctggccgcccctggggccagcgcctacagcttcccccagcagcacaccatgcagcactgggcccggcggctggagcaggaggtggatggagtgatgaggatctttggaggagtgcagcagctgcgggagatctacaaggacaacagaaacctgtttgaggtgcaggagaatgagccccagaagctggtggagaaggtggccggggacatcgagagcctgctggacaggaaggtgcaggccctgaagaggctggctgatgctgctgagaacttccagaaggcccaccgctggcaggacaacatcaaggaggaggacatcgtgtactatgatgccaaggcagatgctgagctggatgatcctgagagtgaagatgtggagcggggcagcaaggccagcaccctgcggctggacttcatcgaggaccccaacttcaagaacaaggtgaactacagctatgctgctgtgcagatccccacagacatctacaagggcagcaccgtcatcctgaatgagctgaactggacagaggccctggagaatgtgttcatggagaacagacggcaggaccccaccctgctgtggcaggtgtttggcagcgccaccggggtgacccgctactacccagccaccccctggagggcccccaagaagattgacctgtatgatgtgagaagaagaccctggtacatccagggcgccagcagccccaaggacatggtgatcatcgtggatgtgtctggctctgtgtctggcctgaccctgaagctgatgaagacctctgtgtgtgagatgctggacaccctgagtgatgatgattatgtgaatgtggccagcttcaatgagaaggcccagcctgtgtcctgcttcacccacctggtgcaggccaacgtgaggaacaagaaggtgttcaaggaggccgtgcagggcatggtggccaagggcaccaccggctacaaggccggctttgaatatgcctttgaccagctgcagaacagcaacatcacccgggccaactgcaacaagatgatcatgatgttcacagatggaggagaggacagagtgcaggatgtgtttgagaagtacaactggcccaacagaacagtgcgggtcttcaccttctctgtgggccagcacaactatgatgtgacccccctgcagtggatggcctgtgccaacaagggctactactttgagatccccagcattggagccatccgcatcaacacccaggagtacctggatgtgctgggccggcccatggtgctggccggcaaggaggccaagcaggtgcagtggaccaacgtgtatgaagatgccctgggcctgggcctggtggtgacaggcaccctgcccgtcttcaacctgacccaggacggccctggagagaagaagaaccagctgatcctgggcgtgatgggcattgatgtggccctgaatgacatcaagaggctgacccccaactacaccctgggcgccaacggctacgtgtttgccatcgacctgaatggctacgtgctgctgcaccccaacctgaagccccagaccaccaacttccgggagcctgtgaccctggacttcctggatgctgagctggaggatgagaacaaggaggagatcagaagatccatgattgatggcaacaagggccacaagcagatccgcaccctggtgaagagcctggatgagcgctacattgatgaggtgaccaggaactacacctgggtgcccatccgcagcaccaactacagcctgggcctggtgctgcccccctacagcaccttctacctgcaggccaacctgagtgaccagatcctgcaggtgaagtactttgagttcctgctgcccagcagctttgaaagtgagggccacgtgttcatcgccccccgggagtactgcaaggacctgaatgccagtgacaacaacacagagttcctgaagaacttcatcgagctgatggagaaggtgaccccagacagcaagcagtgcaacaacttcctgctgcacaacctgatcctggacaccggcatcacccagcagctggtggagcgggtgtggagggaccaggacctgaacacctacagcctgctggccgtgtttgctgccacagatggcggcatcaccagggtcttccccaacaaggctgctgaggactggacagaaaatcctgagcccttcaatgccagcttctaccgccgcagcctggacaaccacggctacgtgttcaagccaccccaccaggatgccctgctgcggcccctggagctggagaatgacacagtgggcatcctggtgtccacagctgtggagctgagcctgggccgccgcaccctgcggcctgctgtggtgggcgtgaagctggacctggaggcctgggccgagaagttcaaggtgctggccagcaacagaacccaccaggaccagccccagaagtgtggccccaacagccactgtgagatggactgtgaggtgaacaatgaagacctgctgtgtgtgctgattgatgatggcggcttcctggtgctgagcaaccagaaccaccagtgggaccaggtgggccgcttcttcagcgaggtggatgccaacctgatgctggccctgtacaacaacagcttctacaccaggaaggagagctatgactaccaggccgcctgtgccccccagcccccaggcaacctgggcgccgccccccggggcgtgtttgtgcccaccgtggccgacttcctgaacctggcctggtggaccagcgctgctgcctggagcctcttccagcagctgctgtatggcctcatctaccacagctggttccaggccgaccctgctgaggccgagggcagccctgagacccgggagagcagctgtgtgatgaagcagacccagtactactttggatctgtgaatgccagctacaatgccatcatcgactgtggcaactgcagccgcctcttccacgcccagaggctgaccaacaccaacctgctgtttgtggtggccgagaagcccctgtgcagccagtgtgaggccggccgcctgctgcagaaggagacccactgcccagcagatggccctgagcagtgtgagctggtgcagaggccccgctacagaagaggcccccacatctgctttgactacaatgccacagaggacaccagtgactgtggccgcggggccagcttcccccccagcctgggcgtgctggtgtccctgcagctgctgctgctgctgggcctgcccccccggccccagccccaggtgctggtgcacgccagccggcggctgtag

SEQ ID NO: 21807 - DNA, 3441 bp, Artificial Sequence
  derived and/or modified sequence
atggctgtgcctgcccggacctgtggggccagcaggcctggccctgccaggacagcccggccctggccaggctgcggcccccaccctggccctggcacccggcggcccaccagcggccccccccggcccctgtggctgctgctgcccctgctgcccctgctggccgcccctggggccagcgcctacagcttcccccagcagcacaccatgcagcactgggcccggcggctggagcaggaggtggatggagtgatgaggatctttggaggagtgcagcagctgcgggagatctacaaggacaacagaaacctgtttgaggtgcaggagaatgagccccagaagctggtggagaaggtggccggggacatcgagagcctgctggacaggaaggtgcaggccctgaagaggctggctgatgctgctgagaacttccagaaggcccaccgctggcaggacaacatcaaggaggaggacatcgtgtactatgatgccaaggcagatgctgagctggatgatcctgagagtgaagatgtggagcggggcagcaaggccagcaccctgcggctggacttcatcgaggaccccaacttcaagaacaaggtgaactacagctatgctgctgtgcagatccccacagacatctacaagggcagcaccgtcatcctgaatgagctgaactggacagaggccctggagaatgtgttcatggagaacagacggcaggaccccaccctgctgtggcaggtgtttggcagcgccaccggggtgacccgctactacccagccaccccctggagggcccccaagaagattgacctgtatgatgtgagaagaagaccctggtacatccagggcgccagcagccccaaggacatggtgatcatcgtggatgtgtctggctctgtgtctggcctgaccctgaagctgatgaagacctctgtgtgtgagatgctggacaccctgagtgatgatgattatgtgaatgtggccagcttcaatgagaaggcccagcctgtgtcctgcttcacccacctggtgcaggccaacgtgaggaacaagaaggtgttcaaggaggccgtgcagggcatggtggccaagggcaccaccggctacaaggccggctttgaatatgcctttgaccagctgcagaacagcaacatcacccgggccaactgcaacaagatgatcatgatgttcacagatggaggagaggacagagtgcaggatgtgtttgagaagtacaactggcccaacagaacagtgcgggtcttcaccttctctgtgggccagcacaactatgatgtgacccccctgcagtggatggcctgtgccaacaagggctactactttgagatccccagcattggagccatccgcatcaacacccaggagtacctggatgtgctgggccggcccatggtgctggccggcaaggaggccaagcaggtgcagtggaccaacgtgtatgaagatgccctgggcctgggcctggtggtgacaggcaccctgcccgtcttcaacctgacccaggacggccctggagagaagaagaaccagctgatcctgggcgtgatgggcattgatgtggccctgaatgacatcaagaggctgacccccaactacaccctgggcgccaacggctacgtgtttgccatcgacctgaatggctacgtgctgctgcaccccaacctgaagccccagaccaccaacttccgggagcctgtgaccctggacttcctggatgctgagctggaggatgagaacaaggaggagatcagaagatccatgattgatggcaacaagggccacaagcagatccgcaccctggtgaagagcctggatgagcgctacattgatgaggtgaccaggaactacacctgggtgcccatccgcagcaccaactacagcctgggcctggtgctgcccccctacagcaccttctacctgcaggccaacctgagtgaccagatcctgcaggtgaagtactttgagttcctgctgcccagcagctttgaaagtgagggccacgtgttcatcgccccccgggagtactgcaaggacctgaatgccagtgacaacaacacagagttcctgaagaacttcatcgagctgatggagaaggtgaccccagacagcaagcagtgcaacaacttcctgctgcacaacctgatcctggacaccggcatcacccagcagctggtggagcgggtgtggagggaccaggacctgaacacctacagcctgctggccgtgtttgctgccacagatggcggcatcaccagggtcttccccaacaaggctgctgaggactggacagaaaatcctgagcccttcaatgccagcttctaccgccgcagcctggacaaccacggctacgtgttcaagccaccccaccaggatgccctgctgcggcccctggagctggagaatgacacagtgggcatcctggtgtccacagctgtggagctgagcctgggccgccgcaccctgcggcctgctgtggtgggcgtgaagctggacctggaggcctgggccgagaagttcaaggtgctggccagcaacagaacccaccaggaccagccccagaagtgtggccccaacagccactgtgagatggactgtgaggtgaacaatgaagacctgctgtgtgtgctgattgatgatggcggcttcctggtgctgagcaaccagaaccaccagtgggaccaggtgggccgcttcttcagcgaggtggatgccaacctgatgctggccctgtacaacaacagcttctacaccaggaaggagagctatgactaccaggccgcctgtgccccccagcccccaggcaacctgggcgccgccccccggggcgtgtttgtgcccaccgtggccgacttcctgaacctggcctggtggaccagcgctgctgcctggagcctcttccagcagctgctgtatggcctcatctaccacagctggttccaggccgaccctgctgaggccgagggcagccctgagacccgggagagcagctgtgtgatgaagcagacccagtactactttggatctgtgaatgccagctacaatgccatcatcgactgtggcaactgcagccgcctcttccacgcccagaggctgaccaacaccaacctgctgtttgtggtggccgagaagcccctgtgcagccagtgtgaggccggccgcctgctgcagaaggagacccactgctgcccagcagatggccctgagcagtgtgagctggtgcagaggccccgctaccgccggggcccccacatctgctttgactacaatgccacagaggacaccagtgactgtggccgcggggccagcttcccccccagcctgggcgtgctggtgtccctgcagctgctgctgctgctgggcctgcccccccggccccagccccaggtgctggtgcacgccagccggcggctgtag

SEQ ID NO: 21808 - DNA, 3438 bp, Artificial Sequence
  derived and/or modified sequence
atggccgtgcccgcccggacctgcggcgccagccggcccggccccgcacgcaccgctaggccttggcctggatgtggacctcatcccgggcctggaacacgcagacccaccagtggacccccacgacctctttggctactgctgcccctgctcccgctgctcgctgctcccggggcttctgcctacagtttcccacagcaacacacgatgcagcactgggccaggcgactggaacaggaggttgatggtgtgatgcgcatattcggcggcgtccagcagctgcgtgagatctacaaggacaacaggaacttgtttgaagttcaggaaaacgagccgcagaagctcgtcgagaaagtggcaggcgacattgaatccctcctggacagaaaggtgcaagcacttaagcgactggctgacgcagctgaaaatttccagaaggcccataggtggcaagacaacatcaaagaggaagatatagtatactacgacgccaaagcagacgccgaactggacgaccctgagtcggaggatgtagagcggggatctaaagcctcgactcttcgcctggatttcatcgaggatcccaactttaaaaataaggtgaattactcctatgccgcggtgcagatccccaccgatatctacaagggatcgactgtcatcctgaatgagctcaactggacagaggctctggagaatgtatttatggagaacaggagacaggaccccacactcctgtggcaggtgttcggtagtgccaccggagttactcgctactacccagcaacgccttggcgggcccccaagaaaattgatctgtacgacgtgcgccgacggccttggtatatccagggggccagctctcctaaagatatggtgatcattgtggacgtctctggtagcgtgtcaggcctgactctcaagctaatgaagactagcgtgtgcgaaatgcttgacaccctgagtgatgacgattatgtgaatgtagcttctttcaacgagaaagcccagccagtttcatgcttcactcatctagtacaggccaatgtacgaaacaagaaggtctttaaagaagcagtccaggggatggtggctaagggcactactggttacaaagctgggttcgagtacgcctttgaccagttacagaacagcaatatcactcgagcgaactgcaacaagatgattatgatgtttaccgatggaggcgaggatagggtgcaggacgtgttcgagaaatacaactggcccaatcgaaccgttagagtattcacttttagtgtgggccagcataactatgatgtcactccactccagtggatggcatgcgcaaataaaggttattattttgagattcccagcattggcgcaatcaggatcaatacacaggagtacctcgacgttctggggagaccaatggtcctcgctgggaaggaagcaaaacaagtgcaatggaccaacgtttacgaggacgccctgggattagggcttgttgtcacgggcacgctgcctgtcttcaacctgacacaggatgggccaggtgagaagaaaaatcagcttatactgggtgtaatgggcattgatgtggcgctaaacgacataaaaaggttaacccctaattacaccctgggggccaacgggtacgtgtttgcaattgacctgaacggatacgttctgctgcatccaaaccttaagccacagactaccaacttccgcgaaccagtaaccctggatttcctcgatgcagagctggaggacgaaaataaggaggaaattcgcaggtctatgattgacggcaataaggggcataaacagatccgtaccttggttaaaagccttgatgagcgctacattgatgaggtgacccggaactatacttgggtgccaatcagatccaccaattattcacttggtctggtactgccaccttattccactttttatctccaggcgaacctgagcgatcaaattctccaggtaaagtacttcgagtttttactgccatctagctttgaaagtgagggccacgtttttattgccccgcgggagtattgcaaagatctgaacgcaagtgataataacaccgagttcctcaagaattttatcgagctgatggaaaaagtcacgcctgacagtaaacagtgcaataactttttactccataacctgattcttgataccgggatcacacaacagctggtggagcgcgtatggcgcgatcaagacctaaacacctacagcctgctggctgtgttcgccgctactgacggtggcatcacgagggtgttcccaaataaagcggcagaggactggactgaaaacccggagccatttaatgcatcattttatcggcgttcactggacaatcatggctatgtgtttaagcccccgcatcaagacgccctcctgaggccgctggagttggaaaatgataccgtgggtattctggtctccacggctgttgagctaagtctcgggagacggacgctgcgaccagcagtcgttggtgtcaaacttgatctggaggcctgggctgaaaagtttaaggttctggccagtaatcgcacacaccaggatcaaccccagaagtgcggtcccaacagccactgcgagatggactgtgaagtcaataacgaagatctcctgtgtgtcctgattgacgatggtgggtttttagtgttgtcaaaccagaatcatcagtgggaccaggtgggcaggtttttttctgaggttgatgcgaatctgatgcttgccctatacaataactctttctatactcgtaaagagtcttatgactaccaggctgcctgtgcaccccagcccccaggtaaccttggggcagcgcctagaggcgtgtttgtcccaactgtggccgacttcctgaacttagcttggtggacaagtgctgcagcgtggagcttgtttcaacagctgttgtacggacttatttatcactcatggtttcaggctgaccctgcagaggctgagggcagccccgaaacccgcgaaagctcttgcgtgatgaaacagacccaatattattttggtagcgtgaacgcctcttacaacgcaattatcgattgtggtaactgttccaggctcttccatgcccagcgcctcacgaatactaatctactgttcgtcgtcgctgaaaagccgctctgctcacagtgtgaagcagggcggctgctgcagaaggaaactcattgcccggccgatggaccagagcagtgcgaattggtgcagagaccacgttatcggcgaggaccccacatctgcttcgattataacgcgaccgaggataccagtgactgcggaaggggtgcatccttccccccttccctaggggtactggtgtccctgcagctattgctgctgctcgggcttccgcccaggccacaaccacaggtcctggtgcatgcatctcggcggctgtag

SEQ ID NO: 21809 - DNA, 3441 bp, Artificial Sequence
  derived and/or modified sequence
atggccgtgcccgcccggacctgcggcgccagccggcccggccccgctcggacagctcggccttggcccggatgcggcccgcatcctggaccaggcacaagacgcccaacgagcgggcctccccgccccctctggctcttgttgcccttgctccccttgctggcagcccccggcgccagtgcttacagctttcctcagcagcatactatgcagcactgggccagacggctggagcaggaagtcgacggggtgatgcgtatatttggaggtgttcagcagctgagagagatctataaggataacagaaacctgtttgaggtgcaggagaatgagccccagaagctggtagagaaggtagcaggcgacattgagtctttgttagatcgcaaagtgcaggcactgaaacggctggcagacgccgccgagaacttccaaaaagctcataggtggcaggacaacattaaagaggaggacatcgtgtactacgatgcaaaagctgacgcagagttggatgatccagaatctgaagacgtcgagcgggggagtaaagcttccaccttgagacttgattttattgaggatcccaactttaaaaacaaagtgaattactcttacgccgccgtacagattcctaccgatatatataagggctctaccgtgatactgaacgagctgaattggacagaggcccttgagaacgtcttcatggaaaatcgccgccaggaccctaccctgctgtggcaggttttcggtagcgccaccggagtgaccaggtactatcctgccacgccttggagagccccaaagaagattgacttgtacgacgttagaaggcggccctggtatatacagggagcatcatcccccaaggatatggtcataatagttgatgtcagcgggtccgtgtccggcctgaccctgaaacttatgaagaccagcgtatgtgagatgcttgacacccttagcgacgatgactacgtaaatgtggcctctttcaacgagaaggcacaacccgtcagttgttttacacacttagttcaggccaacgtgcgcaataagaaagtctttaaggaggctgtgcagggcatggtggctaaaggcacgactggctacaaagctgggttcgagtatgccttcgatcagctccagaacagcaacatcacccgggcgaactgcaataaaatgatcatgatgttcaccgatgggggcgaagaccgtgtacaagacgtgttcgagaaatataattggcccaaccggactgtgagggtctttacattctcagtgggacaacacaactacgatgttacgccgttgcagtggatggcttgtgctaataagggatactactttgaaattccgagtatcggagctattcggataaacacacaggagtacttggatgtgctgggacggcccatggtgctggccggtaaggaggccaagcaggtgcagtggacgaacgtgtatgaggacgccctaggactcgggctcgtggttaccggtaccttacctgtgttcaatcttacccaggacggcccaggtgagaaaaaaaatcaactcatactcggcgtcatgggaattgatgtagccttgaacgacatcaagaggctgaccccaaactacaccctgggggccaatggatacgtctttgccattgatctgaatgggtacgtgttgctgcaccccaacctgaaaccccaaacaaccaactttagggaaccagtaaccctggacttcctggacgccgagctggaggacgaaaataaggaggaaatcagaagatctatgatcgacggcaacaaaggccataagcagattcgaactttggtgaaatctctcgacgaacgttacatcgatgaagtgacacggaattatacatgggtgcctatacggagcaccaattatagcctgggacttgtcctgcccccatattccacattctatctacaagcaaacctgtctgaccaaatcttgcaggtaaagtacttcgagtttttgttgccctctagttttgaatcggagggccatgttttcatcgcacctcgggaatactgtaaggatctgaatgcctccgataacaataccgagttcctcaaaaactttatcgagctgatggagaaggtgacccccgactctaagcagtgtaataactttctcctgcacaatctgattctggatactggcattactcagcagctggtggaacgagtctggcgtgatcaggacctgaatacctatagcttgctagctgtcttcgcagccaccgacggcggcataactcgtgtcttcccaaataaggctgcggaggattggaccgaaaacccagagcccttcaacgctagtttctacagacggagcctagataatcatgggtacgtgtttaagcctccccaccaggacgctctgcttcggcccctggagttggaaaacgacacggtgggcatactcgtctcaaccgcggtcgagctttccctcggtcgacggacactgagacccgctgtcgtcggcgtgaaactggacttagaggcctgggcggaaaaattcaaagtactcgcctctaacagaactcaccaggaccagccccagaagtgtgggcctaatagtcactgcgaaatggactgtgaagtcaataacgaagacttgttatgtgtcctgattgacgacgggggatttttggttctctccaaccaaaaccatcaatgggaccaggtgggcaggtttttttccgaggtggatgcgaatctaatgctggccctttacaacaactctttttacacaagaaaagaatcttatgattaccaagccgcctgcgcaccccagcctcccggtaatttaggtgcagcacctaggggagttttcgttcccacagtcgcggacttcctcaatctggcttggtggacgagtgccgctgcctggtctttatttcagcaactgctttacggtctgatataccactcctggttccaagccgaccctgctgaagccgagggctcacccgaaaccagggagagctcatgcgtcatgaaacagacacaatactattttggctctgtgaatgcctcttataatgcaattattgattgcgggaattgcagccgtctctttcatgcacaaaggcttactaataccaatctgctatttgtggtagcggaaaagccactttgttcccagtgcgaggcagggcgtctgcttcaaaaagagacccactgttgccctgcagacggccccgaacagtgtgagcttgtgcagcgccctcggtataggcgcggtccacatatctgcttcgattacaacgcgactgaggatacctcagattgcggaaggggggcttcgtttcctcccagtctcggggtgcttgtgagtctccaactgcttctcctcctggggttgcctcctcgaccccagccacaggtgttggtgcacgccagccgccgtctttag

SEQ ID NO: 21810 - DNA, 3438 bp, Artificial Sequence
  derived and/or modified sequence
atggccgtgccagcccgaacctgcggggcatcaagacctggacctgccagaaccgccagaccatggcctggttgtgggcctcaccctgggccaggcacccgacgcccaacctcagggccacctaggcctctatggctgttgctgccactcttgccgttgctggccgcaccgggtgccagtgcgtattcgttccctcagcagcacactatgcagcactgggccaggcggctggagcaggaagttgacggtgttatgcgcatatttggtggagtgcaacagctaagggagatctacaaggataatagaaatctgtttgaggtgcaggagaacgaaccccaaaagctggtggagaaggtggccggtgatattgagtctctcctagatagaaaggtacaggctctaaagaggctggccgatgccgctgagaatttccagaaagcacaccggtggcaagacaatattaaggaagaggacatagtatactatgatgctaaagctgatgctgagctagatgatcccgagagtgaagacgtggagcggggatccaaggcatcaacccttagactggacttcatcgaggacccgaactttaaaaacaaggtgaattacagttacgcagctgtacagatccccaccgacatctacaagggctcgactgtgattcttaatgagctgaattggacagaggcacttgagaacgttttcatggagaaccgacgccaggatccaactctcctgtggcaggtctttggatctgccaccggtgtgacgcgatattacccggctactccctggagagctccgaaaaaaatcgatctttacgacgtccgccgtaggccatggtacattcagggagcttcaagtccgaaggacatggtgataattgttgacgtctcgggatccgtttcaggtctgaccctgaagctgatgaaaaccagcgtgtgcgaaatgttagataccctatccgatgatgactatgtgaatgtagcaagcttcaacgagaaggcgcaacccgtttcatgttttacccatctggtgcaagccaatgtgaggaacaagaaggtgtttaaggaggctgtgcagggcatggtagctaagggtacaaccgggtacaaagcaggattcgaatacgcctttgaccaacttcagaactcaaatattacccgtgctaactgcaacaaaatgatcatgatgtttaccgatgggggagaggaccgtgtgcaggatgtattcgagaagtacaactggccaaacagaacagtacgtgtttttaccttttcagtggggcaacataactacgacgttactccactgcagtggatggcttgtgctaacaaagggtattatttcgaaataccctcgatcggggctatccgaatcaacacccaggagtacttggacgtgctcgggcgacccatggtgctggccggtaaagaagcaaagcaagttcagtggacaaacgtgtatgaggatgccctcggactgggcctagtggtcactggtaccctgcccgtcttcaatctgacacaggatgggcctggagagaagaagaatcagctcattctgggcgtgatgggaatagatgtggccctgaatgatataaaacgcttgacacctaactacaccctgggtgccaatggctacgtgttcgcaattgacctcaatgggtatgtgctgcttcatcctaatctcaagccacaaacaacaaacttccgtgaaccagtgacattagattttttggatgctgagctggaagacgaaaacaaagaggaaatccgtaggagtatgattgatggcaacaaaggacacaagcagatccgtactctcgtgaagtccctggacgaacggtacatcgatgaagttacgcgcaattatacttgggtcccgattagatccaccaactactcgctcggactcgtactgcccccttactcaacattttacctacaggctaaccttagtgaccagatcctgcaggtaaagtactttgagtttttactgccgtcttccttcgagtcagagggacacgtgttcatcgctcctagggagtattgcaaagatctgaatgcttcggataataacaccgaattccttaaaaattttatcgaattgatggagaaagtaacgccagattccaagcagtgcaacaattttctgttgcacaacctaattctcgacactggcattacccaacagctagtcgaaagggtgtggcgtgaccaggatctgaatacatattctctgctggccgtcttcgctgctaccgatggagggatcactcgcgtcttcccgaacaaggcggctgaagattggactgagaatcctgaacctttcaatgcatctttttacaggcgatctcttgacaatcacggatatgtctttaaacctccacatcaggacgcactgctgcggcctctagaacttgaaaacgatacagttggaatcctggtgtctactgcagtggagctttcactgggaagaaggaccctccgtccggctgttgtgggcgtgaagctggacctagaggcttgggccgagaagttcaaggtgcttgcaagcaacagaacccatcaggaccagccccagaaatgtgggccaaactcccactgcgaaatggattgcgaggttaataacgaggatctgctgtgcgttttgatcgatgatggcggtttcctggtgctgagcaatcaaaaccaccaatgggatcaggttgggaggttctttagcgaggtcgatgctaaccttatgctggcactctacaataactctttttatacaagaaaagagagctatgattatcaggccgcatgcgcgccacagccacccggtaacctgggcgctgcacccagaggagttttcgtccccacggtcgccgatttccttaacctagcgtggtggacctctgctgctgcctggagcctattccagcagttactgtacggcctgatttatcactcgtggttccaggcggatccagccgaggcggaggggagccccgaaacaagagaatcatcttgcgtaatgaaacaaacccaatactactttggaagcgttaacgcctcttacaatgccattatcgactgcggaaattgttctaggttgtttcacgcccaacgtctgaccaatacaaatctgcttttcgtggtggctgaaaagccactgtgcagccagtgcgaggccggaaggctcctccaaaaagagactcattgccctgcagacgggccagagcaatgtgaattggtgcagaggccgcgatatcggaggggaccgcatatatgcttcgactacaacgctactgaggataccagcgactgcggccgtggtgcgtctttccctccaagtctcggcgtcctggtctccttgcaactcctattgttgctcggtctgccacctcggccacagccacaggtactggtccacgcgagcaggagactctag

SEQ ID NO: 21811 - DNA, 3441 bp, Artificial Sequence
  derived and/or modified sequence
atggctgttccagcccgaacgtgtggagctagccgccctggcccagcgagaacagctcggccttggcctggttgcggaccacatcccggaccagggactagacgaccaacctcaggtccgccacgacccctctggctactgttacctctattgccactgttagccgcaccaggtgctagcgcatacagttttccccagcagcacaccatgcagcattgggcgaggcggttagagcaggaagttgatggcgttatgaggattttcggaggcgtgcagcagttgagagaaatctacaaagacaatcgtaaccttttcgaagtgcaggaaaacgagccccagaagcttgtggaaaaagtcgcaggcgacatcgagtctctgctcgatagaaaagtgcaagcgctcaaaaggctggcggacgctgccgagaatttccaaaaggctcacagatggcaggataacatcaaggaagaagatatcgtgtattatgacgccaaggctgatgcagaactggacgacccagaatctgaggacgtggagcgcggaagcaaagcttccacactccgactcgattttatagaggatccgaatttcaaaaacaaggtcaattacagttacgccgctgtacagatcccaacagacatttataaggggagtaccgttatcctcaatgaactcaattggaccgaggcactcgaaaatgtgttcatggagaaccggagacaggatccaaccctcctttggcaggtttttggatccgcgacaggcgtaacccgctattatcctgctacaccatggcgggctccaaagaaaattgatttatatgatgtccggaggagaccatggtacattcagggagcttcttctcctaaagacatggttataatcgtggacgtgagcggctcggtgtcaggcctgacgcttaaacttatgaagacctccgtttgtgagatgctagacaccctttccgacgatgattatgtgaacgtggcctcattcaacgaaaaggcacaaccagtgtcttgttttacccatttggttcaagccaatgtgaggaataaaaaggtgttcaaggaggcagtgcaaggtatggtcgcgaaaggcacaactggttacaaggccggtttcgagtatgccttcgatcagctccagaactccaacatcacgcgcgctaactgtaataaaatgatcatgatgttcactgacggaggcgaggaccgagtccaggacgtattcgagaagtacaattggccaaacagaaccgtccgggtattcaccttctccgtgggacagcacaattatgacgtgacccctttacagtggatggcctgcgccaataaggggtactatttcgagatcccgagcatcggggctattagaataaatacccaggaatatctcgacgtgttgggcaggcctatggtgctggcgggtaaagaggctaagcaggttcagtggacaaatgtgtacgaggacgctttgggtctgggcctggtagttacagggaccctcccagtcttcaacctgacccaggatgggccaggggaaaagaaaaaccagttgatactgggcgtgatgggcattgacgtcgcactcaacgacatcaagaggctcacccctaactacaccttaggcgctaatggatatgtatttgctatcgatctcaatgggtacgtacttttacatccaaacctgaaaccacaaaccacaaatttcagggaaccagtgaccttggacttccttgacgccgagcttgaggatgagaacaaggaagagatcaggcgttcaatgatcgatgggaataaagggcacaagcagatccggactctggtgaaaagcctagacgaaagatacatagatgaagtgactcggaattatacgtgggtccctattaggtctaccaattacagtctggggctggtcctgcccccttattctaccttctaccttcaggccaatctgtctgatcaaattttgcaagtgaagtatttcgaattccttcttccaagtagctttgaatccgaaggtcacgtatttattgccccacgtgagtactgcaaggatctgaacgccagcgataacaataccgagtttctgaaaaattttattgaactgatggagaaggtgactcctgatagcaagcaatgtaataatttcttgctgcataacctgatccttgacacaggtatcactcagcagttagtagagcgggtgtggcgcgatcaggatctgaacacatatagtctgttagccgtttttgcagccaccgacgggggtatcaccagagttttcccaaacaaggccgcagaagactggacagagaaccccgaaccttttaatgcatcattctacagacgcagtctcgataatcatgggtatgtttttaagccgcctcaccaagacgctctgctgcgcccactagaacttgagaacgatacagtgggaatactcgtttctacagcggttgaattaagccttgggcgtagaactctcagacccgcagtggtgggagttaaactggacctcgaggcatgggctgaaaaatttaaagtgctagcttcaaatcgtacccatcaagatcagccacaaaagtgtggcccaaatagtcactgtgaaatggactgtgaggttaataatgaggacttgctgtgcgtgttgatagacgacggcggttttctcgtgttgtctaatcagaaccatcagtgggaccaggtcggcaggttcttctccgaggtggatgccaatctcatgttagctctctataacaacagtttttacacccggaaagaatcctatgattaccaagctgcatgtgcccctcagcctccgggtaatctgggggctgctcctagaggcgtcttcgttccgaccgttgccgacttcttgaatctggcctggtggacttcagccgctgcttggtcactctttcaacagttgctgtatggcctaatttaccattcatggtttcaggccgatcctgctgaggcagaggggtcacctgaaacaagggaaagctcctgtgtcatgaaacagactcagtactactttggaagcgtcaacgcatcctataatgccatcatcgactgcggcaattgtagtcggttgtttcacgctcagcgcctgaccaacaccaacctcctgttcgtagtggctgagaaacctctgtgctctcagtgtgaggcaggccgactcctgcagaaagaaacccactgctgcccagctgatggacccgagcagtgtgagctggtccagcgtccccgttaccggcgtgggccacacatatgttttgactacaacgcgaccgaagacacctcagattgcggtcgcggagcttcctttcccccttccctgggtgtgcttgtgtcattgcagctgttactcctccttggactacctcccagacctcagcctcaggtcctggtccacgcaagtcgacgactctag

SEQ ID NO: 21812 - DNA, 5476 bp, Artificial Sequence
  derived and/or modified sequence
gcgcagcccgcagaggcgctgcggcccgtgcagccccggaggcccctcgcggagaaggcggcggcggaggagaggccgagttaccgcccgccgcccgcgcccccccaaccccgccgccgccgccgccgccgccactgccccccctccccgcggcgccgcatcttgaatggaaacatggcggtgccggctcggacctgcggcgcctctcggcccggcccagcgcggactgcgcgcccctggcccggctgcggcccccaccctggccccggcacccggcgcccgacgtccgggcccccgcgcccgctgtggctgctgctgccgcttctaccgctgctcgccgcccccggcgcctctgcctacagcttcccccagcagcacacgatgcagcactgggcccggcgtctggagcaggaggtcgacggcgtgatgcggatttttggaggcgtccagcagctccgtgagatttacaaggacaaccggaacctgttcgaggtacaggagaatgagcctcagaagttggtggagaaggtggcaggggacattgagagccttctggacaggaaggtgcaggccctgaagagactggctgatgctgcagagaacttccagaaagcacaccgctggcaggacaacatcaaggaggaagacatcgtgtactatgacgccaaggctgacgctgagctggacgaccctgagagtgaggatgtggaaagggggtctaaggccagcaccctaaggctggacttcatcgaggacccaaacttcaagaacaaggtcaactattcatacgcggctgtacagatccctacggacatctacaaaggctccactgtcatcctcaatgagctcaactggacagaggccctggagaatgtgttcatggaaaaccgcagacaagaccccacactgctgtggcaggtcttcggcagcgccacaggagtcactcgctactacccggccaccccgtggcgagcccccaagaagatcgacctgtacgatgtccgaaggagaccctggtatatccagggggcctcgtcacccaaagacatggtcatcatcgtggatgtgagtggcagtgtgagcggcctgaccctgaagctgatgaagacatctgtctgcgagatgctggacacgctgtctgatgatgactatgtgaatgtggcctcgttcaacgagaaggcacagcctgtgtcatgcttcacacacctggtgcaggccaatgtgcgcaacaagaaggtgttcaaggaagctgtgcagggcatggtggccaagggcaccacaggctacaaggccggctttgagtatgcctttgaccagctgcagaactccaacatcactcgggccaactgcaacaagatgatcatgatgttcacggatggtggtgaggaccgcgtgcaggacgtctttgagaagtacaattggccaaaccggacggtgcgcgtgtttactttctccgtggggcagcataactatgacgtcacaccgctgcagtggatggcctgtgccaacaaaggctactattttgagatcccttccatcggagccatccgcatcaacacacaggaatatctagatgtgttgggcaggcccatggtgctggcaggcaaggaggccaagcaggtgcagtggaccaacgtgtatgaggatgcactgggactggggttggtggtaacagggaccctccctgttttcaacctgacacaggatggccctggggaaaagaagaaccagctgatcctgggcgtgatgggcattgacgtggctctgaatgacatcaagaggctgacccccaactacacgcttggagccaacggctatgtgtttgccattgacctgaacggctacgtgttgctgcaccccaatctcaagccccagaccaccaacttccgggagcctgtgactctggacttcctggatgcggagctagaggatgagaacaaggaagagatccgtcggagcatgattgatggcaacaagggccacaagcagatcagaacgttggtcaagtccctggatgagaggtacatagatgaggtgacacggaactacacctgggtgcctataaggagcactaactacagcctggggctggtgctcccaccctacagcaccttctacctccaagccaatctcagtgaccagatcctgcaggtcaagtattttgagttcctgctccccagcagctttgagtctgaaggacacgttttcattgctcccagagagtactgcaaggacctgaatgcctcagacaacaacaccgagttcctgaaaaactttattgagctcatggagaaagtgactccagactccaagcagtgcaacaacttccttctgcacaacctgatcttggacacgggcatcacgcagcagctggtagagcgtgtgtggagggaccaggatctcaacacgtacagcctactggccgtgttcgctgccacagacggtggcatcacccgagtcttccccaacaaggcagctgaggactggacagagaaccctgagcccttcaatgccagcttctaccgccgcagcctggataaccacggttatgtcttcaagcccccacaccaggatgccctgttaaggccgctggagctggagaatgacactgtgggcatcctcgtcagcacagctgtggagctcagcctaggcaggcgcacactgaggccagcagtggtgggcgtcaagctggacctagaggcttgggctgagaagttcaaggtgctagccagcaaccgtacccaccaagaccagcctcagaagtgcggccccaacagccactgtgagatggactgcgaggttaacaatgaggacttactctgtgtcctcattgatgatggaggattcctggtgctgtcaaaccagaaccatcagtgggaccaggtgggcaggttcttcagtgaggtggatgccaacctgatgctggcactctacaataactccttctacacccgcaaggagtcctatgactatcaggcagcctgtgcccctcagccccctggcaacctgggtgctgcaccccggggtgtctttgtgcccaccgttgcagatttccttaacctggcctggtggacctctgctgccgcctggtccctgttccagcagcttctctacggcctcatctaccacagctggttccaagcagaccccgcggaggccgaggggagccccgagacgcgcgagagcagctgcgtcatgaaacagacccagtactacttcggctcggtaaacgcctcctacaacgccatcatcgactgcggaaactgctccaggctgttccacgcgcagagactgaccaacaccaatcttctctttgtggtggccgagaagccgctgtgcagccagtgcgaggctggccggctgctgcagaaggagacgcactgcccagcggacggcccggagcagtgtgagctagtgcagagaccgcgataccggagaggcccgcacatctgcttcgactacaacgcgacagaagatacctcagactgtggccgcggggcctccttcccgccgtcgctgggcgtcctggtctccctgcaactgctgctcctcctgggcctgccgccccggccgcagcctcaagtcctcgtccacgcctctcgccgcctctgagcaccctgccccaccccacctccactcccacctcacccggcctcttcgcctttcccaccctcctgccccacactccccgccttagagcctcgtccctccctcactgaaggacctgagctggccaggccctgagagtctggtctgcgccttgggatggggagtcccaaagcgggacgccgcaggtgtttggcacccaaatcacatctcacctccgaactgttcaagtgtccccagacccttcttgcctgctgggctccccccagtgggatgggacagggaggccacacgcactggtgccaaaaccaggcctctgctgccgcccttcctggaggctgcctatgttgggggggaccctgcctcagctgacccggcctctctgccccacccaagcccaaacttggtttctgtgagaatagtggaggaaggtgagatggccagtttgaagcctgtgcctcccagcttaaatcctagcaggagagaggctctggggcagcccccatgggctcctgcccctttcaggcctacagccacatccccaagcccaccaggtgtcaggatagtcacagtgataccagttcagacactaccccatatacacctggaacattgaggatggaaactggactcacattcgacataccccactgggcacacgcacaaacacacacactatggggtggggtgggtgtaggggcttacaaagccttacacagggcgaggggttggtgggagggttggcacctgcacactccatctcctgctcaccacctgcctctaatctgagctgcagcctggctggtcctcccatttctaaagctgaatgtcaaacagtgccaaatgctggggcagggggtgaagaaccctctgtcccacccctagccaccagtgtcctccaagtgccccctcacctctccaggtgctcattgtaaccatttctcactagtgtcaggcccccagtgggaccacatgccactgcctgcacctttcggcagaggaacccccaccagacatcaccctttgccttagcaggggtgactttgtctctcctggctgggccatccttccgccaatctggcccttacacactcaggcctgtgcccactccctatctccttcccacccctacacacacactccctgcttgcaggaggccaaactgtccctcccttgctgaacacacacacacacacacacacacaggtggggactgggcacagctcttcacaccattcattctggtcatttcccccaaaggcatcccagcctgggggccagtggggaactgagggcaaggggatatagtgatggggctcagatggactgggaggagggggagggtgatgcattaattaatggcttcgttaattaatgtcatgttgcttgtcgctttctcagtgtgtgtgtgtggtccatgcccactgctggtgccagggtgggtgtccatgtgcacccggcctggatgccagctgtgtccttcgggggcgtgcgtgtaactgtagtgtagtcaggtgctcaatggagaatataaacatatacagaaaaatatatattttaagtttaaaaaacagaaaaacagacaaaacaatccccatcaggtagctgtctaacccccagctgggtctaatccttctcattacccacccgacctggctgcccctcaccttgggctgggggactggggggccatttccttttctctgccctttttttgttgttctattttgtacagacaagttggaaaaacaacagcgacaaaaaagtcaagaaactttgtaaaatatcgtgtgtgtgattccttgtaaaatattttcaaatggtttattacagaagatcagttattaaataatgttcatattttcacttc

SEQ ID NO: 21813 - DNA, 5479 bp, Artificial Sequence
  derived and/or modified sequence
gcgcagcccgcagaggcgctgcggcccgtgcagccccggaggcccctcgcggagaaggcggcggcggaggagaggccgagttaccgcccgccgcccgcgcccccccaaccccgccgccgccgccgccgccgccactgccccccctccccgcggcgccgcatcttgaatggaaacatggcggtgccggctcggacctgcggcgcctctcggcccggcccagcgcggactgcgcgcccctggcccggctgcggcccccaccctggccccggcacccggcgcccgacgtccgggcccccgcgcccgctgtggctgctgctgccgcttctaccgctgctcgccgcccccggcgcctctgcctacagcttcccccagcagcacacgatgcagcactgggcccggcgtctggagcaggaggtcgacggcgtgatgcggatttttggaggcgtccagcagctccgtgagatttacaaggacaaccggaacctgttcgaggtacaggagaatgagcctcagaagttggtggagaaggtggcaggggacattgagagccttctggacaggaaggtgcaggccctgaagagactggctgatgctgcagagaacttccagaaagcacaccgctggcaggacaacatcaaggaggaagacatcgtgtactatgacgccaaggctgacgctgagctggacgaccctgagagtgaggatgtggaaagggggtctaaggccagcaccctaaggctggacttcatcgaggacccaaacttcaagaacaaggtcaactattcatacgcggctgtacagatccctacggacatctacaaaggctccactgtcatcctcaatgagctcaactggacagaggccctggagaatgtgttcatggaaaaccgcagacaagaccccacactgctgtggcaggtcttcggcagcgccacaggagtcactcgctactacccggccaccccgtggcgagcccccaagaagatcgacctgtacgatgtccgaaggagaccctggtatatccagggggcctcgtcacccaaagacatggtcatcatcgtggatgtgagtggcagtgtgagcggcctgaccctgaagctgatgaagacatctgtctgcgagatgctggacacgctgtctgatgatgactatgtgaatgtggcctcgttcaacgagaaggcacagcctgtgtcatgcttcacacacctggtgcaggccaatgtgcgcaacaagaaggtgttcaaggaagctgtgcagggcatggtggccaagggcaccacaggctacaaggccggctttgagtatgcctttgaccagctgcagaactccaacatcactcgggccaactgcaacaagatgatcatgatgttcacggatggtggtgaggaccgcgtgcaggacgtctttgagaagtacaattggccaaaccggacggtgcgcgtgtttactttctccgtggggcagcataactatgacgtcacaccgctgcagtggatggcctgtgccaacaaaggctactattttgagatcccttccatcggagccatccgcatcaacacacaggaatatctagatgtgttgggcaggcccatggtgctggcaggcaaggaggccaagcaggtgcagtggaccaacgtgtatgaggatgcactgggactggggttggtggtaacagggaccctccctgttttcaacctgacacaggatggccctggggaaaagaagaaccagctgatcctgggcgtgatgggcattgacgtggctctgaatgacatcaagaggctgacccccaactacacgcttggagccaacggctatgtgtttgccattgacctgaacggctacgtgttgctgcaccccaatctcaagccccagaccaccaacttccgggagcctgtgactctggacttcctggatgcggagctagaggatgagaacaaggaagagatccgtcggagcatgattgatggcaacaagggccacaagcagatcagaacgttggtcaagtccctggatgagaggtacatagatgaggtgacacggaactacacctgggtgcctataaggagcactaactacagcctggggctggtgctcccaccctacagcaccttctacctccaagccaatctcagtgaccagatcctgcaggtcaagtattttgagttcctgctccccagcagctttgagtctgaaggacacgttttcattgctcccagagagtactgcaaggacctgaatgcctcagacaacaacaccgagttcctgaaaaactttattgagctcatggagaaagtgactccagactccaagcagtgcaacaacttccttctgcacaacctgatcttggacacgggcatcacgcagcagctggtagagcgtgtgtggagggaccaggatctcaacacgtacagcctactggccgtgttcgctgccacagacggtggcatcacccgagtcttccccaacaaggcagctgaggactggacagagaaccctgagcccttcaatgccagcttctaccgccgcagcctggataaccacggttatgtcttcaagcccccacaccaggatgccctgttaaggccgctggagctggagaatgacactgtgggcatcctcgtcagcacagctgtggagctcagcctaggcaggcgcacactgaggccagcagtggtgggcgtcaagctggacctagaggcttgggctgagaagttcaaggtgctagccagcaaccgtacccaccaagaccagcctcagaagtgcggccccaacagccactgtgagatggactgcgaggttaacaatgaggacttactctgtgtcctcattgatgatggaggattcctggtgctgtcaaaccagaaccatcagtgggaccaggtgggcaggttcttcagtgaggtggatgccaacctgatgctggcactctacaataactccttctacacccgcaaggagtcctatgactatcaggcagcctgtgcccctcagccccctggcaacctgggtgctgcaccccggggtgtctttgtgcccaccgttgcagatttccttaacctggcctggtggacctctgctgccgcctggtccctgttccagcagcttctctacggcctcatctaccacagctggttccaagcagaccccgcggaggccgaggggagccccgagacgcgcgagagcagctgcgtcatgaaacagacccagtactacttcggctcggtaaacgcctcctacaacgccatcatcgactgcggaaactgctccaggctgttccacgcgcagagactgaccaacaccaatcttctctttgtggtggccgagaagccgctgtgcagccagtgcgaggctggccggctgctgcagaaggagacgcactgttgcccagcggacggcccggagcagtgtgagctagtgcagagaccgcgataccggagaggcccgcacatctgcttcgactacaacgcgacagaagatacctcagactgtggccgcggggcctccttcccgccgtcgctgggcgtcctggtctccctgcaactgctgctcctcctgggcctgccgccccggccgcagcctcaagtcctcgtccacgcctctcgccgcctctgagcaccctgccccaccccacctccactcccacctcacccggcctcttcgcctttcccaccctcctgccccacactccccgccttagagcctcgtccctccctcactgaaggacctgagctggccaggccctgagagtctggtctgcgccttgggatggggagtcccaaagcgggacgccgcaggtgtttggcacccaaatcacatctcacctccgaactgttcaagtgtccccagacccttcttgcctgctgggctccccccagtgggatgggacagggaggccacacgcactggtgccaaaaccaggcctctgctgccgcccttcctggaggctgcctatgttgggggggaccctgcctcagctgacccggcctctctgccccacccaagcccaaacttggtttctgtgagaatagtggaggaaggtgagatggccagtttgaagcctgtgcctcccagcttaaatcctagcaggagagaggctctggggcagcccccatgggctcctgcccctttcaggcctacagccacatccccaagcccaccaggtgtcaggatagtcacagtgataccagttcagacactaccccatatacacctggaacattgaggatggaaactggactcacattcgacataccccactgggcacacgcacaaacacacacactatggggtggggtgggtgtaggggcttacaaagccttacacagggcgaggggttggtgggagggttggcacctgcacactccatctcctgctcaccacctgcctctaatctgagctgcagcctggctggtcctcccatttctaaagctgaatgtcaaacagtgccaaatgctggggcagggggtgaagaaccctctgtcccacccctagccaccagtgtcctccaagtgccccctcacctctccaggtgctcattgtaaccatttctcactagtgtcaggcccccagtgggaccacatgccactgcctgcacctttcggcagaggaacccccaccagacatcaccctttgccttagcaggggtgactttgtctctcctggctgggccatccttccgccaatctggcccttacacactcaggcctgtgcccactccctatctccttcccacccctacacacacactccctgcttgcaggaggccaaactgtccctcccttgctgaacacacacacacacacacacacacaggtggggactgggcacagctcttcacaccattcattctggtcatttcccccaaaggcatcccagcctgggggccagtggggaactgagggcaaggggatatagtgatggggctcagatggactgggaggagggggagggtgatgcattaattaatggcttcgttaattaatgtcatgttgcttgtcgctttctcagtgtgtgtgtgtggtccatgcccactgctggtgccagggtgggtgtccatgtgcacccggcctggatgccagctgtgtccttcgggggcgtgcgtgtaactgtagtgtagtcaggtgctcaatggagaatataaacatatacagaaaaatatatattttaagtttaaaaaacagaaaaacagacaaaacaatccccatcaggtagctgtctaacccccagctgggtctaatccttctcattacccacccgacctggctgcccctcaccttgggctgggggactggggggccatttccttttctctgccctttttttgttgttctattttgtacagacaagttggaaaaacaacagcgacaaaaaagtcaagaaactttgtaaaatatcgtgtgtgtgattccttgtaaaatattttcaaatggtttattacagaagatcagttattaaataatgttcatattttcacttc

SEQ ID NO: 21814 - DNA, 3438 bp, Artificial Sequence
  derived and/or modified sequence
atggccgtgcccgccagaacctgcggcgccagcagacccggccccgccagaaccgccagaccctggcccggctgcggcccccaccccggccccggcaccagaagacccaccagcggcccccccagacccctgtggctgctgctgcccctgctgcccctgctggccgcccccggcgccagcgcctacagcttcccccagcagcacaccatgcagcactgggccagaagactggagcaggaggtggacggcgtgatgagaatcttcggcggcgtgcagcagctgagagagatctacaaggacaacagaaacctgttcgaggtgcaggagaacgagccccagaagctggtggagaaggtggccggcgacatcgagagcctgctggacagaaaggtgcaggccctgaagagactggccgacgccgccgagaacttccagaaggcccacagatggcaggacaacatcaaggaggaggacatcgtgtactacgacgccaaggccgacgccgagctggacgaccccgagagcgaggacgtggagagaggcagcaaggccagcaccctgagactggacttcatcgaggaccccaacttcaagaacaaggtgaactacagctacgccgccgtgcagatccccaccgacatctacaagggcagcaccgtgatcctgaacgagctgaactggaccgaggccctggagaacgtgttcatggagaacagaagacaggaccccaccctgctgtggcaggtgttcggcagcgccaccggcgtgaccagatactaccccgccaccccctggagagcccccaagaagatcgacctgtacgacgtgagaagaagaccctggtacatccagggcgccagcagccccaaggacatggtgatcatcgtggacgtgagcggcagcgtgagcggcctgaccctgaagctgatgaagaccagcgtgtgcgagatgctggacaccctgagcgacgacgactacgtgaacgtggccagcttcaacgagaaggcccagcccgtgagctgcttcacccacctggtgcaggccaacgtgagaaacaagaaggtgttcaaggaggccgtgcagggcatggtggccaagggcaccaccggctacaaggccggcttcgagtacgccttcgaccagctgcagaacagcaacatcaccagagccaactgcaacaagatgatcatgatgttcaccgacggcggcgaggacagagtgcaggacgtgttcgagaagtacaactggcccaacagaaccgtgagagtgttcaccttcagcgtgggccagcacaactacgacgtgacccccctgcagtggatggcctgcgccaacaagggctactacttcgagatccccagcatcggcgccatcagaatcaacacccaggagtacctggacgtgctgggcagacccatggtgctggccggcaaggaggccaagcaggtgcagtggaccaacgtgtacgaggacgccctgggcctgggcctggtggtgaccggcaccctgcccgtgttcaacctgacccaggacggccccggcgagaagaagaaccagctgatcctgggcgtgatgggcatcgacgtggccctgaacgacatcaagagactgacccccaactacaccctgggcgccaacggctacgtgttcgccatcgacctgaacggctacgtgctgctgcaccccaacctgaagccccagaccaccaacttcagagagcccgtgaccctggacttcctggacgccgagctggaggacgagaacaaggaggagatcagaagaagcatgatcgacggcaacaagggccacaagcagatcagaaccctggtgaagagcctggacgagagatacatcgacgaggtgaccagaaactacacctgggtgcccatcagaagcaccaactacagcctgggcctggtgctgcccccctacagcaccttctacctgcaggccaacctgagcgaccagatcctgcaggtgaagtacttcgagttcctgctgcccagcagcttcgagagcgagggccacgtgttcatcgcccccagagagtactgcaaggacctgaacgccagcgacaacaacaccgagttcctgaagaacttcatcgagctgatggagaaggtgacccccgacagcaagcagtgcaacaacttcctgctgcacaacctgatcctggacaccggcatcacccagcagctggtggagagagtgtggagagaccaggacctgaacacctacagcctgctggccgtgttcgccgccaccgacggcggcatcaccagagtgttccccaacaaggccgccgaggactggaccgagaaccccgagcccttcaacgccagcttctacagaagaagcctggacaaccacggctacgtgttcaagcccccccaccaggacgccctgctgagacccctggagctggagaacgacaccgtgggcatcctggtgagcaccgccgtggagctgagcctgggcagaagaaccctgagacccgccgtggtgggcgtgaagctggacctggaggcctgggccgagaagttcaaggtgctggccagcaacagaacccaccaggaccagccccagaagtgcggccccaacagccactgcgagatggactgcgaggtgaacaacgaggacctgctgtgcgtgctgatcgacgacggcggcttcctggtgctgagcaaccagaaccaccagtgggaccaggtgggcagattcttcagcgaggtggacgccaacctgatgctggccctgtacaacaacagcttctacaccagaaaggagagctacgactaccaggccgcctgcgccccccagccccccggcaacctgggcgccgcccccagaggcgtgttcgtgcccaccgtggccgacttcctgaacctggcctggtggaccagcgccgccgcctggagcctgttccagcagctgctgtacggcctgatctaccacagctggttccaggccgaccccgccgaggccgagggcagccccgagaccagagagagcagctgcgtgatgaagcagacccagtactacttcggcagcgtgaacgccagctacaacgccatcatcgactgcggcaactgcagcagactgttccacgcccagagactgaccaacaccaacctgctgttcgtggtggccgagaagcccctgtgcagccagtgcgaggccggcagactgctgcagaaggagacccactgccccgccgacggccccgagcagtgcgagctggtgcagagacccagatacagaagaggcccccacatctgcttcgactacaacgccaccgaggacaccagcgactgcggcagaggcgccagcttcccccccagcctgggcgtgctggtgagcctgcagctgctgctgctgctgggcctgccccccagaccccagccccaggtgctggtgcacgccagcagaagactgtag

SEQ ID NO: 21815 - DNA, 3441 bp, Artificial Sequence
  derived and/or modified sequence
atggccgtgcccgccagaacctgcggcgccagcagacccggccccgccagaaccgccagaccctggcccggctgcggcccccaccccggccccggcaccagaagacccaccagcggcccccccagacccctgtggctgctgctgcccctgctgcccctgctggccgcccccggcgccagcgcctacagcttcccccagcagcacaccatgcagcactgggccagaagactggagcaggaggtggacggcgtgatgagaatcttcggcggcgtgcagcagctgagagagatctacaaggacaacagaaacctgttcgaggtgcaggagaacgagccccagaagctggtggagaaggtggccggcgacatcgagagcctgctggacagaaaggtgcaggccctgaagagactggccgacgccgccgagaacttccagaaggcccacagatggcaggacaacatcaaggaggaggacatcgtgtactacgacgccaaggccgacgccgagctggacgaccccgagagcgaggacgtggagagaggcagcaaggccagcaccctgagactggacttcatcgaggaccccaacttcaagaacaaggtgaactacagctacgccgccgtgcagatccccaccgacatctacaagggcagcaccgtgatcctgaacgagctgaactggaccgaggccctggagaacgtgttcatggagaacagaagacaggaccccaccctgctgtggcaggtgttcggcagcgccaccggcgtgaccagatactaccccgccaccccctggagagcccccaagaagatcgacctgtacgacgtgagaagaagaccctggtacatccagggcgccagcagccccaaggacatggtgatcatcgtggacgtgagcggcagcgtgagcggcctgaccctgaagctgatgaagaccagcgtgtgcgagatgctggacaccctgagcgacgacgactacgtgaacgtggccagcttcaacgagaaggcccagcccgtgagctgcttcacccacctggtgcaggccaacgtgagaaacaagaaggtgttcaaggaggccgtgcagggcatggtggccaagggcaccaccggctacaaggccggcttcgagtacgccttcgaccagctgcagaacagcaacatcaccagagccaactgcaacaagatgatcatgatgttcaccgacggcggcgaggacagagtgcaggacgtgttcgagaagtacaactggcccaacagaaccgtgagagtgttcaccttcagcgtgggccagcacaactacgacgtgacccccctgcagtggatggcctgcgccaacaagggctactacttcgagatccccagcatcggcgccatcagaatcaacacccaggagtacctggacgtgctgggcagacccatggtgctggccggcaaggaggccaagcaggtgcagtggaccaacgtgtacgaggacgccctgggcctgggcctggtggtgaccggcaccctgcccgtgttcaacctgacccaggacggccccggcgagaagaagaaccagctgatcctgggcgtgatgggcatcgacgtggccctgaacgacatcaagagactgacccccaactacaccctgggcgccaacggctacgtgttcgccatcgacctgaacggctacgtgctgctgcaccccaacctgaagccccagaccaccaacttcagagagcccgtgaccctggacttcctggacgccgagctggaggacgagaacaaggaggagatcagaagaagcatgatcgacggcaacaagggccacaagcagatcagaaccctggtgaagagcctggacgagagatacatcgacgaggtgaccagaaactacacctgggtgcccatcagaagcaccaactacagcctgggcctggtgctgcccccctacagcaccttctacctgcaggccaacctgagcgaccagatcctgcaggtgaagtacttcgagttcctgctgcccagcagcttcgagagcgagggccacgtgttcatcgcccccagagagtactgcaaggacctgaacgccagcgacaacaacaccgagttcctgaagaacttcatcgagctgatggagaaggtgacccccgacagcaagcagtgcaacaacttcctgctgcacaacctgatcctggacaccggcatcacccagcagctggtggagagagtgtggagagaccaggacctgaacacctacagcctgctggccgtgttcgccgccaccgacggcggcatcaccagagtgttccccaacaaggccgccgaggactggaccgagaaccccgagcccttcaacgccagcttctacagaagaagcctggacaaccacggctacgtgttcaagcccccccaccaggacgccctgctgagacccctggagctggagaacgacaccgtgggcatcctggtgagcaccgccgtggagctgagcctgggcagaagaaccctgagacccgccgtggtgggcgtgaagctggacctggaggcctgggccgagaagttcaaggtgctggccagcaacagaacccaccaggaccagccccagaagtgcggccccaacagccactgcgagatggactgcgaggtgaacaacgaggacctgctgtgcgtgctgatcgacgacggcggcttcctggtgctgagcaaccagaaccaccagtgggaccaggtgggcagattcttcagcgaggtggacgccaacctgatgctggccctgtacaacaacagcttctacaccagaaaggagagctacgactaccaggccgcctgcgccccccagccccccggcaacctgggcgccgcccccagaggcgtgttcgtgcccaccgtggccgacttcctgaacctggcctggtggaccagcgccgccgcctggagcctgttccagcagctgctgtacggcctgatctaccacagctggttccaggccgaccccgccgaggccgagggcagccccgagaccagagagagcagctgcgtgatgaagcagacccagtactacttcggcagcgtgaacgccagctacaacgccatcatcgactgcggcaactgcagcagactgttccacgcccagagactgaccaacaccaacctgctgttcgtggtggccgagaagcccctgtgcagccagtgcgaggccggcagactgctgcagaaggagacccactgctgccccgccgacggccccgagcagtgcgagctggtgcagagacccagatacagaagaggcccccacatctgcttcgactacaacgccaccgaggacaccagcgactgcggcagaggcgccagcttcccccccagcctgggcgtgctggtgagcctgcagctgctgctgctgctgggcctgccccccagaccccagccccaggtgctggtgcacgccagcagaagactgtag

SEQ ID NO: 21816 - protein, 144 aa, Artificial Sequence
  derived and/or modified sequence
MAKIAKTHEDIEAQIREIQGKKAALDEAQGVGLDSTGYYDQEIYGGSDSRFAGYVTSIAATELEDDDDDYSSSTSLLGQKKPGYHAPVALLNDIPQSTEQYDPFAEHRPPKIADREDEYKKHRRTMIISPERLDPFADGFYSAA

SEQ ID NO: 21817 - DNA, 435 bp, Artificial Sequence
  derived and/or modified sequence
atggccaagatcgccaagacccacgaggacatcgaggcccagatcagagagatccagggcaagaaggccgccctggacgaggcccagggcgtgggcctggacagcaccggctactacgaccaggagatctacggcggcagcgacagcagattcgccggctacgtgaccagcatcgccgccaccgagctggaggacgacgacgacgactacagcagcagcaccagcctgctgggccagaagaagcccggctaccacgcccccgtggccctgctgaacgacatcccccagagcaccgagcagtacgaccccttcgccgagcacagaccccccaagatcgccgacagagaggacgagtacaagaagcacagaagaaccatgatcatcagccccgagagactggaccccttcgccgacggcttctacagcgccgcctag

SEQ ID NO: 21818 - DNA, 435 bp, Artificial Sequence
  derived and/or modified sequence
atggctaagatcgcgaagacgcatgaagatatagaagcccaaattcgagaaatccagggtaaaaaagcagcactggatgaagcccagggtgtagggctggactcaaccggttactatgaccaggagatatatgggggaagtgactcgcggtttgccgggtacgtgacgtcgatcgcagccactgagcttgaggacgatgacgatgactattcttcatctacttctctcctggggcagaagaagcccggatatcatgctcccgtagctctactgaatgatattccacagagtactgagcagtacgacccattcgccgaacataggccccctaagatagcagatagagaagatgaatacaaaaaacataggcgcacaatgataatatcaccggagcggcttgatcccttcgctgacggcttttacagcgcagcatag

SEQ ID NO: 21819 - DNA, 435 bp, Artificial Sequence
  derived and/or modified sequence
atggcaaaaatcgccaagactcatgaggacatcgaggctcagattcgagaaattcagggcaagaaagccgccctggatgaggcccaaggtgtcggcctggacagcacaggatactatgaccaggaaatatacggagggtcagattctcgctttgccggttacgtaaccagtatagccgcaacagagctcgaagatgacgatgacgattatagcagttccacatcgctgctggggcaaaaaaagccagggtaccatgcccccgtcgcccttctgaatgatataccacaatctacagagcagtatgatccatttgcagaacatcggccaccaaaaattgcagaccgggaggatgagtataaaaaacacaggcgcactatgatcatttcccccgaaaggctggacccattcgccgatggcttttatagcgctgcctag

SEQ ID NO: 21820 - DNA, 435 bp, Artificial Sequence
  derived and/or modified sequence
atggccaagatcgccaagacccatgaagatattgaggcccagatccgggagatccagggcaagaaggccgccctggatgaggcccagggcgtgggcctggacagcacaggctactatgaccaggagatctacggcggcagtgacagcagatttgctggctacgtgaccagcattgctgccacagagctggaggatgatgatgatgactacagcagcagcaccagcctgctgggccagaagaagccaggctaccacgcccctgtggccctgctgaatgacatcccccagagcacagagcagtatgacccctttgctgagcacaggcctcccaagattgctgaccgggaggatgagtacaagaagcacaggaggaccatgatcatcagccctgagcggctggacccctttgctgatggcttctacagcgctgcctag

SEQ ID NO: 21821 - DNA, 435 bp, Artificial Sequence
  derived and/or modified sequence
atggccaagatcgccaagacccacgaggacatcgaggcccagatccgagagatccaaggcaaaaaggccgcgctggacgaagcccagggagtcggcctcgacagtacagggtattacgatcaggagatctacggaggaagcgattctagattcgcggggtacgttacatcaattgctgctaccgagctcgaggacgacgatgacgactactcatcctcgacatctctgctgggccagaaaaagcccggttaccacgcacccgtggctctgctgaatgatattccacagagcacagagcagtacgatccattcgctgagcatcggccaccaaagatcgccgatcgggaagatgaatataagaagcaccggagaaccatgatcattagccccgagcgcctcgatccgttcgcggacggcttttactcagccgcctag

SEQ ID NO: 21822 - DNA, 435 bp, Artificial Sequence
  derived and/or modified sequence
atggccaagatcgccaagacccacgaggacatcgaggcccagatcagagaaattcagggtaaaaaagccgcgctggatgaggcccaaggtgttgggctggactctaccgggtactacgatcaagagatctacggcggttccgatagccggttcgcagggtatgtgacttctatagcagccaccgaactggaagacgatgacgatgactattcttccagtactagtttactaggccagaagaagcccgggtaccacgcccctgtggctttgctgaacgatataccccagtcaaccgaacagtacgatccatttgccgagcatagacctcctaaaattgccgatcgagaggacgaatacaaaaaacatcgtcgtaccatgattattagtccggaaaggctcgaccctttcgcagacggcttttatagtgctgcctag

SEQ ID NO: 21823 - DNA, 435 bp, Artificial Sequence
  derived and/or modified sequence
atggcgaaaattgcaaagacccacgaggatatagaagcccagattcgcgagattcaaggaaaaaaagctgctctggatgaagcacagggggtgggtctggattcaacaggatactacgatcaagagatatatgggggttcagacagccgctttgcaggttatgtcacatccattgctgcaacagagttggaggacgacgacgatgattacagcagcagtacaagtctgctcggccagaagaaacccggttaccatgccccagtcgctctgcttaacgacatcccccagagcactgagcagtatgacccttttgcggagcacagaccgcctaaaatagctgaccgagaagacgaatacaaaaagcatagaagaaccatgataattagtccagagcggttggacccgtttgccgatgggttctacagtgccgcttag

SEQ ID NO: 21824 - DNA, 435 bp, Artificial Sequence
  derived and/or modified sequence
atggccaagattgcaaagacgcacgaagatattgaggcccagatcagggaaattcaggggaagaaggccgctttagatgaagctcaaggcgtagggctggatagcacagggtactatgaccaggagatttacgggggttccgactccagattcgccggatatgtgaccagcattgctgccaccgagttggaagatgacgacgatgattactcttcctcaacttcgctgctgggccaaaaaaagcccggttaccacgcccctgtggccctgctgaacgatataccccaatcaacggaacagtatgacccctttgctgagcataggccacccaaaatcgctgaccgtgaagacgagtacaaaaaacaccgtcgaactatgatcatttcccccgagcggcttgacccgttcgccgacggcttttatagcgccgcatag

SEQ ID NO: 21825 - DNA, 600 bp, Artificial Sequence
  derived and/or modified sequence
gttccgtctgtgtgttcgagtggacaaaatggcgaagatcgccaagactcacgaagatattgaagcacagattcgagaaattcaaggcaagaaggcagctcttgatgaagctcaaggagtgggcctcgattctacaggttattatgaccaggaaatttatggtggaagtgacagcagatttgctggatacgtgacatcaattgctgcaactgaacttgaagatgatgacgatgactattcatcatctacgagtttgcttggtcagaagaagccaggatatcatgcccctgtggcattgcttaatgatataccacagtcaacagaacagtatgatccatttgctgagcacagacctccaaagattgcagaccgggaagatgaatacaaaaagcataggcggaccatgataatttccccagagcgtcttgatccttttgcagatggcttctattctgctgcttgaagtcagaactgctgatggagacaaaggcacgaaagtgagggaaaacccctgatcctaaaatgaatgctaggacttacatggatgtaatgcgagaacaacacttgactaaagaagaacgagaaattaggcaacagcta

SEQ ID NO: 21826 - DNA, 651 bp, Artificial Sequence
  derived and/or modified sequence
agctatttttctccgtggcggcggcgacgagcggaagttcttgggagcgccagttccgtctgtgtgttcgagtggacaaaatggcgaagatcgccaagactcacgaagatattgaagcacagattcgagaaattcaaggcaagaaggcagctcttgatgaagctcaaggagtgggcctcgattctacaggttattatgaccaggaaatttatggtggaagtgacagcagatttgctggatacgtgacatcaattgctgcaactgaacttgaagatgatgacgatgactattcatcatctacgagtttgcttggtcagaagaagccaggatatcatgcccctgtggcattgcttaatgatataccacagtcaacagaacagtatgatccatttgctgagcacagacctccaaagattgcagaccgggaagatgaatacaaaaagcataggcggaccatgataatttccccagagcgtcttgatccttttgcagatggcttctattctgctgcttgaagtcagaactgctgatggagacaaaggcacgaaagtgtacgtattccggattagcaacccaggaacccatcacttctgaagactctaaactgtgctgtcattttgtttttatatgcattaaaatatttgttttaaa

SEQ ID NO: 21827 - protein, 140 aa, Artificial Sequence
  derived and/or modified sequence
MRSPRMRVCAKSVLLSHWLFLAYVLMVCCKLMSASSQHLRGHAGHHQIKQGTCEVVAVHRCCNKNRIEERSQTVKCSCFPGQVAGTTRAQPSCVEASIVIQKWWCHMNPCLEGEDCKVLPDYSGWSCSSGNKVKTTKVTR

SEQ ID NO: 21828 - DNA, 423 bp, Artificial Sequence
  derived and/or modified sequence
atgagatccccaagaatgagagtgtgcgccaagtctgtcctgctttctcattggctgtttctggcttatgtcctaatggtgtgctgcaagctgatgagtgcttcaagccagcatctgagagggcacgccggtcaccatcagatcaagcaagggacatgtgaagtggtggctgttcaccggtgctgtaataaaaatcggattgaggagaggtcccagacagtgaagtgtagctgcttccccggtcaagttgccggaaccacaagggcccaaccgtcctgtgtggaggcttctatcgtgattcaaaagtggtggtgccatatgaacccatgcctggagggcgaagattgtaaagttttgcccgactacagtggatggtcctgttcctccggaaataaggtgaagactactaaggtaacacggtag

SEQ ID NO: 21829 - DNA, 234 bp, Artificial Sequence
  derived and/or modified sequence
atgaggtctccaagaatgagagtttgcgcgaagtcagtgctcctctcccattggctgtttctagcttacgtgctgatggtgtgctgtaaattgatgagcgcatctagccagcacctgaggggacacgctgggcaccaccagatcaagcagggcacatgtgaggtggtagctgtgcacaggtgctgtaacaaaaatcgcattgaagaacggtctcaaaccgtcaagtgctcgtag

SEQ ID NO: 21830 - DNA, 423 bp, Artificial Sequence
  derived and/or modified sequence
atgagatccccacgcatgagagtgtgcgctaaaagcgtgctcctgtcacactggttattcctcgcatacgtgctgatggtgtgttgtaaattgatgagcgcttcctcccagcacctgcgcggccatgctgggcaccaccagattaaacaagggacttgcgaggtggttgctgtgcaccggtgctgcaataaaaaccgcatagaagaacgctcccaaaccgttaagtgtagttgtttccctgggcaggtcgcaggcacgacccgagcacagccatcttgtgttgaagcctcaatcgtcattcaaaagtggtggtgtcacatgaatccctgtctggaaggtgaagactgcaaagtgctccctgattactccgggtggtcttgttcatctggcaacaaggtgaagacaacgaaggtgacgaggtag

SEQ ID NO: 21831 - DNA, 234 bp, Artificial Sequence
  derived and/or modified sequence
atgcgaagtccgagaatgcgagtctgtgcgaagagtgttctgctttctcattggctcttcctggcctatgtgttgatggtgtgttgcaagctgatgtccgcctcatctcagcatctccgggggcatgctggtcatcatcaaataaagcaaggtacgtgtgaagtggtagcagtccataggtgttgtaacaagaataggatcgaagaaagatcccagactgtcaaatgctcgtag

SEQ ID NO: 21832 - DNA, 423 bp, Artificial Sequence
  derived and/or modified sequence
atgcgctctccccggatgcgcgtgtgcgccaaatccgtgttgttgagccactggctctttctggcctatgtgttaatggtctgctgcaaactcatgtcagcatcatctcagcacttgcgcgggcatgcgggacatcatcagattaagcagggtacatgcgaagtggtcgccgtgcatagatgttgcaacaagaaccgaattgaagaaagaagccagaccgtcaaatgcagctgttttccgggacaagtcgccggcaccacccgggcgcagcccagttgtgtggaagcttctattgtgatacagaagtggtggtgccatatgaacccctgccttgagggggaagattgtaaagttctgcccgactactcagggtggtcttgctctagcggtaataaagttaaaacaaccaaggttactagatag

SEQ ID NO: 21833 - DNA, 602 bp, Artificial Sequence
  derived and/or modified sequence
gcgctagctgggctcggctccgcactgctagctgcgcgccgccctggacggggcgcaccgactgcgcgcgcggctgcgggcaaacatcgggagtcctgcctcagctgccgcttctccagcagcagcttcaggcttctcccgcaggagcttcgggcttctcctggtagagacgtgggaacttttcttctcctggcgaggctgcagaggtgatgggccgctcccggggctcccgcggggaggcggcacggtcttctgagctacgataattttttggaacggcagaaatgattggttctagcaacagatgggaatttggagtcactctgaaatatatcctggaataagtgtgtttgactagaaccacatcttatgaggtccccaaggatgagagtctgtgctaagtcagtgttgctgtcgcactggctctttctagcctacgtgttaatggtgtgctgtaagctgatgtccgcctcaagccagcacctccggggacatgcaggtcaccaccaaatcaagcaagggacctgtgaggtggtcgccgtgcacaggtgctgcaataagaaccgcatagaagagcggtcacaaacggtcaagtgctcttg

SEQ ID NO: 21834 - DNA, 2292 bp, Artificial Sequence
  derived and/or modified sequence
aatcagcgcgttccgcggcgggcccggcccctcctggtcagcgcgctagctgggctcggctccgcactgctagctgcgcgccgccctggacggggcgcaccgactgcgcgcgcggctgcgggcaaacatcgggagtcctgcctcagctgccgcttctccagcagcagcttcaggcttctcccgcaggagcttcgggcttctcctggtagagacgtgggaacttttcttctcctggcgaggctgcagaggtgatgggccgctcccggggctcccgcggggaggcggcacggtgagcgtcctcgggctccggtgcggcgatcagtacctagttccggacgcgccggtccgacttggatgccggctctagtcgagtcttctgagctacgataattttttggaacggcagaaatgattggttctagcaacagatgggaatttggagtcactctgaaatatatcctggaataagtgtgtttgactagaaccacatcttatgaggtccccaaggatgagagtctgtgctaagtcagtgttgctgtcgcactggctctttctagcctacgtgttaatggtgtgctgtaagctgatgtccgcctcaagccagcacctccggggacatgcaggtcaccaccaaatcaagcaagggacctgtgaggtggtcgccgtgcacaggtgctgcaataagaaccgcatagaagagcggtcacaaacggtcaagtgctcttgcttcccgggacaggtggcgggcacaactcgggctcaaccttcttgtgttgaagcttccattgtgattcagaaatggtggtgtcacatgaatccgtgtttggaaggagaggattgtaaagtgctgccagattactcaggttggtcctgtagcagtggcaataaagtcaaaactacgaaggtaacgcggtagcgaagagagaggtgtgcttcaatcctggaggggcagcaggaggcggagctcttttgcttggattcccatcatggcccctttgcagaaaattgtctaggatttcagcaacttcatatttgtatatgtgagctgtgagaggtggcattcacttaactggcccagccctctctgcttcgtgattttatttcattgaattataaccacaagccaccacccatttgacatcctctctggattcccaaggagcatacctccaaaatccgagaagagcaaatcagagtcttcaaaatggatcaccactaagggcatgttcattcttcactttctttctgcttttacaaaagaacttggatgtatgttccaaagggtcctcattctgttcctcttttgaacttttccttttgtccttgtattaaagtggttttaaaggggtctaaaaagattttggcaaaacatatttgcagatgtagattagctggtgaagaaaattactgctagagatcaactgattaactggtaaagaacgtttattttataacccttgaagaatagaaggacatagttggattattgtgtgtgcattgtatttttacttctattttttttttgctttccattttccagttagcagagataaaatgagagcgttttaacttcaatgtaccattttactgagtgctaaggaagcatatcaattccaatattttataaccaaagctctatcagaacatatttataaaacttgttggaatttttacggcttttgtgtagtcatgtaggtaaatcatttaaaatataaaacaatctcaatttagatcaagggttatttcttagatcaaatttatgccaattatatgaaaagattttaactccgagacaggagtctttcagtgctgaatttttagactgtaaatgagttcttcttaacttagctgtttccctacttctgtgacttctgtgttagccatcttatttctttaaaatctgagtcctgattggcttaatgattttgcagcagacatgtctccacatattctcaaatgctgtcatgcggaaacgtatgaaacagatgaagaatgactgacccagattttagatgtataatgttgttaaagtacatactactgtaaaaatatgggatgaattttatatattaagaaatgccaaaaacatagtttctgcaccaagttaattatccctgtcctttcacatttatagggggaaaataaatactttaatgttgtttatagcctaacagttatttgattttattcttgcagagggaatggaaaggaatggaaagatttgttggcgtaatttttgaatatttgttatgatcatatgaataagtaaaaaaattcatcctgctgatggca

SEQ ID NO: 21835 - DNA, 423 bp, Artificial Sequence
  derived and/or modified sequence
atgagaagccccagaatgagagtgtgcgccaagagcgtgctgctgagccactggctgttcctggcctacgtgctgatggtgtgctgcaagctgatgagcgccagcagccagcacctgagaggccacgccggccaccaccagatcaagcagggcacctgcgaggtggtggccgtgcacagatgctgcaacaagaacagaatcgaggagagaagccagaccgtgaagtgcagctgcttccccggccaggtggccggcaccaccagagcccagcccagctgcgtggaggccagcatcgtgatccagaagtggtggtgccacatgaacccctgcctggagggcgaggactgcaaggtgctgcccgactacagcggctggagctgcagcagcggcaacaaggtgaagaccaccaaggtgaccagatag

SEQ ID NO: 21836 - DNA, 234 bp, Artificial Sequence
  derived and/or modified sequence
atgagaagccccagaatgagagtgtgcgccaagagcgtgctgctgagccactggctgttcctggcctacgtgctgatggtgtgctgcaagctgatgagcgccagcagccagcacctgagaggccacgccggccaccaccagatcaagcagggcacctgcgaggtggtggccgtgcacagatgctgcaacaagaacagaatcgaggagagaagccagaccgtgaagtgcagctag

SEQ ID NO: 21837 - DNA, 423 bp, Artificial Sequence
  derived and/or modified sequence
atgcgatcacctcgtatgagagtgtgcgctaagtcagttttactgtctcactggctcttcctggcctacgttctgatggtgtgttgtaaactgatgtcagcaagcagtcagcatctgcggggacatgccggccaccatcagatcaaacaggggacctgcgaagttgtggctgtccatcggtgctgcaacaagaatcgtatcgaggaaagatcccagactgtgaagtgttcatgcttccccggccaggtggccggcacgacgcgggctcagccaagttgcgtggaggctagcatcgttatccaaaagtggtggtgtcacatgaatccatgtctggagggcgaggactgtaaggttttgcctgattactccggctggtcctgcagtagcggcaacaaagtaaagactacaaaggttactaggtag

SEQ ID NO: 21838 - DNA, 234 bp, Artificial Sequence
  derived and/or modified sequence
atgcgctcccctcgcatgagggtgtgcgctaaaagtgtgctacttagccactggctatttttggcttacgttctgatggtttgttgcaagctgatgtccgcttcctcacagcatctcagggggcatgcaggtcaccaccagataaaacaggggacatgtgaagtcgtcgccgtgcatcggtgctgtaataagaaccgtatcgaagaaaggagtcagaccgtaaagtgttcttag

SEQ ID NO: 21839 - DNA, 423 bp, Artificial Sequence
  derived and/or modified sequence
atgaggagccccaggatgagggtgtgtgccaagtctgtgctgctgagccactggctgttcctggcctacgtgctgatggtgtgctgcaagctgatgtctgccagcagccagcacctgcggggccatgctggccaccaccagatcaagcagggcacctgtgaggtggtggccgtgcaccgctgctgcaacaagaacagaattgaggagaggagccagacagtgaagtgcagctgcttccctggccaggtggccggcaccacccgggcccagcccagctgtgtggaggccagcatcgtcatccagaagtggtggtgccacatgaacccctgcctggagggggaggactgcaaggtgctgcctgactacagcggctggagctgcagcagcggcaacaaggtgaagaccaccaaggtgaccaggtag

SEQ ID NO: 21840 - DNA, 234 bp, Artificial Sequence
  derived and/or modified sequence
atgaggagccccaggatgagggtgtgtgccaagtctgtgctgctgagccactggctgttcctggcctacgtgctgatggtgtgctgcaagctgatgtctgccagcagccagcacctgcggggccatgctggccaccaccagatcaagcagggcacctgtgaggtggtggccgtgcaccgctgctgcaacaagaacagaattgaggagaggagccagacagtgaagtgcagctag

SEQ ID NO: 21841 - DNA, 423 bp, Artificial Sequence
  derived and/or modified sequence
atgcggagcccccggatgcgggtgtgcgccaagagcgtgctgctgagtcactggttgttcttggcgtacgtgctcatggtgtgttgcaaactgatgtccgcttcaagccaacacctcagaggtcacgctggacaccatcaaattaaacagggcacatgtgaagtcgtcgccgtccatcggtgttgcaataaaaaccggattgaagagaggtcccagaccgtgaaatgttcctgtttcccaggccaagtggctgggacgactagggcccagccctcatgcgtggaagccagcattgtcatacagaagtggtggtgccacatgaatccgtgcttggaaggggaggattgtaaggtgctgccggactactcaggatggtcttgcagctcgggcaataaggtcaagactacaaaagtaaccagatag

SEQ ID NO: 21842 - DNA, 234 bp, Artificial Sequence
  derived and/or modified sequence
atgcggagcccccggatgcgggtgtgcgccaagagcgtgctgctgtcccactggctgttcctggcctatgttctgatggtttgctgtaaactgatgagtgcttcctctcagcacctgagaggccacgccggacaccaccagattaaacagggaacatgcgaggtggttgctgtgcatcgttgctgtaataagaaccggattgaggaacgttcacagactgtcaaatgcagttag

SEQ ID NO: 21843 - RNA, 423 nt, Artificial Sequence
  derived and/or modified sequence
augagauccccacgcaugagagugugcgcuaaaagcgugcuccugucacacugguuauuccucgcauacgugcugaugguguguuguaaauugaugagcgcuuccucccagcaccugcgcggccaugcugggcaccaccagauuaaacaagggacuugcgaggugguugcugugcaccggugcugcaauaaaaaccgcauagaagaacgcucccaaaccguuaaguguaguuguuucccugggcaggucgcaggcacgacccgagcacagccaucuuguguugaagccucaaucgucauucaaaagugguggugucacaugaaucccugucuggaaggugaagacugcaaagugcucccugauuacuccggguggucuuguucaucuggcaacaaggugaagacaacgaaggugacgagguag

SEQ ID NO: 21844 - RNA, 234 nt, Artificial Sequence
  derived and/or modified sequence
augcgaaguccgagaaugcgagucugugcgaagaguguucugcuuucucauuggcucuuccuggccuauguguugaugguguguugcaagcugauguccgccucaucucagcaucuccgggggcaugcuggucaucaucaaauaaagcaagguacgugugaagugguagcaguccauagguguuguaacaagaauaggaucgaagaaagaucccagacugucaaaugcucguag

SEQ ID NO: 21845 - RNA, 423 nt, Artificial Sequence
  derived and/or modified sequence
augcgcucuccccggaugcgcgugugcgccaaauccguguuguugagccacuggcucuuucuggccuauguguuaauggucugcugcaaacucaugucagcaucaucucagcacuugcgcgggcaugcgggacaucaucagauuaagcaggguacaugcgaaguggucgccgugcauagauguugcaacaagaaccgaauugaagaaagaagccagaccgucaaaugcagcuguuuuccgggacaagucgccggcaccacccgggcgcagcccaguuguguggaagcuucuauugugauacagaagugguggugccauaugaaccccugccuugagggggaagauuguaaaguucugcccgacuacucaggguggucuugcucuagcgguaauaaaguuaaaacaaccaagguuacuagauag

SEQ ID NO: 21846 - protein, 389 aa, Artificial Sequence
  derived and/or modified sequence
MGYPEVERRELLPAAAPRERGSQGCGCGGAPARAGEGNSCLLFLGFFGLSLALHLLTLCCYLELRSELRRERGAESRLGGSGTPGTSGTLSSLGGLDPDSPITSHLGQPSPKQQPLEPGEAALHSDSQDGHQMALLNFFFPDEKPYSEEESRRVRRNKRSKSNEGADGPVKNKKKGKKAGPPGPNGPPGPPGPPGPQGPPGIPGIPGIPGTTVMGPPGPPGPPGPQGPPGLQGPSGAADKAGTRENQPAVVHLQGQGSAIQVKNDLSGGVLNDWSRITMNPKVFKLHPRSGELEVLVDGTYFIYSQVYYINFTDFASYEVVVDEKPFLQCTRSIETGKTNYNTCYTAGVCLLKARQKIAVKMVHADISINMSKHTTFFGAIRLGEAPAS

SEQ ID NO: 21847 - DNA, 1167 bp, Artificial Sequence
  derived and/or modified sequence
atgggctaccctgaagtggaaagaagagagctcctccctgcagctgccccccgggaaagaggttcccagggatgtggatgtggtggtgcacctgcacgggcgggggaaggtaacagctgtctgctttttctgggattctttgggctttcccttgcactgcacctgctgactctttgttgttaccttgaactgcgcagcgagctccgcagagaaagaggggcagagtcgagactcggaggttcgggtacccctgggacctcgggaacgcttagcagtctcggaggacttgaccctgattcacctatcacctcccatttgggccaaccttcaccaaaacagcaacccctggaacccggagaagcagcactccattccgattcgcaggatggacatcaaatggccctccttaacttctttttcccagatgagaagccctactcagaagaagaatccagaagagtcagaagaaacaaacgctcgaagtcgaatgaaggggcagatgggccagtgaagaacaagaaaaagggtaagaaggcgggtccaccaggacctaacgggcctcccggcccaccgggtccacccgggccacaaggcccccctggaataccaggtatcccaggtatccctgggactactgtaatggggcccccaggacctcctgggccaccgggacctcaaggccctcccgggctccaaggtcctagcggagccgcagacaaggcaggtactcgagagaaccaaccagcagtcgtgcacctgcagggtcagggctccgctattcaggtgaagaacgacctttcgggtggagtcctgaacgactggtcgagaatcactatgaatccaaaggtctttaagctccacccccgtagcggggaactggaggtgcttgtcgatggaacttacttcatttactcgcaagtgtactacatcaacttcacggattttgcttcatacgaagtggtggtggatgaaaagcctttcctgcaatgcactcgttccattgaaactgggaaaactaactataacacctgttacaccgcgggggtgtgccttttgaaggcgcgccagaaaattgcagtgaagatggtgcatgcagatatcagcatcaatatgtcaaagcacaccacctttttcggcgccattaggcttggcgaagcacctgcatcc

SEQ ID NO: 21848 - DNA, 1167 bp, Artificial Sequence
  derived and/or modified sequence
atggggtatcctgaggtggagcgaagagagctcctccccgctgccgcaccccgggagagagggagccagggctgtggttgtggcggggcgccggcacgagccggggaaggtaacagctgcttgctgtttcttggttttttcggcctgagtctggcactgcatctgctaactttgtgttgctacctagagctgagatccgagctgcggagagaacggggagcagagagtaggctgggcggaagcggaactccggggacatctgggactctgagctcactagggggtctcgatccagactcgcccataaccagtcatctgggccaaccttcacccaagcagcagccactggagcctggcgaggccgccctccattccgatagccaagatgggcatcagatggccctgctgaacttctttttccccgacgagaagccttattctgaagaagaatcccggagggtacgacgaaacaaaagatctaaaagcaatgagggtgccgatggtcctgtgaagaacaagaagaaaggaaagaaagctggaccccctggccctaacggcccgcccggtccgcctggaccaccagggccacagggtcctccaggaattcccgggatacccggcatccccggaaccacggtgatggggccaccaggtccacccggccctcccgggccacagggtccaccaggcctccaggggcctagcggcgccgccgacaaggccgggacacgcgagaaccagccagctgtggtccatctgcaaggtcagggaagcgccatccaggtcaagaacgatctctccggcggcgtgctgaatgattggtctcgcattactatgaaccccaaggtatttaagttgcaccctcggtctggcgaactggaggttttagtggacggcacctactttatctacagccaggtatattacatcaatttcacggattttgcttcttacgaagtcgtagtcgacgagaaacctttcttgcagtgtacacgctcgattgagactggtaaaaccaactacaacacatgttacactgcgggcgtgtgtcttctgaaagctcgccagaagatcgctgtgaaaatggtccacgcagatattagcatcaatatgtcaaaacatacaacatttttcggagcaattagactgggcgaggcaccagcctcc

SEQ ID NO: 21849 - DNA, 1167 bp, Artificial Sequence
  derived and/or modified sequence
atgggctatcccgaagtggagcgccgcgagcttcttcctgccgccgcacccagagagcgaggctcacaggggtgtggctgcggcggcgcgcctgctagggctggagagggtaatagttgcctgctgttcctgggcttcttcgggcttagcttggctctgcatctgctgaccctttgctgctacctagaattgagaagtgaactgagacgtgagaggggcgccgaaagcagactcggaggctcagggactcccggtacaagcggaacactgtcaagtctgggaggcctcgatccagactcccctattacttcccacctaggacagccctcccccaaacagcaaccactcgagcctggggaagcggccttacattccgattctcaggacggccaccagatggcactcctgaacttctttttccctgatgaaaagccgtacagcgaggaggaatccagacgcgtccgccggaataagcggagcaagagcaatgagggcgccgacgggcctgtcaagaacaaaaagaagggcaagaaggctggccctccggggcctaacgggccgcctgggcctccagggccgccaggcccccagggcccccccggaatacccgggatcccaggcatcccaggtaccactgtaatggggccaccaggcccaccagggcctccaggaccacaggggccccctggcttacaaggcccttccggggcggccgataaggccggaacccgtgagaaccaacccgcagtagttcacctccaggggcaggggtctgcaatccaagtcaagaatgacctcagtggtggtgtcctgaacgattggtcgagaatcacaatgaaccccaaagtttttaaactgcacccgcgctcaggtgagctggaagtgcttgtggatggcacttacttcatttatagccaagtgtactatataaatttcaccgacttcgctagctacgaggtcgttgtggacgagaaaccatttctccagtgcacccgatcgatcgaaactggcaagaccaattataatacatgctataccgctggggtctgcctgctgaaagcgcgacaaaaaatagcagtgaagatggtgcacgcagatatctctatcaatatgagtaaacacacaactttcttcggagccattcgcctcggggaggcccctgcctca

SEQ ID NO: 21850 - DNA, 1167 bp, Artificial Sequence
  derived and/or modified sequence
atgggataccctgaagtggaacgccgcgaactcttgcctgcggccgccccgagagaacggggaagccaaggatgcggatgtggaggagcccccgcgcgcgctggtgaaggaaactcgtgcctgctgttcttgggattcttcggtctgtcgctggccctgcatttgctcaccctgtgttgctacctggaattgagatcagagctgcgccgcgagcgcggcgccgagtccagactggggggatccgggacgcctgggaccagcggaacgttgtcgtccctcggagggctggatccggattcccccatcacttctcacctcggtcagccctcgccgaagcaacagcccctggaaccgggagaagcagctttgcactcggattctcaagatggacaccagatggcgctcctgaacttcttctttccggatgaaaagccttattccgaagaagagagtcggcgcgtgagaagaaacaaacgcagcaagagcaacgaaggcgccgacggcccggttaagaataagaagaaaggcaagaaggccggtcctccaggaccaaacggacccccaggaccgcccggcccgccaggaccacaagggccgccgggtatccccggtatccctggaattcctggtactacggtgatgggcccgccggggccgcctggaccaccagggccgcagggaccgccgggcctccaaggaccgtccggcgccgcagataaggctggtactcgggagaatcagcctgcggtcgtccatctgcagggacagggaagcgcaatccaggtgaaaaacgacctttccggcggagtcctcaacgattggtcccggatcaccatgaacccaaaggtgttcaagctccatccacggagcggagaactggaagtccttgtggacggcacctactttatctactcccaagtttactacatcaatttcactgacttcgcttcatacgaagtcgtggtggacgaaaagccgtttctgcagtgtactcggtccatcgagactggaaagaccaactacaatacctgctacacggcgggagtgtgccttctgaaagctcggcagaagatcgccgtgaagatggttcacgcggacatctccatcaacatgtcgaagcacaccaccttctttggagcgatccggctgggggaggccccggccagc

SEQ ID NO: 21851 - DNA, 1167 bp, Artificial Sequence
  derived and/or modified sequence
atgggctaccccgaggttgagaggagagagctgcttcccgccgctgctccaagggagaggggtagccagggttgcggttgtggcggcgcacccgcacgcgccggtgagggaaatagctgtctcttgttcctgggatttttcggcctgtctttggccctccacctcttgactttgtgttgttacctggaactgaggagcgagctgcgccgcgaaaggggagcagaatcacgcctcggcggtagcggcacacccggaacatcaggcacgctgagttcactgggtggccttgacccagacagccccattacttcacatctgggccaaccatcccctaaacagcaacctctggagcccggagaagctgctctccattccgattcccaggatggacatcagatggctctccttaatttcttctttccagacgaaaagccttactccgaggaagaatcccgccgcgtgaggagaaacaaaaggagtaaaagtaatgagggtgccgatggaccagtgaagaacaagaaaaagggcaagaaagctggccctcctggcccgaacggaccccctggcccacccggacccccgggcccacagggtccaccaggtattcccggcattcccggcatccccggcactaccgtaatgggcccccctggcccacccggaccaccgggtccgcagggacctcccggtctccaaggaccctccggtgctgctgacaaagcgggtacgagggaaaaccaacccgctgtagtacacctgcagggacaaggtagcgccattcaagtaaagaatgacctctccggcggcgtactcaatgactggtcccgcatcactatgaaccccaaagtgtttaagcttcatccccgcagcggtgaactggaggtgctggtcgacggaacttatttcatctacagccaagtttactacatcaacttcacggacttcgcttcctacgaggttgtagtggatgagaaaccctttctgcagtgtacaagatctatcgaaacaggaaagaccaattacaatacctgttataccgccggcgtgtgcttgcttaaggccaggcaaaagatcgctgtgaagatggtgcacgccgacatctctatcaacatgtctaagcataccaccttctttggagctatcaggcttggtgaagcgccagcgagc

SEQ ID NO: 21852 - DNA, 1167 bp, Artificial Sequence
  derived and/or modified sequence
atgggatatcctgaagtggaacggcgggaattactaccagctgcggcaccccgcgagcggggcagtcagggttgtggatgcggcggcgcacctgctagagcaggcgagggcaactcctgcctgctgttcctggggttcttcgggttgtcacttgccctgcacctcctaaccctttgctgctacttggaactgcggagcgagctacgccgggagcgaggggcagagagtcgccttgggggttctggaacacccggcacatccggcaccctatcatcactgggagggctcgaccctgatagccccataacgagccatttgggacagcccagccctaagcagcagccactcgaacctggggaggcagctctccacagtgacagtcaagacgggcaccagatggctttgctgaattttttttttcctgatgaaaagccctactcggaggaggaaagtcggagagttcgacgcaacaaaaggtcaaaatcaaatgagggcgccgatggacctgttaagaataagaagaagggaaagaaggcaggccctcccggacccaatgggcctcctgggcctcctggcccaccaggcccacagggcccaccaggtatcccaggtatccccgggattccaggaaccaccgtgatgggacctcctggccctccaggaccacccggtccccagggcccccctgggctccaaggcccatctggggcagctgataaggccggaacacgagagaatcagccagccgtggtacatctgcaggggcaagggtccgccatccaggtcaagaacgacttgagtggaggagtcctaaacgactggtctcgaataaccatgaatcccaaggtgtttaagctccatccccgaagcggtgagcttgaggtacttgtcgacggcacctattttatctattcacaggtgtattatatcaatttcacagatttcgcttcatatgaggtggtggtggacgagaagccgtttcttcagtgcactcggagcatagagacaggcaaaacaaattataatacttgttacacggccggcgtctgtctcctgaaggcaagacagaagatcgccgtgaaaatggtccatgctgacatatcaatcaacatgtccaaacatactacgtttttcggcgcgattagacttggcgaagcacccgcatct

SEQ ID NO: 21853 - DNA, 1167 bp, Artificial Sequence
  derived and/or modified sequence
atggggtatcctgaggttgaaaggcgagagctgctgcccgccgctgctccgagagagcgcgggtctcaagggtgcgggtgcgggggagccccagcccgggccggggagggcaacagctgtctgttgttcctcggctttttcggattgtctctggccctgcacctgctaactctttgttgttatcttgaactgcggtcggaactgcggagagagcgcggagccgagagccgccttggcggctccggcactcccggtacttccggcaccttgagctccttgggtggtctggatcccgattcccccatcacatcacacctggggcagccctctcccaagcagcagccactggagccgggagaagcagctttgcacagcgactcccaggacggacaccagatggccttgcttaacttcttctttcccgacgagaagccgtattcagaggaagaatccaggcgcgttaggaggaacaagagaagcaaatccaacgaaggcgcggatggccccgttaaaaacaagaagaaggggaagaaggctggccctccgggacccaatgggccccctggcccgcctgggcctccaggaccgcaagggccacctgggattcctgggatccccggcattccggggacaacggtgatgggtccccctggtcctcctgggccccccgggccccagggcccccctgggctgcagggcccctccggcgcggcagataaagctggtacgcgcgagaaccagccagccgtggtgcacctccagggtcagggttctgccatccaagtgaaaaatgacctgtcaggcggcgtgctgaacgactggtctcggatcaccatgaatcctaaagtgtttaaactgcacccaagaagcggggagctcgaggtgctggtcgacggcacatacttcatctacagccaggtgtactacattaactttaccgacttcgcgtcctatgaagttgtggtggacgaaaagccgttcctgcagtgtacgaggtccatcgagaccgggaagactaattataatacctgctataccgccggcgtgtgcctattgaaagcccggcagaaaatcgctgtgaagatggttcacgcagacatctccattaacatgtccaagcatactaccttctttggcgccataagactgggagaggccccagcaagc

SEQ ID NO: 21854 - DNA, 1167 bp, Artificial Sequence
  derived and/or modified sequence
atggggtaccccgaagttgagagacgggaacttctgcctgcagcggccccacgggagcgggggagccaggggtgcggctgtggaggcgccccggcacgcgccggcgagggtaactcgtgcctgctgttcctggggtttttcggcctctccctggcactgcacctgttgaccctgtgctgctacttggagcttcggtcagaattgcgacgcgagcgcggcgccgaatcgcggctgggaggatcgggaacccctgggacttccggaaccctgtcctccctgggaggactggatcctgattctccaatcaccagccacctgggtcaaccatccccgaaacagcagccgctcgaaccgggcgaagccgcgctgcacagcgactcgcaggacggccatcagatggcgctgctcaatttcttctttcccgatgaaaaaccatactcggaagaggaatcgcgcagagtccgccgcaacaagcggtcaaagtcgaacgagggggcagacggccccgtcaaaaacaagaaaaagggtaagaaggctggtccgccaggccccaacgggccaccgggaccccccgggcctcctggaccgcaaggcccaccggggatcccgggcatcccgggaatcccggggacgactgtcatggggcctccgggaccgcctggtccgcctggtccccaggggccaccagggttgcagggaccgtccggcgctgccgataaggccggaacgcgcgagaaccaaccggccgtggtgcacctgcagggacagggatccgctatccaggtgaagaatgacctgagcggaggtgtcctcaacgactggtcgaggatcaccatgaaccctaaggtgttcaagttgcatccgcggagcggcgagctcgaagtgctggtcgatgggacctatttcatctactcgcaagtgtactacatcaatttcaccgacttcgccagctacgaagtcgtggttgacgaaaaaccgtttctccagtgcacccggtcaatcgaaaccggaaagactaactacaacacctgttacactgccggagtgtgcctgctgaaggcccgccaaaagatcgcggtgaagatggtgcacgccgatatctcaatcaacatgtctaagcacaccacgttttttggagcgatccgacttggagaagcgccggcttcg

SEQ ID NO: 21855 - DNA, 1167 bp, Artificial Sequence
  derived and/or modified sequence
atgggctatcctgaggtggagcgccgggagttgctcccagcggccgcaccccgggaacgtggatcccagggatgcggctgtggcggcgcaccggcccgcgccggggaggggaacagctgtctgctgtttctgggctttttcggactgtcgctcgccctgcaccttctgacattgtgttgttacctcgagctaaggagcgaattgaggcgagagcggggggcggagagcagacttgggggcagtggaacacccgggacttccggaacactttctagtcttggaggtcttgatcctgattcacctatcacaagtcatcttggccaaccaagtcctaaacagcagccacttgagcccggcgaagcagcacttcattctgactcccaggatggacaccagatggcgctcctcaactttttcttcccagacgaaaagccctattcagaggaagaatctaggagggtgcggagaaataaaagaagtaaatccaatgagggagccgatggtccagtgaaaaacaagaagaagggaaagaaagctgggcctcccggacctaatgggccacccggcccacctggaccaccagggccacaaggtcctcctggcattccgggcatccccggcatacctggcacaaccgtcatgggcccccctggcccccccggacccccaggccctcagggaccacccggcttgcagggcccctctggagcagctgataaggcaggaacccgagaaaaccaacccgccgtggttcatcttcagggccagggctccgccatccaggtgaaaaatgacctgtccggaggcgtactgaatgattggagtcgtatcacaatgaatcctaaggtttttaagctccaccctcggagcggggagctcgaggtgttagtggacgggacctactttatctattctcaagtgtactatatcaatttcacggattttgcttcatacgaggttgtggtcgacgagaaaccatttttgcaatgcacacgcagcatcgaaacggggaagactaactacaacacttgttacacagctggcgtttgcctcctcaaagcacggcagaagatcgctgtgaagatggtacacgctgatatcagcatcaatatgtccaagcataccacatttttcggggccattcggctgggcgaggcccccgcgagc

SEQ ID NO: 21856 - DNA, 1167 bp, Artificial Sequence
  derived and/or modified sequence
atggggtaccctgaagttgaaagaagagaacttctgcctgcagcagcgccccgagagagaggaagccaaggttgtggctgtggcggggctcccgctcgcgcgggcgaaggaaattcttgtctgctgttcctgggctttttcggattgtcccttgcactgcatcttctcaccctgtgttgttacttggaattgcggtcggagctgcgcagagagcgaggtgcagagtcgaggttgggtggatccggaacccctggcacctccggtactctgtcctcactgggcggacttgacccagactcgccaattacttcccatttgggtcagccgagtccaaaacaacagccgctggaaccgggagaagcggcattgcactccgattcgcaggatggacatcaaatggcactcctgaatttcttttttcccgatgaaaagccatatagcgaggaggaatcgcgtcgcgtccggcggaataagcgttcaaaatcgaacgagggcgcagatgggcccgtgaaaaacaagaagaaagggaagaaggcaggtccccctggcccaaatggtcctccaggtccacctggtcccccgggtcctcaggggccgcccggaatccctgggatccctggcatacctggaactactgtcatgggacctcccggaccaccaggccctcccggtccacaggggcccccgggtctgcaagggccttcgggagcggccgataaggcgggcacccgcgagaaccagcccgcagtggtgcacctgcaaggacagggctccgccattcaagtgaagaatgacctttcaggaggggtgctgaacgattggtcccgaattaccatgaacccaaaggtgtttaaactgcatcctcggagcggagaactcgaggttctcgtggacggaacctatttcatttactcccaagtatactacatcaacttcactgactttgcatcttacgaagttgtggtggatgaaaaaccttttctccaatgcacgaggtcaatcgaaaccggtaagactaactacaacacgtgctacacggcaggtgtgtgcctcctgaaggccagacaaaagattgctgtcaagatggtccacgctgatattagcatcaatatgtctaaacatactaccttctttggggcaataaggttgggcgaggcccctgccagc

SEQ ID NO: 21857 - DNA, 1167 bp, Artificial Sequence
  derived and/or modified sequence
atgggctaccctgaggtggaacggcgcgagcttttgccagcagccgcaccaagagagagaggctcacaaggatgcggctgtggcggcgctcctgcaagagcgggtgaggggaatagctgtctgctttttcttggctttttcgggctcagtctggctctgcaccttcttaccctgtgctgctaccttgagctgaggagcgaactgcgccgagagcggggggccgagtcacgtctgggcgggtctggaactcctggcacgtcggggactctgagctcactgggaggactcgatccagactcacccatcacttcccacctggggcaaccttctccgaaacagcaaccactggaaccaggtgaggcagcacttcattccgatagccaagatggacatcaaatggcactgctcaatttcttcttcccggacgaaaaaccatactcggaagaggaatcgcggagagtgcgcaggaataaacgctccaagtcgaacgagggcgccgatggacctgtaaagaataagaaaaagggaaagaaagcaggcccaccaggccctaacggtcctcctgggcctccaggacctcctggccctcaggggccacccggtattcccggtatccctggtattcctggaaccaccgtgatgggtcctcctggaccaccaggtccaccaggaccgcagggccctcctggtttgcaggggccttcgggagctgcagacaaggcaggaacccgagagaatcaacccgcagtggtacatctgcaaggacaaggttcggcaattcaggtgaagaatgatctgtcgggaggtgtgcttaacgattggtcgagaattaccatgaaccccaaggtctttaaactccatccgcgatctggcgaacttgaggtgctggtggacggaacgtactttatctactcgcaggtgtactacataaacttcaccgactttgcatcctacgaagtggtcgtcgacgaaaagccatttcttcagtgtaccagatccatcgagacgggtaagactaactacaacacctgttatactgcaggggtctgcctgttgaaggcgaggcaaaagatcgcagtcaagatggtgcatgcagacatttccatcaacatgtcgaagcatacgacctttttcggagcaataaggctgggagaggctccagcgtca

SEQ ID NO: 21858 - DNA, 1167 bp, Artificial Sequence
  derived and/or modified sequence
atgggatatccagaagtcgaaaggagggaattgctcccagctgccgcacccagggagagaggcagtcagggatgcggatgcggaggggcaccggccagggctggtgagggcaactcttgtcttctgttccttggtttcttcgggctgtcactggctctgcacctgctgaccctctgctgctacttagaactcagaagcgaactgaggcgtgaacgcggagcggaaagtcggcttggcggcagcggaacacctggcacatccggtactctgagttcccttggcggactggacccagattctcccattactagccaccttggacagccttctcctaaacaacagccattagaacccggagaggctgcccttcactctgacagccaggatggccatcagatggcgttgctgaattttttttttcccgatgaaaaaccttacagcgaagaggaatcccgcagagttcggcgcaacaaacggtccaaatccaacgagggggcagacgggcctgtgaaaaacaaaaagaagggcaagaaggcgggaccgccaggcccaaacgggcctcctggaccacctggaccgccagggcctcagggaccacccggaatccctggaatcccaggaatcccaggaaccacggttatgggcccccctggcccccctggtccccccggcccacagggtcccccagggctgcaagggccgagcggagccgcagataaggccgggacacgagagaaccagcccgcagttgttcatctgcagggacagggaagcgctatccaagtgaaaaatgatctgagcggcggtgttcttaacgattggagccgcatcaccatgaatcctaaagtgttcaaactgcatccccggagtggtgagctggaggttctagtcgacggcacatattttatctatagtcaagtatactatattaactttaccgatttcgcttcctacgaagtagtagtcgatgagaaaccttttttgcagtgcacccggtctattgaaactggaaaaacaaattataacacctgctatactgccggtgtctgcttgctcaaagcaaggcagaagatagcagttaagatggtgcatgctgatatatccatcaacatgagtaaacacacaaccttttttggtgcaatcaggcttggagaagcccccgcttct

SEQ ID NO: 21859 - DNA, 1167 bp, Artificial Sequence
  derived and/or modified sequence
atgggataccccgaggtcgagcgccgggagctgctccctgccgcagccccgcgggaacgcggttcgcaaggttgtgggtgcggcggcgcgccggcacgcgccggagaaggaaactcgtgtctgctcttcttgggattcttcggcctctcgcttgcgctccatctgttgactctgtgttgctacttggagctccggagcgagctcagaagagagcgcggagctgaatcccggctgggaggctcaggaaccccaggaacttccgggactttgtcgagcttgggcggactggaccctgactcgccaatcacctcgcatctgggacagccgagcccaaaacagcaaccgctggagcctggagaggccgcgctccactcagactcgcaagatggacaccagatggccctgctgaacttcttctttccagacgagaagccgtactcggaggaggaatcgagaagagtccgccgcaacaagagatcaaagtcaaatgaaggcgcggatggcccagtgaagaataagaagaagggcaaaaaagccgggccgccgggcccgaatggtccaccgggcccacctgggccaccgggaccccagggtcccccaggaatcccgggaatccctggcatcccaggcacgactgtcatgggcccaccaggaccgccgggacccccgggaccgcaagggccgcccggcttgcaaggaccatcaggcgccgcagacaaggcggggacccgggaaaaccaaccagcagttgttcacctccagggacagggttccgccattcaagtcaagaacgacctgtcaggtggtgtgctgaacgactggtcgcgcataaccatgaacccgaaggtgttcaaactgcatccgcgctcgggagaattggaggtgctcgtggatggaacttactttatctatagccaggtgtactacatcaatttcacggacttcgcttcgtacgaggtggtcgtggacgagaagccttttctccagtgcactagatccatcgagactggcaagactaactacaatacctgttacactgctggggtgtgccttcttaaagcgcgccagaagatcgcggtgaaaatggtgcacgccgacatctcaatcaacatgtccaagcataccactttctttggagcaatccgactcggagaagcacctgcatcg

SEQ ID NO: 21860 - DNA, 1167 bp, Artificial Sequence
  derived and/or modified sequence
atgggttatcctgaggttgagagaagggagctcttgccagccgctgcaccaagagagagaggctcgcaggggtgcggctgcggtggcgcccctgcccgcgccggggaaggaaactcgtgcctgctgtttctgggtttctttggcctgtcattagccctgcacctcctaacactgtgttgctatctagaattgaggtcagagctgcggcgcgagcggggagctgagtcccgtctcgggggatccggcacccccggcacatccggaactctctcttctctcggcggtctggatcccgactcccctatcacaagtcacctggggcagccctctccaaaacagcaaccactcgagcccggcgaggctgctctgcattccgactcacaggatggacaccaaatggctctgctgaattttttttttcctgacgagaagccatattcagaggaggagtcccggagagtgcgtcgcaataagcgtagtaaaagtaacgagggagcagatggcccagtgaagaacaaaaaaaaggggaaaaaggctggtcctccgggtccaaatgggcctccgggcccccctggcccacccggtccccaaggcccccctggcatccctggaattcctgggattccggggactaccgtcatgggtccaccaggcccgcccgggcccccgggaccccagggccccccgggcctgcagggccccagtggggctgcagacaaagccggcacgcgcgagaatcagcctgccgtggtgcatctgcagggtcagggctccgcaattcaggtaaaaaacgacctctccggtggggttctcaacgattggtctcggattactatgaatccaaaagtcttcaaattacatccaagatctggggagttagaagtgctcgtcgatggtacctatttcatatactctcaggtgtattatatcaatttcacagattttgcttcttacgaagtggtggtggatgaaaagccttttctgcaatgtacccggtcaatcgagacgggaaagactaactacaacacatgttatacagccggcgtctgtctactaaaggccagacagaagatagctgtgaaaatggtacacgctgacataagtattaatatgtctaagcacactacctttttcggggccatcagactgggggaagcacccgcctcc

SEQ ID NO: 21861 - DNA, 1167 bp, Artificial Sequence
  derived and/or modified sequence
atgggctaccctgaagttgaaaggcgggagctgctccctgccgcggcgcctagggagcgcgggagccagggatgtggctgcggcggcgcccctgccagagccggcgaggggaacagttgcctgctatttctcgggtttttcgggctcagtcttgccttgcacctccttacactttgctgctatctggagctgcggagtgaactgcggagggaaagaggggccgaatcccgcctgggcgggtctggcacaccggggaccagcgggaccctttcctctctcggcggtctggatcccgattctcccattacaagtcaccttgggcaaccgtctccaaagcaacaacctctggagccgggcgaagctgctctgcactccgattctcaggacggtcatcagatggcactattgaatttctttttccccgacgagaaaccttatagcgaagaggagagcaggcgagttcgtcgcaataagaggtccaaatccaatgagggagctgacggacccgtcaagaacaagaaaaaagggaaaaaggcaggtccccccgggcccaacggcccgcccggccctcctggtccccccggccctcaaggccctcccggaattcctgggatacccggaattccgggaacaaccgtcatgggcccccctgggcccccagggcctcctggccctcaaggcccacccggcctccagggacccagcggcgcagctgacaaagccggcacccgggagaatcaaccggctgttgtgcatctgcagggccaaggcagcgctatccaagtaaagaatgatctttccggcggcgtcctgaatgattggagtcggatcaccatgaatccaaaggtcttcaagctccatcctcggagcggggaactcgaagtgttggtcgatggaacttatttcatttacagtcaggtctactacataaattttacagattttgccagctacgaagtggtggtggacgaaaagcccttcctgcagtgcacccgcagtatagagaccgggaaaactaactacaacacatgctacacagctggggtttgcttgctgaaagcaaggcagaagatcgccgtcaaaatggtacacgccgacatttccattaacatgtcaaaacacacaacttttttcggggctatccggctgggtgaagctcctgcaagc

SEQ ID NO: 21862 - DNA, 1167 bp, Artificial Sequence
  derived and/or modified sequence
atgggatatccagaggttgaaagaagagaacttttgccggcggctgctccacgagagcggggttcgcaaggatgcggctgtggtggagcgccagcacgggctggggaaggaaattcttgtttgctgttccttggattctttggactctccttagccctacatctgttaaccctttgttgctacttggagctccgtagtgagttacgtagggagcgtggagctgagagccggcttggaggttccggaacaccaggaacttctggcacgctatcctccctgggaggtttagatccagattcacctattacatctcatcttggacaaccatcaccaaagcaacaaccgttggagccaggagaggctgcactgcactcggattcacaagatggtcaccagatggctcttctcaatttcttttttcccgacgaaaaaccatattccgaggaggaatctcggcgggtcagacgtaataaacgctcgaagtctaacgagggggccgatggtcctgtgaaaaataaaaagaagggcaagaaagctggacctccaggtccgaatggaccaccaggaccaccaggtccaccaggaccgcagggacctccgggaataccaggtattccaggaattccggggacaaccgttatgggacctccaggaccacctggtccacctggaccacaaggaccacccggcttgcaaggaccgtcgggtgctgctgacaaagcaggaacacgtgaaaaccagcctgccgtggtccatttacaagggcaaggttcagcaattcaagtcaaaaacgacctttcaggcggtgtcttaaatgattggtccaggattacaatgaatcctaaagtgttcaagttgcacccaagatctggtgaacttgaagttctcgtggacggaacgtattttatctattcacaagtctattatattaactttacagattttgcaagttatgaagttgtggtagacgaaaagccctttcttcaatgtacacgcagtattgagacaggaaaaactaattataacacatgttacacagctggggtctgtctacttaaagcacgacagaagattgctgttaagatggtacacgcagatatctctatcaacatgagtaagcacactacattcttcggcgctattcgtctcggagaagctccagcttct

SEQ ID NO: 21863 - DNA, 1167 bp, Artificial Sequence
  derived and/or modified sequence
atggggtacccggaagtcgaaagacgggaattgctcccggctgctgctccccgggagcgtggaagccaggggtgtggttgcggcggggctcccgctcgagctggggaaggaaactcctgtctgctgtttttaggcttttttggactcagcctggccctgcacctgctaaccctttgctgctatctggagctccggagcgagctgcgacgggagcggggagcggagagcaggctgggcggcagtggcacgcctggcacctcaggcacactctctagcctcggtggactcgaccctgactcacctatcactagccatcttggccagccttccccaaagcagcaacccctggagccaggagaagctgcgttacactccgacagccaagatggacatcagatggccttgctaaattttttcttccccgacgagaagccctactctgaggaggagtcccggcgcgtgaggcggaacaaaaggtcgaagtcaaatgaaggtgccgatgggcccgtcaaaaataagaagaaaggcaaaaaggctggtccccctggcccaaatggaccccctggaccacccgggccccctggcccccaagggcctccaggaattcctgggatccctgggataccagggacaaccgtgatgggccctcccggccctccagggcctccaggtcctcagggccctcccggattacagggaccctccggcgcagcggataaagccgggaccagggagaaccagccagccgtcgtccatctccaaggacagggctccgcaatacaggtgaagaacgatcttagtggcggggttctaaacgactggagcagaatcaccatgaaccctaaggtatttaagctccaccctaggagcggggagctggaggttcttgtggacggcacgtatttcatatattcacaggtctactacattaattttacagactttgccagttacgaagtggttgtggacgaaaaaccctttctccagtgcactcgaagtattgaaaccgggaaaacaaactataacacgtgctacacggccggcgtctgtctgctgaaagcccggcagaagatcgcagtcaaaatggtgcatgcggacatctcaatcaacatgtccaagcacacaactttctttggtgccataagactcggcgaggcaccggcatct

SEQ ID NO: 21864 - DNA, 1167 bp, Artificial Sequence
  derived and/or modified sequence
atgggatatccagaagtggaaagacgcgagcttcttccagccgcagcaccaagagaacgaggctcgcaaggttgtggatgcgggggagcacctgcccgtgcaggtgaaggaaattcgtgtctgttgtttctcgggttctttggactttcactcgcgctccacctcctgaccctgtgctgttacctcgaacttagatcagaactgagacgggagagaggtgcagagagtagactcggcgggtcgggtactcctggaacttcaggtaccctcagctccttgggtggtcttgaccccgactcgccaattacttcgcatttgggccaaccttcacccaagcaacaacctctggaaccaggagaggctgccctgcattcggattcccaagacgggcaccagatggcactcctgaactttttctttcctgacgaaaagccctactccgaagaggagtcccgtagagtgcgaagaaacaagagatcgaagtctaatgaaggtgcggacggacctgtgaagaataagaaaaaaggtaagaaggcaggtcctcccggcccaaacggtcctccaggccccccagggccccctggtccccagggcccacctgggatacctggtatacctggaatcccaggtaccaccgtgatgggccctccaggaccgccggggcctccaggtccacagggtccccctggattgcagggtccttccggagcagcagacaaagccggcaccagggaaaaccagccagcagtggtgcatcttcaaggtcagggctcggccattcaagtcaagaatgatctgtcgggtggagtgctcaacgattggagcagaattaccatgaaccctaaggtgttcaaactgcatcctcgctcgggtgagttggaagttcttgtggatgggacttacttcatctactcccaagtgtactacatcaactttactgactttgccagctacgaagtcgtggtggatgaaaagccttttctccaatgtacgcgttcgatagagactggtaagactaattacaatacttgttacaccgcaggagtgtgcctgctgaaggcacggcaaaagattgcagtgaagatggtgcatgcagatatatccattaacatgtccaagcacactacgtttttcggggcgattagacttggcgaagcgccagcatcc

SEQ ID NO: 21865 - DNA, 1167 bp, Artificial Sequence
  derived and/or modified sequence
atgggatatcctgaggttgagaggcgggagctactccctgcagccgcacccagggaaaggggaagccagggctgcgggtgcggtggcgcccccgcgcgcgctggggagggtaacagttgcctgctgttcctcgggttcttcgggctatcactggcactccatcttctcaccttgtgttgttacctcgaactgcgcagtgagctccgaagggagaggggcgctgaatctaggctgggagggagcggcacccctgggacttccgggacactgtcttcactaggtgggctcgacccagactccccaattaccagccatttgggtcagccgtcccccaaacagcagcccctcgagccaggagaagccgcgctgcattctgacagccaggacggccaccaaatggcccttctgaattttttcttccctgatgagaaaccgtactccgaggaagagtccagacgggtccgacgcaataaacggtctaagagcaacgagggcgcagacggccccgtaaagaataagaagaagggaaaaaaagcaggccctccagggccgaatggcccccctggtcccccaggccctccagggcctcaggggcctccaggcatccccggaattccaggaattcccggcaccacggtgatggggcctcctgggccacctgggccgccaggacctcaaggcccacccggcctgcagggtcctagtggggcagctgacaaagctggaacccgagaaaaccagccggcagttgtgcatctacagggacagggtagcgctattcaggtaaagaacgatctgagtggaggagttcttaacgattggtcccgaattaccatgaatcctaaggtgttcaaactacatccgcgctcaggcgaattagaagtgttggtggacggaacttacttcatatattcgcaggtctattatattaattttaccgatttcgccagttacgaagtggttgtggacgagaagccttttctccagtgtacaaggtcaatcgagaccggcaagaccaactacaatacttgctatacggctggggtgtgtctgttaaaagcccgtcagaagatcgctgtcaagatggtccatgcagacatatctatcaacatgtctaagcataccacttttttcggggccattcggctcggagaggctccggccagc

SEQ ID NO: 21866 - DNA, 1167 bp, Artificial Sequence
  derived and/or modified sequence
atggggtacccagaagtggagaggagggaactgttacccgccgcggccccgcgcgaaagaggctcacaaggttgcggttgtggaggggcgcccgcccgcgccggggagggcaattcatgtctcctctttctggggttctttgggttgtctttggcccttcatttactcacattatgctgttatctggaattgaggagcgagctgagaagagaaaggggagcagagagtagacttgggggctccggaacccctgggacttctggtacattgtcgtccctcggaggattagatcccgattcccctatcacatcccacctgggacagccttcccccaaacaacagcctctcgagccgggcgaagcagctctgcacagtgatagccaagatgggcatcagatggccctcttgaatttcttcttcccagacgaaaagccatatagcgaagaggaaagccggcgagtgagacgcaacaaacgcagcaaatctaatgagggcgcggacggacccgtcaagaacaaaaagaaagggaagaaggcggggcctcctggcccaaatggcccccctggtcctccgggtcccccagggcctcagggaccacccggcattccaggcattcccggaataccaggaactaccgttatgggacccccaggccctcctggacccccgggcccacaggggcctccaggcctccagggtccatcgggcgctgccgataaggcaggaaccagagagaatcagcccgccgtggtacacctgcaaggacaggggtcagctattcaagttaaaaacgacctcagtggtggtgtgctgaacgattggtcaagaattaccatgaatcccaaagtttttaaactgcacccccggtccggtgagcttgaggtgctggtggatgggacctacttcatctacagccaggtgtactatataaacttcacagactttgcctcatatgaggttgtggtggatgagaagcctttcttgcaatgtacacggtcaatcgagactggtaagactaattataacacttgctataccgccggggtgtgcctcttaaaagcgaggcagaagattgccgtgaagatggttcacgccgatatctcgatcaacatgtcgaagcacactactttttttggggcaataaggttaggagaagctcccgcttcc

SEQ ID NO: 21867 - DNA, 1167 bp, Artificial Sequence
  derived and/or modified sequence
atgggatatcccgaggttgagcggagagaactgctccctgctgccgcaccccgggagcggggatcccaaggctgcggatgcggcggggcaccggcacgagcaggcgaagggaactcctgtctcttatttctggggttcttcgggctttcgttggccctgcatctgttgacgctatgctgttaccttgagctgagatccgaactgagacgggaacggggtgccgaaagcaggctgggcggctccgggacaccaggcacgtctggcactctttcaagtttgggcggcctggaccctgattcacccataacaagccatttaggccagccttctcccaaacagcaaccacttgagccaggcgaggcggctctccacagcgatagtcaggacgggcaccagatggccctcctaaacttcttctttccggacgaaaaaccgtactccgaggaagaatcacgaagggtgaggaggaacaagcggagtaagtcaaatgagggtgccgacggcccggttaaaaacaagaaaaaaggtaagaaagccggtcccccaggccctaacggacctccagggccccctggacctccgggccctcagggcccgccagggatacccgggatccctgggattcctggcacaactgttatgggtcctcccggtccccccggtccgcctggaccgcagggaccccccggcctacaaggcccctcgggcgcagccgacaaggctggaaccagagagaatcagcccgccgtcgtgcacttgcagggacagggatctgcgattcaagtgaaaaatgacctaagcgggggagttctcaatgactggtcacgcatcacaatgaatcccaaagtgtttaagttgcatcctaggtccggcgaactcgaggtgctggtggatgggacatattttatatactctcaggtgtactacattaacttcactgactttgcatcatacgaggtggtcgtagatgaaaagccctttttgcagtgcacccggtcgattgaaactggtaagacaaattataacacctgttacactgctggcgtgtgcttactgaaagctagacagaaaatcgccgttaagatggtgcacgctgatatctcgatcaatatgagcaaacataccaccttttttggggcaatccgactgggcgaggcacccgcatcc

SEQ ID NO: 21868 - DNA, 1167 bp, Artificial Sequence
  derived and/or modified sequence
atgggttaccctgaagtcgaacgcagggagctcctgcctgctgccgccccgagagagagaggctcccagggatgcggctgcggcggagcccctgcccgcgccggagaaggcaacagctgtctgctgtttctggggttctttgggctgtcgctggcgctgcatctgttgaccctgtgctgttacctcgagctcaggagcgaactgcggcgggagcgcggagccgaatcgagattgggcggctcgggcactccagggaccagcggaaccctgagttcgctggggggtctggacccggactcaccgatcacctcgcacttgggacagccgtcccccaagcaacaaccactggagccaggggaagccgcacttcattcggactctcaggatggacatcagatggctcttctcaatttcttcttcccagatgaaaagccgtacagcgaagaagaaagcagacgggtgcggagaaacaagcggtccaagtcaaacgagggagctgacggacccgtcaagaataagaagaagggaaagaaggcgggaccacccggaccgaacggccctcctggaccacctggaccgccgggaccacagggcccaccggggatcccaggaatccctgggatcccgggtaccactgtgatgggaccccccgggccacctggcccgcctggacctcagggcccgccggggctccagggaccgtcgggagccgcggacaaggctggcacgcgcgaaaaccagcccgccgtggtccacctccaaggacagggatcagccatccaggtgaagaacgacctgagcggcggagtgctcaacgattggtcccgcataaccatgaacccaaaggtgtttaaactgcatcctcgctctggcgagttggaagtgctcgtcgatggaacttacttcatctactcgcaggtgtattacattaacttcaccgactttgcgtcgtacgaagttgtggtcgatgaaaagccatttcttcaatgcacccggtcgatcgaaaccggaaagacgaactacaatacctgctacactgccggagtttgcctgcttaaagcaagacagaagatcgccgtcaaaatggtgcatgccgacatcagcatcaacatgagcaagcatactaccttctttggagcgatccggctcggtgaagcccccgcctca

SEQ ID NO: 21869 - DNA, 1167 bp, Artificial Sequence
  derived and/or modified sequence
atgggataccccgaagtggagagaagggagctgctgccagctgccgccccccgggagagaggatcccagggatgcgggtgcggaggagctccagcaagggccggagagggaaactcttgtctcctgttcctcggattcttcggactctcactggcactgcacctgctgaccctgtgttgttacctggaactccggtccgagctgaggcgggagaggggagctgagtccagactgggtggctccgggacgccgggaaccagtggcaccctttcttcactgggcggtttagatcctgactctccaattactagtcacctcggccaaccgagtccgaagcaacagcctctggagcctggggaagctgccctccactctgacagccaggatggccaccaaatggccctgctcaacttcttcttcccagacgagaagccttatagtgaggaggaaagtagacgggtgagacgaaataagcggagtaaatccaatgagggggctgatggtccagtgaagaacaagaagaagggcaagaaggccggtccaccgggcccaaatggtccacctggcccccccgggcctccaggccctcagggacctccagggattcccggaatcccgggaatccccggtacaacagtgatggggcctcctggccccccaggaccacctggacctcaggggccacccggattgcagggtccaagcggcgccgcagacaaggccggcacacgggaaaaccagccggcggtcgttcacttgcagggccagggtagtgccatccaagtgaagaacgacctctctggtggcgtgttaaatgattggagtcgcattactatgaatcccaaagtcttcaagctgcatccccggtcaggagagctggaggtgctggtcgacgggacatattttatatacagtcaggtgtactatatcaattttacagattttgccagctatgaggtggtggttgatgagaagcctttcctgcagtgcacgaggagcatcgaaacgggcaagactaactataatacttgctacacagcgggagtgtgccttctgaaggcgcggcaaaagattgccgtcaagatggtgcacgccgacatcagtatcaacatgagtaaacacactacctttttcggagccataagactcggggaggccccagcttct

SEQ ID NO: 21870 - DNA, 1167 bp, Artificial Sequence
  derived and/or modified sequence
atgggctaccctgaggtcgagcggcgggaacttctcccagcggccgccccacgcgaacgcggctcccaaggctgcggctgcggcggcgccccagcacgcgccggcgagggtaattcgtgcctgctttttctgggattctttggactgtccctggcgctgcatctgctcaccctgtgttgttacctcgaactgagatcggagctcagacgagagcggggcgctgaaagcagattgggcggatcgggaaccccggggacttcggggactctgtcctcactcggaggacttgacccagattcacccatcaccagccatcttgggcagcctagccctaagcaacagccgttggagcccggggaggccgctctgcattcggattctcaagacggacaccagatggctctgctgaacttcttctttcccgatgaaaagccgtactcggaagaggaatccaggcgagtgcggcgcaacaaacgctccaagtccaacgaaggagccgacggacctgtcaagaataagaagaagggaaagaaggcaggaccgcctggtccaaacggtcctcctggtccacctggacccccgggaccccagggtccgccaggaataccggggattccgggaattcctggtaccaccgtgatgggaccaccaggaccgccgggtccaccaggaccacaaggcccgccgggactccaggggccatccggggcagccgataaagccggcacccgcgagaatcagccggcagtggtgcacctccaaggtcagggttccgcaattcaggtcaagaacgatctttcgggaggggtgctcaacgattggtcccgcatcaccatgaacccgaaggtgttcaaactccacccaagaagcggagaactcgaagtcctcgtggacggtacttacttcatctactcacaagtctactacatcaatttcaccgatttcgcgtcatacgaagtcgtcgtggacgaaaagccattcctgcagtgtactcggagcatcgaaaccggaaagaccaactataacacttgttacaccgcaggagtgtgcctgttgaaagcgaggcagaaaatcgcagtgaaaatggtgcacgcagacatctccatcaatatgagcaagcacaccacttttttcggagcaatccggctgggagaggcaccggcctcg

SEQ ID NO: 21871 - DNA, 1167 bp, Artificial Sequence
  derived and/or modified sequence
atgggttacccggaagtggagagacgggaacttctgcctgccgccgctccccgcgagaggggatcccaaggctgcggctgtggtggagccccggcccgggcaggagaaggcaactcctgcctgctgttccttggcttcttcggactctcgctggctctgcacctgcttaccttgtgttgttacctggaactgagatccgagctgagacgcgaacggggcgccgaatccagactgggcggatccggaaccccgggcacctcgggaactttgtccagcctcggaggtctggaccccgattccccgatcacctcgcacctcggacagccctctccgaagcagcaaccactggaaccgggcgaggccgcactgcactccgattcgcaagacgggcaccaaatggctctgttgaatttctttttccccgacgaaaagccatactcggaagaggagtcgagaagagtgcgccgcaacaaacgctcgaagtctaatgaaggggcagacggaccggtcaagaacaagaagaaagggaagaaggctggacccccaggccctaacggacctcctggcccgccaggtcctccaggcccccaaggcccgccgggaatccctggcatccccggcattccgggtactaccgtcatgggccccccaggtccgcctggaccgccgggacctcagggtccccccggacttcagggcccgtcaggtgcggcggacaaagccggtaccagagagaatcaaccagcagtcgtgcacctccaaggtcagggatccgcgattcaggtgaaaaacgacctcagcggaggggtgctgaacgattggtcacggatcaccatgaacccgaaggtgttcaaactgcatccacgcagcggagagctggaggtgctggtggacggaacctactttatctactctcaggtgtactacatcaactttaccgatttcgcgtcgtatgaggtggtggtggatgagaagcctttcctccaatgtactcggtcgatcgaaactggaaaaacgaactataacacttgctacaccgcgggagtatgcctgctgaaggcccggcagaagatagccgtcaaaatggtccatgcggacatctcgatcaacatgagcaagcatacgactttctttggtgcgatccgcctgggggaagcgcccgccagc

SEQ ID NO: 21872 - DNA, 1167 bp, Artificial Sequence
  derived and/or modified sequence
atggggtaccccgaggtcgagaggagggaattgttacctgctgcagctccaagagaacgtggtagccaaggatgtgggtgcggaggggccccagcaagagcaggagagggtaattcctgcctactttttcttggattttttggtctcagtttggctcttcatcttttgactctttgttgttatctagagcttcgaagcgagttgcgtagagaacgtggagcagagtcaaggctaggggggtccggtacccctgggacatctggtaccctcagttccttaggtggtttggatcccgatagtccaataacatctcatctaggacaaccttcgcctaaacaacagccactcgaacccggtgaagccgcacttcattcagattcgcaggatggtcatcaaatggctttgctcaacttcttcttccctgacgaaaagccctactccgaggaagaaagtcgtagagtcaggagaaacaagcgatctaagtccaatgaaggagctgatggcccagtgaagaataagaaaaaggggaaaaaggcgggtccacccggtccaaacggtcctcccgggccgccaggaccaccagggccacagggaccccctgggattcctggaattccgggaattccgggaactacagtgatgggtccaccgggtccgccgggccctccaggccctcaaggccctcccggtctccaggggccaagtggagccgcggataaagccggtacccgggaaaaccaaccggctgttgtccatttgcagggccagggttccgctattcaagtgaagaacgatttgagcggaggcgtccttaatgattggagtcgtatcaccatgaacccaaaggtgtttaagctccacccacgttccggggaactcgaagtattggtagatgggacatactttatatacagccaagtctactacattaacttcactgatttcgcatcttacgaagtggtggttgatgaaaagccatttcttcagtgcacaagaagcattgaaactggcaagacaaactataatacctgctacactgcaggtgtgtgtttactcaaagcccgacagaaaattgctgttaagatggtgcatgctgatatcagcattaacatgtcaaagcatactaccttctttggagctattcgtctcggagaggccccagcctca

SEQ ID NO: 21873 - DNA, 1167 bp, Artificial Sequence
  derived and/or modified sequence
atggggtaccctgaagttgagcggcgcgaactgttacccgccgctgccccaagggagaggggatcacagggatgtggatgcggcggcgcaccagcgagagcaggcgaaggaaattcttgtctcctgtttttgggcttcttcgggctgagcctggcactgcatctgctcacactgtgctgctacttggagttaagaagcgagctgcgccgcgaacgcggtgccgaaagccgcctgggcggcagcggcacccctggcacctcaggaaccctgtctagtttgggaggcctcgatccagactcgcccatcacatctcacctcggtcaaccaagccctaagcagcagcccctcgaacctggcgaagccgctctacacagcgacagccaagatggtcaccagatggccctcctcaactttttttttccagacgaaaaaccttatagcgaggaggagagccgcagggtgagaaggaacaaaagatcaaagtcgaatgaaggtgctgatgggccagtgaaaaacaagaagaaaggaaagaaagccggaccacccgggccaaacggcccacctggcccccccggtccacctggcccacagggaccaccaggaatccctggaatccctggaattccagggaccactgtgatgggcccacccggcccgcctggccctccaggccctcaggggccaccgggactgcaaggtccaagcggtgccgccgataaagcaggaaccagagagaatcagccagcagtagtgcatctgcaaggccaagggtccgctatccaggtgaagaacgatctgtccggaggcgttctgaacgattggtctagaataaccatgaacccaaaagtgttcaaattacaccccaggagcggagagctggaagtgctggtcgatggtacgtactttatttactcccaggtctactacatcaacttcaccgattttgcatcctacgaggtggtcgtggatgagaaaccattcctgcagtgcacacgatctattgagaccggaaagaccaattacaacacttgctacacagccggcgtgtgtctcctcaaagctagacaaaaaatcgcagtgaagatggtccacgctgacatctccatcaatatgtcaaagcacacaaccttctttggcgctatccgtttaggtgaagcaccggcaagc

SEQ ID NO: 21874 - DNA, 1167 bp, Artificial Sequence
  derived and/or modified sequence
atgggataccccgaggtggagcgcagagaactgttgcctgctgctgccccaagggaaaggggatcacaaggatgcgggtgtggtggtgcccccgctcgagctggggagggtaactcttgtctgctgtttctgggatttttcggactgagtctggcccttcacctgctcacactgtgctgttacctcgagctgcgttccgagttgcgaagggaaagaggcgctgagtcaaggctggggggctcaggtacgcccggcacctctgggactctatcttctctagggggactggatcccgactcacctatcaccagccacctaggtcagccctcccccaaacagcagccccttgaaccaggtgaggccgcactgcattcggactctcaagacgggcaccaaatggccctgctgaattttttttttccggacgaaaaaccttactcagaagaggaatcgaggagagttcggaggaacaagcgttcgaagtccaatgagggagccgacggtcccgtcaaaaacaagaagaagggcaaaaaggctggccctccaggcccaaacggcccgccaggacctccaggacctcctggaccccaggggccccccggaatccccggaatccctggcatccctgggacaacggtgatggggcctcccgggcctcccggacctccgggcccacagggccccccgggcctgcaagggccaagtggagccgctgacaaggccggcacccgggagaatcagccggccgttgtgcatctgcagggacaggggtcagcaattcaggtgaagaacgatctgtctgggggcgttctgaacgattggtcccggataacgatgaaccccaaggtcttcaaattgcatccccggtcgggtgaacttgaggtcctggtggacgggacctattttatctacagtcaggtatactatattaacttcacagacttcgctagttatgaggtcgtcgtggatgaaaagcccttccttcaatgcacgcggagcattgaaactggcaaaaccaattataatacatgctacaccgccggcgtgtgcttactgaaggctagacagaagatcgctgtgaagatggttcatgcagatatcagcatcaacatgagtaagcataccacattctttggtgcaatacgcctcggcgaggcccccgctagc

SEQ ID NO: 21875 - DNA, 1167 bp, Artificial Sequence
  derived and/or modified sequence
atggggtacccagaggtcgaacggagggaactgcttcccgccgccgcaccccgagaacgggggtctcaggggtgtggatgtggaggggcccccgcgcgagcgggagaggggaattcttgtttactgttccttgggttctttgggctcagtcttgctctgcatctgctcacactctgttgctaccttgaactccgatctgaacttagacgcgagcgcggggccgaatctcggcttggagggtctggaacacctggaacatctgggacactgtctagtctcggagggctcgatcctgatagtccaataacatcccatcttgggcagccctcacctaaacagcagccactcgaaccaggggaggccgccctccattccgattcacaggatgggcaccagatggcattactcaactttttctttcctgacgaaaagccatattctgaagaagaatctcggcgcgtgcgaagaaataaaaggtctaaatctaacgagggagccgatgggcctgtgaaaaataaaaagaaagggaaaaaagccgggcctccagggccaaatggaccacctggaccccctggacccccaggaccccaggggcctcctgggatccctgggatccccgggatcccaggaactactgtaatgggacctcccgggcccccaggaccccctgggcctcagggaccaccagggctccaggggccctccggggccgccgataaagcaggaactcgagagaaccagcccgcagttgtacatctccaaggacagggatcagccatccaggtgaaaaacgatctctccgggggagtactcaacgattggagtcgcatcactatgaaccctaaagtttttaaactccatcctcgatctggagagctggaagtactggtggatggaacatatttcatatattcacaggtttattatataaattttacagattttgcttcttatgaagtagtggtcgacgaaaaaccatttctacagtgcacacgctctatcgagacagggaaaacaaactataatacatgctatacagcaggagtgtgtctcttgaaggctaggcagaagattgccgtcaaaatggttcatgctgatatcagtataaatatgagtaaacatactacattctttggggctatcagacttggggaagcacctgcatca

SEQ ID NO: 21876 - DNA, 1167 bp, Artificial Sequence
  derived and/or modified sequence
atgggctatcctgaagtcgaacgccgcgaactgctgcccgcagctgccccacgcgagcggggcagccagggttgtggatgtggaggtgctcccgcaagagccggtgaaggcaacagctgcctgctgttcctgggatttttcggactgagccttgcactgcatcttctcactctgtgttgttacctcgagctgagatccgagctgaggagagagcgtggcgcagagtcacgcctgggaggatcaggaactcctggtacttcaggaactctctcctcccttggaggcttggacccagactcgcctattacgtcccatttggggcaaccatccccgaagcagcaacctctcgaacctggtgaggcagcacttcactcagattcccaagatggacaccaaatggcactgctgaacttcttttttcctgacgagaagccctactcagaagaggagtcgaggcgcgtccgacgtaataagagatccaagtcgaatgagggagcagacgggcctgtcaaaaacaaaaagaagggtaagaaggcaggaccaccggggcccaacgggccaccaggtcctccaggtcctcctggccctcaaggacctccgggcatacccggtattcccggcattcccggtaccaccgtcatgggtcctcccggacctcccggtccacccggtcctcagggaccacctggacttcagggcccctccggtgcagcagataaggcaggaaccagggaaaatcaaccagcagtggtgcatctccagggtcagggttcggcaatccaagtcaagaacgatctgtccggaggagtgctgaacgattggtcaagaataactatgaatcccaaggtgtttaaacttcatcctcgctccggggagctcgaggtacttgtcgacggtacctactttatctactcacaggtgtactacatcaactttactgattttgccagctacgaagtggtggtcgacgagaagccattcctgcagtgcactaggtccattgaaactggaaaaaccaattacaatacttgttacactgcgggggtgtgtctcttgaaggcacggcagaagatcgccgtgaaaatggtgcatgcagatatctcgatcaatatgtccaaacacaccaccttctttggagccatccggctcggggaagccccagctagc

SEQ ID NO: 21877 - DNA, 1167 bp, Artificial Sequence
  derived and/or modified sequence
atgggataccctgaggtggagcgccgggaattgctgccggctgccgcccctagggagaggggttcacagggatgcggttgtggtggcgccccggcccgcgccggagagggcaatagctgcctcctgttcctgggcttcttcggactctctcttgctctgcaccttctgacactctgttgctacctggagctgcgctctgaattgcggagggagagaggggctgagtcacggctggggggctccggaactccaggaacaagtggtacactgagttccctcggcgggctcgatcctgactcacctatcacaagtcatctcggacagccgtcccctaagcagcagcctcttgaacctggggaggcggcgttgcactccgactctcaggacggccatcagatggctctgctcaacttttttttccccgatgagaagccatatagcgaggaggagtctcggcgggtgcggaggaacaagagatccaagtctaacgagggcgcagatggtccagtgaaaaacaaaaaaaagggtaagaaggcaggcccaccaggccctaatggtccccctgggcctcctggcccccccgggcctcaaggtccccccgggattcccggcatcccaggcatccctggcactacggtaatgggaccgcctgggccccctggcccgccggggccacaaggtccacccgggcttcagggcccctcaggggctgctgacaaggccggcaccagggaaaatcaacccgctgtggtccacctgcaaggtcagggcagtgcgatccaggtgaagaacgatttgtccggaggggtgctgaacgattggtccaggattaccatgaatcccaaagtgtttaagctccacccacggtccggagagctcgaagtgcttgtggatgggacctatttcatctattcccaggtgtactatatcaacttcactgactttgcgagctacgaggtggtcgtggacgaaaagccgttcctgcagtgtaccagatcaattgaaacaggaaaaactaattacaacacctgttacacagcaggcgtgtgcctgctgaaagcccggcagaagatcgcggtgaagatggtgcacgccgatatcagcattaatatgtctaagcatacaacttttttcggcgccatccgactgggcgaagcaccagcctct

SEQ ID NO: 21878 - DNA, 1167 bp, Artificial Sequence
  derived and/or modified sequence
atgggttaccctgaggtagaaaggagagagcttctacccgctgccgcgcctagagagcggggctcacaaggttgcggttgcgggggggctcctgcgcgggcaggagaggggaatagctgcctactgttccttggcttcttcggtttgtcactcgccctgcacctgcttacgctctgctgttatttggaattacggagtgaactaagacgggagagaggagctgagtctcgcttggggggatcaggaacccccggcactagtggtaccttgtctagcctgggtggcctggatcctgactctcctatcacatcccatttaggtcaaccatccccaaagcagcagcccctagaacccggcgaggcggcgctgcatagtgactcccaagacggccatcaaatggccctcctgaatttctttttccccgatgagaagccatactccgaggaagagagccggcgggtgcgtcgcaacaagagaagtaaatcaaatgagggcgcagatggacctgtcaagaataaaaagaaaggtaaaaaggctggcccaccgggccccaatggtccacccggaccacccggaccccctggaccacaggggccccccggtatccccgggatccccggcatacctggcacgaccgtcatgggcccccccggacccccgggaccaccaggtccgcagggtccccccgggctacaggggcccagcggggccgctgataaggccggaaccagagaaaaccaacctgcagttgttcacctccaaggccagggaagcgcaattcaagttaaaaatgacctgtcgggtggggtgctgaatgactggtcccggatcaccatgaacccgaaagtgttcaagcttcatccgcggagcggcgagctggaagttctcgtggatggcacttattttatttattcccaggtttactacatcaatttcaccgacttcgcctcctatgaggttgtggttgacgaaaagccattccttcagtgcacgaggagcatcgagactgggaagaccaactataatacatgttatactgctggcgtatgtctcctgaaggctcggcaaaaaatcgccgtcaagatggtccatgccgatataagtattaatatgtctaaacacacaacatttttcggagctatcagactcggagaggctccagcttcc

SEQ ID NO: 21879 - DNA, 1167 bp, Artificial Sequence
  derived and/or modified sequence
atgggatatcccgaagtggagcgtagggaactgctacctgctgctgccccaagggaacgcggctcacaggggtgcggctgcggcggtgccccggcacgggcgggggaggggaactcttgtctcttgtttttaggctttttcggcctgagtttggccctacacctgttgacgctatgctgctacctcgaacttcgcagtgagctgcggcgtgagcggggtgccgaaagtagactcggtgggagtggaacaccaggtacctctggaacacttagttccttgggggggctggaccctgacagcccaatcacatcccatctgggccagccctcaccaaaacagcagcccctggaacctggcgaggcagccttgcactcagacagccaggacgggcatcagatggcgctactcaacttttttttcccagacgagaagccatattccgaggaagagagtaggcgcgtccgcagaaacaaacgttccaaatctaatgaaggtgcagatggtcctgtcaaaaacaaaaaaaaggggaaaaaggcaggccctcccggccccaatggtccccccgggccccctgggcctcctggacctcaggggcctccaggtatccccggaattccaggcattcctgggaccaccgtaatggggccaccaggacctcctggaccgccgggccctcagggacctcctggcctacagggcccttccggggcagctgacaaggctggcacgcgggagaatcagcctgctgtagttcaccttcagggacaagggtccgccatccaggtcaagaatgacctgtccggaggagtgctcaacgactggtcccgcattaccatgaatcccaaggtcttcaaacttcacccacggtcgggggagttggaggtgttggttgacgggacctacttcatttattcccaggtttactacatcaacttcactgattttgcttcatacgaggtcgtcgttgacgaaaagccatttttgcagtgtactagaagcattgagactggcaagaccaattataatacctgctacacagccggtgtttgcctgctgaaagctagacaaaaaattgccgttaagatggtgcatgcggatatctccatcaatatgagtaaacatactacattttttggagccatcagactcggggaggcccccgctagc

SEQ ID NO: 21880 - DNA, 1167 bp, Artificial Sequence
  derived and/or modified sequence
atggggtaccccgaggtagagagacgggagctcttgccagcggccgcccctagggagagaggtagccagggctgtggctgcggcggcgcccctgcacgggccggagaaggcaactcctgcctcctgttcctcggattttttggactgtctctcgcccttcatctgctgactctgtgctgttacttggaactcagaagcgagctgcggcgcgagaggggcgcagaaagccggcttggcggcagcggcactccaggaacctccgggacattgtcctcactcggtggattggatcctgactctccgattacctctcaccttggtcagccgtctccaaagcagcagccgctggagccgggtgaggccgctctgcactccgatagccaagacggacatcaaatggccttgctgaacttttttttccccgacgaaaagccatactccgaggaggaaagccgccgagtgcggcggaataaacggagtaaatccaacgaaggcgcggatgggccagttaaaaacaagaagaagggtaagaaggctggaccaccggggccgaacggacctcccggacctcccggccccccaggccctcaaggcccacccggcatcccaggtatccccggcatcccaggaacgacggtgatgggccctcccggcccacctgggccacctggacctcagggaccccccggactgcagggtcccagcggagccgctgataaggcaggtacgcgcgaaaatcagccagctgtggtccacctccagggacaaggcagtgccatccaagtcaaaaacgacctcagcggtggggtattgaatgactggagtcggataaccatgaatcctaaggtctttaaactgcatccacgcagcggcgaactggaagtgctggttgacggtacttactttatttattcccaggtgtactacattaattttacggactttgcctcatatgaagtggtcgtggatgagaaacccttcttgcagtgtactcgcagtattgagaccggaaaaacaaattataatacctgctacaccgccggcgtgtgtctgcttaaggccagacagaagatcgcagttaaaatggtgcatgctgacattagcattaacatgagtaaacacactaccttctttggtgccataagactgggtgaagcccctgcttcc

SEQ ID NO: 21881 - DNA, 1167 bp, Artificial Sequence
  derived and/or modified sequence
atggggtatcctgaggttgagagaagggaattgctgcctgctgcagctccccgggaaagaggcagtcaggggtgtggctgtggtggggccccagcccgcgctggggaagggaacagctgccttttgttcctcggcttctttggcctgtctctcgctctccacctgctgaccctgtgctgctacttggaactaaggagcgagctgcggagggagcgcggtgccgagagtcggctcggaggttccggaacgccaggcacctccgggactctgtcctcactgggagggttggatcccgactcgcccatcacaagccatctgggccagccctcgcccaaacagcagcctctagagccaggcgaagctgccctacactcagattctcaggacggccaccagatggcattattgaacttcttcttccctgacgagaaaccctactctgaggaggagagcaggagagtgagacgtaataaaagatccaagtccaatgagggggctgacggcccagtaaagaataagaagaaaggcaaaaaggctggcccacccggcccaaatggccccccaggtccacccgggcctcctggaccacagggccctcctggcatccccgggatcccgggcattcccgggaccactgtcatgggacctccaggtcctcccgggcccccgggcccgcagggcccccctggactgcagggtccaagcggagcagccgacaaggccggaaccagggagaatcagcctgctgtggttcatctgcaagggcaagggtctgccatacaggtgaaaaatgacctgagcgggggcgtgttgaacgattggtcacgcatcacaatgaatcctaaggtgtttaagctgcatcctaggagtggagaactcgaagtattggtcgacggtacttactttatttacagccaggtgtactatattaattttaccgattttgcaagttacgaggttgtcgttgatgagaaacctttcctccagtgtacccgttctattgaaacgggaaagaccaactacaacacatgttacaccgctggagtgtgtctgctgaaggcacgacagaagattgctgttaaaatggttcacgctgatatctcaataaatatgtccaagcacactacttttttcggagcgattagactaggagaggctcctgcatct

SEQ ID NO: 21882 - DNA, 1167 bp, Artificial Sequence
  derived and/or modified sequence
atgggttatcctgaggtcgaaagacgagagcttctgccagcagcagctccacgggagcgcgggtctcagggttgcggctgtggcggggcaccagccagggccggagaaggcaatagctgcctgctctttctgggctttttcgggctctcactggcactgcacctgctgacactgtgttgctacctggagctccgaagcgagttaaggcgtgagaggggtgccgagtctcgactgggggggtctgggactccaggaaccagcggtaccctgagtagcctaggggggctggaccccgattcccctataacatctcatttaggacagccctctcctaaacagcagccactggagcccggggaggctgccctgcactcagacagtcaagacggccatcagatggctctactgaatttcttctttcccgacgagaagccttactccgaagaggagagccggcgcgttcggcgtaacaagagaagtaagagcaacgagggagctgatggcccagttaaaaataagaagaaggggaagaaagccgggccaccaggtcctaacggaccacctggcccaccagggcctccgggcccgcaaggaccacccggaattccaggtattccagggatccccgggaccacagttatgggccctccaggccctcccggccctccaggacctcagggcccccccggcctgcaaggcccatccggtgcagccgacaaagccggcacaagggagaaccagccagcagttgtgcatctgcagggacagggcagtgctatacaagtgaaaaacgatctgagtgggggcgttctgaatgactggagcagaatcaccatgaaccccaaggtgttcaagctgcacccaaggtctggcgagcttgaggttctggtagacggaacctacttcatctactcccaggtctactatataaacttcactgattttgcttcttacgaggtagtggtggacgagaagccttttctccagtgtactcgaagcattgaaaccgggaagaccaattacaatacctgctatacagctggggtgtgcctgctgaaagctcgccaaaagattgccgtgaaaatggtgcacgccgatatctctattaatatgtccaaacacacaacattctttggcgccatacgattgggcgaggctcccgccagt

SEQ ID NO: 21883 - DNA, 1167 bp, Artificial Sequence
  derived and/or modified sequence
atgggatatccagaagtggagagacgggaactgctgccggcggctgcaccaagagagagaggctcccaaggatgtgggtgcggcggtgcaccagcaagagcaggagaaggtaatagctgccttctttttcttggattctttggtctttcgcttgcactccatctccttactctgtgttgttacttggaacttcgctcagagcttcgcagagaacggggggcagaatcccggctgggtggatccggtactcccgggacctctggaaccctgagctcgctgggcggactcgatcccgattccccaattacctcccaccttggtcaaccgtcccctaagcaacagccacttgaacctggagaagcagccctgcactccgactcgcaagatgggcaccagatggcgctgttgaacttcttttttcctgacgaaaaaccatactccgaagaagaatcccgaagggtccgtcggaataagcggtcaaagtcaaacgaaggagcagatggaccggtgaagaataagaagaaaggcaagaaagcgggaccacctggaccaaatgggcctcccgggcctcctggtcccccaggaccacaaggaccccccggtatccctggaatcccaggcatcccgggaaccaccgtgatgggaccaccaggaccacccggacctcctgggccacagggtccacctggcctccaaggaccaagtggggccgcagataaggcaggtactcgcgaaaaccaacctgcggtggtgcatctgcaaggacagggttcggcgattcaggtgaagaatgacctttcgggcggagtgttgaacgattggagcaggatcaccatgaatccaaaggtctttaagctgcatccccgctccggagaacttgaggtgctggtggatggtacttacttcatttactcgcaagtttactacattaactttaccgactttgcatcttacgaagtggtggtggacgaaaaaccctttctccagtgcactagatcaatcgaaactggtaagaccaactacaatacttgttacactgctggtgtgtgccttctgaaggccagacagaagatagcagtgaagatggtgcatgcggatatcagcatcaatatgtccaagcataccacgtttttcggagcaattaggctgggagaagcacctgcaagc

SEQ ID NO: 21884 - DNA, 1167 bp, Artificial Sequence
  derived and/or modified sequence
atgggttaccctgaggtagagagacgcgaactcctgcccgccgctgccccaagagaacgcggctcccaaggttgtggttgtggtggagcccctgctagagccggtgaaggcaactcctgtctgctgtttttgggattcttcggtctgtcccttgcactgcaccttctgaccctctgctgttatttggagctccgcagtgagctcaggcgtgagcgtggcgccgagagtaggcttggaggcagcggtacacctggtacatccggaaccctctcaagtttgggaggtctggacccagacagtcctattacctctcacttgggccagccttctcccaaacaacaaccactcgagccaggcgaggccgctctccattcagatagccaggacggccaccaaatggctctcctcaacttcttcttcccagacgagaagccatattctgaagaggagtcccgtcgtgtaaggcgcaacaagagaagcaaatctaatgaaggtgctgatggccccgtgaaaaacaaaaaaaagggtaagaaggcaggaccccccggtcccaacggaccacccggccctcccggccctcccggacctcagggaccacccggcatccctggcatcccaggcatcccaggaaccacagttatgggacctccaggcccccctggtcctccaggtccacaaggcccacccggcttgcaaggtccttcaggtgctgccgacaaagccggcacacgcgaaaatcagccagccgtggtgcacctccagggccaaggctccgctatccaggttaaaaacgatctctccggcggtgtgctgaatgattggtctaggatcacaatgaacccaaaggttttcaagctccaccctcgttcaggtgaacttgaggttctcgtcgacggcacctatttcatctattctcaggtgtactacattaacttcaccgatttcgcctcatacgaagtggttgtagatgaaaagcctttccttcaatgtacccgcagtatcgaaactggcaagactaactacaatacctgttacactgccggcgtttgcttgctgaaggccagacagaagatcgccgtcaagatggtccacgccgatatttccatcaacatgtccaaacatacaaccttcttcggcgccataaggttgggagaagctcctgctagc

SEQ ID NO: 21885 - DNA, 1167 bp, Artificial Sequence
  derived and/or modified sequence
atgggatacccagaggtggaaagacgcgagctcctgcccgcagccgccccgagggaaagggggtcacaaggctgtggctgtggaggtgcccctgcgagagcaggagaaggaaacagctgcctgctgtttctggggttcttcggactgagcttggccctccacctgttgaccctgtgctgttacctcgaactcaggtctgagcttaggagggaaagaggagccgaatctcgcctgggcgggagcgggacaccaggtacctcagggactcttagctcactgggcggccttgaccccgacagtcccatcacaagccacttgggccagcccagccccaaacagcaacccctggaaccaggcgaggccgccctgcactccgattcacaggacggccatcaaatggctctcctgaacttttttttccctgatgagaagccttatagcgaggaggagtcaaggcgcgttcgcagaaacaagcgatccaagagcaacgagggagcggacggccctgttaagaataagaaaaagggaaaaaaggccgggccccccggccccaacggtcctcctggacccccaggacctcccggcccacagggccctcctggaatacctggcattcctggcatacctgggacaaccgtgatgggcccaccgggccccccagggcctcccggacctcagggccctcccggtctgcaagggcccagcggagctgctgacaaagccgggactcgagaaaaccagcccgctgtggtgcatctgcagggccagggcagtgctatccaggtgaagaatgaccttagtggcggtgtactgaacgattggagcaggattaccatgaatcccaaagtttttaaactgcacccacggtccggagagctcgaagtgttggtggacgggacttattttatctacagtcaagtctactacataaacttcaccgatttcgcttcctacgaagtggtcgtcgatgaaaagcctttcctgcagtgtacgagatctatcgagacaggcaaaacgaattataatacatgctataccgccggcgtatgcctgctgaaagctcgacagaaaattgcagtgaagatggtgcacgctgacatctctataaatatgagcaagcatacaacattctttggggccattaggctgggagaagcgcccgcctca

SEQ ID NO: 21886 - DNA, 1167 bp, Artificial Sequence
  derived and/or modified sequence
atgggatacccggaagtggaacgcagagagttgctgccggccgcggctccgcgggagagaggaagccaaggatgcggatgcgggggtgcgccggcccgagcaggcgagggaaactcctgcctgctcttcttgggatttttcggactcagcttggcgctccacctccttactctgtgctgctacctggagctgagaagcgaactgcggcgcgaacgcggcgctgagtcgcggcttggtggatccggaacgccgggaacctccggaaccctgtcgtccctcggaggcctcgatccggactcacctatcacctcgcacctgggacagccttccccgaagcagcagccgctggaaccgggagaggcagccttgcattctgactcacaagacggccaccagatggctctgctgaatttctttttcccggatgaaaagccctactccgaagaggaatcacgccgcgtccgtagaaacaaacgcagcaaaagtaatgaaggagccgatggaccggtcaaaaacaagaagaagggcaaaaaggcgggccctccaggaccaaacggcccgccaggacctccgggcccaccagggccgcagggacctccagggatcccgggcattccgggaatcccaggtactaccgtgatgggcccccctggtccccccgggccgcccgggcctcaagggccacccgggctgcaaggaccatcgggggccgccgacaaggctggcactcgggagaaccagccagcagtggtccacctgcaaggccagggtagcgcaatccaggtcaagaatgacctctcgggaggagttctgaacgactggtcacgcattacgatgaacccgaaggtgttcaaactgcaccctaggtccggtgaacttgaagtgctcgtggacggcacctacttcatttacagccaggtgtactatatcaactttactgactttgcctcgtacgaagtggtcgtggatgagaaacctttcctgcaatgcaccaggtccatcgaaactggaaagactaattacaatacctgttacactgccggtgtgtgtctgctcaaggcccggcagaagatcgccgtaaagatggtgcatgcagatatctcgatcaacatgtcaaagcataccaccttcttcggggctatccggctcggagaggcgccagcgtcg

SEQ ID NO: 21887 - DNA, 1167 bp, Artificial Sequence
  derived and/or modified sequence
atgggctatcctgaggtcgagagaagagagctcctgccggcagcagctccgcgggaaagaggaagtcaaggttgcgggtgcgggggcgccccagcaagagcgggcgaaggtaactcttgtctcctttttctcggttttttcggattatcactcgccctccacctgcttacgttatgctgctatctcgaattgcgatccgaactaaggagagaaaggggcgccgagtctaggctgggaggttccgggacccccggcacttccggcactctgagttcgctgggtggcctcgatccggactcccctattacttcccatctcggccaaccatctcccaaacaacagcccctggaacctggggaggccgcattgcattccgactctcaggacgggcatcaaatggccctactgaatttttttttccccgatgagaaaccatactctgaagaggagtcacggcgtgtacgtcggaacaagagaagtaagagcaatgagggcgcggacgggccagtgaaaaacaagaagaaggggaagaaagccgggccgcctggaccaaatggaccccccggccctccaggaccccccggaccccaaggcccccctgggatccccgggattccagggatacctggcacaacggtgatgggaccacctggccccccggggccacccggaccacaagggccccccggcttgcagggaccctctggggcagcagataaggcaggaactagggagaatcaacccgccgtagttcatctccagggccaggggagcgccatccaggttaagaatgatctctccggcggggtcctgaatgactggagtaggatcacgatgaacccaaaggtctttaagctgcaccctcgctcaggcgaattggaggtgctagtcgatggtacatatttcatttacagtcaggtgtactacattaatttcacagacttcgcctcatacgaagttgtcgttgacgagaagccattcctccagtgcacaagatcaatcgaaaccgggaaaacaaattataatacgtgctataccgctggcgtctgcctccttaaggcgagacagaagatcgccgtgaagatggtgcatgcagacatttctatcaatatgtccaagcatactacgttctttggcgcaattcggctgggcgaggctcctgcatcc

SEQ ID NO: 21888 - DNA, 1167 bp, Artificial Sequence
  derived and/or modified sequence
atgggctatccagaggtcgagcgcagagagctcttgcctgctgcggctccaagagagagaggatctcaaggctgcggatgcggtggtgcccccgcgcgggctggcgagggcaacagctgcctgctttttttaggcttcttcgggctgtcactggcgctgcatctgctaaccctgtgttgctatctcgagctgcggagtgagcttcgaagagagaggggcgctgaatcaagacttggtgggtccgggaccccaggaacgtccgggacgcttagtagtctgggcggcctggacccagactctcctataacttctcatctcgggcagccatcacccaagcagcagcctctagaaccgggcgaggccgccctgcattcagactctcaggatggacaccagatggctctgctaaatttctttttcccagacgagaaaccgtattcagaagaagagagccgccgggtccgcaggaataagaggagcaagagcaacgagggagcagatggcccagtaaagaataagaagaagggcaaaaaggccggtcccccgggaccaaacggacctccagggccccctggaccccctggaccccagggcccccccgggattccaggaatacctgggattccaggtactactgtgatgggcccgccaggacctcccggacctcctggtcctcaaggaccacctggccttcagggtcctagcggagctgctgataaggctggcacaagagaaaaccagcctgccgtggttcatctgcaggggcagggtagtgctatccaagttaaaaacgacttgtctggcggggtgctgaatgactggagtcgcataactatgaacccaaaggtcttcaagctgcatccgcgatctggggaacttgaggtactggttgacgggacctacttcatttatagccaggtatattacatcaattttaccgattttgcgtcatacgaggtggtcgtagacgaaaaaccatttctgcaatgtactaggagcatcgagaccggtaaaactaattataacacttgctacactgctggagtgtgcctgctgaaggcacggcagaagatcgccgtcaaaatggtgcacgctgacattagtattaatatgtccaaacacacaacatttttcggggcaatccgactgggcgaggctccagcctcc

SEQ ID NO: 21889 - DNA, 1167 bp, Artificial Sequence
  derived and/or modified sequence
atggggtatcccgaggttgaacgtcgtgaactgcttccggccgccgcgccccgagagagaggatctcagggctgtggctgtggaggcgcacctgcgagagccggtgagggcaattcctgcttgttgtttctgggcttcttcggcctttctctcgctctgcacctgctgactctctgttgctatttggagctgaggagcgaactcaggcgtgagagaggcgccgagagccgactgggagggagcggaactccagggacatccggcacactctcgtccctcggcggcctggaccccgacagccccatcacatcacatctgggtcagccctcccccaaacagcagccattggagccaggcgaggccgccctgcactcagactcccaggatggccaccagatggcgctactgaactttttttttccggacgagaagccatattccgaggaagagagtcgacgtgtgcgacgcaacaaacggagcaaatcaaacgaaggcgctgatggcccagtcaaaaacaagaagaagggcaagaaagcaggtcctcccggacctaacggcccacccggaccccccgggcctccaggcccccaaggtccccccggcattcccggaatacctgggattccagggaccacagtgatgggccctccggggccccccgggccacctggacctcaaggcccacctggcctccaggggccatctggcgctgccgataaagctgggactcgagagaaccagcccgcggtggtacatctccagggtcagggaagcgccatccaggtcaaaaatgatctctccggcggcgtccttaacgattggtcacgaattaccatgaacccaaaagtgttcaagctgcatccccgttccggcgaattagaagtcttggtggacggcacctactttatctacagtcaggtgtattatatcaatttcacggattttgcttcctacgaagtcgtagtagatgaaaaacccttcttgcagtgtactagatcaatagagactggaaagactaattataacacttgctatacggccggcgtgtgtctccttaaagctagacagaagatcgccgtaaagatggtgcatgccgatatctcaatcaacatgagcaagcacacaaccttcttcggtgcgataagattgggggaggcccccgccagt

SEQ ID NO: 21890 - DNA, 1167 bp, Artificial Sequence
  derived and/or modified sequence
atgggataccccgaggtagagcgaagggaacttctgcctgccgccgctccaagagagagaggctcacagggttgtgggtgcgggggcgcgcccgctagggccggagaaggtaattcatgcttactgtttcttgggttctttggcctgagtctcgccctgcacctccttacactctgctgttatctggagctgcggtctgaactccgtcgtgaacggggtgcggagtctcggctaggaggcagtggcacacctgggacttccgggacactttcttcccttggcgggttagaccctgattcgcctatcaccagccacctggggcagccttcgcctaaacaacagcctctggaaccaggagaggccgcccttcattccgacagtcaggatggccatcagatggccctgctcaacttctttttccccgatgagaagccatactctgaagaggaaagccggcgtgtgagacgtaataaaaggtctaaaagcaacgaaggagctgacggcccagtaaagaacaaaaaaaaagggaagaaagccggaccaccgggtccgaacgggcccccagggcctccagggccaccagggcctcagggtccccccgggatcccggggattcccggaattccaggaaccacggtaatggggcccccaggtccacctgggcctcccggtccacagggcccacctggcctccagggaccttcaggagctgccgacaaagctggcaccagggagaatcagcccgcggtggtgcacctgcagggacagggctcagctatccaggtaaaaaacgatctgagcggcggggtgctgaacgattggtctcgcattactatgaaccccaaagtcttcaagctgcaccctcgctctggggaattagaggtgcttgttgatggaacctacttcatctatagtcaggtgtattatatcaactttacagattttgcttcatatgaagtagtggtagacgaaaagccattcttgcagtgtactcgtagtattgagacagggaagaccaactataacacatgttatactgctggagtctgcttgcttaaggccaggcagaaaattgccgtcaagatggtgcacgccgacatctccatcaacatgtcgaagcataccacctttttcggtgctattagactcggggaggcccccgcatca

SEQ ID NO: 21891 - DNA, 1167 bp, Artificial Sequence
  derived and/or modified sequence
atgggctacccagaggtagagagaagagagcttctcccggctgctgcaccgcgtgagagaggatcacaaggatgcggttgtggaggagcccctgcacgtgctggagaaggtaactcgtgccttctttttctgggttttttcggcctttcgctggcactgcatctcctgaccttgtgttgttacctcgaacttcgttccgagcttcgcagggaacgtggtgcagagtcccgcctcggaggatcgggcactcccggaacttcaggaaccctttcatccctgggtggactcgatccagattcaccgattaccagtcatctgggccagccttcgcccaaacagcaaccgctggagcctggtgaggccgcgcttcatagcgatagccaagacggtcatcaaatggcacttcttaacttctttttccccgatgagaaaccatatagcgaagaagagtccagaagagtacgtcggaacaagcgtagcaagagcaacgaaggcgcagacggaccagtgaagaataagaagaagggtaaaaaggcagggccccctggaccgaacggtccgcctggaccccccggcccgccaggaccacaagggccgcccggcattccggggataccaggtatccctggtactactgtgatggggcctccaggtcctccagggcctcctggcccgcaaggacccccagggctgcaggggccttcgggagccgcggacaaggcggggactcgggaaaaccaacctgccgtggtgcatctccaaggacagggatcggcaattcaggtcaaaaatgatctgtcgggcggagttttgaatgactggtcacgaatcactatgaatccaaaggtgttcaaacttcacccacggtccggagaacttgaagtcctggtcgacggaacctactttatctacagccaggtctactacattaactttaccgattttgcttcctacgaagtggttgtcgatgaaaagccatttctccaatgcaccaggtctatagaaaccggcaagaccaattacaacacctgttacaccgcaggtgtgtgtctgttgaaggcacgccagaagattgcagtcaaaatggtgcatgcagatatttcgatcaacatgagcaaacacacgacttttttcggcgcaattagacttggagaagccccagcgtca

SEQ ID NO: 21892 - DNA, 1167 bp, Artificial Sequence
  derived and/or modified sequence
atgggttacccggaagtcgaacgtagagagctgctgcccgctgccgcgccacgcgaacgaggtagccagggatgtggatgtggcggagcacctgcccgcgctggcgagggaaatagctgccttctctttcttggattcttcggactttccctggcactgcatctgctgactctctgttgttacctcgagcttaggtctgaactccgcagagagcggggagctgagtcgaggctcggtggctccggaacgcctggaactagcggaactctgtctagtctcggaggtctggaccccgattccccaatcactagccatctgggccaaccatcgcccaaacaacaaccactggaacccggtgaggcagcacttcattcggattcgcaggatgggcatcaaatggctctgctcaatttctttttccctgatgaaaagccttactccgaagaggaaagtcgtagagtgcgccgtaataagaggagcaaatccaacgagggtgcagacggacctgtcaaaaacaagaaaaagggtaagaaggcagggccaccaggtcctaacggccctccgggacctccagggccacccggacctcagggacccccagggatacccggtattcccggaattccaggaactactgtcatgggccccccagggccccctggacccccgggtccacaaggtccaccaggccttcagggaccttccggcgcagcggacaaggccggaactagggaaaaccagcccgcagttgtgcacctgcagggacagggttcagcaatacaagtcaaaaacgatctttcgggcggcgtgctgaacgactggtcacgcatcaccatgaacccaaaagtgttcaaattgcaccccaggtccggtgaactggaggtcttggtggatggaacctatttcatatacagccaagtgtactacatcaatttcaccgattttgcgagctacgaagtggtggtggatgagaagccctttcttcagtgtaccagatcaatcgaaaccggaaagaccaactacaatacctgctacactgctggagtgtgccttctgaaagctagacagaagatcgccgtgaagatggttcacgccgatatttcaatcaatatgtcgaagcatactaccttttttggggccattaggcttggagaggcacctgcgtcg

SEQ ID NO: 21893 - DNA, 1167 bp, Artificial Sequence
  derived and/or modified sequence
atgggctatcctgaggtagaaagacgcgaacttctcccggcagcggctccgcgtgagaggggaagccagggatgcggatgcggcggggcaccggcaagagcgggcgagggtaactcgtgccttttgtttctggggttttttggtctcagccttgctcttcatcttctaacattgtgctgttatttggaattgcggtcagagcttcgaagagaacgtggagcggaatcgcgtcttggcggatctggtacaccgggtactagcggtaccctatccagcttaggaggtttggatccagactctccaattacttctcatttgggacaaccatcaccaaaacagcaaccgttagaacccggggaagcagcactgcattcggatagccaagatgggcaccagatggcattattgaacttttttttccccgacgagaaaccatattccgaagaggaatcacgcagggtgcgccgtaacaaacgttccaaaagtaacgaaggagcggatggaccggtcaaaaataaaaagaaaggcaaaaaagccggccctccaggacccaatggaccgccaggtccaccaggaccccccggcccgcagggcccaccaggcatccctggcattccgggtatccctgggacaacagtcatgggtccgccgggccctcccggaccaccaggtcctcaggggccgccaggtttacagggaccttcaggtgcggctgataaagcaggcacaagagaaaaccagccagccgtcgtgcaccttcagggccaaggaagcgcaatacaagttaaaaacgatctttcaggtggcgttttgaatgattggagtaggataacaatgaaccccaaagtctttaagcttcatccgcgcagtggagagcttgaagtgctggtggatggcacctactttatttactctcaagtctattatatcaactttaccgattttgctagctatgaagtagtcgtagatgagaagccttttttgcaatgcacccgatccattgagacgggaaaaaccaattacaatacttgctatacggctggcgtttgcctgctgaaggcccgccaaaaaattgccgtgaaaatggtacatgctgatattagcatcaatatgtctaaacatacgaccttttttggcgcaatcagattaggtgaagcgcctgcatct

SEQ ID NO: 21894 - DNA, 1167 bp, Artificial Sequence
  derived and/or modified sequence
atgggttacccggaggtggaaagacgcgagctgcttccggctgccgcacctcgggaacgtggatcccaaggatgcggttgtggaggcgcccccgcacgcgctggagaaggcaattcatgcctcctcttcctgggtttctttggcctgagcctcgccctgcacctgttgaccctgtgctgctacctggaattgcggtcggagctcaggcgggagaggggagcggagtcaagactgggaggaagcgggaccccaggaacctcgggaaccctgagcagcctgggaggtctggacccagattcgcctattacctcgcatctgggacagccgtctccgaagcaacaacctctggaaccgggagaagccgcccttcatagcgactcccaggacggtcatcagatggcactcctcaatttctttttcccagatgagaagccttacagcgaagaggaatcaagacgggtgcggcgcaacaaacgcagcaagtcgaatgagggagccgatgggccggtgaagaacaagaagaaggggaagaaggccgggccacctgggccgaatggaccacctggacctcctggaccgccaggaccgcagggaccacccggcatcccgggtattccgggcattcctggaaccacggtgatgggacctccgggcccgccgggcccccctggcccgcaagggccacctggactccagggaccatccggtgccgctgacaaagctgggacccgcgagaatcagccggcagtggtgcacctccagggccagggatcggccattcaagtgaagaatgacctgagcggaggcgtgttgaatgattggagcagaatcaccatgaacccgaaggtctttaaactccatccacggtcaggagaacttgaagtcctggtggacggaacttactttatctactcccaggtctactacatcaactttactgacttcgcgtcatacgaggtggtggtggatgaaaagcctttcctgcagtgcacccggagcattgaaacgggaaagactaactacaacacgtgttacactgcgggagtgtgcctgctgaaggcacggcaaaaaatcgcggtgaagatggttcacgccgacatctccatcaacatgtccaagcataccactttcttcggggccattaggctcggggaagcgcccgcgtca

SEQ ID NO: 21895 - DNA, 1167 bp, Artificial Sequence
  derived and/or modified sequence
atgggctacccggaagtagaacgccgagagctccttcccgctgccgccccacgtgagaggggttcccaaggttgtgggtgcgggggcgcaccagccagggccggagagggaaatagctgtctcctgtttctcggtttttttggtctgagtctggcccttcacctgctcaccctctgttgctacctcgaactgcggtctgaacttaggagggaacgaggcgcggagtctcggctcgggggatctggcacgcctggcacaagtgggactctgagttcactaggcggactcgaccccgatagtcctatcactagccatctcggtcagccatctcccaaacagcagccacttgaaccaggtgaagcggctttgcacagcgatagccaagacgggcaccagatggctttgctgaatttttttttccccgacgagaagccttactctgaggaagaatcacgtagagtgagaaggaacaagcgtagcaagagtaacgaaggggcagacggcccagtcaagaataagaagaaagggaagaaagccgggccgcccggccccaacggtcccccgggaccccctggccctccaggccctcaagggccgcctgggataccagggatcccaggcattcccgggaccactgttatgggccctcccggcccccccggcccccctggtccacaaggcccacctggacttcagggccctagcggagcggctgacaaagcaggtacccgggagaatcagccggccgtcgtgcacttgcaggggcagggaagtgcgatccaggtgaaaaatgatctgagcggtggcgttctgaacgattggtccagaataactatgaacccaaaggtgtttaaactgcacccccgatccggagaactggaagtcttggtggatggcacctactttatttactcccaggtctactacataaacttcactgatttcgcttcctatgaggtagtggtggacgaaaagccttttctgcaatgcacacgatccatagagaccggaaaaacaaactataacacatgctacacagccggcgtttgcctactgaaggctcggcaaaagattgccgtgaagatggtccacgcagatattagcatcaacatgtccaagcatacaactttttttggtgccataagactcggggaggctcccgcctcc

SEQ ID NO: 21896 - DNA, 1167 bp, Artificial Sequence
  derived and/or modified sequence
atgggttaccctgaggtggaaagaagggagctgctgcctgctgctgctcctagagagcgcggcagccaaggatgtgggtgcggtggagcccccgctcgagctggtgaggggaacagttgccttcttttcttgggcttctttggactatcccttgcacttcatctgttaactctgtgctgctatctagagttgcggagcgagctccgacgggagagaggcgccgagagtaggcttggagggtctggcacaccggggacatccggtaccctgtcttctctaggaggcctcgatccagactcacccatcacttcacacctgggccagccatccccaaagcagcaaccactggagcccggtgaagctgccttgcacagtgacagccaggacgggcaccagatggcactgttgaactttttcttccccgacgagaaaccttactcggaggaggagtcccgccgggtccgccgcaataagaggtctaagtccaatgagggagcagatggtccagtgaaaaataaaaagaaaggtaaaaaagcgggcccacctgggcctaacggtcctccgggaccacccggcccacccggaccacagggtccccccggcatccccggtattcccggaattccagggaccacagtcatggggccccctggtccccccggacctccaggccctcagggtcccccgggtcttcagggcccttccggtgctgccgataaagcgggaacacgcgagaaccagccggcggtggtccatctacaaggccagggcagcgcgatccaggtcaagaacgatctcagcggaggtgtgctaaacgactggtccagaattactatgaatcccaaggtgttcaagttgcacccacgctcaggcgagctcgaggtcctggtggacgggacctacttcatatattcccaggtttattacatcaacttcacggactttgcatcctacgaggtggtcgtagatgagaagccttttctgcagtgcaccagaagcatcgaaacagggaaaacaaattacaatacctgctacaccgcgggagtctgcctacttaaggcccgacagaaaattgctgtaaagatggtccatgctgatataagcatcaatatgagcaaacacacaaccttttttggagctatccggctaggagaagcccccgcttca

SEQ ID NO: 21897 - DNA, 1167 bp, Artificial Sequence
  derived and/or modified sequence
atgggatacccggaggtcgagcgacgcgagctgttgccggccgcggctccgcgggaaagggggtcgcagggatgtggatgcggaggagccccggcccgcgcgggggaaggaaattcctgtctcctgttcctgggatttttcggactgtcactggccttgcacttgttgactctgtgctgctacctggagctgcgtagcgaacttcggcgggaaagaggagctgagagccggctcggaggctcaggcactccgggaacctcgggaactttgtcgtccttgggtggactggatcccgactccccgatcaccagccatttgggtcagccctcccctaagcagcagccgctcgagccgggagaggccgccctccatagcgactcacaagatggccatcagatggcacttctgaacttcttctttccggacgagaagccgtactcagaggaagaatcgaggagagtgcgccggaacaaacggtcgaagtcgaacgaaggagcggatggaccggtcaagaataagaagaaaggaaagaaagctggcccgcccggtccgaatggacctcccggcccacccgggccaccgggcccgcagggcccgccaggcatcccaggaatccctggaatcccgggaactaccgtgatggggccaccagggccccccggacccccgggtccacagggacctccaggcctccagggcccctcgggggccgcagacaaggcaggcacgagagaaaatcaaccagcagtggtgcacttgcagggacaaggatccgccatccaggtcaagaatgatctgagcggaggcgtgctgaacgactggtcgcgcatcactatgaatccaaaggtctttaagctccacccacgctcgggcgaattggaagtcctggtcgacggtacctacttcatctattcgcaggtctactacattaacttcactgattttgcgtcatacgaggtggtggtggacgaaaagccatttctgcagtgtacccgctccatcgaaaccggaaagactaattacaacacctgctacaccgcaggcgtgtgcctcctgaaggcccgccagaagatcgcagtgaagatggttcacgctgacatcagcatcaacatgtccaaacataccactttctttggggccatccgtctgggggaggcccctgcatcc

SEQ ID NO: 21898 - DNA, 1167 bp, Artificial Sequence
  derived and/or modified sequence
atgggttacccggaagtagagcgccgcgaactgctgcctgctgccgcgccgcgcgagcggggtagtcagggttgtggttgtggaggcgctccggctcgggctggcgaaggaaacagttgcttgttgttcttgggctttttcggtttgtccctggcactgcacctgttgaccctgtgctgctacttggagctgcgcagcgagctgcgccgtgagcgcggtgccgagagccgcctcggcggctccggtaccccaggcaccagcggcacgctgtctagcctcggtggactggacccagacagcccgattacctctcacttgggacagccgagccctaagcaacagccgctagagccaggagaagctgcccttcattctgactcacaagacggccaccagatggctctgctaaactttttcttccccgacgaaaaaccatactccgaggaagagagccggcgcgtccgtcgtaacaaacgctctaagtctaatgagggcgccgatggccctgtgaagaataaaaaaaaaggcaaaaaagcgggtcctccaggtccaaatgggccaccaggtccacctggcccccctggtccgcaaggtccgccagggatcccgggaattcctggcattcctggcacgactgtgatgggtccaccgggacctccggggccgcctggccctcaggggcccccgggactgcagggtccatcgggagcggccgacaaggcgggcacacgcgaaaaccagccggccgtcgtccatctgcaagggcaggggtcggctattcaggtaaaaaacgacctgagtggtggagtcctgaacgactggtctcgcattaccatgaatccgaaagttttcaaactgcacccacggagcggcgagctagaggtcttggtagacggtacctatttcatctatagccaggtgtattacataaatttcaccgatttcgctagctatgaggttgtcgtggatgaaaaaccgttcctgcaatgtacgcgcagcatcgagaccgggaaaacaaactataatacctgctataccgccggcgtgtgtttactgaaggcgcgccagaagatcgcagttaaaatggtgcatgccgacatctcgattaatatgagcaaacacacgacgtttttcggcgccattcgcctgggtgaagctccggctagc

SEQ ID NO: 21899 - DNA, 1167 bp, Artificial Sequence
  derived and/or modified sequence
atgggctaccctgaagtggaaaggagagagctgcttcctgctgccgccccgcgtgaacgcggcagccaaggttgtggatgcggaggtgcacctgccagggcaggagaaggtaactcatgcctccttttcctgggtttctttgggctgtcgctcgcgctgcatcttctgactctgtgttgttacctcgaactgcggtccgaactgagacgtgagaggggagccgaatcccggttgggagggagcggaactccaggcacttcgggcaccctgtcctcactgggaggactcgacccagactccccaattacctcccatctcgggcaaccttccccaaaacagcaaccacttgagcctggggaagcagccctgcattcggattcgcaggatggacatcaaatggcactccttaacttctttttcccagatgagaagccctactccgaggaagaaagcagacgtgtgagacgcaacaaaagaagcaagtcgaacgaaggtgctgatggcccagtcaagaacaagaaaaaaggtaagaaggccggacctcccggcccaaacggcccaccgggccccccagggccaccagggccacaaggtccaccaggaatcccaggaatccccggaataccaggcaccacggtaatgggaccacctggccctcctgggccccctggtccgcagggcccacctggtttgcagggtccaagcggagccgccgataaggcagggactagggaaaatcaaccggctgtggtgcacctccagggacagggtagcgcaatacaggtcaagaacgacctctcagggggagtgcttaacgattggtcccgtatcactatgaatcccaaggtgttcaagctgcatcctcggtccggcgagcttgaagtccttgttgatggtacctactttatctactcgcaagtgtactacattaactttactgattttgcctcatacgaggtggtcgtcgatgagaagcctttcctgcaatgtactcggtcaattgaaactggcaaaactaactacaacacctgttacactgcgggggtgtgcctgcttaaggcacgccaaaagattgcagtcaagatggtgcacgccgatatctccatcaatatgtccaagcataccacgttctttggtgcaattcgtcttggagaggcccctgcttct

SEQ ID NO: 21900 - DNA, 1167 bp, Artificial Sequence
  derived and/or modified sequence
atgggttaccctgaggtggagcggcgagagctgcttccggcggctgcacctcgcgagcgcggatcgcaaggatgtggatgtgggggagccccggcccgcgcaggcgagggaaatagctgtctcctttttctcggattcttcggactgtcgctggccctgcatctgctgaccctgtgttgttatttggagttgagatcagagctcaggagggagcgcggggcagaatccaggttgggaggtagcggaaccccggggacttccggaaccctgtcgtcgctgggaggactggacccagattcgccgatcacctcgcacctgggacagccaagcccgaaacagcagcccctcgaaccgggcgaagccgcactgcatagcgacagccaggatggacaccagatggccctgttgaatttcttcttcccggacgaaaaaccgtacagcgaagaagagtcgcgccgggtgcggcggaataagaggtccaaaagcaacgaaggggcggatggaccggtcaaaaacaagaagaagggaaagaaggccggcccacctggtcctaacggtccgccgggaccgccgggcccacccggtccacaaggacccccaggaatcccaggcattccgggaatccctggaactaccgtgatgggcccgccagggccaccagggcccccgggaccccagggaccaccagggcttcaggggccgtcgggcgcggccgataaggcaggaaccagagagaatcagcccgcagtggtgcatctgcaagggcaaggaagcgccatccaagtgaagaacgatttgagcggcggagtgctgaatgactggagcaggatcacgatgaaccctaaagtgttcaagctgcacccgcggtctggcgaactggaggtgctggtggatggcacttacttcatctactcgcaggtctactacatcaacttcaccgacttcgcgtcatatgaagttgtggttgacgaaaagccgtttctgcagtgtacccgctcgattgaaaccggtaagaccaactacaatacttgctacactgccggtgtgtgcctgctcaaggcgcgccagaaaatcgcagtcaagatggtccacgccgatatcagcattaacatgtcaaaacacactactttcttcggagccatacgcctgggagaagcgccagcctcc

SEQ ID NO: 21901 - DNA, 1167 bp, Artificial Sequence
  derived and/or modified sequence
atgggttacccggaagttgaaagaagggagctgctccccgcggccgctcctagggagcggggcagtcagggttgcgggtgcggaggtgcacctgcccgcgccggagagggtaactcttgccttctgttcctgggtttcttcggcctctctctcgcgttgcacctacttacgctgtgttgttaccttgaactcagaagcgaacttagacgagaacggggcgccgagagtaggctgggcgggagcggcaccccagggacgagtggaacgctctcgtctctggggggcctggaccctgacagccctataacaagccacttagggcagccctctcccaagcagcagcccttagagcccggcgaagctgcattacactcagactcccaagacggtcaccagatggccctgcttaatttcttctttcccgacgaaaaaccttatagcgaagaagaatcacggcgagtgcggagaaacaaacgatctaaaagtaacgaaggtgctgatggaccggtgaagaataagaagaaaggcaaaaaggcagggcccccgggcccgaatgggcctccaggcccccccggacctccaggaccccaaggccccccaggcatccctggcatacctggcattcctggcacaactgttatgggaccacccgggccgcctggaccaccagggccacagggtccccctggtctgcaggggccgagcggcgccgctgataaagctggcactagggagaaccaacccgccgtcgtgcacctgcaggggcagggctctgcgatccaggtgaagaacgatctgtccggcggagtactgaatgattggtctcgcatcactatgaacccaaaagtcttcaaacttcacccacgaagtggtgagctggaggttttggtagatggcacgtacttcatatatagtcaggtgtattatattaactttaccgatttcgcatcctacgaagtcgtggtggatgagaagccattccttcagtgtactcggagtattgaaactggtaaaaccaattacaatacgtgttataccgctggtgtctgccttctgaaagctaggcagaaaatcgctgtgaagatggtccacgcagatataagtatcaatatgagtaaacatactacattttttggtgctatccggctcggtgaggcacctgcctca

SEQ ID NO: 21902 - DNA, 1167 bp, Artificial Sequence
  derived and/or modified sequence
atgggatacccagaagtcgaaaggcgagagctgctcccggctgccgcaccccgggagagggggagtcaaggctgtggctgtggaggggcaccggctcgcgcaggtgaaggaaactcctgtctgctgtttctgggatttttcggcctatctctggctcttcaccttctcactttgtgttgttacttggagttaagatccgagttgcgcagagaaagaggtgccgagagccggctggggggatctgggacaccaggtacttctgggactctttcctcactggggggtctggatccagatagtccaattacgtcacacttaggacaaccgtcaccaaagcagcagcctctggagcctggggaagcagccctccacagtgactctcaagatgggcaccagatggcccttctgaattttttctttccagatgagaagccgtactccgaagaggagtcacggagggtgcggcgcaataagcgcagtaagtcgaacgaaggggcagacggtcctgtcaaaaacaaaaaaaagggtaagaaagctggtcccccaggccccaacggccctcctggaccaccaggacctccaggtcctcaggggccccctgggatcccaggtattccaggaatccccggcaccacagtgatgggacctccaggacctcccggacctcccggaccccaaggaccacctggcctgcagggtccaagcggagccgccgataaagctggcacacgggaaaatcaaccagcagttgtgcatcttcagggccagggctctgccatacaggtaaaaaacgatctgtctggaggcgtgctgaatgactggtctcggatcacaatgaaccccaaggtctttaagctccacccccgcagcggcgagcttgaagtgctcgtcgatggcacatatttcatttactcgcaggtgtattatattaacttcactgacttcgcctcctacgaggtggtggttgacgagaagccattcttgcagtgcacccgctctattgagactgggaagactaattataatacatgttacacggctggggtctgtctcctgaaggcgcgacagaagatcgccgtcaaaatggtgcatgccgatatttcaatcaacatgtctaagcataccactttctttggtgctatccgattgggtgaggcccccgcctcc

SEQ ID NO: 21903 - DNA, 1167 bp, Artificial Sequence
  derived and/or modified sequence
atgggctaccctgaagtagaaaggcgggagttgcttccagctgctgcacctcgggagcgcggcagccaaggctgcggctgcggtggcgcgccagctagagccggcgagggcaatagctgccttctgtttcttgggttcttcggattgtcactggcgctccacctgctcacgctttgttgctatctggaactgcgttctgagctcagaagagagcgaggcgcagaatctcggcttggcggatccgggacccctggtactagcggtacccttagtagcctcggtggcttggatcctgactcccctattacctctcatctgggccagcctagccccaaacagcagccactggagcccggcgaagccgccctgcactcagattcgcaggatggccatcagatggccctgttaaacttctttttcccggacgagaaaccttacagtgaagaggaatctcggagagttcggagaaataagcgatccaagagcaacgaaggcgccgacggtcccgtgaaaaacaagaaaaaggggaagaaggcgggcccacccggtccaaacggccctccaggcccacccggccctcctggccctcaggggcctccagggatcccaggcattcctgggatcccaggtactactgtgatggggccccccggcccccccggccctcctggcccacagggacccccaggactgcaggggccaagcggtgcagctgataaggcagggactagggaaaaccaacctgctgtagtacaccttcaggggcagggatcagcaatccaggtgaaaaatgacttgtcaggaggagtactcaacgattggagcaggattacaatgaatcccaaagtattcaagcttcatccccgctccggggaactggaggtgctggtggatgggacctactttatttattcccaggtatattatataaattttacagacttcgcctcctatgaggtggttgtggatgaaaagccatttttacagtgtacaagatctatcgaaacaggcaagactaactacaatacttgctacacggctggtgtatgcctgctgaaggctcgacagaaaatcgccgtgaagatggtgcacgctgacatcagcattaatatgagcaaacataccacattcttcggggctatcagactgggcgaggcacccgcatcc

SEQ ID NO: 21904 - DNA, 1167 bp, Artificial Sequence
  derived and/or modified sequence
atgggttacccggaggtcgagcggagagagttgctgccagcagcggctccgcgcgaacgcggctctcagggctgtggttgcggcggcgcacctgccagagcaggagagggtaatagctgtttgctgttcctgggtttcttcggactgagtctggccctgcatctcctgacactgtgctgttaccttgagctgcgtagcgaactgaggcgtgagagaggagcggaatcccgcctgggtggatccggcacaccgggcacaagtggtaccttgtcctcgctgggtggacttgatcccgactcgccgataacgtctcacctgggccaaccgagcccgaagcagcagccactcgagccaggcgaggctgctctgcacagtgactcccaggatggacatcaaatggccctgctgaactttttcttcccggacgaaaagccatactcggaggaggaatctcgcagagtgcgccgtaataaacgaagcaagtcgaacgagggcgccgatggaccagtgaagaacaagaaaaagggcaagaaagcgggacccccgggcccaaatggtccgcccggaccacctggcccgcccggcccccagggtcccccaggaatccccggcatacccggtattcctggcacgactgtcatgggtccacccggtcccccgggtccgcccggaccccagggccctcccggccttcagggaccttccggagcagccgataaggctggcacacgagagaaccaacccgccgtggttcatctgcagggccaaggatccgccattcaagtgaagaacgatctgagtggcggtgtgctcaatgactggtctcgtataactatgaatcccaaggtgttcaagttgcacccgcgcagcggtgagttggaggtgcttgttgacgggacatatttcatctattctcaggtatactacattaactttacagatttcgctagttacgaggtggttgttgacgagaaaccgtttttgcagtgcacgcgcagcatcgaaactggtaagactaactataatacgtgctacacagccggggtgtgtttgcttaaagcgcggcagaagatcgccgtaaagatggtgcatgcggacatatccataaatatgagcaaacatactaccttttttggcgccatccgcctaggcgaggctccggcttcg

SEQ ID NO: 21905 - DNA, 1167 bp, Artificial Sequence
  derived and/or modified sequence
atgggctaccctgaggtcgagcggagagagctgctgcctgcagcagccccacgtgagcggggatcgcaggggtgcggatgcggcggcgcccctgctcgcgccggagagggcaattcctgcctcctcttcctgggcttcttcggtctgagcctggcgttgcatttgctgactctgtgttgctacctggagctcagatccgaattgcgcagggagcgcggagcggaatcacgcctgggaggatccggtactccgggtacctcgggaaccctcagctccctgggcggacttgacccagattcccctattactagccacctcggacagccatccccgaagcagcagccgctggaacccggtgaagcggccctccacagcgattcgcaagacggccaccagatggcactgctgaacttcttctttcccgatgagaagccgtactcggaagaagaatcgagacgggtgcgccggaacaagaggtccaaaagcaatgaaggcgctgacgggccagtgaagaacaagaaaaagggtaagaaggccggaccgccgggccctaatggaccgccaggacctccgggtccgccaggtcctcagggaccgcccggaatccccggaattccaggaatcccaggaaccaccgtgatgggcccgcctggacccccgggtccccctggtccacagggaccgcctggtctgcagggaccatccggagccgcagacaaggcgggaactcgggaaaaccaacccgcggtggtgcatcttcaaggccagggatccgccatccaggtcaagaacgatctttccgggggcgtgttgaacgactggtcgcgcatcactatgaaccctaaggtattcaagctgcatcctcggtcaggcgagttggaggtcctcgtcgacggaacctacttcatttactctcaggtgtactacatcaacttcactgactttgccagctacgaagtggtcgtcgacgagaagccttttctgcagtgcaccagatcgatcgagactggtaaaaccaattacaacacgtgctacactgcgggggtctgcctccttaaagcgcggcagaagatcgctgtgaagatggtgcacgccgatatctcgatcaatatgtcgaagcacaccacttttttcggtgcaatccggctgggagaagcgccggcctcc

SEQ ID NO: 21906 - DNA, 1167 bp, Artificial Sequence
  derived and/or modified sequence
atgggttacccagaagtggagaggcgggaactcctgcccgcagcagcaccccgagagcgtggctcgcagggatgcggatgtggaggagcacctgcacgggcaggggaaggaaacagctgcctgctgtttttgggttttttcggactttccctggccctgcacctcctgaccctttgttgttacctggaacttagatcagagctgcgccgcgaaagaggagcggaaagccggctcggcggttcgggaacccctggcacctcgggaacgttgtcatcacttggaggcctcgaccctgattcgcccattacttctcatcttggccagccctcccctaaacaacagccactggagcccggtgaagcggcccttcattcagactcccaggatggtcaccaaatggcactgcttaacttcttcttccctgatgaaaagccttacagtgaggaggagagcaggagagtgaggagaaacaagcgttcgaaatccaatgagggcgcagatgggccggtcaagaacaaaaagaagggcaagaaggcgggccctccaggtccaaatggtcctccaggcccacctggaccacctggacctcaaggaccgcctgggattccaggcattccaggaattccgggtaccactgtgatgggtcctccaggacctcccgggccccccggacctcagggtccacccggactgcaaggaccctcgggagccgcagacaaggcagggaccagagagaaccagccagctgttgtgcatctgcagggtcagggatcagcaatccaagtgaagaacgacctttctggtggtgtgctgaatgattggtctaggattacgatgaacccgaaagtattcaaattgcatccccgatcgggtgaacttgaagtgctcgtggacggcacctatttcatatactcgcaagtgtactacattaacttcaccgattttgccagctacgaagtcgtcgtggatgaaaaaccttttcttcagtgtactcgatcaatcgaaactggaaagaccaattacaacacctgttacactgcaggagtgtgccttctgaaggcacgccaaaagatcgccgtgaagatggtgcatgcggatatttcgattaacatgtctaagcacactaccttctttggtgctatacggcttggtgaagcacccgcctcg

SEQ ID NO: 21907 - DNA, 1167 bp, Artificial Sequence
  derived and/or modified sequence
atgggctaccctgaagtggagcgtagagaattgctgcctgccgcagcaccacgagaaagaggaagccaggggtgcggctgcgggggagctcctgctcgagccggagagggtaacagttgtctcctcttcctgggattctttggactgtcccttgctttacacctgctgaccctgtgttgttaccttgaactgaggagcgaactaaggcgagaacgaggagcggaatcccgactgggcggaagcggaaccccggggacctccggaactcttagttctctgggcggcctagatcctgattcacccatcacctcacatctcggccagccgagcccaaaacagcagcctctggaaccaggggaagccgcgttgcactcagactcacaggacgggcaccaaatggcattgctgaatttctttttccccgatgagaagccatattcggaagaggaatctcgtcgcgtacgtcggaataagcgatccaagagcaatgagggcgccgatgggccggtgaagaataagaaaaaaggaaaaaaggcgggccctccaggacctaacgggcctcccggacctcccggcccgccgggccctcaggggccccccggcatccctggcatccccgggatcccgggtaccactgtgatggggccgccaggtccccccgggccaccggggccccaggggccccctggccttcaggggccctctggtgcggcggacaaagctggcactagagaaaatcaacccgccgtagtgcacttgcagggccagggatccgcaattcaggtcaaaaatgatttgtccggcggggtccttaacgactggagtcggattaccatgaaccccaaggtttttaaattacacccccgaagtggggagctcgaggtgctggtcgatgggacatatttcatttactcccaggtctattacattaactttaccgatttcgcatcctatgaagtggtggtggatgaaaaacccttcctgcagtgtaccaggtctatagaaacaggaaagacgaactataacacatgctatacagccggagtctgtctccttaaggcgagacaaaagatagctgtcaagatggtgcatgccgatatttcaattaatatgagcaagcacacaacatttttcggtgccatccgcctcggagaggcccctgctagt

SEQ ID NO: 21908 - DNA, 1167 bp, Artificial Sequence
  derived and/or modified sequence
atgggctacccggaggtggagcggcgggaactgctgccagccgcggctcctagggagagaggatcccaaggatgcggctgcggcggcgccccagctagagcaggagagggcaactcatgcttgctctttctgggattctttggcctctctctcgccttgcacctgctgactctctgttgctacctcgaactccgctcagagctgcggcgcgaaaggggcgcggagtctcggttgggaggttccggcaccccgggaacttcaggaaccctgtcaagcctgggaggactcgaccctgactccccgattacgtcccatttggggcagccgagccctaaacagcagccgctcgaaccaggagaagctgccctgcactccgactcgcaagatggccatcagatggcccttctcaacttcttttttccagacgaaaagccgtactccgaagaagaatcacgccgcgtccgaaggaataaacggtcgaagtcgaacgaaggagctgatggaccagtcaagaataagaaaaaaggcaaaaaggccgggccacctggacccaatggaccgcctgggcctcctggaccgccgggcccgcaaggcccacctggaatcccaggcatccccggtatcccagggaccaccgttatgggcccgcctggaccaccagggcccccagggccgcaaggacccccagggctgcaagggccttcaggggcagcggataaagccgggacccgcgaaaaccaaccggcagtggtgcacttgcaagggcagggaagcgccatccaggtgaagaatgacttgtcaggaggtgtcctgaacgattggtcccggattactatgaacccaaaggtgtttaagctccatccacggtcaggcgagctggaggtgctcgtggacggcacttacttcatctactcgcaggtctactacatcaacttcactgattttgcgagctacgaggtggtggtggatgagaaaccgtttctgcaatgcacccgatcgatcgaaaccggaaagacgaattacaacacctgctatactgccggagtctgcctcctgaaagcacggcaaaagatcgcagtcaagatggttcacgccgacatctcgatcaatatgtccaagcacaccactttctttggcgctattagactgggtgaggccccagcctca

SEQ ID NO: 21909 - DNA, 1167 bp, Artificial Sequence
  derived and/or modified sequence
atggggtatcccgaggtcgagcggcgagaactacttcccgccgcagcaccacgggaacggggatcccagggatgtggatgtgggggggcccctgctagggccggggaaggaaacagttgtctcttgttcctgggattttttggattgtccctagccctgcatttgttaactttatgctgttatttggaactgcgctctgaattgagaagagaaaggggagcagaatctcggctcggaggatccggaactcctgggacttccgggacactgtcctctctcggagggctagatccagattcacccataacatcacacttaggacagccctcacctaaacaacagcccctagaacccggggaagccgccttacactcagattcacaggatggacaccagatggcacttctcaacttttttttccccgatgaaaaaccctatagtgaagaagaatcccgacgggtcagacgcaacaaaagatctaaaagtaacgagggggctgatggacctgtcaaaaataaaaaaaaaggaaaaaaagcggggccccctgggcccaacgggccccctgggccacccggacctcctgggccccagggacctcctgggatacccggaataccagggatcccagggacaacagtgatgggacctccaggacctcccggacctcccggaccccaggggcctcccgggcttcagggaccctctggggccgccgataaagcagggactcgagaaaatcagcccgctgtagttcatctgcagggacagggatcagccatccaagtcaaaaacgatttatctgggggagttctcaacgactggtctaggataactatgaatcctaaagtgttcaaattacacccgcggtcaggagagcttgaagtgctcgtggatgggacatacttcatatattctcaagtttactatataaattttacagattttgcctcctatgaagtcgtcgtggacgaaaagcccttcttacagtgtacacgaagtatagaaacaggaaaaacaaattataatacttgttatactgctggagtctgtcttcttaaggcccgacagaaaatagctgtcaagatggtgcacgcggacatcagtattaacatgtcaaagcatactactttttttggggctattaggctgggggaagcacctgcttcc

SEQ ID NO: 21910 - DNA, 1167 bp, Artificial Sequence
  derived and/or modified sequence
atgggttaccctgaggtcgaacgccgcgagctgctgccagccgctgcgccccgggaacgcggatcgcagggttgcgggtgtggaggcgcccctgcacgcgctggtgaaggcaactcgtgcctcttgttcttgggtttctttggactgtccctggcgctgcacctcctcacgctgtgctgctaccttgagcttcggtctgagctgcggcgagagagaggcgctgaatcaaggctcggcggttccggcaccccgggcacctcggggactctgagctcactgggcgggctggacccagattcacctataacttcacacttggggcaacccagccccaagcagcaacctctcgagccaggagaggccgccctgcactcggactcacaagacggacatcagatggcactgctcaactttttcttccccgacgagaagccgtactcagaggaggagtctcgccgcgtgcggcgcaataaacggtccaagtccaacgaaggagcggacggccctgtcaaaaacaagaagaaggggaagaaggctgggccgcccggaccgaacggaccaccgggtcctccggggccacccggaccgcagggaccaccgggaattccgggaatcccaggcatccctggcaccaccgtgatgggaccaccagggccgccagggccgccggggccccagggaccgccgggcttgcaaggaccgtccggagccgctgataaggctggtacccgggagaaccagccggcagtggtgcacctgcagggacagggatcggcaatccaggtgaaaaacgacctttccgggggtgtcctcaacgactggtcccggatcactatgaatccgaaggttttcaaacttcacccgaggtcgggcgaactcgaggtgctggtggatggaacttacttcatctactctcaggtctactatatcaacttcactgacttcgccagctacgaagtggtcgtggatgagaagccgttcctgcagtgcactcgctcgatcgaaactggcaagactaactacaatacctgttacaccgccggcgtgtgtctcctcaaggcacggcaaaagatcgccgtcaagatggtgcacgcagatatatcaatcaacatgtccaagcataccaccttctttggcgcaattcggctcggagaagcgccggccagc

SEQ ID NO: 21911 - DNA, 1167 bp, Artificial Sequence
  derived and/or modified sequence
atgggctatcccgaagtcgagcggcgtgaactactcccagcggcggccccccgagagaggggttcccaggggtgtgggtgcgggggtgcccctgctcgggcaggcgaaggaaacagctgtctgttatttttggggtttttcggcctctcactcgctctccacctgctcactctgtgttgctatctggaacttcgttcagagctcagacgtgaacgaggtgctgagtcccgcctcggggggtcagggactccggggacctccggcactctgagtagcctaggcgggctagaccctgacagtcctatcacaagccacctgggccagccaagtccgaagcagcagccactggaaccgggggaggctgcactgcacagcgacagccaggatgggcatcaaatggcgctactgaacttcttttttcccgacgaaaagccctactccgaggaagaatccaggagggtgaggcgaaacaaacgatccaaatctaacgaaggggctgacggcccagtgaaaaacaaaaaaaaaggtaagaaagctggacctccaggaccaaacgggccacctggccccccaggccccccaggaccccagggtcccccaggtatcccaggaattcctggcataccaggcactacggttatgggcccacccggtccccccgggcctcccggcccacaaggcccccctgggttgcagggaccgagtggggccgccgataaagccggaactagggaaaaccagccggcagtagttcatctgcaaggacaaggctctgcgatccaggttaaaaacgatcttagtggcggtgtgctgaatgattggtctcgtattacgatgaaccctaaggtgtttaagttgcacccacgctctggagaactcgaggtgcttgtggacggtacatacttcatctatagtcaggtttattatatcaactttaccgacttcgcttcttatgaggtggtggtagatgagaagcccttcttgcagtgtacacgttccatagaaaccgggaagaccaactacaacacctgttatacagcaggggtgtgtctgctgaaggcacggcagaaaattgctgtgaagatggtccatgctgatatctccattaacatgtcaaaacacacaacctttttcggggcaattcggctgggtgaggcacccgctagt

SEQ ID NO: 21912 - DNA, 1167 bp, Artificial Sequence
  derived and/or modified sequence
atgggatacccagaggtggaacggcgcgagctcctgccggctgcggccccgcgcgaacgcggcagccagggttgcggatgcggcggagcccccgcgagagccggcgaaggaaatagctgcctgctgttcctgggtttcttcggattgtccctggccctgcacttgcttaccctctgctgttacctggaactccggtcggagctgcgtcgcgagcgcggagctgagtcaaggttgggtgggagcggaaccccggggacctcaggaactctctcgtcgctgggaggcctggacccagactcccctatcaccagtcatcttgggcagccgtccccaaagcagcagccactcgaaccgggcgaagccgctcttcactccgattcgcaggacgggcaccaaatggctcttctcaactttttctttccggatgaaaaaccctacagcgaagaggagtcgcggagagtgcgccgcaacaagcggtcaaagtcaaatgaaggcgctgacgggcccgtgaagaacaaaaagaaaggcaagaaagcgggcccgccgggacccaacggaccccctggaccgcccgggcctccgggccctcaaggaccgcctggcatccctggaatacccggcatcccggggaccaccgtcatgggaccgccgggaccaccggggccccccggaccgcagggaccaccagggttgcaaggaccgtcaggtgccgccgataaggccggcaccagagagaaccaaccagccgtcgttcatctccaaggccagggatcggcgatccaggtgaagaacgacctgagtggaggggtgctgaacgactggtcgaggattacgatgaaccctaaggtgttcaaactccatccacggtcgggggagctcgaagtgctggtcgacggaacctacttcatctactcacaagtgtactacatcaatttcaccgattttgcatcttacgaggtggtggtcgacgagaagccgttcctgcagtgcaccagatccatcgaaacgggaaagactaattacaacacttgctatactgcgggagtctgtctcttgaaggcgcgccagaagatcgccgtgaagatggtccacgcggacatatccatcaatatgagcaaacacaccactttcttcggggctatcagactgggcgaagccccggcctcg

SEQ ID NO: 21913 - DNA, 1167 bp, Artificial Sequence
  derived and/or modified sequence
atgggttatccggaagttgaacgtcgtgaattactaccggcggcggcgccgcgagaacgtggttcgcaaggttgtggttgtggtggtgcgccggcgcgagcgggtgaaggtaattcgtgtctactatttctaggtttttttggtctatcgttagcgctacatttattaacgctatgttgttatctagaattacgatcggaactacgtcgtgaacgaggtgcggaatcgcgtttaggtggttcgggtacgccgggtacgtcgggtacgctatcgtcgctaggtggtttagatccggattcgccgataacgtcgcatttaggtcaaccgtcgccgaaacaacaaccgctagaaccgggtgaagcggcgttacattcggattcgcaagatggtcatcaaatggcgctattaaattttttttttccggatgaaaaaccgtattcggaagaagaatcgcgacgtgtacgtcgtaataaacgatcgaaatcgaatgaaggtgcggatggtccggttaaaaataaaaaaaaaggtaaaaaagcgggtccgccgggtccgaatggtccgccgggtccgccgggtccgccgggtccgcaaggtccgccgggtataccgggtataccgggtataccgggtacgacggtaatgggtccgccgggtccgccgggtccgccgggtccgcaaggtccgccgggtttacaaggtccgtcgggtgcggcggataaagcgggtacgcgagaaaatcaaccggcggttgtacatttacaaggtcaaggttcggcgatacaagtaaaaaatgatttatcgggtggtgtattaaatgattggtcgcgaataacgatgaatccgaaagtatttaaattacatccgcgttcgggtgaactagaagttttagttgatggtacgtattttatatattcgcaagtttattatataaattttacggattttgcgtcgtatgaagtagtagtagatgaaaaaccgtttctacaatgtacgcgttcgatagaaacgggtaaaacgaattataatacgtgttatacggcgggtgtttgtttattaaaagcgcgtcaaaaaatagcggttaaaatggtacatgcggatatatcgataaatatgtcgaaacatacgacgttttttggtgcgatacgtttaggtgaagcgccggcgtcg

SEQ ID NO: 21914 - DNA, 1167 bp, Artificial Sequence
  derived and/or modified sequence
atgggatatccggaagtcgaacgaagagaactcctcccggccgcagctccgagggagagaggcagccaagggtgtggatgtggaggcgcccctgcccgggctggagagggcaattcatgcttgctttttctggggttttttggactgtcgctcgccttgcacctcctgactttgtgctgctatctcgaactgcggagcgagcttagaagagagcgcggcgccgaatcacgcctgggcggaagcggaaccccgggaacctcaggtacgctgtcatccctgggtggactggaccctgacagcccgattacgagccacttgggccaaccctcgccaaaacagcagccattggaaccaggagaggccgcactgcattcggattcgcaggacggacatcagatggctctgctgaatttctttttcccggatgaaaagccatactcggaagaggaatcacggcgcgtgcggcggaataagcgttcgaagtccaatgagggcgcagatggacccgtgaagaacaagaagaaggggaagaaagcaggtccgcctggtccaaacggccccccgggcccaccaggaccgccgggtcctcagggaccaccgggcatccctggcatcccggggatcccaggcaccaccgtcatgggccccccaggaccccccggtcctccagggccccagggcccgccggggctccaaggaccatccggcgcggcggacaaggccgggactagggaaaaccaacccgccgtcgtccacctgcagggacaaggctccgcaatccaagtcaaaaatgatctgagcggaggggtgctgaacgactggtcccggatcactatgaatccaaaggtgttcaagctgcatccccgctcaggagaactcgaagtgctggtggacggtacttactttatctacagccaggtgtactacatcaacttcactgactttgcatcgtacgaggtcgtggtggacgagaagccttttctccaatgtactcgaagcatagagacgggaaagaccaattacaacacttgttacactgccggggtgtgcctgcttaaggctcgccaaaagatcgcagtgaagatggtccatgcggatatctctatcaacatgtccaagcacactacttttttcggagctatcagactgggcgaggctccggccagc

SEQ ID NO: 21915 - DNA, 1167 bp, Artificial Sequence
  derived and/or modified sequence
atgggatacccggaggtcgagaggcgggagcttttgccagctgcagcacctagagaaagaggaagccagggttgtgggtgtggcggtgcccccgccagagcaggagaaggaaattcgtgtctcctcttcctgggcttttttggacttagccttgcactgcatcttctgacgctttgttgttacctggaacttcgatcggagctgagaagggagcgaggagcggagtcacggcttggtggttccggtacccctggtacttcgggtaccctcagctcgcttggtggactggatcctgattcgccgattacgtcccatctgggccagccatcaccaaaacagcaaccacttgaaccgggggaggcggcgcttcatagcgatagccaggacgggcatcagatggcacttcttaacttcttctttccggatgaaaaaccttacagcgaagaagaatcgaggcgcgttcggcgcaataagcggtctaagagcaatgagggtgcagacggtcctgttaagaacaaaaagaaggggaagaaggcaggccctcctggacccaacgggccacctggcccaccaggacctcctggacctcagggacctcctggtattcccggtattccaggaataccaggcaccaccgtgatgggtccccctggtcctcctggaccacccggacctcaaggtcctcccgggcttcagggtccatcgggagccgcagataaggcaggaacccgcgaaaaccaacccgcagtcgtccaccttcaaggccagggaagcgcaatccaggtgaagaacgatttgtccggaggtgtgctgaatgattggagccggataaccatgaaccctaaggtgttcaagttgcatccccgatccggagaactggaagtgcttgtggatgggacctacttcatctattcccaagtgtactacatcaactttacggattttgcctcatacgaagtggtggtcgacgagaaaccttttctccagtgtacccgctcgatcgaaaccggtaagactaactacaacacttgttacaccgccggggtgtgccttcttaaggctagacaaaagattgcagtcaaaatggtgcacgcagacatttctatcaatatgtccaaacacaccaccttttttggcgcaattagactgggggaagcacctgcctca

SEQ ID NO: 21916 - DNA, 1167 bp, Artificial Sequence
  derived and/or modified sequence
atgggctatcctgaggttgaacgccgcgaactcctcccggccgccgcacccagagaacgtggtagccagggatgcgggtgtggaggggctcctgcacgcgccggggaagggaattcgtgcctactttttctaggttttttcggtctttccctcgctctccaccttctgacactgtgctgttacctggaactccgttcagagctacggcgtgagcggggtgctgaaagtcgcttaggaggctcgggaacccccggaacttcgggcactcttagttccctcggtggtctggatcctgattctccgatcacatcccatctaggacagccctctcctaagcaacagccactcgaacccggtgaagcagccctgcatagcgactctcaggacggacaccaaatggctctgttgaatttcttctttcctgacgaaaagccatattcagaggaggaatctcgtcgcgtccgtcgcaacaagcgatcgaaatccaacgaaggagccgatgggcccgtgaagaataagaagaagggaaagaaagctggccctccaggacctaatggacctcccggcccgccaggccctccaggacctcagggtccccctggcatcccaggtatcccaggaatcccgggaactacggtcatgggaccgccgggtcccccaggcccgccgggcccccaagggccacccggactccaggggccatcaggtgcagcagataaggctggtacacgagagaaccaacctgctgtggtccatctgcaaggacaaggctccgcaatccaggtaaagaacgacttatctgggggggtgctgaacgattggagtcgtattacgatgaatccaaaagtattcaagctgcatccgagatccggggagctcgaggtattggtggacggcacatatttcatttattcccaggtttactacattaactttactgacttcgcatcttacgaagtggtcgtggacgagaagcctttcctccaatgcaccagatctattgaaacagggaagactaactacaacacctgctacacggctggagtctgtttgctgaaggcccgccagaagatcgccgtcaagatggtacatgccgatatttctatcaatatgagtaagcacacaacatttttcggtgcgattcggcttggtgaagcgccagcttcc

SEQ ID NO: 21917 - DNA, 1167 bp, Artificial Sequence
  derived and/or modified sequence
atgggctaccctgaggtcgagcggcgggagctccttcccgccgccgctcctagggagcgtggctcgcagggttgtggctgcggtggcgcacctgcgcgggcaggagagggtaattcctgcttgctgttcctcggtttctttggtctcagtctggccctccatcttctcactctatgctgctatttggagttgcggagcgagttgcgccgcgagcgtggcgctgagtctcgcctgggtggctcggggacgccgggcactagcggtaccctgtcaagcctgggcggattggatccggattcccccatcaccagccacctaggccagccctcccctaaacagcagcccctcgagcccggcgaggccgcccttcacagcgactcgcaggatggacaccaaatggcccttctgaacttttttttccctgatgagaagccctacagtgaagaggagtcccgcagagtccgccgcaataagcgtagtaagtcaaacgagggcgcggatggcccggttaagaacaagaaaaagggcaagaaggccggtcctcctgggcccaacggcccccccggtccccccggcccccccggcccacaaggtcctcccggcatcccaggcatccccggaatccccggtacaaccgtcatgggacctcctggtccccccggtccacctggcccccagggtcccccaggtttgcagggaccatccggagccgccgacaaggctggcaccagggagaaccagccggctgttgttcaccttcaaggtcaaggctctgctatccaggttaagaacgacctctcgggcggcgtgctaaatgactggtcgagaatcacgatgaatcccaaggtttttaagcttcaccctcgctctggtgagctcgaggtcttggtcgatggaacctattttatctatagccaagtgtactacatcaatttcaccgacttcgcttcttacgaggtcgtcgttgacgaaaagcccttcttgcagtgcacccgctccatagagacaggtaagaccaactacaacacgtgctacaccgccggtgtctgtttgcttaaggcgcgccagaagattgccgttaagatggttcacgctgatatcagcatcaatatgtccaagcacaccacattcttcggcgcaatccgactgggtgaggctccggcgtcc

SEQ ID NO: 21918 - DNA, 1167 bp, Artificial Sequence
  derived and/or modified sequence
atgggataccctgaagtcgaacgaagagaactcttgccagctgctgccccgcgggagcggggatcacaaggatgcgggtgtggaggggcgccagctcgggctggagagggcaatagctgcctccttttccttggattcttcggtctgagcctggctctgcatctgctgaccttgtgctgctacctggagctgcgctcagaactcaggcgcgaacgtggcgcagaatccagattgggagggtccgggactccgggaactagcgggactctctcgtccctgggcggactcgacccggactcccctatcacctcgcatctgggacagccatcgccaaagcagcaaccgcttgagccgggtgaagccgcgttgcactcagactcacaagatggacaccagatggcgctcctgaacttctttttcccggacgaaaagccgtattcggaggaggaatcccggcgcgtcagaagaaacaagaggtccaagagcaacgaaggggcagacggcccggtcaagaataagaagaagggcaagaaagccggaccgcctggccctaacgggccacctggcccgcctggaccgccaggccctcaaggacccccgggaatcccgggtatccctgggatcccgggcactactgtgatgggaccgccaggtccaccgggaccaccaggaccccaaggtccacctggactgcaggggccgtcgggagcagcggataaggccggcacccgggaaaatcagccggccgtggtgcacctccaagggcaaggatcagcgatccaggtgaagaacgacctgtcgggtggagtgctcaatgactggtcgaggatcacgatgaatccgaaggtctttaagttgcaccctcgctcgggcgagctggaggtgctcgtggacggtacctactttatctactcccaagtttactacatcaacttcacggactttgcatcctacgaagtggtcgtcgatgaaaaacctttcctgcagtgtaccaggtccatcgaaacggggaaaaccaactacaacacttgctacaccgcgggagtctgtttgcttaaggcccgacagaagatcgccgtgaagatggtgcacgctgatatctcaatcaacatgtcgaaacatactactttctttggagccattcgcctgggtgaagccccagcgtca

SEQ ID NO: 21919 - DNA, 1167 bp, Artificial Sequence
  derived and/or modified sequence
atgggttatcccgaggtagagcgtagagagctccttcctgcagccgctcccagagagagaggcagccagggttgtgggtgcggtggagcaccagcaagagctggtgaaggcaattcctgtttgctctttctcggctttttcgggctttctctggctcttcacctgctaaccctttgctgttatctggaacttcgctctgagctccgtagggaaagaggggccgaatcaaggctgggaggatccggtacgcccgggaccagcggcacgctttcctcgctcggaggcctggacccagattccccaatcaccagccacctggggcagccaagcccaaaacaacagcccttagaacccggggaggcagcgttgcacagcgatagtcaggacggtcatcagatggctttgttgaattttttctttcccgacgaaaaaccctacagcgaggaagaaagtcggagagtccggcggaataaaagatcaaaaagtaacgagggagcagacgggcctgtgaagaacaaaaaaaagggcaaaaaggccggccctcccggccctaatggcccccctgggccgcctggtccccccggtccccaggggccgcctggcattcctggcatacctggtatcccgggcaccaccgtcatgggtccaccagggccacccggtccacctgggccccagggacctccggggctccagggacccagcggagcagccgataaagctggaacccgggagaaccaacccgcagtggtgcacctacagggccagggcagcgctatccaggtgaaaaatgatctgtccggaggagttctaaatgattggtcaaggattacaatgaaccccaaggtgtttaagctgcatccccgctcgggagagctagaggtgcttgtggatgggacatactttatctacagccaggtgtactatatcaatttcaccgactttgcctcatacgaagtggtagtagatgagaaacctttcctacagtgtacgaggagcatcgaaactggcaaaacaaattataacacttgctacactgcgggggtttgtcttctgaaggcccggcagaagatcgcggtgaaaatggtccatgctgacatctctattaacatgtcgaaacatactacgttctttggagcaataagactgggtgaggcacccgcaagc

SEQ ID NO: 21920 - DNA, 1167 bp, Artificial Sequence
  derived and/or modified sequence
atgggctaccccgaggtggaacgtcgcgaactgcttcccgcagctgcgccccgagaaagaggaagccagggatgtggttgtggtggggcacctgcgcgggcaggagaagggaactcctgccttctgttcctgggatttttcgggctttcgctggccctgcatctcctgaccctgtgctgttaccttgaactgcggtccgagctccgtcgcgaaagaggagctgaatccagattgggaggaagcggtactcctggtacctccggtactctttcgtcccttggtggactggaccctgatagcccgataaccagccaccttggtcagccgtcacctaagcaacagcctctggaaccaggtgaggcagcactgcacagcgacagccaagacggtcatcaaatggcactcttgaacttctttttcccagatgagaagccttacagcgaagaagaatcccggagggtccgtagaaacaaaagatctaagtccaacgagggtgcagatggtccagtgaagaacaagaaaaagggcaagaaagcaggacctcctggtcccaatggacccccaggcccacctggtcctcctggccctcaaggccctcccggtatccccggcattcctggcattccaggcactactgtgatgggtccccctggaccccccggtccccccggtccgcaaggccctccagggctccagggtccatccggtgccgcggacaaggctggtaccagggagaaccagcctgccgtggtgcatcttcagggacaaggctcagcaatccaggtcaagaacgatctctccgggggagtccttaatgattggtcacgtatcacgatgaatcctaaggtgttcaaactgcaccccagatccggagagctcgaagtgctggtggacggaacctacttcatctattcacaagtgtactacatcaatttcacggattttgcttcgtacgaggtggtcgtcgatgaaaaacccttccttcagtgtactagatcgatcgagactggcaagaccaactacaacacctgctatactgcaggagtttgtctcctcaaagcgagacagaagatagcagtcaagatggtccatgctgatatctccattaacatgtcaaagcatactacttttttcggagccattagacttggtgaagctccagcgtct

SEQ ID NO: 21921 - DNA, 1167 bp, Artificial Sequence
  derived and/or modified sequence
atgggatacccggaggttgagaggcgcgaactgctgccagctgcggcgcctcgcgagagggggtcgcagggatgcggctgcggcggcgccccagcgagggccggcgaggggaactcatgtctgctgttcctggggttcttcggactcagcctggccctgcacttgctgactctctgctgttacttggaactgcgctcggaactgagacgcgagcggggagcggaaagccggctgggaggttcaggcaccccaggaacctcaggtaccctgtcgagccttggaggcctggacccggacagcccgataacctctcatctgggtcagccgtccccgaagcagcagccgctcgagccgggagaagctgccttgcactcggactcccaggatggacatcaaatggctctcctgaacttctttttcccggacgagaagccgtactcggaggaagaatcacgccgcgtgcgtcgcaacaaaagaagcaaaagcaacgaaggggccgacggaccggtcaagaataagaagaagggaaagaaagcaggcccgccgggaccgaacggaccgcctggtcctccaggacctccaggcccgcaaggcccgccaggaatcccgggaatccctggaatcccagggacgaccgtgatggggcctcctggacccccaggaccaccgggacctcagggaccgcctggattgcagggaccgtcgggcgcagcagataaggccggaactcgcgagaaccagcctgctgtcgtgcacctccaaggccaaggatcagcaatccaggtgaagaacgacctgtcaggtggagtgttgaacgattggtcccggatcaccatgaaccctaaagtctttaaactgcatccgcggtcaggcgaactggaggtgctggtggacggcacctactttatctattcgcaagtgtattacattaacttcacggacttcgcctcgtatgaggttgtcgtggacgaaaagccattcctccagtgtactcggagcatcgaaactggaaaaaccaactacaacacttgctacactgccggggtctgcctcctgaaggcccggcagaaaattgccgtgaagatggtgcacgccgatatctccatcaatatgtccaaacacactactttctttggggccatcaggctcggtgaggccccagcgtca

SEQ ID NO: 21922 - DNA, 1167 bp, Artificial Sequence
  derived and/or modified sequence
atgggataccctgaagtcgagcgcagagagctcctgcctgcagccgcaccccgggagcgtgggagccagggctgtggctgcggtggagctcccgcacgagcaggtgaaggaaacagctgccttctgtttctgggatttttcggactttcccttgctctgcaccttctgaccctttgttgttacttggaattgaggagcgagctgagacgcgaacggggtgcagaatctcgactggggggatcagggacccctgggacctcgggaaccctgtcgtcgctgggaggacttgatccagactccccgattacttcgcatcttgggcaaccttccccaaagcaacagcctctggaaccaggtgaagccgcactgcattcggattcacaagatggacatcaaatggccctgctcaacttcttctttccagatgaaaagccctactcggaggaagagtcgaggcgggtccgccgtaacaaaagatcgaaatcgaacgaaggtgcagatggtccagtcaagaataagaagaagggaaagaaggcaggcccgcccggaccaaacgggcctcctgggccccccggacctcctggtccacaaggaccaccaggtatccctgggattcctgggatccccggtactactgtcatgggccctcctggaccacccggaccccccgggccgcagggaccgcctggtctgcaaggtccttcgggcgccgctgataaggcagggactagggagaaccagcccgccgtggtccatctccaaggtcagggatcggcgattcaggtgaagaacgatctttcgggtggcgttttgaacgattggagccgaataactatgaatcctaaggtgttcaaacttcacccaaggtcaggcgaactggaagtgctcgtggacggcacgtacttcatatacagccaggtctactacatcaatttcaccgatttcgccagctatgaagtcgtggtggatgaaaagcctttcctccaatgtactcggtcgatcgaaaccggaaaaactaactacaatacttgttacacggcaggtgtgtgcctgcttaaagcgagacagaaaattgctgtcaagatggttcatgcagacatttcaattaacatgtccaagcacaccaccttctttggcgcaatcagactgggagaagcacccgcaagc

SEQ ID NO: 21923 - DNA, 1167 bp, Artificial Sequence
  derived and/or modified sequence
atggggtaccctgaagtcgaaagaagagagctgctgccagcagcagcaccaagggaacgcggatcccaaggttgtggttgcggaggcgcccctgcacgagcaggagaggggaattcctgcctgctgttcctgggttttttcgggctttcgctcgccctccatcttttgaccctgtgctgttaccttgaactgcgatcggagctgagacgtgagcggggagcagagtccagactgggaggttccggtacccctggtacctccggtaccctctcctcgctcggcggactggatcctgacagcccgattacctcacacctgggtcaaccttcacctaagcagcaaccgctggaacctggagaagccgccctccattcagatagccaggatggtcatcaaatggcccttttgaactttttctttccggacgaaaaaccttatagcgaagaagaatcgcgccgcgtgaggcgcaacaagcggtccaaaagcaacgagggagcggatggtccggtcaagaacaagaaaaagggaaagaaggccggtccccccggacctaatgggcctcctggacctcctggccctcccggccctcaaggcccaccaggtattccaggaatccctggaattcccggaactaccgtcatgggccctccgggaccgccaggaccaccgggtcctcaaggacctcctgggctccaaggcccttccggcgccgccgacaaggctggtacccgcgaaaaccaacctgcagtcgtgcatcttcaaggccagggttcagccattcaagtcaagaacgatctcagcggaggagtgcttaacgattggtcccgcatcacgatgaatccaaaagtgtttaaactccatccccgttcgggtgagctcgaagtcctggtcgatggcacgtactttatctactcccaagtgtactacattaactttactgactttgcatcatacgaggtggtggtggacgaaaagcctttccttcagtgtactaggagcattgaaactggaaagaccaactacaacacttgttacaccgctggagtgtgtctcctgaaggcaaggcaaaagatcgcagtgaaaatggtccacgcggacatcagcatcaatatgagcaagcataccaccttctttggagcaattaggctcggcgaagcacctgcctct

SEQ ID NO: 21924 - DNA, 1167 bp, Artificial Sequence
  derived and/or modified sequence
atgggataccccgaggtggaaaggcgggaactgctgccggccgccgcgccacgcgagcgcggctcccaaggctgtggatgtggcggggctcccgcacgggccggtgagggaaattcctgcctgctcttcctgggcttcttcggattgtcactcgcgctgcacctcctgactttgtgctgctacctggagctccgctcggagcttagacgcgagagaggagccgaaagccgcctcggaggatcaggaacgccgggaacctcgggaactctctcctcgctcggagggttggatcctgactcacctatcacctcccacctcggacagccttcgccgaagcagcaaccgttggaaccaggcgaagccgctcttcattcagactctcaagacggacaccaaatggccctgttgaacttcttcttcccggacgaaaagccgtactccgaagaggagagccggcgcgtgagaagaaacaagcggagcaagtcgaatgaaggcgcggacggaccggtgaagaacaaaaagaagggaaagaaagcaggcccgccaggcccaaatgggcctcccggtccccccggaccgccgggtcctcagggaccgccgggaattccgggcatcccaggcatccctggcaccaccgtcatgggacccccgggaccacctggtccgccggggccgcaaggacctccgggcctgcaaggaccatcgggggcagcagacaaagcgggcactcgcgaaaaccagccagccgtcgtgcacctccagggccagggctcggccatccaggtgaagaacgatctgtccggaggtgtgctgaacgattggtcgcggattactatgaatccaaaagttttcaagctccatccgcggtcgggagaactggaggtcctggtcgacggcacgtacttcatctactcccaggtgtactacatcaacttcaccgatttcgcatcgtacgaagtggtggtggacgaaaaacctttcctgcagtgcacccgctcaatcgagactggaaagaccaactacaacacctgctacactgccggtgtgtgcctgctgaaggcccggcagaagattgccgtgaagatggtgcacgccgatatctcgatcaatatgtctaagcacactactttcttcggcgcgatccggctcggagaagcacccgcctct

SEQ ID NO: 21925 - DNA, 1167 bp, Artificial Sequence
  derived and/or modified sequence
atgggatatccagaagtagaaagaagagaattgttgccagcagcagcacctagagaacgtggatcacaaggatgcggttgtggtggagctcctgcaagagctggtgaaggaaattcttgtttactttttcttggattttttggtctttcacttgctttacatcttttgacattatgttgttatctcgaattacgttctgaattaagaagagaaagaggagctgaaagtagacttggaggatcaggaactccaggaacatctggaacactttcatcattaggaggattagatccagattcaccaattactagtcatttaggtcaaccatctccaaagcaacaaccattagaaccaggagaagcagcattacattcagactcacaagatggtcatcaaatggcattgttaaattttttttttcctgatgaaaagccatattctgaagaagaatcaagaagagttcgaagaaacaaaagaagtaaaagtaatgagggagctgatggaccagttaaaaataagaaaaaaggaaaaaaggctggtcctccagggccaaatggacctccaggaccacctgggccaccaggaccacaaggacctccaggaattccaggtattcctggaattccaggaacaacagttatgggaccaccaggacctccaggaccaccaggtccacaaggtccaccaggtttacaaggaccatcaggagctgctgataaagcaggtactagagaaaatcaaccagcagtagttcatttacaaggacaaggaagtgcaattcaagtaaaaaatgatttatcaggaggtgttttaaatgattggagtcgtataacaatgaacccaaaagtttttaaacttcatccaagatcaggagaattagaagttcttgttgatggaacttatttcatttattcccaagtttattatattaatttcacagatttcgcttcatatgaagtggtcgtagatgaaaaaccatttttacaatgtactcgtagtatagaaacaggaaagacaaactataatacttgttatacagctggagtatgtttacttaaagctagacaaaaaattgcagttaaaatggtccatgctgatattagtattaatatgtcaaaacatacaactttcttcggtgctataagattaggagaagcaccagcatcg

SEQ ID NO: 21926 - DNA, 1167 bp, Artificial Sequence
  derived and/or modified sequence
atggggtatcccgaagtcgaacggcgagaactactaccagccgcagctccccgggaaaggggttcacaaggatgtggatgcgggggagcaccagcccgcgcgggcgaggggaacagctgtctgctgtttcttggattcttcggcctaagcctggctttgcaccttcttacgctgtgttgttaccttgaacttagatcagagctgcggcgggaacgtggcgctgaatctcgtctgggaggctccgggaccccagggacaagcggcactctcagctctctgggaggactggacccagatagccccatcacctcccatctgggccagccgtcacccaagcaacagcccctggagccaggcgaggccgccttacacagcgatagccaggacggccatcaaatggcactgttgaattttttcttccctgatgaaaaaccatactccgaggaagaatccagaagagtccgacgaaacaaacgctctaaatccaacgaaggcgcagatggcccagtgaaaaacaagaagaagggaaaaaaggcggggccccctggcccaaacggaccaccagggccaccgggccctccgggaccacagggccctcctggcattcccgggatccccggaatccccgggactacagtgatggggcctcccggcccccccggccctcccggccctcagggtccaccggggttacagggcccatctggagccgccgacaaagctggaacccgcgaaaaccagcctgctgtcgtgcatttgcagggtcagggaagcgccatccaggtgaagaacgatctgtccggcggggtccttaatgactggtcgaggattacgatgaaccccaaagtgtttaagttgcaccctcggagtggcgaactggaggtgcttgtagacgggacctactttatctactcacaagtgtattatattaattttactgactttgcctcatacgaggtggttgtggatgagaaaccatttctgcagtgtacgcgttcaattgaaactggaaagactaattataatacatgttatacagctggggtctgcttactcaaagctcgacagaaaattgctgtcaaaatggtgcatgccgatatctctatcaatatgtccaagcacacgacattcttcggcgccatccggcttggtgaggcccctgcctca

SEQ ID NO: 21927 - DNA, 1167 bp, Artificial Sequence
  derived and/or modified sequence
atgggttaccctgaagtggagagaagagaactgcttccggcagcggcacctagagaaagagggagccaaggttgtggttgcggcggtgccccagcacgtgcaggcgaaggcaactcctgtcttttgtttctcgggtttttcggtttgtcgctggcacttcacctgttgacgctttgttgctaccttgagctgcgctccgaactgcgcagagagcggggagcagaaagccgcctgggaggatcaggaacccccggcactagcggtactttgtcctccctggggggactggatccagactcgcctatcacctcgcatcttggacaaccgagccccaaacagcaacctcttgagccaggcgaagccgctttgcattcagatagccaagacgggcaccagatggcattgttgaacttctttttccccgatgaaaagccttactcggaagaggaatcgcggcgggtgagaaggaataagcgatcaaaatcgaacgagggtgctgatggacccgtgaagaacaaaaagaagggaaaaaaggcaggacctcccggtcccaacggcccccctggccctcctgggccacctgggcctcaaggaccacctggaatcccagggattccaggaatacccggaaccactgtcatgggaccaccaggtccacctggccctccaggtccacaaggaccaccgggactgcaggggccatcaggtgcagcggacaaagctggtacccgtgaaaaccaaccagcagtcgtgcaccttcaaggccagggatcagctatccaagtcaaaaatgacttgtctggcggcgtgctgaatgattggtcacgaatcaccatgaaccccaaggtctttaagctccatccccggtcaggcgaactggaggtgctggtggatgggacttacttcatctacagccaggtgtactacattaactttaccgactttgcgtcgtacgaagtggtggtagacgagaagccgttcctccaatgtactaggagcatcgaaactggaaagactaactacaacacgtgctatactgctggagtctgtctgctgaaggcccgtcagaaaatcgcagtcaagatggtgcatgccgacatctcgattaacatgagcaaacataccaccttttttggtgccattagactgggagaggcaccagcatca

SEQ ID NO: 21928 - DNA, 1167 bp, Artificial Sequence
  derived and/or modified sequence
atgggctacccggaggtggagagaagggaactcctgcctgcagccgcgccgcgggaacgcgggagtcaggggtgcggttgtggtggcgctccggctcgcgccggcgaggggaacagttgcctgttgttcctagggtttttcgggctgtctctggctctgcacctgctaactctatgctgctaccttgaactccgttctgaacttaggagagagaggggagcagaatctagactgggggggagtggaactcccggcacttccggaacccttagttccctgggaggtctggatccagactccccaataaccagccacctcggacaaccgtcccccaagcagcagccattggagccaggagaggctgcactccacagcgatagccaagatggacatcagatggctctgttaaattttttctttcctgacgagaaaccctactccgaagaagagtctaggcgcgtcagacggaataagcggagtaaatccaatgagggggccgacgggcctgtaaaaaacaagaagaaaggtaagaaagccgggcctcccggtcccaatggcccccccggcccgcctgggcctcctggtccccagggccctccggggatacccggaattcctggtattccaggcacaactgtcatgggccctccgggaccaccaggtccgcctggccctcaggggccaccagggctgcagggcccttctggggcagcagataaagccgggacgcgggagaaccagccagcagttgtccacctgcagggccagggttctgctatccaagtgaaaaacgacctgtccgggggcgtcctcaacgactggtcccggattacaatgaatccaaaagtgttcaaactgcatcctagatccggggaactcgaggtcttggtggacgggacttattttatttattcacaggtgtattacattaactttacagattttgccagttacgaggtggttgtggacgagaagccttttctgcagtgcaccaggtcaatcgaaaccggaaaaaccaactacaatacctgctacacggctggggtatgtctgttgaaagcacgccagaaaatagcggtcaaaatggtgcatgctgatatctccattaacatgtccaaacacactaccttcttcggcgctattcgcctgggcgaggcacctgctagc

SEQ ID NO: 21929 - DNA, 1167 bp, Artificial Sequence
  derived and/or modified sequence
atgggatatcctgaagtggagcggagggagctgctacctgccgcagcccctcgagaacgtggatctcagggttgcgggtgtggaggggctcccgcccgggccggcgaaggaaactcgtgcttgctgtttctcggcttcttcggtttgtccctagccctgcacctcctgaccctgtgttgctacctggagttgcggagtgagctccgtagggagcgtggggcggagtcgaggttgggtggttccggtacccctggaacctctggaacgcttagctcactggggggtctcgatccggatagtcccataacttcccatcttggccagccttcaccaaaacaacagccgctggagcctggcgaggctgcactacacagtgacagtcaggacggccatcagatggccctgctcaacttctttttcccagatgaaaaaccctactccgaggaagaatctcgcagggtaagacgcaacaagagatctaaaagcaatgagggcgctgacgggcccgttaagaacaagaagaaaggcaaaaaggctggcccgcccggcccaaacggtccccctggacccccaggaccgcccggcccccaggggccccctgggattcccggcatccctggaatcccaggaacaacagtcatgggacctcctgggccccccgggccccctggaccacaggggccaccaggactgcagggacccagtggcgccgcagacaaggcggggacaagggagaatcagccagcggtggtgcacctccagggccagggcagcgccattcaggtgaagaatgatttaagcggcggagtgttgaatgattggagcaggatcactatgaatccgaaagtgtttaaactgcaccctagatctggcgaactcgaggtcctggttgacggcacgtattttatctacagtcaggtgtattatattaatttcaccgatttcgctagctacgaagtggtggtggatgagaagcccttcctccagtgcactcgatctatcgagaccggcaagactaattataacacatgttataccgccggggtctgccttcttaaggcccgccagaagattgcagtcaagatggttcatgccgatatctcaattaacatgagtaaacatacaaccttctttggcgcaatcaggcttggtgaggccccagccagc

SEQ ID NO: 21930 - DNA, 1167 bp, Artificial Sequence
  derived and/or modified sequence
atgggataccctgaggtggaaaggcgggagcttcttcctgcggcagcacctagggaacgagggagccaaggttgtggatgcggaggcgcaccagcacgcgccggggaaggaaactcatgcctgctctttctgggcttttttggcctctcacttgcgctgcatctccttaccctgtgttgttaccttgaacttcgatcagagctgcgtagagaacgtggagccgagtcccgcctgggtgggagcggtacccccggaacgtccggaactctctcatcgcttggaggacttgatcctgattcacctattactagccacctcgggcaaccttctccaaaacagcaacctttggaacccggagaagcagcactgcactccgatagccaggacggacaccagatggcgctcctgaacttctttttcccagatgagaagccatactcggaggaagaaagcagaagagtgagaagaaataagagatcgaagtcaaatgaaggtgcagatggcccagtgaagaacaagaaaaagggcaagaaagcgggacccccggggccaaacggaccacctggcccccctggccccccaggtccacaaggaccacctgggattccgggaatcccggggattccagggaccactgtcatgggcccacctggtccgcctggaccgccaggacctcaaggccctcctggattgcaaggcccaagcggagcggccgataaggccggaacccgcgaaaaccaaccagcagtcgtgcatctgcaaggtcagggctcggcgattcaagtaaagaacgacctttccggaggcgtgcttaacgattggtcccggattactatgaaccctaaggtgttcaagctgcatccccgctcgggtgagctcgaggttctggtcgatggtacttactttatctattcacaagtgtactacattaactttaccgatttcgctagctacgaggtggtggtcgatgaaaaaccatttttgcagtgcaccaggtccattgaaaccggtaagactaactacaatacttgttacaccgctggcgtctgcctgcttaaggccaggcaaaagattgcggtcaagatggtgcatgcagacatttcgataaacatgtccaagcacaccacctttttcggtgcaatcaggcttggagaggcgcccgcttcc

SEQ ID NO: 21931 - DNA, 1167 bp, Artificial Sequence
  derived and/or modified sequence
atggggtacccagaagttgaacgtcgggagctgttgcctgcagccgcgcctagagaacggggcagccagggttgcggctgtggtggagcgccagcacgcgctggagaaggtaactcatgccttctttttctcggattctttggcctgtcgcttgctctccaccttctgaccctttgttgttatcttgaacttagatcggaattgcgcagagaaagaggcgctgaatcaaggcttggggggtccggaacccctggaacgtccggaacgctcagctccctgggaggacttgaccccgattccccaattacttctcacctcggtcagccaagccccaagcaacagcctctcgaacccggcgaggcagcgctgcactctgattcccaggacggccaccaaatggcccttctgaacttcttttttcctgacgaaaaaccatactcagaagaagaaagccgccgcgttaggagaaacaaaagatcgaagagcaacgagggagcagatgggcctgtgaagaataagaagaagggaaagaaggccggcccacctggccctaacggtccccccggtccaccgggtccgccaggaccacaagggccacccgggatccctgggattcctggcattccaggtaccacggtgatgggtccccctgggccaccaggtcctcctggacctcaaggccctccaggcctccaaggtccttctggggcagcggataaggctggtacccgtgaaaatcaaccggccgtggtccatctccagggccagggaagcgccatacaagtgaagaacgacctgtcagggggagtcttgaatgattggtcacgtataacgatgaaccccaaggtgtttaaactgcatccccggtcgggagagctggaagtgctcgtggacggcacctacttcatttactcgcaggtgtactatatcaactttactgatttcgcatcatatgaggtggtggtcgatgagaagccatttctgcagtgcactcgatcaattgagactggcaagaccaactacaacacttgttacaccgcaggagtctgccttctgaaggcacgtcagaagatcgcagtcaaaatggtgcatgccgacatttcaataaacatgtcgaagcatactaccttctttggggcaatacgcctcggcgaagcacctgcgtca

SEQ ID NO: 21932 - DNA, 1167 bp, Artificial Sequence
  derived and/or modified sequence
atgggatacccagaagtggagcgaagggagctgctgccagccgccgcccctcgcgaaaggggctcccagggatgcggctgcggaggagcaccggcgcgggcaggcgagggcaattcctgcctgttgttcctgggattcttcggtctttcactggccctgcacctcctcactctctgttgctacctggaacttcgcagcgagttgcgacgagagcggggagccgaatctcgcctgggaggaagcggcactccggggacttccgggactctgtcgtcactgggaggacttgatcctgactcaccgattacttcgcatctgggccagccatccccgaagcagcaacccctcgagccgggagaagccgccttgcattccgatagccaggacggacaccagatggccctcctgaacttcttctttccagacgagaaaccctactcggaagaagaatccagacgcgtgagacgcaacaagcggagcaaatccaatgaaggggccgacggaccagtcaagaacaagaagaaaggcaagaaggctggtccgccgggaccaaatgggccgccgggcccgccaggccctccgggcccacaaggcccaccaggtataccgggcattcccggcattcccggtaccaccgtcatggggcctccagggccgcccggtcccccgggaccgcaaggaccacctgggctccaaggcccgtcgggcgcggccgacaaagctggaacccgggagaaccagccggcagtagtgcatctccagggacaggggagcgcaatccaggtgaagaacgatctctctggaggggtccttaacgactggtctaggatcaccatgaatccgaaggtctttaagctccacccgcggtcaggagagttggaggtcctggttgatggaacctatttcatctacagtcaagtgtactacatcaacttcaccgatttcgcgagttacgaagtggtggtggacgaaaaacctttcctgcaatgcactagatcaatcgagactggcaagacgaactacaacacctgctataccgctggtgtgtgtttgctcaaggcacggcagaagatcgctgtgaaaatggtgcacgctgacatttcgatcaatatgagcaagcacaccaccttttttggcgcgatccgactgggggaggcgcctgcgtcc

SEQ ID NO: 21933 - DNA, 1313 bp, Artificial Sequence
  derived and/or modified sequence
gggaaataagagagaaaagaagagtaagaagaaatataagagccaccatggggtaccctgaggtggagcgcagggaacttctgcctgcagccgcaccgcgggagcgcggaagccaggggtgcgggtgtggtggcgcaccagccagagccggggaagggaattcatgtttgctttttctcggtttcttcggtttgtccctggcgttgcaccttctcaccctgtgttgctacctcgaactgagatcagagttgcggcgagagcggggagctgagtcccggcttggcggtagcggaactcccggaacgtcggggacgctcagctcactgggtggactggatcccgacagccctattacctcacacttgggtcagccttcgccgaaacagcaacccctcgaacccggagaggcagcactccattcggattcgcaagacggacaccagatggcgctcttgaacttcttctttcccgacgaaaagccttatagcgaagaagagtcccgaagggtgcgccggaacaagcggtcgaagtcaaatgagggtgcggacggacccgtgaagaacaaaaagaagggaaagaaagctgggcccccgggaccgaatgggccaccaggaccgccaggtccccctggaccacaaggtccgcctggaatcccgggaattccgggtatccccggcacaacagtcatggggccacccggaccaccgggaccgcctgggccgcagggaccccctgggctccaggggccttcgggtgctgcggataaggcgggaacaagggagaatcagcccgcagtcgtccacttgcagggacagggatcggcgatccaagtgaaaaatgacttgtccggtggggtccttaacgactggtcaagaatcactatgaatccaaaggtctttaaacttcaccctagatcaggtgaactcgaagtgttggtcgatggaacgtatttcatctacagccaggtatactatatcaactttaccgactttgcctcgtatgaggtcgtagtagatgagaagccttttctgcagtgtactcggtcaattgagacagggaaaaccaattacaacacgtgctacactgctggagtgtgcctgttgaaggccagacagaagatcgcggtgaaaatggtacatgcggatatctcgattaacatgtcaaaacatacgacattcttcggggcgattagactgggcgaagctcccgcatcctgataagctgccttctgcggggcttgccttctggccatgcccttcttctctcccttgcacctgtacctcttggtctttgaataaagcctgagtaggaag

SEQ ID NO: 21934 - DNA, 1170 bp, Artificial Sequence
  derived and/or modified sequence
atgggctaccccgaggtggagagaagagagctgctgcccgccgccgcccccagagagagaggcagccagggctgcggctgcggcggcgcccccgccagagccggcgagggcaacagctgcctgctgttcctgggcttcttcggcctgagcctggccctgcacctgctgaccctgtgctgctacctggagctgagaagcgagctgagaagagagagaggcgccgagagcagactgggcggcagcggcacccccggcaccagcggcaccctgagcagcctgggcggcctggaccccgacagccccatcaccagccacctgggccagcccagccccaagcagcagcccctggagcccggcgaggccgccctgcacagcgacagccaggacggccaccagatggccctgctgaacttcttcttccccgacgagaagccctacagcgaggaggagagcagaagagtgagaagaaacaagagaagcaagagcaacgagggcgccgacggccccgtgaagaacaagaagaagggcaagaaggccggcccccccggccccaacggcccccccggcccccccggcccccccggcccccagggcccccccggcatccccggcatccccggcatccccggcaccaccgtgatgggcccccccggcccccccggcccccccggcccccagggcccccccggcctgcagggccccagcggcgccgccgacaaggccggcaccagagagaaccagcccgccgtggtgcacctgcagggccagggcagcgccatccaggtgaagaacgacctgagcggcggcgtgctgaacgactggagcagaatcaccatgaaccccaaggtgttcaagctgcaccccagaagcggcgagctggaggtgctggtggacggcacctacttcatctacagccaggtgtactacatcaacttcaccgacttcgccagctacgaggtggtggtggacgagaagcccttcctgcagtgcaccagaagcatcgagaccggcaagaccaactacaacacctgctacaccgccggcgtgtgcctgctgaaggccagacagaagatcgccgtgaagatggtgcacgccgacatcagcatcaacatgagcaagcacaccaccttcttcggcgccatcagactgggcgaggcccccgccagctag

SEQ ID NO: 21935 - DNA, 1170 bp, Artificial Sequence
  derived and/or modified sequence
atgggctatccagaggttgaaagaagggagctgctccctgccgccgccccacgtgagagagggtcccaagggtgcggctgcggaggggctcccgcccgggctggcgagggcaattcatgcctgttatttttgggtttcttcgggctgtctttggccttgcacctgctgaccctgtgctgctatctggagctgaggtctgagctgaggcgcgaacggggcgccgagagtcgcctcggaggctcagggaccccgggcaccagcggtaccttatcctctctgggcgggctggacccggatagcccaattacatcccatcttggtcagccttccccgaaacagcagccactagagcccggcgaggctgcactccattccgacagccaggacggtcatcagatggcccttctgaacttcttctttccggacgagaaaccttacagcgaagaagaaagcagaagggtgaggaggaacaagaggagcaaatctaacgagggggccgacggcccagtcaagaataagaagaagggtaaaaaggctggaccccctgggcctaatgggccccccgggccgcccggaccgcccggccctcaaggcccgcctggcatcccaggaattccaggcataccaggcaccaccgtgatgggcccacccggacctccaggtccacccgggcctcagggtcccccaggcctgcaggggcccagcggagctgcagataaggcgggaacccgagaaaaccagcctgccgttgtgcacctccagggccaaggctccgccatccaagttaaaaacgacttgagtggaggagttttgaacgactggtctcggattaccatgaatccaaaggttttcaaacttcacccaaggagtggcgagctggaagtgctcgtggacgggacatatttcatttactctcaggtatattatattaactttacggacttcgcgtcctatgaggttgtggttgacgagaagcccttccttcaatgtacccgcagtatcgaaaccggcaagacaaattacaatacttgctacaccgctggtgtgtgtctactgaaggcaagacagaagattgccgttaaaatggtccacgccgacatttctatcaatatgtcaaaacataccaccttttttggtgcaatccgcctcggtgaagcccccgccagttag

SEQ ID NO: 21936 - DNA, 1170 bp, Artificial Sequence
  derived and/or modified sequence
atgggctacccagaggtggagcggcgggagctgctgcctgctgctgccccccgggagcggggcagccagggctgcggctgcggcggggccccagcccgggccggggagggcaacagctgcctgctcttcctgggcttcttcggcctgagcctggccctgcacctgctgaccctgtgctgctacctggagctgcggtctgagctgcggcgggagagaggagctgagagccggctgggcggcagcggcaccccaggcaccagcggcaccctgagcagcctgggcggcctggaccctgacagccccatcaccagccacctgggccagcccagccccaagcagcagcccctggagcccggggaggccgccctgcacagcgacagccaggacggccaccagatggccctgctgaacttcttcttcccagatgagaagccctacagcgaggaggagagccggcgggtgagaagaaacaagaggagcaagagcaatgaaggagcagatggccctgtgaagaacaagaagaagggcaagaaggccggccccccaggccccaatggacctcctggccccccaggccccccaggcccccagggccccccaggcatccctggcatccctggcatccctggcaccaccgtgatgggccccccaggccccccaggccccccaggcccccagggccccccaggcctgcagggccccagcggggctgctgacaaggccggcacccgggagaaccagcctgctgtggtgcacctgcagggccagggcagcgccatccaggtgaagaatgacctgtctggaggagtgctgaatgactggagccgcatcaccatgaaccccaaggtgttcaagctgcaccccaggtctggagagctggaggtgctggtggatggcacctacttcatctacagccaggtgtactacatcaacttcacagactttgccagctatgaggtggtggtggatgagaagcccttcctgcagtgcaccaggagcattgagaccgggaagaccaactacaacacctgctacacagctggggtgtgcctgctgaaggcccggcagaagattgctgtgaagatggtgcatgctgacatcagcatcaacatgagcaagcacaccaccttcttcggggccatccggctgggggaggccccagccagctag

SEQ ID NO: 21937 - DNA, 5272 bp, Artificial Sequence
  derived and/or modified sequence
attccctcggcgggccgagcctcccctctctcccgcccctcctcctccctttcccacccctcggagtagagctgcacatgcggctgctccctgctccgtcccgcccagccactgtcgcgcaggaacgggtccctgcagcccccagccgatggcaggacagtagccgcctgtcagaggtcgtgaacggctgaggcagacgcagcggctcccgggcctcaagagagtgggtgtctccggaggccatgggctacccggaggtggagcgcagggaactcctgcctgcagcagcgccgcgggagcgagggagccagggctgcgggtgtggcggggcccctgcccgggcgggcgaagggaacagctgcctgctcttcctgggtttctttggcctctcgctggccctccacctgctgacgttgtgctgctacctagagttgcgctcggagttgcggcgggaacgtggagccgagtcccgccttggcggctcgggcacccctggcacctctggcaccctaagcagcctcggtggcctcgaccctgacagccccatcaccagtcaccttgggcagccgtcacctaagcagcagccattggaaccgggagaagccgcactccactctgactcccaggacgggcaccagatggccctattgaatttcttcttccctgatgaaaagccatactctgaagaagaaagtaggcgtgttcgccgcaataaaagaagcaaaagcaatgaaggagcagatggcccagttaaaaacaagaaaaagggaaagaaagcaggacctcctggacccaatggccctccaggacccccaggacctccaggaccccagggacccccaggaattccagggattcctggaattccaggaacaactgttatgggaccacctggtcctccaggtcctcctggtcctcaaggaccccctggcctccagggaccttctggtgctgctgataaagctggaactcgagaaaaccagccagctgtggtgcatctacagggccaagggtcagcaattcaagtcaagaatgatctttcaggtggagtgctcaatgactggtctcgcatcactatgaaccccaaggtgtttaagctacatccccgcagcggggagctggaggtactggtggacggcacctacttcatctatagtcaggtatactacatcaacttcactgactttgccagctatgaggtggtggtggatgagaagcccttcctgcagtgcacacgcagcatcgagacgggcaagaccaactacaacacttgctataccgcaggcgtctgcctcctcaaggcccggcagaagatcgccgtcaagatggtgcacgctgacatctccatcaacatgagcaagcacaccacgttctttggggccatcaggctgggtgaagcccctgcatcctagattccccccattttgcctctgtccgtgccccttccctgggtttgggagccaggactcccagaacctctaagtgctgctgtggagtgaggtgtattggtgttgcagccgcagagaaatgccccagtgttatttattccccagtgactccagggtgacaaggcctgcttgactttccagaatgaccttgagttaacaggacagttgatggagccccagggtttacatgaagcagaaccttctttggttccatgttgactgacttatggcatgactcttcaaccccgaggtccctgttgtcagatctattgtttgttgcactaaaatgaggatccagggcagcaggccagagaaagcaaaggtgcactccagactctgggggtggacatctgaccccaagggggctgctgctcctctcttgggtagggtagtggctggggtggagtgggaagggagcattgcagcctaagaagaaggccagagagggaaaaggcaggtgcttttggcagagaccataagagaaacctgccaaggagcatccttggcagtgggaatgttctttctgctctatactgtggcctgcaggagggttggagtgctcttcccactccagctgacagccacaccgtggcagcttgctgggctttgggaagtttgctgtgctttggaacaatcacagggaatggccacaaacctgcccgcctaagaccctgaatccgtacttgggtcacatgactctcattttatttacagctgtgctccacactcagaaaattccctggggtcaccttctagttgcccccattcccagcctgactagaactcctgtcttctttctccatggagcctacctctgtctgagacaggtgcctaacctgggacctgtggtcatgtgagtctgggatattctttagcttacctgggcacaaacagaattttccatttattaagcagtacaaatgtttttcatccattcctaatcaaattctgtctggggacgaagggttggacgggatgacctccagaagtcccttcaatttctagtacctgtgactcttagccctcaccacagccttctaaattcccaaatcctagactgctcctgggcattagcaaggcagagcctttttacctggcctagaaagggcaaggggtgaggataggacagagggattttgttcaagtttgctgcaacccaagtggacgttaggccaggccttatctgaaaggccagcagctgatgctgtactaacccagtctttcttcactctggcttcaaaaagccacagcagagcattgtcaccgcaggtgctcatgctgctcccctaaagccaggctcaggagaagccagtgtctaggcactgagcagggatctgccccctagttcaggtccaaattcaccttcccctaaaccccaagcttcccaacagatcatatggtaggaccctcgagagccttacttcaaagtgcctgggctcagcctggtttctgggtgctagatccagcccaaacctgggaaggccagccttgtacagtctgctcctcttgttcctgaaatgtgtttccttttcaggagatggggaataatttccttcaggcagctgaaattcaccaagaacagcgggtacttatttctcagctgtgccttccctttctaagcaaccacactgcttggcccttcaagggtcagggtgagacgtgatgggctaggcctccgttgtctggttgctaatgacagccttgcaacccaaggtgaggtgaactccaggcatgtgtctggccctaactcctataaagtgcctcggacagtccgcagttgtagcagaaaccaacaagaaccactccttcatgtttggaaaataatttctcttgtattatctcctttgaagaaggcaaggctgataatatgacaaacatcattgtttagatgaggctcagagaggtagcactctcagagtgttttgaccagtttaagccgcagacctggagcttcagccaggtctgactccaaagctgttccattacaccacagcattgtgtggaatttgaggtctagagagaaccaataaaagtggtaattgggaactgaaatccttgagagttccggggagaaacccagagatgcctgatttcattcctcgatggtaatacccgtcctctcggctgccaggggctctgtggcaaaaagagtcagacatttctttggaaaacagcgaacagccttagagctcttgtgttcagaagaatcttcctggcacaatgttggagcagcaggcctctgggacccacagaacttgtggcctttatgttctttcacccatcctaggaaccagccaaccatcatgtgtagagcccctactgtgggcaaagtcctcctttcattaccctacagacagcttacaggagccagcctgcttcccacaactactagtgtgactccttatctctttccaccataccttagagactttgatactaccagggtctctcagggatggagggaagacctgaaagagaggactggttctgaggccagaaaggtgtgaggagagaggaggaaaagtcttcctaattgtgcccctaaagagcatcctgataccattctattctccagacatggaggggatgataaaggaaataggatctccactggacccttgattcattctgaaccctccaaaggaactctagagggcgagggatgatgagggaagcaataggtagctggggagccctattgctgctaagtcattggcaaagtgacaaagcaatttactgatgagagaatgtggaaatagatgtgcagtttggaattatgttggtgtgaatttgccagaggaccaatgcttgcatggagaatgggacgaggacatttgtgggcaagcagatgacagaggtttgaaggagaatggcatggcaggagtctctgccagttacttgggcttcaacagccaagctggcacaaaagacagctggcggaggctgctcggctactggttacctggagaagtagtatttgcctatttcccccttcatccatcctgagccaaatttcttttgctgaacaggaaagagctaggaaccctggaggtaaacaaagactttgatccatgtatgagtgtatgtgtttatgtaacttcctgtggatgcaaatagattcagagaaatttagagctaaaaaggcccttagagggaatctagcccaacctacattccaccctgttacttatgtagaaactgaggcccagagagggaagatgacctgccccaagtggtgagcaagcaccaacctccagactcagcagagtgagggggtaaagcagttcctgtcccacatggccatcttctttcttccacccacaaactccaggctggaagtacttggcccccttcaggagcctggccaggcagggagagagtagctgcagccttcatcagaactcttcctcctcccaaggcattctcccagctctagcctctggactggaaagcacaagactggcccagtgccagcaagtccttaggctactgtaatgctgcctcaggacccatccctgcctggaggctcctctaggccctgtgagcacaaagaagaaagctgatttttgtcttttaatccatttcaggactctctccaggagggctcggggtgtgtcatttctatattcctccagctgggattggggggtgggctttgttgtgagaatggcctggagcaggcccaatgctgcttttgggggtcagcatccagtgtgagatactgtgtatataaactatatataatgtatataaactgggatgtaagtttgtgtaaattaatggtttattctttgcaaataaaacgctttccccgtctgttcttg

SEQ ID NO: 21938 - DNA, 1170 bp, Artificial Sequence
  derived and/or modified sequence
atgggctaccccgaggtggagcggcgggagctgctgcccgccgccgcgccacgcgaaagaggtagccagggatgtgggtgtggcggcgctcctgcccgggctggggaggggaacagttgcctgctttttctcgggttctttgggctctctttggctctgcacttgctgaccctttgctgctatctggagctgcgtagcgaattgcgacgtgaacgaggtgccgagtcccgtcttggcggaagcggaactcccgggacaagcgggacactgtctagcctgggtgggcttgacccagactctccaatcacaagtcacctagggcaaccatctcccaaacaacagccactggagcccggtgaagcagcactccatagtgacagccaggacggccaccaaatggcgcttctaaacttcttcttccccgacgaaaaaccctattccgaagaagaatcaaggagggtgagacgtaacaaaaggtctaaatcaaatgaaggggctgacggccccgtaaagaataaaaagaagggtaagaaagccggccctcctggtccaaatggcccgccgggcccgccaggcccccctggcccccaaggacccccaggtatccccgggatcccaggaatccctgggaccaccgtgatgggaccccctgggcctcctggacctcccggtccacaaggtcctcctgggctgcaggggcctagcggtgcagcggacaaagctggcaccagggaaaaccaacccgcggtcgtacacctgcagggacaagggagtgcaattcaggtgaagaacgatctctcaggaggcgtgctgaacgactggagccgcattacaatgaatccaaaggtcttcaaactccaccctcggtctggagaattggaggtgctcgtggatgggacctacttcatctactcacaggtctactacataaacttcaccgatttcgcctcctatgaggtcgtcgtggatgagaaaccatttcttcaatgtacccgaagcatcgagacaggcaagactaactataacacatgttacactgccggggtatgtttgcttaaagcccgtcagaaaatcgcagtgaaaatggtgcacgcagacatttccatcaacatgagtaagcatacaacgttcttcggcgccatccggctcggagaggcaccagcgtcatag

SEQ ID NO: 21939 - DNA, 1170 bp, Artificial Sequence
  derived and/or modified sequence
atgggttacccagaggtggagcgaagagagctcctgcctgcagccgctcccagggagcgcggttcccaagggtgcggctgcggtggagcgccagcccgtgcaggcgagggcaactcatgtctgttgtttctcggctttttcggcctgagtctggcattgcatcttctgacgctgtgctgttacttggagctccgctctgaactcagacgcgaacgcggagcagaaagcagactgggaggtagcggcacgccgggaacctccgggacccttagctccctgggaggacttgaccccgactccccaatcacttcccacctgggtcagccttcccccaaacagcagcccctcgaacccggagaggctgccctccatagcgattcacaggacgggcatcagatggctctgctgaactttttctttcctgacgagaagccatacagcgaggaagagtcacgcagggtgcgccgaaataagcgatctaagtccaatgaaggcgcagacgggcctgtcaaaaacaagaaaaaagggaagaaagccggtccgccaggccctaatgggcctcctgggcctccgggtccccctggaccccaagggccacctgggataccaggtatcccaggcataccaggcacaaccgttatgggcccaccgggtcccccaggtcctcctggaccacaggggcctccagggttacaaggaccttcgggcgctgccgataaggccggaactcgcgaaaatcagcccgctgtcgttcatctgcagggacagggatccgctatccaagttaaaaatgatctgtcgggcggtgtgcttaacgactggtcccgcatcacaatgaaccctaaagtgttcaagttacaccctaggtccggcgagctcgaagtacttgtagatggaacctatttcatctacagtcaggtgtattacataaacttcacagattttgctagctatgaggtggtcgtggatgagaaaccgttcctgcagtgtaccagatctattgagacagggaagacgaactacaacacctgttacaccgcaggagtatgtctcctgaaagcaagacagaagattgccgtgaaaatggtgcatgccgacatctccataaacatgagtaaacacactaccttctttggggctattcgcctcggcgaagccccagcgagttag

SEQ ID NO: 21940 - DNA, 1170 bp, Artificial Sequence
  derived and/or modified sequence
atgggctatccagaggtggagaggagggaactgctgcctgcagcggcccctagggaaagaggttctcagggttgcggctgcggtggggcccccgcgcgagccggcgagggcaacagctgtctcctattcctcggtttttttggactgtctctggccctccaccttctaacactttgctgttatctcgaactgagatcagaactgcgccgcgaacggggggcagagtcaagactagggggttcaggaactcctggaacatcagggaccctgtcttcattagggggcctagaccccgactcgcctataacatcacatctcggccagccgagtcctaagcagcagcctcttgagcccggtgaagctgcccttcatagcgactcacaggacgggcatcagatggccttgctaaattttttctttccagacgaaaaaccctactctgaggaggagtctcggcgcgtgcgtagaaacaaaagatcaaaatctaatgagggagccgacggtcccgtcaaaaataagaaaaaaggtaaaaaggctggtcctccaggtcccaatggtcctcctggccctccaggccctcctggaccccaaggccctccaggaattccagggatccccggcataccagggacaactgtgatgggccctccagggcctccggggcctcccggtccccaaggcccgccagggctgcaggggccttccggggctgctgacaaggccggaaccagggagaatcagcccgccgtagtccatttgcagggccaaggctcagcgatacaggtgaagaacgacctgagtgggggagttctaaacgactggtcacgcatcacaatgaaccctaaggtgtttaagttgcatccacgatccggcgagctagaagttctggtggatggcacctattttatatactcccaggtttactatatcaattttacagatttcgcatcttacgaagttgtggttgacgagaagcccttccttcagtgtacaaggtctattgaaacagggaagacaaattacaacacctgttacacagccggcgtttgcctgctgaaagccagacagaaaattgcagtaaagatggtgcacgcagatatctcaatcaatatgtccaaacataccaccttctttggcgccattcggctgggagaggcacccgcttcatag

SEQ ID NO: 21941 - DNA, 1170 bp, Artificial Sequence
  derived and/or modified sequence
atgggttatcccgaggtggaacgaagagaacttctgccagcggcagctccacgggaaagaggctcccaagggtgtggatgcggaggggcccccgccagggcaggggagggaaacagctgtctgctcttcctaggcttctttggactgtccctcgcgctccacttgttgaccctgtgttgctatctggaattacgcagcgagctaagaagggaacgtggcgctgagagcaggctgggcggctctggtactcccggaactagtgggacactatcttccctgggtggacttgaccccgactcccctataacatcacatctcggccagccgagtcctaagcagcagcctcttgagcccggtgaagctgcccttcatagcgactcacaggacgggcatcagatggccttgctaaattttttctttccagacgaaaaaccctactctgaggaggagtctcggcgcgtgcgtagaaacaaaagatcaaaatctaatgagggagccgacggtcccgtcaaaaataagaaaaaaggtaaaaaggctggtcctccaggtcccaatggtcctcctggccctccaggccctcctggaccccaaggccctccaggtattcccggaatccccggcatcccaggaactacggtaatggggccccctggccctcccggacctcccggaccccagggtcctccaggattgcagggtccgtccggagctgctgacaaagccggaaccagagaaaaccagcccgccgtggtacatcttcagggccagggaagtgcaattcaggttaagaatgacttaagtgggggtgtgcttaatgactggtcacgcattacaatgaaccctaaggtgtttaaactgcacccgcggagcggagagttagaagttctggttgatggcacttattttatttacagtcaggtttattacatcaacttcacagacttcgcttcatatgaggtagtggtggacgagaaaccctttctgcagtgtaccagatcaattgagaccggcaagacaaattataacacctgctacactgctggcgtctgtttacttaaggctagacagaaaattgctgttaagatggtgcatgctgacatctcaattaatatgtctaagcacacaactttcttcggagctatccgcctaggcgaggcacccgcatcatag

SEQ ID NO: 21942 - RNA, 1313 nt, Artificial Sequence
  derived and/or modified sequence
gggaaauaagagagaaaagaagaguaagaagaaauauaagagccaccaugggguacccugagguggagcgcagggaacuucugccugcagccgcaccgcgggagcgcggaagccaggggugcgggugugguggcgcaccagccagagccggggaagggaauucauguuugcuuuuucucgguuucuucgguuugucccuggcguugcaccuucucacccuguguugcuaccucgaacugagaucagaguugcggcgagagcggggagcugagucccggcuuggcgguagcggaacucccggaacgucggggacgcucagcucacuggguggacuggaucccgacagcccuauuaccucacacuugggucagccuucgccgaaacagcaaccccucgaacccggagaggcagcacuccauucggauucgcaagacggacaccagauggcgcucuugaacuucuucuuucccgacgaaaagccuuauagcgaagaagagucccgaagggugcgccggaacaagcggucgaagucaaaugagggugcggacggacccgugaagaacaaaaagaagggaaagaaagcugggcccccgggaccgaaugggccaccaggaccgccaggucccccuggaccacaagguccgccuggaaucccgggaauuccggguauccccggcacaacagucauggggccacccggaccaccgggaccgccugggccgcagggacccccugggcuccaggggccuucgggugcugcggauaaggcgggaacaagggagaaucagcccgcagucguccacuugcagggacagggaucggcgauccaagugaaaaaugacuuguccggugggguccuuaacgacuggucaagaaucacuaugaauccaaaggucuuuaaacuucacccuagaucaggugaacucgaaguguuggucgauggaacguauuucaucuacagccagguauacuauaucaacuuuaccgacuuugccucguaugaggucguaguagaugagaagccuuuucugcaguguacucggucaauugagacagggaaaaccaauuacaacacgugcuacacugcuggagugugccuguugaaggccagacagaagaucgcggugaaaaugguacaugcggauaucucgauuaacaugucaaaacauacgacauucuucggggcgauuagacugggcgaagcucccgcauccugauaagcugccuucugcggggcuugccuucuggccaugcccuucuucucucccuugcaccuguaccucuuggucuuugaauaaagccugaguaggaag

SEQ ID NO: 21943 - RNA, 1170 nt, Artificial Sequence
  derived and/or modified sequence
augggcuauccagagguggagaggagggaacugcugccugcagcggccccuagggaaagagguucucaggguugcggcugcgguggggcccccgcgcgagccggcgagggcaacagcugucuccuauuccucgguuuuuuuggacugucucuggcccuccaccuucuaacacuuugcuguuaucucgaacugagaucagaacugcgccgcgaacggggggcagagucaagacuaggggguucaggaacuccuggaacaucagggacccugucuucauuagggggccuagaccccgacucgccuauaacaucacaucucggccagccgaguccuaagcagcagccucuugagcccggugaagcugcccuucauagcgacucacaggacgggcaucagauggccuugcuaaauuuuuucuuuccagacgaaaaacccuacucugaggaggagucucggcgcgugcguagaaacaaaagaucaaaaucuaaugagggagccgacggucccgucaaaaauaagaaaaaagguaaaaaggcugguccuccaggucccaaugguccuccuggcccuccaggcccuccuggaccccaaggcccuccaggaauuccagggauccccggcauaccagggacaacugugaugggcccuccagggccuccggggccucccgguccccaaggcccgccagggcugcaggggccuuccggggcugcugacaaggccggaaccagggagaaucagcccgccguaguccauuugcagggccaaggcucagcgauacaggugaagaacgaccugagugggggaguucuaaacgacuggucacgcaucacaaugaacccuaagguguuuaaguugcauccacgauccggcgagcuagaaguucugguggauggcaccuauuuuauauacucccagguuuacuauaucaauuuuacagauuucgcaucuuacgaaguugugguugacgagaagcccuuccuucaguguacaaggucuauugaaacagggaagacaaauuacaacaccuguuacacagccggcguuugccugcugaaagccagacagaaaauugcaguaaagauggugcacgcagauaucucaaucaauauguccaaacauaccaccuucuuuggcgccauucggcugggagaggcacccgcuucauag

SEQ ID NO: 21944 - RNA, 1170 nt, Artificial Sequence
  derived and/or modified sequence
auggguuaucccgagguggaacgaagagaacuucugccagcggcagcuccacgggaaagaggcucccaaggguguggaugcggaggggcccccgccagggcaggggagggaaacagcugucugcucuuccuaggcuucuuuggacugucccucgcgcuccacuuguugacccuguguugcuaucuggaauuacgcagcgagcuaagaagggaacguggcgcugagagcaggcugggcggcucugguacucccggaacuagugggacacuaucuucccuggguggacuugaccccgacuccccuauaacaucacaucucggccagccgaguccuaagcagcagccucuugagcccggugaagcugcccuucauagcgacucacaggacgggcaucagauggccuugcuaaauuuuuucuuuccagacgaaaaacccuacucugaggaggagucucggcgcgugcguagaaacaaaagaucaaaaucuaaugagggagccgacggucccgucaaaaauaagaaaaaagguaaaaaggcugguccuccaggucccaaugguccuccuggcccuccaggcccuccuggaccccaaggcccuccagguauucccggaauccccggcaucccaggaacuacgguaauggggcccccuggcccucccggaccucccggaccccaggguccuccaggauugcaggguccguccggagcugcugacaaagccggaaccagagaaaaccagcccgccgugguacaucuucagggccagggaagugcaauucagguuaagaaugacuuaagugggggugugcuuaaugacuggucacgcauuacaaugaacccuaagguguuuaaacugcacccgcggagcggagaguuagaaguucugguugauggcacuuauuuuauuuacagucagguuuauuacaucaacuucacagacuucgcuucauaugagguagugguggacgagaaacccuuucugcaguguaccagaucaauugagaccggcaagacaaauuauaacaccugcuacacugcuggcgucuguuuacuuaaggcuagacagaaaauugcuguuaagauggugcaugcugacaucucaauuaauaugucuaagcacacaacuuucuucggagcuauccgccuaggcgaggcacccgcaucauag

SEQ ID NO: 21945 - protein, 135 aa, Artificial Sequence
  derived and/or modified sequence
MGYPEVERRELLPAAAPRERGSQGCGCGGAPARAGEGNSCLLFLGFFGLSLALHLLTLCCYLELRSELRRERGAESRLGGSGTPGTSGTLSSLGGLDPDSPITSHLGQPSPKQQPLEPGEAALHSDSQDGHQGHQ

SEQ ID NO: 21946 - DNA, 408 bp, Artificial Sequence
  derived and/or modified sequence
atgggctaccccgaggtggagagaagagagctgctgcccgccgccgcccccagagagagaggcagccagggctgcggctgcggcggcgcccccgccagagccggcgagggcaacagctgcctgctgttcctgggcttcttcggcctgagcctggccctgcacctgctgaccctgtgctgctacctggagctgagaagcgagctgagaagagagagaggcgccgagagcagactgggcggcagcggcacccccggcaccagcggcaccctgagcagcctgggcggcctggaccccgacagccccatcaccagccacctgggccagcccagccccaagcagcagcccctggagcccggcgaggccgccctgcacagcgacagccaggacggccaccagggccaccagtag

SEQ ID NO: 21947 - DNA, 408 bp, Artificial Sequence
  derived and/or modified sequence
atggggtaccccgaagtggaaaggcgcgagctgctgcccgcggccgctcctcgagagagaggctctcagggatgtggctgcggtggcgctcctgctagggcaggggagggcaattcctgccttttgttcctgggctttttcggcctgtctctggcactgcacctgctcaccctgtgctgttacctggaattgaggagcgagctgcgacgagaacgcggggccgagtctaggctgggtggaagcggcactcccggcacctcaggcaccttgtccagtctgggaggtctcgacccggatagcccgatcaccagtcatttgggccaacctagccccaaacagcagccactggaaccaggtgaggcagccctccactccgactcccaggacggacaccagggacaccaatag

SEQ ID NO: 21948 - DNA, 408 bp, Artificial Sequence
  derived and/or modified sequence
atgggctacccagaggtggagcggcgggagctgctgcctgctgctgccccccgggagcggggcagccagggctgcggctgcggcggggccccagcccgggccggggagggcaacagctgcctgctcttcctgggcttcttcggcctgagcctggccctgcacctgctgaccctgtgctgctacctggagctgcggtctgagctgcggcgggagagaggagctgagagccggctgggcggcagcggcaccccaggcaccagcggcaccctgagcagcctgggcggcctggaccctgacagccccatcaccagccacctgggccagcccagccccaagcagcagcccctggagcccggggaggccgccctgcacagcgacagccaggacggccaccagggccaccagtag

SEQ ID NO: 21949 - DNA, 843 bp, Artificial Sequence
  derived and/or modified sequence
attccctcggcgggccgagcctcccctctctcccgcccctcctcctccctttcccacccctcggagtagagctgcacatgcggctgctccctgctccgtcccgcccagccactgtcgcgcaggaacgggtccctgcagcccccagccgatggcaggacagtagccgcctgtcagaggtcgtgaacggctgaggcagacgcagcggctcccgggcctcaagagagtgggtgtctccggaggccatgggctacccggaggtggagcgcagggaactcctgcctgcagcagcgccgcgggagcgagggagccagggctgcgggtgtggcggggcccctgcccgggcgggcgaagggaacagctgcctgctcttcctgggtttctttggcctctcgctggccctccacctgctgacgttgtgctgctacctagagttgcgctcggagttgcggcgggaacgtggagccgagtcccgccttggcggctcgggcacccctggcacctctggcaccctaagcagcctcggtggcctcgaccctgacagccccatcaccagtcaccttgggcagccgtcacctaagcagcagccattggaaccgggagaagccgcactccactctgactcccaggacgggcaccagggacaccaatgagttgtgtcttccctctgtccactctcagcaccttcactctgaagatctgttaaaagcacacgagtcgtctcagtccctcagtgggagctgtttcacctggcgtcatctagtcagccatcttcaataataactgttaaatggacatttatatccactgaaaccactaagtgaaataaagatgtgtttaggcaaa

SEQ ID NO: 21950 - DNA, 408 bp, Artificial Sequence
  derived and/or modified sequence
atgggctaccccgaggtggagcggcgggagctgctgcccgccgccgccccacgagaaaggggctcacaaggctgcggttgcggtggtgcccctgccagagccggtgaaggcaattcatgcttgttattcctgggcttcttcggattaagtctggcgctgcacttgctgaccttgtgttgctatttggaactgagatcggaattacggcgcgagcgaggagcagagtcccggcttggagggtctggtacacccgggacctctggaaccctttcttccctaggggggctggatccagatagccccattacttctcacttggggcagccaagccctaagcagcagcccctggagccaggcgaagcggctctgcacagcgactctcaagacgggcatcagggtcaccaatag

SEQ ID NO: 21951 - DNA, 408 bp, Artificial Sequence
  derived and/or modified sequence
atgggctaccctgaagtcgaacgaagagaactcctgcccgctgcagcccctcgagaacgcggatcccagggttgtggatgcggtggcgctcctgcaagggctggggagggaaattcttgcctgctgttcttgggtttcttcgggctctccttggctctccatttgctgaccctgtgttgctatcttgagctgcgttcagagctaaggagggagcggggtgcagagtctcgcctgggtggcagcggcactccagggacttccggtacgttgtctagcctgggagggttggatcctgactctcctatcacgtcgcatctgggacagccgtctccgaaacagcaaccgttggagccaggggaggcagccctacacagtgatagccaggacggccaccaaggccaccaatag

SEQ ID NO: 21952 - DNA, 408 bp, Artificial Sequence
  derived and/or modified sequence
atgggttaccctgaggtggaaagaagagagctattaccagctgctgcccccagagaaagaggatcacagggatgtggttgtggcggcgccccggcaagggccggagaaggcaactcctgtctcctgttcttaggcttcttcgggctctcccttgctttacatttgctgaccttgtgctgctatttggagttgagaagcgaactcagacgagaaagaggggcagaatcgcgactgggcgggtccggcactcccggcaccagcggtactctgtctagccttggcggcttagaccccgactccccgatcaccagccatttaggacagccatctcccaagcaacagccgctggagcccggtgaagccgctttacatagtgacagtcaagatgggcatcagggccatcagtag

SEQ ID NO: 21953 - DNA, 408 bp, Artificial Sequence
  derived and/or modified sequence
atgggttaccctgaggtggaaagaagagagctattaccagctgctgcccccagagaaagaggatcacagggatgtggttgtggcggcgccccggcaagggccggagaaggcaactcctgtctcctgttcttaggcttcttcgggctctcccttgctttacatttgctgaccttgtgctgctatttggagttgagaagcgaactcagacgagaaagaggggcagaatcgcgactgggcgggtccggcactcccggcaccagcggtactctgtctagccttggcggcttagaccccgactcccccatcaccagccatctcggtcagccctctcccaagcagcaaccgcttgagcctggcgaagcagcactccattcagattcgcaggatggccaccaaggacaccagtag

SEQ ID NO: 21954 - RNA, 408 nt, Artificial Sequence
  derived and/or modified sequence
auggguuacccugagguggaaagaagagagcuauuaccagcugcugcccccagagaaagaggaucacagggaugugguuguggcggcgccccggcaagggccggagaaggcaacuccugucuccuguucuuaggcuucuucgggcucucccuugcuuuacauuugcugaccuugugcugcuauuuggaguugagaagcgaacucagacgagaaagaggggcagaaucgcgacugggcggguccggcacucccggcaccagcgguacucugucuagccuuggcggcuuagaccccgacuccccgaucaccagccauuuaggacagccaucucccaagcaacagccgcuggagcccggugaagccgcuuuacauagugacagucaagaugggcaucagggccaucaguag

SEQ ID NO: 21955 - RNA, 408 nt, Artificial Sequence
  derived and/or modified sequence
auggguuacccugagguggaaagaagagagcuauuaccagcugcugcccccagagaaagaggaucacagggaugugguuguggcggcgccccggcaagggccggagaaggcaacuccugucuccuguucuuaggcuucuucgggcucucccuugcuuuacauuugcugaccuugugcugcuauuuggaguugagaagcgaacucagacgagaaagaggggcagaaucgcgacugggcggguccggcacucccggcaccagcgguacucugucuagccuuggcggcuuagaccccgacucccccaucaccagccaucucggucagcccucucccaagcagcaaccgcuugagccuggcgaagcagcacuccauucagauucgcaggauggccaccaaggacaccaguag

SEQ ID NO: 21956 - protein, 386 aa, Artificial Sequence
  derived and/or modified sequence
MGYPEVERRELLPAAAPRERGSQGCGCGGAPARAGEGNSCLLFLGFFGLSLALHLLTLCCYLELRSELRRERGAESRLGGSGTPGTSGTLSSLGGLDPDSPITSHLGQPSPKQQPLEPGEAALHSDSQDGHQMALLNFFFPDEKPYSEEESRRVRRNKRSKSNEGADGPVKNKKKGKKAGPPGPNGPPGPPGPPGPQGPPGIPGIPGIPGTTVMGPPGPPGPPGPQGPPGLQGPSGAADKAGTRENQPAVVHLQGQGSAIQVKNGGVLNDWSRITMNPKVFKLHPRSGELEVLVDGTYFIYSQVYYINFTDFASYEVVVDEKPFLQCTRSIETGKTNYNTCYTAGVCLLKARQKIAVKMVHADISINMSKHTTFFGAIRLGEAPAS

SEQ ID NO: 21957 - DNA, 1161 bp, Artificial Sequence
  derived and/or modified sequence
atgggctaccccgaggtggagagaagagagctgctgcccgccgccgcccccagagagagaggcagccagggctgcggctgcggcggcgcccccgccagagccggcgagggcaacagctgcctgctgttcctgggcttcttcggcctgagcctggccctgcacctgctgaccctgtgctgctacctggagctgagaagcgagctgagaagagagagaggcgccgagagcagactgggcggcagcggcacccccggcaccagcggcaccctgagcagcctgggcggcctggaccccgacagccccatcaccagccacctgggccagcccagccccaagcagcagcccctggagcccggcgaggccgccctgcacagcgacagccaggacggccaccagatggccctgctgaacttcttcttccccgacgagaagccctacagcgaggaggagagcagaagagtgagaagaaacaagagaagcaagagcaacgagggcgccgacggccccgtgaagaacaagaagaagggcaagaaggccggcccccccggccccaacggcccccccggcccccccggcccccccggcccccagggcccccccggcatccccggcatccccggcatccccggcaccaccgtgatgggcccccccggcccccccggcccccccggcccccagggcccccccggcctgcagggccccagcggcgccgccgacaaggccggcaccagagagaaccagcccgccgtggtgcacctgcagggccagggcagcgccatccaggtgaagaacggcggcgtgctgaacgactggagcagaatcaccatgaaccccaaggtgttcaagctgcaccccagaagcggcgagctggaggtgctggtggacggcacctacttcatctacagccaggtgtactacatcaacttcaccgacttcgccagctacgaggtggtggtggacgagaagcccttcctgcagtgcaccagaagcatcgagaccggcaagaccaactacaacacctgctacaccgccggcgtgtgcctgctgaaggccagacagaagatcgccgtgaagatggtgcacgccgacatcagcatcaacatgagcaagcacaccaccttcttcggcgccatcagactgggcgaggcccccgccagctag

SEQ ID NO: 21958 - DNA, 1161 bp, Artificial Sequence
  derived and/or modified sequence
atgggatatcctgaagtggaacgtagagagctgctcccggccgccgctcccagagagcgggggtcgcagggatgcgggtgcggcggtgcccccgcacgcgccggcgagggaaattcctgcttattattcctcgggttcttcggtttaagtctcgccttgcatctccttaccttgtgctgctatttagagctgaggtctgaactgaggagggaaaggggcgcggaatcacgcttgggaggatctggaactcccggaacctcagggactctatcctccctgggcggacttgatccagacagcccaataaccagccaccttggccagccaagccctaaacagcagcccctggagccaggcgaagcagctttacacagcgatagtcaagacggacatcagatggccttgctgaattttttcttccccgacgagaagccatactccgaggaggaatctcgtagggtccggagaaataagcgctctaagtctaacgaaggggcagacggccccgtcaaaaacaagaaaaaaggaaagaaggccgggccaccagggcccaacggcccccctggcccaccaggtccccctgggccccaggggccacctggaatccccgggattccaggaatccccggcacaacagtgatgggccccccagggccccctggtcccccgggcccccagggtccaccaggcctccaggggccgagcggagcagcggataaagccggtacgcgagagaaccagcctgctgtggtccacttgcagggccagggcagcgctatccaagtgaagaatgggggggtacttaacgactggtctcgcattaccatgaatcccaaggtttttaagttgcacccaaggtccggtgagttggaggtcctcgtggacggaacgtattttatctatagtcaggtgtactatatcaactttaccgactttgccagctatgaagtggtggtcgatgagaaaccgtttctgcaatgcacgcggtccatcgagactggaaaaaccaattataatacatgttacactgctggtgtttgcctgttaaaggcacgacagaaaatagctgtgaagatggtgcacgctgacataagcataaacatgagtaaacacaccaccttttttggagcgattaggctcggcgaagctcccgcttcctag

SEQ ID NO: 21959 - DNA, 1161 bp, Artificial Sequence
  derived and/or modified sequence
atgggctacccagaggtggagcggcgggagctgctgcctgctgctgccccccgggagcggggcagccagggctgcggctgcggcggggccccagcccgggccggggagggcaacagctgcctgctcttcctgggcttcttcggcctgagcctggccctgcacctgctgaccctgtgctgctacctggagctgcggtctgagctgcggcgggagagaggagctgagagccggctgggcggcagcggcaccccaggcaccagcggcaccctgagcagcctgggcggcctggaccctgacagccccatcaccagccacctgggccagcccagccccaagcagcagcccctggagcccggggaggccgccctgcacagcgacagccaggacggccaccagatggccctgctgaacttcttcttcccagatgagaagccctacagcgaggaggagagccggcgggtgagaagaaacaagaggagcaagagcaatgaaggagcagatggccctgtgaagaacaagaagaagggcaagaaggccggccccccaggccccaatggacctcctggccccccaggccccccaggcccccagggccccccaggcatccctggcatccctggcatccctggcaccaccgtgatgggccccccaggccccccaggccccccaggcccccagggccccccaggcctgcagggccccagcggggctgctgacaaggccggcacccgggagaaccagcctgctgtggtgcacctgcagggccagggcagcgccatccaggtgaagaatggaggagtgctgaatgactggagccgcatcaccatgaaccccaaggtgttcaagctgcaccccaggtctggagagctggaggtgctggtggatggcacctacttcatctacagccaggtgtactacatcaacttcacagactttgccagctatgaggtggtggtggatgagaagcccttcctgcagtgcaccaggagcattgaaacaggcaagaccaactacaacacctgctacacagctggggtgtgcctgctgaaggcccggcagaagattgctgtgaagatggtgcacgccgacatcagcatcaacatgagcaagcacaccaccttctttggagccatccggctgggggaggccccagccagctag

SEQ ID NO: 21960 - DNA, 1381 bp, Artificial Sequence
  derived and/or modified sequence
ttcccacccctcggagtagagctgcacatgcggctgctccctgctccgtcccgcccagccactgtcgcgcaggaacgggtccctgcagcccccagccgatggcaggacagtagccgcctgtcagaggtcgtgaacggctgaggcagacgcagcggctcccgggcctcaagagagtgggtgtctccggaggccatgggctacccggaggtggagcgcagggaactcctgcctgcagcagcgccgcgggagcgagggagccagggctgcgggtgtggcggggcccctgcccgggcgggcgaagggaacagctgcctgctcttcctgggtttctttggcctctcgctggccctccacctgctgacgttgtgctgctacctagagttgcgctcggagttgcggcgggaacgtggagccgagtcccgccttggcggctcgggcacccctggcacctctggcaccctaagcagcctcggtggcctcgaccctgacagccccatcaccagtcaccttgggcagccgtcacctaagcagcagccattggaaccgggagaagccgcactccactctgactcccaggacgggcaccagatggccctattgaatttcttcttccctgatgaaaagccatactctgaagaagaaagtaggcgtgttcgccgcaataaaagaagcaaaagcaatgaaggagcagatggcccagttaaaaacaagaaaaagggaaagaaagcaggacctcctggacccaatggccctccaggacccccaggacctccaggaccccagggacccccaggaattccagggattcctggaattccaggaacaactgttatgggaccacctggtcctccaggtcctcctggtcctcaaggaccccctggcctccagggaccttctggtgctgctgataaagctggaactcgagaaaaccagccagctgtggtgcatctacagggccaagggtcagcaattcaagtcaagaatggtggagtgctcaatgactggtctcgcatcactatgaaccccaaggtgtttaagctacatccccgcagcggggagctggaggtactggtggacggcacctacttcatctatagtcaggtatactacatcaacttcactgactttgccagctatgaggtggtggtggatgagaagcccttcctgcagtgcacacgcagcatcgagacgggcaagaccaactacaacacttgctataccgcaggcgtctgcctcctcaaggcccggcagaagatcgccgtcaagatggtgcacgctgacatctccatcaacatgagcaagcacaccacgttctttggggccatcaggctgggtgaagcccctgcatcctagattccccccattttgcctctgtccgtgc

SEQ ID NO: 21961 - DNA, 1161 bp, Artificial Sequence
  derived and/or modified sequence
atgggctaccccgaggtggagcggcgggagctgctgcccgccgccgcaccacgtgaacggggaagtcaggggtgcgggtgtggaggtgctcctgcccgggcgggcgagggcaatagctgtttacttttccttggcttctttgggctgtctttggccctccatctgctgactctctgctgctatctggaactaagatccgagttgcgcagggagcggggagctgagtccagactcggcggatccggaactcccggcacctccgggactctcagctccctgggcggcttggatccggatagcccaatcacgtctcatctggggcagcctagcccaaaacagcagcctctcgaacctggggaggcagcattgcattccgatagccaagatgggcatcagatggcgttacttaatttttttttccccgacgagaagccatattccgaggaagagtctcggcgagtgcgtcgaaacaaacgctcaaagagcaacgagggtgctgatgggcctgttaaaaacaaaaaaaaagggaaaaaagctggacccccaggccccaatggccctcccgggccccccgggccgcccggtccacagggaccacccggaattcccggtattcctgggatacccggaacaacagtgatgggtcctcccgggccacccggcccgccagggccacagggccccccaggactccaggggccttccggagccgctgataaggccggaacccgggaaaatcaaccagcggtggtgcacctgcagggccaggggagtgcaatacaggttaaaaatggtggggtgttaaatgactggtcgaggatcaccatgaaccctaaggtgtttaagcttcacccacgcagcggagagctagaggtgctggttgatggcacttactttatttattcacaggtgtactacatcaacttcacagacttcgcgagctatgaagtggtggtagacgaaaagccattcttgcagtgtactcggagtatcgagactggtaagacaaactataacacatgttacaccgcgggagtgtgcctgctaaaggcccggcagaagatcgctgtcaagatggtacatgctgatatcagcatcaatatgtctaaacataccaccttctttggagccatcaggttgggggaggcgccggcaagctag

SEQ ID NO: 21962 - DNA, 1161 bp, Artificial Sequence
  derived and/or modified sequence
atgggatatccagaagttgagagaagagagctcttacccgcagctgccccaagagagagaggaagccaggggtgtgggtgcgggggagcgcctgcacgggcaggagaaggcaattcctgtctcctgttcctgggtttcttcgggctgtcccttgccctgcacctgctgaccttatgctgttacctcgaactccggtctgaacttaggagggagcggggagcagagagtaggctgggcggttccggcacgcccggtactagcggtaccctctctagccttgggggtctagatcccgactctcccatcacctcccatctgggacaaccgagcccaaaacaacagcctctcgagcctggcgaggccgctctccattccgactctcaggatggacaccagatggcactgctaaatttctttttccctgacgagaagccatattcagaggaagaatccaggagagttcggcgaaataaacggagtaagtctaatgagggggctgacggtccagtgaagaacaaaaagaagggcaagaaggccggaccacccggtcctaatggaccccctggccctcccggacctcctgggcctcagggcccaccaggcattcccggaattcccggtattcctggaacaacggtcatgggccctcctgggcctcccggtccaccagggccacagggcccacctgggctgcaaggacctagtggagctgccgataaggcgggaacccgagaaaaccaaccggcagtggtgcatctgcaggggcagggatctgctattcaagtaaaaaatgggggtgttctcaatgactggagtaggatcacaatgaatcctaaggtatttaaattacacccacgctcaggtgaactggaagtgttagttgatggtacttactttatctacagccaggtgtactacatcaactttacggactttgcctcctacgaggttgtggtcgacgaaaagccctttctacagtgtacaaggagcatcgaaacaggcaagacaaactataacacctgttataccgctggagtgtgtcttctgaaggcacgtcagaaaatcgccgttaagatggtccatgcagatatttcaatcaacatgtcaaagcacactacattctttggcgcaatcaggctgggcgaagccccagctagttag

SEQ ID NO: 21963 - DNA, 1161 bp, Artificial Sequence
  derived and/or modified sequence
atgggttaccctgaagtcgaacgtagagagctgctgccagctgccgcgccccgcgagagaggatcccagggctgcgggtgcggaggagcgcccgctagggccggagaagggaactcctgcttgctgtttctcgggttctttggactgtcgcttgctctccacttacttactttatgttgttacttggagctgaggagcgaactgagacgggagcggggcgctgagagcaggctgggcggctccggtacacctggcacaagcggcaccctgtcctcactaggaggtctggatcccgattctcctattacttcccacctcgggcagccatctcccaagcagcagcctctggagcccggagaagctgccctccattccgacagccaggatgggcaccagatggcactccttaacttcttttttccagatgagaagccctactctgaggaagaatcccgacgggtccgaagaaacaagagaagcaaatctaatgagggagctgatggccccgttaagaataagaaaaagggcaagaaagcaggccctcctggacctaatggcccccctggccctcctggcccccctggtcctcagggccctcccggaataccaggcatccccggcatccccggcaccacagtgatggggccaccgggaccccccggaccaccagggccacagggaccacctggcttacagggtcccagcggggcggccgataaggctgggacgcgtgagaaccagccggcagtcgtgcacttacagggccagggcagcgcaatccaagtgaagaatggcggcgtcctaaacgactggtccagaataacgatgaaccctaaggtcttcaagcttcaccctcgctctggggaactggaagttctcgttgacggtacttactttatttacagccaggtttattatatcaactttacggacttcgcaagttacgaggtcgtcgtcgatgaaaagcccttcctccaatgcacccgatccattgagacgggtaaaacaaattacaacacctgctataccgctggggtttgcttactgaaagcaagacaaaaaatcgctgttaagatggtgcatgccgatatttccatcaacatgtctaagcacactacattttttggcgccatcagactgggagaggcacccgccagctag

SEQ ID NO: 21964 - DNA, 1161 bp, Artificial Sequence
  derived and/or modified sequence
atgggttaccctgaagtggagaggagggaactgctgcctgccgccgcccctcgggagagagggagccagggatgcggatgtggcggcgcacctgcgcgggctggtgaggggaattcgtgccttctcttcctgggctttttcggcctatctttggcactacatcttctgactttgtgctgttacctcgagctccgctccgaactaagaagagagagaggggccgagtcacgcctaggcggctcaggtaccccaggtacgtccggcacattatccagcttgggaggactcgatcccgattccccgatcaccagtcacctgggccagccttcccctaagcaacaacctctcgagccaggggaagctgccctacacagtgatagtcaggacgggcatcaaatggctctattgaattttttctttcccgatgaaaagccctattccgaggaagagtcccggcgcgtgaggagaaacaagaggagcaaatcaaacgaaggtgctgacgggcctgtcaagaacaagaaaaaagggaagaaagccggaccacccgggcctaacggaccacccggaccgcctggaccaccgggacctcagggaccaccaggaattccaggaattcccggcatcccaggcactaccgtgatgggaccgcctggaccacccggtcctcccgggcctcagggccctcccggtttgcagggcccatcaggagcagcagacaaagcaggtaccagagagaaccagcccgcagtggtacacctgcagggacaaggatcagccatacaagttaagaatgggggggtgctgaacgattggagtcggattacaatgaaccccaaggtgtttaagctgcacccgcgctcaggggaactggaagtgctggtggacggaacgtactttatctattctcaagtctattatataaatttcactgattttgctagctatgaagtggttgtcgatgaaaaacctttcctgcagtgcactaggagtatcgaaacaggaaaaacaaactataatacatgttacacagccggcgtttgtctccttaaagcgcggcaaaagatagcggttaaaatggttcacgccgacatcagcataaacatgtccaaacacactacctttttcggagctattagactaggggaggcccccgcatcatag

SEQ ID NO: 21965 - RNA, 1161 nt, Artificial Sequence
  derived and/or modified sequence
auggguuacccugaagucgaacguagagagcugcugccagcugccgcgccccgcgagagaggaucccagggcugcgggugcggaggagcgcccgcuagggccggagaagggaacuccugcuugcuguuucucggguucuuuggacugucgcuugcucuccacuuacuuacuuuauguuguuacuuggagcugaggagcgaacugagacgggagcggggcgcugagagcaggcugggcggcuccgguacaccuggcacaagcggcacccuguccucacuaggaggucuggaucccgauucuccuauuacuucccaccucgggcagccaucucccaagcagcagccucuggagcccggagaagcugcccuccauuccgacagccaggaugggcaccagauggcacuccuuaacuucuuuuuuccagaugagaagcccuacucugaggaagaaucccgacggguccgaagaaacaagagaagcaaaucuaaugagggagcugauggccccguuaagaauaagaaaaagggcaagaaagcaggcccuccuggaccuaauggccccccuggcccuccuggccccccugguccucagggcccucccggaauaccaggcauccccggcauccccggcaccacagugauggggccaccgggaccccccggaccaccagggccacagggaccaccuggcuuacagggucccagcggggcggccgauaaggcugggacgcgugagaaccagccggcagucgugcacuuacagggccagggcagcgcaauccaagugaagaauggcggcguccuaaacgacugguccagaauaacgaugaacccuaaggucuucaagcuucacccucgcucuggggaacuggaaguucucguugacgguacuuacuuuauuuacagccagguuuauuauaucaacuuuacggacuucgcaaguuacgaggucgucgucgaugaaaagcccuuccuccaaugcacccgauccauugagacggguaaaacaaauuacaacaccugcuauaccgcugggguuugcuuacugaaagcaagacaaaaaaucgcuguuaagauggugcaugccgauauuuccaucaacaugucuaagcacacuacauuuuuuggcgccaucagacugggagaggcacccgccagcuag

SEQ ID NO: 21966 - RNA, 1161 nt, Artificial Sequence
  derived and/or modified sequence
auggguuacccugaaguggagaggagggaacugcugccugccgccgccccucgggagagagggagccagggaugcggauguggcggcgcaccugcgcgggcuggugaggggaauucgugccuucucuuccugggcuuuuucggccuaucuuuggcacuacaucuucugacuuugugcuguuaccucgagcuccgcuccgaacuaagaagagagagaggggccgagucacgccuaggcggcucagguaccccagguacguccggcacauuauccagcuugggaggacucgaucccgauuccccgaucaccagucaccugggccagccuuccccuaagcaacaaccucucgagccaggggaagcugcccuacacagugauagucaggacgggcaucaaauggcucuauugaauuuuuucuuucccgaugaaaagcccuauuccgaggaagagucccggcgcgugaggagaaacaagaggagcaaaucaaacgaaggugcugacgggccugucaagaacaagaaaaaagggaagaaagccggaccacccgggccuaacggaccacccggaccgccuggaccaccgggaccucagggaccaccaggaauuccaggaauucccggcaucccaggcacuaccgugaugggaccgccuggaccacccgguccucccgggccucagggcccucccgguuugcagggcccaucaggagcagcagacaaagcagguaccagagagaaccagcccgcagugguacaccugcagggacaaggaucagccauacaaguuaagaaugggggggugcugaacgauuggagucggauuacaaugaaccccaagguguuuaagcugcacccgcgcucaggggaacuggaagugcugguggacggaacguacuuuaucuauucucaagucuauuauauaaauuucacugauuuugcuagcuaugaagugguugucgaugaaaaaccuuuccugcagugcacuaggaguaucgaaacaggaaaaacaaacuauaauacauguuacacagccggcguuugucuccuuaaagcgcggcaaaagauagcgguuaaaaugguucacgccgacaucagcauaaacauguccaaacacacuaccuuuuucggagcuauuagacuaggggaggcccccgcaucauag

SEQ ID NO: 21967 - protein, 148 aa, Artificial Sequence
  derived and/or modified sequence
MGYPEVERRELLPAAAPRERGSQGCGCGGAPARAGEGNSCLLFLGFFGLSLALHLLTLCCYLELRSELRRERGAESRLGGSGTPGTSGTLSSLGGLDPDSPITSHLGQPSPKQQPLEPGEAALHSDSQDGHQDFDYIISFSYGLQGFC

SEQ ID NO: 21968 - DNA, 447 bp, Artificial Sequence
  derived and/or modified sequence
atgggctaccccgaggtggagagaagagagctgctgcccgccgccgcccccagagagagaggcagccagggctgcggctgcggcggcgcccccgccagagccggcgagggcaacagctgcctgctgttcctgggcttcttcggcctgagcctggccctgcacctgctgaccctgtgctgctacctggagctgagaagcgagctgagaagagagagaggcgccgagagcagactgggcggcagcggcacccccggcaccagcggcaccctgagcagcctgggcggcctggaccccgacagccccatcaccagccacctgggccagcccagccccaagcagcagcccctggagcccggcgaggccgccctgcacagcgacagccaggacggccaccaggacttcgactacatcatcagcttcagctacggcctgcagggcttctgctag

SEQ ID NO: 21969 - DNA, 447 bp, Artificial Sequence
  derived and/or modified sequence
atgggctatcctgaggtggaacgcagggagctcctcccggccgcagctcctcgggaacgcggtagccagggatgcggatgcggtggagcgccagctcgagctggtgaaggcaacagttgtctgttatttctggggtttttcggactttcccttgctctgcatctgctgactctttgctgttatcttgagcttcggtccgaacttcgtcgagagcgtggtgctgagagccgcctcggcggtagcggaaccccaggcaccagcggtactctgtccagcttgggaggcctggatcctgattcccccattacgtcacaccttggacagccaagtccgaagcaacagccattggaaccaggcgaggcggccttgcactccgactcacaagatgggcaccaggactttgattacataatctcattctcatacgggctgcagggcttctgctag

SEQ ID NO: 21970 - DNA, 447 bp, Artificial Sequence
  derived and/or modified sequence
atggggtatcccgaagttgaaagaagagagctcctcccagctgcagccccacgtgagcgcgggagccagggatgtggatgcggcggagcacccgctagagcaggcgaaggtaactcttgtttattgtttctggggttttttggcctgtcactagccctccatctgctgaccctatgctgctatctggaactgcggtcagaactgcgcagggagcggggagctgagtctcgtttgggagggtccggcacaccggggacctccgggaccttatcctctctggggggacttgaccccgacagcccaatcacgtcgcatctcggtcaacccagtccaaaacagcagccactagaacccggtgaggctgctctacattccgattcccaagacggccatcaggactttgattacatcatttcattctcctacggattgcagggcttttgctag

SEQ ID NO: 21971 - DNA, 447 bp, Artificial Sequence
  derived and/or modified sequence
atgggctacccagaggtggagcggcgggagctgctgcctgctgctgccccccgggagcggggcagccagggctgcggctgcggcggggccccagcccgggccggggagggcaacagctgcctgctcttcctgggcttcttcggcctgagcctggccctgcacctgctgaccctgtgctgctacctggagctgcggtctgagctgcggcgggagagaggagctgagagccggctgggcggcagcggcaccccaggcaccagcggcaccctgagcagcctgggcggcctggaccctgacagccccatcaccagccacctgggccagcccagccccaagcagcagcccctggagcccggggaggccgccctgcacagcgacagccaggacggccaccaggactttgactacatcatctccttctcctatggcctgcagggcttctgctag

SEQ ID NO: 21972 - DNA, 689 bp, Artificial Sequence
  derived and/or modified sequence
attccctcggcgggccgagcctcccctctctcccgcccctcctcctccctttcccacccctcggagtagagctgcacatgcggctgctccctgctccgtcccgcccagccactgtcgcgcaggaacgggtccctgcagcccccagccgatggcaggacagtagccgcctgtcagaggtcgtgaacggctgaggcagacgcagcggctcccgggcctcaagagagtgggtgtctccggaggccatgggctacccggaggtggagcgcagggaactcctgcctgcagcagcgccgcgggagcgagggagccagggctgcgggtgtggcggggcccctgcccgggcgggcgaagggaacagctgcctgctcttcctgggtttctttggcctctcgctggccctccacctgctgacgttgtgctgctacctagagttgcgctcggagttgcggcgggaacgtggagccgagtcccgccttggcggctcgggcacccctggcacctctggcaccctaagcagcctcggtggcctcgaccctgacagccccatcaccagtcaccttgggcagccgtcacctaagcagcagccattggaaccgggagaagccgcactccactctgactcccaggacgggcaccaggactttgactacatcatttcattctcttatggcctacaaggtttctgctga

SEQ ID NO: 21973 - DNA, 927 bp, Artificial Sequence
  derived and/or modified sequence
attccctcggcgggccgagcctcccctctctcccgcccctcctcctccctttcccacccctcggagtagagctgcacatgcggctgctccctgctccgtcccgcccagccactgtcgcgcaggaacgggtccctgcagcccccagccgatggcaggacagtagccgcctgtcagaggtcgtgaacggctgaggcagacgcagcggctcccgggcctcaagagagtgggtgtctccggaggccatgggctacccggaggtggagcgcagggaactcctgcctgcagcagcgccgcgggagcgagggagccagggctgcgggtgtggcggggcccctgcccgggcgggcgaagggaacagctgcctgctcttcctgggtttctttggcctctcgctggccctccacctgctgacgttgtgctgctacctagagttgcgctcggagttgcggcgggaacgtggagccgagtcccgccttggcggctcgggcacccctggcacctctggcaccctaagcagcctcggtggcctcgaccctgacagccccatcaccagtcaccttgggcagccgtcacctaagcagcagccattggaaccgggagaagccgcactccactctgactcccaggacgggcaccaggactttgactacatcatttcattctcttatggcctacaaggtttctgctgagaaatccactgatattctaatggatattcctttggacaccaatgagttgtgtcttccctctgtccactctcagcaccttcactctgaagatctgttaaaagcacacgagtcgtctcagtccctcagtgggagctgtttcacctggcgtcatctagtcagccatcttcaataataactgttaaatggacatttatatccactgaaaccactaagtgaaataaagatgtgtttaggcaaa

SEQ ID NO: 21974 - DNA, 447 bp, Artificial Sequence
  derived and/or modified sequence
atgggctaccccgaggtggagcggcgggagctgctgcccgccgccgctcccagggagagggggtcccaggggtgcggttgcggcggggcccccgcgagagccggggaaggtaattcgtgcctcctcttcttgggattttttggcctttcccttgcactgcacctgttgactctgtgctgctaccttgaactgcgttctgagttgcgccgcgagagaggcgccgaatctcgacttggcggctctgggacccccggtactagtggcaccctctcaagcctgggcgggctcgaccccgatagtccaattacatctcacctggggcagcccagccctaaacagcaacccttagagcccggtgaagccgcgctgcattctgactcccaggatggccatcaagactttgactacatcatttcctttagctacggtctgcaggggttttgctag

SEQ ID NO: 21975 - DNA, 447 bp, Artificial Sequence
  derived and/or modified sequence
atgggctaccccgaggtggagcggcgggagctgctgcccgccgccgctccaagggagagaggatcacagggatgcggttgcgggggtgctcccgccagggccggcgaggggaatagctgtcttttgttcctggggtttttcggcctctcgctggcgctccatctgttaaccctgtgctgctacctggagttaagaagcgaattgaggcgggagcgcggtgcggagagtagactcgggggatccggcacccctggtacatcaggcacactgtcaagtcttgggggccttgaccccgacagtccaataacatcccacctcgggcagccttcacccaaacaacaaccgctggaacccggcgaagccgcactgcactctgatagccaggatgggcaccaagattttgactatataatttctttttcatacggccttcagggtttctgctag

SEQ ID NO: 21976 - DNA, 447 bp, Artificial Sequence
  derived and/or modified sequence
atggggtatccagaagtggagcgtcgggagttgctcccagcagcagcaccgagggagcggggtagccagggctgcggatgcggcggtgccccagctcgggcaggggagggaaacagctgcctgctgttcctcggattttttggactatcacttgccctccatctgctgacactatgttgctatctggagctcagatccgagctgcgcagagagcgaggcgcagaatccaggctgggagggtcaggcacaccaggtacgagcggaacactatccagtttgggcggactggatcccgactctcctatcaccagccatttaggacagccttcccccaagcagcagccccttgaaccaggggaggccgcacttcatagcgactcccaagacggacaccaggacttcgactatatcatctcctttagttacgggctacaaggcttctgttag

SEQ ID NO: 21977 - DNA, 447 bp, Artificial Sequence
  derived and/or modified sequence
atgggatatcctgaggtagagcggagggaattactgccggctgccgcaccccgtgagcgtggctctcaaggttgcggatgtggtggtgccccagcccgagccggagagggaaattcgtgtctgctttttctgggcttctttggcctcagccttgcacttcaccttctgacactttgctgctatctggagttaaggtctgagcttcgtcgggagcgcggtgccgaaagccgactaggtggcagcggcactcctggcacctccggcaccttgtcttctcttgggggtttggatcctgattcaccaattacaagccacttgggccagccctcccccaaacagcagccattagaacccggtgaggcagcgcttcactcggatagtcaagatggacaccaagacttcgactatataatttctttctcctatggcctccagggcttctgttag

SEQ ID NO: 21978 - DNA, 447 bp, Artificial Sequence
  derived and/or modified sequence
atgggatatccagaggtggaaagacgagagcttctccccgccgctgctccaagggaaagagggagccaaggatgcggttgtggaggagcacctgctagggcgggagagggaaactcttgcctgctattcttaggcttttttggactgagcctggctctccatctccttacgttgtgctgctacctcgagttgagatctgaactccgtagagaacgcggcgcagaaagccgcttgggcggatcgggtacgcccggtacatcaggcactctttcctccctgggtggtctcgatcccgactccccaattacatcacatcttggccagcccagtccaaagcagcagccactggaacctggagaggctgccctgcacagtgactctcaggacggacatcaagacttcgattacatcatctccttcagctacggactgcaagggttttgctag

SEQ ID NO: 21979 - DNA, 447 bp, Artificial Sequence
  derived and/or modified sequence
atgggatatcctgaagttgagagacgggaacttcttccagcagcagcaccgagagagagaggatcccaaggctgcggctgtgggggagcaccggcacgggccggagaggggaatagctgcctactgtttttagggttcttcgggttgagtctggcccttcacctgttaacactgtgctgctacctggaactgagatcggaattaagacgggaaaggggagccgagagcagactcggtggatcagggacccctggaaccagcggcaccttatcgtcgttaggcggcctggatccagattctcctattacaagccacctgggacagcccagtccgaaacagcagccactggaacccggagaggccgcattacattccgattcccaggatggtcatcaggacttcgattacatcatttctttcagctacggattacaggggttttgctag

SEQ ID NO: 21980 - DNA, 447 bp, Artificial Sequence
  derived and/or modified sequence
atgggttacccagaagtggagcggagagagctgttacctgctgctgcccctcgcgaaagaggatctcagggttgtggatgcgggggagcacctgccagagctggcgagggaaattcttgtttgttgtttctgggcttcttcggtctgtctttggcgttgcaccttcttaccctgtgttgctacctggagttgagatctgagctaaggcgagaaagaggagccgaatctaggctaggtggcagtggcactcctggtacctcaggcaccctgtcgagcctcggcggtctcgatccagactctcccatcacctctcacctgggccagccatctcctaagcagcagccactagaaccgggggaagcagcactacactcagattcgcaagacggtcaccaggacttcgattatattatatcattctcgtatggtttacaaggcttctgttag

SEQ ID NO: 21981 - DNA, 447 bp, Artificial Sequence
  derived and/or modified sequence
atgggatatcctgaagttgagagacgggaacttcttccagcagcagcaccgagagagagaggatcccaaggctgcggctgtgggggagcaccggcacgggccggagaggggaatagctgcctactgtttttagggttcttcgggttgagtctggcccttcacctgttaacactgtgctgctacctggaactgagatcggaattaagacgggaaaggggagccgagagcagactcggtggatcagggacccctggaaccagcggcaccttatcgtcgttaggcggcctggatccagattctccaatcaccagtcatcttggacagccttcacccaaacagcaaccactggaaccaggcgaggccgcattacattcagatagccaggatgggcaccaggattttgactacattatttcattttcatacgggttgcaagggttttgctag

SEQ ID NO: 21982 - RNA, 447 nt, Artificial Sequence
  derived and/or modified sequence
augggauauccagagguggaaagacgagagcuucuccccgccgcugcuccaagggaaagagggagccaaggaugcgguuguggaggagcaccugcuagggcgggagagggaaacucuugccugcuauucuuaggcuuuuuuggacugagccuggcucuccaucuccuuacguugugcugcuaccucgaguugagaucugaacuccguagagaacgcggcgcagaaagccgcuugggcggaucggguacgcccgguacaucaggcacucuuuccucccuggguggucucgaucccgacuccccaauuacaucacaucuuggccagcccaguccaaagcagcagccacuggaaccuggagaggcugcccugcacagugacucucaggacggacaucaagacuucgauuacaucaucuccuucagcuacggacugcaaggguuuugcuag

SEQ ID NO: 21983 - RNA, 447 nt, Artificial Sequence
  derived and/or modified sequence
augggauauccugaaguugagagacgggaacuucuuccagcagcagcaccgagagagagaggaucccaaggcugcggcugugggggagcaccggcacgggccggagaggggaauagcugccuacuguuuuuaggguucuucggguugagucuggcccuucaccuguuaacacugugcugcuaccuggaacugagaucggaauuaagacgggaaaggggagccgagagcagacucgguggaucagggaccccuggaaccagcggcaccuuaucgucguuaggcggccuggauccagauucuccuauuacaagccaccugggacagcccaguccgaaacagcagccacuggaacccggagaggccgcauuacauuccgauucccaggauggucaucaggacuucgauuacaucauuucuuucagcuacggauuacagggguuuugcuag

SEQ ID NO: 21984 - RNA, 447 nt, Artificial Sequence
  derived and/or modified sequence
auggguuacccagaaguggagcggagagagcuguuaccugcugcugccccucgcgaaagaggaucucaggguuguggaugcgggggagcaccugccagagcuggcgagggaaauucuuguuuguuguuucugggcuucuucggucugucuuuggcguugcaccuucuuacccuguguugcuaccuggaguugagaucugagcuaaggcgagaaagaggagccgaaucuaggcuagguggcaguggcacuccugguaccucaggcacccugucgagccucggcggucucgauccagacucucccaucaccucucaccugggccagccaucuccuaagcagcagccacuagaaccgggggaagcagcacuacacucagauucgcaagacggucaccaggacuucgauuauauuauaucauucucguaugguuuacaaggcuucuguuag

SEQ ID NO: 21985 - RNA, 447 nt, Artificial Sequence
  derived and/or modified sequence
augggauauccugaaguugagagacgggaacuucuuccagcagcagcaccgagagagagaggaucccaaggcugcggcugugggggagcaccggcacgggccggagaggggaauagcugccuacuguuuuuaggguucuucggguugagucuggcccuucaccuguuaacacugugcugcuaccuggaacugagaucggaauuaagacgggaaaggggagccgagagcagacucgguggaucagggaccccuggaaccagcggcaccuuaucgucguuaggcggccuggauccagauucuccaaucaccagucaucuuggacagccuucacccaaacagcaaccacuggaaccaggcgaggccgcauuacauucagauagccaggaugggcaccaggauuuugacuacauuauuucauuuucauacggguugcaaggguuuugcuag

SEQ ID NO: 21986 - DNA, 5418 bp, Artificial Sequence
  derived and/or modified sequence
atggccgggcccagaccctcgccatgggctcggctgctcctggccgctttgatcagcgtctccctcagtggcactctggctaatcgctgtaaaaaagcccccgttaaatcatgtaccgagtgcgtccgggtggataaggactgcgcgtattgtaccgacgaaatgtttcgagatcgcaggtgtaatacgcaagctgaactgctagctgccggctgccaaagagagtccatcgtggtcatggaaagttcttttcagattaccgaggaaacgcagatcgacacaactctcagaagaagtcagatgtccccccagggattacgggttagactccggcctggagaagagcggcatttcgagctggaggtattcgaaccattagagtcaccggtcgacctgtatatcctcatggacttttccaattccatgtcagacgatcttgataatctcaagaagatgggacagaaccttgctagagtgttatcccaactgacatccgattataccatcgggttcggaaagttcgtcgataaagttagtgtgccccaaaccgatatgcggcctgaaaaacttaaagaaccttggccaaactcagatccaccttttagctttaagaacgttataagtctcacagaggacgtggacgaattccgtaacaagctgcagggcgaaagaatctcgggaaacctggacgcccccgagggcgggttcgacgccatcctgcagaccgcagtctgcacccgcgacatcggatggagacctgatagcacccacctgttggtattttctacggagagcgctttccattatgaagctgacggtgctaatgtgttggctggaattatgtctcgtaatgatgaaaggtgtcacttggacaccactgggacttacactcaatataggacccaggactatccatcagtccctactctggtgcgtctcctcgccaagcataacatcatacccatttttgcagtgaccaactatagctattcgtattatgagaagcttcatacctacttcccggtgtccagtctgggggtacttcaagaggactcctctaatattgtggaactgctggaggaagcattcaacaggataaggtctaatcttgacattcgcgccttggattcgccgcgaggcttaaggacggaggtgacctctaaaatgttccaaaagacaaggactggatctttccacattcgtaggggggaagtcgggatatatcaggttcaactgcgcgcactggagcatgttgacggaacacatgtatgccagctccccgaggaccaaaaaggaaacattcatctcaagccttcctttagtgacgggctcaaaatggatgctggcattatttgtgatgtgtgtacctgtgaattgcagaaagaggttcgatccgctcgctgttcatttaacggagactttgtgtgtggacagtgtgtgtgctccgagggctggtctggccaaacctgtaactgctcaactggatcactctccgacattcagccgtgtcttagagagggtgaggacaaaccatgctctggaagaggcgagtgtcagtgcgggcattgcgtgtgctacggcgaaggaaggtacgaaggacagttctgcgagtatgacaatttccagtgccccagaacctctgggttcctgtgtaacgaccgcggtcgctgtagtatggggcagtgtgtgtgcgagccgggctggaccggcccctcctgcgactgcccccttagtaatgctacgtgtatagactctaacggcggtatctgtaacggacgaggacactgcgagtgtgggcggtgtcactgccatcagcaatctctgtatacagacactatctgtgagatcaactactcagccatccatcctggtctgtgcgaagacctacggagctgtgtccagtgccaggcatggggtaccggggagaagaaaggaagaacttgcgaagagtgcaactttaaggtaaagatggtagacgagctcaagcgcgctgaggaggtcgtggttcggtgtagtttccgagatgaagacgatgattgtacttactcatacaccatggagggtgacggcgctcccggtcctaatagcactgtactagtgcacaagaaaaaagactgcccccctgggtcattctggtggctaatccctcttctgctcctgttgttgcctctgcttgctctactcctccttctgtgttggaaatactgcgcatgttgtaaagcctgcttagcccttctcccatgctgcaatcggggccacatggtcggctttaaagaagatcactatatgctgcgtgagaaccttatggcctctgaccatctcgacacgcccatgctgcgtagtggaaatttaaaaggcagggacgtcgtgcggtggaaagtcaccaacaacatgcagcggcctggattcgccactcacgccgcaagcatcaatccaacagagctggtgccttatggcttgagtttgcggttggcgaggctgtgcactgaaaatctcctgaagccggacactcgggagtgtgcacagctccgacaggaagtcgaggaaaatttaaatgaggtataccggcagatatctggtgtccataaacttcaacagaccaaattccgacagcagccaaacgcgggcaagaaacaggaccacaccatagttgacacagtcctgatggctccaaggtccgcaaagcctgctttgcttaagctaacggaaaagcaggttgaacagcgagcctttcatgatcttaaggtcgcccccggctattacactctgaccgctgaccaggacgcacgcgggatggtcgagttccaagagggagtcgagctggtggatgtgcgtgtgcctctgtttatcagacctgaggatgacgacgaaaagcagctcctggtagaggccattgatgttccagccggcaccgccactctgggcagacgcctggttaacataacgataatcaaggagcaggcccgcgacgttgtgagcttcgagcagcccgagttctccgtcagtagaggcgaccaggttgcccgcattccagtgatcaggagggttctcgatggaggtaaatcccaggtctcatacagaactcaagacgggacggctcaagggaatcgggactatatcccagtagagggggaattgttgttccagccgggcgaagcctggaaggagctgcaggtaaaactgctggagctccaagaagtggacagcctgctacgcggacgccaggtgagacgttttcacgtccagctgagcaaccccaagtttggcgcccacctgggacaaccacactcgaccacgataattatcagggatccagacgagctggacaggtctttcaccagtcagatgctatcttcacagccccctccccacggcgatctgggcgcccctcagaatcccaatgcaaaggccgctgggagccgaaaaattcattttaactggctcccaccttccgggaaacctatgggctacagagtgaagtactggatccaaggagacagcgaatcagaagctcacctgttggactccaaagtaccttctgtggaattgactaacctttatccctattgtgattatgagatgaaagtgtgtgcatacggcgcccagggagagggaccctactcgtcactggtgtcatgtaggacgcatcaagaggtgccctccgagcccgggcgactggcctttaatgtggtctctagcactgtgacccaacttagttgggcagagcctgctgagacaaacggcgagatcactgcctatgaggtgtgctacgggttagtaaatgacgataaccgaccgattggcccaatgaagaaggtactcgttgacaatcctaaaaaccgcatgctgctcatcgagaaccttagggagtcccagccttatagatatactgtcaaagcccggaacggcgcgggatggggccctgagcgcgaagctatcataaacctcgccacacagccaaagcggcctatgagcatacctattatccccgacatccccatcgtggacgcccagagtggcgaagattacgatagttttcttatgtactctgacgacgtacttcggagcccctcgggaagccagaggccatctgtgtcagacgatacggaacatctggtgaatgggcggatggacttcgcctttccagggagcaccaattccctccacaggatgacaaccacttctgccgcggcttacgggactcacttgtccccacacgtgcctcaccgggtcttgtccacgtcgtctactcttaccagagactacaattccctcacccgaagcgaacacagccatagcacaaccctcccaagagactattcgactcttacctccgtttcctcccatgggttgccacccatctgggagcacggcaggtctcggctgcctctctcttgggccctcggttctaggtcccgagcgcagatgaaaggcttcccaccatctcggggccctcgcgattccatcattctagccggaaggccagccgcccccagttggggcccggatagccgacttacggcgggagtgcccgacacacctacgcgcctggtgttttcagctctgggcccaacctctcttagggtgagttggcaggagcctcgctgcgaacggcctctgcaggggtatagcgtggagtatcagcttctgaatggaggtgagttacacagactaaacatcccaaatccagctcagacaagcgtggttgtggaggatctgttaccgaatcactcctacgtcttcagggttagagcacaatcacaagaaggttggggccgggagagggagggagttatcacaatagaatctcaggtccacccgcagagccctctgtgtcccctgcctggaagcgcttttacgcttagcaccccatccgcacccggccccctggtgttcacagctctatcccctgactcgcttcaactgtcgtgggagcggccgcgtcgtccaaacggcgacatcgtaggctacctggtcacatgcgagatggctcagggcggaggtccagccactgcctttcgcgttgacggcgacagcccagagtctcggctgaccgtaccaggcctgagcgagaatgttccatataaatttaaggtgcaggccaggactaccgaggggttcggaccagaacgggagggtataattacaatcgaatctcaagacggcggaccatttccccagctgggatcacgtgctggactattccagcatcctctacagtccgagtattcatctatcacaactacccacacatcggccaccgaaccttttttggtcgatggactgacactgggtgcccagcacctggaagcaggtgggtcgctgacccggcatgtcacccaagagtttgtgtcccgaactttgaccacgagcggcactttaagcacgcacatggatcaacagtttttccagacatag

SEQ ID NO: 21987 - DNA, 5418 bp, Artificial Sequence
  derived and/or modified sequence
atggcaggtccgaggccttccccttgggccaggcttctcctggctgccctcatatctgtcagcctgtccggcaccttagcaaacaggtgtaaaaaggctcccgttaagagctgtaccgagtgcgtacgcgtggacaaagactgcgcttattgtactgacgagatgtttcgggaccggcgctgtaatactcaggcagagcttctagcagcagggtgtcaacgggagtctattgtggtgatggaaagcagcttccagatcaccgaagagactcagattgacacaacacttcgacgaagccagatgtctccacaaggacttcgggtgcgtcttaggcctggcgaagaacgacatttcgagctggaagttttcgaaccactggaaagtccagtagatttgtacatcctgatggattttagtaatagtatgtcagacgacttagataacttgaagaaaatggggcagaacctagcgagggttttgtcccaactgacatcagactacacgattggtttcggaaagttcgttgataaggttagtgttcctcaaaccgatatgaggcctgaaaagctgaaagagccgtggccgaattctgatccacccttcagcttcaagaacgtgataagcctgacagaggatgtggacgaattccgaaacaaactgcagggagaacgcatttctggcaaccttgatgcacctgaaggtggctttgacgctatcttacagacagcagtatgtacaagggatatcggatggaggccagatagtactcatctgctggtcttcagcaccgagtcagctttccactacgaggcagacggggccaacgtgctggctggcatcatgagtagaaatgatgagcgctgccacctggacaccaccgggacctacacccaataccggactcaggactaccccagcgtgcccacactggtgagactgctggctaaacataatataattcccatctttgcagtgaccaactattcttattcatattacgagaagctgcacacctattttcctgtttcttctctcggggtgctacaggaagatagcagcaacatcgtcgagttgctcgaggaggcgttcaatagaatccggtccaacctggacatcagggcgcttgactcaccaagagggctgagaactgaggtgacaagcaagatgtttcagaagacccggaccgggtccttccacattcggcggggcgaggtgggaatctaccaggtgcaattacgagccctggaacatgtcgacggaacacatgtgtgccaattaccggaggaccagaagggcaacatccaccttaaaccctcctttagcgatggtctgaaaatggacgccggaattatttgcgacgtgtgcacctgcgagctccaaaaagaggttcgcagtgcccgatgctcatttaatggcgattttgtatgcggacagtgcgtatgctccgaaggctggagcgggcagacatgtaactgctcaaccgggtctctgtcagacatccagccatgcctgagagaaggtgaagataaaccctgctcaggccggggagagtgccaatgtggacactgtgtttgctacggagagggccgatatgaaggacaattctgcgaatatgataattttcagtgcccccgcacaagtggctttctgtgcaacgaccgcggccgttgcagcatgggccagtgcgtgtgcgagcccggatggaccggcccttcctgtgactgtcccctgtccaatgcaacttgtatcgattctaatgggggtatctgcaatggcaggggtcattgcgagtgtgggagatgtcactgccatcaacagtcattgtacacagacacaatttgcgagatcaattatagcgccattcacccaggcctgtgcgaagatctgaggtcctgtgttcagtgtcaggcttgggggaccggcgagaagaaaggaaggacctgcgaggaatgcaacttcaaggtcaagatggtggacgaactgaagagggcagaggaagtggttgttcgttgtagctttagggatgaggacgacgactgcacgtatagttataccatggagggggacggagcccccggacctaacagcactgtcttagtgcacaaaaagaaggattgtccccccggctcattctggtggttaatccccctcctgctactactcctgccccttctggctctgctccttttgttatgctggaagtactgtgcttgctgcaaagcctgtctagcactactgccctgctgtaaccgaggacacatggtgggatttaaagaggatcattatatgttgcgagaaaacctgatggctagtgaccatctcgacacgccgatgcttcgctcagggaatctgaaaggtagggatgtggtgcggtggaaggtcacaaataatatgcagcgacccggctttgccactcacgctgccagcattaaccctacagagcttgtaccttacggactcagtcttcgccttgcacgcctgtgtactgagaatctcctcaagccagacacacgcgagtgcgctcagcttagacaggaagtggaagagaatttgaatgaagtgtaccgccagatctcaggggtccataagcttcagcagacaaagttcaggcaacaacctaatgcgggaaaaaaacaggaccataccatcgttgacactgttctgatggcacctcggtcagctaaaccggccctgctgaaactcaccgagaagcaggttgaacagcgcgcctttcatgatttgaaggttgcaccaggatactacaccctcaccgctgaccaagatgctcggggaatggtggagtttcaagagggcgtggaactggtggacgtacgcgtccctctgtttattaggcctgaggacgatgatgagaaacagctcctcgtcgaagccatcgatgttccagccggtaccgccactttaggtaggcggctggtgaacattacgataatcaaggagcaagctcgggacgttgtgagttttgaacagcctgagttttccgtgtccaggggtgaccaagtggcccgcatcccagttatcagacgagtgctcgacggcggcaagagccaggtttcttataggacgcaggatggtacagcccaggggaaccgggactatataccagttgagggagaacttcttttccaaccaggcgaagcttggaaggagcttcaggtgaaactgctggagttgcaggaggtggattctctcctgcgcggacggcaggtgcggaggttccatgtccaattaagcaatcccaaattcggggctcatctgggacagccacattcaactacaattattatcagagaccccgacgagctcgaccgctcatttactagccagatgctgtctagtcagcctcctccccacggcgatctgggggctccccaaaaccctaacgccaaggcggccggttcccggaaaattcattttaattggttgccaccatcggggaaacctatgggttaccgagtgaagtactggatccagggtgatagcgagagcgaagcgcacctgctggacagtaaggtccctagtgtggaattaaccaacctgtacccctattgcgattacgagatgaaagtatgcgcctatggggcccagggagaggggccatacagctcgctcgtaagctgtcgtacccaccaggaagtcccctccgaacccggacgactggcgtttaatgtcgtttcgtctactgtgacccagctgtcctgggccgaacccgctgaaaccaatggtgaaatcaccgcttatgaagtctgctatggcctggtcaatgatgacaatcgcccgatcggccccatgaaaaaagtgctcgttgacaaccctaagaatcggatgctcctcatcgaaaatttacgtgaaagccagccctaccggtacacagtgaaagcccgtaatggagcagggtgggggccggagagagaggctataataaatttggccactcagcccaaacggccaatgtctatccccatcatcccagatattccaatagtagacgcgcaatctggagaagactacgattcatttctcatgtactcagacgatgttttgaggtcgccttccggttctcagcgccctagcgtgtccgatgacaccgaacaccttgtcaatgggcgcatggattttgcctttcccggctccacgaattcccttcatcgtatgaccactaccagcgccgccgcctatgggacacatctctcacctcatgtaccacaccgggtcctttccacctcctctaccctgacccgtgattacaattcattgacaaggtccgaacattctcactcaaccactttacccagagattatagcacactcactagtgtgagttcccatggattgccacccatctgggaacacgggaggtccagactgcccctgtcttgggcactagggagcagatctagagctcagatgaaggggttccctccgagccggggcccaagggatagtatcatccttgcagggcgaccagctgctcctagctggggcccagatagtcgtcttaccgcaggggtaccagatacacccacaagattagtgttcagcgccctaggtccaacatcactcagggtttcctggcaggaacccaggtgcgaacgtccactgcaagggtacagtgtggaatatcagttactgaatggtggcgaactacataggctaaacataccgaatcccgcacagacctcggtagtcgtcgaagatttactgcccaaccactcctatgtgtttcgcgtgcgtgcccaatctcaggagggctggggccgggaacgggaaggcgtaatcaccattgagagccaagtgcatccccagtccccactgtgtcctctgccagggtccgcctttacactgagtaccccgagcgccccaggcccgctcgtctttaccgcactatccccagatagtttacagttgtcctgggagagaccgagacgcccaaatggtgacatagtcggatatttggtgacctgtgaaatggcacagggaggaggaccagccacagcattccgggtcgacggagattctcccgaaagtcggctgaccgtgcctgggttgagtgaaaatgtgccgtacaaatttaaggtccaagcgagaacaactgaaggttttggacctgaacgagaggggataatcacaatcgagagccaggatggtggtccttttccacaactaggctcccgcgcagggctatttcaacatcctctgcagtccgagtactccagcatcacaactacacacacatcagccaccgagcctttcctggtggatggactgacactgggcgcacaacatttagaggctggcgggtctcttaccagacatgtcacgcaggaatttgtaagtcgcacactgaccacttcaggcaccctttctacccatatggatcagcagtttttccagacatag

SEQ ID NO: 21988 - DNA, 5418 bp, Artificial Sequence
  derived and/or modified sequence
atggccggcccccggcccagcccctgggcccggctgctgctggccgccctgatctctgtgtccctgagcggcaccctggccaaccgctgcaagaaggcccctgtgaagagctgcacagaatgtgtgcgggtggacaaggactgtgcctactgcacagatgagatgttccgggaccggcgctgcaacacccaggccgagctgctggccgccggctgccagcgggagagcatcgtggtgatggagagcagcttccagatcacagaggagacccagattgacaccaccctgcggcgcagccagatgagcccccagggcctgcgggtgcggctgcggcctggagaggagcggcactttgagctggaggtgtttgagcccctggagagccctgtggacctgtacatcctgatggacttcagcaacagcatgtctgatgacctggacaacctgaagaagatgggccagaacctggcccgggtgctgagccagctgaccagtgactacaccatcggctttgggaagtttgtggacaaggtgtctgtgccccagacagacatgaggcctgagaagctgaaggagccctggcccaacagcgacccccccttctccttcaagaatgtcatcagcctgacagaagatgtggatgagttcaggaacaagctgcagggcgagcgcatcagcggcaacctggatgcccctgagggcggctttgatgccatcctgcagacagctgtgtgcacccgggacatcggctggaggccagacagcacccacctgctggtgttcagcacagaaagtgccttccactatgaagcagatggagccaacgtgctggccggcatcatgagcagaaatgatgagcgctgccacctggacaccaccggcacctacacccagtaccgcacccaggactaccccagcgtgcccaccctggtgcggctgctggccaagcacaacatcatccccatctttgctgtgaccaactacagctacagctactatgagaagctgcacacctacttccctgtgagcagcctgggcgtgctgcaggaggacagcagcaacatcgtggagctgctggaggaggccttcaaccgcatccgcagcaacctggacatccgggccctggacagcccccggggcctgaggacagaggtgaccagcaagatgttccagaagaccaggacaggcagcttccacatcagaagaggagaggtgggcatctaccaggtgcagctgcgggccctggagcacgtggatggcacccacgtgtgccagctgcctgaggaccagaagggcaacatccacctgaagcccagcttcagtgatggcctgaagatggatgctggcatcatctgtgatgtgtgcacctgtgagctgcagaaggaggtgcgcagcgcccgctgcagcttcaatggagactttgtgtgtggccagtgtgtgtgcagcgagggctggagcggccagacctgcaactgcagcacaggcagcctgagtgacatccagccctgcctgcgggagggggaggacaagccctgcagcggcagaggagagtgccagtgtggccactgtgtgtgctacggggagggccgctatgagggccagttctgtgaatatgacaacttccagtgccccaggaccagcggcttcctgtgcaatgaccggggccgctgcagcatgggccagtgtgtgtgtgagcccggctggacaggccccagctgtgactgccccctgagcaatgccacctgcatcgacagcaatggaggcatctgcaatggccggggccactgtgaatgtggccgctgccactgccaccagcagagcctgtacacagacaccatctgtgagatcaactacagcgccatccaccctggcctgtgtgaggacctgcggagctgtgtgcagtgccaggcctggggcaccggggagaagaagggccgcacctgtgaggagtgcaacttcaaggtgaagatggtggatgagctgaagagagctgaggaggtggtggtgcgctgcagcttcagagatgaagatgatgactgcacctacagctacaccatggagggagatggagcccctggccccaacagcacagtgctggtgcacaagaagaaggactgccccccaggcagcttctggtggctgatccccctgctgctgctgctgctgcccctgctggccctgctgctgctgctgtgctggaagtactgtgcctgctgcaaggcctgcctggccctgctgccctgctgcaacagaggccacatggtgggcttcaaggaggaccactacatgctgcgggagaacctgatggccagtgaccacctggacacccccatgctgcggagcggcaacctgaagggcagagatgtggtgcgctggaaggtgaccaacaacatgcagaggcctggctttgccacccatgctgccagcatcaaccccacagagctggtgccctacggcctgagcctgcggctggcccggctgtgcacagagaacctgctgaagccagacaccagagaatgtgcccagctgcggcaggaggtggaggagaacctgaatgaggtgtaccggcagatctctggagtgcacaagctgcagcagaccaagttccggcagcagcccaatgccggcaagaagcaggaccacaccatcgtggacacagtgctgatggcccccaggtctgccaagccagccctgctgaagctgacagagaagcaggtggagcagagggccttccatgacctgaaggtggcccctggctactacaccctgacagctgaccaggatgcccggggcatggtggagttccaggagggcgtggagctggtggatgtgcgggtgcccctcttcatccggccagaagatgatgatgagaagcagctgctggtggaggccattgatgtgcctgctggaacagccaccctgggccggcggctggtgaacatcaccatcatcaaggagcaggccagagatgtggtgtcctttgagcagcctgagttctctgtgtccagaggagaccaggtggcccgcatccctgtgatccggcgggtgctggatggcggcaagagccaggtgtcctaccgcacccaggacggcacagcccagggcaacagagactacatccctgtggagggggagctgctcttccagcccggggaggcctggaaggagctgcaggtgaagctgctggagctgcaggaggtggacagcctgctgcggggccggcaggtgcggcgcttccacgtgcagctgagcaaccccaagtttggagcccacctgggccagccccacagcaccaccatcatcatccgggaccctgatgagctggaccgctccttcaccagccagatgctgagcagccagcccccaccccacggggacctgggcgccccccagaaccccaatgccaaggccgccggcagcaggaagatccacttcaactggctgcccccatctgggaagcccatgggctacagagtgaagtactggatccagggcgacagcgagagcgaggcccacctgctggacagcaaggtgcccagcgtggagctgaccaacctgtacccctactgtgactatgagatgaaggtgtgtgcctatggagcccagggcgagggcccctacagcagcctggtgtcctgcaggacccaccaggaggtgcccagcgagcccggccgcctggccttcaacgtggtgagcagcacagtgacccagctgtcctgggccgagcctgctgagaccaatggagagatcacagcctatgaggtgtgctacggcctggtgaatgatgacaaccggcccatcggccccatgaagaaggtgctggtggacaaccccaagaacaggatgctgctgattgagaacctgcgggagagccagccctaccgctacacagtgaaggccagaaatggagctggctggggccctgagcgggaggccatcatcaacctggccacccagcccaagaggcccatgagcatccccatcatcccagacatccccatcgtggatgcccagagcggagaagattatgacagcttcctgatgtacagtgatgatgtgctgcggagccccagcggcagccagaggcccagcgtgtctgatgacacagagcacctggtgaatggccgcatggactttgccttccctggcagcaccaacagcctgcacaggatgaccaccaccagcgctgctgcctacggcacccacctgagcccccacgtgccccaccgggtgctgagcaccagcagcaccctgacccgggactacaacagcctgaccaggtctgagcacagccacagcaccaccctgccccgggactacagcaccctgacctctgtgagcagccacggcctgccccccatctgggagcacggccgcagccggctgcccctgtcctgggccctgggcagccgcagccgggcccagatgaagggcttcccccccagccggggcccccgggacagcatcatcctggccggccggcctgctgcccccagctggggccctgacagccggctgacagctggggtgcctgacacccccacccggctggtgttcagcgccctgggccccaccagcctgcgggtgtcctggcaggagccccgctgtgagcggcccctgcagggctacagcgtggagtaccagctgctgaatggaggagagctgcaccggctgaacatccccaacccagcccagacctctgtggtggtggaggacctgctgcccaaccacagctatgtgttccgggtgcgggcccagagccaggagggctggggccgggagcgggagggcgtcatcaccatcgagagccaggtgcacccccagagccccctgtgccccctgcccggcagcgccttcaccctgagcaccccatctgcccctggccccctggtgttcaccgccctgagcccagacagcctgcagctgtcctgggagcggccccggcggcccaatggagacatcgtgggctacctggtgacctgtgagatggcccagggcggcggccctgccacagccttccgggtggatggagacagccctgagagccggctgactgtgcccggcctgtctgaaaatgtgccctacaagttcaaggtgcaggcccggaccacagagggctttggacctgagcgggagggcatcatcaccatcgagagccaggacggcggccccttcccccagctgggcagccgggccggcctcttccagcaccccctgcagagcgagtacagcagcatcaccaccacccacaccagcgccacagagcccttcctggtggatggcctgaccctgggcgcccagcacctggaggccggcggcagcctgaccaggcatgtgacccaggagtttgtgtccaggaccctgaccaccagcggcaccctgagcacccacatggaccagcagttcttccagacctag

SEQ ID NO: 21989 - DNA, 5418 bp, Artificial Sequence
  derived and/or modified sequence
atggccggcccccggcccagcccctgggcccggctgctgctggccgcattaatttccgtctcactctccgggactctagccaatcgttgtaaaaaagcccctgttaaatcatgcacagagtgtgtcagggtggataaggactgtgcctattgcacagacgaaatgttccgtgaccgccgctgcaacacacaggccgaactgttagcagccggctgccaacgtgagtccatcgtggtgatggagagttcctttcagattaccgaggagacgcagattgacacaaccctgaggcgcagccagatgtcaccccaggggttacgggtccggttgcgtcccggtgaggaaaggcattttgagctcgaggttttcgagccattagaatccccggttgatctgtacatcttgatggacttcagtaactccatgtccgatgacttggataatctaaaaaaaatgggccagaaccttgctagagtgctttctcagctgacttccgattacactatcgggtttggcaaattcgtggacaaagttagcgttccccagacagacatgcgccccgagaagctcaaggagccctggcctaactccgaccctcctttctcttttaagaatgttatctccctgactgaggatgtggatgagtttcggaacaagttgcagggcgaaagaattagcggcaatctggacgcccctgagggcggattcgacgcgatcctacagaccgccgtctgcactcgcgacatcggatggcggcccgattcaactcacttgttggtcttctccacagagagtgctttccactatgaagctgacggggcaaatgttctggcgggtatcatgagtcgcaacgatgaacggtgtcacctcgacacaaccggcacctacacacagtacaggacacaagattatccctcagtgccaaccttggtgcgccttctcgcaaaacataatatcattccgatatttgccgtgacaaactatagctactcctattatgagaaactgcacacttatttccctgtgtcttcactcggcgtgttacaagaagactccagcaatattgtggaattgctggaagaggctttcaatcgcatacgcagcaacctggatatccgggcactcgactctccccggggactgcgtaccgaagttacgagtaagatgttccagaaaacacgcactggcagctttcatatcagaagaggcgaggtaggcatttatcaagtgcagctacgggcattggagcatgtagacggtactcacgtgtgtcagctcccggaagatcaaaaaggcaatattcacttaaagccgtcattttcagatggactgaaaatggacgcggggatcatatgcgatgtgtgtacttgcgagctccagaaggaggtgaggagcgcacgctgtagcttcaacggggattttgtatgtggacagtgcgtgtgtagtgaaggctggtccgggcaaacttgcaattgttctacgggcagcctgtccgacatacaaccttgcttgagagaaggagaggataagccctgctccgggagaggggagtgccagtgcggacactgcgtctgttacggggaggggcggtatgagggtcaattttgtgagtatgacaattttcagtgccctaggacgagtggctttctctgtaacgacaggggccgctgcagtatgggacagtgtgtgtgcgagcctggctggactggccctagctgcgattgtcccctgagcaacgccacatgtatagacagcaacgggggcatctgtaacggccgtggccattgcgaatgtgggagatgccactgccatcagcagtctctttatacggatactatttgcgagatcaactacagtgccatccatcctggtctgtgcgaggatttacgcagttgcgttcagtgccaagcgtgggggactggagaaaaaaagggtagaacatgcgaagagtgcaattttaaggtgaaaatggtagacgagcttaagagggccgaggaggtggtggtgagatgcagcttcagagatgaggacgatgactgtacatattcctacaccatggagggcgatggtgcccctgggcccaactccaccgtcttagtccacaagaaaaaagattgtccccccgggtctttttggtggctgatacccctacttctgttgctcttgccattgttggctcttctgttactgctgtgctggaaatactgtgcttgctgtaaagcatgtctggcactactaccatgttgtaaccgcggccacatggtgggttttaaggaggaccattacatgctgcgagaaaatctgatggccagtgatcacttagacaccccgatgttaagaagtggaaacctgaagggaagggacgtcgtgaggtggaaggtgaccaataacatgcaacggcctggattcgcgacccacgcggccagcattaatcccaccgaactcgtaccctacggtctgtcattgcgactggccagactgtgcaccgagaaccttctcaagcccgatacccgcgagtgtgcccaactgagacaggaggtcgaggagaatctgaacgaggtttacagacagattagtggggtccataaactgcagcagactaagtttaggcagcagccaaacgcagggaaaaagcaggatcacacaattgttgatactgttctcatggctccaagatcggccaagcctgcgctcctcaaactgactgagaaacaagtggagcagcgggcctttcatgatcttaaggtagccccaggctattatacacttaccgcggaccaggatgcgcgaggcatggtggagtttcaggagggcgtcgagctggttgatgtgcgggtgcccctttttattagaccagaggatgatgatgaaaaacagttgttggtagaagccatcgacgtcccagccggaaccgccactttgggccgtcgcctggtgaatatcacaataattaaggaacaagcccgagatgtcgtgtcctttgagcaaccagagttctcagtgtctcgcggcgaccaggttgctaggattcctgttattcggcgcgttttagacggtgggaagtcacaagtatcttacagaacccaagacggtactgctcaaggaaacagggactacataccggtcgagggagaacttctcttccagccaggagaagcttggaaggaactgcaggtaaaactgttggaattacaggaagttgacagccttctacgaggaagacaggtgagaaggttccacgtccagttatccaaccctaagttcggagcacatcttggacagccacattcaacaactatcatcatccgggatccagatgagttggacagaagttttacatcccagatgctgtcgtcacaacctccaccacacggagatcttggtgcacctcagaacccaaatgctaaggcagcagggtcgaggaaaattcactttaactggttgcctccgtccggtaaacccatgggatatcgagtgaaatactggatccaaggcgattccgagtctgaggcgcatctgctggattcaaaggttcctagtgtggagctcactaacctctacccctactgcgattatgagatgaaggtctgtgcctatggcgcacagggggaggggccctatagctccctggtgtcttgtcgaactcaccaggaggtgcctagtgaaccgggaaggctagccttcaatgtggtgtcctcaactgtgactcagctctcctgggccgagcccgccgaaactaatggagaaatcaccgcctatgaggtatgctacggacttgtcaacgacgataacaggccgataggccccatgaagaaggttctggtggacaatccgaaaaatagaatgctgctcattgaaaacctcagagagtctcaaccctatagatacaccgttaaggctagaaacggcgccgggtgggggccagagagggaagcgataatcaacttggcaacccagccaaaacgccccatgtcaatcccgattatccccgatatcccaattgtggacgcccagtcaggagaagactacgattctttcctgatgtattctgatgatgtcttgaggagtcccagtggctctcaaaggcctagcgtatcagatgataccgaacacctcgtgaatgggaggatggatttcgcttttcccggctcaaccaacagcttgcataggatgactactactagcgctgctgcttatggaacacatctaagtcctcatgtgccacaccgggtcctctctacaagctcaacactgacccgtgattacaattcactcacaagaagtgagcactctcacagtaccacactgcctagagactactcaacacttacttcggtttcttcacatggattacctcctatctgggagcatggacggagtcgactacccctcagttgggcattaggctccaggtcccgtgcccaaatgaaaggttttccccccagccgcggcccccgtgattccatcatcctggcaggcaggcctgctgccccctcatggggtcctgactctaggctgactgccggcgtgcctgatacccccactcgtctggtcttctctgccctgggaccgacatctctcagagtgagttggcaagagcccagatgcgagcggcctcttcaaggctactcagttgagtatcaactgctgaatggaggagagctccaccgccttaatatccccaatcccgctcaaactagtgtggttgttgaggacctgttaccaaaccactcgtatgtgtttcgggtgagagctcagagtcaggagggctggggaagagagagggagggcgtgattacgattgagtcccaagtacacccgcaaagcccactgtgcccgctgccagggtctgcctttacactgtccacaccttctgcccccggccctctcgtgttcactgccctgagccctgactcactgcaactcagctgggaaaggccgaggcggccaaacggggacattgtcggctatctagtaacctgcgaaatggcccagggagggggtcccgcgaccgcttttagagtggacggcgactcgcccgagtcaaggctgactgtgcccgggttgagcgagaacgtgccatacaagttcaaagtgcaagcgcgcaccaccgaagggttcggccccgagagagagggcattataaccatcgaatcacaagatgggggtccctttccgcagcttggtagcagggccgggctgttccagcacccactacagtcagaatacagcagtatcaccacgacccacacatccgcaacagagcccttcttggtggacggcctaactttaggggcgcagcatcttgaagccggcggctctctgacccggcatgtgacccaggaattcgtcagccgaaccttgacaacctcaggcacactgtcgacacatatggatcagcagtttttccagacctag

SEQ ID NO: 21990 - DNA, 5418 bp, Artificial Sequence
  derived and/or modified sequence
atggccggcccccggcccagcccctgggcccggctgctgctggccgccctaatcagtgtgtctttgtctgggaccctcgctaatcggtgcaagaaagcgcccgtgaagtcatgcacagagtgcgtaagagttgacaaggattgtgcatattgtaccgacgaaatgtttcgggacaggcggtgtaatacacaggcagaactgctggcagcaggatgccaacgcgagagcatagtcgttatggagtcctcattccagattacagaggaaacacagatagacaccactcttagacgatctcagatgtctccacaaggcctcagggtacggctccgccctggtgaggagcgacactttgaactggaggtgtttgagccccttgagtctcctgtggatttgtacatactgatggacttctccaattccatgtccgatgacctggacaacctgaaaaagatggggcaaaacctggcccgggtgttaagccagctcacttctgactataccatagggtttggaaaatttgtggacaaggttagcgttccacagaccgatatgcgaccggagaagctgaaagaaccatggcccaacagcgatccgcctttctccttcaagaacgttatctccttaactgaggacgtggacgaattccgaaacaaactgcagggtgagagaatttccgggaatctcgatgctcctgaaggcggcttcgatgccatactgcagacggcggtctgtacgagggacataggctggcgccccgattccacgcatctgctggttttctcaaccgagagtgcattccactacgaagcggacggggccaatgtactggctgggatcatgtctcgcaatgacgagcgctgtcacctcgataccacgggaacatatacccagtaccgaactcaagactaccccagtgtgcccacattggtgcgattactggctaaacataatattatacccatctttgctgtgacaaactattcatattcatactacgagaagctccatacgtatttcccagtaagcagcttaggagttttgcaggaggatagttccaatatagtagaattgctggaagaggcatttaacagaatcagatctaatttagacatacgcgccctggattcgccacgaggccttcggaccgaggtaacaagtaagatgtttcagaagacgagaaccggcagctttcacattagacggggagaggttggtatttaccaggtccagctgcgggcgctggaacacgtcgatggaactcacgtatgtcaactgcccgaagatcagaaaggaaatatccacttgaaaccgtccttcagcgatggccttaagatggatgctggcatcatatgtgacgtgtgtacatgcgaactgcaaaaagaagtgcggtctgctagatgctcgttcaatggtgactttgtctgcggacagtgcgtttgcagtgaaggctggagtgggcagacatgtaactgttccacgggatcactgagtgatatccagccatgtcttcgcgaaggcgaggacaagccgtgctccggccggggcgaatgccagtgcggccattgcgtatgttacggggagggcagatacgaagggcaattctgcgaatacgacaacttccagtgccctagaacgagcggatttctttgcaatgacaggggccgctgctctatgggccaatgcgtatgtgagcccggatggaccggaccttcttgcgactgtcctcttagcaacgcaacatgcatagacagcaatggcggcatttgcaatggaaggggccattgcgaatgcggacgttgtcattgtcatcaacaatctctctataccgacaccatttgtgagataaactacagtgccatccacccgggtctctgtgaggatctgcgctcctgcgtgcaatgccaggcctggggtaccggagagaagaaagggcgtacttgcgaggagtgcaatttcaaggtgaaaatggtggacgagcttaagcgcgcagaagaagtggtggttagatgttccttccgcgacgaagacgatgattgtacctactcctataccatggagggagatggggccccaggccccaattcaaccgtgctagtccacaagaaaaaagactgtcctcccgggtcattctggtggctaattcccctgcttttactgctgctgccgctgttagcacttctgctgctcctttgctggaaatactgtgcatgttgtaaggcctgcctcgccctgctaccttgttgcaaccgcgggcacatggtgggattcaaggaggaccattatatgctaagggaaaatttgatggcaagtgaccacctcgatactcctatgcttcgctcaggtaatttaaagggccgcgatgtggttcggtggaaggtgacaaacaatatgcaaaggcccgggttcgccactcacgcggcctctataaacccaaccgaattggtaccatacggactgagcctaaggctggcgcgtctgtgcacagaaaacctactgaaacctgacacccgggagtgcgcacagctgagacaggaggtcgaggaaaatctgaacgaggtgtacagacagatcagcggggtccataagctgcagcagacaaagtttaggcagcaacccaatgccgggaagaagcaggaccacacgattgtggacacagtgctgatggctcctcggtcagccaagccggccctgctgaagctgaccgagaagcaggttgagcaaagagcttttcatgacctcaaggttgcgccgggatactacaccctgaccgctgatcaggacgctcgaggcatggtggagttccaggaaggggtcgagctggtcgacgtgcgggtcccactgttcattcggccagaagacgacgatgagaagcagctactcgtcgaggcgattgatgtgccagccggcaccgcaacgcttggtaggagactggtcaacattaccattattaaagagcaggccagagatgtcgtgtccttcgagcagcccgagttctctgtgtctcgaggggaccaggtggcaaggattcccgtgatccgacgagtactcgacggcggaaagtcacaggtgtcctatagaactcaggacggaactgcccaaggcaaccgggactacatccctgtggagggagagcttctattccagcctggggaggcctggaaggaattgcaagtgaaactgttagagctgcaagaggttgatagccttttgcgcggaaggcaggtgcggcggtttcatgtacagctctctaacccgaagttcggtgcccaccttgggcaaccacattcaacgaccataataattcgtgatccggacgagcttgatcggtcatttacatcacagatgcttagcagccagcctcccccgcacggggacctgggcgctcctcagaatcccaacgccaaggccgccggttccagaaagatccactttaattggctgcccccatcgggcaagccaatgggttatagagtgaaatactggattcagggcgactccgagagcgaagctcacttgctggactctaaggtgccgagcgtggagctgaccaatctctatccctactgcgactacgagatgaaagtgtgtgcctacggcgcccagggggaagggccgtactcctccttagtcagctgccgaacccaccaggaggtgccttctgagcccggccgactggccttcaatgttgtgagcagtacagttacacagctgagctgggctgagcctgccgagaccaacggggagattaccgcatacgaggtgtgctacgggttagttaatgacgataacaggccaatcggccccatgaagaaggtactcgtggacaatccaaaaaaccgaatgctactgatagagaatcttagagagtctcagccatataggtacacggtgaaggcccgcaatggtgccgggtggggcccggagcgcgaagccataattaatctagcaacccaacctaagaggcctatgtcaatcccgattatccccgacattccaattgtcgatgcacagagtggtgaggattacgattcatttctgatgtattcagatgacgttctaaggtcacctagcggttcccagagaccaagtgtatcagacgatactgaacaccttgtgaacggccggatggacttcgcatttcccggctccactaattctttgcaccgaatgacaacaaccagcgcagcagcatacgggacccatctaagtcctcatgtaccccaccgggtactgtctactagctccaccctgaccagggactacaactccctcacgcggtctgaacactcccatagtacgacactgccaagggactactccaccctgacaagcgtatcaagccatggccttccacctatctgggagcacggaagatcacgcctgccgctttcttgggcccttggttctagatcgagggcacagatgaaaggtttccccccctcaaggggccccagagactctatcatactggctggcagaccagcagcaccttcttggggcccagatagccgtttaacggcaggcgtgcccgacacccctactagattagtgttcagtgccctaggccccacaagcctgcgggtctcctggcaggagccccgatgtgaacgcccactgcagggctatagtgtcgaataccagttactgaacggcggtgaactgcatcgcctgaatattcctaacccagcccagacatcagtcgtcgtggaggacctacttcccaatcatagttacgtttttcgggtgagagcacagagccaagagggatggggccgtgagcgggagggagtcataaccatcgagagccaagtacacccccagtcccctctttgtccattgcctgggagcgctttcaccttgtcaacgccctccgcccctgggcccctggtgtttaccgctcttagtccagactcgctccagctgtcttgggaaagaccccggcgcccaaacggagacatcgtgggctacctcgtcacctgcgaaatggcacagggaggcggtcccgccactgcgtttcgtgtcgacggcgattcccctgagagcagactgacggtcccggggttgagcgaaaatgttccatataaatttaaggtgcaggcccgcaccacagaaggttttggccctgaacgagaagggattatcacaattgaatcacaggacggggggcccttccctcagctcggaagcagggctggcctcttccagcacccactgcagtctgaatattcctccatcaccacaacacatacatccgccaccgagcctttcctggtcgatggattaactcttggcgcccagcatctggaggctgggggaagcctaacccgtcatgtgacacaggaattcgtgagccggacgttgacaacttctggcaccctctcaactcacatggatcagcagttcttccagacttag

SEQ ID NO: 21991 - DNA, 5417 bp, Artificial Sequence
  derived and/or modified sequence
atggcaggccctaggcctagcccttgggcacgcttgctcctggcagccctgatcagcgtaagtctctccggtacactcgctaaccggtgcaaaaaagctcccgtgaagagttgcactgagtgcgtgagggtggacaaggattgtgcatattgcaccgacgagatgtttcgggaccggagatgtaacactcaggcagagctgctggccgcaggatgccagagggaatcaattgtagtgatggagtcatcatttcagattacagaggagacacagattgacacaactcttagacgctcacaaatgtctcctcaggggctgagagtccgcctgcgccctggcgaagagcggcactttgagcttgaggtgtttgagccactcgaaagcccagtggatctgtacatactcatggacttcagtaactctatgagtgatgatcttgacaatctcaagaagatgggccagaatctggctcgcgtgctgagtcaactgaccagcgattatacaataggatttggcaagtttgtagacaaggttagcgtgcctcagaccgatatgcggcctgaaaaactcaaagagccctggccaaattctgaccctcccttttcatttaaaaacgtgatcagtctgaccgaagatgttgatgagttccgaaacaaactgcagggggagagaatttctggcaatttggacgctcccgagggcggatttgatgcaatcctgcagactgctgtatgtacaagagacattggatggcgcccagattcgacccacctgctggtgttctctactgagagcgctttccattacgaagcagatggagctaacgtgttggccggtattatgagccggaacgatgagaggtgccacctcgatacaaccgggacctacacacagtatcgcacacaggactacccctccgtccctaccttggtccgactgctggccaaacataatataattccaatctttgccgtgacgaactatagctattcctattacgaaaagctccatacgtacttccccgtcagcagcctcggcgtgctgcaggaagactcaagcaatattgtcgagctccttgaggaggcttttaataggattaggagcaacttagatattcgggcacttgactccccccgtggtttacggacagaagtgacatccaaaatgttccagaaaacgcgcaccggcagctttcacattcgacggggagaggtgggaatctaccaggtgcagctgcgggctttagagcacgtcgacggcacacatgtgtgtcaattgcctgaagaccaaaagggcaacatccacttaaagccaagcttttccgatggtctcaagatggatgccggaattatttgtgatgtgtgcacttgcgaactccagaaggaggtgcgcagtgccaggtgttcctttaatggcgacttcgtgtgtggacagtgcgtgtgttccgagggatggtccggacagacctgcaattgctccacgggaagcctgtccgacatccagccttgtcttcgcgagggtgaggataaaccttgctctggcagaggggaatgtcaatgcggccattgtgtctgctacggggaggggcgatatgaaggacagttctgtgagtacgacaattttcagtgccctaggacctccggtttcctttgtaacgaccgcggtcgctgttccatgggtcaatgtgtgtgtgaaccgggatggacgggaccctcatgtgattgcccactgagtaacgctacgtgcatagactccaacggcggaatttgcaacggtcggggacactgcgagtgtggccgatgtcattgccatcagcagagtttgtacactgatacgatctgtgaaattaattatagtgccatccatccaggactctgtgaggaccttagaagctgcgtgcagtgccaggcttggggaactggtgaaaagaaagggcgtacctgtgaagaatgtaactttaaggtcaaaatggtggacgaactcaaacgggcagaggaagtggtggtgagatgcagtttcagagatgaagatgatgattgcacctatagctatacaatggagggcgacggagcccctggcccaaactcaaccgttctggtacataaaaaaaaggactgcccaccaggttccttctggtggctcatccccctgttgctcctgctcctgccgctcctggcactcctgctgcttttgtgttggaagtactgcgcgtgttgcaaggcatgtctggctctgctcccctgttgtaatcgtggccatatggtggggttcaaagaggaccactacatgctgagagagaatctgatggccagcgaccacttagataccccaatgctacgctcaggaaatcttaaaggaagagacgtagtccggtggaaagtgactaacaatatgcagcgcccaggattcgcaacacacgccgcttcaataaaccctactgagttggtgccttacggactctctctacgactcgcacgcttatgcacggaaaatctcctgaaacctgatacacgggaatgtgcccaactccgacaggaggtcgaagaaaaccttaacgaggtgtataggcagatatccggagtgcacaaactgcagcagaccaagtttagacaacagcctaatgcaggtaagaaacaggaccacaccatcgttgatacagtgctgatggccccacgttctgctaaaccagcgctacttaaactgacagagaaacaagtagaacagcgggcatttcacgatttgaaagtggcccctgggtactacactcttactgccgatcaagatgcaagagggatggttgagttccaggagggtgtggagctggtggacgtgcgcgtgcctctttttattcgaccggaagacgatgacgagaaacagctgttggtggaagccatcgatgtgccggcaggtactgccacccttggacgtaggttagtcaacattaccattataaaagaacaggcacgggacgttgttagttttgaacagcccgagttctccgtctccaggggtgatcaggtggcaaggattcctgttatcaggcgggtcctcgatggtggtaagtcccaggtatcataccgcacacaggatgggacagcccagggaaacagagactatatcccagtggagggggaacttctgttccagccaggcgaagcctggaaagagctgcaggtcaaacttctagaattgcaagaagtcgatagcttgttgagaggcaggcaggtcagaagatttcacgtacagctcagcaatcccaaatttggcgctcacttgggacaacctcactccaccactatcatcataagagatcccgatgagctggatcggagcttcacgtcccagatgcttagctcccaaccccctcctcacggagacctaggggctccccagaatcccaatgcaaaagctgccggatcacggaaaattcatttcaactggctgcctccctccggcaaacctatgggctacagggtcaaatattggattcagggtgactccgaaagtgaagcccatctcttggacagcaaagtgccttccgtcgagctgaccaatttatatccctattgcgattatgaaatgaaggtgtgtgcctatggggctcagggcgagggcccatacagcagtctcgtgagttgcagaacccatcaggaagtcccaagcgagccagggcgactggccttcaacgtcgtgtccagcacagtcactcagctgtcctgggccgagccagccgagaccaacggcgagattaccgcttacgaagtctgctacggcctggtcaacgatgacaacaggcccatcgggccaatgaagaaggtcctggttgacaaccccaaaaaccggatgctacttatcgaaaatctcagagaatcacagccttaccggtatactgtaaaggctcgtaatggggcaggatgggggccagaaagagaggccattattaatttggcgacccagcctaagcgacccatgagcattccaattattcctgacatccccattgtggatgctcagagtggggaggactacgacagcttcctgatgtactctgatgacgtcttgaggtccccaagcgggtcacagaggcccagcgtgtcagatgatactgagcacctggtaaacggacgcatggattttgctttcccgggatcaacaaactctttgcatagaatgacgactacatccgccgctgcatatggcacccacctttctccacacgtgccgcatcgtgtcttgtctacaagctctacactgactagggactacaactcgttaactcgtagtgaacattcacactcaacaaccctgcctcgggactattccaccctcactagcgtgtcatctcacgggctgcctccaatctgggagcatggccgtagccgtctgcccctgtcttgggccctgggaagtagatcccgcgcacaaatgaaggggtttccgccttcccgtggacctcgcgatagtatcatcctggcgggacgacccgcagctccgagctggggacctgactccaggctcacagcgggagtcccagacacacctactcggctcgtattttcggcattggggccaacctcattgcgggtcagttggcaggagcctcggtgtgaacggccactgcaaggttattccgtggagtatcagcttttaaatggcggagagttgcatcggctgaacattcccaatccagcccagacttcggttgtggtggaagacctcctgcctaatcattcctacgtgttccgtgtccgggctcaatcccaggaaggctggggccgagagcgagagggagtgatcaccatagagagtcaggtacatccgcagagcccgctatgccccttgccaggtagtgcctttactttgagcaccccctctgcccctgggccactggtctttacagcgctgagccccgactccctccagctttcttgggaacgcccacgcaggccgaatggggacatcgtgggctatttagtaacatgcgaaatggcacaagggggtggcccagcaacggcgtttcgggtagacggggacagcccagaaagtaggctaactgtgccgggtctttccgagaacgtgccgtacaagttcaaggtccaggccaggaccactgagggattcggccctgaacgggaaggcatcattactatcgaaagccaggacggcggacccttcccccaactggggtcaagggccggactattccaacacccattgcaaagcgaatatagcagtatcactacaacccatacaagcgctaccgaacctttccttgtagacggcttaacgctcggagctcagcatctcgaggccggaggatccctgactcgccacgttacccaggagtttgtgtctcggactctgacgacatccggtactttgtcgacccatatggaccaacagttttttcagaccta

SEQ ID NO: 21992 - DNA, 5417 bp, Artificial Sequence
  derived and/or modified sequence
atggccggacctagacccagcccatgggcacggctgctgctggccgcattaatttcggtgtccctgtctggcacactcgccaataggtgcaaaaaggcccctgtgaagagctgcaccgagtgtgtcagagtcgacaaagactgtgcctactgtaccgacgagatgtttagggaccgcagatgtaatacccaagctgagctccttgccgctggatgccagagggaaagcatagtcgtgatggagagctctttccagattacagaggagacgcagatcgacacaaccttgcggaggtctcagatgtcccctcaaggtttgagggtgaggctccgcccaggcgaggagcgacactttgaactcgaagtttttgagcctctggagtcccccgtggacctgtatattctgatggatttctctaatagtatgtccgatgacctcgacaatctgaagaaaatggggcagaatctcgccagagtgctgagtcagcttactagtgactatacaatcggttttgggaaattcgtggataaagttagtgtgcctcaaacagatatgcgacccgaaaagctcaaagagccttggcccaactcagaccctccatttagttttaaaaacgtgatctccctcactgaagacgtggacgagttcaggaataaactccagggggagcggatctccggcaacttggacgctcccgaaggcggttttgatgctatactgcagaccgccgtgtgcacccgcgatattggatggagaccagactccacccaccttttggtatttagcacggaatccgcattccattatgaggccgacggcgctaacgtccttgctggcataatgtcgagaaacgatgaaaggtgccatctggacacgacaggtacatatactcaatatcgtactcaggactatcccagtgtaccaacactggtacgccttctagcgaaacacaacattataccgatcttcgccgtcacaaattatagttactcttattacgaaaaactccatacgtacttccccgtaagcagcctcggtgttctgcaggaagatagtagcaatattgttgagcttcttgaagaagcctttaacagaattagatccaacctggacatccgcgctctcgatagccccaggggactccggactgaggtaacatccaaaatgtttcagaagacacggaccggcagtttccacatcaggagaggggaagtgggcatctatcaagtgcagctgcgagccttggagcatgtcgacggcactcacgtgtgccagctccccgaggatcaaaagggcaacatccacctcaagccgtcctttagtgacgggctgaaaatggacgcagggatcatatgcgatgtgtgcacctgtgagctgcagaaagaagtgagatcggctcggtgcagtttcaacggcgacttcgtgtgtggacagtgcgtttgtagtgaaggatggagcggccagacatgtaactgttcaaccggtagcctgtcggatatccagccctgcctcagggagggcgaagataaaccttgctccgggaggggggaatgtcagtgtgggcactgcgtttgctatggcgagggtaggtacgaggggcaattctgtgaatatgacaactttcagtgtcctcggaccagcggttttctgtgcaatgatcgcggaaggtgtagtatgggccagtgcgtttgtgagcctgggtggactgggccttcctgcgattgtccgctctccaacgccacttgtatcgacagcaacggcggaatatgtaacggccgtggccattgcgaatgtgggagatgtcattgccatcagcagtccctttatacggacacaatttgtgaaatcaactattcagcaatccatccagggttatgcgaagacctcagaagctgcgttcagtgccaggcctggggcactggcgaaaagaaagggaggacctgcgaggaatgcaatttcaaagtcaagatggtcgacgagctgaaaagagctgaggaggtcgtcgtgagatgctcgtttcgcgatgaagacgacgattgtacctattcctacactatggaaggcgacggcgctcctggacccaactctactgtcctcgtgcataaaaagaaagattgtccccctgggtctttttggtggctgattcccctgttgctgttgctcctgcctcttttggcactactgttattattgtgctggaagtattgcgcatgctgtaaggcgtgcctggccctcctgccgtgttgtaaccgcggacatatggtaggattcaaggaagaccactatatgcttcgtgagaacctgatggctagcgatcatctagacacgccaatgttgaggagtggtaaccttaagggacgagacgttgtacgatggaaggtgaccaacaacatgcagcgtccagggtttgccacccacgccgcatccatcaatcctactgaactggtgccttacggactttcgttgaggctcgcccgactgtgcacggagaatcttctgaagcccgacacccgggaatgcgcgcaactccgccaagaggtggaggagaaccttaacgaagtgtaccggcagatttccggagtgcacaagttgcagcagactaaattccgtcaacagcctaatgctggaaagaagcaggatcatacgattgtcgatactgtgcttatggcacccagaagtgccaagccagccctgctaaagttaaccgagaagcaggtagagcaacgagccttccatgatctgaaagtcgctcccggatattatacactgacagcagaccaggacgccagggggatggtggagttccaggagggggtggaacttgtcgatgtcagggttcccctgttcatcaggcccgaagatgatgacgagaagcagctgctcgttgaggccatcgatgtgcctgccggaacggccacactgggacgacgcctggtcaacatcaccataattaaggagcaggccagagatgttgtgtccttcgagcagcctgaattcagtgtcagcaggggagaccaggtggcacgaataccagtaattcgacgggtattggacggaggcaagagccaagtcagctataggacccaggacggtacagcacaaggcaatcgagactacatccccgtagaaggagagctactgtttcagcctggcgaggcatggaaggaacttcaggtgaagcttctcgagctgcaggaagtggatagtctgctcagaggacgccaggtgagacggttccatgttcagctgagcaaccccaagtttggggcacatctgggccaaccacactccacaacaataatcattagagatccagacgaactcgaccgtagctttactagccagatgctcagcagtcagccccctccccacggcgatttgggcgcaccgcaaaaccccaacgcaaaagccgcagggtccagaaagattcacttcaactggttgcccccatcagggaaacctatgggctacagggtgaaatactggatccagggagactccgaatcagaagctcacctcctggactccaaggtgccctctgtggagctcacaaatctgtatccttattgcgactacgagatgaaagtgtgcgcctacggtgctcaaggcgaaggcccatactcctccctggtgtcctgtaggacacatcaggaggtgccttcagaaccaggtagattggcatttaatgttgtgagcagcaccgtgacccagctgagctgggctgagccagctgagacaaatggtgaaattaccgcttatgaggtttgctacggattggtgaatgacgacaatagacctatcggtcctatgaagaaagtgctggtcgacaaccccaagaatcgcatgctattaattgaaaatcttcgggagtctcagccctacaggtacacggtcaaagctcggaacggtgccggttggggacccgagagagaagccatcatcaatctggcgactcagccaaagagacctatgagcattccaatcataccagatatccccatcgtcgacgctcagtcgggggaggactacgacagttttctgatgtattcagacgatgtgctcaggagtccgtcaggctcgcagcgcccatctgtgtccgacgatactgagcatctagtgaatggaaggatggacttcgcttttccagggagcaccaactccctgcatcgcatgaccaccacttccgccgcagcatatggcacacacctcagtcctcatgttccacacagggtcctttctaccagtagcacccttaccagggattacaatagcctgacccgatcggagcactcccactctacaacacttcctcgcgattactcaactctcacttctgtctcctcacacggcctgcccccaatctgggaacacggcagaagcagattgcccttaagttgggccctgggaagcaggagccgtgctcagatgaagggatttccaccctcacggggtccccgtgacagcatcatcctcgcagggagaccagccgcacctagctggggccctgattcccggctcacggccggagttcctgatacaccaacgcggttagttttctccgcattggggcctaccagtctgagagtgtcctggcaggaacctagatgtgagaggcctttacagggttacagcgttgagtatcagctgcttaatggcggagaactgcaccgtctgaatatccctaatccagcccagacctcagtcgtcgttgaggacctgttgcccaaccacagctacgtctttagagtgcgcgctcaaagccaagaaggatggggtagagagagagagggcgtcattaccatagagagccaagtccaccctcagagccccctttgtccactgccaggttcagcttttactttgagtactccttcggcccctggccctctcgttttcacagccctttcccccgacagtctgcagctttcctgggaaagacccaggagacccaatggtgatatcgtaggctatctcgtcacttgcgaaatggcccagggcggaggtccagcaaccgcgtttagggtggacggagactcacccgaatctcgcctgactgtacctggtttgagcgagaacgttccttacaagttcaaagtccaggcacggaccaccgaagggtttggacctgagagagagggaatcatcacaatcgaatctcaggacggcggaccgtttccccagcttggctctcgcgctggactcttccagcacccacttcagagcgagtactcttctatcactaccactcatacttccgccaccgagccttttttggttgatgggctaaccctaggtgcccagcatctcgaggctggtggctctctcactagacacgtgactcaggagtttgtcagtagaactcttactacatcgggaactcttagcacacacatggaccaacagttttttcaaactta

SEQ ID NO: 21993 - DNA, 5418 bp, Artificial Sequence
  derived and/or modified sequence
atggccggccccagacccagcccctgggccagactgctgctggccgccctgatcagcgtgagcctgagcggcaccctggccaacagatgcaagaaggcccccgtgaagagctgcaccgagtgcgtgagagtggacaaggactgcgcctactgcaccgacgagatgttcagagacagaagatgcaacacccaggccgagctgctggccgccggctgccagagagagagcatcgtggtgatggagagcagcttccagatcaccgaggagacccagatcgacaccaccctgagaagaagccagatgagcccccagggcctgagagtgagactgagacccggcgaggagagacacttcgagctggaggtgttcgagcccctggagagccccgtggacctgtacatcctgatggacttcagcaacagcatgagcgacgacctggacaacctgaagaagatgggccagaacctggccagagtgctgagccagctgaccagcgactacaccatcggcttcggcaagttcgtggacaaggtgagcgtgccccagaccgacatgagacccgagaagctgaaggagccctggcccaacagcgacccccccttcagcttcaagaacgtgatcagcctgaccgaggacgtggacgagttcagaaacaagctgcagggcgagagaatcagcggcaacctggacgcccccgagggcggcttcgacgccatcctgcagaccgccgtgtgcaccagagacatcggctggagacccgacagcacccacctgctggtgttcagcaccgagagcgccttccactacgaggccgacggcgccaacgtgctggccggcatcatgagcagaaacgacgagagatgccacctggacaccaccggcacctacacccagtacagaacccaggactaccccagcgtgcccaccctggtgagactgctggccaagcacaacatcatccccatcttcgccgtgaccaactacagctacagctactacgagaagctgcacacctacttccccgtgagcagcctgggcgtgctgcaggaggacagcagcaacatcgtggagctgctggaggaggccttcaacagaatcagaagcaacctggacatcagagccctggacagccccagaggcctgagaaccgaggtgaccagcaagatgttccagaagaccagaaccggcagcttccacatcagaagaggcgaggtgggcatctaccaggtgcagctgagagccctggagcacgtggacggcacccacgtgtgccagctgcccgaggaccagaagggcaacatccacctgaagcccagcttcagcgacggcctgaagatggacgccggcatcatctgcgacgtgtgcacctgcgagctgcagaaggaggtgagaagcgccagatgcagcttcaacggcgacttcgtgtgcggccagtgcgtgtgcagcgagggctggagcggccagacctgcaactgcagcaccggcagcctgagcgacatccagccctgcctgagagagggcgaggacaagccctgcagcggcagaggcgagtgccagtgcggccactgcgtgtgctacggcgagggcagatacgagggccagttctgcgagtacgacaacttccagtgccccagaaccagcggcttcctgtgcaacgacagaggcagatgcagcatgggccagtgcgtgtgcgagcccggctggaccggccccagctgcgactgccccctgagcaacgccacctgcatcgacagcaacggcggcatctgcaacggcagaggccactgcgagtgcggcagatgccactgccaccagcagagcctgtacaccgacaccatctgcgagatcaactacagcgccatccaccccggcctgtgcgaggacctgagaagctgcgtgcagtgccaggcctggggcaccggcgagaagaagggcagaacctgcgaggagtgcaacttcaaggtgaagatggtggacgagctgaagagagccgaggaggtggtggtgagatgcagcttcagagacgaggacgacgactgcacctacagctacaccatggagggcgacggcgcccccggccccaacagcaccgtgctggtgcacaagaagaaggactgcccccccggcagcttctggtggctgatccccctgctgctgctgctgctgcccctgctggccctgctgctgctgctgtgctggaagtactgcgcctgctgcaaggcctgcctggccctgctgccctgctgcaacagaggccacatggtgggcttcaaggaggaccactacatgctgagagagaacctgatggccagcgaccacctggacacccccatgctgagaagcggcaacctgaagggcagagacgtggtgagatggaaggtgaccaacaacatgcagagacccggcttcgccacccacgccgccagcatcaaccccaccgagctggtgccctacggcctgagcctgagactggccagactgtgcaccgagaacctgctgaagcccgacaccagagagtgcgcccagctgagacaggaggtggaggagaacctgaacgaggtgtacagacagatcagcggcgtgcacaagctgcagcagaccaagttcagacagcagcccaacgccggcaagaagcaggaccacaccatcgtggacaccgtgctgatggcccccagaagcgccaagcccgccctgctgaagctgaccgagaagcaggtggagcagagagccttccacgacctgaaggtggcccccggctactacaccctgaccgccgaccaggacgccagaggcatggtggagttccaggagggcgtggagctggtggacgtgagagtgcccctgttcatcagacccgaggacgacgacgagaagcagctgctggtggaggccatcgacgtgcccgccggcaccgccaccctgggcagaagactggtgaacatcaccatcatcaaggagcaggccagagacgtggtgagcttcgagcagcccgagttcagcgtgagcagaggcgaccaggtggccagaatccccgtgatcagaagagtgctggacggcggcaagagccaggtgagctacagaacccaggacggcaccgcccagggcaacagagactacatccccgtggagggcgagctgctgttccagcccggcgaggcctggaaggagctgcaggtgaagctgctggagctgcaggaggtggacagcctgctgagaggcagacaggtgagaagattccacgtgcagctgagcaaccccaagttcggcgcccacctgggccagccccacagcaccaccatcatcatcagagaccccgacgagctggacagaagcttcaccagccagatgctgagcagccagccccccccccacggcgacctgggcgccccccagaaccccaacgccaaggccgccggcagcagaaagatccacttcaactggctgccccccagcggcaagcccatgggctacagagtgaagtactggatccagggcgacagcgagagcgaggcccacctgctggacagcaaggtgcccagcgtggagctgaccaacctgtacccctactgcgactacgagatgaaggtgtgcgcctacggcgcccagggcgagggcccctacagcagcctggtgagctgcagaacccaccaggaggtgcccagcgagcccggcagactggccttcaacgtggtgagcagcaccgtgacccagctgagctgggccgagcccgccgagaccaacggcgagatcaccgcctacgaggtgtgctacggcctggtgaacgacgacaacagacccatcggccccatgaagaaggtgctggtggacaaccccaagaacagaatgctgctgatcgagaacctgagagagagccagccctacagatacaccgtgaaggccagaaacggcgccggctggggccccgagagagaggccatcatcaacctggccacccagcccaagagacccatgagcatccccatcatccccgacatccccatcgtggacgcccagagcggcgaggactacgacagcttcctgatgtacagcgacgacgtgctgagaagccccagcggcagccagagacccagcgtgagcgacgacaccgagcacctggtgaacggcagaatggacttcgccttccccggcagcaccaacagcctgcacagaatgaccaccaccagcgccgccgcctacggcacccacctgagcccccacgtgccccacagagtgctgagcaccagcagcaccctgaccagagactacaacagcctgaccagaagcgagcacagccacagcaccaccctgcccagagactacagcaccctgaccagcgtgagcagccacggcctgccccccatctgggagcacggcagaagcagactgcccctgagctgggccctgggcagcagaagcagagcccagatgaagggcttcccccccagcagaggccccagagacagcatcatcctggccggcagacccgccgcccccagctggggccccgacagcagactgaccgccggcgtgcccgacacccccaccagactggtgttcagcgccctgggccccaccagcctgagagtgagctggcaggagcccagatgcgagagacccctgcagggctacagcgtggagtaccagctgctgaacggcggcgagctgcacagactgaacatccccaaccccgcccagaccagcgtggtggtggaggacctgctgcccaaccacagctacgtgttcagagtgagagcccagagccaggagggctggggcagagagagagagggcgtgatcaccatcgagagccaggtgcacccccagagccccctgtgccccctgcccggcagcgccttcaccctgagcacccccagcgcccccggccccctggtgttcaccgccctgagccccgacagcctgcagctgagctgggagagacccagaagacccaacggcgacatcgtgggctacctggtgacctgcgagatggcccagggcggcggccccgccaccgccttcagagtggacggcgacagccccgagagcagactgaccgtgcccggcctgagcgagaacgtgccctacaagttcaaggtgcaggccagaaccaccgagggcttcggccccgagagagagggcatcatcaccatcgagagccaggacggcggccccttcccccagctgggcagcagagccggcctgttccagcaccccctgcagagcgagtacagcagcatcaccaccacccacaccagcgccaccgagcccttcctggtggacggcctgaccctgggcgcccagcacctggaggccggcggcagcctgaccagacacgtgacccaggagttcgtgagcagaaccctgaccaccagcggcaccctgagcacccacatggaccagcagttcttccagacctag

SEQ ID NO: 21994 - DNA, 1932 bp, Artificial Sequence
  derived and/or modified sequence
ggaggaattgaggagacccagatagacacaacgctgcgacgcagccagatgtcaccccagggccttagagtgcggctgcgcccaggtgaggagcggcacttcgagctggaggtgttcgagccccttgagagccccgtggacctgtacatcctcatggatttttccaactcaatgagcgatgacctggataatttaaaaaagatgggccagaaccttgctcgagtgctctctcagctgacgtcggactatacgattgggtttggaaaattcgttgacaaggtgtcagtgccccagacggacatgcgtcccgaaaaattgaaggagccttggcctaactccgatccgcccttttcctttaagaatgtgatctcgctgaccgaagatgtagacgaattccggaacaaactacagggcgaaaggatctcagggaatctagacgctcccgagggcggtttcgacgccattctgcagacggcagtgtgtacccgtgacataggatggcgccccgattctacccacctcctggtgttcagcaccgagagtgcattccactacgaggctgacggcgccaacgtcttagctggcatcatgagtcgcaatgacgaaagatgccacctagacacaactgggacctatacccagtatcgaactcaagactacccctccgtgcccactttggtgcgtctgctggcaaaacacaacattataccaattttcgccgtgactaactatagctactcctattacgaaaagctgcatacatattttcctgtgtccagtcttggtgtcctacaggaggatagttctaacattgtcgagctcctggaggaagcattcaacagaatccggtctaatttggacattagggccctggatagtccacgtggcctgaggactgaggtgacctccaaaatgttccagaagaccagaacagggtcattccacatccggagaggagaagtgggcatctatcaggtccagttgagagcactggagcatgtggatggaacccacgtttgccagcttcctgaagaccaaaaaggcaatatacatttgaaaccgagtttctctgatggcctgaaaatggatgccgggattatatgtgacgtctgtacttgcgagctccagaaggaagttcggagcgctcgctgtagtttcaatggtgattttgtgtgtgggcaatgtgtgtgtagtgagggatggtccggccagacatgtaactgctccacgggctccttgagtgacatccagccttgccttcgggaaggagaagataagccttgctccggaaggggagagtgtcagtgtggccactgtgtgtgctatggagaggggcggtacgaaggtcaattttgtgagtacgacaacttccagtgtcccaggacgagcggatttctttgtaacgatcgtgggagatgctccatgggtcagtgcgtgtgtgaaccagggtggacaggtccaagctgcgactgtcccctctctaacgcaacctgcatcgattccaacgggggaatctgcaacggccgtggtcactgcgaatgcgggaggtgccactgtcaccagcagtcattgtacactgacacgatctgcgagatcaactactcggctatccacccaggactgtgcgaagatcttaggtcatgtgtgcagtgccaggcctggggcacaggcgaaaaaaaggggcggacctgtgaggagtgcaactttaaagtaaagatggtggacgaactgaagcgggccgaggaggtggtggttagatgtagcttcagagatgaagacgatgattgcacatactcgtacacgatggagggggacggagctccaggaccaaactccactgttttggtgcataagaagaaagattgcccccctggatcattttggtggttaataccattgctgctgttactgctccccctgctggcgctctag

SEQ ID NO: 21995 - DNA, 5269 bp, Artificial Sequence
  derived and/or modified sequence
gggggtattgaggagacccagattgacaccaccctgcggcgcagccagatgtccccccaaggcctgcgggtccgtctgcggcccggtgaggagcggcattttgagctggaggtgtttgagccactggagagccccgtggacctgtacatcctcatggacttctccaactccatgtccgatgatctggacaacctcaagaagatggggcagaacctggctcgggtcctgagccagctcaccagcgactacactattggatttggcaagtttgtggacaaagtcagcgtcccgcagacggacatgaggcctgagaagctgaaggagccctggcccaacagtgacccccccttctccttcaagaacgtcatcagcctgacagaagatgtggatgagttccggaataaactgcagggagagcggatctcaggcaacctggatgctcctgagggcggcttcgatgccatcctgcagacagctgtgtgcacgagggacattggctggcgcccggacagcacccacctgctggtcttctccaccgagtcagccttccactatgaggctgatggcgccaacgtgctggctggcatcatgagccgcaacgatgaacggtgccacctggacaccacgggcacctacacccagtacaggacacaggactacccgtcggtgcccaccctggtgcgcctgctcgccaagcacaacatcatccccatctttgctgtcaccaactactcctatagctactacgagaagcttcacacctatttccctgtctcctcactgggggtgctgcaggaggactcgtccaacatcgtggagctgctggaggaggccttcaatcggatccgctccaacctggacatccgggccctagacagcccccgaggccttcggacagaggtcacctccaagatgttccagaagacgaggactgggtcctttcacatccggcggggggaagtgggtatataccaggtgcagctgcgggcccttgagcacgtggatgggacgcacgtgtgccagctgccggaggaccagaagggcaacatccatctgaaaccttccttctccgacggcctcaagatggacgcgggcatcatctgtgatgtgtgcacctgcgagctgcaaaaagaggtgcggtcagctcgctgcagcttcaacggagacttcgtgtgcggacagtgtgtgtgcagcgagggctggagtggccagacctgcaactgctccaccggctctctgagtgacattcagccctgcctgcgggagggcgaggacaagccgtgctccggccgtggggagtgccagtgcgggcactgtgtgtgctacggcgaaggccgctacgagggtcagttctgcgagtatgacaacttccagtgtccccgcacttccgggttcctctgcaatgaccgaggacgctgctccatgggccagtgtgtgtgtgagcctggttggacaggcccaagctgtgactgtcccctcagcaatgccacctgcatcgacagcaatgggggcatctgtaatggacgtggccactgtgagtgtggccgctgccactgccaccagcagtcgctctacacggacaccatctgcgagatcaactactcggcgatccacccgggcctctgcgaggacctacgctcctgcgtgcagtgccaggcgtggggcaccggcgagaagaaggggcgcacgtgtgaggaatgcaacttcaaggtcaagatggtggacgagcttaagagagccgaggaggtggtggtgcgctgctccttccgggacgaggatgacgactgcacctacagctacaccatggaaggtgacggcgcccctgggcccaacagcactgtcctggtgcacaagaagaaggactgccctccgggctccttctggtggctcatccccctgctcctcctcctcctgccgctcctggccctgctactgctgctatgctggaagtactgtgcctgctgcaaggcctgcctggcacttctcccgtgctgcaaccgaggtcacatggtgggctttaaggaagaccactacatgctgcgggagaacctgatggcctctgaccacttggacacgcccatgctgcgcagcgggaacctcaagggccgtgacgtggtccgctggaaggtcaccaacaacatgcagcggcctggctttgccactcatgccgccagcatcaaccccacagagctggtgccctacgggctgtccttgcgcctggcccgcctttgcaccgagaacctgctgaagcctgacactcgggagtgcgcccagctgcgccaggaggtggaggagaacctgaacgaggtctacaggcagatctccggtgtacacaagctccagcagaccaagttccggcagcagcccaatgccgggaaaaagcaagaccacaccattgtggacacagtgctgatggcgccccgctcggccaagccggccctgctgaagcttacagagaagcaggtggaacagagggccttccacgacctcaaggtggcccccggctactacaccctcactgcagaccaggacgcccggggcatggtggagttccaggagggcgtggagctggtggacgtacgggtgcccctctttatccggcctgaggatgacgacgagaagcagctgctggtggaggccatcgacgtgcccgcaggcactgccaccctcggccgccgcctggtaaacatcaccatcatcaaggagcaagccagagacgtggtgtcctttgagcagcctgagttctcggtcagccgcggggaccaggtggcccgcatccctgtcatccggcgtgtcctggacggcgggaagtcccaggtctcctaccgcacacaggatggcaccgcgcagggcaaccgggactacatccccgtggagggtgagctgctgttccagcctggggaggcctggaaagagctgcaggtgaagctcctggagctgcaagaagttgactccctcctgcggggccgccaggtccgccgtttccacgtccagctcagcaaccctaagtttggggcccacctgggccagccccactccaccaccatcatcatcagggacccagatgaactggaccggagcttcacgagtcagatgttgtcatcacagccaccccctcacggcgacctgggcgccccgcagaaccccaatgctaaggccgctgggtccaggaagatccatttcaactggctgcccccttctggcaagccaatggggtacagggtaaagtactggattcagggtgactccgaatccgaagcccacctgctcgacagcaaggtgccctcagtggagctcaccaacctgtacccgtattgcgactatgagatgaaggtgtgcgcctacggggctcagggcgagggaccctacagctccctggtgtcctgccgcacccaccaggaagtgcccagcgagccagggcgtctggccttcaatgtcgtctcctccacggtgacccagctgagctgggctgagccggctgagaccaacggtgagatcacagcctacgaggtctgctatggcctggtcaacgatgacaaccgacctattgggcccatgaagaaagtgctggttgacaaccctaagaaccggatgctgcttattgagaaccttcgggagtcccagccctaccgctacacggtgaaggcgcgcaacggggccggctgggggcctgagcgggaggccatcatcaacctggccacccagcccaagaggcccatgtccatccccatcatccctgacatccctatcgtggacgcccagagcggggaggactacgacagcttccttatgtacagcgatgacgttctacgctctccatcgggcagccagaggcccagcgtctccgatgacactgagcacctggtgaatggccggatggactttgccttcccgggcagcaccaactccctgcacaggatgaccacgaccagtgctgctgcctatggcacccacctgagcccacacgtgccccaccgcgtgctaagcacatcctccaccctcacacgggactacaactcactgacccgctcagaacactcacactcgaccacactgcccagggactactccaccctcacctccgtctcctcccacgactctcgcctgactgctggtgtgcccgacacgcccacccgcctggtgttctctgccctggggcccacatctctcagagtgagctggcaggagccgcggtgcgagcggccgctgcagggctacagtgtggagtaccagctgctgaacggcggtgagctgcatcggctcaacatccccaaccctgcccagacctcggtggtggtggaagacctcctgcccaaccactcctacgtgttccgcgtgcgggcccagagccaggaaggctggggccgagagcgtgagggtgtcatcaccattgaatcccaggtgcacccgcagagcccactgtgtcccctgccaggctccgccttcactttgagcactcccagtgccccaggcccgctggtgttcactgccctgagcccagactcgctgcagctgagctgggagcggccacggaggcccaatggggatatcgtcggctacctggtgacctgtgagatggcccaaggaggagggccagccaccgcattccgggtggatggagacagccccgagagccggctgaccgtgccgggcctcagcgagaacgtgccctacaagttcaaggtgcaggccaggaccactgagggcttcgggccagagcgcgagggcatcatcaccatagagtcccaggatggaggacccttcccgcagctgggcagccgtgccgggctcttccagcacccgctgcaaagcgagtacagcagcatcaccaccacccacaccagcgccaccgagcccttcctagtggatgggctgaccctgggggcccagcacctggaggcaggcggctccctcacccggcatgtgacccaggagtttgtgagccggacactgaccaccagcggaacccttagcacccacatggaccaacagttcttccaaacttgaccgcaccctgccccacccccgccacgtcccactaggcgtcctcccgactcctctcccggagcctcctcagctactccatccttgcacccctgggggcccagcccacccgcatgcacagagcaggggctaggtgtctcctgggaggcatgaagggggcaaggtccgtcctctgtgggcccaaacctatttgtaaccaaagagctgggagcagcacaaggacccagcctttgttctgcacttaataaatggttttgctactgct

SEQ ID NO: 21996 - DNA, 1932 bp, Artificial Sequence
  derived and/or modified sequence
gggggcatcgaggagacccagattgacaccaccctgcggcgcagccagatgagcccccagggcctgcgggtgcggctgcggcctggagaggagcggcactttgagctggaggtgtttgagcccctggagagccctgtggacctgtacatcctgatggacttcagcaacagcatgtctgatgacctggacaacctgaagaagatgggccagaacctggcccgggtgctgagccagctgaccagtgactacaccatcggctttgggaagtttgtggacaaggtgtctgtgccccagacagacatgaggcctgagaagctgaaggagccctggcccaacagcgacccccccttctccttcaagaatgtcatcagcctgacagaagatgtggatgagttcaggaacaagctgcagggcgagcgcatcagcggcaacctggatgcccctgagggcggctttgatgccatcctgcagacagctgtgtgcacccgggacatcggctggaggccagacagcacccacctgctggtgttcagcacagaaagtgccttccactatgaagcagatggagccaacgtgctggccggcatcatgagcagaaatgatgagcgctgccacctggacaccaccggcacctacacccagtaccgcacccaggactaccccagcgtgcccaccctggtgcggctgctggccaagcacaacatcatccccatctttgctgtgaccaactacagctacagctactatgagaagctgcacacctacttccctgtgagcagcctgggcgtgctgcaggaggacagcagcaacatcgtggagctgctggaggaggccttcaaccgcatccgcagcaacctggacatccgggccctggacagcccccggggcctgaggacagaggtgaccagcaagatgttccagaagaccaggacaggcagcttccacatcagaagaggagaggtgggcatctaccaggtgcagctgcgggccctggagcacgtggatggcacccacgtgtgccagctgcctgaggaccagaagggcaacatccacctgaagcccagcttcagtgatggcctgaagatggatgctggcatcatctgtgatgtgtgcacctgtgagctgcagaaggaggtgcgcagcgcccgctgcagcttcaatggagactttgtgtgtggccagtgtgtgtgcagcgagggctggagcggccagacctgcaactgcagcacaggcagcctgagtgacatccagccctgcctgcgggagggggaggacaagccctgcagcggcagaggagagtgccagtgtggccactgtgtgtgctacggggagggccgctatgagggccagttctgtgaatatgacaacttccagtgccccaggaccagcggcttcctgtgcaatgaccggggccgctgcagcatgggccagtgtgtgtgtgagcccggctggacaggccccagctgtgactgccccctgagcaatgccacctgcatcgacagcaatggaggcatctgcaatggccggggccactgtgaatgtggccgctgccactgccaccagcagagcctgtacacagacaccatctgtgagatcaactacagcgccatccaccctggcctgtgtgaggacctgcggagctgtgtgcagtgccaggcctggggcaccggggagaagaagggccgcacctgtgaggagtgcaacttcaaggtgaagatggtggatgagctgaagagagctgaggaggtggtggtgcgctgcagcttcagagatgaagatgatgactgcacctacagctacaccatggagggagatggagcccctggccccaacagcacagtgctggtgcacaagaagaaggactgccccccaggcagcttctggtggctgatccccctgctgctgctgctgctgcccctgctggccctgtag

SEQ ID NO: 21997 - DNA, 1932 bp, Artificial Sequence
  derived and/or modified sequence
ggcggcatcgaggagacccagatcgacaccaccctgcggcggagccagatgagcccccagggattgcgggtgaggctgaggccaggggaagagagacacttcgagctggaggtgttcgagcctttggaatcaccagtagacttgtatattctgatggattttagtaattccatgtcagatgatctggacaacctgaaaaagatgggccagaatctagccagagtcttgtcacagcttacatctgactacacaatcgggtttggtaaattcgtggacaaggtgtccgtgccgcagacagatatgcggcccgagaagctgaaagaaccatggcccaactcagaccctccgtttagcttcaagaatgtcattagtctgacagaggacgttgacgaattccggaacaaacttcagggagaacggatctctggcaacctcgacgcccccgaaggcgggttcgatgcaatcttgcaaaccgccgtgtgcaccagggacatcggatggagacccgactccacccaccttctggtgtttagcaccgagtctgccttccactatgaggcagatggggctaacgtgctcgctggtattatgtccagaaatgatgagcgctgccatctggatacaacgggaacttacactcagtaccgcacgcaggattatccatcagtgcccactctagttaggctactggctaagcacaacatcattccaatctttgccgtgaccaactactcttacagttattacgaaaagctccacacttacttccctgtctcatctcttggcgtgcttcaggaggactcatcaaatatagtagagctgctcgaagaggcctttaatcgtattagaagcaatctcgatattcgtgctctggattcccctagaggacttcggaccgaggttaccagcaagatgtttcagaagacaaggactggctcattccacatccgccgaggagaggtcgggatctaccaggttcagctccgagccctcgagcacgtggatggcacacatgtgtgtcagctgcccgaagaccagaagggaaacattcacctgaaacctagtttcagcgatggactgaagatggatgcaggaattatttgcgatgtgtgcacttgcgagttgcagaaggaggtgagatccgcccgctgctcattcaatggtgattttgtgtgtggccaatgtgtatgctcagagggctggtctgggcagacctgcaattgtagtaccgggagccttagtgatatccagccttgcctccgagagggtgaagataagccttgcagtggtaggggagagtgccaatgtggacactgcgtgtgctatggtgaaggccgatatgaggggcaattttgtgagtacgataacttccaatgtcctagaacaagcggattcttgtgcaatgacagggggcggtgcagcatgggccagtgcgtgtgcgaaccaggatggacaggcccgtcctgcgactgccctcttagtaatgcaacctgcatcgatagcaatggcggcatatgcaacggccggggccactgcgaatgcggccggtgtcattgccatcaacagagtttgtacacagacacaatatgtgagatcaattacagcgccatacaccctggtctttgcgaggatctgcgatcctgcgtgcagtgtcaagcctggggcactggcgagaaaaaaggcagaacctgcgaggagtgtaatttcaaggtgaaaatggttgacgagctgaagagggccgaagaggttgtagttcggtgcagctttcgagatgaagacgatgattgcacctactcttacacgatggagggcgatggagcaccaggacccaacagcacagtgctggtgcacaagaaaaaagactgccctcctgggagcttctggtggctcattcccctcctactacttctactacctctgctggcactttag

SEQ ID NO: 21998 - DNA, 1932 bp, Artificial Sequence
  derived and/or modified sequence
gggggaattgaagaaacacagattgacactactctccgacgaagtcaaatgagtccccagggacttagagtgagattgagacccggagaggaacggcactttgaactggaagtcttcgagccactggaaagtcctgtagatctctacatcctcatggatttcagtaacagcatgagcgatgatctcgataaccttaagaaaatgggacagaaccttgccagggtcctgagtcagctgaccagtgattatactatcgggtttggaaagtttgtggataaggtttcagtaccccagaccgatatgcggccagagaaattgaaagagccatggcctaactccgacccaccttttagcttcaagaacgtaatctcactgaccgaggatgttgacgaatttagaaacaagctgcagggagaacgaattagcggcaatctcgatgcacctgagggaggcttcgacgccattctacaaaccgccgtgtgcaccagagatatcgggtggcgcccagatagcacacatctgctggtatttagtaccgaatcagcctttcattacgaagcggatggtgcaaacgtcctagcgggtatcatgagcaggaatgacgagcggtgccatcttgataccacaggtacatacacacagtatcgcacccaagattacccttccgtcccaactctggtgcggctgttggcaaagcacaatataattcccatcttcgcggtgacaaattactcgtacagttattacgagaaactccacacgtactttccagtgtccagcttgggcgtcctgcaggaagattcaagtaatattgtagagctcctcgaagaggccttcaatcgcatacgatctaaccttgacattagagccctagacagtccgagaggacttaggacagaggtaacaagtaagatgttccaaaagaccaggacgggtagctttcatattaggagaggggaggtcggaatttaccaggtgcaactgagggctctggagcacgtggatggaacacacgtgtgtcagttgcctgaggaccagaagggtaacatccacctcaagccgtctttctccgatggactgaagatggatgctggaattatctgcgatgtttgcacctgtgaactacagaaagaggtgcggagcgccagatgttcttttaatggagactttgtctgtggccaatgcgtatgttcagaaggctggtctgggcagacatgcaactgtagcaccggttccttgtcagacatccaaccttgcctgagggaaggtgaggacaagccatgtagcggccgtggcgagtgccagtgcggccattgtgtctgttacggggaaggccgatacgaaggccagttctgcgaatacgataattttcagtgtccaaggacatcaggcttcttgtgtaacgatagaggacgatgctcgatggggcagtgcgtttgcgagccaggatggaccggaccaagctgtgattgtcctttgtctaacgcgacatgcatcgatagcaacggagggatctgtaatgggaggggacactgtgaatgtggacggtgtcattgtcaccagcaaagtctttatacagacactatctgtgaaatcaactacagcgccatccatcctggattgtgcgaggacctacgcagctgcgtccagtgccaagcctggggcacgggtgaaaaaaaagggagaacgtgtgaggagtgcaatttcaaggttaaaatggttgacgagctgaagcgagccgaagaggttgtggttcgctgtagcttccgggatgaggacgatgattgcacatatagctacacaatggaaggcgatggtgctcccggaccaaacagcacagtgttagttcacaagaagaaagattgtccacctggaagcttttggtggttaatcccattgctcctcctgctcctccccctgctggcactgtag

SEQ ID NO: 21999 - DNA, 1932 bp, Artificial Sequence
  derived and/or modified sequence
ggcggcatcgaggagacccagatcgacaccaccctgagaagaagccagatgagcccccagggcctgagagtgagactgagacccggcgaggagagacacttcgagctggaggtgttcgagcccctggagagccccgtggacctgtacatcctgatggacttcagcaacagcatgagcgacgacctggacaacctgaagaagatgggccagaacctggccagagtgctgagccagctgaccagcgactacaccatcggcttcggcaagttcgtggacaaggtgagcgtgccccagaccgacatgagacccgagaagctgaaggagccctggcccaacagcgacccccccttcagcttcaagaacgtgatcagcctgaccgaggacgtggacgagttcagaaacaagctgcagggcgagagaatcagcggcaacctggacgcccccgagggcggcttcgacgccatcctgcagaccgccgtgtgcaccagagacatcggctggagacccgacagcacccacctgctggtgttcagcaccgagagcgccttccactacgaggccgacggcgccaacgtgctggccggcatcatgagcagaaacgacgagagatgccacctggacaccaccggcacctacacccagtacagaacccaggactaccccagcgtgcccaccctggtgagactgctggccaagcacaacatcatccccatcttcgccgtgaccaactacagctacagctactacgagaagctgcacacctacttccccgtgagcagcctgggcgtgctgcaggaggacagcagcaacatcgtggagctgctggaggaggccttcaacagaatcagaagcaacctggacatcagagccctggacagccccagaggcctgagaaccgaggtgaccagcaagatgttccagaagaccagaaccggcagcttccacatcagaagaggcgaggtgggcatctaccaggtgcagctgagagccctggagcacgtggacggcacccacgtgtgccagctgcccgaggaccagaagggcaacatccacctgaagcccagcttcagcgacggcctgaagatggacgccggcatcatctgcgacgtgtgcacctgcgagctgcagaaggaggtgagaagcgccagatgcagcttcaacggcgacttcgtgtgcggccagtgcgtgtgcagcgagggctggagcggccagacctgcaactgcagcaccggcagcctgagcgacatccagccctgcctgagagagggcgaggacaagccctgcagcggcagaggcgagtgccagtgcggccactgcgtgtgctacggcgagggcagatacgagggccagttctgcgagtacgacaacttccagtgccccagaaccagcggcttcctgtgcaacgacagaggcagatgcagcatgggccagtgcgtgtgcgagcccggctggaccggccccagctgcgactgccccctgagcaacgccacctgcatcgacagcaacggcggcatctgcaacggcagaggccactgcgagtgcggcagatgccactgccaccagcagagcctgtacaccgacaccatctgcgagatcaactacagcgccatccaccccggcctgtgcgaggacctgagaagctgcgtgcagtgccaggcctggggcaccggcgagaagaagggcagaacctgcgaggagtgcaacttcaaggtgaagatggtggacgagctgaagagagccgaggaggtggtggtgagatgcagcttcagagacgaggacgacgactgcacctacagctacaccatggagggcgacggcgcccccggccccaacagcaccgtgctggtgcacaagaagaaggactgcccccccggcagcttctggtggctgatccccctgctgctgctgctgctgcccctgctggccctgtag

SEQ ID NO: 22000 - protein, 965 aa, Artificial Sequence
  derived and/or modified sequence
MASSHSSSPVPQGSSSDVFFKIEVDPSKHIRPVPSLPDVCPKEPTVTDQHRWTVYHSKVNLPAALNDPRLAKRESDFFTKTWGLDFVDTEVIPSFYLPQISKEHFTVYQQEISQREKIHERCKNICPPKDTFERTLLHTHDKSRTDLEQVPKIFMKPDFALDDSLTFNSVLPWSHFNTAGGKGNRDAASSKLLQEKLSHYLDIVEVNIAHQISLRSEAFFHAMTSQHELQDYLRKTSQAVKMLRDKIAQIDKVMCEGSLHILRLALTRNNCVKVYNKLKLMATVHQTQPTVQVLLSTSEFVGALDLIATTQEVLQQELQGIHSFRHLGSQLCELEKLIDKMMIAEFSTYSHSDLNRPLEDDCQVLEEERLISLVFGLLKQRKLNFLEIYGEKMVITAKNIIKQCVINKVSQTEEIDTDVVVKLADQMRMLNFPQWFDLLKDIFSKFTIFLQRVKATLNIIHSVVLSVLDKNQRTRELEEISQQKNAAKDNSLDTEVAYLIHEGMFISDAFGEGELTPIAVDTTSQRNASPNSEPCSSDSVSEPECTTDSSSSKEHTSSSAIPGGVDIMVSEDMKLTDSELGKLANNIQELLYSASDICHDRAVKFLMSRAKDGFLEKLNSMEFITLSRLMETFILDTEQICGRKSTSLLGALQSQAIKFVNRFHEERKTKLSLLLDNERWKQADVPAEFQDLVDSLSDGKIALPEKKSGATEERKPAEVLIVEGQQYAVVGTVLLLIRIILEYCQCVDNIPSVTTDMLTRLSDLLKYFNSRSCQLVLGAGALQVVGLKTITTKNLALSSRCLQLIVHYIPVIRAHFEARLPPKQYSMLRHFDHITKDYHDHIAEISAKLVAIMDSLFDKLLSKYEVKAPVPSACFRNICKQMTKMHEAIFDLLPEEQTQMLFLRINASYKLHLKKQLSHLNVINDGGPQNGLVTADVAFYTGNLQALKGLKDLDLNMAEIWEQKR

SEQ ID NO: 22001 - DNA, 2898 bp, Artificial Sequence
  derived and/or modified sequence
atggccagcagccacagcagcagccccgtgccccagggcagcagcagcgacgtgttcttcaagatcgaggtggaccccagcaagcacatcagacccgtgcccagcctgcccgacgtgtgccccaaggagcccaccgtgaccgaccagcacagatggaccgtgtaccacagcaaggtgaacctgcccgccgccctgaacgaccccagactggccaagagagagagcgacttcttcaccaagacctggggcctggacttcgtggacaccgaggtgatccccagcttctacctgccccagatcagcaaggagcacttcaccgtgtaccagcaggagatcagccagagagagaagatccacgagagatgcaagaacatctgcccccccaaggacaccttcgagagaaccctgctgcacacccacgacaagagcagaaccgacctggagcaggtgcccaagatcttcatgaagcccgacttcgccctggacgacagcctgaccttcaacagcgtgctgccctggagccacttcaacaccgccggcggcaagggcaacagagacgccgccagcagcaagctgctgcaggagaagctgagccactacctggacatcgtggaggtgaacatcgcccaccagatcagcctgagaagcgaggccttcttccacgccatgaccagccagcacgagctgcaggactacctgagaaagaccagccaggccgtgaagatgctgagagacaagatcgcccagatcgacaaggtgatgtgcgagggcagcctgcacatcctgagactggccctgaccagaaacaactgcgtgaaggtgtacaacaagctgaagctgatggccaccgtgcaccagacccagcccaccgtgcaggtgctgctgagcaccagcgagttcgtgggcgccctggacctgatcgccaccacccaggaggtgctgcagcaggagctgcagggcatccacagcttcagacacctgggcagccagctgtgcgagctggagaagctgatcgacaagatgatgatcgccgagttcagcacctacagccacagcgacctgaacagacccctggaggacgactgccaggtgctggaggaggagagactgatcagcctggtgttcggcctgctgaagcagagaaagctgaacttcctggagatctacggcgagaagatggtgatcaccgccaagaacatcatcaagcagtgcgtgatcaacaaggtgagccagaccgaggagatcgacaccgacgtggtggtgaagctggccgaccagatgagaatgctgaacttcccccagtggttcgacctgctgaaggacatcttcagcaagttcaccatcttcctgcagagagtgaaggccaccctgaacatcatccacagcgtggtgctgagcgtgctggacaagaaccagagaaccagagagctggaggagatcagccagcagaagaacgccgccaaggacaacagcctggacaccgaggtggcctacctgatccacgagggcatgttcatcagcgacgccttcggcgagggcgagctgacccccatcgccgtggacaccaccagccagagaaacgccagccccaacagcgagccctgcagcagcgacagcgtgagcgagcccgagtgcaccaccgacagcagcagcagcaaggagcacaccagcagcagcgccatccccggcggcgtggacatcatggtgagcgaggacatgaagctgaccgacagcgagctgggcaagctggccaacaacatccaggagctgctgtacagcgccagcgacatctgccacgacagagccgtgaagttcctgatgagcagagccaaggacggcttcctggagaagctgaacagcatggagttcatcaccctgagcagactgatggagaccttcatcctggacaccgagcagatctgcggcagaaagagcaccagcctgctgggcgccctgcagagccaggccatcaagttcgtgaacagattccacgaggagagaaagaccaagctgagcctgctgctggacaacgagagatggaagcaggccgacgtgcccgccgagttccaggacctggtggacagcctgagcgacggcaagatcgccctgcccgagaagaagagcggcgccaccgaggagagaaagcccgccgaggtgctgatcgtggagggccagcagtacgccgtggtgggcaccgtgctgctgctgatcagaatcatcctggagtactgccagtgcgtggacaacatccccagcgtgaccaccgacatgctgaccagactgagcgacctgctgaagtacttcaacagcagaagctgccagctggtgctgggcgccggcgccctgcaggtggtgggcctgaagaccatcaccaccaagaacctggccctgagcagcagatgcctgcagctgatcgtgcactacatccccgtgatcagagcccacttcgaggccagactgccccccaagcagtacagcatgctgagacacttcgaccacatcaccaaggactaccacgaccacatcgccgagatcagcgccaagctggtggccatcatggacagcctgttcgacaagctgctgagcaagtacgaggtgaaggcccccgtgcccagcgcctgcttcagaaacatctgcaagcagatgaccaagatgcacgaggccatcttcgacctgctgcccgaggagcagacccagatgctgttcctgagaatcaacgccagctacaagctgcacctgaagaagcagctgagccacctgaacgtgatcaacgacggcggcccccagaacggcctggtgaccgccgacgtggccttctacaccggcaacctgcaggccctgaagggcctgaaggacctggacctgaacatggccgagatctgggagcagaagagatag

SEQ ID NO: 22002 - DNA, 2898 bp, Artificial Sequence
  derived and/or modified sequence
atggcaagttcgcactccagtagcccagttccacagggctcttcctctgacgtgttttttaagatcgaggtagatccctccaaacacattcgacccgtgccatcgctacctgacgtctgtcccaaggagccgacggtgacggaccaacacagatggaccgtctaccattccaaggttaatctgccggctgcgcttaatgaccctaggctggccaaacgcgagtccgattttttcaccaaaacctggggcctcgactttgtggacaccgaggttattccttcgttttacttgccccagattagtaaagaacactttacggtctatcagcaggagatttctcagagagaaaagattcacgagcgctgtaagaatatctgccctccaaaagacaccttcgagcgcacccttctgcatacacatgataagtcacggacagatctagaacaagtcccgaagatttttatgaaacccgacttcgctctcgacgacagcctgactttcaatagcgtcttgccctggagccactttaacactgctggtggcaaaggcaatagagacgcagctagctctaaactcctccaggagaagctgagtcactatcttgatattgtggaggtcaacatagctcaccaaatttctctgaggtccgaggctttttttcacgcgatgacatctcagcacgaactgcaggactatcttcgtaaaaccagtcaggccgtcaagatgctacgggacaaaatcgctcagattgataaggtcatgtgtgagggctccttgcatatcctgcggcttgcccttacgcgcaacaactgcgtgaaagtgtacaacaagctcaaactgatggctaccgtacatcagactcagcccacagtgcaggtgttattatccacaagcgaatttgtgggagccctggacctgatcgcaactacccaggaagtgttgcaacaggagctgcaaggaatccacagctttaggcacctaggatctcagctttgcgagctcgagaagcttattgacaaaatgatgattgcagagttctcaacatacagccatagtgacctgaatagacctctggaagatgattgccaagtcctcgaagaggaacgcctgattagcctggtcttcggcctcctgaaacaaaggaagctgaatttcctcgaaatttacggggagaagatggttattacggccaagaacatcattaagcaatgtgtaatcaacaaggtcagccaaaccgaagagattgatacggacgttgtagtgaagctagctgatcaaatgaggatgctcaacttcccccagtggttcgatctgcttaaggacattttcagcaagttcactatcttcctccagcgtgtgaaggccactttgaatattatacactccgtggtgctgtctgtcctggataagaaccaacggacccgggagttggaggagatttctcagcagaaaaacgcagccaaggataactccctggatactgaggtggcttacctgatccatgaggggatgtttattagcgacgcttttggcgagggggagctgactccaatcgctgttgatacgaccagtcagcgcaatgcctctcctaacagcgagccgtgcagcagcgacagtgtatcggagccagaatgcactactgacagttcatcctcaaaggagcacacttcttcatccgctatcccgggcggcgttgacataatggtgtccgaggatatgaagctcaccgattctgaattaggaaaactggctaacaacattcaagaactgttgtacagtgcctcagacatttgtcatgatcgagcagtcaagttcctgatgtccagagccaaagatggatttctggaaaagttaaacagtatggaatttatcaccctgagccgcttgatggagaccttcatcctggacaccgaacagatatgcggccgcaagtcaacgtcccttctcggggcactccagtctcaggcgatcaaattcgtgaataggtttcatgaggagagaaaaacgaaactgtctctgctgctggacaatgagagatggaaacaggcagacgtccccgcagagttccaggatttggttgacagtctgagcgacggcaagatcgcactgcccgaaaaaaagagtggggccaccgaggagcggaaacctgccgaggtcctgatagtggaaggccagcaatatgccgtggtggggactgtccttctcctaatccgcattattttggaatactgccagtgcgtcgacaacatcccaagcgttaccacagatatgcttacgcggctgagcgaccttctcaaatactttaactcgcgctcgtgtcaactggtattgggagccggcgcactgcaagttgtcggtctaaagactatcacaacaaagaacctagcgctgtcaagtaggtgcctccagcttatagtccattacatccctgtgatacgcgctcacttcgaggctaggctgccgcccaagcagtacagcatgcttcgccatttcgaccacattacaaaagattatcatgatcacatagccgagatatccgctaagctcgtggctattatggactctctatttgataagttactgtcaaaatatgaagtcaaggcccctgtgccgtctgcgtgttttcgaaatatctgtaagcaaatgactaagatgcatgaggctatattcgacctgctacccgaggagcagacgcagatgctgttcctccgtatcaacgcgagctacaaactccatttaaaaaaacagctgtcacacttgaatgtgattaatgacgggggcccgcaaaacggtctggtaaccgccgacgtcgccttttacacaggtaatctccaggcactcaaaggcctgaaggaccttgatttaaacatggccgaaatttgggagcagaagcggtag

SEQ ID NO: 22003 - DNA, 2898 bp, Artificial Sequence
  derived and/or modified sequence
atggcatcttcccacagctcctcccccgtgccacagggcagttccagcgacgtgttcttcaagatagaagttgatcctagcaagcacatacgccccgtgccatcgttgccagatgtctgtccaaaagaacctacagtgacagaccagcatcgttggacggtttatcattccaaggttaaccttcctgctgctctgaatgaccccagattggccaaaagggagtcagacttcttcaccaagacctggggtctcgatttcgttgataccgaagttatcccctcgttctatctgccccagatatccaaagaacatttcaccgtgtatcagcaggaaatatcccagcgcgaaaagatccatgagcgatgcaaaaatatctgtccaccaaaagacaccttcgagcgcacattgctacatacccacgacaagagtcggactgacttagagcaggtcccaaagatctttatgaaacctgattttgcgttggacgacagcctgaccttcaactctgtcctgccatggagccacttcaacaccgcaggtgggaagggcaaccgcgatgctgcttcttccaaactgctgcaggagaaactgagccattatcttgatattgtggaggtcaacatagctcaccaaatttcgctgaggtccgaagcctttttccacgccatgacaagtcagcacgagctgcaagactatctccgaaagacgtcccaagcagtcaagatgcttcgggacaaaattgctcaaatcgataaagtgatgtgtgaaggatctctgcacatccttcggctggccttgacccggaacaactgcgttaaggtctacaacaaactcaagctcatggccacagtacaccaaacccagcccactgtgcaggttttgctttcaacctcagaattcgtcggggcactggacctgattgctaccacccaggaggtactccagcaggagcttcagggtatccactcctttcgccatttgggcagtcagctttgcgaactcgaaaagctgatcgataaaatgatgatcgctgagttcagtacctactcccattcagacctgaatagaccactggaagacgattgtcaggtgcttgaggaagagcggctcatatctttagtgttcgggctcttaaagcaacggaaactgaatttccttgaaatctatggggagaagatggttatcactgccaaaaatatcattaaacagtgcgtgattaataaggtgagccaaactgaagagatcgacaccgacgtagtcgtaaagctggccgatcaaatgcgcatgctgaacttccctcagtggttcgatctccttaaagatattttttctaagttcactatctttctacagcgggtcaaagctacgcttaatatcatccatagtgttgtccttagcgtcctggataagaatcaaaggactcgcgagctcgaggaaataagccagcagaaaaatgcagccaaggataattccctcgacaccgaagtcgcttacctcattcatgagggaatgtttataagcgatgcatttggcgagggggaacttaccccaattgccgttgacactacctcacagcgaaacgcctctcccaactcggagccatgcagcagtgactccgtgtccgaacccgagtgcaccacagactcgagtagctcgaaggaacacactagctctagcgccatccctggcggggtggacattatggtgagtgaggacatgaagttgacagacagtgagcttgggaagcttgcaaacaatatccaggagctgttgtacagcgccagcgacatctgtcacgatcgagcggtgaagtttctgatgtctagagcgaaggatggtttcctggagaaactgaacagtatggaatttatcaccctgagtagacttatggaaacctttatccttgacacagaacagatctgtggaagaaagtccacaagcctgttgggggcactccagagccaggcaatcaagtttgtgaaccggttccatgaggagcggaagacgaaactgagcctgctgctggacaatgagcgctggaagcaggcagacgtgccagctgaattccaggacctggtggatagtttatctgacggcaaaatagctctacccgagaaaaagagcggggctactgaagaaagaaagccggcagaggtcctgatcgtagaaggacagcagtacgccgtggtaggaactgtcttgttgctaattcggataatcctcgaatactgtcagtgtgtggacaacatccctagtgtgacaactgacatgctgaccaggctgtccgacctgttaaagtactttaattcacggtcatgccaactagtgctcggggctggcgcattgcaggtagtaggactcaagaccataactaccaaaaacctcgccctgtcctctcgatgtctccagttaattgtgcattatatcccagtgatacgggcgcatttcgaagcccgtttgcccccgaagcagtattctatgctgagacattttgaccatattaccaaggactaccacgatcatattgccgaaataagtgccaaactggttgcaatcatggacagcctttttgacaagctgctctccaaatatgaggtgaaagctcccgtaccttctgcatgttttagaaatatctgtaaacagatgacaaaaatgcacgaagccattttcgacctgctgccggaagagcaaacacagatgctgttcctgcgcattaacgcttcctacaagttgcatctgaaaaaacagctgtcccacttaaatgttatcaatgatggagggcctcagaacgggctggtgaccgccgacgtggctttctatacgggtaatctgcaggccctcaaaggcctgaaagacctcgacctaaacatggctgagatatgggagcagaagagatag

SEQ ID NO: 22004 - DNA, 2898 bp, Artificial Sequence
  derived and/or modified sequence
atggccagcagccacagcagcagccctgtgccccagggcagcagcagtgatgtgttcttcaagattgaggtggaccccagcaagcacatccggcctgtgcccagcctgcctgatgtgtgccccaaggagcccaccgtgacagaccagcaccgctggacagtgtaccacagcaaggtgaacctgcctgctgccctgaatgacccccggctggccaagcgggagagtgacttcttcaccaagacctggggcctggactttgtggacacagaggtgatccccagcttctacctgccccagatcagcaaggagcacttcaccgtgtaccagcaggagatcagccagcgggagaagatccacgagcgctgcaagaacatctgcccccccaaggacacctttgagaggaccctgctgcacacccatgacaagagcaggacagacctggagcaggtgcccaagatcttcatgaagccagactttgccctggatgacagcctgaccttcaacagcgtgctgccctggagccacttcaacacagctgggggcaagggcaacagagatgctgccagcagcaagctgctgcaggagaagctgagccactacctggacatcgtggaggtgaacatcgcccaccagatcagcctgcggtctgaggccttcttccacgccatgaccagccagcacgagctgcaggactacctgaggaagaccagccaggccgtgaagatgctgcgggacaagatcgcccagattgacaaggtgatgtgtgagggcagcctgcacatcctgcggctggccctgaccaggaacaactgtgtgaaggtgtacaacaagctgaagctgatggccaccgtgcaccagacccagcccaccgtgcaggtgctgctgagcaccagcgagtttgtgggcgccctggacctgattgccaccacccaggaggtgctgcagcaggagctgcagggcatccacagcttccgccacctgggcagccagctgtgtgagctggagaagctgattgacaagatgatgattgctgagttcagcacctacagccacagcgacctgaaccggcccctggaggatgactgccaggtgctggaggaggagcggctcatcagcctggtgtttggcctgctgaagcagaggaagctgaacttcctggagatctatggagagaagatggtgatcacagccaagaacatcatcaagcagtgtgtgatcaacaaggtgtcccagacagaggagattgacacagatgtggtggtgaagctggccgaccagatgaggatgctgaacttcccccagtggtttgacctgctgaaggacatcttcagcaagttcaccatcttcctgcagagggtgaaggccaccctgaacatcatccacagcgtggtgctgtctgtgctggacaagaaccagaggacccgggagctggaggagatcagccagcagaagaatgctgccaaggacaacagcctggacacagaggtggcctacctgattcatgagggcatgttcatcagtgatgccttcggggagggggagctgacccccatcgctgtggacaccaccagccagagaaatgccagccccaacagcgagccctgcagcagtgacagcgtgtctgagcctgagtgcaccacagacagcagcagcagcaaggagcacaccagcagcagcgccatccctgggggcgtggacatcatggtgtctgaggacatgaagctgacagacagcgagctgggcaagctggccaacaacatccaggagctgctgtacagcgccagtgacatctgccacgacagagctgtgaagttcctgatgagccgggccaaggatggcttcctggagaagctgaacagcatggagttcatcaccctgagccggctgatggagaccttcatcctggacacagagcagatctgtggcaggaagagcaccagcctgctgggcgccctgcagagccaggccatcaagtttgtgaaccgcttccacgaggagaggaagaccaagctgagcctgctgctggacaatgaacgctggaagcaggctgatgtgcctgctgagttccaggacctggtggacagcctgagtgatggcaagatcgccctgcctgagaagaagagcggggccacagaggagaggaagccagctgaggtgctgattgtggagggccagcagtatgctgtggtgggcaccgtgctgctgctgatccgcatcatcctggagtactgccagtgtgtggacaacatccccagcgtgaccacagacatgctgacccggctgagtgacctgctgaagtacttcaacagccgcagctgccagctggtgctgggcgctggggccctgcaggtggtgggcctgaagaccatcaccaccaagaacctggccctgagcagccgctgcctgcagctgattgtgcactacatccctgtgatccgggcccactttgaggcccggctgccccccaagcagtacagcatgctgcggcactttgaccacatcaccaaggactaccatgaccacatcgccgagatcagcgccaagctggtggccatcatggacagcctgtttgacaagctgctgagcaaatatgaggtgaaggcccctgtgcccagcgcctgcttcaggaacatctgcaagcagatgaccaagatgcatgaggccatctttgacctgctgcctgaggagcagacccagatgctgttcctgcgcatcaatgccagctacaagctgcacctgaagaagcagctgagccacctgaatgtcatcaatgatggcggcccccagaatggcctggtgacagcagatgtggccttctacacaggcaacctgcaggccctgaagggcctgaaggacctggacctgaacatggccgagatctgggagcagaagaggtag

SEQ ID NO: 22005 - DNA, 2898 bp, Artificial Sequence
  derived and/or modified sequence
atggccagcagccacagcagcagccccgtgccccagggcagcagcagcgacgtcttctttaagatcgaagttgacccaagtaaacacataaggccggtgcctagtctccccgatgtttgcccgaaggagccaaccgtgactgaccagcaccgctggacggtgtatcacagtaaagtcaacctcccagccgccctcaacgaccctcgcctcgcaaagagggaaagtgacttcttcacaaaaacatggggactcgatttcgtggacacagaagtgattccgtcattttacctcccacagatttcaaaggaacactttaccgtctaccagcaggagatctcccagcgggaaaaaatccatgagcgctgtaaaaacatttgcccacctaaggacactttcgaacggaccttactgcacacacacgacaagtcaaggaccgacctggaacaggtccccaagatattcatgaagcccgactttgcactagatgatagtctgacgtttaactccgtgctcccctggagtcatttcaataccgcagggggaaaaggaaacagagacgctgcttctagtaaactgctacaggagaagttgtcccattatctcgatatcgttgaagtgaacatcgctcaccagattagcctgagatccgaagccttctttcacgcaatgacgtcacaacatgaactgcaagattacctgaggaaaacttcacaggccgtgaagatgttgagggataagattgcccagatagataaggtgatgtgcgaggggagtttgcacattctcaggctcgcccttacccgcaataactgcgtcaaagtttacaataaactaaaactgatggccacggtccaccagacacagcctaccgtgcaggtattgctgtcgacgtcagagttcgtgggagcattggatctgatcgctactacacaggaagtacttcagcaggaacttcaaggcattcacagcttccgacacttggggagccagctgtgtgagctcgagaagctgatcgacaagatgatgatagctgagttctcgacgtacagtcacagcgacctgaaccgccccctcgaagacgattgtcaagtgcttgaggaggagaggctgatcagcctggtattcggactgcttaagcagaggaagctgaatttcctggaaatctatggagagaaaatggtcattaccgccaagaatatcataaaacagtgtgtgatcaacaaggttagtcaaaccgaagaaattgatactgacgtcgtggttaaactggccgaccaaatgcgcatgctgaattttccacagtggttcgacctgctgaaagatatcttttcgaaatttactattttcctgcagcgggtcaaagccactttaaacatcatccattctgtggtcctcagcgttctagataagaaccagcgaactcgtgaactggaagagatctcccaacaaaaaaatgctgcaaaggataactcattagacacggaagtggcatatctgattcacgagggaatgtttattagcgatgcattcggagaaggggaactgacgccgatagcagtcgacactacttcccagaggaacgcgtccccaaatagcgagccctgctcttctgattccgtttcggagcctgaatgcaccaccgatagctctagttccaaggagcatacttcctcctctgccattcccggcggagtcgatataatggtctccgaggacatgaaactgaccgactccgagcttggaaagcttgctaataatatacaggagctcctgtacagcgcatccgatatttgtcatgaccgcgcagttaaatttctaatgtcacgcgctaaagatgggttcttagaaaaactaaacagcatggagttcattacactcagccgtctaatggaaaccttcatcctggatacagagcagatatgtggccggaagtcaacatctcttctcggggccctccagtcgcaagctatcaagtttgtgaaccgcttccacgaggaacgaaagactaagctgagcctccttttggacaacgagaggtggaagcaggctgatgttcctgccgagttccaggatctggtagactccctgtcagatggcaagatcgccttacccgaaaagaaaagtggggctaccgaggagagaaagcctgctgaggtccttattgttgaaggacaacagtacgcagtagtggggacggttctcttactgatacggattatcttagagtactgtcaatgcgtcgacaatatccctagtgtcactacagatatgttgactcggctgtctgacctactcaaatatttcaattcccgctcctgtcagctcgtccttggtgccggagctcttcaggtcgtgggtctgaagacaataacaacgaagaacctggctctttcaagccgctgtctgcagttgattgtgcattacattccagtgatcagggcacacttcgaggctcgcctgccgccgaaacagtactctatgctacgccatttcgaccacataacaaaagactatcatgaccacattgccgagatttccgcaaaactggtcgccatcatggacagcttgtttgataagctgctcagcaaatatgaggtgaaagctccagtcccatccgcatgcttccgcaacatctgtaaacagatgaccaaaatgcatgaagctatcttcgaccttttgccagaggagcaaacccagatgctgtttctgcgtattaacgcctcctataagttacaccttaaaaagcaactgtcacacctgaatgtgatcaatgatggcggcccccagaatgggctggtcaccgccgatgtggctttttataccggcaatctgcaggccctaaaaggcctcaaggacctggacttgaacatggctgagatttgggagcagaagagatag

SEQ ID NO: 22006 - DNA, 2898 bp, Artificial Sequence
  derived and/or modified sequence
atggccagcagccacagcagcagccccgtgccccagggcagcagcagcgatgtcttttttaagatcgaggtggatccttcgaagcacatcaggcccgttccaagtctcccagacgtgtgcccgaaagaacccaccgttactgaccagcacagatggaccgtgtatcattcgaaggtaaacctgcctgcagcactgaatgacccaagactcgctaagagggagtcggacttctttacgaagacatgggggcttgacttcgtggatactgaggtgattccatcattttaccttccacagatttcgaaagaacacttcaccgtatatcaacaggagatttctcagcgggagaaaatccatgagcgctgcaagaatatttgcccgccaaaggacacgttcgagcggacgctgctgcacacgcatgataaatctagaactgacctggagcaggtgccaaagatctttatgaagcccgacttcgctttagacgattcactgaccttcaacagcgtcctgccgtggtcgcacttcaatactgcaggcggcaaaggaaacagagatgccgcttcctctaaactgctgcaggaaaagcttagtcattatcttgatatcgtagaggtgaatatcgcacatcaaatttcccttcggagcgaggcctttttccacgcaatgacctcccagcacgaactgcaggactacctgaggaagacaagtcaagcggtgaagatgttgcgagacaagatcgcccagattgacaaggtaatgtgcgagggttccctgcatattctgcggctggccctcactaggaataactgcgtaaaggtgtataacaaattgaagctgatggccactgtgcatcagactcagccaacagttcaggtgttgctgagcacctcagagttcgtgggggctctcgaccttatcgctacaacccaagaggtgttacagcaagaactgcaggggatccatagcttcagacacctgggatcccagctttgtgagctagaaaagctgatagataaaatgatgattgccgaattttcgacgtactctcacagtgatctgaaccggccgcttgaggacgactgccaggtgttggaggaggagcggctgatctcactggtattcggcctcttgaaacagaggaagctgaacttcctcgagatttacggggagaagatggtgataacagcgaagaatattatcaagcagtgcgtaattaacaaagtgagtcagacagaggagatcgacaccgacgtggtggtgaagctggccgatcaaatgagaatgttaaatttcccgcagtggtttgatttgctcaaggatatcttctcaaagttcacaatttttctccaacgcgttaaagctaccctgaatatcattcacagcgtcgtcctgagtgttctggataaaaatcaaagaactcgggaactggaagagattagccagcagaagaatgccgccaaagacaactcactcgacaccgaggtcgcgtacctgatacacgaagggatgttcataagtgatgcatttggagagggcgaactcactccaatcgctgttgacactacctcacaacggaatgccagccctaattcagagccgtgtagcagcgattctgtcagcgagccggaatgcactacggattctagttccagcaaagaacacacatccagctctgccattccggggggggtggacatcatggtctccgaggatatgaagctgaccgactctgagttggggaaactggcaaacaatatacaggagctcctgtactccgctagtgacatctgtcatgatagggctgtgaagttcctgatgagtagggccaaggacggatttttggagaagctgaactctatggagttcatcacattgagccgcttaatggagaccttcatcctagacaccgagcaaatttgtggtcgcaagtctacctccttactgggcgcgctccagagccaagctattaaattcgtgaatcgtttccatgaggagaggaaaacaaagctctccctcctgctggacaacgaacgctggaagcaggcggacgtgcccgccgagtttcaggacctcgtggattccttgtcagatggaaaaattgcattacccgagaaaaaaagcggggcgacagaagagagaaagccggcagaagtgctgattgtagaaggacagcagtatgcggtggtgggaactgtcttgctgctgatccgcattatcctggagtattgccagtgtgttgataatattccttccgtcactaccgatatgttaactcgactttctgatttgctgaagtatttcaactcccgcagctgtcaacttgttctgggcgcaggcgcattacaggtcgttgggcttaaaacgatcactactaaaaacctcgctctgtcttctcggtgcttgcagctgatcgtgcactatattccggtgattcgggcacacttcgaggcacgcctgccgccgaaacagtattcaatgctgcgtcacttcgaccacattaccaaagattatcatgatcacattgctgagatctcagcgaagctggtagccatcatggattccctttttgataaacttctgtccaagtatgaggtgaaggcgccagtgccaagcgcctgcttccgaaacatttgtaagcaaatgacaaagatgcacgaagccatatttgaccttctacctgaggagcagacacaaatgctctttcttcggatcaatgcttcgtacaagttgcacctcaagaagcagctcagtcaccttaacgtaataaacgatgggggcccccagaatgggctagtcacagcggacgtggcattttacacgggaaatctgcaagccctcaaggggctgaaggatctggatcttaatatggccgagatatgggaacagaagcgctag

SEQ ID NO: 22007 - DNA, 2898 bp, Artificial Sequence
  derived and/or modified sequence
atggccagcagccactcctcaagcccggtgccacagggcagcagctccgacgtgttctttaaaatcgaggtcgatccgtcgaagcatatccggcctgtaccatccctcccagacgtctgccctaaagagcccacagtgaccgaccagcatcgctggactgtctatcattctaaagtgaatctcccagctgctctcaatgacccccgtttggcaaaaagagaaagcgatttttttacaaagacatggggccttgactttgtcgacaccgaggtaatcccctccttctacctgccccagatctccaaggaacactttactgtgtatcagcaggagatctcccagcgtgagaaaatccacgagcgctgcaaaaacatttgtcccccaaaggatacgttcgaaagaaccctgcttcacacccacgataagagcaggactgatttggagcaagtacctaagatctttatgaaacccgattttgcgctggatgatagtctgaccttcaatagcgtgctaccatggagtcattttaacactgcaggcggaaaggggaaccgagatgcagctagcagtaagctcctccaggaaaagctctcacactatctggacattgtcgaggtgaatattgcgcaccagatttcgctgagaagcgaagcctttttccacgccatgacttcacagcacgagctccaggattacttaaggaagactagtcaggctgtgaaaatgctgcgggataaaattgctcaaattgacaaagtaatgtgtgaagggtccttacatattctgcggctggccctcactcgtaacaactgtgttaaagtgtacaacaagctgaagttgatggccaccgtgcaccagacacaacctaccgtgcaagtccttttgtcaacctctgaatttgtaggcgctttggacttaatcgctaccactcaggaggtactgcagcaggaactgcagggcattcattccttcagacacctgggttcacaactttgcgagcttgagaagctgattgacaagatgatgatagcagaattcagtacgtattctcacagcgacctgaaccggcctttagaagacgactgtcaggttctggaggaggaacgactgattagcctggtgtttggactactaaaacagagaaaactgaactttttggaaatctatggcgagaagatggtgataaccgccaagaacatcatcaagcaatgcgtgataaacaaggtcagccagacagaagagatcgacacggatgtggtggtgaaattggccgaccagatgagaatgttaaacttccctcagtggtttgatctgctgaaggatattttctcaaaatttacaatctttctgcagcgggtgaaggcgaccctgaacatcatccactctgtcgtgctctcagtgctcgataaaaaccaacgcaccagagaactagaggagatctcccagcagaagaacgctgcaaaagataattccctcgatacggaggttgcctacctgattcatgaggggatgtttataagtgacgctttcggagagggggaattaactcctatcgccgtcgacacgacttcccagagaaatgcctcccctaatagcgagccctgttcatcggactctgtcagcgagcccgagtgcactaccgacagcagctcttcaaaggagcatacgagctcctcagccatccccggtggtgtggacataatggtgagtgaggacatgaagctcacagactcagaactgggaaaacttgccaacaacattcaggagctcttatattccgctagcgacatctgtcacgaccgtgctgtcaaattcctgatgagtagagccaaggacggtttcttggaaaagcttaactccatggagttcatcactctttcacgacttatggaaaccttcatcttggatactgaacagatatgcggcagaaagagtacttctttgctgggcgcactccagtcccaagccattaagtttgttaaccgcttccatgaggaaaggaagacaaaactgtcgctccttctggacaacgagaggtggaagcaggcggacgtccctgccgagttccaggacctggtcgactccctgtccgacggcaaaattgccctgcccgaaaagaagagtggggcaactgaggaaagaaaacctgcagaggtgttgatcgtcgaaggccaacagtacgctgtggtgggcaccgtgttgttactcattcgcatcatcctcgaatattgtcaatgtgttgacaatattccctctgtcactactgatatgctgactcgcctgtcagatctgctaaagtactttaattcaaggtcttgccaactcgtgctgggcgcaggcgctctgcaggttgttggcctgaagactatcaccacaaagaacctagctctctcatcccgttgcctccagctaatcgtgcactacatacctgttatccgcgcacattttgaagcacggcttcctcctaagcaatatagcatgttgcggcattttgatcacatcactaaggactatcacgatcacatcgccgaaatttctgctaagctagtggcaataatggattcactatttgacaagctattgtctaaatacgaagttaaggccccagtcccgtctgcatgcttccgaaacatttgtaagcagatgactaaaatgcacgaagccattttcgacctgttacctgaagagcagactcagatgctgttcctcaggatcaatgccagctacaaactccatctgaagaagcagctgagccacctgaacgtgattaacgatggcggtccacagaacggcctcgttacagccgatgttgcgttctacaccgggaatcttcaggcccttaagggactaaaagacctggatctgaacatggccgaaatctgggagcaaaaaagatag

SEQ ID NO: 22008 - DNA, 2898 bp, Artificial Sequence
  derived and/or modified sequence
atggccagtagtcacagctcttcacccgtcccccagggcagttcatccgacgtctttttcaagatcgaggtggacccttccaagcacatacgcccagtacctagcttgccggatgtgtgccctaaggagcctactgtgaccgaccagcaccgctggactgtctatcactcaaaagtcaacctgcctgccgctttgaatgacccacgccttgccaagagggagagtgacttcttcactaagacctggggcttagacttcgtggacaccgaggtgattccatccttttatctgccccaaatcagcaaggaacacttcacagtgtatcaacaagaaatttcgcagagggaaaaaattcatgaacgctgtaaaaacatatgcccaccgaaggatacgttcgagaggactctccttcatacacacgataagtcccgcacagacctggaacaagtccccaaaatctttatgaaaccagatttcgcactggacgattcgttgaccttcaacagtgtactcccttggtctcacttcaatacagctggcggtaagggtaacagggatgccgcaagtagcaaactcttacaggagaagctttctcattatctagacattgtggaggtgaatatcgcccatcagatttctttgcgaagcgaggcattctttcacgcaatgacgtcccaacatgaactgcaggactatctaaggaaaactagtcaggccgttaagatgttaagggataagatcgctcagatcgacaaagtgatgtgtgagggcagcctgcatattctgcggttagctctgacgagaaataactgcgtgaaggtatacaataagctgaagttaatggccaccgttcaccagacacagccgacagtgcaagtcctgttgagcacgtcagaatttgtcggcgcactggacctgatcgctaccacccaggaggtattgcagcaagaactgcagggaattcatagcttccggcacttagggtctcagttgtgtgagctggaaaaattgattgataaaatgatgattgcagagttctccacgtactctcactccgatctgaaccggcctttggaggatgattgccaggtgttagaagaggaaagattgatatcactggtgttcggtttgctcaagcaaaggaaactcaacttcctcgaaatatatggagagaagatggtcataaccgcgaagaacatcattaaacaatgcgtgattaataaggtcagccagaccgaggagatcgacacagatgtggtggtgaaactcgccgatcagatgcgcatgctgaattttccgcagtggtttgacctgcttaaagatattttttcaaagtttacaattttcctccaaagagtaaaggctacccttaatatcatccattccgtcgtgttatctgtgttagacaagaaccagagaactagagagttggaagaaatcagtcaacagaagaacgccgctaaggataattcactggataccgaggtagcctacctaatacacgaagggatgtttatcagcgatgctttcggagagggggagctcactcccatcgcagtcgataccacaagccagcgcaatgctagtcccaactcagaaccctgcagctctgacagcgtgtcagaacctgagtgcacaactgattcatcttcttctaaggagcacactagcagctccgccatacctgggggagtcgacatcatggtcagcgaggacatgaaactcacagattcggagctgggaaaactggctaacaacatccaggagcttctctattccgcatccgatatatgtcacgatcgggctgtgaagtttttaatgagtagagccaaagatgggttcctggagaagctgaactctatggagtttatcacactgagtcgccttatggagacttttattttagacactgagcaaatctgcggacggaagtccacctctttgttgggcgcacttcagtcccaggccatcaagtttgttaaccgttttcacgaagagcggaaaactaaactatctcttctgctggacaacgagaggtggaagcaggccgacgtgccggcagagttccaggacctggtcgatagcctgagcgacgggaagatagccctgcctgaaaaaaagtctggagcgacagaggagcgaaagccagccgaggtgctgatagtggagggccagcagtacgccgtggtggggacagtgttgcttttaatccggattatactggagtattgtcagtgtgtcgataacattccctccgttactaccgatatgctgacaagacttagtgacctgctaaagtactttaatagtagatcctgtcagttggtacttggtgctggtgcactacaggttgttgggctgaaaaccatcaccaccaaaaatttggcactctctagtcggtgccttcagcttatcgtccactacattcccgtgatccgggcacatttcgaagccaggctgccaccaaagcagtattctatgctccgccactttgaccatatcacaaaggactaccacgatcatattgccgagatttcagcaaaactggtggcaatcatggattcactgtttgacaaactgctcagtaaatatgaggtaaaagcaccagtccccagcgcttgcttccggaatatttgtaagcagatgaccaagatgcacgaggctatatttgacttactgcccgaggagcagacacagatgctgttcttaaggattaatgcctcttataagttacacctgaagaaacagctgtctcacttaaatgttattaatgatggcggtcctcagaatggattggtgacggccgatgtggccttttataccggaaatctgcaagctctaaagggcttaaaagaccttgacttgaatatggccgaaatctgggaacagaagcgctag

SEQ ID NO: 22009 - DNA, 3427 bp, Artificial Sequence
  derived and/or modified sequence
gggaacccgggctcgggcccggccgggcgccgggcggcggcggccgtggagcagcagcctcggtgcgacgtggagggctggaggcggcggcgatgcactaggcctcgctcagggcggctgccccgggacccgcagttgagtggtgattttatgcaatggcttcaagccacagttcttcaccagtgcctcaaggaagcagcagtgatgttttctttaaaatagaggtagatccgtcaaaacacattcgacctgtgccatcactgccagatgtgtgtcccaaggaacccacagttacagatcaacatagatggactgtatatcattccaaagtaaatctcccagcagcattaaacgatcctagattagcaaaaagagaatctgacttcttcacaaaaacatggggattggactttgtggacactgaagtcataccttcattctacctcccacagatcagcaaggaacattttacagtatatcaacaggaaatctctcagagagagaagattcatgagagatgcaagaatatttgtcctcctaaagataccttcgaaaggactcttttacatactcatgataaatccaggacagatctggagcaagtacctaagatttttatgaaaccagattttgccttggatgattccttaacttttaattcagttttaccatggtctcattttaatactgctggtggaaaaggaaatcgtgatgcagcttcctcaaagttgcttcaagaaaagctgagccattatctggatattgtggaagtaaacattgctcaccagatctctctacgttcagaagcattttttcatgcaatgacctctcaacacgagttgcaggactacctcaggaaaacttcccaggctgtaaaaatgcttcgagataaaattgcacagattgataaagtaatgtgtgaaggatcactccacattttaagactggcacttaccagaaataattgtgttaaagtatacaataagctgaagttaatggccactgtacaccagactcagcctacagtacaggtgttattatctacttctgaatttgttggagcattggacttaatagcaacaacacaagaggttctacagcaggaacttcagggcattcacagtttccggcatttgggatcacagctttgtgaattagaaaaactgatagataaaatgatgattgcagaattttctacttattctcacagtgacttaaatagaccactggaagatgactgtcaagttttagaagaggaaagactaatatctcttgtatttggacttttaaaacaaagaaagcttaattttttagaaatctatggtgaaaaaatggttattacagcaaagaatatcattaaacagtgtgtgattaataaagtttcacaaacagaagaaatagacacagatgttgttgtgaagcttgcagatcagatgagaatgttgaattttccccagtggtttgatctgctcaaggatattttctctaagtttacaattttcctacagagagtgaaggcaacattaaatatcattcacagtgttgttctctcagttcttgacaaaaaccaaaggactagagaattggaagagatttcacaacagaagaatgctgcaaaagataattcactggacacagaggtggcttatttaatccatgaaggcatgtttataagtgatgcattcggtgagggtgagctaacacctatagcagttgacactacctctcaaagaaatgcatctccaaatagtgagccctgcagcagtgattctgtatccgagccagaatgtactactgattcttcatccagcaaagagcacacatcatcatctgctattccaggaggtgtggatattatggtcagtgaagatatgaaattaactgactcagagctaggaaagctggcaaataatatccaggaattattatatagtgcctcagatatatgccatgatcgagctgtcaaatttctcatgtcaagagcaaaggatggttttcttgagaagctaaattccatggaattcataacactttctagattaatggaaacattcattttagacaccgaacagatctgtggaagaaaaagcacgtcattacttggagcacttcagagccaagctattaagtttgtaaataggtttcatgaagagagaaaaaccaagctcagcctcctcttagacaatgagcgctggaagcaagcagatgttcctgcagaatttcaggatcttgttgattctctgtcagatgggaagattgctttacctgaaaaaaaatcaggagccacagaagaaaggaaaccagctgaagttcttattgtcgagggacaacagtatgcagttgttggaaccgtattgctgttaataagaattatccttgaatattgccagtgtgtggataacatcccatctgttactactgacatgcttactcgtctgtcagatttattgaagtacttcaattcaagaagttgccagttagttcttggagctggtgcactgcaagttgttggactaaaaacgataactacaaaaaatttggctctttcttcacgatgtttgcagttaattgtgcactacattcctgtgatccgggctcattttgaagctcgactaccacctaagcaatatagcatgcttaggcattttgatcatatcactaaggactaccatgatcacatagctgaaatatcagctaagcttgtagcgataatggatagcttatttgacaagctgttatctaagtatgaagtgaaggctcctgttccttctgcctgtttcaggaatatttgtaagcaaatgacaaaaatgcacgaagctatatttgatctccttccagaagaacaaacacagatgttatttttaagaattaatgcaagttataaactccacttgaaaaagcagttatctcacttaaatgtgataaatgatggaggacctcaaaatgggttggtcacagcagatgtagctttttacactggaaatcttcaagccttaaaaggccttaaagatttggacctaaatatggccgaaatttgggagcagaagaggtgatgtcatcctggaaaactgggtagttcatctgaccatgggatgtgtttgttatgaagaaaatctggatgcctgtgattcgagaattgaacctgaaacccaaagtgaactggggtgggggaagggaaaaaggaaagtatcaagtgttgggaaactggattcagtgggatctacaaggaatgtcatttttgtgcatcctacagtgaggagtaactgatcaggtgtctataacatttttcattctctctggaaacagactcaggtttctttggaccaaatccaaaagaacacatagctgtaacacagctgtagttgactagaatgctctgtatactttatattaaaaaatgctttgcatttcttccagtgcaatgaaa

SEQ ID NO: 22010 - DNA, 3414 bp, Artificial Sequence
  derived and/or modified sequence
gcggtggattgtgggctgggggctgcggcggcctccggcgctgtctccccgcacccgaccgggccgagccggctgggccggcggggtgagggaaagcagtggagtcgggagcagaagcgctagaggcagtggtcgtggcgcggcggccgtggagcagcagcctcggtgcgacgtggagggctggaggcggcggcgatgcactaggcctcgctcagggcggctgccccgggacccgcagttgagtggtgattttatgcaatggcttcaagccacagttcttcaccagtgcctcaaggaagcagcagtgatgttttctttaaaatagaggtagatccgtcaaaacacattcgacctgtgccatcactgccagatgtgtgtcccaaggaacccacagttacagatcaacatagatggactgtatatcattccaaagtaaatctcccagcagcattaaacgatcctagattagcaaaaagagaatctgacttcttcacaaaaacatggggattggactttgtggacactgaagtcataccttcattctacctcccacagatcagcaaggaacattttacagtatatcaacaggaaatctctcagagagagaagattcatgagagatgcaagaatatttgtcctcctaaagataccttcgaaaggactcttttacatactcatgataaatccaggacagatctggagcaagtacctaagatttttatgaaaccagattttgccttggatgattccttaacttttaattcagttttaccatggtctcattttaatactgctggtggaaaaggaaatcgtgatgcagcttcctcaaagttgcttcaagaaaagctgagccattatctggatattgtggaagtaaacattgctcaccagatctctctacgttcagaagcattttttcatgcaatgacctctcaacacgagttgcaggactacctcaggaaaacttcccaggctgtaaaaatgcttcgagataaaattgcacagattgataaagtaatgtgtgaaggatcactccacattttaagactggcacttaccagaaataattgtgttaaagtatacaataagctgaagttaatggccactgtacaccagactcagcctacagtacaggtgttattatctacttctgaatttgttggagcattggacttaatagcaacaacacaagaggttctacagcaggaacttcagggcattcacagtttccggcatttgggatcacagctttgtgaattagaaaaactgatagataaaatgatgattgcagaattttctacttattctcacagtgacttaaatagaccactggaagatgactgtcaagttttagaagaggaaagactaatatctcttgtatttggacttttaaaacaaagaaagcttaattttttagaaatctatggtgaaaaaatggttattacagcaaagaatatcattaaacagtgtgtgattaataaagtttcacaaacagaagaaatagacacagatgttgttgtgaagcttgcagatcagatgagaatgttgaattttccccagtggtttgatctgctcaaggatattttctctaagtttacaattttcctacagagagtgaaggcaacattaaatatcattcacagtgttgttctctcagttcttgacaaaaaccaaaggactagagaattggaagagatttcacaacagaagaatgctgcaaaagataattcactggacacagaggtggcttatttaatccatgaaggcatgtttataagtgatgcattcggtgagggtgagctaacacctatagcagttgacactacctctcaaagaaatgcatctccaaatagtgagccctgcagcagtgattctgtatccgagccagaatgtactactgattcttcatccagcaaagagcacacatcatcatctgctattccaggaggtgtggatattatggtcagtgaagatatgaaattaactgactcagagctaggaaagctggcaaataatatccaggaattattatatagtgcctcagatatatgccatgatcgagctgtcaaatttctcatgtcaagagcaaaggatggttttcttgagaagctaaattccatggaattcataacactttctagattaatggaaacattcattttagacaccgaacagatctgtggaagaaaaagcacgtcattacttggagcacttcagagccaagctattaagtttgtaaataggtttcatgaagagagaaaaaccaagctcagcctcctcttagacaatgagcgctggaagcaagcagatgttcctgcagaatttcaggatcttgttgattctctgtcagatgggaagattgctttacctgaaaaaaaatcaggagccacagaagaaaggaaaccagctgaagttcttattgtcgagggacaacagtatgcagttgttggaaccgtattgctgttaataagaattatccttgaatattgccagtgtgtggataacatcccatctgttactactgacatgcttactcgtctgtcagatttattgaagtacttcaattcaagaagttgccagttagttcttggagctggtgcactgcaagttgttggactaaaaacgataactacaaaaaatttggctctttcttcacgatgtttgcagttaattgtgcactacattcctgtgatccgggctcattttgaagctcgactaccacctaagcaatatagcatgcttaggcattttgatcatatcactaaggactaccatgatcacatagctgaaatatcagctaagcttgtagcgataatggatagcttatttgacaagctgttatctaagtatgaagtgaaggctcctgttccttctgcctgtttcaggaatatttgtaagcaaatgacaaaaatgcacgaagctatatttgatctccttccagaagaacaaacacagatgttatttttaagaattaatgcaagttataaactccacttgaaaaagcagttatctcacttaaatgtgataaatgatggaggacctcaaaatgggttggtcacagcagatgtagctttttacactggaaatcttcaagccttaaaaggccttaaagatttggacctaaatatggccgaaatttgggagcagaagaggtgatgtcatcctggaaaactgggtagttcatctgaccatgggatgtgtttgttatgaagaaaatctggatgcctgtgattcgagaattgaacctgaaacccaaagtgaactggggtgggggaagggaaaaaggaaagtatcaagtgttgggaaactggattcagtgggatctacaaggaatgtcatttttgtgcatcctacagtgaggagtaactgatcaggtgtctataacatttttcattctctctggaaacagactca

SEQ ID NO: 22011 - protein, 592 aa, Artificial Sequence
  derived and/or modified sequence
MNKLRQSFRRKKDVYVPEASRPHQWQTDEEGVRTGKCSFPVKYLGHVEVDESRGMHICEDAVKRLKATGKKAVKAVLWVSADGLRVVDEKTKDLIVDQTIEKVSFCAPDRNFDRAFSYICRDGTTRRWICHCFMAVKDTGERLSHAVGCAFAACLERKQKREKECGVTATFDASRTTFTREGSFRVTTATEQAEREEIMKQMQDAKKAETDKIVVGSSVAPGNTAPSPSSPTSPTSDATTSLEMNNPHAIPRRHAPIEQLARQGSFRGFPALSQKMSPFKRQLSLRINELPSTMQRKTDFPIKNAVPEVEGEAESISSLCSQITNAFSTPEDPFSSAPMTKPVTVVAPQSPTFQGTEWGQSSGAASPGLFQAGHRRTPSEADRWLEEVSKSVRAQQPQASAAPLQPVLQPPPPTAISQPASPFQGNAFLTSQPVPVGVVPALQPAFVPAQSYPVANGMPYPAPNVPVVGITPSQMVANVFGTAGHPQAAHPHQSPSLVRQQTFPHYEASSATTSPFFKPPAQHLNGSAAFNGVDDGRLASADRHTEVPTGTCPVDPFEAQWAALENKSKQRTNPSPTNPFSSDLQKTFEIEL

SEQ ID NO: 22012 - DNA, 702 bp, Artificial Sequence
  derived and/or modified sequence
atgaacaaactgcgccagagctttcgacggaaaaaagatgtttatgttcccgaagcgagccgaccacaccaatggcaaacggacgaggaaggggtgaggaccgggaaatgttcgtttccagtcaaaacaggtaagaaagcagttaaagccgtgctgtgggtatccgccgatggcttgcgagtggtggacgaaaagaccaaagacctgattgtggatcagaccatcgaaaaagtctctttttgtgctcccgaccgcaacttcgaccgcgctttcagctatatatgtcgagacggaaccacccgccgctggatttgtcactgtttcatggcagtcaaagacactggcgaacgattaagtcacgccgtcgggtgtgcttttgccgcctgtttagaaaggaagcagaaacgggagaaagaatgtggcgttactgctactttcgacgcctcaaggacgacgttcactagagagggaagctttcgggtgacaactgcaactgaacaagcagagcgggaagagatcatgaaacagatgcaagacgctaagaaggcagaaacagataaaatcgtagtaggctcgtcggtcgcccccggtaataccgcacctagcccgtcctcccctacctctcccactagcgacgccacaacctccttggaaatgaacaacccacatgcgatccccagacggcatgcaccaatcgagtag

SEQ ID NO: 22013 - DNA, 1779 bp, Artificial Sequence
  derived and/or modified sequence
atgaataaactgaggcagagttttagacgcaagaaggacgtatacgtgccagaagcttcaaggccgcaccagtggcagacagacgaggaaggagtgcggacggggaaatgcagctttcctgttaaatacctcggtcacgtggaagttgacgagagtcgcggaatgcatatctgcgaagacgccgtgaaaagactcaaggctactgggaagaaggccgtcaaggctgtgctttgggtctcagctgacggattacgtgtcgtagacgagaagacaaaagacctcattgtggatcagactattgaaaaggtgagtttctgtgcccccgatcggaattttgatagggcctttagctatatttgccgggatggcaccacccgacgctggatttgtcactgcttcatggccgttaaagacactggagagcgcctaagtcatgccgtggggtgcgcgtttgcagcctgcctggagcggaagcaaaagagagaaaaggagtgtggcgttaccgcaacattcgacgcctctcgtaccacattcactagggaaggcagttttagagtgactaccgccactgagcaggctgagagagaagagattatgaagcagatgcaggatgcgaaaaaggcggaaaccgacaaaatagtggtgggcagttctgtggcaccgggcaataccgcgccaagcccgtcttcccctacgtctcccacgtctgacgcaaccacctctctagagatgaataatccccatgctatacccaggagacatgcaccgattgagcagctcgcccggcagggatctttccgtggattccccgcgctttcacagaagatgagtccctttaaaagacaactcagcttgcgcattaatgagctgcccagtactatgcagcggaaaactgattttcctatcaaaaacgccgtgccagaagtggagggcgaggccgagtcaatctcttccttatgtagtcagatcaccaatgccttttcaactcccgaagaccccttctcttcagcccccatgactaagcctgttaccgtggtcgcaccgcaaagccccacctttcagggaacggagtggggccaatcatccggagcagcctctcctggactttttcaggccggtcaccggagaacgccttctgaggcggatcgatggctggaggaagtgtctaaatccgtccgcgctcaacagccgcaggcctctgccgcacctttacaacctgttttgcagccgccccctcctacagctatcagccaacccgcctctccttttcagggtaatgccttcctcactagccagcccgtgccagtgggggtggtaccagcactgcagcctgcatttgtgccagctcaatcttatccagtcgcaaatggaatgccctaccccgctccaaacgtgcccgtggttggcatcacgcctagccagatggtggctaacgtctttgggactgccggtcacccacaggctgcccacccacatcagagccctagccttgttaggcagcagactttcccacattatgaggcctcaagcgcaacgacgtccccattttttaagcccccagctcagcatctcaatggcagtgccgcatttaacggcgttgatgacggcagactcgcctctgccgacagacacaccgaggttcctacaggaacctgtcctgtggatccttttgaggcccagtgggccgctttagagaataagagtaagcagagaaccaatccttcacctacgaatccattttcaagtgacttgcagaagaccttcgaaatcgagctgtag

SEQ ID NO: 22014 - DNA, 702 bp, Artificial Sequence
  derived and/or modified sequence
atgaacaagctgcggcagagcttccggaggaagaaggatgtgtatgtgcctgaggccagccggccccaccagtggcagacagatgaggagggcgtgaggacaggcaagtgcagcttccctgtgaagacaggcaagaaggctgtgaaggctgtgctgtgggtgtctgcagatggcctgcgggtggtggatgagaagaccaaggacctgattgtggaccagaccatcgagaaggtgtccttctgtgccccagacaggaactttgaccgggccttctcctacatctgcagagatggcaccacccggcgctggatctgccactgcttcatggctgtgaaggacaccggggagcggctgagccatgctgtgggctgtgcctttgctgcctgcctggagaggaagcagaagcgggagaaggaatgtggggtgacagccacctttgatgccagcaggaccaccttcacccgggagggcagcttccgggtgaccacagccacagagcaggccgagcgggaggagatcatgaagcagatgcaggatgccaagaaggccgagacagacaagatcgtggtgggcagctctgtggcccctggcaacacagcccccagccccagcagccccaccagccccaccagtgatgccaccaccagcctggagatgaacaacccccacgccatccccaggagacatgcccccatcgagtag

SEQ ID NO: 22015 - DNA, 1779 bp, Artificial Sequence
  derived and/or modified sequence
atgaacaagctgcggcagagcttccggaggaagaaggatgtgtatgtgcctgaggccagccggccccaccagtggcagacagatgaggagggcgtgaggacaggcaagtgcagcttccctgtgaagtacctgggccacgtggaggtggatgagagccggggcatgcacatctgtgaagatgctgtgaagaggctgaaggccaccgggaagaaggctgtgaaggctgtgctgtgggtgtctgcagatggcctgcgggtggtggatgagaagaccaaggacctgattgtggaccagaccatcgagaaggtgtccttctgtgccccagacaggaactttgaccgggccttctcctacatctgcagagatggcaccacccggcgctggatctgccactgcttcatggctgtgaaggacacaggagagcggctgagccatgctgtgggctgtgcctttgctgcctgcctggagaggaagcagaagcgggagaaggaatgtggggtgacagccacctttgatgccagcaggaccaccttcacccgggagggcagcttccgggtgaccacagccacagagcaggccgagcgggaggagatcatgaagcagatgcaggatgccaagaaggccgagacagacaagatcgtggtgggcagctctgtggcccctggcaacacagcccccagccccagcagccccaccagccccaccagtgatgccaccaccagcctggagatgaacaacccccacgccatccccaggagacatgcccccatcgagcagctggcccggcagggcagcttccggggcttccctgccctgagccagaagatgagccccttcaagaggcagctgagcctgcgcatcaatgagctgcccagcaccatgcagaggaagacagacttccccatcaagaatgctgtgcctgaggtggagggggaggccgagagcatcagcagcctgtgcagccagatcaccaatgccttcagcaccccagaggaccccttcagcagcgcccccatgaccaagcctgtgacagtggtggccccccagagccccaccttccagggcacagagtggggccagagcagcggggccgccagccctggcctcttccaggccggccacaggaggaccccatctgaggccgaccgctggctggaggaggtgtccaagtctgtgcgggcccagcagccccaggccagcgctgcccccctgcagcctgtgctgcagcccccaccacccacagccatcagccagcctgccagccccttccagggcaatgccttcctgaccagccagcctgtgcctgtgggcgtggtgcctgccctgcagcctgcctttgtgcctgcccagagctaccctgtggccaacggcatgccctacccagcccccaacgtgcctgtggtgggcatcacccccagccagatggtggccaacgtgtttggaacagctggccacccccaggccgcccacccccaccagagccccagcctggtgcggcagcagaccttcccccactatgaggccagcagcgccaccaccagccccttcttcaagcccccagcccagcacctgaatggatctgctgccttcaatggagtggatgatggccgcctggccagcgctgacagacacacagaggtgcccaccggcacctgccctgtggacccctttgaggcccagtgggccgccctggagaacaagagcaagcagaggaccaaccccagccccaccaaccccttcagcagtgacctgcagaagacctttgaaattgagctgtag

SEQ ID NO: 22016 - DNA, 702 bp, Artificial Sequence
  derived and/or modified sequence
atgaacaagctgcggcagagcttccggcggaagaaggacgtgtacgttccggaagcatcccgcccccatcagtggcaaaccgatgaagagggcgtgcgaacggggaaatgtagctttccagtcaaaaccggcaaaaaggccgtgaaggccgtgctgtgggtcagtgcagacggcctgcgagtcgtcgatgaaaaaactaaggaccttattgtggatcagacaattgagaaggtctccttctgcgcgcctgatagaaatttcgatagggcttttagttacatctgtagggatgggaccaccaggagatggatctgtcattgttttatggccgtgaaggatactggggagaggctcagtcatgccgtggggtgtgccttcgcagcctgcctcgagcgaaagcagaaaagggaaaaagagtgcggcgtaacagcaaccttcgacgcaagtagaacaactttcacacgggagggatccttccgagtcaccacggctacggaacaagcagagagagaagaaattatgaaacagatgcaggacgcaaaaaaagcggaaaccgataagatcgttgtcggcagctcagtcgctccaggcaacactgcacctagcccatcaagccccacaagcccaactagtgatgcaaccacttcactggagatgaataatccgcatgccatcccccgtagacatgccccaatcgagtag

SEQ ID NO: 22017 - DNA, 1779 bp, Artificial Sequence
  derived and/or modified sequence
atgaacaagctgcggcagagcttccggcggaagaaggacgtgtacgtacccgaagccagtcgtccccaccaatggcagaccgatgaagaaggggtgcgtacaggcaaatgcagcttcccagtcaagtacttagggcacgtggaggtcgatgagtctagaggcatgcacatatgtgaggacgccgttaaaaggctgaaggccacaggcaaaaaggccgtgaaagccgtattatgggtgagcgctgatggactgcgagtggtagacgagaagactaaggacctcattgtggatcagaccatagagaaagtgagcttctgtgcccccgatcgaaactttgaccgggccttttcatacatttgcagggatgggaccaccagaagatggatttgtcattgttttatggcggttaaggacactggtgagcgtctcagtcatgccgtgggctgcgcgtttgctgcttgtctcgagcgaaagcagaaacgagagaaagagtgtggggttactgcaacatttgatgcctctcgcacaacctttactcgggaggggagttttcgggttactacagctacggagcaggccgagcgcgaggagatcatgaagcagatgcaggatgccaagaaggccgaaactgacaagatcgtggtcggaagttcagtcgcccccggaaatactgccccctctccctctagtcccacatcaccaacctcagacgccaccacttcactggagatgaataatcctcatgccatcccgcgtagacatgctcccatcgagcagttggcccgacagggctcattcagaggctttcccgcgctaagccaaaaaatgtccccatttaagcgccagctgtcactgcgcattaatgagctccctagtacaatgcagagaaagactgacttcccaatcaaaaatgccgttccagaagtggagggtgaggcagaatctataagttccctatgttctcagatcactaatgcctttagcactcccgaggacccattttcaagtgcccccatgaccaagccagtgacggttgtcgctcctcagagccctacgtttcaaggaaccgaatggggccaatcctccggagctgccagtcccggattatttcaggcagggcatcgacgcaccccgagcgaggcagacaggtggctcgaagaggtcagtaagtccgttcgcgcacagcagccccaagcatcggccgctccattgcagccagtactccagcctcctccgcccacagcaatttcccagcctgccagtccatttcagggcaatgcattcctcacctcgcaacctgtaccagtgggcgtggtacctgccttgcagccagcctttgtcccggcacagagctacccggtcgcaaatggcatgccctatcccgcaccgaatgtccctgtggtgggtattacaccctcccagatggttgctaatgtgttcggaacagcaggccatccacaagccgcgcatcctcatcaaagccccagtttagtgcgccagcagacgttcccccactatgaggcatcatccgctaccaccagccctttttttaagcctcctgcccaacatctgaatggttccgccgcctttaatggggttgatgatggcaggctggcctccgcagatcggcatactgaggtgccaacaggaacttgtcccgtggacccctttgaagcgcagtgggctgctctggagaacaaatccaaacagcgaaccaatccctcacccactaacccgttttctagtgatctccagaagactttcgagatcgagctgtag

SEQ ID NO: 22018 - DNA, 3607 bp, Artificial Sequence
  derived and/or modified sequence
caatggataggttagaagtatgaaagagggtgggcctgttgtcatgggggaggtggtggcgcttggtggccactggcggccgaggtagaggcagtggcgcttgagttggtcgggggcagcggcagatttgaggcttaagcaacttcttccggggaagagtgccagtgcagccactgttacaattcaagatcttgatctatatccatagattggaatattggtgggccagcaatcctcagacgcctcacttaggacaaatgaggaaactgaggcttggtgaagttacgaaacttgtccaaaatcacacaacttgtaaagggcacagccaagattcagagccaggctgtaaaaattaaaatgaacaaattacggcaaagttttaggagaaagaaggatgtttatgttccagaggccagtcgtccacatcagtggcagacagatgaagaaggcgttcgcaccggaaaatgtagcttcccggttaagtaccttggccatgtagaagttgatgaatcaagaggaatgcacatctgtgaagatgctgtaaaaagattgaaagctactggaaagaaagcagttaaagcagttctgtgggtctcagcagatggactcagagttgtggatgaaaaaactaaggacctcatagttgaccagacgatagagaaagtttctttctgtgccccagacaggaactttgatagagccttttcttacatatgccgtgatggcaccactcgtcgctggatctgtcactgcttcatggctgtcaaggacacaggtgaaaggttgagccatgcagtaggctgtgcttttgcagcctgtttagagcgcaagcagaagcgggagaaggaatgtggagtgactgctacttttgatgctagtcggaccacttttacaagagaaggatcattccgtgtcacaacagccactgaacaagcagaaagagaggagatcatgaaacaaatgcaagatgccaagaaagctgaaacagataagatagtcgttggttcatcagttgcccctggcaacactgccccatccccatcctctcccacctctcctacttctgatgccacgacctctctggagatgaacaatcctcatgccatcccacgccggcatgctccaattgaacagcttgctcgccaaggctctttccgaggttttcctgctcttagccagaagatgtcaccctttaaacgccaactatccctacgcatcaatgagttgccttccactatgcagaggaagactgatttccccattaaaaatgcagtgccagaagtagaaggggaggcagagagcatcagctccctgtgctcacagatcaccaatgccttcagcacacctgaggaccccttctcatctgctccgatgaccaaaccagtgacagtggtggcaccacaatctcctaccttccaagggaccgagtggggtcaatcttctggtgctgcctctccaggtctcttccaggccggtcatagacgtactccctctgaggccgaccgatggttagaagaggtgtctaagagcgtccgggctcagcagccccaggcctcagctgctcctctgcagccagttctccagcctcctccacccactgccatctcccagccagcatcacctttccaagggaatgcattcctcacctctcagcctgtgccagtgggtgtggtcccagccctgcaaccagcctttgtccctgcccagtcctatcctgtggccaatggaatgccctatccagcccctaatgtgcctgtggtgggcatcactccctcccagatggtggccaacgtatttggcactgcaggccaccctcaggctgcccatccccatcagtcacccagcctggtcaggcagcagacattccctcactacgaggcaagcagtgctaccaccagtcccttctttaagcctcctgctcagcacctcaacggttctgcagctttcaatggtgtagatgatggcaggttggcctcagcagacaggcatacagaggttcctacaggcacctgcccagtggatccttttgaagcccagtgggctgcattagaaaataagtccaagcagcgtactaatccctcccctaccaaccctttctccagtgacttacagaagacgtttgaaattgaactttaagcaatcattatggctatgtatcttgtccataccagacagggagcagggggtagcggtcaaaggagcaaaacagactttgtctcctgattagtactcttttcactaatcccaaaggtcccaaggaacaagtccaggcccagagtactgtgaggggtgattttgaaagacatgggaaaaagcattcctagagaaaagctgccttgcaattaggctaaagaagtcaaggaaatgttgctttctgtactccctcttcccttacccccttacaaatctctggcaacagagaggcaaagtatctgaacaagaatctatattccaagcacatttactgaaatgtaaaacacaacaggaagcaaagcaatctccctttgtttttcaggccattcacctgcctcctgtcagtagtggcctgtattagagatcaagaagagtggtttgtgctcaggctggggaacagagaggcacgctatgctgccagaattcccaggagggcatatcagcaactgcccagcagagctatattttgggggagaagttgagcttccattttgagtaacagaataaatattatatatatcaaaagccaaaatctttatttttatgcatttagaatattttaaatagttctcagatattaagaagttgtatgagttgtaagtaatcttgccaaaggtaaaggggctagttgtaagaaattgtacataagattgatttatcattgatgcctactgaaataaaaagaggaaaggctggaagctgcagacaggatccctagcttgttttctgtcagtcattcattgtaagtagcacattgcaacaacaatcatgcttatgaccaatacagtcactaggttgtagttttttttaaataaaggaaaagcagtattgtcctggttttaaacctatgatggaattctaatgtcattattttaatggaatcaatcgaaatatgctctatagagaatatatcttttatatattgctgcagtttccttatgttaatcctttaacactaaggtaacatgacataatcataccatagaagggaacacaggttaccatattggtttgtaatatgggtcttggtgggttttgttttatcctttaaattttgttcccatgagttttgtggggatggggattctggttttattagctttgtgtgtgtcctcttcccccaaacccccttttggtgagaacatccccttgacagttgcagcctcttgacctcggataacaataagagagctcatctcatttttacttttgaacgttggccttacaatcaaatgtaagttatatatatttgtactgatgaaaatttataatctgctttaacaaaaataaatgttcatggtagaagcttttgcccatgaagggctgttctttcccctttcctttattagtaaatgaatttatttttcgttcttttggtcttactctccattctactgctgctgtaaatccctag

SEQ ID NO: 22019 - DNA, 702 bp, Artificial Sequence
  derived and/or modified sequence
atgaacaaactccgccagtcgtttcgccgaaaaaaagacgtgtatgttccagaggcctctaggcctcatcagtggcagactgacgaagagggcgttagaactggaaagtgctctttcccggtaaaaactggaaagaaggcggttaaagccgttctttgggtgagtgccgacggcctccgggtggtggacgaaaaaactaaagacctgattgtcgaccagaccattgagaaggtatcattctgtgcccctgatcggaatttcgacagagcattttcttacatttgtagggacggcactacgaggcggtggatatgccactgcttcatggccgtcaaagacacgggagaacgtcttagccacgccgtgggttgcgccttcgcggcttgcctggagcggaaacagaagcgggaaaaggagtgcggggtgactgcgacttttgacgcgtccagaactacattcacaagagaaggaagtttccgggtgacaacagccactgagcaagccgaacgcgaggagatcatgaagcagatgcaggatgccaaaaaagccgagaccgataagattgtggttgggtccagcgtggcacccggtaatactgcacctagcccttcgagtcccaccagtccgacgtccgatgctacgacatccctcgagatgaacaatccacatgccattcccagacggcatgctcctattgaatag

SEQ ID NO: 22020 - DNA, 1779 bp, Artificial Sequence
  derived and/or modified sequence
atgaataaactgaggcaaagcttcagaagaaagaaggacgtgtacgtccccgaagcatcccgtcctcaccagtggcagaccgacgaggaaggggtgcgcaccggaaagtgcagcttccctgtgaagtatctggggcatgtcgaggtcgacgagtccagaggcatgcatatatgtgaggacgccgttaagagactgaaggccaccggcaagaaggccgtaaaggcagtcctgtgggtaagtgcagacggccttcgagtggtggacgagaagaccaaagacctcatcgtagaccaaacgattgaaaaagtctcgttttgtgcccctgataggaattttgaccgcgctttctcctacatctgtcgcgatggcaccacacggaggtggatatgccattgtttcatggctgtcaaggatacaggggagcgactgtctcacgctgtgggatgtgcgttcgccgcatgccttgagagaaagcaaaaacgtgaaaaggaatgtggcgttaccgctacattcgacgcctcgcgaaccacttttacccgagaggggtcttttagagtgaccactgccaccgaacaagctgaaagagaggagataatgaagcaaatgcaagacgcaaagaaagccgaaacagataaaattgtagtcggaagctccgtggctcccggaaacaccgcaccctcaccaagtagtcccacttccccaaccagtgatgccaccacatccctcgaaatgaacaacccccatgccattcccaggcgccatgccccaattgagcagcttgcgagacaggggtctttccggggttttcctgccctaagccaaaaaatgagccccttcaaacgtcagctgagtctgcgtattaatgaactgccttcgacaatgcagagaaaaaccgatttccccatcaaaaacgccgttcctgaagtagagggcgaggcggagagcatatcttctttgtgcagtcagatcactaatgccttttccacacccgaggacccattcagtagcgccccaatgacgaaaccggtgacagttgtggcaccccagtcccccacgtttcagggcacagaatggggccagtcgtctggagccgcttctccaggcttatttcaggctggacatagacggacccccagcgaggccgacagatggttagaggaggtgtccaagtcagtgagagcccaacagccccaggcctcagccgcacccctgcagccagtgttacaaccccctccccctacagccatctctcagcctgcaagtcctttccagggcaatgcatttctgacttcccaacccgtgccggtcggtgtggtgccagccctccagccggcattcgtcccagctcagtcctatcctgttgccaatggaatgccgtatcctgctccaaacgtaccagtcgttggaattaccccctctcagatggttgctaacgtgttcggcacggccggacaccctcaggccgctcatccacaccagtccccgtcccttgtgagacagcagactttcccgcactatgaggcaagctcagccacaacaagtccctttttcaagcctccagcccagcacctcaacggctccgctgccttcaacggggtggacgacggtaggctcgccagcgccgaccggcatactgaggtcccaacaggcacttgtcccgtggatccttttgaggcccaatgggccgcactcgagaataagtccaagcagcggaccaacccgagtccaacaaatccattcagtagtgacctccagaaaactttcgagatcgaactttag

SEQ ID NO: 22021 - DNA, 702 bp, Artificial Sequence
  derived and/or modified sequence
atgaacaagctgagacagagcttcagaagaaagaaggacgtgtacgtgcccgaggccagcagaccccaccagtggcagaccgacgaggagggcgtgagaaccggcaagtgcagcttccccgtgaagaccggcaagaaggccgtgaaggccgtgctgtgggtgagcgccgacggcctgagagtggtggacgagaagaccaaggacctgatcgtggaccagaccatcgagaaggtgagcttctgcgcccccgacagaaacttcgacagagccttcagctacatctgcagagacggcaccaccagaagatggatctgccactgcttcatggccgtgaaggacaccggcgagagactgagccacgccgtgggctgcgccttcgccgcctgcctggagagaaagcagaagagagagaaggagtgcggcgtgaccgccaccttcgacgccagcagaaccaccttcaccagagagggcagcttcagagtgaccaccgccaccgagcaggccgagagagaggagatcatgaagcagatgcaggacgccaagaaggccgagaccgacaagatcgtggtgggcagcagcgtggcccccggcaacaccgcccccagccccagcagccccaccagccccaccagcgacgccaccaccagcctggagatgaacaacccccacgccatccccagaagacacgcccccatcgagtag

SEQ ID NO: 22022 - DNA, 1779 bp, Artificial Sequence
  derived and/or modified sequence
atgaacaagctgagacagagcttcagaagaaagaaggacgtgtacgtgcccgaggccagcagaccccaccagtggcagaccgacgaggagggcgtgagaaccggcaagtgcagcttccccgtgaagtacctgggccacgtggaggtggacgagagcagaggcatgcacatctgcgaggacgccgtgaagagactgaaggccaccggcaagaaggccgtgaaggccgtgctgtgggtgagcgccgacggcctgagagtggtggacgagaagaccaaggacctgatcgtggaccagaccatcgagaaggtgagcttctgcgcccccgacagaaacttcgacagagccttcagctacatctgcagagacggcaccaccagaagatggatctgccactgcttcatggccgtgaaggacaccggcgagagactgagccacgccgtgggctgcgccttcgccgcctgcctggagagaaagcagaagagagagaaggagtgcggcgtgaccgccaccttcgacgccagcagaaccaccttcaccagagagggcagcttcagagtgaccaccgccaccgagcaggccgagagagaggagatcatgaagcagatgcaggacgccaagaaggccgagaccgacaagatcgtggtgggcagcagcgtggcccccggcaacaccgcccccagccccagcagccccaccagccccaccagcgacgccaccaccagcctggagatgaacaacccccacgccatccccagaagacacgcccccatcgagcagctggccagacagggcagcttcagaggcttccccgccctgagccagaagatgagccccttcaagagacagctgagcctgagaatcaacgagctgcccagcaccatgcagagaaagaccgacttccccatcaagaacgccgtgcccgaggtggagggcgaggccgagagcatcagcagcctgtgcagccagatcaccaacgccttcagcacccccgaggaccccttcagcagcgcccccatgaccaagcccgtgaccgtggtggccccccagagccccaccttccagggcaccgagtggggccagagcagcggcgccgccagccccggcctgttccaggccggccacagaagaacccccagcgaggccgacagatggctggaggaggtgagcaagagcgtgagagcccagcagccccaggccagcgccgcccccctgcagcccgtgctgcagccccccccccccaccgccatcagccagcccgccagccccttccagggcaacgccttcctgaccagccagcccgtgcccgtgggcgtggtgcccgccctgcagcccgccttcgtgcccgcccagagctaccccgtggccaacggcatgccctaccccgcccccaacgtgcccgtggtgggcatcacccccagccagatggtggccaacgtgttcggcaccgccggccacccccaggccgcccacccccaccagagccccagcctggtgagacagcagaccttcccccactacgaggccagcagcgccaccaccagccccttcttcaagccccccgcccagcacctgaacggcagcgccgccttcaacggcgtggacgacggcagactggccagcgccgacagacacaccgaggtgcccaccggcacctgccccgtggaccccttcgaggcccagtgggccgccctggagaacaagagcaagcagagaaccaaccccagccccaccaaccccttcagcagcgacctgcagaagaccttcgagatcgagctgtag

SEQ ID NO: 22023 - protein, 502 aa, Artificial Sequence
  derived and/or modified sequence
MDVVARGTTTRRSRLKRSDGSTTSTSFILRQGSADSYTSRPSDSDVSLEEDREAIRQEREQQAAIQLERAKSKPVAFAVKTNVSYCGALDEDVPVPSTAISFDAKDFLHIKEKYNNDWWIGRLVKEGCEIGFIPSPLRLENIRIQQEQKRGRFHGGKSSGNSSSSLGEMVSGTFRATPTSTAKQKQKVTEHIPPYDVVPSMRPVVLVGPSLKGYEVTDMMQKALFDFLKHRFDGRISITRVTADISLAKRSVLNNPSKRAIIERSNTRSSLAEVQSEIERIFELARSLQLVVLDADTINHPAQLIKTSLAPIIVHVKVSSPKVLQRLIKSRGKSQSKHLNVQLVAADKLAQCPPEMFDVILDENQLEDACEHLGEYLEAYWRATHTTSSTPMTPLLGRNLGSTALSPYPTAISGLQSQRMRHSNHSTENSPIERRSLMTSDENYHNERARKSRNRLSSSSQHSRDHYPLVEEDYPDSYQDTYKPHRNRGSPGGYSHDSRHRL

SEQ ID NO: 22024 - DNA, 1509 bp, Artificial Sequence
  derived and/or modified sequence
atggacgtggttgcccgaggtacaactacgcgacggtcccgcctgaaaaggtctgacggcagcacaacgtccacatcctttattctccggcaaggatccgctgatagctataccagcagacccagtgatagcgacgtctctctggaagaggacagggaggctattagacaggagcgagaacaacaggctgccatccagcttgagagagctaaaagcaaacccgtcgcctttgcagtgaagaccaatgtgtcctactgcggagccctcgacgaagacgttcccgtgccctcaacagccatttcgttcgatgcaaaagacttcctacatatcaaggaaaagtataataacgattggtggatcggcaggttggtgaaagaggggtgcgaaattggatttataccctccccactccgactcgagaacataagaatccaacaagagcagaagcggggccgctttcatggcggtaagagttcaggcaattcgtccagcagcctcggggagatggtgtctggaacattccgtgcaaccccgacgtccaccgctaaacagaagcaaaaggtaactgagcatatccccccttacgacgtggtcccttccatgcgcccagttgttctcgtaggcccatctctcaagggctacgaggttactgacatgatgcaaaaggccctgtttgatttcctcaaacaccgcttcgatgggcggatatcgattactcgagtcactgcagacataagcctggccaaaagatccgttcttaacaacccttctaagagagccatcatcgaaagatcgaacacaagatcttccctcgccgaggtacaatcagaaatcgagagaatttttgaacttgctcggagcctgcaactcgtggtactggatgcggacaccattaaccaccccgctcagctgataaagacctccctcgcacccattatagtgcatgtcaaggtgtctagccctaaagtgctacagcggctgattaaatctagaggtaagtcgcagtctaaacacttgaacgttcaactcgttgccgcagacaaattggctcaatgccctcccgagatgtttgatgtgatcctggacgagaaccagctggaggatgcctgtgagcatctaggagagtacttggaggcctactggcgagcaacacataccacatccagcaccccaatgaccccgttgttagggcggaatctcggatctacagcattatcaccgtaccctactgcgatttcaggcctgcagtctcagcgcatgaggcactctaaccactcaactgaaaactctccgatcgagcggcggtcactaatgacaagcgacgagaactaccataatgaaagggcaaggaagtcccgcaatcggctctcctccagtagccagcatagcagggaccactaccctctcgtggaggaggattaccctgacagctaccaagacacttacaaacctcaccgcaaccgcggcagtccagggggatactcacatgactcaaggcaccgcctttag

SEQ ID NO: 22025 - DNA, 1509 bp, Artificial Sequence
  derived and/or modified sequence
atggatgtggtggcccggggcaccaccaccaggaggagccggctgaagagaagtgatggcagcaccaccagcaccagcttcatcctgcggcagggcagcgctgacagctacaccagccggcccagcgacagtgatgtgtccctggaggaggaccgggaggccatccggcaggagcgggagcagcaggccgccatccagctggagcgggccaagagcaagcctgtggcctttgctgtgaagaccaacgtgtcctactgtggggccctggatgaagatgtgcctgtgcccagcacagccatcagctttgatgccaaggacttcctgcacatcaaggagaagtacaacaatgactggtggattggccgcctggtgaaggagggctgtgagatcggcttcatccccagccccctgcggctggagaacatccgcatccagcaggagcagaagaggggccgcttccacggcggcaagagcagcggcaacagcagcagcagcctgggggagatggtgtctggcaccttccgggccacccccaccagcacagccaagcagaagcagaaggtgacagagcacatccccccctatgatgtggtgcccagcatgaggcctgtggtgctggtgggccccagcctgaagggctatgaggtgacagacatgatgcagaaggccctgtttgacttcctgaagcacagatttgatggccgcatcagcatcaccagggtgacagctgacatcagcctggccaagaggtctgtgctgaacaaccccagcaagagggccatcatcgagaggagcaacaccaggagcagcctggccgaggtgcagagcgagattgaaagaatttttgagctggcccggagcctgcagctggtggtgctggatgctgacaccatcaaccacccagcccagctgatcaagaccagcctggcccccatcatcgtgcacgtgaaggtgagcagccccaaggtgctgcagaggctcatcaagagccggggcaagagccagagcaagcacctgaatgtgcagctggtggccgctgacaagctggcccagtgccccccagagatgtttgatgtgatcctggatgagaaccagctggaggatgcctgtgagcacctgggggagtacctggaggcctactggagggccacccacaccaccagcagcacccccatgacccccctgctgggcaggaacctgggcagcacagccctgagcccctaccccacagccatcagcggcctgcagagccagaggatgaggcacagcaaccacagcacagagaacagccccatcgagcggcgcagcctgatgaccagtgatgagaactaccacaatgaaagagccaggaagagcaggaaccggctgagcagcagcagccagcacagccgggaccactaccccctggtggaggaggactacccagacagctaccaggacacctacaagccccacaggaacagaggcagccctgggggctacagccatgacagccgccaccggctgtag

SEQ ID NO: 22026 - DNA, 1509 bp, Artificial Sequence
  derived and/or modified sequence
atggacgtggtggcccggggcaccaccacccggcggagccggctgaagaggtccgatggctccacaacgtcgaccagttttatcttacgacagggttccgccgattcctatacaagtcggccctccgattcagatgtcagcctcgaggaagatcgagaagccattagacaggagcgggagcagcaggccgccatccaactggagcgcgcaaaatcaaagccagtggccttcgctgtgaagacaaacgtcagctactgtggagcgctagacgaggacgtgccggtcccatccaccgcaatcagctttgacgcaaaagatttcctccacattaaggagaaatacaataacgattggtggatcgggcggctagttaaagaagggtgtgagatcggctttatcccctcacccctgaggctcgagaatattcgcatacaacaggaacaaaagcggggccggttccatgggggcaagtcctctggaaacagctcatcttcattaggggaaatggtaagcggtaccttccgcgcaactcccacctccactgccaagcagaagcaaaaagtgaccgaacatatccccccatacgatgtagtgccttcaatgcgccccgtggttcttgtgggaccctcgctgaagggctacgaggtaacggacatgatgcagaaggctttatttgacttccttaagcaccggttcgacggccgcatctcaatcacccgagttaccgcagacatcagcttagctaagcggtcggtgttaaataacccatctaagagagcaataatcgaaaggtccaacaccagaagctccctcgcagaggtgcagagcgagatcgaaaggatcttcgaactggcccgcagtctccagctcgtagtgttagacgccgataccatcaatcaccctgctcaactgatcaagacctctttggcacccattattgtgcacgtgaaggtgtcatccccaaaagtgttacaaagactgatcaagtctagaggtaagtctcagtcgaaacatctgaacgtccagcttgttgctgccgacaagctagcccaatgtccaccagaaatgttcgacgtgatcctggatgaaaatcagctcgaggatgcgtgtgaacacctcggtgaatacctagaggcctactggagggctacacacaccacttcttccacacccatgacaccccttctcggtcggaatcttggtagtaccgctctttctccttatcctaccgcgatatcaggcttgcagtcccagcgcatgcgccatagtaaccattctacagagaatagcccgatcgagcgtcgcagtctgatgacctccgacgagaactatcataacgaacgagccaggaaaagcaggaatcgcctgtcctcgagttcccagcactccagggatcattacccactggtggaggaagactaccctgactcataccaggatacttacaagccacacagaaacagaggctcaccgggaggctattcccatgactccaggcatagactttag

SEQ ID NO: 22027 - DNA, 1509 bp, Artificial Sequence
  derived and/or modified sequence
atggatgtggtagctaggggcaccacaaccagaaggtccagacttaaacggtccgacggctcgactacctcaacttcatttattcttcgacagggcagtgcagatagctacacctctcgcccttccgattctgacgttagtctggaagaggacagggaggcaatccgccaggagcgcgaacagcaggcggctatccaactggagagggcgaaaagcaagcctgtcgctttcgccgtgaaaacaaatgttagctactgcggcgcacttgatgaggacgtccccgttccatctactgctatcagcttcgatgcaaaggattttttgcacattaaggagaaatacaacaatgattggtggatcggaaggctggttaaagagggatgtgagatcggtttcattccctcccctttgcggctggagaatattcggattcagcaagagcagaagcgcggacggttccatggcggtaagagttcagggaacagttcatcatcccttggcgaaatggtgtccggtacatttagagcaacgcccacttccacagcaaaacagaaacaaaaggtgaccgagcacatccccccttacgacgtggtgccaagcatgcgtcccgtggtcctggttggcccaagtcttaagggttacgaggtcactgatatgatgcagaaggcactcttcgactttctgaaacacaggttcgacggacgcatcagcataaccagggtgacggctgatattagccttgccaagcgttctgtattaaataatccctctaagagagcaatcatcgaacggtccaatacaaggtcttctctggcagaggtgcagtctgagattgagagaatcttcgagcttgctagatctctgcagctggtggtgctggacgctgacactatcaaccaccctgcccagttaattaagaccagtctagccccaattatcgtgcacgtcaaggtctctagccctaaggtgctgcagagactcatcaaatctagggggaaatctcagtcaaagcatttgaatgtccagcttgtggccgctgacaagctggcgcagtgccctcccgagatgtttgatgtgattctggacgaaaatcagctcgaagacgcctgcgaacacctgggagagtacctcgaagcatactggcgtgccacccataccacctcttcaactcccatgactcccctgttgggacgcaacttgggttcaactgccctgagcccttaccccaccgccatctcagggcttcagagccagcgcatgcgacactctaatcactcgacagaaaatagcccaattgagcgtagatctctcatgacttctgatgaaaattaccacaatgaaagggctcgcaagagcaggaataggctgtcatcctcttctcagcacagcagggatcactaccccctggttgaagaagattaccctgactcttaccaggatacgtacaagccccatcggaataggggatcgcccggaggttacagccatgactctagacatcgcctctag

SEQ ID NO: 22028 - DNA, 1886 bp, Artificial Sequence
  derived and/or modified sequence
ccgctccggagcccgcagcctcccccagcggatgccggggactcggaccccgcaccctgagagtctttgttaatggatgtggtggcccgaggcaccacaacccggaggagcaggttgaaaagatccgatggcagcaccacttcgaccagcttcatcctcagacagggttcagcggattcctacacaagcaggccgtctgactccgatgtctctttggaagaggaccgggaagcaattcgacaggagagagaacagcaagcagctatccagcttgagagagcaaagtccaaacctgtagcatttgccgtgaagacaaatgtgagctactgcggcgccctggacgaggatgtgcctgttccaagcacagctatctcctttgatgctaaagactttctacatattaaagagaaatataacaatgattggtggataggaaggctggtgaaagagggctgtgaaattggcttcattccaagtccactcagattggagaacatacggatccagcaagaacaaaaaagaggacgttttcacggagggaaatcaagtggaaattcttcttcaagtcttggagaaatggtatctgggacattccgagcaactcccacatcaacagcaaaacagaagcaaaaagtgacggagcacattcctccttacgatgttgtaccgtcaatgcgtccggtggtgttagtggggccgtcactgaaaggttacgaggtaacagacatgatgcagaaagccctctttgatttcctgaagcacaggtttgatgggaggatttcaataacgagagtgacagctgacatttctcttgctaagaggtctgtcctaaataatcccagcaagagagcaataattgaacgttcgaacacccggtccagcttagcggaagtacaaagtgaaattgaaagaatctttgagttggcaagatctttgcaactggttgttcttgatgcagacaccatcaatcacccagcacaacttataaagacttccttagcaccaattattgttcatgtaaaagtctcatctccaaaggttttacagcggttgattaaatctagaggaaagtcacaaagtaaacacttgaatgttcaactggtggcagctgataaacttgcacaatgccccccagaaatgtttgatgttatattggatgaaaatcagcttgaggatgcatgtgaacatctaggggagtacctggaggcgtactggcgtgccacccacacaaccagtagcacacccatgaccccgctgctgggaaggaatttgggctccacggcactctcaccatatcccacagcaatttctgggttacagagtcagcgaatgaggcacagcaaccactccacagagaactctccaattgaaagacgaagtctaatgacctctgatgaaaattatcacaatgaaagggctcggaagagtaggaaccgcttgtcttccagttctcagcatagccgagatcattaccctcttgtggaagaagattaccctgactcataccaggacacttacaaaccccataggaaccgaggatcacctgggggatatagccatgactcccgacataggctttgagtctaatgaaacaaaaaatattcatctgttgacaatttgccatagcagtgctaggataaaccaatcatcttaacttggctaacatagcacagtatttactgtgctaatgggctgctgtcattttatgctaagtaaggggcaaaaaaaaaaattacattatgcccttgagtctagatggatattagatgcccgatcatatagatatttttaagtgcaacatttacatgataacagtacattttgttttcttcatagatttagacacatcaatttgtaatttagggtacttacaaggcacatataaa

SEQ ID NO: 22029 - DNA, 1509 bp, Artificial Sequence
  derived and/or modified sequence
atggacgtggtggccagaggcaccaccaccagaagaagcagactgaagagaagcgacggcagcaccaccagcaccagcttcatcctgagacagggcagcgccgacagctacaccagcagacccagcgacagcgacgtgagcctggaggaggacagagaggccatcagacaggagagagagcagcaggccgccatccagctggagagagccaagagcaagcccgtggccttcgccgtgaagaccaacgtgagctactgcggcgccctggacgaggacgtgcccgtgcccagcaccgccatcagcttcgacgccaaggacttcctgcacatcaaggagaagtacaacaacgactggtggatcggcagactggtgaaggagggctgcgagatcggcttcatccccagccccctgagactggagaacatcagaatccagcaggagcagaagagaggcagattccacggcggcaagagcagcggcaacagcagcagcagcctgggcgagatggtgagcggcaccttcagagccacccccaccagcaccgccaagcagaagcagaaggtgaccgagcacatccccccctacgacgtggtgcccagcatgagacccgtggtgctggtgggccccagcctgaagggctacgaggtgaccgacatgatgcagaaggccctgttcgacttcctgaagcacagattcgacggcagaatcagcatcaccagagtgaccgccgacatcagcctggccaagagaagcgtgctgaacaaccccagcaagagagccatcatcgagagaagcaacaccagaagcagcctggccgaggtgcagagcgagatcgagagaatcttcgagctggccagaagcctgcagctggtggtgctggacgccgacaccatcaaccaccccgcccagctgatcaagaccagcctggcccccatcatcgtgcacgtgaaggtgagcagccccaaggtgctgcagagactgatcaagagcagaggcaagagccagagcaagcacctgaacgtgcagctggtggccgccgacaagctggcccagtgcccccccgagatgttcgacgtgatcctggacgagaaccagctggaggacgcctgcgagcacctgggcgagtacctggaggcctactggagagccacccacaccaccagcagcacccccatgacccccctgctgggcagaaacctgggcagcaccgccctgagcccctaccccaccgccatcagcggcctgcagagccagagaatgagacacagcaaccacagcaccgagaacagccccatcgagagaagaagcctgatgaccagcgacgagaactaccacaacgagagagccagaaagagcagaaacagactgagcagcagcagccagcacagcagagaccactaccccctggtggaggaggactaccccgacagctaccaggacacctacaagccccacagaaacagaggcagccccggcggctacagccacgacagcagacacagactgtag

SEQ ID NO: 22030 - protein, 487 aa, Artificial Sequence
  derived and/or modified sequence
MYDNLYLHGIEDSEAGSADSYTSRPSDSDVSLEEDREAIRQEREQQAAIQLERAKSKPVAFAVKTNVSYCGALDEDVPVPSTAISFDAKDFLHIKEKYNNDWWIGRLVKEGCEIGFIPSPLRLENIRIQQEQKRGRFHGGKSSGNSSSSLGEMVSGTFRATPTSTVKMVLKIHTEHIPPYDVVPSMRPVVLVGPSLKGYEVTDMMQKALFDFLKHRFDGRISITRVTADISLAKRSVLNNPSKRAIIERSNTRSSLAEVQSEIERIFELARSLQLVVLDADTINHPAQLIKTSLAPIIVHVKVSSPKVLQRLIKSRGKSQSKHLNVQLVAADKLAQCPPEMFDVILDENQLEDACEHLGEYLEAYWRATHTTSSTPMTPLLGRNLGSTALSPYPTAISGLQSQRMRHSNHSTENSPIERRSLMTSDENYHNERARKSRNRLSSSSQHSRDHYPLVEEDYPDSYQDTYKPHRNRGSPGGYSHDSRHRL

SEQ ID NO: 22031 - protein, 486 aa, Artificial Sequence
  derived and/or modified sequence
MYDNLYLHGIEDSEAGSADSYTSRPSDSDVSLEEDREAIRQEREQQAAIQLERAKSKPVAFAVKTNVSYCGALDEDVPVPSTAISFDAKDFLHIKEKYNNDWWIGRLVKEGCEIGFIPSPLRLENIRIQQEQKRGRFHGGKSSGNSSSSLGEMVSGTFRATPTSTAKQKQKVTEHIPPYDVVPSMRPVVLVGPSLKGYEVTDMMQKALFDFLKHRFDGRISITRVTADISLAKRSVLNNPSKRAIIERSNTRSSLAEVQSEIERIFELARSLQLVVLDADTINHPAQLIKTSLAPIIVHVKVSSPKVLQRLIKSRGKSQSKHLNVQLVAADKLAQCPPEMFDVILDENQLEDACEHLGEYLEAYWRATHTTSSTPMTPLLGRNLGSTALSPYPTAISGLQSQRMRHSNHSTENSPIERRSLMTSDENYHNERARKSRNRLSSSSQHSRDHYPLVEEDYPDSYQDTYKPHRNRGSPGGYSHDSRHRL

SEQ ID NO: 22032 - DNA, 1464 bp, Artificial Sequence
  derived and/or modified sequence
atgtacgacaatctgtatctgcatgggatagaagactctgaggcaggtagcgccgattcctacacctccaggccatccgactcagacgtgagcctggaggaggatagggaagctataagacaagagagagagcaacaggccgccatccagctagagcgtgcaaaatccaaacccgtagccttcgcggtaaagacaaatgtgagttattgtggcgcactggatgaagacgttcccgtaccctctacagccatctcattcgatgcaaaagattttttgcacattaaggaaaaatacaataacgattggtggattggccgcttagtgaaggagggttgcgagatagggttcatcccatctccactgaggttggagaacatccgcatacaacaggagcagaagcgtggccgcttccacggggggaaaagctccggcaatagtagctctagccttggagagatggtctcaggcaccttcagagccacgcccacgagcaccgtcaagatggtgctgaagatccataccgagcatatacctccctatgatgttgtcccatcaatgcgccccgttgtgttggtaggaccaagtttgaaagggtatgaagttactgacatgatgcagaaggccctttttgacttcctgaagcatcgttttgacggaagaatcagcattacacgtgtgacagctgacatcagcctggcgaaacggagcgtcctgaacaatccatccaagagggccatcatcgagcgaagtaatacacgctctagccttgctgaagtgcagagcgaaattgagcggatctttgaactcgcgaggtctctgcagcttgtggtccttgacgccgacaccattaaccacccagctcagctgatcaagacttccctggcacctattattgtccatgtgaaggtgtccagcccgaaggtacttcaacggctcataaaatcaagggggaaatctcagagtaaacacctgaacgtgcagctggtggctgcagacaagcttgctcagtgtccccctgagatgttcgacgtgattcttgatgagaatcagctagaggacgcttgcgagcacttaggggagtatttagaagcctactggagggccactcacactactagctccaccccgatgacgccattactgggacgaaatcttggcagcactgctctgagtccctaccctacagccattagtggtctgcagagtcaaaggatgcgccactccaatcatagtacagagaactctcccatcgagaggcgaagtctgatgactagcgacgagaactaccataatgaacgggcacgcaagtctcggaaccgtctgtcttcctctagtcagcatagtagggatcactatcctctagttgaagaagattatccagatagttaccaagatacatacaagccacaccgtaaccgagggagtcctggaggatatagtcatgacagccgacacaggctgtag

SEQ ID NO: 22033 - DNA, 1461 bp, Artificial Sequence
  derived and/or modified sequence
atgtacgataacttgtacttacacggcatcgaagacagtgaagctggtagcgccgattcgtatacaagccgcccctccgattcagatgtctccctcgaagaggatcgcgaagcaattcgtcaagagcgagagcagcaggcggccatacaactggaacgggccaagtccaagcccgttgccttcgcggtgaaaaccaatgtgtcttactgcggagctctcgatgaagatgttcctgtgccctcaaccgccatctccttcgatgcgaaagatttcctccacattaaagagaaatataataatgattggtggattggaagacttgtgaaggaggggtgcgaaattggcttcatcccctccccactgcggctcgaaaacatcaggatccagcaggagcagaagcgagggcggttccacgggggaaagtcttccgggaacagtagctcatctcttggtgagatggtgtcaggcacattccgggccaccccaacatccaccgctaagcagaaacaaaaggtaactgagcatataccaccgtatgatgttgttccttccatgagacctgtcgtgttggtcgggcccagtcttaaaggctacgaagtgaccgacatgatgcaaaaagcccttttcgatttcctgaaacacaggtttgacggtaggatttccattacccgggtaacagcagatatctcactggccaaaagatctgtactgaataacccttccaaacgggctatcatcgaaagatctaacacacggtcttcactagctgaagtgcagagtgaaattgagagaatatttgaactggcccggtctttgcagctagtcgtcctggatgcagacactattaaccaccccgcgcagctcatcaagaccagtttggccccaattatagtccacgttaaggtgtcgtccccaaaagtcctgcaaaggctcataaagtctcggggaaagtcccagtccaaacacctgaacgtgcaactggtggcagccgataaattggcacagtgtcctccagaaatgtttgatgtgatccttgacgaaaatcagcttgaggatgcttgtgagcacttaggcgaatatctcgaagcctattggagagcgacacacaccacctcaagcacccccatgacaccattgcttggacgaaatcttgggagtaccgctctgtccccctacccaacggccatctccggacttcagtcccagcggatgaggcattctaatcactcgaccgagaattcaccaatagagagacggtccttaatgacaagcgatgaaaactaccataatgagagggccaggaaaagtaggaaccgcttgtcgtcttcttcgcagcacagccgcgaccattatcctcttgtagaagaagactatcccgatagctatcaggacacctacaaaccacatagaaatagggggagccctggggggtacagtcatgactcgagacaccgtctgtag

SEQ ID NO: 22034 - DNA, 1464 bp, Artificial Sequence
  derived and/or modified sequence
atgtatgacaacctgtacctgcacggcattgaagattctgaggccggcagcgctgacagctacaccagccggcccagcgacagtgatgtgtccctggaggaggaccgggaggccatccggcaggagcgggagcagcaggccgccatccagctggagcgggccaagagcaagcctgtggcctttgctgtgaagaccaacgtgtcctactgtggggccctggatgaagatgtgcctgtgcccagcacagccatcagctttgatgccaaggacttcctgcacatcaaggagaagtacaacaatgactggtggattggccgcctggtgaaggagggctgtgagatcggcttcatccccagccccctgcggctggagaacatccgcatccagcaggagcagaagaggggccgcttccacggcggcaagagcagcggcaacagcagcagcagcctgggggagatggtgtctggcaccttccgggccacccccaccagcacagtgaagatggtgctgaagatccacacagagcacatccccccctatgatgtggtgcccagcatgaggcctgtggtgctggtgggccccagcctgaagggctatgaggtgacagacatgatgcagaaggccctgtttgacttcctgaagcacagatttgatggccgcatcagcatcaccagggtgacagctgacatcagcctggccaagaggtctgtgctgaacaaccccagcaagagggccatcatcgagaggagcaacaccaggagcagcctggccgaggtgcagagcgagattgagcgcatctttgagctggcccggagcctgcagctggtggtgctggatgctgacaccatcaaccacccagcccagctgatcaagaccagcctggcccccatcatcgtgcacgtgaaggtgagcagccccaaggtgctgcagaggctcatcaagagccggggcaagagccagagcaagcacctgaatgtgcagctggtggccgctgacaagctggcccagtgccccccagagatgtttgatgtgatcctggatgagaaccagctggaggatgcctgtgagcacctgggggagtacctggaggcctactggagggccacccacaccaccagcagcacccccatgacccccctgctgggcaggaacctgggcagcacagccctgagcccctaccccacagccatcagcggcctgcagagccagaggatgaggcacagcaaccacagcacagagaacagccccattgaaagaagaagcctgatgaccagtgatgagaactaccacaatgaaagagccaggaagagcaggaaccggctgagcagcagcagccagcacagccgggaccactaccccctggtggaggaggactacccagacagctaccaggacacctacaagccccacaggaacagaggcagccctgggggctacagccatgacagccgccaccggctgtag

SEQ ID NO: 22035 - DNA, 1461 bp, Artificial Sequence
  derived and/or modified sequence
atgtatgacaacctgtacctgcacggcattgaagattctgaggccggcagcgctgacagctacaccagccggcccagcgacagtgatgtgtccctggaggaggaccgggaggccatccggcaggagcgggagcagcaggccgccatccagctggagcgggccaagagcaagcctgtggcctttgctgtgaagaccaacgtgtcctactgtggggccctggatgaagatgtgcctgtgcccagcacagccatcagctttgatgccaaggacttcctgcacatcaaggagaagtacaacaatgactggtggattggccgcctggtgaaggagggctgtgagatcggcttcatccccagccccctgcggctggagaacatccgcatccagcaggagcagaagaggggccgcttccacggcggcaagagcagcggcaacagcagcagcagcctgggggagatggtgtctggcaccttccgggccacccccaccagcacagccaagcagaagcagaaggtgacagagcacatccccccctatgatgtggtgcccagcatgaggcctgtggtgctggtgggccccagcctgaagggctatgaggtgacagacatgatgcagaaggccctgtttgacttcctgaagcacagatttgatggccgcatcagcatcaccagggtgacagctgacatcagcctggccaagaggtctgtgctgaacaaccccagcaagagggccatcatcgagaggagcaacaccaggagcagcctggccgaggtgcagagcgagattgaaagaatttttgagctggcccggagcctgcagctggtggtgctggatgctgacaccatcaaccacccagcccagctgatcaagaccagcctggcccccatcatcgtgcacgtgaaggtgagcagccccaaggtgctgcagaggctcatcaagagccggggcaagagccagagcaagcacctgaatgtgcagctggtggccgctgacaagctggcccagtgccccccagagatgtttgatgtgatcctggatgagaaccagctggaggatgcctgtgagcacctgggggagtacctggaggcctactggagggccacccacaccaccagcagcacccccatgacccccctgctgggcaggaacctgggcagcacagccctgagcccctaccccacagccatcagcggcctgcagagccagaggatgaggcacagcaaccacagcacagagaacagccccatcgagcggcgcagcctgatgaccagtgatgagaactaccacaatgaaagagccaggaagagcaggaaccggctgagcagcagcagccagcacagccgggaccactaccccctggtggaggaggactacccagacagctaccaggacacctacaagccccacaggaacagaggcagccctgggggctacagccatgacagccgccaccggctgtag

SEQ ID NO: 22036 - DNA, 1464 bp, Artificial Sequence
  derived and/or modified sequence
atgtacgacaacctgtacctgcacggcatcgaggacagcgaggccggatcagctgattcgtatacctccagaccctccgatagcgatgtgagtttggaggaggaccgcgaggccattagacaggaaagggagcagcaggctgcaatccagctcgaaagagctaaatctaaacctgtggcgttcgccgtgaagacaaatgtgtcatactgcggcgcccttgatgaggatgtcccagttcccagcacagctatcagttttgacgccaaagattttctccacatcaaggaaaaatacaacaacgattggtggatcgggaggctggtcaaggaagggtgtgaaattggatttatcccctcccctcttaggctcgagaacattaggatccaacaagaacagaaaaggggacggtttcacgggggaaaatcaagcgggaactcgagcagtagcctcggagagatggtctcagggacgttccgagctacgcccacctctacggtgaagatggtcctgaagatccataccgaacatatccccccatacgatgtagtgccctccatgaggccagtcgtgctggtcgggccttctctgaaaggatatgaggttacagacatgatgcagaaagctctgtttgattttctaaaacacagattcgatggtagaatctcaattaccagagtgacggctgatattagtctggctaagcggtcggtactgaataaccccagcaagagagcaataatcgagaggtctaacacgcggtccagcctcgcagaagtgcaaagcgagattgagcgtatctttgaacttgcgcgtagcttgcagcttgtcgtgctggacgctgatacaatcaatcacccagcccagctaatcaagacctcccttgcccccataattgtacatgtgaaggttagcagccctaaagtgctccagagactaattaaaagcagagggaagtcccagtcaaagcacttaaatgttcagctcgttgctgcagacaaactcgcccagtgccctcctgagatgttcgatgtcatactggacgaaaaccagctcgaagacgcctgcgaacatctcggagagtacctcgaggcatactggcgcgctacacacactacatcgtccacccctatgacacccctcctgggccgcaacctcgggagtaccgcactctccccctacccgacagcaatctccggtctgcagagtcagcgcatgcgacactccaatcattcgacagagaattcccccatcgagcgacgaagtttgatgacttctgacgagaactatcataatgagcgggccaggaaaagccgaaatcggctttcatcgagctcacagcattctcgggaccactatccactcgttgaagaggattaccctgacagctaccaggacacctacaagcctcatcgcaacagaggtagccccgggggatattcacacgactcgaggcaccgcttatag

SEQ ID NO: 22037 - DNA, 1461 bp, Artificial Sequence
  derived and/or modified sequence
atgtacgacaacctgtacctgcacggcatcgaggacagcgaggccgggtctgcagattcgtatactagcaggccttccgactctgacgtctccctagaggaggacagggaggccattagacaggaacgtgagcagcaggcggcaatccagctggagagggccaaatctaagccagtggccttcgcagtgaagactaacgtcagctactgcggagcactggacgaagatgtgcccgttcccagcactgccatctccttcgatgccaaagatttcctgcacatcaaggagaaatataacaatgattggtggatagggcgtcttgtcaaagagggttgtgagattggttttattccgtcccccctgagattggaaaatatccgcatccagcaggaacagaagcggggacgatttcacggtgggaaaagtagtggcaactcgtcaagttctttgggggaaatggtgtccggaaccttccgagccacacccacatccaccgcaaaacaaaaacaaaaggtcacagagcatataccaccatatgacgttgtgccctctatgcgcccagttgtactcgttggcccctctctgaagggctacgaggtgaccgacatgatgcagaaggccttgttcgatttcctgaaacatcggtttgacggtcgaatcagcatcacccgagtgactgcagacatctccctggccaaaagaagtgtcctcaacaacccctctaagagagccataattgagagatcaaatacacgctcatcccttgctgaggtccagagcgagattgagagaatctttgaactcgctagatcgcttcagctcgtggttctggatgccgacaccatcaaccaccctgctcaactcattaaaacttccttagctcccatcattgtgcacgtgaaagtcagttcacctaaagtacttcagaggctgatcaagtcaagagggaagtctcagtccaaacatcttaatgtgcaattggtagcggccgacaagctggctcagtgccccccagagatgtttgatgtgattctcgatgaaaatcagctggaggatgcttgtgagcacctgggagagtaccttgaggcatattggcgggccacacacactacttctagtactccaatgactccactgctgggtagaaatctgggcagcactgctctcagcccatatccaaccgcaattagcggcctccagagtcaacgcatgagacacagtaatcattccactgaaaactcgccaatcgagaggaggtcccttatgaccagcgacgagaactatcacaacgaaagggcccgaaaaagtagaaaccgcctcagcagcagctcccagcattcccgcgaccactaccccctagtcgaagaagattatcctgacagctaccaggacacatacaaaccacatagaaacagggggtctcccgggggctattcccatgattccagacacaggttgtag

SEQ ID NO: 22038 - DNA, 1464 bp, Artificial Sequence
  derived and/or modified sequence
atgtatgataacctgtacctgcacggcatagaagattcagaagcaggtagtgctgacagttataccagcaggccatcagacagcgatgtgagccttgaagaggacagagaggctatccgacaggagagggaacagcaggccgcaatacaacttgaacgtgctaaaagtaaacccgtcgcctttgctgttaagacgaatgtgagttattgcggtgctttggacgaagatgttccagtcccttctacagcgattagtttcgacgctaaggattttttgcacattaaagagaagtataacaacgattggtggatcggaagactagtgaaagaaggatgtgaaattgggtttatcccatcgccacttagactggagaacatcagaatccaacaggaacagaagcggggtagattccacggagggaagtccagcggcaattcttcttcaagcctgggtgagatggtatccggtacctttcgcgctactccaacatccaccgtaaaaatggtgctgaagatccataccgagcatatccctccatacgacgtagtgccttctatgcggcctgtggtgctggtgggccctagcttgaaaggatatgaggtgaccgacatgatgcagaaagctctgttcgactttctgaagcacagattcgacgggaggatttcgattacccgagtaaccgctgacatctctctggcaaagagatcggtgttgaataacccctcgaagcgtgcaattattgagcgttccaacaccagaagctccctcgccgaagtgcagtcagaaatcgagcggatatttgagctcgcccgatctttgcagctcgtcgttttagacgccgatacgataaaccaccctgcacaactgatcaagactagcttagcccctatcatcgtgcacgttaaagtgagttcacccaaggtcttgcagaggctcattaagtctcgcggtaagagccagtcaaaacacctgaatgtgcaactcgtggcagccgacaagctcgcacagtgccccccagagatgtttgatgtcattctggatgaaaaccaactcgaagacgcctgcgagcacctcggggagtaccttgaagcatattggcgagccacgcataccaccagctccactccaatgactcctctgctgggtaggaatcttggcagcacggcattatcgccctatccgaccgcaatctcaggcctccagagccaacgaatgcggcactcaaatcacagcaccgagaatagtcctattgaacggcgatcactgatgaccagtgatgaaaactatcataacgaacgggctcgaaagagccgcaaccgactatcatcaagtagccaacatagccgggatcactaccccctggtcgaggaggactaccccgacagttatcaggacacgtataaacctcaccggaatagaggctcgcccggtggctactcgcacgactctaggcacaggttatag

SEQ ID NO: 22039 - DNA, 1461 bp, Artificial Sequence
  derived and/or modified sequence
atgtatgacaacctgtacttgcacggtattgaggactctgaagctggctcagctgacagctatacttcccgcccttcagactctgacgtatccctagaggaggatcgcgaggccattcgccaggaaagggagcagcaggccgcaatccagttggaacgcgctaaatctaagcccgtcgcatttgccgttaagactaacgtaagttactgcggcgctcttgacgaagacgtgcctgtaccaagcacagcgatctcattcgacgctaaggacttcctccacattaaagagaaatacaacaatgattggtggataggacgccttgttaaggagggatgtgagatcggatttatcccatcccctctgagactcgaaaatattcgtattcaacaggagcagaaacgaggccgtttccacggtggaaaatcttctggcaactcatcttcttccctgggagaaatggtgagcggaacctttagagcaacacctacatctactgcaaagcagaaacagaaggttacagagcacatccctccttatgatgtcgttccctctatgcgaccggtcgttctagttggcccatccctgaagggttatgaagtgacagatatgatgcagaaagccttattcgactttctcaaacaccgattcgatggaagaatttcaataacccgcgtgacagccgatatatctctggctaagcggagtgttcttaacaatcccagcaagcgtgcaattatcgaacgaagcaatacccggagctcactggccgaggttcagtctgaaatcgagaggatcttcgagctagctcgatccctgcagctagtggtgctcgacgctgataccattaaccaccctgcgcagttaattaaaacttccctggcacctatcattgtgcacgtgaaggtcagcagtcccaaagtgttgcagagactcatcaagtccaggggtaaatcccagagcaaacatctgaacgtgcagctcgtcgccgctgataaattggctcagtgtcctccagaaatgtttgacgtgatcctcgacgagaaccagttggaagatgcgtgtgagcaccttggggaatatctcgaagcgtactggagggccacccacaccaccagcagtacacccatgacccctttgctaggtcgcaatcttggttctacagccctgagtccttacccaacggcaatctctgggctccagagtcaaagaatgcggcattctaaccatagtactgaaaactcaccgattgagagacggagtttaatgacttcagacgaaaactaccataacgagagggccagaaaatctcggaaccggctatcctcctcctcacagcatagccgggatcattaccccctagtcgaggaagattatcccgactcgtaccaggacacttacaaacctcatcgcaatcggggaagccccggaggatactctcacgactccagacatcgactttag

SEQ ID NO: 22040 - DNA, 8055 bp, Artificial Sequence
  derived and/or modified sequence
agtctgtggttgaggaagggttttgctttttgtgctctgtattgggaaggcagataaaatgccaggtctggactgcctctggggataacctcaccctgtgggatgtgaatgaatagcatcttgcctggtaaatccacaggaattgataaggcaggcgcagttctcccaaacaggccttttctctttaagctgtagctgtggtttctgcagcaattttgtttttgccttgaaagaggtgctctggattatcacacctccatgtatgacaatttgtacctgcatggaattgaagactcggaggctggttcagcggattcctacacaagcaggccgtctgactccgatgtctctttggaagaggaccgggaagcaattcgacaggagagagaacagcaagcagctatccagcttgagagagcaaagtccaaacctgtagcatttgccgtgaagacaaatgtgagctactgcggcgccctggacgaggatgtgcctgttccaagcacagctatctcctttgatgctaaagactttctacatattaaagagaaatataacaatgattggtggataggaaggctggtgaaagagggctgtgaaattggcttcattccaagtccactcagattggagaacatacggatccagcaagaacaaaaaagaggacgttttcacggagggaaatcaagtggaaattcttcttcaagtcttggagaaatggtatctgggacattccgagcaactcccacatcaacagttaaaatggtattaaaaattcatacggagcacattcctccttacgatgttgtaccgtcaatgcgtccggtggtgttagtggggccgtcactgaaaggttacgaggtaacagacatgatgcagaaagccctctttgatttcctgaagcacaggtttgatgggaggatttcaataacgagagtgacagctgacatttctcttgctaagaggtctgtcctaaataatcccagcaagagagcaataattgaacgttcgaacacccggtccagcttagcggaagtacaaagtgaaattgaaagaatctttgagttggcaagatctttgcaactggttgttcttgatgcagacaccatcaatcacccagcacaacttataaagacttccttagcaccaattattgttcatgtaaaagtctcatctccaaaggttttacagcggttgattaaatctagaggaaagtcacaaagtaaacacttgaatgttcaactggtggcagctgataaacttgcacaatgccccccagaaatgtttgatgttatattggatgaaaatcagcttgaggatgcatgtgaacatctaggggagtacctggaggcgtactggcgtgccacccacacaaccagtagcacacccatgaccccgctgctgggaaggaatttgggctccacggcactctcaccatatcccacagcaatttctgggttacagagtcagcgaatgaggcacagcaaccactccacagagaactctccaattgaaagacgaagtctaatgacctctgatgaaaattatcacaatgaaagggctcggaagagtaggaaccgcttgtcttccagttctcagcatagccgagatcattaccctcttgtggaagaagattaccctgactcataccaggacacttacaaaccccataggaaccgaggatcacctgggggatatagccatgactcccgacataggctttgagtctaatgaaacaaaaaatattcatctgttgacaatttgccatagcagtgctaggataaaccaatcatcttaacttggctaacatagcacagtatttactgtgctaatgggctgctgtcattttatgctaagtaaggggcaaaaaaaaaaattacattatgcccttgagtctagatggatattagatgcccgatcatatagatatttttaagtgcaacatttacatgataacagtacattttgttttcttcatagatttagacacatcaatttgtaatttagggtacttacaaggcacatataaaataatttcccatgctggaaattccaaatgaccagttccagttggaaccaatttataaaccaattcctgttggaatttgggtgaattgactagaaagtctacttgagcatgttgtaatcaactgaaaaatctggggggaaaaaaaaaaaactaataagaaaatcgaaataccaatagaagccaaatccagctttggtatttatttgctggaagctaaatttacacttaaagttggagtgtataaacattttaatatatgttaatgttgccagaatgacttttcagacttaccaaatgtattgatagtgccaaaaaaaaaatctcagaaatcttaatgcagaaattatatagtctcctcagattttaatatttttatttctttcctggcacagctgttgtattcaaagtgttttgctttttgtttggtcagtactgttagctcatttgaagttggcaaaaacaaatacaaacaagcaaaaaacctcaaatttttttcagcagtgagagagaatagtaaagagaggcccaagcatagctggttatgtgaaatataaaatggggtgttgttctccctttaatcaatctgagcacaactacatacatccaggaatctgaagtcagatagtaaggatgtggtaccaatcctcccgagtgcaatgctaaacacttccaggtgggaattcatctatttcacttaacacaaacgcagggtctgtatttcctgccaacaagattgagtatctttccattgcttctctcagtctctgtctttgaatatctgaatgttctggcccttcaacaaattctttaaatcatgctaaggaatttcgttttatgtggacacactcaactttgatattcaggagatgtttttacaaaatgactaattgaaaaaagttgaaacaaatgattttaaaagcttgcagtaaaaaataaactcatagattcagcaaatatttgttgactaaaattatagcatttttaatgcagaaaattataaagaatttggagattgagctgccttatttctaatgaacactcctcttcatcttattaagtcttcacagtttttccagtggctataattatggaattggtgacctatgttttatattatcaaggaagccttagattcactctgatctaagaaattattgaaattgaccctttttacacaaatgtctttaaaaaaaaaaacttatttctaaatgtccatagtgcatgcattttctaaaaccccaataagtccagccataaaagttcttttctgctagtacatgtcatgaagcctatttttgaaaataatgataattaattttatagtatcttcttttctccccaagcctttcagtattcaggcactcaaagcatgcaccagttcagtaatcttcttgaccatggaaataagttccacattactgatgagttatatatatatcttgaaccccattacaacctcaccacatccccctgcatttatgttcagtgtttgtaccccattatgaacctgtttagctgataatgaggatacctataattctgtaagtcatttcaaatatttgatacaattaaaaaatatgggcttagtaaattttaaaagttaacatgtgatactggcttgtgagattcttctgtcatctagtgaagcttataaaactttcagttaagacattttaaaagagttatatccattaggcactttaataaacatataacctgccattactgaatactttgttagaacacagaagagcatcttccagcaaacaaaaatatatttattacatgtacagcacatacttgcatgagaaagaaaacattagccaaaacatttttctatatgctttactggtttcttgtttatgcgcattaaagtatttaattgcaaagagtgcaccaaggtgtacaaatttagactagacagctgttcagctttttctgtagtagcattagcagtttggtcatttaactactttaagatacttacattttatggcaggtagctgtaacagcatttaaatatatttcctagtcatcaagattaccatcttctttcaactttttaaaagtcacttgtttttaaaggtttttcaaagccttgtttttagtcttccatgtcatgccgataaagagagtctcattcaatatctgtgcacaaaaccaatctatcaattaccatcagatgtccatacctgttttgctttgcattcttattcaaaagctgacaatcttggaaagggtataatgtatattttattgatggatatatttaaatgtttactttaatttggaatattctttccccttctttctgtaataagtttatcttcctcaaataaggggatatacatcttattttttttaaagacttaagagtttattgtgtaaatgatacttaaaatctagatatatactaaatgaaaagttttatttttgccaagcacaccaagcacctttgaaaaatacatactccatactttgtttttaattaatttcatttaaagatagcaaatgattataagcaagagaaacaagtcttttactgttttgaggctgttttaacttacagtataagccacatactagaattctgtaatttcagtcacagacatataataatgtggactcatgtgacaatgtggaaatgtagttctggaaaaaaacgaatgcaatttgtcaatcctgatgttaattctcaagggtataatgtcactctaatattataaccaacaacattatcttgtttaatatttaaagcaacacttagaaatgtttataaatgatgattctctcttatctttatacagttctattggagagaaggttgaaattgttcacaatttagatgatggtctttcctaataagagtcttaattttgtgactatataagtcattgcagttagtctttaatgaaatgaattttattaatgtaaaacaaattctgagacaattatttgtttcctttaaataatctgctatttaattattattgtcgttgtttgcaaaatgtatttttggaatgttaacctcttttcatacctgcatacttgaacttgtcttttgtgtgggggccttaaaattcataataggaagtggaggcagtgaaaggaagtaagaaaaggaaattatgctaaaagatggtttgcaaatttaaattctttaaatgaacatatcacaaaatgttgttaagacccaggatgtccgttaagaatgtgtcttggcaaccttaatttgcatgttagtatatattttcttagttacacagttttattttggtatttgcttaaaaaatgtaataccattgtagaaattaccctatgtactgatatatttactacctcttctctagagaagacaatctgtctttaaagggaaaaacactggtcaataagtagtgatcaaaattatcactattctggctaaccttgctgcaaagctaaatacatagattattaaaatatgccttccctttagattttaaactgtttccaaaatgctgtttggcaccctttcatttcttccacgttagtgaagttttctttgaattggttcacagtttatcatgaggcaaggttaatttaacaaataagtcatcatagggaacaaaacaaactgcaagggaattgcctttgtgtgcaacttgttataatatctagttctaagtctaaaggagtaaaagtccaaagactttatgtttaagagcagctggtttgcaaattcacattttgttggtccttgacttccacagagcatgacttagccatttactgggtaaggatatgcataatcttggactcccatgtaattggaataaacttcatatcaatgtttcaaataaatgctatgtaccccttattccttttacatttctgcctttgtcttttatgacaatgttgcatgttgtgtttttttaaattatataaaactcatccttgaatgactgtatgaatgaaaaatttataggaaattatgtaataaaatctgttttattagtttctcatacctttaaatactgtcaatactataactgttagtaagttacttactcaagctgtgtctatggggcagagaacagtcctcttctttaaaataatcatgatcaaaccagtcaagtcaatccaattagctgttagacagacaataaggataaccttctttttgacttaagcagtcaagttagtcaaaatagaaaaattggcttatatgggcacccagaactacagcattcaaaaattacttttaaaagtttcttcttttattaaaatggactttcttaaataaaatacatcctctgatagcagctatctctttttacttgtaatgattaattctaaatgcttcatgtaattgagggacattatgagaagactagaaagtatctcatcagataatcctaagggctgtaacttctacttgccataaacaaagtataattaagagtgagtagcaattggtttggggagtcgtagttatatatgaaactttcttttgtttctcatgatgtatgtaaaatgtttgcagaaggatggtagaaaatgttactaatgaatttagagtggtttgggagaatacactgatacttcctcatttgaaaattataaggagttacaaggggaactaagaaccagaagtggctggcctctagcttttcaatacctgataagtgttcttggttatgttttgaacacttaaatttctcaacaaatggctatgtctatatttatgtaggggccacccttgccctacttgcatgccactttgacttttaactgaaatcagtgtgaattctgtatgcataagggatgtaataaagaggcgggatcattaacgctatatcgttgcatactatttttcatatgccttacaatattttctgggatgttattaaaatgaaagcattttattgccaaaataaatctatgttgttacttataatctgcattagcagtagaaaaataatgtagcaaaaacatattgtacagtacaaaattataaaatatatattttgccaataatataaaaatagattgaggagaaagaagcacatttgttatagcacaaacttataacaaaatccaccgttaaatttggcagtcatattttttaaaagtatgtcgatttagttctaagttttgtcagatttacttcatctaccatctttttaacttgctgcttgatacttttccagcaatttatttcatagccttgcaatctgtggatgtaatttcttttgttttattcccttccataaaatttattaaattttattttgtgataacactcataccatattttctcctcttatttcttctctttcaataacaacagcagaaagtcacagcaagtgagctcatagggctcctctgaattttggacatgtgtgagatttttgtatttttcacagcctcgagtcagaatgatcaataaagatgtcccaaccacaaaaaattatattagttagggattctttaatttgttttgtactgaatactactttgaaacataagttaaagccattagctgtgtttttgtagggatggtgggaaggaataaaaaataaatgtattaacataaaacatactaaaacagaaatatggcaaaatgatgtaaaaagatttttcctactattctgagggctgttgaaatcccaggctattgctatatctccattgacaaagtgggataaaaaatgcctttgtcaaataattttttttctttctttaaattttagttatttattttaataatttgtccccttttatttttcttatctaggtatgtgtagcattctacaaggcatgctgggtaaaatatactatgcaaatgtgtacagtgctgcatgttttgttctccctctgctttagtggctttaaagaaaaaaacgtggtgttatttttgtgaataaaaacattaacaaagaaaatgcagagtgcatgcatagagtatcctcatttctatggatttgttttatggaatttaaatgtgtacaaaacaactgcattactttttttcttttatataataaatg

SEQ ID NO: 22041 - DNA, 2181 bp, Artificial Sequence
  derived and/or modified sequence
gtgctctgtattgggaaggcagataaaatgccaggtctggactgcctctggggataacctcaccctgtgggatgtgaatgaatagcatcttgcctggtaaatccacaggaattgataaggcaggcgcagttctcccaaacaggccttttctctttaagctgtagctgtggtttctgcagcaattttgtttttgccttgaaagaggtgctctggattatcacacctccatgtatgacaatttgtacctgcatggaattgaagactcggaggctggttcagcggattcctacacaagcaggccgtctgactccgatgtctctttggaagaggaccgggaagcaattcgacaggagagagaacagcaagcagctatccagcttgagagagcaaagtccaaacctgtagcatttgccgtgaagacaaatgtgagctactgcggcgccctggacgaggatgtgcctgttccaagcacagctatctcctttgatgctaaagactttctacatattaaagagaaatataacaatgattggtggataggaaggctggtgaaagagggctgtgaaattggcttcattccaagtccactcagattggagaacatacggatccagcaagaacaaaaaagaggacgttttcacggagggaaatcaagtggaaattcttcttcaagtcttggagaaatggtatctgggacattccgagcaactcccacatcaacagcaaaacagaagcaaaaagtgacggagcacattcctccttacgatgttgtaccgtcaatgcgtccggtggtgttagtggggccgtcactgaaaggttacgaggtaacagacatgatgcagaaagccctctttgatttcctgaagcacaggtttgatgggaggatttcaataacgagagtgacagctgacatttctcttgctaagaggtctgtcctaaataatcccagcaagagagcaataattgaacgttcgaacacccggtccagcttagcggaagtacaaagtgaaattgaaagaatctttgagttggcaagatctttgcaactggttgttcttgatgcagacaccatcaatcacccagcacaacttataaagacttccttagcaccaattattgttcatgtaaaagtctcatctccaaaggttttacagcggttgattaaatctagaggaaagtcacaaagtaaacacttgaatgttcaactggtggcagctgataaacttgcacaatgccccccagaaatgtttgatgttatattggatgaaaatcagcttgaggatgcatgtgaacatctaggggagtacctggaggcgtactggcgtgccacccacacaaccagtagcacacccatgaccccgctgctgggaaggaatttgggctccacggcactctcaccatatcccacagcaatttctgggttacagagtcagcgaatgaggcacagcaaccactccacagagaactctccaattgaaagacgaagtctaatgacctctgatgaaaattatcacaatgaaagggctcggaagagtaggaaccgcttgtcttccagttctcagcatagccgagatcattaccctcttgtggaagaagattaccctgactcataccaggacacttacaaaccccataggaaccgaggatcacctgggggatatagccatgactcccgacataggctttgagtctaatgaaacaaaaaatattcatctgttgacaatttgccatagcagtgctaggataaaccaatcatcttaacttggctaacatagcacagtatttactgtgctaatgggctgctgtcattttatgctaagtaaggggcaaaaaaaaaaattacattatgcccttgagtctagatggatattagatgcccgatcatatagatatttttaagtgcaacatttacatgataacagtacattttgttttcttcatagatttagacacatcaatttgtaatttagggtacttacaaggcacatataaaataatttcccatgctggaaattccaaatgaccagttccagttggaaccaatttataaaccaattcctgttggaatttgggtgaattgactagaaagtctacttgagcatgttgtaatcaactgaaaaatctggggggaaaaaaaaaaaactaataagaaaatcgaaataccaatagaagccaaatcca

SEQ ID NO: 22042 - DNA, 1464 bp, Artificial Sequence
  derived and/or modified sequence
atgtacgacaacctgtacctgcacggcatcgaggacagcgaggccggcagcgccgacagctacaccagcagacccagcgacagcgacgtgagcctggaggaggacagagaggccatcagacaggagagagagcagcaggccgccatccagctggagagagccaagagcaagcccgtggccttcgccgtgaagaccaacgtgagctactgcggcgccctggacgaggacgtgcccgtgcccagcaccgccatcagcttcgacgccaaggacttcctgcacatcaaggagaagtacaacaacgactggtggatcggcagactggtgaaggagggctgcgagatcggcttcatccccagccccctgagactggagaacatcagaatccagcaggagcagaagagaggcagattccacggcggcaagagcagcggcaacagcagcagcagcctgggcgagatggtgagcggcaccttcagagccacccccaccagcaccgtgaagatggtgctgaagatccacaccgagcacatccccccctacgacgtggtgcccagcatgagacccgtggtgctggtgggccccagcctgaagggctacgaggtgaccgacatgatgcagaaggccctgttcgacttcctgaagcacagattcgacggcagaatcagcatcaccagagtgaccgccgacatcagcctggccaagagaagcgtgctgaacaaccccagcaagagagccatcatcgagagaagcaacaccagaagcagcctggccgaggtgcagagcgagatcgagagaatcttcgagctggccagaagcctgcagctggtggtgctggacgccgacaccatcaaccaccccgcccagctgatcaagaccagcctggcccccatcatcgtgcacgtgaaggtgagcagccccaaggtgctgcagagactgatcaagagcagaggcaagagccagagcaagcacctgaacgtgcagctggtggccgccgacaagctggcccagtgcccccccgagatgttcgacgtgatcctggacgagaaccagctggaggacgcctgcgagcacctgggcgagtacctggaggcctactggagagccacccacaccaccagcagcacccccatgacccccctgctgggcagaaacctgggcagcaccgccctgagcccctaccccaccgccatcagcggcctgcagagccagagaatgagacacagcaaccacagcaccgagaacagccccatcgagagaagaagcctgatgaccagcgacgagaactaccacaacgagagagccagaaagagcagaaacagactgagcagcagcagccagcacagcagagaccactaccccctggtggaggaggactaccccgacagctaccaggacacctacaagccccacagaaacagaggcagccccggcggctacagccacgacagcagacacagactgtag

SEQ ID NO: 22043 - DNA, 1461 bp, Artificial Sequence
  derived and/or modified sequence
atgtacgacaacctgtacctgcacggcatcgaggacagcgaggccggcagcgccgacagctacaccagcagacccagcgacagcgacgtgagcctggaggaggacagagaggccatcagacaggagagagagcagcaggccgccatccagctggagagagccaagagcaagcccgtggccttcgccgtgaagaccaacgtgagctactgcggcgccctggacgaggacgtgcccgtgcccagcaccgccatcagcttcgacgccaaggacttcctgcacatcaaggagaagtacaacaacgactggtggatcggcagactggtgaaggagggctgcgagatcggcttcatccccagccccctgagactggagaacatcagaatccagcaggagcagaagagaggcagattccacggcggcaagagcagcggcaacagcagcagcagcctgggcgagatggtgagcggcaccttcagagccacccccaccagcaccgccaagcagaagcagaaggtgaccgagcacatccccccctacgacgtggtgcccagcatgagacccgtggtgctggtgggccccagcctgaagggctacgaggtgaccgacatgatgcagaaggccctgttcgacttcctgaagcacagattcgacggcagaatcagcatcaccagagtgaccgccgacatcagcctggccaagagaagcgtgctgaacaaccccagcaagagagccatcatcgagagaagcaacaccagaagcagcctggccgaggtgcagagcgagatcgagagaatcttcgagctggccagaagcctgcagctggtggtgctggacgccgacaccatcaaccaccccgcccagctgatcaagaccagcctggcccccatcatcgtgcacgtgaaggtgagcagccccaaggtgctgcagagactgatcaagagcagaggcaagagccagagcaagcacctgaacgtgcagctggtggccgccgacaagctggcccagtgcccccccgagatgttcgacgtgatcctggacgagaaccagctggaggacgcctgcgagcacctgggcgagtacctggaggcctactggagagccacccacaccaccagcagcacccccatgacccccctgctgggcagaaacctgggcagcaccgccctgagcccctaccccaccgccatcagcggcctgcagagccagagaatgagacacagcaaccacagcaccgagaacagccccatcgagagaagaagcctgatgaccagcgacgagaactaccacaacgagagagccagaaagagcagaaacagactgagcagcagcagccagcacagcagagaccactaccccctggtggaggaggactaccccgacagctaccaggacacctacaagccccacagaaacagaggcagccccggcggctacagccacgacagcagacacagactgtag

SEQ ID NO: 22044 - DNA, 471 bp, Artificial Sequence
  derived and/or modified sequence
atgattagatcccgcaaggctgtctccaagctttatgccagcaaagcccacatgaacagcgtactgatgggcatgaagaaccagctggctgtgctgagagtggctggaagtttacagaagtccactgaggtgatgaaagccatgcagtctttggtaaagatacctgagatccaggccacaatgagagagctgtcaaaggagatgatgaaggctgggattatagaggagatgctcgaagacacttttgaatccatggatgatcaagaggagatggaggaggaagccgagatggaaatcgaccgcattctctttgagattactgccggcgcattgggtaaggcccctagcaaggttaccgacgctctgcccgagcctgagccacccggagccatggccgccagcgaggatgaggaggaggaggaagaggccttagaagctatgcagagcagactggcaacactgcgaagctag

SEQ ID NO: 22045 - DNA, 471 bp, Artificial Sequence
  derived and/or modified sequence
atgatccgcagcaggaaggctgtgtccaagctgtatgccagcaaggcccacatgaacagcgtgctgatgggcatgaagaaccagctggccgtgctgcgggtggccggcagcctgcagaagagcacagaggtgatgaaggccatgcagagcctggtgaagatccctgagatccaggccaccatgagggagctgagcaaggagatgatgaaggccggcatcatcgaggagatgctggaggacacctttgagagcatggatgaccaggaggagatggaggaggaggccgagatggagattgaccgcatcctgtttgagatcacagctggggccctgggcaaggcccccagcaaggtgacagatgccctgcctgagcctgagcccccaggggccatggccgcctctgaagatgaggaggaggaggaggaggccctggaggccatgcagagccggctggccaccctgcggagctag

SEQ ID NO: 22046 - DNA, 471 bp, Artificial Sequence
  derived and/or modified sequence
atgatccggagccggaaggccgtgagcaagctgtacgccagcaaggctcacatgaattctgtactgatgggcatgaagaaccagctggcggtgctgagggtggcaggctccctgcagaaaagtaccgaagtgatgaaggcaatgcagtcacttgtgaaaattccagaaatccaagccaccatgagggagctttccaaagagatgatgaaagcaggcatcattgaggagatgctggaggatacattcgaatctatggacgatcaggaagagatggaggaggaggccgaaatggagattgaccgtatcctcttcgaaattacagccggcgcattaggtaaggcaccatcgaaggtgacggacgccctgccagaacctgagcctcctggagccatggccgccagcgaggacgaggaagaggaggaagaggcccttgaagctatgcagtctcggttagccactctgaggagctag

SEQ ID NO: 22047 - DNA, 471 bp, Artificial Sequence
  derived and/or modified sequence
atgatcaggtcacggaaagccgtctccaaactctatgccagcaaagcccatatgaacagtgtgttaatgggtatgaagaaccagttagcagtcctgagagtggcaggcagtctccagaaatccacagaagttatgaaagccatgcaatccctggtgaaaataccggaaattcaggctactatgagggaactcagtaaggaaatgatgaaagccggaatcatagaggagatgctagaagatacttttgagagtatggatgatcaggaggaaatggaggaggaggccgaaatggaaattgaccgaatcttatttgaaattacggcaggggcactcggaaaagcacccagtaaagttacagacgctctccccgaaccagaacctcctggagccatggcggcttcagaagatgaggaggaagaagaagaggccctcgaagccatgcagagccgcctggccacgctgagatcctag

SEQ ID NO: 22048 - DNA, 471 bp, Artificial Sequence
  derived and/or modified sequence
atgatcagaagcagaaaggccgtgagcaagctgtacgccagcaaggcccacatgaacagcgtgctgatgggcatgaagaaccagctggccgtgctgagagtggccggcagcctgcagaagagcaccgaggtgatgaaggccatgcagagcctggtgaagatccccgagatccaggccaccatgagagagctgagcaaggagatgatgaaggccggcatcatcgaggagatgctggaggacaccttcgagagcatggacgaccaggaggagatggaggaggaggccgagatggagatcgacagaatcctgttcgagatcaccgccggcgccctgggcaaggcccccagcaaggtgaccgacgccctgcccgagcccgagccccccggcgccatggccgccagcgaggacgaggaggaggaggaggaggccctggaggccatgcagagcagactggccaccctgagaagctag

SEQ ID NO: 22049 - protein, 101 aa, Artificial Sequence
  derived and/or modified sequence
MSDQEAKPSTEDLGDKKEGEYIKLKVIGQDSSEIHFKVKMTTHLKKLKESYCQRQGVPMNSLRFLFEGQRIADNHTPKELGMEEEDVIEVYQEQTGGHSTV

SEQ ID NO: 22050 - protein, 62 aa, Artificial Sequence
  derived and/or modified sequence
MTTHLKKLKESYCQRQGVPMNSLRFLFEGQRIADNHTPKELGMEEEDVIEVYQEQTGGHSTV

SEQ ID NO: 22051 - DNA, 306 bp, Artificial Sequence
  derived and/or modified sequence
atgagcgaccaggaggccaagcccagcaccgaggacctgggcgacaagaaggagggcgagtacatcaagctgaaggtgatcggccaggacagcagcgagatccacttcaaggtgaagatgaccacccacctgaagaagctgaaggagagctactgccagagacagggcgtgcccatgaacagcctgagattcctgttcgagggccagagaatcgccgacaaccacacccccaaggagctgggcatggaggaggaggacgtgatcgaggtgtaccaggagcagaccggcggccacagcaccgtgtag

SEQ ID NO: 22052 - DNA, 306 bp, Artificial Sequence
  derived and/or modified sequence
atgtcagatcaggaagctaaaccctcaaccgaagatcttggcgataagaaggaaggcgaatatattaaactgaaggtgatcggacaggatagctcagagatccacttcaaagtcaagatgactacgcacttgaagaagctgaaggagtcttattgtcaaaggcagggagtgcctatgaactcactccggttcctgtttgagggccagcgcattgccgacaaccataccccaaaggagctgggcatggaagaggaagatgtgatcgaagtttatcaggaacagaccggcggccactctaccgtgtag

SEQ ID NO: 22053 - DNA, 306 bp, Artificial Sequence
  derived and/or modified sequence
atgtctgatcaagaggcaaagccctcaactgaagacttgggcgataaaaaggaaggcgaatatatcaagctaaaggtgattggccaagattcaagcgaaatccacttcaaggtgaagatgaccacccaccttaaaaaactcaaggaaagctactgccagcgacagggagtacccatgaattctctgaggttcctcttcgagggccagcgaatcgcggataaccatacgccaaaagagcttggcatggaggaagaagatgtgatcgaggtataccaggaacaaacaggcgggcatagtacagtgtag

SEQ ID NO: 22054 - DNA, 306 bp, Artificial Sequence
  derived and/or modified sequence
atgtctgaccaggaggccaagcccagcacagaggacctgggggacaagaaggagggggagtacatcaagctgaaggtgattggccaggacagcagcgagatccacttcaaggtgaagatgaccacccacctgaagaagctgaaggagagctactgccagaggcagggcgtgcccatgaacagcctgcgcttcctgtttgagggccagagaattgctgacaaccacacccccaaggagctgggcatggaggaggaggatgtgattgaggtgtaccaggagcagacaggaggccacagcacagtgtag

SEQ ID NO: 22055 - DNA, 306 bp, Artificial Sequence
  derived and/or modified sequence
atgagcgaccaggaggccaagcccagcaccgaggacctgggcgacaaaaaggagggggagtacattaaactgaaagtgatcggccaggactcctccgaaatccattttaaggtaaaaatgacgacgcacctcaaaaaactgaaggaaagctactgtcaacgccagggagtgccaatgaatagcctgcggttcttgttcgagggtcagcgaatagctgataaccatacacctaaagaactcggtatggaagaagaggatgtgatagaggtctatcaggagcaaactggcggccacagcaccgtgtag

SEQ ID NO: 22056 - DNA, 306 bp, Artificial Sequence
  derived and/or modified sequence
atgagcgaccaggaggccaagcccagcaccgaggacctgggcgacaagaaggagggcgagtacataaagcttaaagtgatagggcaggattcttccgaaatacactttaaggttaagatgactacccatttaaaaaaactgaaggaatcctattgccagcgccagggggtgccaatgaatagcttaagatttttgttcgagggccagagaatcgctgacaaccatactccaaaggagcttggaatggaagaagaggacgtgatcgaggtataccaggagcaaacaggaggccatagtacagtgtag

SEQ ID NO: 22057 - DNA, 306 bp, Artificial Sequence
  derived and/or modified sequence
atgtcggaccaggaggctaagccgagcacagaagatctcggtgacaaaaaagagggggaatatattaagctaaaggttatagggcaagactctagcgaaattcacttcaaggtcaagatgactacccacctcaagaagctgaaggagtcctattgccagaggcagggggtgccgatgaactctctccgattcctctttgagggccagcgcatcgccgataaccatacacccaaagaactcgggatggaagaagaggacgtcatcgaagtgtaccaggagcagactggagggcactccacggtttag

SEQ ID NO: 22058 - DNA, 306 bp, Artificial Sequence
  derived and/or modified sequence
atgtccgaccaagaagcgaagcccagtactgaagacctgggagacaagaaagaaggggaatatattaagcttaaagtcatcggccaggatagcagtgagattcacttcaaggtgaaaatgacaactcatcttaagaaactgaaggaatcttactgtcagcgtcaaggcgtcccgatgaacagtctgaggtttctcttcgagggtcagcggattgcggacaaccacaccccgaaagagcttggcatggaagaagaggacgttattgaagtctaccaggaacaaacaggaggacatagcactgtgtag

SEQ ID NO: 22059 - DNA, 1071 bp, Artificial Sequence
  derived and/or modified sequence
gcggaagtgacgcgaggcgtagcggaagttactgcagccgcggtgttgtgctgtggggaagggagaaggatttgtaaaccccggagcgaggttctgcttacccgaggccgctgctgtgcggagacccccgggtgaagccaccgtcatcatgtctgaccaggaggcaaaaccttcaactgaggacttgggggataagaaggaaggtgaatatattaaactcaaagtcattggacaggatagcagtgagattcacttcaaagtgaaaatgacaacacatctcaagaaactcaaagaatcatactgtcaaagacagggtgttccaatgaattcactcaggtttctctttgagggtcagagaattgctgataatcatactccaaaagaactgggaatggaggaagaagatgtgattgaagtttatcaggaacaaacggggggtcattcaacagtttagttttaaaatttgagggtctggaccaaaagaagaggaatatcaggttgaagtcaagatgacagataaggtgagagtaatgactaactccaaagatggcttcactgaagaaaaggcattttaagattttttaaaaatcttgtcagaagatcccagaaaagttctaattttcattagcaattaataaagctatacatgcagaaatgaatacaacagaacactgctctttttgattttatttgtactttttggcctgggatatgggttttaaatggacattgtctgtaccagcttcattaaaataaacaatatttgtaaaaatcatactaatgcttattttattttaattgtatagaaagaaaaaaatgcctaaaataaggttttcttgcataaatactggaaattgcacatggtacaaattttttcttcattactgtacagtgatgatgttaatgactttgaagcactgaaagttactgaagtgccttctgaatcaaggatttaattaaggccacaatacctttttaatactcagtgttctgtttttttaaaaacttgatattcctgtatggtgcatatatgatacagttacctaatcatgttgaataaatgggcatgcc

SEQ ID NO: 22060 - DNA, 1536 bp, Artificial Sequence
  derived and/or modified sequence
ctgcgcgaagcggaagtgacgcgaggcgtagcggaagttactgcagccgcggtgttgtgctgtggggaagggagaaggatttgtaaaccccggagcgaggttctgcttacccgaggccgctgctgtgcggagacccccgggtgaagccaccgtcatcatgtctgaccaggaggcaaaaccttcaactgaggacttgggggataagaaggaaggtgaatatattaaactcaaagtcattggacaggatagcagtgagattcacttcaaagtgaaaatgacaacacatctcaagaaactcaaagaatcatactgtcaaagacagggtgttccaatgaattcactcaggtttctctttgagggtcagagaattgctgataatcatactccaaaagaactgggaatggaggaagaagatgtgattgaagtttatcaggaacaaacggggggtcattcaacagtttagatattctttttattttttttcttttccctcaatccttttttatttttaaaaatagttcttttgtaatgtggtgttcaaaacggaattgaaaactggcaccccatctctttgaaacatctggtaatttgaattctagtgctcattattcattattgtttgttttcattgtgctgatttttggtgatcaagcctcagtccccttcatattaccctctcctttttaaaaattacgtgtgcacagagaggtcacctttttcaggacattgcattttcaggcttgtggtgataaataagatcgaccaatgcaagtgttcataatgactttccaattggccctgatgttctagcatgtgattacttcactcctggactgtgactttcagtgggagatggaagtttttcagagaactgaactgtggaaaaatgacctttccttaacttgaagctacttttaaaatttgagggtctggaccaaaagaagaggaatatcaggttgaagtcaagatgacagataaggtgagagtaatgactaactccaaagatggcttcactgaagaaaaggcattttaagattttttaaaaatcttgtcagaagatcccagaaaagttctaattttcattagcaattaataaagctatacatgcagaaatgaatacaacagaacactgctctttttgattttatttgtactttttggcctgggatatgggttttaaatggacattgtctgtaccagcttcattaaaataaacaatatttgtaaaaatcatactaatgcttattttattttaattgtatagaaagaaaaaaatgcctaaaataaggttttcttgcataaatactggaaattgcacatggtacaaattttttcttcattactgtacagtgatgatgttaatgactttgaagcactgaaagttactgaagtgccttctgaatcaaggatttaattaaggccacaatacctttttaatactcagtgttctgtttttttaaaaacttgatattcctgtatggtgcatatatgatacagttacctaatcatgttgaataaatgggcatgccaaaaatt

SEQ ID NO: 22061 - DNA, 534 bp, Artificial Sequence
  derived and/or modified sequence
ccaccgtcatcatgtctgaccaggaggcaaaaccttcaactgaggacttgggggataagaaggaaggtgaatatattaaactcaaagtcattggacagcagtgagattcacttcaaagtgaaaatgacaacacatctcaagaaactcaaagaatcatactgtcaaagacagggtgttccaatgaattcactcaggtttctctttgagggtcagagaattgctgataatcatactccaaaagaactgggaatggaggaagaagatgtgattgaagtttatcaggaacaaacggggggtcattcaacagtttagatattctttttattttttttcttttccctcaatccttttttatttttaaaaatagttcttttgtaatgtggtgttcaaaacggaattgaaaactggcaccccatctctttgaaacatctggtaatttgaattctagtgctcattattcattattgtttgttttcattgtgctgatttttggtgatcaagcctcagtccccttcatattaccctctccttttt

SEQ ID NO: 22062 - DNA, 779 bp, Artificial Sequence
  derived and/or modified sequence
gaggcgtagcggaagttactgcagccgcggtgttgtgctgtggggaagggagaaggatttgtaaaccccggagcgaggttctgcttacccgaggccgctgctgtgcggagacccccgggtgaagccaccgtcatcatgtctgaccaggctctgtggattagactcacctctgcttcttggtgtgtggggcctcagctgagatgactcaagtggctgggggctggaacagctagttgtcaggaggcaaaaccttcaactgaggacttgggggataagaaggaaggtgaatatattaaactcaaagtcattggacaggatagcagtgagattcacttcaaagtgaaaatgacaacacatctcaagaaactcaaagaatcatactgtcaaagacagggtgttccaatgaattcactcaggtttctctttgagggtcagagaattgctgataatcatactccaaaagaactgggaatggaggaagaagatgtgattgaagtttatcaggaacaaacggggggtcattcaacagtttagatattctttttattttttttcttttccctcaatccttttttatttttaaaaatagttcttttgtaatgtggtgttcaaaacggaattgaaaactggcaccccatctctttgaaacatctggtaatttgaattctagtgctcattattcattattgtttgttttcattgtgctgatttttggtgatcaagcctcagtccccttcatattaccctctcctttttaaaaattacgtgtgcacagagag

SEQ ID NO: 22063 - protein, 76 aa, Artificial Sequence
  derived and/or modified sequence
MSDQDSSEIHFKVKMTTHLKKLKESYCQRQGVPMNSLRFLFEGQRIADNHTPKELGMEEEDVIEVYQEQTGGHSTV

SEQ ID NO: 22064 - DNA, 231 bp, Artificial Sequence
  derived and/or modified sequence
atgagcgaccaggacagcagcgagatccacttcaaggtgaagatgaccacccacctgaagaagctgaaggagagctactgccagagacagggcgtgcccatgaacagcctgagattcctgttcgagggccagagaatcgccgacaaccacacccccaaggagctgggcatggaggaggaggacgtgatcgaggtgtaccaggagcagaccggcggccacagcaccgtgtag

SEQ ID NO: 22065 - DNA, 189 bp, Artificial Sequence
  derived and/or modified sequence
atgaccacccacctgaagaagctgaaggagagctactgccagagacagggcgtgcccatgaacagcctgagattcctgttcgagggccagagaatcgccgacaaccacacccccaaggagctgggcatggaggaggaggacgtgatcgaggtgtaccaggagcagaccggcggccacagcaccgtgtag

SEQ ID NO: 22066 - DNA, 231 bp, Artificial Sequence
  derived and/or modified sequence
atgtcagaccaggattcttccgagattcacttcaaagtaaagatgactacacacctgaagaagctcaaagagtcttattgccagcgacaaggcgttcccatgaatagcctgagattcctctttgaagggcagcggattgcagataaccatactcctaaagagttgggcatggaagaggaggacgtcattgaagtgtaccaggaacagaccgggggacactccactgtgtag

SEQ ID NO: 22067 - DNA, 189 bp, Artificial Sequence
  derived and/or modified sequence
atgaccactcatctcaagaagctgaaagagagttactgtcagagacagggcgtgccaatgaactccttgagatttctgttcgaggggcagcgcatcgcggataaccacacacccaaggaactgggtatggaggaagaggacgtgatagaggtgtatcaggagcagacaggtggccactctacagtctag

SEQ ID NO: 22068 - DNA, 189 bp, Artificial Sequence
  derived and/or modified sequence
atgaccacacatttaaaaaaacttaaagagagttactgccagaggcagggagtgccaatgaattcactgcgctttctgttcgagggtcagcggatcgccgacaaccatactcccaaggagctgggaatggaagaagaggatgtgatcgaagtctaccaggagcaaactggaggccattccacagtttag

SEQ ID NO: 22069 - DNA, 231 bp, Artificial Sequence
  derived and/or modified sequence
atgtctgaccaggacagcagcgagatccacttcaaggtgaagatgaccacccacctgaagaagctgaaggagagctactgccagaggcagggcgtgcccatgaacagcctgcgcttcctgtttgagggccagagaattgctgacaaccacacccccaaggagctgggcatggaggaggaggatgtgattgaggtgtaccaggagcagacaggaggccacagcacagtgtag

SEQ ID NO: 22070 - DNA, 189 bp, Artificial Sequence
  derived and/or modified sequence
atgaccacccacctgaagaagctgaaggagagctactgccagaggcagggcgtgcccatgaacagcctgcgcttcctgtttgagggccagagaattgctgacaaccacacccccaaggagctgggcatggaggaggaggatgtgattgaggtgtaccaggagcagacaggaggccacagcacagtgtag

SEQ ID NO: 22071 - DNA, 231 bp, Artificial Sequence
  derived and/or modified sequence
atgagcgaccaggacagcagcgagatccacttcaaggtgaagatgacaacacatctgaaaaagcttaaggagagctactgtcaacgacagggtgtgcctatgaatagcttacgatttctctttgaaggccaaagaattgccgataaccatacaccaaaagagcttggaatggaggaagaggacgtcatcgaggtgtatcaggaacagacaggtgggcacagcacagtgtag

SEQ ID NO: 22072 - DNA, 189 bp, Artificial Sequence
  derived and/or modified sequence
atgaccacccacctgaagaagctgaaggagagctactgccagcggcagggggttcccatgaacagcctaaggttcctgtttgaagggcagaggattgccgataatcatacacccaaggagctgggcatggaggaggaggatgttatagaggtttatcaggagcagaccgggggtcattcaactgtgtag

SEQ ID NO: 22073 - DNA, 189 bp, Artificial Sequence
  derived and/or modified sequence
atgaccacccacctgaagaagctgaaggagagctactgccagcggcagggggtgccaatgaactcgctgagatttctctttgagggtcaaaggatcgccgacaaccatacaccaaaagagcttggaatggaggaggaggacgtcatcgaggtatatcaggagcagacaggaggccattccacagtctag

SEQ ID NO: 22074 - DNA, 231 bp, Artificial Sequence
  derived and/or modified sequence
atgtccgatcaggatagctccgagatccatttcaaagtgaaaatgaccacccatctgaagaagttgaaagagagctactgccagagacagggagtcccaatgaatagcctccggttcctcttcgagggacaacgaatcgccgataatcacaccccaaaagaactaggcatggaggaggaggatgtgattgaagtatatcaggagcaaacaggcggacacagtaccgtctag

SEQ ID NO: 22075 - DNA, 189 bp, Artificial Sequence
  derived and/or modified sequence
atgaccactcacctgaagaagttaaaagagtcttactgccagcgccaaggcgtcccaatgaactctctgagattcctgtttgaggggcagagaatagccgacaaccacacgcctaaggaactggggatggaggaagaagacgtgatcgaagtgtatcaggagcaaactggcggacacagcacagtgtag

SEQ ID NO: 22076 - DNA, 189 bp, Artificial Sequence
  derived and/or modified sequence
atgacgacacacctcaagaagttaaaagaatcttattgccagagacaaggagtgcctatgaattccctgcgattcctttttgaggggcagcgcattgctgacaaccatacacccaaggagcttggaatggaggaagaagacgtgatcgaagtataccaggaacagaccggagggcattctacagtatag

SEQ ID NO: 22077 - DNA, 831 bp, Artificial Sequence
  derived and/or modified sequence
gcagccgcggtgttgtgctgtggggaagggagaaggatttgtaaaccccggagcgaggttctgcttacccgaggccgctgctgtgcggagacccccgggtgaagccaccgtcatcatgtctgaccaggatagcagtgagattcacttcaaagtgaaaatgacaacacatctcaagaaactcaaagaatcatactgtcaaagacagggtgttccaatgaattcactcaggtttctctttgagggtcagagaattgctgataatcatactccaaaagaactgggaatggaggaagaagatgtgattgaagtttatcaggaacaaacggggggtcattcaacagtttagatattctttttattttttttcttttccctcaatccttttttatttttaaaaatagttcttttgtaatgtggtgttcaaaacggaattgaaaactggcaccccatctctttgaaacatctggtaatttgaattctagtgctcattattcattattgtttgttttcattgtgctgatttttggtgatcaagcctcagtccccttcatattaccctctcctttttaaaaattacgtgtgcacagagaggtcacctttttcaggacattgcattttcaggcttgtggtgataaataagatcgaccaatgcaagtgttcataatgactttccaattggccctgatgttctagcatgtgattacttcactcctggactgtgactttcagtgggagatggaagtttttcagagaactgaactgtggaaaaatgacctttccttaacttgaagctacttttaaaatttgagggtctggaccaaaagaagagga

SEQ ID NO: 22078 - protein, 534 aa, Artificial Sequence
  derived and/or modified sequence
MSAANPETPNSTISREASTQSSSAAASQGWVLPEGKIVPNTVFVGGIDARMDETEIGSCFGRYGSVKEVKIITNRTGVSKGYGFVSFVNDVDVQKIVGSQIHFHGKKLKLGPAIRKQKLCARHVQPRPLVVNPPPPPQFQNVWRNPNTETYLQPQITPNPVTQHVQAYSAYPHSPGQVITGCQLLVYNYQEYPTYPDSAFQVTTGYQLPVYNYQPFPAYPRSPFQVTAGYQLPVYNYQAFPAYPNSPFQVATGYQFPVYNYQPFPAYPSSPFQVTAGYQLPVYNYQAFPAYPNSPFQVATGYQFPVYNYQAFPAYPNSPVQVTTGYQLPVYNYQAFPAYPSSPFQVTTGYQLPVYNYQAFPAYPSSPFQVTTGYQLPVYNYQAFPAYPSSPFQVTTGYQLPVYNYQAFPAYPSSPFQVTTGYQLPVYNYQAFPAYPSSPFQVTTGYQLPVYNYQAFPAYPSSPFQVTTGYQLPVYNYQAFPAYPNSAVQVTTGYQFHVYNYQMPPQCPVGEQRRNLWTEAYKWWYLVCLIQRRD

SEQ ID NO: 22079 - protein, 486 aa, Artificial Sequence
  derived and/or modified sequence
MSAANPETPNSTISREASTQSSSAAASQGWVLPEGKIVPNTVFVGGIDARMDETEIGSCFGRYGSVKEVKIITNRTGVSKGYGFVSFVNDVDVQKIVGSQIHFHGKKLKLGPAIRKQKLCARHVQPRPLVVNPPPPPQFQNVWRNPNTETYLQPQITPNPVTQHVQAYSAYPHSPGQVITGCQLLVYNYQEYPTYPDSAFQVTTGYQLPVYNYQPFPAYPRSPFQVTAGYQLPVYNYQAFPAYPNSPFQVATGYQFPVYNYQPFPAYPSSPFQVTAGYQLPVYNYQAFPAYPNSPFQVATGYQFPVYNYQPFPAYPSSPFQVTAGYQLPVYNYQAFPAYPNSPFQVATGYQFPVYNYQAFPAYPNSPVQVTTGYQLPVYNYQAFPAYPNSPFQVATGYQFPVYNYQAFPAYPNSPVQVTTGYQLPVYNYQAFPAYPNSAVQVTTGYQFHVYNYQMPPQCPVGEQRRNLWTEAYKWWYLVCLIQRRD

SEQ ID NO: 22080 - DNA, 3759 bp, Artificial Sequence
  derived and/or modified sequence
cacgcgccccgatacccggcacaggagccacctcccagagccccgcagtccatgcctcagtcggcctgcgctcctcagcctggcggttctacctccgagggttcgcccgcccttggttttccttacaccttagcctttggctcctttgaccactcgaagccccacagcgtgttccagcggacttcaccagcagacccagaagtggtgggtgaaacactgcctctgttcctccttgagcctgtcgggagctgctgcctgccaccaccatgtctgctgcaaatcctgagactccaaactcaaccatctccagagaggccagcacccagtcttcatcagctgcagctagccaaggctgggtgttaccagaaggcaaaatcgtgccaaacactgtttttgttggtggaattgatgctaggatggatgaaactgagattggaagctgctttggtagatacggttcagtgaaagaagtgaagataatcacgaatcgaactggtgtgtccaaaggctatggatttgtttcgtttgttaatgacgtggatgtccagaagatagtaggatcacagatacatttccatggtaaaaagctgaagctgggccctgcaatcaggaaacaaaagttatgtgctcgtcatgtgcagccacgtcctttggtagttaatcctcctcctccaccacagtttcagaacgtctggcggaatccaaacactgaaacctacctgcagccccaaatcacgccgaatcctgtaactcagcacgttcaggcttactctgcttatccacattcaccaggtcaggtcatcactggatgtcagttgcttgtatataattatcaggaatatcctacttatcccgattcagcatttcaggtcaccactggatatcagttgcctgtatataattatcagccatttcctgcttatccaagatcaccatttcaggtcactgctggatatcagttgcctgtatataattatcaggcatttcctgcttatccaaattcaccatttcaagtcgccactggatatcagttccctgtatacaattatcagccatttcctgcttatccaagttcaccatttcaggtcactgctggatatcagttgcctgtatataattatcaggcatttcctgcttatccaaattcaccatttcaagtcgccactggatatcagttccctgtatacaattatcaggcatttcctgcttatccaaattcaccagttcaggtcaccactggatatcagttgcctgtatacaattatcaggcatttcctgcttatccaaattcaccagttcaggtcaccactggatatcagttgcctgtatacaattatcaggcatttcctgcttatccaagttcaccatttcaggtcaccactggatatcagttgcctgtatataattatcaggcatttcctgcttatccaagttcaccatttcaggtcaccactggatatcagttgcctgtatataattatcaggcatttcctgcttatccaagttcaccatttcaggtcaccactggatatcagttgcctgtatataattatcaggcatttcctgcttatccaagttcaccatttcaggtcaccactggatatcagttgcctgtatataattatcaggcatttcctgcttatccaagttcaccatttcaggtcaccactggatatcagttgcctgtatataattatcaggcatttcctgcttatccaaattcagcagttcaggtcaccactggatatcagttccatgtatacaattaccagatgccaccgcagtgccctgttggggagcaaaggagaaatctgtggaccgaagcatacaaatggtggtatcttgtctgtttaatccagagaagagactgataaattccgttgttactcaagatgactgcttcaagggtaaaagagtgcatcgctttagaagaagtttggcagtatttaaatctgttggatcctctcagctatctagtttcatgggaagttgctggttttgaatattaagctaaaagttttccactattacagaaattctgaattttggtaaatcacactgaaactttctgtataacttgtattattagactctctagttttatcttaacactgaaactgttcttcattagatgtttatttagaacctggttctgtgtttaatatatagtttaaagtaacaaataatcgagactgaaagaatgttaagatttatctgcaaggatttttaaaaaattgaaacttgcattttaagtgtttaaaagcaaatactgactttcaaaaaagtttttaaaacctgatttgaaagctaacaattttgatagtctgaacacaagcatttcacttctccaagaagtacctgtgaacagtacaatatttcagtattgagctttgcatttatgatttatctagaaatttacctcaaaagcagaatttttaaaactgcatttttaatcagtggaactcaatgtatagttagctttattgaagtcttatccaaacccagtaaaacagattctaagcaaacagtccaatcagtgagtcataatgtttattcaaagtattttatcttttatctagaatccacatatgtatgtccaatttgattgggatagtagttaggataactaaaattctgggcctaattttttaaagaatccaagacaaactaaactttactgggtatataaccttctcaatgagttaccattcttttttataaaaaaaattgttccttgaaatgctaaacttaatggctgtatgtgaaatttgcaaaatactggtattaaagaacgctgcagcttttttatgtcactcaaaggttaatcggagtatctgaaaggaattgtttttataaaaacattgaagtattagttacttgctataaatagatttttatttttgttttttagcctgttatatttccttctgtaaaataaaatatgtccagaagaggcatgttgtttctagattaggtagtgtcctcattttatattgtgaccacacagctagagcaccagagcccttttgctatactcacagtcttgttttcccagcctcttttactagtctttcaggaggtttgctcttagaactggtgatgtaaagaatggaagtagctgtatgagcagttcaaaggccaagccgtggaatggtagcaatgggatataatacctttctaagggaaacatttgtatcagtatcatttgatctgccatggacatgtgtttaaagtggctttctggcccttctttcaatggcttcttccctaaaacgtggagactctaagttaatgtcgttactatgggccatattactaatgcccactggggtctatgatttctcaaaattttcattcggaatccgaaggatacagtctttaaactttagaattcccaagaaggctttattacacctcagaaattgaaagcaccatgactttgtccattaaaaaattatccatagtttttttagtgcttttaacattccgacatacatcattctgtgattaaatctccagatttctgtaaatgatacctacattctaaagagttaattctaattattccgatatgaccttaaggaaaagtaaaggaataaatttttgtctttgttgaagtatttaatagagtaaggtaaagaagatattaagtccctttcaaaatggaaaattaattctaaactgagaaaaatgttcctactacctattgctgatactgtctttgcataaatgaataaaaataaactttttttcttcaaa

SEQ ID NO: 22081 - DNA, 1605 bp, Artificial Sequence
  derived and/or modified sequence
atgtcagccgcgaatcctgagacacccaattcaacgattagcagagaggcaagcacacagagtagctccgccgctgcttcccagggctgggtcctgcccgaggggaagattgtccccaacaccgttttcgtgggcggcattgacgctagaatggacgagactgagattggctcttgttttggccgctatgggagcgttaaggaggtgaagatcataaccaatcggactggcgtcagtaaaggctatgggttcgtgagcttcgtcaatgacgttgatgtgcagaaaattgtgggctctcagatccacttccacggtaagaagctaaagcttgggccagcaatacgcaagcagaaactctgtgcacgccacgtgcagccaaggcctctcgtggtgaatcctcccccaccaccacagtttcagaatgtgtggagaaatcctaataccgagacctatttgcagccgcagatcacaccaaacccagtaacccaacatgtgcaggcttactctgcctatccccacagtcccgggcaggtcatcactgggtgtcaactccttgtgtacaattatcaggagtaccctacatacccggattccgccttccaggtgacaactgggtaccagctcccagtgtataactatcagccgtttccagcctatccaaggagcccctttcaggtcaccgccgggtaccaattgcccgtgtacaattatcaggcattcccagcctatcctaattctcctttccaagtggccaccggctatcaattccctgtgtacaattaccagcctttccccgcctacccctctagcccatttcaagttacggccggctaccagcttccagtctataattatcaagccttcccagcctatccaaacagcccttttcaagtggcaaccgggtaccaatttccagtctataactatcaggcttttcctgcatatcctaattcaccagtgcaggtgacaacaggctatcaacttcctgtttataactaccaagcttttccagcatatcctagtagcccatttcaggtaacgacaggataccagctgcccgtctataattaccaagccttcccggcctaccccagcagcccctttcaggtgaccaccgggtatcagctgcctgtttataactatcaggcgtttcccgcttacccaagttctccatttcaggttactacaggctatcagctgcccgtgtataactaccaggcttttccggcctatccaagctcaccttttcaggtgaccaccggatatcagttgcccgtgtacaactatcaagcctttcctgcttacccgtcttctccattccaggtgacaaccggctatcagctcccagtgtacaactatcaggctttcccggcttacccctcttcgcctttccaggtgacaacaggatatcagctacccgtctataattatcaagcttttcccgcctatcccaacagtgctgtacaggtgacgactggctatcagttccacgtatacaattatcaaatgccgcctcagtgccctgtgggcgagcagaggcggaatctgtggaccgaggcctacaagtggtggtacctggtgtgtctgatacaaaggcgagattag

SEQ ID NO: 22082 - DNA, 1461 bp, Artificial Sequence
  derived and/or modified sequence
atgagcgccgccaatcctgaaacacctaattctacaattagtcgggaggcctccacccagtcctcgagcgccgcagctagccaaggttgggtgctgcctgagggcaaaattgtgcctaacaccgtattcgtgggtggcatagacgctaggatggatgaaacagagataggcagttgctttggcagatacgggtctgttaaagaagtaaagattataactaatcgcaccggcgtcagcaagggctatgggttcgtgagcttcgtgaatgacgtagacgtgcaaaagattgtcgggtcccaaatccactttcatggaaagaaacttaagcttgggcccgctatacggaagcagaaactgtgtgccaggcacgtgcaaccacggccccttgtggtaaatcctccccctcccccgcagtttcagaacgtgtggaggaacccgaataccgaaacgtacttacagccacagatcacaccgaacccagttactcagcacgtgcaagcttactccgcttaccctcactcaccaggacaagtgataaccggctgccagcttcttgtgtacaactatcaggagtaccccacgtacccagacagcgctttccaggtgactaccgggtatcagttaccagtctataactaccagcccttccctgcctaccctaggtccccttttcaagtgactgcaggctaccagttgccagtttacaactaccaggccttccctgcataccctaatagccccttccaggttgccactgggtatcagttcccggtctataactatcagccttttcctgcgtacccgtcttcaccattccaagtgactgcgggctaccagctgcccgtttacaactatcaagcgtttccggcctaccctaactctcccttccaagtggccacaggatatcagttccccgtgtacaattatcagcccttcccggcctatccatccagtccctttcaggtgacagccggctatcaacttccagtctataactaccaagccttccctgcctatcccaacagcccctttcaagtcgctacaggctaccagtttcccgtatacaattatcaggccttcccagcctaccctaattcaccagttcaggtgaccaccggatatcagctgcccgtatataactaccaggccttccccgcctaccccaattccccctttcaggttgccactggttaccagttccctgtgtataattatcaggctttcccagcctacccgaacagcccagtacaagttactactgggtaccagctccctgtttacaactatcaggctttccccgcttaccccaacagtgccgtacaggtgactaccggctaccagtttcacgtgtacaattatcagatgcctccacagtgcccagtcggagagcagcgacgaaacctgtggaccgaggcctataagtggtggtatctggtatgtctgatccagcgtcgggactag

SEQ ID NO: 22083 - DNA, 1605 bp, Artificial Sequence
  derived and/or modified sequence
atgtctgcggctaatcccgagacccctaactccaccattagccgcgaggcatccactcagtcaagtagtgctgccgcttctcagggctgggtgttgccagaggggaaaatcgtccctaacactgtttttgtgggcgggatcgatgcacgaatggatgagactgagattgggagctgtttcggtcgctatggaagtgtgaaggaagtgaaaatcatcaccaacagaaccggcgtgtccaaaggttacgggttcgtgtctttcgtgaacgatgtcgacgtccagaaaattgtgggatcacagatccactttcacggtaagaagctcaagctcggcccagctatcaggaaacaaaaattgtgtgctcggcacgtgcagccacgcccactggtggtgaacccccctcctccaccacagttccaaaacgtgtggcggaatcccaacaccgaaacttatctccagcctcagatcacccctaacccagttacacagcacgtgcaggcgtactccgcttaccctcatagccccggccaggtcattacaggatgccagctgctagtctataactaccaggaataccctacctatcctgattcagcctttcaggtgactacaggctatcagctcccggtgtataactaccagcccttccctgcgtatcccagatccccgtttcaggtcacagcaggttaccagcttccagtttataattatcaggctttccctgcttatcctaactctcccttccaggtcgctactgggtaccagttcccagtttacaactatcagcccttcccagcctatcctagctccccatttcaggttaccgcgggctaccagctcccggtgtacaattatcaggcatttccggcataccccaactcgccatttcaggtagctacagggtatcagttcccagtatacaactaccaagccttccccgcttaccccaacagcccagtgcaggtgacgaccggttaccagctccccgtgtataattaccaggcctttccggcttatccttcaagtccttttcaggtgactaccggataccagctgcccgtctacaactatcaggcatttcctgcgtaccccagctctcccttccaggtgactactggctaccagctgccagtctataattaccaggccttccccgcttacccatcaagcccattccaggtgaccactgggtaccagttgccagtttacaactaccaggcatttcccgcctacccctcatctcccttccaagtgacgactggctaccaactgcctgtctacaattaccaggccttcccagcttatccatcatctccatttcaggttactacaggatatcagttaccagtgtataactaccaggccttcccagcctacccatctagcccattccaggtgactaccgggtatcagctgccagtttataactaccaagccttcccagcataccctaactcagcagttcaggtgactaccggctaccagttccatgtttataattaccagatgcccccccaatgtcccgtgggggaacagcggcgtaacctctggactgaagcatataaatggtggtatttggtgtgtttaattcagagacgcgattag

SEQ ID NO: 22084 - DNA, 1605 bp, Artificial Sequence
  derived and/or modified sequence
atgtctgctgccaaccctgagacccccaacagcaccatcagccgggaggccagcacccagagcagcagcgctgctgccagccagggctgggtgctgcctgagggcaagatcgtgcccaacacagtgtttgtgggcggcattgatgccaggatggatgaaacagagatcggcagctgcttcggccgctatggctctgtgaaggaggtgaagatcatcaccaacagaactggagtgtccaagggctacggctttgtgtcctttgtgaatgatgtggatgtgcagaagatcgtgggcagccagatccacttccacggcaagaagctgaagctgggccctgccatcaggaagcagaagctgtgtgcccggcacgtgcagccccggcccctggtggtgaaccccccacctccaccccagttccagaatgtgtggaggaaccccaacacagagacctacctgcagccccagatcacccccaaccctgtgacccagcacgtgcaggcctacagcgcctacccccacagccctggccaggtgatcaccggctgccagctgctggtgtacaactaccaggagtaccccacctacccagacagcgccttccaggtgaccaccggctaccagctgcctgtgtacaactaccagcccttccctgcctaccccaggagccccttccaggtgacagctggctaccagctgcctgtgtacaactaccaggccttccctgcctaccccaacagccccttccaggtggccaccggctaccagtttcctgtgtacaactaccagcccttccctgcctaccccagcagccccttccaggtgacagctggctaccagctgcctgtgtacaactaccaggccttccctgcctaccccaacagccccttccaggtggccaccggctaccagtttcctgtgtacaactaccaggccttccctgcctaccccaacagccctgtgcaggtgaccaccggctaccagctgcctgtgtacaactaccaggccttccctgcctaccccagcagccccttccaggtgaccaccggctaccagctgcctgtgtacaactaccaggccttccctgcctaccccagcagccccttccaggtgaccaccggctaccagctgcctgtgtacaactaccaggccttccctgcctaccccagcagccccttccaggtgaccaccggctaccagctgcctgtgtacaactaccaggccttccctgcctaccccagcagccccttccaggtgaccaccggctaccagctgcctgtgtacaactaccaggccttccctgcctaccccagcagccccttccaggtgaccaccggctaccagctgcctgtgtacaactaccaggccttccctgcctaccccagcagccccttccaggtgaccaccggctaccagctgcctgtgtacaactaccaggccttccctgcctaccccaacagcgctgtgcaggtgaccaccggctaccagttccacgtgtacaactaccagatgccaccccagtgccctgtgggggagcagaggaggaacctgtggacagaggcctacaagtggtggtacctggtgtgcctgatccagaggcgggactag

SEQ ID NO: 22085 - DNA, 1461 bp, Artificial Sequence
  derived and/or modified sequence
atgtctgctgccaaccctgagacccccaacagcaccatcagccgggaggccagcacccagagcagcagcgctgctgccagccagggctgggtgctgcctgagggcaagatcgtgcccaacacagtgtttgtgggcggcattgatgccaggatggatgaaacagagatcggcagctgcttcggccgctatggctctgtgaaggaggtgaagatcatcaccaacagaactggagtgtccaagggctacggctttgtgtcctttgtgaatgatgtggatgtgcagaagatcgtgggcagccagatccacttccacggcaagaagctgaagctgggccctgccatcaggaagcagaagctgtgtgcccggcacgtgcagccccggcccctggtggtgaaccccccacctccaccccagttccagaatgtgtggaggaaccccaacacagagacctacctgcagccccagatcacccccaaccctgtgacccagcacgtgcaggcctacagcgcctacccccacagccctggccaggtgatcaccggctgccagctgctggtgtacaactaccaggagtaccccacctacccagacagcgccttccaggtgaccaccggctaccagctgcctgtgtacaactaccagcccttccctgcctaccccaggagccccttccaggtgacagctggctaccagctgcctgtgtacaactaccaggccttccctgcctaccccaacagccccttccaggtggccaccggctaccagtttcctgtgtacaactaccagcccttccctgcctaccccagcagccccttccaggtgacagctggctaccagctgcctgtgtacaactaccaggccttccctgcctaccccaacagccccttccaggtggccaccggctaccagtttcctgtgtacaactaccagcccttccctgcctaccccagcagccccttccaggtgacagctggctaccagctgcctgtgtacaactaccaggccttccctgcctaccccaacagccccttccaggtggccaccggctaccagtttcctgtgtacaactaccaggccttccctgcctaccccaacagccctgtgcaggtgaccaccggctaccagctgcctgtgtacaactaccaggccttccctgcctaccccaacagccccttccaggtggccaccggctaccagtttcctgtgtacaactaccaggccttccctgcctaccccaacagccctgtgcaggtgaccaccggctaccagctgcctgtgtacaactaccaggccttccctgcctaccccaacagcgctgtgcaggtgaccaccggctaccagttccacgtgtacaactaccagatgccaccccagtgccctgtgggggagcagaggaggaacctgtggacagaggcctacaagtggtggtacctggtgtgcctgatccagaggcgggactag

SEQ ID NO: 22086 - DNA, 1605 bp, Artificial Sequence
  derived and/or modified sequence
atgagcgccgccaaccccgagacccccaacagcaccatcagccgggaggcgtcgactcagagttcaagcgccgccgcttcccaagggtgggtcctgcccgagggaaagatagtgcccaacaccgtcttcgtaggtgggattgacgcccgaatggacgagacagagatcgggtcctgtttcgggcgatacggttcagtcaaagaggtgaaaatcatcacaaataggacgggtgtttccaaggggtatggctttgtctcttttgtcaacgacgttgatgttcagaagatcgtcggcagtcagatccactttcatggaaaaaagctcaaactggggccagcaatccgaaaacagaaactttgcgctcggcatgttcagcctcgccctctggtcgtgaaccctccccctccaccccagtttcagaacgtgtggaggaaccctaataccgaaacgtacctccaaccccagatcacccctaatcctgtgactcagcacgtgcaggcttacagtgcctacccacactctccaggccaagtgattacgggttgccagctgctggtatataactatcaggaatatccaacttacccagactccgcttttcaagtgactaccggttatcaactccccgtttacaactaccaaccatttccggcctaccccagatccccctttcaggtgaccgccggctatcagcttccagtttataattatcaggctttcccagcctatccgaacagcccctttcaggtagctacagggtaccagtttcctgtttataactatcagccctttccggcatacccttctagcccctttcaggtaacagccggttaccagctacccgtatacaactaccaggctttccctgcctatcccaacagtcccttccaggtcgcaacaggttaccagttcccagtgtacaactatcaggccttcccggcgtaccctaattccccagttcaagtgaccactggttatcagcttccagtgtataattaccaggctttccctgcatacccatcttctcctttccaggttacaaccggctaccaactgccagtgtacaactaccaggcctttcccgcctacccgtcatccccatttcaagtgaccacagggtaccagttgcctgtgtataattaccaagcttttcccgcttacccatctagcccctttcaggtgactaccgggtaccaactgcccgtctataattaccaggcattccccgcttacccctccagtcctttccaggtgaccacagggtatcagctacccgtctacaactatcaggcatttcctgcctaccctagttcccctttccaggttacaaccgggtaccagctgcctgtgtataactaccaggcctttccagcatatccctccagtcctttccaggtgactacggggtaccaactgcctgtgtacaattaccaggcttttcctgcctacccaaatagtgctgttcaggtcactacagggtaccagttccatgtctacaactaccagatgcccccccagtgccctgtcggcgagcaacgtagaaatctttggacagaggcatacaaatggtggtacttggtgtgtctcatccagcggcgcgactag

SEQ ID NO: 22087 - DNA, 1461 bp, Artificial Sequence
  derived and/or modified sequence
atgagcgccgccaaccccgagacccccaacagcaccatcagccgggaagcatccactcagagtagtagcgccgccgcaagccaggggtgggtattgcctgaaggcaagatcgtgccaaacaccgttttcgtgggaggaattgacgctagaatggatgagacagagatcgggagctgcttcggaaggtacggcagcgtgaaagaggtgaagattattacgaatcgcaccggggtgtcgaagggctacggtttcgtctcttttgtcaatgatgttgacgtgcagaaaatcgtaggctcccagatccactttcatggaaagaagctaaagctggggccggcaataagaaaacagaagttatgtgcccgacacgtacagcctcgcccactagtggtgaaccctcccccgccccctcagtttcagaatgtgtggagaaaccctaacaccgagacttacctacagccacagattacgcctaatccagtgacccagcatgtccaggcttactctgcatatcctcactctcccggccaggtaataaccggatgtcagctacttgtgtacaactaccaggagtatcctacttatccagattcagccttccaagtcactactggttatcagttgcccgtctacaattaccagccttttcccgcttacccccgcagccccttccaagtgacagctggctatcaactcccagtgtacaattaccaggccttccctgcttaccccaacagcccatttcaggttgctactgggtatcagttccccgtgtataactatcagccttttcctgcctaccctagcagtccatttcaagtaacagcgggataccagttgcctgtttacaattaccaggcattcccagcttaccccaacagcccattccaagttgcaaccggctaccaattcccagtctataattaccagccattcccagcctacccgtcctcaccatttcaagtgacagccggatatcagttgcccgtctacaactatcaggcattcccggcctatcccaattcaccttttcaggtggccaccggttatcagtttcccgtgtacaattaccaggcctttcccgcttaccccaacagccctgttcaggttacgaccggttaccagctgcccgtgtacaattatcaggcattccccgcttaccctaactctccctttcaggtggcgacggggtaccagttccccgtgtacaactaccaggcctttcctgcatacccgaactcacctgtgcaggtcacaactggctaccagttgccggtttacaactaccaggcattccccgcgtatcctaattctgccgtccaagtcaccactggttatcaatttcacgtttataactaccagatgccaccacagtgtcccgtcggggaacaacgtagaaacctttggacagaggcgtacaagtggtggtatctggtatgtcttatacagaggcgggactag

SEQ ID NO: 22088 - DNA, 1605 bp, Artificial Sequence
  derived and/or modified sequence
atgagcgccgccaaccccgagacccccaacagcaccatcagccgggaggcttcaacgcagtcctcttctgcagccgcttcccagggctgggtacttcctgaaggtaagatcgtgcctaatacggtgtttgtcggcggtattgatgctcggatggacgagaccgagatcggatcctgttttgggcgatacggttccgtgaaggaagtgaagatcattacaaaccgcaccggggttagcaagggttatggattcgtcagctttgtaaacgacgttgatgtccagaaaatcgtggggagccagattcactttcacggcaaaaaactcaagctggggcccgccatccgtaagcagaagctttgcgcaaggcatgtgcaacccaggcccttagttgtgaatccccctccaccaccacagttccagaatgtgtggcggaaccctaacactgaaacgtatcttcagccacagatcactccaaacccagtcacgcagcatgtccaggcctattccgcatatcctcactcaccaggccaagtgattacggggtgccagctcctcgtatataactaccaggagtaccccacctaccctgacagtgcttttcaggtcactaccgggtaccagcttcccgtgtacaattatcagcctttccctgcttatcctcggtcaccgtttcaggtgaccgctggatatcagctacctgtctataactaccaagcttttcccgcttacccgaactcaccctttcaagtggccacaggctaccaattcccagtttacaactatcagcccttcccagcctatcctagttctcccttccaggttaccgcaggttaccagctaccagtttataactaccaggcctttcccgcctaccccaattctccgttccaggtggccaccgggtaccaatttcctgtttataactaccaggccttccctgcctacccaaattctccagtgcaggtgacaacaggttatcagctccccgtgtacaattaccaggccttcccagcatacccatcttccccctttcaggtgaccaccggctaccagttacctgtgtacaactaccaggcgtttccggcttacccctcatctcctttccaggtcaccactggctaccagctcccggtctataactaccaggcatttccagcctacccctctagccctttccaggtgaccacaggctaccagttgcccgtgtataattatcaggcattccccgcctacccttcctccccttttcaagtaaccaccggatatcaattgccagtctacaattaccaagcttttccagcttacccgtcatcacctttccaagtgacaaccgggtatcagcttccagtttacaattaccaagcctttccggcataccctagcagcccttttcaggtaaccactggctaccagttgcctgtctacaactaccaagccttccccgcctaccctaacagtgcggtacaggttaccaccggataccagttccatgtctataactatcaaatgccccctcagtgcccagtcggagaacaaagaagaaacctctggaccgaggcctacaaatggtggtacttggtctgtttgatccaacgccgcgattag

SEQ ID NO: 22089 - DNA, 1605 bp, Artificial Sequence
  derived and/or modified sequence
atgtctgccgcaaaccccgagacaccaaacagcacaatttcccgggaggcaagcacgcaatcatcttccgcagcggctagccaaggatgggttctgcctgagggcaaaatagttcccaacaccgtttttgtcggaggtatcgatgcaagaatggatgagacagagatcggtagttgctttggtaggtacgggtccgtcaaagaggtcaagataataacaaatagaacaggcgtgtccaaaggctacggttttgttagttttgtaaacgacgtcgatgtgcagaagatcgtcggttctcaaatccactttcatgggaaaaaactgaagctgggaccggctattcgtaagcagaaactatgtgctcgccacgtgcagccacgtcctctggttgtgaacccccctccacctccacagtttcaaaacgtgtggaggaatccaaacacagaaacctatctgcagcctcagatcactcctaaccccgtgacgcagcacgtgcaggcctattcggcatacccgcattcccctggacaggttatcaccggttgccagctcttggtgtataattatcaggagtaccctacctaccccgattcagcctttcaggtgaccacaggatatcagctgcctgtttacaactaccagccattccccgcttacccacgatcgccctttcaagtgactgcaggctaccagcttccggtatataactaccaggcttttcctgcatatcccaactctcctttccaggttgccaccggttatcagtttcctgtctacaactaccagccattccccgcttatccaagttccccgttccaggtaacggctggctaccaactccccgtgtataattaccaggcatttcctgcttaccctaatagtccttttcaggtggccacaggttatcagtttcctgtttataattaccaagcatttccggcatacccaaactctccagtgcaggtaactaccgggtatcagctgcctgtgtacaactatcaggcatttccagcctacccctcttctcccttccaggtcaccaccggctatcagctccctgtctacaattatcaagcgttccctgcataccccagcagcccatttcaggttaccacaggatatcaactgccagtttataattaccaagcattcccagcttatccgtcttccccgttccaggtcactaccggctaccaactacctgtctataactaccaggcctttcccgcatacccctcatcacctttccaggtcaccacaggataccagctgcctgtgtacaattaccaagcctttccggcatatcccagttcccctttccaagttacaactggttatcaactacccgtctacaactatcaggcattccctgcttaccctagcagtcccttccaagtgaccactggataccaacttcccgtatataactaccaggcatttcctgcttaccctaactcagctgtgcaggtgaccactgggtatcagttccacgtctataactatcagatgcccccacaatgccctgtgggagaacagcgcagaaacctgtggactgaggcttacaaatggtggtatctggtatgtctcattcagcggagggattag

SEQ ID NO: 22090 - DNA, 1461 bp, Artificial Sequence
  derived and/or modified sequence
atgagtgccgctaatcccgaaacccctaatagtactatctctagagaagctagcacacaatcctccagcgcagcggcttcccagggctgggttctgccagagggaaagattgtgcccaataccgtatttgtggggggaatagatgccagaatggatgaaaccgagataggctcttgttttggcaggtatggctccgtcaaagaagtgaaaatcattacaaaccgtaccggcgtgagcaaggggtacgggttcgtcagctttgtcaacgacgtggacgtccagaaaatcgttggctctcagatccatttccacggaaagaagctgaagctcggacccgctatccgcaagcagaaactgtgcgccaggcacgtgcagccacgcccactcgtggtgaaccctcctcctcctccccagttccagaacgtgtggcgcaaccccaacacagagacctatttgcaaccccaaatcactccaaacccagtgacgcaacacgttcaggcgtactcggcatacccgcattctccaggtcaggtgatcactggctgtcagctactggtgtataactaccaagagtaccccacataccctgattctgctttccaggttaccaccggatatcagctgcccgtttataattaccagccgttccccgcatatccccgttctccattccaagtcaccgccggataccaactgcccgtttacaactatcaagcttttcccgcatatccaaatagcccctttcaggtggccaccggttaccagttccccgtgtacaactaccagcccttccctgcctacccctccagtccctttcaggtcactgctggctaccagctgccagtttacaattatcaggcttttcctgcgtatcctaactctccctttcaagtggcaactggatatcagtttcccgtatataactaccagcctttcccagcttacccgtcgagtccatttcaagttaccgcaggctaccaactgccggtctataattaccaggctttcccagcgtatcccaatagtcccttccaggtcgccacgggataccaattcccagtctacaactatcaagcgtttccagcttaccctaactcaccagtccaggtgacaacaggctatcagctcccagtgtacaactaccaagctttccctgcttacccgaactctccctttcaggttgctaccggctatcagttcccagtgtacaattaccaggcatttcccgcatacccgaactccccagtgcaagtcactaccggttaccaactgcccgtttacaactatcaggcctttcctgcctacccaaatagcgccgtccaggtgaccactggctaccagttccacgtttacaactatcagatgccaccacagtgccctgtcggcgaacagagacgaaatctttggactgaagcctataaatggtggtacctagtctgccttatccagagaagggactag

SEQ ID NO: 22091 - DNA, 1605 bp, Artificial Sequence
  derived and/or modified sequence
atgtcagcagcgaatcctgagacacctaactcaacaatcagcagagaagccagtactcagagctcttcagctgccgcatcccagggatgggttctccctgaagggaagatcgtcccgaataccgtctttgtaggaggaattgacgctcgtatggatgagaccgagatcggttcgtgctttggacgctacggtagcgtgaaagaggtaaagatcataaccaatcgcaccggagtgtcaaagggctatggattcgtgagtttcgtcaatgacgttgatgtgcagaagatcgtagggagccagatccattttcacgggaaaaagctcaaacttggccctgctattagaaaacagaagctgtgtgccagacacgtgcaaccgaggccgctggtggtcaacccccctcccccaccccaattccagaacgtgtggcggaatcccaataccgagacctaccttcagcctcagatcactccaaatccagtcacccaacatgtgcaagcctactcagcatatcctcactcgccgggacaggtaatcaccggttgtcaactgctcgtctataactaccaagagtacccaacatacccggacagcgcgtttcaggttaccaccgggtaccagctcccagtttataactatcagccctttcctgcatatccacgctccccctttcaggtgactgctggttaccagcttccagtctataattaccaagcgttcccagcttaccctaactccccctttcaggtagctactgggtatcagttcccagtctataattatcagcctttccctgcctacccctccagcccatttcaggtgactgcaggctatcaattacccgtgtacaattaccaggcatttccagcgtaccccaactcacccttccaagtcgccaccggctaccagtttccggtctataattatcaggccttcccggcataccccaatagtccagtgcaggtgaccacaggctaccaactgcccgtctacaattaccaagctttccctgcttacccctcaagtcctttccaagtgaccactggataccaactgcccgtgtataattaccaggccttcccggcatatccgagcagccccttccaagtaaccactggttatcagcttccagtttataattaccaggcctttccggcttatcccagctccccttttcaagtgactaccggctaccagttgcccgtttataactaccaggccttccctgcctacccatcctccccgttccaggttacaaccggctaccagctacctgtgtacaattatcaagccttcccagcttacccttcaagcccttttcaagtaaccaccggctaccagctacctgtatacaattaccaagcctttccagcctacccctcttcaccgtttcaggtgacaacaggctaccagttaccggtgtacaactaccaggctttccccgcttatcctaactctgcagtccaggtgaccactggctaccaattccatgtgtataattaccagatgccaccccaatgccccgttggcgaacaacggagaaatctatggacagaagcttacaaatggtggtatcttgtgtgtctaatccaaagaagggactag

SEQ ID NO: 22092 - DNA, 1605 bp, Artificial Sequence
  derived and/or modified sequence
atgagcgccgccaaccccgagacccccaacagcaccatcagcagagaggccagcacccagagcagcagcgccgccgccagccagggctgggtgctgcccgagggcaagatcgtgcccaacaccgtgttcgtgggcggcatcgacgccagaatggacgagaccgagatcggcagctgcttcggcagatacggcagcgtgaaggaggtgaagatcatcaccaacagaaccggcgtgagcaagggctacggcttcgtgagcttcgtgaacgacgtggacgtgcagaagatcgtgggcagccagatccacttccacggcaagaagctgaagctgggccccgccatcagaaagcagaagctgtgcgccagacacgtgcagcccagacccctggtggtgaacccccccccccccccccagttccagaacgtgtggagaaaccccaacaccgagacctacctgcagccccagatcacccccaaccccgtgacccagcacgtgcaggcctacagcgcctacccccacagccccggccaggtgatcaccggctgccagctgctggtgtacaactaccaggagtaccccacctaccccgacagcgccttccaggtgaccaccggctaccagctgcccgtgtacaactaccagcccttccccgcctaccccagaagccccttccaggtgaccgccggctaccagctgcccgtgtacaactaccaggccttccccgcctaccccaacagccccttccaggtggccaccggctaccagttccccgtgtacaactaccagcccttccccgcctaccccagcagccccttccaggtgaccgccggctaccagctgcccgtgtacaactaccaggccttccccgcctaccccaacagccccttccaggtggccaccggctaccagttccccgtgtacaactaccaggccttccccgcctaccccaacagccccgtgcaggtgaccaccggctaccagctgcccgtgtacaactaccaggccttccccgcctaccccagcagccccttccaggtgaccaccggctaccagctgcccgtgtacaactaccaggccttccccgcctaccccagcagccccttccaggtgaccaccggctaccagctgcccgtgtacaactaccaggccttccccgcctaccccagcagccccttccaggtgaccaccggctaccagctgcccgtgtacaactaccaggccttccccgcctaccccagcagccccttccaggtgaccaccggctaccagctgcccgtgtacaactaccaggccttccccgcctaccccagcagccccttccaggtgaccaccggctaccagctgcccgtgtacaactaccaggccttccccgcctaccccagcagccccttccaggtgaccaccggctaccagctgcccgtgtacaactaccaggccttccccgcctaccccaacagcgccgtgcaggtgaccaccggctaccagttccacgtgtacaactaccagatgcccccccagtgccccgtgggcgagcagagaagaaacctgtggaccgaggcctacaagtggtggtacctggtgtgcctgatccagagaagagactag

SEQ ID NO: 22093 - DNA, 1461 bp, Artificial Sequence
  derived and/or modified sequence
atgagcgccgccaaccccgagacccccaacagcaccatcagcagagaggccagcacccagagcagcagcgccgccgccagccagggctgggtgctgcccgagggcaagatcgtgcccaacaccgtgttcgtgggcggcatcgacgccagaatggacgagaccgagatcggcagctgcttcggcagatacggcagcgtgaaggaggtgaagatcatcaccaacagaaccggcgtgagcaagggctacggcttcgtgagcttcgtgaacgacgtggacgtgcagaagatcgtgggcagccagatccacttccacggcaagaagctgaagctgggccccgccatcagaaagcagaagctgtgcgccagacacgtgcagcccagacccctggtggtgaacccccccccccccccccagttccagaacgtgtggagaaaccccaacaccgagacctacctgcagccccagatcacccccaaccccgtgacccagcacgtgcaggcctacagcgcctacccccacagccccggccaggtgatcaccggctgccagctgctggtgtacaactaccaggagtaccccacctaccccgacagcgccttccaggtgaccaccggctaccagctgcccgtgtacaactaccagcccttccccgcctaccccagaagccccttccaggtgaccgccggctaccagctgcccgtgtacaactaccaggccttccccgcctaccccaacagccccttccaggtggccaccggctaccagttccccgtgtacaactaccagcccttccccgcctaccccagcagccccttccaggtgaccgccggctaccagctgcccgtgtacaactaccaggccttccccgcctaccccaacagccccttccaggtggccaccggctaccagttccccgtgtacaactaccagcccttccccgcctaccccagcagccccttccaggtgaccgccggctaccagctgcccgtgtacaactaccaggccttccccgcctaccccaacagccccttccaggtggccaccggctaccagttccccgtgtacaactaccaggccttccccgcctaccccaacagccccgtgcaggtgaccaccggctaccagctgcccgtgtacaactaccaggccttccccgcctaccccaacagccccttccaggtggccaccggctaccagttccccgtgtacaactaccaggccttccccgcctaccccaacagccccgtgcaggtgaccaccggctaccagctgcccgtgtacaactaccaggccttccccgcctaccccaacagcgccgtgcaggtgaccaccggctaccagttccacgtgtacaactaccagatgcccccccagtgccccgtgggcgagcagagaagaaacctgtggaccgaggcctacaagtggtggtacctggtgtgcctgatccagagaagagactag

SEQ ID NO: 22094 - DNA, 3756 bp, Artificial Sequence
  derived and/or modified sequence
cacgcgccccgatacccggcacaggagccacctcccagagccccgcagtccatgcctcagtcggcctgcgctcctcagcctggcggttctacctccgagggttcgcccgcccttggttttccttacaccttagcctttggctcctttgaccactcgaagccccacagcgtgttccagcggacttcaccagcagacccagaagtggtgggtgaaacactgcctctgttcctccttgagcctgtcgggagctgctgcctgccaccaccatgtctgctgcaaatcctgagactccaaactcaaccatctccagagaggccagcacccagtcttcatcagctgcagctagccaaggctgggtgttaccagaaggcaaaatcgtgccaaacactgtttttgttggtggaattgatgctaggatggatgaaactgagattggaagctgctttggtagatacggttcagtgaaagaagtgaagataatcacgaatcgaactggtgtgtccaaaggctatggatttgtttcgtttgttaatgacgtggatgtccagaagatagtaggatcacagatacatttccatggtaaaaagctgaagctgggccctgcaatcaggaaacaaaagttatgtgctcgtcatgtgcagccacgtcctttggtagttaatcctcctcctccaccacagtttcagaacgtctggcggaatccaaacactgaaacctacctgcagccccaaatcacgccgaatcctgtaactcagcacgttcaggcttattctgcttatccacattcaccaggtcaggtcatcactggatgtcagttgcttgtatataattatcaggaatatcctacttatcccgattcagcatttcaggtcaccactggatatcagttgcctgtatataattatcagccatttcctgcttatccaagatcaccatttcaggtcactgctggatatcagttgcctgtatataattatcaggcatttcctgcttatccaaattcaccatttcaagtcgccactggatatcagttccctgtatacaattatcagccatttcctgcttatccaagttcaccatttcaggtcactgctggatatcagttgcctgtatataattatcaggcatttcctgcttatccaaattcaccatttcaagtcgccactggatatcagttccctgtatacaattatcaggcatttcctgcttatccaaattcaccagttcaggtcaccactggatatcagttgcctgtatacaattatcaggcatttcctgcttatccaagttcaccatttcaggtcaccactggatatcagttgcctgtatataattatcaggcatttcctgcttatccaagttcaccatttcaggtcaccactggatatcagttgcctgtatataattatcaggcatttcctgcttatccaagttcaccatttcaggtcaccactggatatcagttgcctgtatataattatcaggcatttcctgcttatccaagttcaccatttcaggtcaccactggatatcagttgcctgtatataattatcaggcatttcctgcttatccaagttcaccatttcaggtcaccactggatatcagttgcctgtatataattatcaggcatttcctgcttatccaagttcaccatttcaggtcaccactggatatcagttgcctgtatataattatcaggcatttcctgcttatccaaattcagcagttcaggtcaccactggatatcagttccatgtatacaattaccagatgccaccgcagtgccctgttggggagcaaaggagaaatctgtggaccgaagcatacaaatggtggtatcttgtctgtttaatccagagaagagactgataaattccgttgttactcaagatgactgcttcaagggtaaaagagtgcatcgctttagaagaagtttggcagtatttaaatctgttggatcctctcagctatctagtttcatgggaagttgctggttttgaatattaagctaaaagttttccactattacagaaattctgaattttggtaaatcacactgaaactttctgtataacttgtattattagactctctagttttatcttaacactgaaactgttcttcattagatgtttatttagaacctggttctgtgtttaatatatagtttaaagtaacaaataatcgagactgaaagaatgttaagatttatctgcaaggatttttaaaaaattgaaacttgcattttaagtgtttaaaagcaaatactgactttcaaaaaagtttttaaaacctgatttgaaagctaacaattttgatagtctgaacacaagcatttcacttctccaagaagtacctgtgaacagtacaatatttcagtattgagctttgcatttatgatttatctagaaatttacctcaaaagcagaatttttaaaactgcatttttaatcagtggaactcaatgtatagttagctttattgaagtcttatccaaacccagtaaaacagattctaagcaaacagtccaatcagtgagtcataatgtttattcaaagtattttatcttttatctagaatccacatatgtatgtccaatttgattgggatagtagttaggataactaaaattctgggcctaattttttaaagaatccaagacaaactaaactttactgggtatataaccttctcaatgagttaccattcttttttataaaaaaaattgttccttgaaatgctaaacttaatggctgtatgtgaaatttgcaaaatactggtattaaagaacgctgcagcttttttatgtcactcaaaggttaatcggagtatctgaaaggaattgtttttataaaaacattgaagtattagttacttgctataaatagatttttatttttgttttttagcctgttatatttccttctgtaaaataaaatatgtccagaagaggcatgttgtttctagattaggtagtgtcctcattttatattgtgaccacacagctagagcaccagagcccttttgctatactcacagtcttgttttcccagcctcttttactagtctttcaggaggtttgctcttagaactggtgatgtaaagaatggaagtagctgtatgagcagttcaaaggccaagccgtggaatggtagcaatgggatataatacctttctaagggaaacatttgtatcagtatcatttgatctgccatggacatgtgtttaaagtggctttctggcccttctttcaatggcttcttccctaaaacgtggagactctaagttaatgtcgttactatgggccatattactaatgcccactggggtctatgatttctcaaaattttcattcggaatccgaaggatacagtctttaaactttagaattcccaagaaggctttattacacctcagaaattgaaagcaccatgactttgtccattaaaaaattatccatagtttttttagtgcttttaacattccgacatacatcattctgtgattaaatctccagatttctgtaaatgatacctacattctaaagagttaattctaattattccgatatgaccttaaggaaaagtaaaggaataaatttttgtctttgttgaagtatttaatagagtaaggtaaagaagatattaagtccctttcaaaatggaaaattaattctaaactgagaaaaatgttcctactacctattgctgatactgtctttgcataaatgaataaaaataaactttttttcttc

SEQ ID NO: 22095 - DNA, 1891 bp, Artificial Sequence
  derived and/or modified sequence
ctggcggttctacctccgagggttcgcccgcccttggttttccttacaccttagcctttggctcctttgaccactcgaagccccacagcgtgttccagcggacttcaccagcagacccagaagtggtgggtgaaacactgcctctgttcctccttgagcctgtcgggagctgctgcctgccaccaccatgtctgctgcaaatcctgagactccaaactcaaccatctccagagaggccagcacccagtcttcatcagctgcagctagccaaggctgggtgttaccagaaggcaaaatcgtgccaaacactgtttttgttggtggaattgatgctaggatggatgaaactgagattggaagctgctttggtagatacggttcagtgaaagaagtgaagataatcacgaatcgaactggtgtgtccaaaggctatggatttgtttcgtttgttaatgacgtggatgtccagaagatagtaggatcacagatacatttccatggtaaaaagctgaagctgggccctgcaatcaggaaacaaaagttatgtgctcgtcatgtgcagccacgtcctttggtagttaatcctcctcctccaccacagtttcagaacgtctggcggaatccaaacactgaaacctacctgcagccccaaatcacgccgaatcctgtaactcagcacgttcaggcttattctgcttatccacattcaccaggtcaggtcatcactggatgtcagttgcttgtatataattatcaggaatatcctacttatcccgattcagcatttcaggtcaccactggatatcagttgcctgtatataattatcagccatttcctgcttatccaagatcaccatttcaggtcactgctggatatcagttgcctgtatataattatcaggcatttcctgcttatccaaattcaccatttcaagtcgccactggatatcagttccctgtatacaattatcagccatttcctgcttatccaagttcaccatttcaggtcactgctggatatcagttgcctgtatataattatcaggcatttcctgcttatccaaattcaccatttcaagtcgccactggatatcagttccctgtatacaattatcagccatttcctgcttatccaagttcaccatttcaggtcactgctggatatcagttgcctgtatataattatcaggcatttcctgcttatccaaattcaccatttcaagtcgccactggatatcagttccctgtatacaattatcaggcatttcctgcttatccaaattcaccagttcaggtcaccactggatatcagttgcctgtatacaattatcaggcatttcctgcttatccaaattcaccatttcaagtcgccactggatatcagttccctgtatacaattatcaggcatttcctgcttatccaaattcaccagttcaggtcaccactggatatcagttgcctgtatacaattatcaggcatttcctgcttatccaaattcagcagttcaggtcaccactggatatcagttccatgtatacaattaccagatgccaccgcagtgccctgttggggagcaaaggagaaatctgtggaccgaagcatacaaatggtggtatcttgtctgtttaatccagagaagagactgataaattccgttgttactcaagatgactgcttcaagggtaaaagagtgcatcgctttagaagaagtttggcagtatttaaatctgttggatcctctcagctatctagtttcatgggaagttgctggttttgaatattaagctaaaagttttccactattacagaaattctgaattttggtaaatcacactgaaactttctgtataacttgtattattagactctctagttttatcttaacactg

SEQ ID NO: 22096 - DNA, 3791 bp, Artificial Sequence
  derived and/or modified sequence
gctgccacccattggctcaggccgataccacgcgccccgatacccggcacaggagccacctcccagagccccgcagtccatgcctcagtcggcctgcgctcctcagcctggcggttctacctccgagggttcgcccgcccttggttttccttacaccttagcctttggctcctttgaccactcgaagccccacagcgtgttccagcggacttcaccagcagacccagaagtggtgggtgaaacactgcctctgttcctccttgagcctgtcgggagctgctgcctgccaccaccatgtctgctgcaaatcctgagactccaaactcaaccatctccagagaggccagcacccagtcttcatcagctgcagctagccaaggctgggtgttaccagaaggcaaaatcgtgccaaacactgtttttgttggtggaattgatgctaggatggatgaaactgagattggaagctgctttggtagatacggttcagtgaaagaagtgaagataatcacgaatcgaactggtgtgtccaaaggctatggatttgtttcgtttgttaatgacgtggatgtccagaagatagtaggatcacagatacatttccatggtaaaaagctgaagctgggccctgcaatcaggaaacaaaagttatgtgctcgtcatgtgcagccacgtcctttggtagttaatcctcctcctccaccacagtttcagaacgtctggcggaatccaaacactgaaacctacctgcagccccaaatcacgccgaatcctgtaactcagcacgttcaggcttattctgcttatccacattcaccaggtcaggtcatcactggatgtcagttgcttgtatataattatcaggaatatcctacttatcccgattcagcatttcaggtcaccactggatatcagttgcctgtatataattatcagccatttcctgcttatccaagatcaccatttcaggtcactgctggatatcagttgcctgtatataattatcaggcatttcctgcttatccaaattcaccatttcaagtcgccactggatatcagttccctgtatacaattatcagccatttcctgcttatccaagttcaccatttcaggtcactgctggatatcagttgcctgtatataattatcaggcatttcctgcttatccaaattcaccatttcaagtcgccactggatatcagttccctgtatacaattatcaggcatttcctgcttatccaaattcaccagttcaggtcaccactggatatcagttgcctgtatacaattatcaggcatttcctgcttatccaagttcaccatttcaggtcaccactggatatcagttgcctgtatataattatcaggcatttcctgcttatccaagttcaccatttcaggtcaccactggatatcagttgcctgtatataattatcaggcatttcctgcttatccaagttcaccatttcaggtcaccactggatatcagttgcctgtatataattatcaggcatttcctgcttatccaagttcaccatttcaggtcaccactggatatcagttgcctgtatataattatcaggcatttcctgcttatccaagttcaccatttcaggtcaccactggatatcagttgcctgtatataattatcaggcatttcctgcttatccaagttcaccatttcaggtcaccactggatatcagttgcctgtatataattatcaggcatttcctgcttatccaaattcagcagttcaggtcaccactggatatcagttccatgtatacaattaccagatgccaccgcagtgccctgttggggagcaaaggagaaatctgtggaccgaagcatacaaatggtggtatcttgtctgtttaatccagagaagagactgataaattccgttgttactcaagatgactgcttcaagggtaaaagagtgcatcgctttagaagaagtttggcagtatttaaatctgttggatcctctcagctatctagtttcatgggaagttgctggttttgaatattaagctaaaagttttccactattacagaaattctgaattttggtaaatcacactgaaactttctgtataacttgtattattagactctctagttttatcttaacactgaaactgttcttcattagatgtttatttagaacctggttctgtgtttaatatatagtttaaagtaacaaataatcgagactgaaagaatgttaagatttatctgcaaggatttttaaaaaattgaaacttgcattttaagtgtttaaaagcaaatactgactttcaaaaaagtttttaaaacctgatttgaaagctaacaattttgatagtctgaacacaagcatttcacttctccaagaagtacctgtgaacagtacaatatttcagtattgagctttgcatttatgatttatctagaaatttacctcaaaagcagaatttttaaaactgcatttttaatcagtggaactcaatgtatagttagctttattgaagtcttatccaaacccagtaaaacagattctaagcaaacagtccaatcagtgagtcataatgtttattcaaagtattttatcttttatctagaatccacatatgtatgtccaatttgattgggatagtagttaggataactaaaattctgggcctaattttttaaagaatccaagacaaactaaactttactgggtatataaccttctcaatgagttaccattcttttttataaaaaaaattgttccttgaaatgctaaacttaatggctgtatgtgaaatttgcaaaatactggtattaaagaacgctgcagcttttttatgtcactcaaaggttaatcggagtatctgaaaggaattgtttttataaaaacattgaagtattagttacttgctataaatagatttttatttttgttttttagcctgttatatttccttctgtaaaataaaatatgtccagaagaggcatgttgtttctagattaggtagtgtcctcattttatattgtgaccacacagctagagcaccagagcccttttgctatactcacagtcttgttttcccagcctcttttactagtctttcaggaggtttgctcttagaactggtgatgtaaagaatggaagtagctgtatgagcagttcaaaggccaagccgtggaatggtagcaatgggatataatacctttctaagggaaacatttgtatcagtatcatttgatctgccatggacatgtgtttaaagtggctttctggcccttctttcaatggcttcttccctaaaacgtggagactctaagttaatgtcgttactatgggccatattactaatgcccactggggtctatgatttctcaaaattttcattcggaatccgaaggatacagtctttaaactttagaattcccaagaaggctttattacacctcagaaattgaaagcaccatgactttgtccattaaaaaattatccatagtttttttagtgcttttaacattccgacatacatcattctgtgattaaatctccagatttctgtaaatgatacctacattctaaagagttaattctaattattccgatatgaccttaaggaaaagtaaaggaataaatttttgtctttgttgaagtatttaatagagtaaggtaaagaagatattaagtccctttcaaaatggaaaattaattctaaactgagaaaaatgttcctactacctattgctgatactgtctttgcataaatgaataaaaataaactttttttcttcaaatgtg

SEQ ID NO: 22097 - protein, 366 aa, Artificial Sequence
  derived and/or modified sequence
MSAANPETPNSTISREASTQSSSAAASQGWVLPEGKIVPNTVFVGGIDARMDETEIGSCFGRYGSVKEVKIITNRTGVSKGYGFVSFVNDVDVQKIVGSQIHFHGKKLKLGPAIRKQKLCARHVQPRPLVVNPPPPPQFQNVWRNPNTETYLQPQITPNPVTQHVQAYSAYPHSPGQVITGCQLLVYNYQEYPTYPDSAFQVTTGYQLPVYNYQPFPAYPRSPFQVTAGYQLPVYNYQAFPAYPNSPFQVATGYQFPVYNYQPFPAYPSSPFQVTAGYQLPVYNYQAFPAYPNSPVQVTTGYQLPVYNYQAFPAYPNSAVQVTTGYQFHVYNYQMPPQCPVGEQRRNLWTEAYKWWYLVCLIQRRD

SEQ ID NO: 22098 - protein, 366 aa, Artificial Sequence
  derived and/or modified sequence
MSAANPETPNSTISREASTQSSSAAASQGWVLPEGKIVPNTVFVGGIDARMDETEIGSCFGRYGSVKEVKIITNRTGVSKGYGFVSFVNDVDVQKIVGSQIHFHGKKLKLGPAIRKQKLCARHVQPRPLVVNPPPPPQFQNVWRNPNTETYLQPQITPNPVTQHVQAYSAYPHSPGQVITGCQLLVYNYQEYPTYPDSAFQVTTGYQLPVYNYQPFPAYPSSPFQVTAGYQLPVYNYQAFPAYPSSPFQVTTGYQLPVYNYQAFPAYPSSPFQVTTGYQLPVYNYQAFPAYPSSPFQVTTGYQLPVYNYQAFPAYPNSAVQVTTGYQFHVYNYQMPPQCPVGEQRRNLWTEAYKWWYLVCLIQRRD

SEQ ID NO: 22099 - protein, 366 aa, Artificial Sequence
  derived and/or modified sequence
MSAANPETPNSTISREASTQSSSAAASQGWVLPEGKIVPNTVFVGGIDARMDETEIGSCFGRYGSVKEVKIITNRTGVSKGYGFVSFVNDVDVQKIVGSQIHFHGKKLKLGPAIRKQKLCARHVQPRPLVVNPPPPPQFQNVWRNPNTETYLQPQITPNPVTQHVQAYSAYPHSPGQVITGCQLLVYNYQEYPTYPDSAFQVTTGYQLPVYNYQPFPAYPRSPFQVTAGYQLPVYNYQAFPAYPNSPVQVTTGYQLPVYNYQAFPAYPNSPVQVTTGYQLPVYNYQAFPAYPNSPVQVTTGYQLPVYNYQAFPAYPNSAVQVTTGYQFHVYNYQMPPQCPVGEQRRNLWTEAYKWWYLVCLIQRRD

SEQ ID NO: 22100 - DNA, 1101 bp, Artificial Sequence
  derived and/or modified sequence
atgagcgccgccaaccccgagacccccaacagcaccatcagcagagaggccagcacccagagcagcagcgccgccgccagccagggctgggtgctgcccgagggcaagatcgtgcccaacaccgtgttcgtgggcggcatcgacgccagaatggacgagaccgagatcggcagctgcttcggcagatacggcagcgtgaaggaggtgaagatcatcaccaacagaaccggcgtgagcaagggctacggcttcgtgagcttcgtgaacgacgtggacgtgcagaagatcgtgggcagccagatccacttccacggcaagaagctgaagctgggccccgccatcagaaagcagaagctgtgcgccagacacgtgcagcccagacccctggtggtgaacccccccccccccccccagttccagaacgtgtggagaaaccccaacaccgagacctacctgcagccccagatcacccccaaccccgtgacccagcacgtgcaggcctacagcgcctacccccacagccccggccaggtgatcaccggctgccagctgctggtgtacaactaccaggagtaccccacctaccccgacagcgccttccaggtgaccaccggctaccagctgcccgtgtacaactaccagcccttccccgcctaccccagcagccccttccaggtgaccgccggctaccagctgcccgtgtacaactaccaggccttccccgcctaccccagcagccccttccaggtgaccaccggctaccagctgcccgtgtacaactaccaggccttccccgcctaccccagcagccccttccaggtgaccaccggctaccagctgcccgtgtacaactaccaggccttccccgcctaccccagcagccccttccaggtgaccaccggctaccagctgcccgtgtacaactaccaggccttccccgcctaccccaacagcgccgtgcaggtgaccaccggctaccagttccacgtgtacaactaccagatgcccccccagtgccccgtgggcgagcagagaagaaacctgtggaccgaggcctacaagtggtggtacctggtgtgcctgatccagagaagagactag

SEQ ID NO: 22101 - DNA, 1101 bp, Artificial Sequence
  derived and/or modified sequence
atgagcgccgccaatccggagacacctaatagcacgatctcacgagaagcgtctacccaatctagcagtgcagctgcctcccagggatgggtcctgcccgagggaaagattgtccctaatacagtgttcgtaggcggcattgatgcacgaatggacgaaaccgaaattggatcatgctttggcaggtacggatccgtaaaagaagtaaagatcattacaaatcgaaccggcgtctccaagggatacgggttcgtaagcttcgtgaacgatgtcgatgtccagaagatagttggatcccagatccactttcatggcaagaaattaaagttggggcctgcgatccgcaaacagaagctctgtgcacggcacgtccagccccgccccctggttgtaaatccgcccccgcccccacagtttcagaacgtgtggcgaaaccctaacacagaaacatacctgcagcctcagatcacgcccaatccagtcacccagcatgtccaggcttatagtgcttacccccacagtccggggcaggtcatcactggctgtcaactactggtgtataactaccaggagtaccccacttaccctgatagcgcatttcaggttaccaccggttatcagttgcccgtctataattatcagcctttccctgcttacccgagttctccctttcaggtcacagccgggtatcagttacccgtgtataactatcaggcttttcctgcctatccttcaagcccatttcaagtaacaaccggataccagctgccagtatataactatcaggcctttccagcttatcctagttcacccttccaggtcactaccggatatcagcttcctgtgtataactatcaagccttccccgcctacccatcatcaccattccaggtcactaccggttaccagctgcctgtatataactatcaggcttttccggcataccccaacagtgcggtgcaggtgacgaccggctaccaattccatgtgtacaattatcaaatgcctcctcaatgccccgtgggagagcagcgcaggaacctctggactgaggcttacaagtggtggtacttagtgtgcctgatccagaggagggactag

SEQ ID NO: 22102 - DNA, 1101 bp, Artificial Sequence
  derived and/or modified sequence
atgtctgctgccaaccctgagacccccaacagcaccatcagccgggaggccagcacccagagcagcagcgctgctgccagccagggctgggtgctgcctgagggcaagatcgtgcccaacacagtgtttgtgggcggcattgatgccaggatggatgaaacagagatcggcagctgcttcggccgctatggctctgtgaaggaggtgaagatcatcaccaacagaactggagtgtccaagggctacggctttgtgtcctttgtgaatgatgtggatgtgcagaagatcgtgggcagccagatccacttccacggcaagaagctgaagctgggccctgccatcaggaagcagaagctgtgtgcccggcacgtgcagccccggcccctggtggtgaaccccccacctccaccccagttccagaatgtgtggaggaaccccaacacagagacctacctgcagccccagatcacccccaaccctgtgacccagcacgtgcaggcctacagcgcctacccccacagccctggccaggtgatcaccggctgccagctgctggtgtacaactaccaggagtaccccacctacccagacagcgccttccaggtgaccaccggctaccagctgcctgtgtacaactaccagcccttccctgcctaccccagcagccccttccaggtgacagctggctaccagctgcctgtgtacaactaccaggccttccctgcctaccccagcagccccttccaggtgaccaccggctaccagctgcctgtgtacaactaccaggccttccctgcctaccccagcagccccttccaggtgaccaccggctaccagctgcctgtgtacaactaccaggccttccctgcctaccccagcagccccttccaggtgaccaccggctaccagctgcctgtgtacaactaccaggccttccctgcctaccccaacagcgctgtgcaggtgaccaccggctaccagttccacgtgtacaactaccagatgccaccccagtgccctgtgggggagcagaggaggaacctgtggacagaggcctacaagtggtggtacctggtgtgcctgatccagaggcgggactag

SEQ ID NO: 22103 - DNA, 1101 bp, Artificial Sequence
  derived and/or modified sequence
atgagcgccgccaaccccgagacccccaacagcaccatcagccgggaagctagtacacaaagcagttccgcagccgcatcccaggggtgggtccttccagagggtaagattgtccctaacaccgtgttcgtggggggcattgatgctagaatggacgagactgagatcggcagctgcttcgggcggtatggatccgtaaaagaggtcaaaatcattactaaccgaactggcgtcagtaaaggctacggcttcgtctcattcgtcaacgatgttgacgtgcaaaaaatcgtagggagtcagatccatttccacggaaaaaagctcaaactggggcctgccatcaggaagcagaagctgtgtgcacgtcatgtgcagccacgacccctcgttgtcaatccaccaccgcctcctcagtttcagaatgtgtggcgaaatcccaataccgaaacctatcttcagccccaaatcaccccgaatccagtgacccaacatgtccaggcttattccgcgtacccccacagccctggccaagtgataacagggtgccaacttcttgtgtacaactaccaagagtaccccacttaccctgacagcgccttccaggtgaccacaggttatcagttgccggtctacaactatcagccgtttcccgcataccccagttctccgttccaagtaaccgcaggctaccagctgcccgtgtacaattaccaggcgtttccagcttacccatcttccccgtttcaggtgacaactggctaccagttaccagtgtacaattatcaagcctttccagcttatccttcgagccctttccaggtgaccactggttaccagctcccggtgtataattatcaggcgtttcctgcctacccatcttcaccatttcaggttacaacaggttatcagctccctgtttacaactaccaggctttcccagcgtaccccaatagcgccgtgcaggtgacaactgggtaccaatttcacgtgtataactatcagatgccgccccagtgccctgtaggagagcagcgcaggaatttatggacggaggcctacaagtggtggtatctggtgtgcctaatacagaggagagactag

SEQ ID NO: 22104 - DNA, 3195 bp, Artificial Sequence
  derived and/or modified sequence
agtcggcctgcgctcctcagcctggcggttctacctccgagggttcgcccgcccttggttttccttacaccttagcctttggctcctttgaccactcgaagccccacagcgtgttccagcggacttcaccagcagacccagaagtggtgggtgaaacactgcctctgttcctccttgagcctgtcgggagctgctgcctgccaccaccatgtctgctgcaaatcctgagactccaaactcaaccatctccagagaggccagcacccagtcttcatcagctgcagctagccaaggctgggtgttaccagaaggcaaaatcgtgccaaacactgtttttgttggtggaattgatgctaggatggatgaaactgagattggaagctgctttggtagatacggttcagtgaaagaagtgaagataatcacgaatcgaactggtgtgtccaaaggctatggatttgtttcgtttgttaatgacgtggatgtccagaagatagtaggatcacagatacatttccatggtaaaaagctgaagctgggccctgcaatcaggaaacaaaagttatgtgctcgtcatgtgcagccacgtcctttggtagttaatcctcctcctccaccacagtttcagaacgtctggcggaatccaaacactgaaacctacctgcagccccaaatcacgccgaatcctgtaactcagcacgttcaggcttactctgcttatccacattcaccaggtcaggtcatcactggatgtcagttgcttgtatataattatcaggaatatcctacttatcccgattcagcatttcaggtcaccactggatatcagttgcctgtatataattatcagccatttcctgcttatccaagttcaccatttcaggtcactgctggatatcagttgcctgtatataattatcaggcatttcctgcttatccaagttcaccatttcaggtcaccactggatatcagttgcctgtatataattatcaggcatttcctgcttatccaagttcaccatttcaggtcaccactggatatcagttgcctgtatataattatcaggcatttcctgcttatccaagttcaccatttcaggtcaccactggatatcagttgcctgtatataattatcaggcatttcctgcttatccaaattcagcagttcaggtcaccactggatatcagttccatgtatacaattaccagatgccaccgcagtgccctgttggggagcaaaggagaaatctgtggaccgaagcatacaaatggtggtatcttgtctgtttaatccagagaagagactgataaattccgttgttactcaagatgactgcttcaagggtaaaagagtgcatcgctttagaagaagtttggcagtatttaaatctgttggatcctctcagctatctagtttcatgggaagttgctggttttgaatattaagctaaaagttttccactattacagaaattctgaattttggtaaatcacactgaaactttctgtataacttgtattattagactctctagttttatcttaacactgaaactgttcttcattagatgtttatttagaacctggttctgtgtttaatatatagtttaaagtaacaaataatcgagactgaaagaatgttaagatttatctgcaaggatttttaaaaaattgaaacttgcattttaagtgtttaaaagcaaatactgactttcaaaaaagtttttaaaacctgatttgaaagctaacaattttgatagtctgaacacaagcatttcacttctccaagaagtacctgtgaacagtacaatatttcagtattgagctttgcatttatgatttatctagaaatttacctcaaaagcagaatttttaaaactgcatttttaatcagtggaactcaatgtatagttagctttattgaagtcttatccaaacccagtaaaacagattctaagcaaacagtccaatcagtgagtcataatgtttattcaaagtattttatcttttatctagaatccacatatgtatgtccaatttgattgggatagtagttaggataactaaaattctgggcctaattttttaaagaatccaagacaaactaaactttactgggtatataaccttctcaatgagttaccattcttttttataaaaaaaattgttccttgaaatgctaaacttaatggctgtatgtgaaatttgcaaaatactggtattaaagaacgctgcagcttttttatgtcactcaaaggttaatcggagtatctgaaaggaattgtttttataaaaacattgaagtattagttacttgctataaatagatttttatttttgttttttagcctgttatatttccttctgtaaaataaaatatgtccagaagaggcatgttgtttctagattaggtagtgtcctcattttatattgtgaccacacagctagagcaccagagcccttttgctatactcacagtcttgttttcccagcctcttttactagtctttcaggaggtttgctcttagaactggtgatgtaaagaatggaagtagctgtatgagcagttcaaaggccaagccgtggaatggtagcaatgggatataatacctttctaagggaaacatttgtatcagtatcatttgatctgccatggacatgtgtttaaagtggctttctggcccttctttcaatggcttcttccctaaaacgtggagactctaagttaatgtcgttactatgggccatattactaatgcccactggggtctatgatttctcaaaattttcattcggaatccgaaggatacagtctttaaactttagaattcccaagaaggctttattacacctcagaaattgaaagcaccatgactttgtccattaaaaaattatccatagtttttttagtgcttttaacattccgacatacatcattctgtgattaaatctccagatttctgtaaatgatacctacattctaaagagttaattctaattattccgatatgaccttaaggaaaagtaaaggaataaatttttgtctttgttgaagtatttaatagagtaaggtaaagaagatattaagtccctttcaaaatggaaaattaattctaaactgagaaaaatgttcctactacctattgctgatactgtctttgcataaatgaataaaaataaactttttttcttca

SEQ ID NO: 22105 - DNA, 1101 bp, Artificial Sequence
  derived and/or modified sequence
atgagcgcagctaaccccgagactccaaactctaccatcagtagggaagcatccactcagtccagttccgctgctgctagccaggggtgggttctgcctgaaggcaaaattgtgcccaacacagtcttcgttgggggaatcgacgcgcgtatggatgaaacagagataggaagttgctttgggcgttacgggtccgttaaggaggtgaagattatcaccaacaggacaggggtctccaaaggctatggttttgtgagtttcgttaacgacgtggatgtccagaaaattgtcggaagtcagatccattttcatggtaaaaagcttaaattagggcctgccatccggaaacagaaactatgtgcaaggcacgtgcaacctcggcctttggtcgtgaacccccctccgccacctcagtttcagaacgtctggagaaatccaaataccgagacttatctgcagccccagatcactccaaatccagtgacacagcacgtgcaggcgtatagcgcatatccccattctcccggtcaggtaatcaccgggtgccaactgttagtttataactaccaggagtaccccacttaccccgacagtgctttccaggtgacgaccggctatcagttgcccgtgtacaattaccaacctttcccggcttacccaagttcgcctttccaggtgactgctggctaccagttacctgtgtacaattaccaggcgttccctgcctacccctccagcccattccaagtgacaacaggctaccaactgccagtgtataactaccaagcctttcccgcatatccttcaagcccctttcaagtaaccactggctatcagctaccagtttacaactaccaggcttttccggcttacccgtccagcccctttcaggtgactaccgggtatcaactgcccgtgtacaattatcaggcatttcctgcatatccaaactcagcagtccaggtcacaacaggatatcagttccacgtgtataactaccagatgccgcctcagtgtccagtcggagaacagcgccgtaatctttggacagaggcctacaaatggtggtatctggtctgtttgatccagagacgagattag

SEQ ID NO: 22106 - DNA, 1101 bp, Artificial Sequence
  derived and/or modified sequence
atgtcagccgctaatccagaaacccccaacagcaccatctcccgggaagccagcacgcagagcagtagcgcagccgcttcccagggttgggttctgccagaaggtaagattgttccgaataccgtgttcgtcggaggaatcgatgctcggatggatgaaacagaaattggaagctgcttcggcaggtatggttctgtgaaagaggtgaaaatcattacgaatagaacaggcgtgtcgaaggggtacggcttcgttagctttgtcaatgacgtcgatgtgcagaaaatagtgggaagtcagatccatttccacggcaagaaactgaaacttggcccagccatacgtaagcagaagctgtgtgcccgtcacgtccaacccagaccattagtggtcaatcctccaccgccgccacaattccagaacgtttggagaaacccaaatacggagacatacctgcagccacagatcactccgaatccagtgacacaacacgtccaggcatactctgcttacccacactcacccggacaggtgattacaggctgccaactgctggtatataattatcaagaataccctacctaccctgactctgcctttcaggtgactactggataccagctccctgtgtacaactatcagccatttcctgcttacccgtcaagccctttccaagttaccgccgggtaccaacttcctgtttacaactaccaggcattccccgcttaccctagctcaccttttcaagtcaccacgggataccagcttccagtatacaattaccaggctttccctgcatacccatcatcaccctttcaggtgaccactggctatcagctgcctgtgtataattatcaggcttttccagcatatcccagctctcccttccaagttaccaccgggtatcaattgcctgtatataactatcaggcttttcccgcttaccctaactccgccgtgcaggttaccaccggctatcaattccacgtgtacaactaccagatgcccccacagtgccctgtcggcgaacagcggcgcaacctttggacagaggcctataagtggtggtatctggtctgtttaatccagcgacgtgattag

SEQ ID NO: 22107 - DNA, 1101 bp, Artificial Sequence
  derived and/or modified sequence
atgagcgccgcaaaccctgagactccaaactcaacaatatctcgtgaggcctccacacagtcctcatcggccgccgcaagtcagggatgggtcctgccggagggaaaaattgttcccaacactgtgttcgtgggaggcatcgatgctcgaatggacgagacagagattggctcttgtttcgggcggtacggatccgtcaaagaggttaaaatcataaccaatcgaaccggcgtgagcaagggctacgggtttgtgtcctttgttaatgacgtcgacgttcaaaagatagtgggttcccagatccatttccatggaaagaagctgaaactgggtcccgccatcagaaagcagaagctatgcgctagacacgtccaaccccggcctctggtcgtaaaccccccacctccccctcagttccagaatgtgtggcgaaatcccaacaccgagacatatctgcagccacagataactcctaaccccgttactcagcacgtgcaggcttatagcgcctaccctcactctcctggccaggtgatcaccggctgccagctcctcgtctataattatcaggagtatccaacatacccagacagtgccttccaggtcaccaccggatatcagttacctgtatacaactatcaaccattccccgcgtatccacggtccccctttcaggtgaccgccggctaccagctgccggtgtacaactaccaagcattcccagcgtaccctaactcccctgtgcaggtgaccacaggataccagctcccagtatacaactatcaggccttccccgcctatcctaacagtcccgtacaggtaaccacaggctaccagctccctgtgtacaactaccaggcgtttcccgcatatcccaacagcccagtccaggtaactaccggctaccaactgccagtctacaattatcaggcttttcccgcctacccgaactccgccgtccaggtcaccaccgggtatcagtttcacgtgtataattaccagatgcctcctcagtgcccggttggagaacaaaggcgaaatttgtggactgaggcttataagtggtggtatctggtgtgcctgatccagcggcgggactag

SEQ ID NO: 22108 - DNA, 1101 bp, Artificial Sequence
  derived and/or modified sequence
atgtctgctgccaaccctgagacccccaacagcaccatcagccgggaggccagcacccagagcagcagcgctgctgccagccagggctgggtgctgcctgagggcaagatcgtgcccaacacagtgtttgtgggcggcattgatgccaggatggatgaaacagagatcggcagctgcttcggccgctatggctctgtgaaggaggtgaagatcatcaccaacagaactggagtgtccaagggctacggctttgtgtcctttgtgaatgatgtggatgtgcagaagatcgtgggcagccagatccacttccacggcaagaagctgaagctgggccctgccatcaggaagcagaagctgtgtgcccggcacgtgcagccccggcccctggtggtgaaccccccacctccaccccagttccagaatgtgtggaggaaccccaacacagagacctacctgcagccccagatcacccccaaccctgtgacccagcacgtgcaggcctacagcgcctacccccacagccctggccaggtgatcaccggctgccagctgctggtgtacaactaccaggagtaccccacctacccagacagcgccttccaggtgaccaccggctaccagctgcctgtgtacaactaccagcccttccctgcctaccccaggagccccttccaggtgacagctggctaccagctgcctgtgtacaactaccaggccttccctgcctaccccaacagccctgtgcaggtgaccaccggctaccagctgcctgtgtacaactaccaggccttccctgcctaccccaacagccctgtgcaggtgaccaccggctaccagctgcctgtgtacaactaccaggccttccctgcctaccccaacagccctgtgcaggtgaccaccggctaccagctgcctgtgtacaactaccaggccttccctgcctaccccaacagcgctgtgcaggtgaccaccggctaccagttccacgtgtacaactaccagatgccaccccagtgccctgtgggggagcagaggaggaacctgtggacagaggcctacaagtggtggtacctggtgtgcctgatccagaggcgggactag

SEQ ID NO: 22109 - DNA, 1101 bp, Artificial Sequence
  derived and/or modified sequence
atgagcgccgccaaccccgagacccccaacagcaccatcagccgggaagcttccacccaatcctcatctgcagcagcaagccaggggtgggtcctgcccgagggcaaaatcgtgcctaacacagtgtttgttggcggcatcgacgcccggatggacgagaccgagattgggtcttgctttggccgatatggctccgtgaaagaagtgaagattattacaaacaggacaggggtgagcaagggatatggcttcgtgagttttgtaaatgatgtggacgtgcagaagatcgtggggagccagattcatttccacggaaaaaagctgaaactaggtcctgcgattcggaaacagaaactctgcgccaggcacgtccagccaagacccctcgtggtaaaccctccaccacccccgcagtttcagaatgtgtggagaaatcccaacactgagacatatttgcaaccccagatcacccccaatcccgtcacccaacacgttcaggcatactctgcatatccacactcaccaggacaggtcattacggggtgccagttgctggtgtacaactaccaggaatacccaacctaccccgactcggcattccaggttacaaccgggtaccaactgccagtctacaattaccaaccctttccagcctacccatcatctcccttccaggtgacggcaggctaccagctcccagtctacaactaccaagccttccctgcataccctagcagcccttttcaggtcacaaccgggtaccagttgcctgtgtacaactatcaggctttccctgcatatccttcttcccccttccaggttacaacgggataccagctgccagtctacaactaccaggcctttccggcatatcctagcagtccctttcaggttaccacagggtatcagctgccagtctataattatcaggcattccctgcctaccctaatagcgcggtgcaagtgacaaccggctatcagttccacgtttataattaccagatgcccccccagtgtccagtgggtgaacagcgtcgcaacctgtggacggaagcatacaagtggtggtacctggtgtgcctaatccaacgtagagactag

SEQ ID NO: 22110 - DNA, 1101 bp, Artificial Sequence
  derived and/or modified sequence
atgagcgccgccaaccccgagacccccaacagcaccatcagccgggaggcctcaacccaaagttcatcagctgccgcatcacagggatgggttctcccagagggtaagatcgtgcctaataccgtgttcgtgggaggaattgatgccaggatggacgagacagaaattggttcttgttttggacgatatggctccgtgaaagaggtgaagattataacaaacaggacgggtgtttctaagggctacggattcgtgtcatttgtaaatgacgttgatgtgcaaaaaatcgtgggctcccaaattcacttccatggtaagaagctgaagctcggtcctgccataaggaaacagaaattgtgtgcgaggcatgtccagccacgccctctggtggtgaatccccccccacccccccagtttcagaatgtgtggagaaaccccaatacagaaacatacctgcaaccccagattacccctaacccggtgacccagcacgttcaagcttattcagcctatcctcattccccggggcaggtaattactggttgtcagcttctagtgtataattaccaggagtatcctacctaccctgactctgctttccaagtcactacaggctaccagctgccagtctacaattaccagcccttcccagcctaccccagaagtccatttcaggtgactgctgggtaccagttaccggtgtacaactaccaggcttttcccgcctatccaaactctccagtgcaggtgactactggctatcagctgcctgtgtacaattaccaggcttttcccgcctaccctaatagccccgtgcaggtcaccaccggatatcagttgccagtttataactaccaagctttccctgcctatcccaatagccccgttcaggtaacaacaggctatcagctgcctgtgtataattaccaggcttttcccgcctaccccaactctgctgtgcaggttacaacaggctaccaattccacgtctataattaccaaatgccaccccagtgtccggtcggggagcagcgacgcaatctctggaccgaggcctacaagtggtggtacctggtgtgcctgatccaaaggcgtgattag

SEQ ID NO: 22111 - DNA, 1101 bp, Artificial Sequence
  derived and/or modified sequence
atgagcgcagccaacccagaaacacctaacagtactatctcaagagaggcctctactcagtccagcagcgcagccgcaagtcagggctgggtgctacctgagggcaagatcgtacctaataccgtcttcgtaggcggaatagatgccaggatggacgagaccgagatcggctcctgttttggtagatacggtagcgtcaaagaggtcaaaatcataacaaaccggaccggcgttagtaaaggctacggatttgtgtcattcgtgaacgacgtggatgtacagaaaatcgtgggatctcagatccacttccacggcaagaaactaaagctggggccagcaataaggaaacaaaaactgtgtgcaaggcacgtgcagccccgacctttagttgtcaacccaccgcctcccccacagtttcaaaacgtgtggcggaaccccaatactgaaacttacctgcagcctcagattacccccaatccggtgacacagcatgtgcaggcatacagcgcgtatccgcacagccctggacaggtcattaccgggtgccagctgctggtttacaattaccaggaatatcctacgtatcccgactctgccttccaggtgactacaggatatcagcttcccgtttacaactaccaaccctttcctgcatatccaagcagccccttccaggtgaccgccggttaccaattgcctgtctacaattaccaggcctttccagcttaccccagttcacccttccaggtgacaactggatatcagctgcctgtgtataattatcaggcattccctgcctacccaagttcgccatttcaggttacaaccggataccaactacccgtctacaattatcaggccttccccgcataccccagttcaccctttcaggttacgacagggtaccaacttccagtgtacaattaccaagcatttcccgcataccccaacagcgccgttcaggttactacaggataccagttccatgtctataactatcaaatgccccctcagtgccctgtgggggagcaacgccgaaatctgtggactgaggcctacaagtggtggtatctggtgtgtctgattcagaggagggattag

SEQ ID NO: 22112 - DNA, 1101 bp, Artificial Sequence
  derived and/or modified sequence
atgagtgccgctaatccagaaacaccgaactccacaatctcaagggaagcgtccactcagagctctagcgccgcagcttctcagggatgggtcctgcctgaggggaagatcgtgcccaatacagtattcgtcggaggtattgatgcgaggatggatgaaactgaaataggctcatgctttggtagatacggctccgtcaaggaagtcaagattatcactaaccgaaccggcgtgtcaaagggatatggctttgtgtcttttgtgaacgatgtcgacgtgcagaagattgtgggtagtcagattcactttcacggcaagaagctcaaacttggacccgctatccggaagcagaagttatgcgctaggcacgttcagccgcgacccctggttgtgaatcctccccctccaccacagtttcaaaacgtatggcgaaatccaaatacagaaacgtacctccagccccagattacaccaaaccccgtgacacagcacgtacaggcctatagcgcctacccacatagcccaggccaggtgattaccggatgccagctcctggtttataattatcaggagtacccaacatatcctgattctgcattccaggtgactacgggatatcaattgcccgtctataactatcagccttttcccgcatatccgagaagcccctttcaggtgaccgcaggttatcagctacccgtgtataattatcaagccttcccggcttatcccaactcccctgtgcaggtgaccacggggtaccaattgcctgtttataattaccaggcatttcctgcttaccctaactcccccgtgcaggtgacaaccggctatcagctgccggtctacaactaccaagctttccccgcttaccctaactctcctgtgcaagtgaccacgggctatcagctcccagtgtataattatcaggcatttccagcctacccgaactccgcagttcaggtaaccacaggttatcagtttcacgtttacaactatcagatgccaccccaatgtccggtgggggagcaaaggcggaacctgtggactgaggcatataagtggtggtacctggtgtgcctgatacagcggcgtgactag

SEQ ID NO: 22113 - DNA, 1101 bp, Artificial Sequence
  derived and/or modified sequence
atgagcgccgccaaccccgagacccccaacagcaccatcagcagagaggccagcacccagagcagcagcgccgccgccagccagggctgggtgctgcccgagggcaagatcgtgcccaacaccgtgttcgtgggcggcatcgacgccagaatggacgagaccgagatcggcagctgcttcggcagatacggcagcgtgaaggaggtgaagatcatcaccaacagaaccggcgtgagcaagggctacggcttcgtgagcttcgtgaacgacgtggacgtgcagaagatcgtgggcagccagatccacttccacggcaagaagctgaagctgggccccgccatcagaaagcagaagctgtgcgccagacacgtgcagcccagacccctggtggtgaacccccccccccccccccagttccagaacgtgtggagaaaccccaacaccgagacctacctgcagccccagatcacccccaaccccgtgacccagcacgtgcaggcctacagcgcctacccccacagccccggccaggtgatcaccggctgccagctgctggtgtacaactaccaggagtaccccacctaccccgacagcgccttccaggtgaccaccggctaccagctgcccgtgtacaactaccagcccttccccgcctaccccagaagccccttccaggtgaccgccggctaccagctgcccgtgtacaactaccaggccttccccgcctaccccaacagccccgtgcaggtgaccaccggctaccagctgcccgtgtacaactaccaggccttccccgcctaccccaacagccccgtgcaggtgaccaccggctaccagctgcccgtgtacaactaccaggccttccccgcctaccccaacagccccgtgcaggtgaccaccggctaccagctgcccgtgtacaactaccaggccttccccgcctaccccaacagcgccgtgcaggtgaccaccggctaccagttccacgtgtacaactaccagatgcccccccagtgccccgtgggcgagcagagaagaaacctgtggaccgaggcctacaagtggtggtacctggtgtgcctgatccagagaagagactag

SEQ ID NO: 22114 - DNA, 3195 bp, Artificial Sequence
  derived and/or modified sequence
agtcggcctgcgctcctcagcctggcggttctacctccgagggttcgcccgcccttggttttccttacaccttagcctttggctcctttgaccactcgaagccccacagcgtgttccagcggacttcaccagcagacccagaagtggtgggtgaaacactgcctctgttcctccttgagcctgtcgggagctgctgcctgccaccaccatgtctgctgcaaatcctgagactccaaactcaaccatctccagagaggccagcacccagtcttcatcagctgcagctagccaaggctgggtgttaccagaaggcaaaatcgtgccaaacactgtttttgttggtggaattgatgctaggatggatgaaactgagattggaagctgctttggtagatacggttcagtgaaagaagtgaagataatcacgaatcgaactggtgtgtccaaaggctatggatttgtttcgtttgttaatgacgtggatgtccagaagatagtaggatcacagatacatttccatggtaaaaagctgaagctgggccctgcaatcaggaaacaaaagttatgtgctcgtcatgtgcagccacgtcctttggtagttaatcctcctcctccaccacagtttcagaacgtctggcggaatccaaacactgaaacctacctgcagccccaaatcacgccgaatcctgtaactcagcacgttcaggcttattctgcttatccacattcaccaggtcaggtcatcactggatgtcagttgcttgtatataattatcaggaatatcctacttatcccgattcagcatttcaggtcaccactggatatcagttgcctgtatataattatcagccatttcctgcttatccaagttcaccatttcaggtcactgctggatatcagttgcctgtatataattatcaggcatttcctgcttatccaagttcaccatttcaggtcaccactggatatcagttgcctgtatataattatcaggcatttcctgcttatccaagttcaccatttcaggtcaccactggatatcagttgcctgtatataattatcaggcatttcctgcttatccaagttcaccatttcaggtcaccactggatatcagttgcctgtatataattatcaggcatttcctgcttatccaaattcagcagttcaggtcaccactggatatcagttccatgtatacaattaccagatgccaccgcagtgccctgttggggagcaaaggagaaatctgtggaccgaagcatacaaatggtggtatcttgtctgtttaatccagagaagagactgataaattccgttgttactcaagatgactgcttcaagggtaaaagagtgcatcgctttagaagaagtttggcagtatttaaatctgttggatcctctcagctatctagtttcatgggaagttgctggttttgaatattaagctaaaagttttccactattacagaaattctgaattttggtaaatcacactgaaactttctgtataacttgtattattagactctctagttttatcttaacactgaaactgttcttcattagatgtttatttagaacctggttctgtgtttaatatatagtttaaagtaacaaataatcgagactgaaagaatgttaagatttatctgcaaggatttttaaaaaattgaaacttgcattttaagtgtttaaaagcaaatactgactttcaaaaaagtttttaaaacctgatttgaaagctaacaattttgatagtctgaacacaagcatttcacttctccaagaagtacctgtgaacagtacaatatttcagtattgagctttgcatttatgatttatctagaaatttacctcaaaagcagaatttttaaaactgcatttttaatcagtggaactcaatgtatagttagctttattgaagtcttatccaaacccagtaaaacagattctaagcaaacagtccaatcagtgagtcataatgtttattcaaagtattttatcttttatctagaatccacatatgtatgtccaatttgattgggatagtagttaggataactaaaattctgggcctaattttttaaagaatccaagacaaactaaactttactgggtatataaccttctcaatgagttaccattcttttttataaaaaaaattgttccttgaaatgctaaacttaatggctgtatgtgaaatttgcaaaatactggtattaaagaacgctgcagcttttttatgtcactcaaaggttaatcggagtatctgaaaggaattgtttttataaaaacattgaagtattagttacttgctataaatagatttttatttttgttttttagcctgttatatttccttctgtaaaataaaatatgtccagaagaggcatgttgtttctagattaggtagtgtcctcattttatattgtgaccacacagctagagcaccagagcccttttgctatactcacagtcttgttttcccagcctcttttactagtctttcaggaggtttgctcttagaactggtgatgtaaagaatggaagtagctgtatgagcagttcaaaggccaagccgtggaatggtagcaatgggatataatacctttctaagggaaacatttgtatcagtatcatttgatctgccatggacatgtgtttaaagtggctttctggcccttctttcaatggcttcttccctaaaacgtggagactctaagttaatgtcgttactatgggccatattactaatgcccactggggtctatgatttctcaaaattttcattcggaatccgaaggatacagtctttaaactttagaattcccaagaaggctttattacacctcagaaattgaaagcaccatgactttgtccattaaaaaattatccatagtttttttagtgcttttaacattccgacatacatcattctgtgattaaatctccagatttctgtaaatgatacctacattctaaagagttaattctaattattccgatatgaccttaaggaaaagtaaaggaataaatttttgtctttgttgaagtatttaatagagtaaggtaaagaagatattaagtccctttcaaaatggaaaattaattctaaactgagaaaaatgttcctactacctattgctgatactgtctttgcataaatgaataaaaataaactttttttcttca

SEQ ID NO: 22115 - DNA, 3195 bp, Artificial Sequence
  derived and/or modified sequence
agtcggcctgcgctcctcagcctggcggttctacctccgagggttcgcccgcccttggttttccttacaccttagcctttggctcctttgaccactcgaagccccacagcgtgttccagcggacttcaccagcagacccagaagtggtgggtgaaacactgcctctgttcctccttgagcctgtcgggagctgctgcctgccaccaccatgtctgctgcaaatcctgagactccaaactcaaccatctccagagaggccagcacccagtcttcatcagctgcagctagccaaggctgggtgttaccagaaggcaaaatcgtgccaaacactgtttttgttggtggaattgatgctaggatggatgaaactgagattggaagctgctttggtagatacggttcagtgaaagaagtgaagataatcacgaatcgaactggtgtgtccaaaggctatggatttgtttcgtttgttaatgacgtggatgtccagaagatagtaggatcacagatacatttccatggtaaaaagctgaagctgggccctgcaatcaggaaacaaaagttatgtgctcgtcatgtgcagccacgtcctttggtagttaatcctcctcctccaccacagtttcagaacgtctggcggaatccaaacactgaaacctacctgcagccccaaatcacgccgaatcctgtaactcagcacgttcaggcttactctgcttatccacattcaccaggtcaggtcatcactggatgtcagttgcttgtatataattatcaggaatatcctacttatcccgattcagcatttcaggtcaccactggatatcagttgcctgtatataattatcagccatttcctgcttatccaagatcaccatttcaggtcactgctggatatcagttgcctgtatataattatcaggcatttcctgcttatccaaattcaccagttcaggtcaccactggatatcagttgcctgtatacaattatcaggcatttcctgcttatccaaattcaccagttcaggtcaccactggatatcagttgcctgtatacaattatcaggcatttcctgcttatccaaattcaccagttcaggtcaccactggatatcagttgcctgtatacaattatcaggcatttcctgcttatccaaattcagcagttcaggtcaccactggatatcagttccatgtatacaattaccagatgccaccgcagtgccctgttggggagcaaaggagaaatctgtggaccgaagcatacaaatggtggtatcttgtctgtttaatccagagaagagactgataaattccgttgttactcaagatgactgcttcaagggtaaaagagtgcatcgctttagaagaagtttggcagtatttaaatctgttggatcctctcagctatctagtttcatgggaagttgctggttttgaatattaagctaaaagttttccactattacagaaattctgaattttggtaaatcacactgaaactttctgtataacttgtattattagactctctagttttatcttaacactgaaactgttcttcattagatgtttatttagaacctggttctgtgtttaatatatagtttaaagtaacaaataatcgagactgaaagaatgttaagatttatctgcaaggatttttaaaaaattgaaacttgcattttaagtgtttaaaagcaaatactgactttcaaaaaagtttttaaaacctgatttgaaagctaacaattttgatagtctgaacacaagcatttcacttctccaagaagtacctgtgaacagtacaatatttcagtattgagctttgcatttatgatttatctagaaatttacctcaaaagcagaatttttaaaactgcatttttaatcagtggaactcaatgtatagttagctttattgaagtcttatccaaacccagtaaaacagattctaagcaaacagtccaatcagtgagtcataatgtttattcaaagtattttatcttttatctagaatccacatatgtatgtccaatttgattgggatagtagttaggataactaaaattctgggcctaattttttaaagaatccaagacaaactaaactttactgggtatataaccttctcaatgagttaccattcttttttataaaaaaaattgttccttgaaatgctaaacttaatggctgtatgtgaaatttgcaaaatactggtattaaagaacgctgcagcttttttatgtcactcaaaggttaatcggagtatctgaaaggaattgtttttataaaaacattgaagtattagttacttgctataaatagatttttatttttgttttttagcctgttatatttccttctgtaaaataaaatatgtccagaagaggcatgttgtttctagattaggtagtgtcctcattttatattgtgaccacacagctagagcaccagagcccttttgctatactcacagtcttgttttcccagcctcttttactagtctttcaggaggtttgctcttagaactggtgatgtaaagaatggaagtagctgtatgagcagttcaaaggccaagccgtggaatggtagcaatgggatataatacctttctaagggaaacatttgtatcagtatcatttgatctgccatggacatgtgtttaaagtggctttctggcccttctttcaatggcttcttccctaaaacgtggagactctaagttaatgtcgttactatgggccatattactaatgcccactggggtctatgatttctcaaaattttcattcggaatccgaaggatacagtctttaaactttagaattcccaagaaggctttattacacctcagaaattgaaagcaccatgactttgtccattaaaaaattatccatagtttttttagtgcttttaacattccgacatacatcattctgtgattaaatctccagatttctgtaaatgatacctacattctaaagagttaattctaattattccgatatgaccttaaggaaaagtaaaggaataaatttttgtctttgttgaagtatttaatagagtaaggtaaagaagatattaagtccctttcaaaatggaaaattaattctaaactgagaaaaatgttcctactacctattgctgatactgtctttgcataaatgaataaaaataaactttttttcttca

SEQ ID NO: 22116 - protein, 71 aa, Artificial Sequence
  derived and/or modified sequence
MADEKPKEGVKTENNDHINLKVAGQDGSVVQFKIKRHTPLSKLMKAYCERQLEMEDEDTIDVFQQQTGGVY

SEQ ID NO: 22117 - DNA, 216 bp, Artificial Sequence
  derived and/or modified sequence
atggccgacgagaagcccaaggagggcgtgaagaccgagaacaacgaccacatcaacctgaaggtggccggccaggacggcagcgtggtgcagttcaagatcaagagacacacccccctgagcaagctgatgaaggcctactgcgagagacagctggagatggaggacgaggacaccatcgacgtgttccagcagcagaccggcggcgtgtactag

SEQ ID NO: 22118 - DNA, 216 bp, Artificial Sequence
  derived and/or modified sequence
atggcagacgaaaagccaaaggaaggtgtcaagacagaaaataatgaccacatcaatctgaaggtggccggtcaagacggctcggtcgtgcagttcaagattaagaggcatacgcccctgagtaagcttatgaaagcatactgcgagagacaactggagatggaagacgaggacaccattgatgttttccagcagcagacaggcggggtttactag

SEQ ID NO: 22119 - DNA, 216 bp, Artificial Sequence
  derived and/or modified sequence
atggctgatgagaagcccaaggagggcgtgaagacagaaaataatgaccacatcaacctgaaggtggccggccaggacggctctgtggtgcagttcaagatcaagaggcacacccccctgagcaagctgatgaaggcctactgtgagcggcagctggagatggaggatgaggacaccattgatgtgttccagcagcagacaggaggagtgtactag

SEQ ID NO: 22120 - DNA, 216 bp, Artificial Sequence
  derived and/or modified sequence
atggccgacgagaagcccaaggagggcgtgaagaccgagaacaacgatcatatcaacctcaaggtcgcaggacaagacgggtctgtggttcaatttaagatcaagagacacactccattatcaaaactgatgaaagcatactgtgaacggcaattggagatggaagacgaggacacaattgacgtgtttcagcagcagacaggaggagtttactag

SEQ ID NO: 22121 - DNA, 216 bp, Artificial Sequence
  derived and/or modified sequence
atggccgatgaaaaaccgaaggaaggtgttaagaccgaaaacaatgatcacataaacctgaaagtggccggacaggacggaagcgtcgtccagtttaagatcaagcggcataccccacttagtaaactgatgaaagcttactgcgaacgacagctggagatggaagacgaggacactatcgacgtgttccagcagcagaccggtggggtgtattag

SEQ ID NO: 22122 - DNA, 994 bp, Artificial Sequence
  derived and/or modified sequence
gcgcacgcagggtggggggagggagcgcacgacgtgcgcgcaccctctcccctcgtccaccgctgccgcctccttcttctgccgctcctggtgctgcttgtgtgctcgtttggtgcggacctggtacctcttttgtgaagcggcagctgaggagactccggcgctcgccatggccgacgaaaagcccaaggaaggagtcaagactgagaacaacgatcatattaatttgaaggtggcggggcaggatggttctgtggtgcagtttaagattaagaggcatacaccacttagtaaactaatgaaagcctattgtgaacgacagttggaaatggaggatgaagatacaattgatgtgttccaacagcagacgggaggtgtctactgaaaagggaacctgcttctttactccagaactctgttctttaaagaccaagattacattctcaattagaaaactgcaatttggttccaccacatcctgactactaccgtatagttttctctattctttcatttcccccttccccattcctttattgtacataaagtaactggtatatgtgcacaagcatattgcattttttttttttttaactaaacagccaatggtatgttttgattgacatcaagtggagacgggatggggaaaaatactgattctgtgaaaataccccctttctccattagtggcatgctcattcagctcttatctttatattccagtaagttattttgctctcactgttttaacaaaaaaaaaaaacaacaacataaaaatccttgcataccttgttcaattggagaattttaatgtttttcatttatcattgtaaaaccaaggacaattttataacttttttgtacgtagctgttacatgtagggcaatctgtctttaagtagggataaattactctaaaacaaaaaagaatcctagatagttttcccttcaagtcaagcgtcttgttgtttaaataaacttcttgtttaaaatga

SEQ ID NO: 22123 - protein, 312 aa, Artificial Sequence
  derived and/or modified sequence
MSGENVTKVSTFILVGLPTAPGLQYLLFLLFLLTYLFVLVENLAIILIVWSSTSLHRPMYYFLSSMSFLEIWYVSDITPKMLEGFLLQQKRISFVGCMTQLYFFSSLVCTECVLLASMAYDRYVAICHPLRYHVLVTPGLCLQLVGFSFVSGFTISMIKVCFISSVTFCGSNVLNHFFCDISPILKLACTDFSTAELVDFILAFIILVFPLLATILSYWHITLAVLRIPSATGCWRAFSTCASHLTVVTVFYTALLFMYVRPQAIDSQSSNKLISAVYTVVTPIINPLIYCLRNKEFKDALKKALGLGQTSH

SEQ ID NO: 22124 - DNA, 939 bp, Artificial Sequence
  derived and/or modified sequence
atgagcggcgagaacgtgaccaaggtgagcaccttcatcctggtgggcctgcccaccgcccccggcctgcagtacctgctgttcctgctgttcctgctgacctacctgttcgtgctggtggagaacctggccatcatcctgatcgtgtggagcagcaccagcctgcacagacccatgtactacttcctgagcagcatgagcttcctggagatctggtacgtgagcgacatcacccccaagatgctggagggcttcctgctgcagcagaagagaatcagcttcgtgggctgcatgacccagctgtacttcttcagcagcctggtgtgcaccgagtgcgtgctgctggccagcatggcctacgacagatacgtggccatctgccaccccctgagataccacgtgctggtgacccccggcctgtgcctgcagctggtgggcttcagcttcgtgagcggcttcaccatcagcatgatcaaggtgtgcttcatcagcagcgtgaccttctgcggcagcaacgtgctgaaccacttcttctgcgacatcagccccatcctgaagctggcctgcaccgacttcagcaccgccgagctggtggacttcatcctggccttcatcatcctggtgttccccctgctggccaccatcctgagctactggcacatcaccctggccgtgctgagaatccccagcgccaccggctgctggagagccttcagcacctgcgccagccacctgaccgtggtgaccgtgttctacaccgccctgctgttcatgtacgtgagaccccaggccatcgacagccagagcagcaacaagctgatcagcgccgtgtacaccgtggtgacccccatcatcaaccccctgatctactgcctgagaaacaaggagttcaaggacgccctgaagaaggccctgggcctgggccagaccagccactag

SEQ ID NO: 22125 - DNA, 939 bp, Artificial Sequence
  derived and/or modified sequence
atgtcaggcgaaaacgttactaaggtgtcaacctttatcctggtgggtctgccaacagcacctggccttcagtatctgcttttccttttatttctcctgacctatctgttcgtcttggtcgaaaatcttgcaataattcttatcgtctggtcatcgacatcactgcacaggcctatgtactattttctgtcatccatgtctttcctggaaatctggtatgtgtctgacatcactcccaagatgcttgagggtttcctgcttcagcagaaaagaatcagttttgttggatgtatgacccagctgtacttcttctcatcgctggtatgtactgaatgcgtcctcctggcatctatggcctatgatcgttatgtggcaatatgtcaccccctgcgatatcatgtcctggtaacccctgggctgtgccttcagctggtgggattctcctttgtttctggcttcaccatctccatgataaaggtctgctttatcagcagcgtcaccttctgcggatctaatgtgcttaaccacttcttctgcgatatctctcccatcctcaaactcgcctgtacagatttctcaaccgccgaactagtggacttcattctggccttcattattctggtgttcccgctgctggccaccattttatcttattggcatattaccctcgcagtactgcgaattccgtctgcaactggctgctggcgcgccttcagcacgtgcgcatcgcatctgacggttgtaaccgttttctacactgccctcctgttcatgtatgtgagacctcaggctatagatagccagtcaagcaacaagctgatcagcgcagtttataccgtcgtaacaccgatcatcaatccgctcatatactgtctgcggaataaggagtttaaagacgcactaaagaaggccctgggactgggccaaacctctcattag

SEQ ID NO: 22126 - DNA, 939 bp, Artificial Sequence
  derived and/or modified sequence
atgtctggagaaaatgtgaccaaggtgtccaccttcatcctggtgggcctgcccacagcccctggcctgcagtacctgctcttcctgctcttcctgctgacctacctgtttgtgctggtggagaacctggccatcatcctgattgtgtggagcagcaccagcctgcaccggcccatgtactacttcctgagctccatgtccttcctggagatctggtacgtgtctgacatcacccccaagatgctggagggcttcctgctgcagcagaagaggatcagctttgtgggctgcatgacccagctgtacttcttcagcagcctggtgtgcacagaatgtgtgctgctggcctccatggcctatgacagatatgtggccatctgccaccccctgcgctaccacgtgctggtgaccccaggcctgtgcctgcagctggtgggcttctcctttgtgtctggcttcaccatctccatgatcaaggtgtgcttcatcagctctgtgaccttctgtggcagcaatgtgctgaaccacttcttctgtgacatcagccccatcctgaagctggcctgcacagacttcagcacagctgagctggtggacttcatcctggccttcatcatcctggtgttccccctgctggccaccatcctgagctactggcacatcaccctggccgtgctgcgcatccccagcgccaccggctgctggagggccttcagcacctgtgccagccacctgactgtggtgacagtgttctacacagccctgctcttcatgtatgtgcggccccaggccatcgacagccagagcagcaacaagctgatctctgctgtgtacacagtggtgacccccatcatcaaccccctcatctactgcctgaggaacaaggagttcaaggatgccctgaagaaggccctgggcctgggccagaccagccactag

SEQ ID NO: 22127 - DNA, 939 bp, Artificial Sequence
  derived and/or modified sequence
atgagcggcgagaacgtgaccaaggtgagcaccttcatcctggtgggtttgccaactgcacccggactgcagtaccttctattccttctgtttctgctgacatacttgttcgtcctcgttgaaaatctggctattatcttgatcgtttggagctcaacatcacttcaccgcccaatgtactactttctttcctctatgtcttttttagagatttggtatgtgagtgatataaccccgaagatgcttgaaggttttctgcttcagcagaagcgtatctccttcgtgggttgcatgacccagctttattttttctccagcctcgtctgtaccgagtgcgtgctcttagcgagcatggcttacgataggtatgtggccatttgccacccattacgatatcacgtgttagttacccccgggctatgcctccagctcgtgggattcagcttcgtctcagggtttactatcagcatgattaaggtctgctttattagctcagtgaccttctgcggcagcaacgtcctgaatcacttcttctgtgacatctcgcccatactaaagctggcatgcacggattttagcaccgccgagctggttgactttattttggcctttataatcctggtctttcccctgctggccaccatcctgtcatactggcatataaccctcgctgtcctgcgcattccgtctgccacaggatgctggcgggctttttcaacctgtgccagccatctcactgtggtgacagtcttctacaccgccctgctattcatgtacgtgcggccgcaggcaattgatagccagtcatctaacaaactcattagcgcagtgtataccgtggtgactcccataatcaacccgctgatctactgcttgcggaataaagagttcaaagacgctctgaagaaagctctcggtttgggccagacgagtcactag

SEQ ID NO: 22128 - DNA, 939 bp, Artificial Sequence
  derived and/or modified sequence
atgtcaggggaaaacgtcaccaaagtctcaactttcatcctggtggggctcccaactgcacctggcctgcagtacctgttattcctcctgtttcttctgacttatcttttcgtgttagtggagaacctggcgatcatactgatcgtgtggtccagtaccagtctgcatcgaccaatgtattacttcctcagctcgatgtctttcctagagatttggtacgtgtccgatattaccccaaagatgctggaaggctttctactgcagcagaagcggattagctttgtcgggtgtatgacacagttgtatttcttcagcagtttggtgtgtacggaatgtgtgcttctcgctagtatggcctatgataggtatgtggctatttgccatcccttgagatatcacgtgttagtgacccctggcctctgtctgcagctggtggggtttagcttcgtgagtggctttactatcagtatgatcaaggtatgctttatttcttccgtgaccttctgtgggtcgaatgtgctaaaccacttcttctgtgatatctctccaatcttaaaactggcctgtaccgacttttctactgcagaactggtagattttattctggcttttattatattggtgtttcctcttctggccaccatcctgtcctactggcacattaccttggccgttctcaggataccttcagcaacaggttgttggagggcattctccacctgtgcgtcccacttgaccgttgtgacagttttttatactgccctgttatttatgtatgtcagacctcaagccattgactcccaatcaagtaataaactaataagcgcggtctatactgttgtcaccccaattataaacccattgatatactgtctgcgcaacaaagagtttaaagacgccctgaaaaaagcattgggattaggtcaaacctctcactag

SEQ ID NO: 22129 - protein, 608 aa, Artificial Sequence
  derived and/or modified sequence
AWAARLGRPGRSCLPGARGRAPPPPPLLLLLALLPLLPAPGAAAAPAPRPPELQSASAGPSVSLYLSEDEVRRLIGLDAELYYVRNDLISHYALSFSLLVPSETNFLHFTWHAKSKVEYKLGFQVDNVLAMDMPQVNISVQGEVPRTLSVFRVELSCTGKVDSEVMILMQLNLTVNSSKNFTVLNFKRRKMCYKKLEEVKTSALDKNTSRTIYDPVHAAPTTSTRVFYISVGVCCAVIFLVAIILAVLHLHSMKRIELDDSISASSSSQGLSQPSTQTTQYLRADTPNNATPITSSLGYPTLRIEKNDLRSVTLLEAKGKVKDIAISRERITLKDVLQEGTFGRIFHGILIDEKDPNKEKQAFVKTVKDQASEIQVTMMLTESCKLRGLHHRNLLPITHVCIEEGEKPMVILPYMNWGNLKLFLRQCKLVEANNPQAISQQDLVHMAIQIACGMSYLARREVIHKDLAARNCVIDDTLQVKITDNALSRDLFPMDYHCLGDNENRPVRWMALESLVNNEFSSASDVWAFGVTLWELMTLGQTPYVDIDPFEMAAYLKDGYRIAQPINCPDELFAVMACCWALDPEERPKFQQLVQCLTEFHAALGAYV

SEQ ID NO: 22130 - protein, 418 aa, Artificial Sequence [sequence omitted]

SEQ ID NO: 22131 - DNA, 1827 bp, Artificial Sequence
  derived and/or modified sequence
gcctgggccgccagactgggcagacccggcagaagctgcctgcccggcgccagaggcagagcccccccccccccccccctgctgctgctgctggccctgctgcccctgctgcccgcccccggcgccgccgccgcccccgcccccagaccccccgagctgcagagcgccagcgccggccccagcgtgagcctgtacctgagcgaggacgaggtgagaagactgatcggcctggacgccgagctgtactacgtgagaaacgacctgatcagccactacgccctgagcttcagcctgctggtgcccagcgagaccaacttcctgcacttcacctggcacgccaagagcaaggtggagtacaagctgggcttccaggtggacaacgtgctggccatggacatgccccaggtgaacatcagcgtgcagggcgaggtgcccagaaccctgagcgtgttcagagtggagctgagctgcaccggcaaggtggacagcgaggtgatgatcctgatgcagctgaacctgaccgtgaacagcagcaagaacttcaccgtgctgaacttcaagagaagaaagatgtgctacaagaagctggaggaggtgaagaccagcgccctggacaagaacaccagcagaaccatctacgaccccgtgcacgccgcccccaccaccagcaccagagtgttctacatcagcgtgggcgtgtgctgcgccgtgatcttcctggtggccatcatcctggccgtgctgcacctgcacagcatgaagagaatcgagctggacgacagcatcagcgccagcagcagcagccagggcctgagccagcccagcacccagaccacccagtacctgagagccgacacccccaacaacgccacccccatcaccagcagcctgggctaccccaccctgagaatcgagaagaacgacctgagaagcgtgaccctgctggaggccaagggcaaggtgaaggacatcgccatcagcagagagagaatcaccctgaaggacgtgctgcaggagggcaccttcggcagaatcttccacggcatcctgatcgacgagaaggaccccaacaaggagaagcaggccttcgtgaagaccgtgaaggaccaggccagcgagatccaggtgaccatgatgctgaccgagagctgcaagctgagaggcctgcaccacagaaacctgctgcccatcacccacgtgtgcatcgaggagggcgagaagcccatggtgatcctgccctacatgaactggggcaacctgaagctgttcctgagacagtgcaagctggtggaggccaacaacccccaggccatcagccagcaggacctggtgcacatggccatccagatcgcctgcggcatgagctacctggccagaagagaggtgatccacaaggacctggccgccagaaactgcgtgatcgacgacaccctgcaggtgaagatcaccgacaacgccctgagcagagacctgttccccatggactaccactgcctgggcgacaacgagaacagacccgtgagatggatggccctggagagcctggtgaacaacgagttcagcagcgccagcgacgtgtgggccttcggcgtgaccctgtgggagctgatgaccctgggccagaccccctacgtggacatcgaccccttcgagatggccgcctacctgaaggacggctacagaatcgcccagcccatcaactgccccgacgagctgttcgccgtgatggcctgctgctgggccctggaccccgaggagagacccaagttccagcagctggtgcagtgcctgaccgagttccacgccgccctgggcgcctacgtgtag

SEQ ID NO: 22132 - DNA, 1257 bp, Artificial Sequence
  derived and/or modified sequence
atgtgctacaagaagctggaggaggtgaagaccagcgccctggacaagaacaccagcagaaccatctacgaccccgtgcacgccgcccccaccaccagcaccagagtgttctacatcagcgtgggcgtgtgctgcgccgtgatcttcctggtggccatcatcctggccgtgctgcacctgcacagcatgaagagaatcgagctggacgacagcatcagcgccagcagcagcagccagggcctgagccagcccagcacccagaccacccagtacctgagagccgacacccccaacaacgccacccccatcaccagcagcctgggctaccccaccctgagaatcgagaagaacgacctgagaagcgtgaccctgctggaggccaagggcaaggtgaaggacatcgccatcagcagagagagaatcaccctgaaggacgtgctgcaggagggcaccttcggcagaatcttccacggcatcctgatcgacgagaaggaccccaacaaggagaagcaggccttcgtgaagaccgtgaaggaccaggccagcgagatccaggtgaccatgatgctgaccgagagctgcaagctgagaggcctgcaccacagaaacctgctgcccatcacccacgtgtgcatcgaggagggcgagaagcccatggtgatcctgccctacatgaactggggcaacctgaagctgttcctgagacagtgcaagctggtggaggccaacaacccccaggccatcagccagcaggacctggtgcacatggccatccagatcgcctgcggcatgagctacctggccagaagagaggtgatccacaaggacctggccgccagaaactgcgtgatcgacgacaccctgcaggtgaagatcaccgacaacgccctgagcagagacctgttccccatggactaccactgcctgggcgacaacgagaacagacccgtgagatggatggccctggagagcctggtgaacaacgagttcagcagcgccagcgacgtgtgggccttcggcgtgaccctgtgggagctgatgaccctgggccagaccccctacgtggacatcgaccccttcgagatggccgcctacctgaaggacggctacagaatcgcccagcccatcaactgccccgacgagctgttcgccgtgatggcctgctgctgggccctggaccccgaggagagacccaagttccagcagctggtgcagtgcctgaccgagttccacgccgccctgggcgcctacgtgtag

SEQ ID NO: 22133 - DNA, 1827 bp, Artificial Sequence
  derived and/or modified sequence
gcttgggccgcgagattagggcggccaggacgtagttgcctgcctggagcccgcgggagagctccaccccctcctcctcttctactcctcctggcattgctgccccttttgcccgcacccggggctgccgccgcccctgctccacggccacctgaactgcaatccgcaagtgccggacctagtgtctccttatacctgagtgaagatgaggtgaggcggttgatcggtctggacgccgagctgtattacgttcgcaacgacctgatttctcattatgctctttcctttagcctccttgtaccatcagaaacaaattttctgcatttcacttggcatgcgaaaagcaaggtggagtacaagctgggatttcaagtggataatgtgctcgcaatggatatgccccaggtgaacatctctgtccagggggaggtaccaagaactttgtcagtgttccgagtggagctgagctgtactgggaaagtggactctgaggtgatgatcctgatgcagctgaatttgacggtcaacagcagcaagaactttacagtgctgaatttcaaacgccggaagatgtgttacaagaagttagaggaggtgaagacatccgccctggacaagaataccagcagaactatttatgacccagtccatgccgcaccaactacatcgacgagagtgttttacatttccgtgggcgtgtgctgtgctgtaatttttctagtcgccataatcctggctgtgttacacctccacagcatgaaacggatcgagctcgatgatagcatctccgcgtccagctccagccaaggcctgagccagccctctacccaaaccactcagtatctgcgggcagatacccccaataatgcgacacccatcacttcttccctgggctaccctacgcttcggatcgagaagaacgaccttcgctcggtcaccttgctcgaggccaagggcaaggtaaaagacatagctatttcgcgggagcgcatcaccctgaaggatgttctgcaggagggaacatttggtcgtatcttccacggcattcttatcgacgagaaggaccctaacaaggaaaagcaggcatttgttaagacagtgaaagatcaggcaagtgagattcaggtgactatgatgctcacagaaagctgtaaactccggggtctgcatcatcgtaatctgctccctattacccacgtttgtatcgaggaaggagaaaagcccatggtgattttgccctacatgaattggggtaatctgaaattgtttctgagacaatgcaagttggttgaagccaacaatccccaagccatctcacagcaggatctggtccatatggccattcagattgcctgtggcatgagttatctggcgagaagagaagtgattcataaggacctggcagctcgcaactgtgtcatcgacgacaccctccaagttaagattaccgacaacgctctgagcagagatctgtttcccatggactatcattgtcttggggataatgagaatcggcccgttagatggatggctctggagtcactagtgaataatgagttttcctcagccagtgatgtgtgggcttttggggttacactctgggagctcatgaccctggggcagaccccttatgtggacatagatccctttgagatggcggcctacttgaaagacggatacaggattgctcagccgattaactgcccggatgagctgtttgccgttatggcttgttgttgggcccttgaccccgaggaaaggcctaagttccagcagctagtgcaatgtttgaccgagttccatgcggctttgggtgcctatgtttag

SEQ ID NO: 22134 - DNA, 1257 bp, Artificial Sequence
  derived and/or modified sequence
atgtgctacaagaagttagaggaggtaaagactagcgccctggacaagaacacttcacgtactatttacgacccagtgcacgctgcgccgactacatctacccgggttttttacatcagcgtgggtgtgtgttgtgccgtgatatttctggttgccattatcctcgcagttctccacctgcactctatgaagcgcattgagctggacgactcgataagcgccagctctagcagccagggactttcccagccatccacccagaccacccagtacctgcgggcagacacacctaataacgccacacccatcactagcagcctcggttatccgaccctccgaatagaaaaaaacgacttaaggagcgtcactcttctggaagccaaagggaaggtgaaagacatagcaatcagccgggaacggattacccttaaagacgtcttgcaggaagggacctttggcaggatcttccacgggattctgattgatgagaaggatcctaacaaagaaaaacaggctttcgtgaagactgtaaaggaccaggcctcagagatccaggtgacaatgatgctgaccgagtcttgtaagcttaggggactgcatcaccggaacttgcttcctatcacccacgtctgtatcgaggaaggcgaaaagcctatggttatcctaccttatatgaactggggcaacctgaagctattcctgaggcagtgtaaattagtggaagccaataacccccaggcaatatcacagcaagacttagtacatatggcaatccagattgcgtgcggcatgagttatctcgcccgccgcgaggtgatccacaaggatctggccgcaaggaattgcgtcattgacgatacactgcaggtgaagatcaccgacaatgcactctccagggacctattccccatggattatcattgcctgggggataatgagaatcggcccgtcagatggatggcacttgagagtctggttaacaatgagttcagttccgccagcgatgtgtgggctttcggcgtgactttgtgggagctcatgacgctcggacagactccgtatgtggatattgacccgttcgagatggctgcctacttaaaggacggatacaggattgcacagccaatcaactgccctgatgaactgttcgcagtgatggcctgttgttgggcacttgacccagaggagcggccaaagtttcagcaactagtccaatgcctgaccgagtttcacgccgcgttaggcgcttacgtatag

SEQ ID NO: 22135 - DNA, 1827 bp, Artificial Sequence
  derived and/or modified sequence
gcctgggccgcccggctgggccggcccggccgcagctgcctgcccggggcccggggccgggcccctcctcctccacccctgctgctgctgctggccctgctgcccctgctgcctgcccctggagctgctgctgccccagccccccggcccccagagctgcagagcgccagcgctggccccagcgtgtccctgtacctgtctgaagatgaggtgcggcggctgattggcctggatgctgagctgtactacgtgagaaatgacctgatcagccactacgccctgtccttcagcctgctggtgcccagcgagaccaacttcctgcacttcacctggcacgccaagagcaaggtggagtacaagctgggcttccaggtggacaacgtgctggccatggacatgccccaggtgaacatctctgtgcagggcgaggtgcccaggaccctgtctgtgttccgggtggagctgagctgcaccgggaaggtggacagcgaggtgatgatcctgatgcagctgaacctgactgtgaacagcagcaagaacttcaccgtgctgaacttcaagaggaggaagatgtgctacaagaagctggaggaggtgaagaccagcgccctggacaagaacaccagcaggaccatctatgaccctgtgcacgccgcccccaccaccagcaccagggtcttctacatctctgtgggcgtgtgctgtgccgtcatcttcctggtggccatcatcctggccgtgctgcacctgcacagcatgaagagaattgagctggatgacagcatcagcgccagcagcagcagccagggcctgagccagcccagcacccagaccacccagtacctgcgggctgacacccccaacaatgccacccccatcaccagcagcctgggctaccccaccctgcgcatcgagaagaatgacctgcggtctgtgaccctgctggaggccaagggcaaggtgaaggacatcgccatcagccgggagcgcatcaccctgaaggatgtgctgcaggagggcaccttcggccgcatcttccacggcatcctgattgatgagaaggaccccaacaaggagaagcaggcctttgtgaagacagtgaaggaccaggccagcgagatccaggtgaccatgatgctgacagagagctgcaagctgcggggcctgcaccacaggaacctgctgcccatcacccacgtgtgcatcgaggagggggagaagcccatggtgatcctgccctacatgaactggggcaacctgaagctgttcctgcggcagtgcaagctggtggaggccaacaacccccaggccatcagccagcaggacctggtgcacatggccatccagatcgcctgtggcatgagctacctggcccggcgggaggtgatccacaaggacctggccgccaggaactgtgtgattgatgacaccctgcaggtgaagatcacagacaatgccctgagccgggacctcttccccatggactaccactgcctgggggacaatgaaaatagacctgtgcgctggatggccctggagagcctggtgaacaatgagttcagcagcgccagtgatgtgtgggcctttggagtgaccctgtgggagctgatgaccctgggccagaccccctacgtggacatcgacccctttgagatggccgcctacctgaaggatggctaccgcatcgcccagcccatcaactgcccagatgagctgtttgctgtgatggcctgctgctgggccctggaccctgaggagcggcccaagttccagcagctggtgcagtgcctgacagagttccacgccgccctgggcgcctacgtgtag

SEQ ID NO: 22136 - DNA, 1257 bp, Artificial Sequence
  derived and/or modified sequence
atgtgctacaagaagctggaggaggtgaagaccagcgccctggacaagaacaccagcaggaccatctatgaccctgtgcacgccgcccccaccaccagcaccagggtcttctacatctctgtgggcgtgtgctgtgccgtcatcttcctggtggccatcatcctggccgtgctgcacctgcacagcatgaagagaattgagctggatgacagcatcagcgccagcagcagcagccagggcctgagccagcccagcacccagaccacccagtacctgcgggctgacacccccaacaatgccacccccatcaccagcagcctgggctaccccaccctgcgcatcgagaagaatgacctgcggtctgtgaccctgctggaggccaagggcaaggtgaaggacatcgccatcagccgggagcgcatcaccctgaaggatgtgctgcaggagggcaccttcggccgcatcttccacggcatcctgattgatgagaaggaccccaacaaggagaagcaggcctttgtgaagacagtgaaggaccaggccagcgagatccaggtgaccatgatgctgacagagagctgcaagctgcggggcctgcaccacaggaacctgctgcccatcacccacgtgtgcatcgaggagggggagaagcccatggtgatcctgccctacatgaactggggcaacctgaagctgttcctgcggcagtgcaagctggtggaggccaacaacccccaggccatcagccagcaggacctggtgcacatggccatccagatcgcctgtggcatgagctacctggcccggcgggaggtgatccacaaggacctggccgccaggaactgtgtgattgatgacaccctgcaggtgaagatcacagacaatgccctgagccgggacctcttccccatggactaccactgcctgggggacaatgaaaatagacctgtgcgctggatggccctggagagcctggtgaacaatgagttcagcagcgccagtgatgtgtgggcctttggagtgaccctgtgggagctgatgaccctgggccagaccccctacgtggacatcgacccctttgagatggccgcctacctgaaggatggctaccgcatcgcccagcccatcaactgcccagatgagctgtttgctgtgatggcctgctgctgggccctggaccctgaggagcggcccaagttccagcagctggtgcagtgcctgacagagttccacgccgccctgggcgcctacgtgtag

SEQ ID NO: 22137 - DNA, 1827 bp, Artificial Sequence
  derived and/or modified sequence
gcctgggccgcccggctgggccggcccggccggagctgcctgcccggcgctagagggcgggctcctccaccaccacctctgttgctactcctggctcttctcccactcctgcccgctccgggggccgcagcagcccccgctcctcgtccccccgaactgcagtcagccagcgctggccccagcgtgtcactataccttagcgaggatgaggttcggcgtctgatcgggctcgatgcagagctttattacgtaagaaacgatctaatttctcactatgccttatctttttccctgttggttccctctgagaccaactttctacattttacatggcatgcgaaatcgaaggtggagtataagctgggcttccaggtggataatgtgttagcgatggacatgccacaggttaatatttccgtgcaaggggaagtgccccgcacactgagcgttttccgcgtagagctatcatgcacggggaaggtcgactcagaggttatgattctgatgcagttgaatctgactgtcaatagttctaaaaatttcacggtgctgaattttaagcgcaggaagatgtgttacaaaaaacttgaagaagtgaaaacatctgcccttgacaaaaacacttccagaacaatatatgatcccgttcacgctgctcccacgaccagtactcgcgttttctacattagcgttggcgtatgctgcgccgttatctttctggtagcgatcatccttgccgttctgcacctgcacagcatgaaaaggattgaactggatgacagtatatctgcgagttcatcttctcagggactgtcacagccttcaacacagaccacacagtacttgcgagccgatacccctaataatgcgactcccatcacatcaagccttggctaccctaccctccgcattgagaaaaacgacctccggagcgtgacgctgcttgaagcgaaggggaaggtcaaggacatcgccatttcccgtgagagaattacacttaaggacgtgctgcaggagggaaccttcggaagaatttttcatgggattttgatcgatgaaaaggaccctaacaaagagaagcaggccttcgttaagactgtgaaggatcaggcatccgaaattcaggtgaccatgatgctgaccgagtcgtgtaagctgcgagggctgcaccatagaaacctcctgccaatcacacatgtctgcatcgaagagggcgagaaacctatggtcatcttgccctatatgaattggggtaacctgaagttattccttagacaatgcaagcttgttgaagctaataacccgcaggcaattagccagcaggatctggtgcatatggccatccaaattgcgtgtggaatgagctacctagcccggagagaggtgattcataaagatctcgccgcgcgaaactgtgtaatagatgacacgctacaggtcaagattaccgataacgcgctgtcacgggacctctttcctatggactaccattgcttgggtgacaacgaaaatagaccagttcggtggatggctttggaaagtctggtgaataacgagttcagctctgcgagcgatgtctgggcattcggcgtgactctatgggaactgatgacactggggcaaaccccatacgtcgatattgacccattcgaaatggccgcctaccttaaagatggctaccgtattgcacaacctattaactgtccagacgaactttttgccgttatggcctgttgttgggcgctcgatcctgaagaaagacccaaatttcagcagctggttcagtgcctcactgaattccatgccgcactgggagcttacgtgtag

SEQ ID NO: 22138 - DNA, 1257 bp, Artificial Sequence
  derived and/or modified sequence
atgtgctacaagaagctggaggaggtgaagaccagcgccctggacaagaacacgtcccgaactatctacgaccctgtgcatgcagcacctactacttccacgagagtgttttacatatccgtaggcgtctgttgcgccgttatcttcttagtggccataatacttgcagtccttcacctgcactccatgaaacgaatcgaacttgacgattctatctctgcctccagctcctcgcaaggactatcccagccctcaactcaaaccacccaatacttgcgtgctgatactcctaataacgccactcctatcacaagcagcttaggctatccaacactgcgaatcgagaagaacgaccttcgtagcgtcacgctgctcgaagccaaagggaaagtgaaggacatcgctatttcccgtgagaggatcactctgaaagacgtcctccaggaaggaacatttggtaggatctttcacggtattctcatcgatgagaaagaccctaacaaggagaagcaggcattcgtgaaaacagtgaaggaccaggcctctgagatccaggtgaccatgatgctcactgagtcatgcaagctgaggggcttgcaccataggaatcttctcccgatcacacatgtgtgtatcgaggagggcgaaaaaccgatggtcatcttgccttacatgaattggggaaacctcaaattgttcctaagacagtgcaagcttgtcgaggccaataacccccaggctatcagccaacaggacctcgtgcatatggccatccaaattgcttgtggcatgtcctacctagcccgacgggaagtgatacacaaggatctggcagccagaaattgcgtgatagacgatactcttcaggtaaagatcacggataatgccctaagtcgggacctattccccatggattatcactgcctgggcgacaatgagaatcggcccgtccggtggatggctctcgagagcttggtgaataacgaattctcctctgcatcagatgtctgggctttcggtgtcactctgtgggagctgatgacattagggcagactccttatgtggacatcgacccatttgaaatggctgcctacctgaaagacggatatcgaattgcacagccaattaactgcccagatgaactgttcgcggtgatggcatgttgttgggcgctcgaccccgaggaaaggcccaagtttcagcagctggttcagtgtcttaccgaattccacgcagccctcggtgcctatgtatag

SEQ ID NO: 22139 - DNA, 1827 bp, Artificial Sequence
  derived and/or modified sequence
gcatgggcagctagactgggcagaccagggcgtagctgcctgccaggggcaagaggtagagctccaccccctccgcctttactgttgctcttagcccttctgccactgcttcccgcaccgggagccgcagccgcacctgctcccaggcctccagagctgcagagcgcgagtgctggaccctccgtcagtctgtatctttctgaggacgaggtccggaggcttatcgggttagacgctgagctttactacgtgcgcaacgatctcatctcacactacgccctgtcatttagtctcttagtgccaagtgaaaccaattttctacatttcacatggcacgccaaaagcaaagtcgaatataaactcggtttccaagtagataatgtgctggctatggatatgccccaggtgaacatctccgttcaaggagaagtccccaggacgctctcagtcttcagagttgaactgtcttgtacaggcaaggtggactccgaggtgatgatacttatgcaacttaacctgactgtgaattcctctaagaactttacagtcctaaattttaagagacgtaagatgtgttacaaaaagctggaggaggtgaaaacaagcgccctggataagaatacctctagaaccatatatgatcctgtccatgccgcacctaccaccagcaccagagttttctacatttccgtgggtgtttgttgtgcagtgatttttttggtagcaataatcctggctgtactgcatcttcacagtatgaagcgcatcgaactggatgattcaatcagcgcttcttcaagtagccagggactgagtcaaccatcaacccagaccacacagtacttgcgagccgacacacctaacaatgctacccctatcacgagttcactagggtacccaacactgcgcatcgagaagaatgacttgcgctcagtgacgttactagaggccaagggcaaagtgaaagacattgccatctccagggagagaataaccttgaaagatgtgcttcaggagggaacttttgggaggatatttcacggaatcttgatcgacgaaaaagatccaaacaaagaaaaacaggcttttgtaaagacagtcaaggaccaggcatctgaaattcaggtgaccatgatgcttaccgaatcttgcaaactgcgcggtctgcatcaccgcaatcttttgccgattactcatgtatgcatagaagaaggggaaaaacccatggtcatattaccttatatgaattggggcaacctaaagctgttccttcgccaatgtaaattggtagaagcaaataacccgcaggcgataagccagcaggaccttgtgcatatggccattcagatcgcttgcggaatgtcttatctggcccgtagggaagttattcacaaggatctggcggcacgtaactgtgtaatcgatgataccctacaagtaaagattaccgataacgccctcagcagggacctctttccaatggactatcactgcttgggggacaacgagaatcgaccagtcaggtggatggcacttgaaagcctcgttaacaatgagttcagttctgcatcagatgtgtgggcttttggggtgacgctgtgggagttgatgacactcggccagaccccatatgttgacatcgacccatttgaaatggccgcttatctgaaagatggatataggatagcccaacccatcaattgtcccgacgaactcttcgcagtaatggcttgttgctgggcattggacccagaggagcggcctaagttccagcagttggtgcaatgtttgacagaatttcatgccgcactgggagcctacgtctag

SEQ ID NO: 22140 - DNA, 1257 bp, Artificial Sequence
  derived and/or modified sequence
atgtgctacaaaaaattggaggaggtgaagacctcagccctggataagaatactagccggactatttacgatcctgttcatgccgcacccacaactagcacccgcgtcttctacatcagtgtcggcgtgtgttgcgccgtgatcttcctggtggcaatcatactggccgttctacacttgcattcaatgaagcgcatagagctggatgactctatctctgcatctagcagctcacagggcctcagccaaccaagtacccagaccactcagtaccttagagcggacactcctaacaatgccacacccataacgagctctctgggatatcctaccctaaggatagagaagaacgatctgaggtccgttacactcctggaggctaaggggaaagtaaaagatatagccatctcacgggagcggatcaccttaaaggacgttcttcaggagggcacatttggtcgtatttttcatggcattcttatcgacgagaaggacccaaacaaagaaaagcaggcattcgtaaagactgtgaaggatcaggcaagcgaaatacaggtcacaatgatgctgactgaatcttgcaaattgagaggacttcaccaccggaatttgctgcctatcacccatgtgtgcattgaagagggagaaaagccaatggtcatcctcccgtatatgaattggggcaacctgaagctgtttcttcggcagtgtaagctggtggaggcaaacaacccacaggcaatcagccaacaggatctcgttcacatggccatccaaatcgcctgtggtatgtcctacctggctcgccgagaagttatccataaggacttagctgctaggaattgcgtcattgatgacacccttcaggtcaagattactgataatgcgctgtctcgtgacctttttcctatggattatcactgcttgggggacaacgagaaccgccctgtaaggtggatggcgttggaaagccttgtcaacaacgagttttcctcagccagtgatgtgtgggcctttggggtgacactctgggagctcatgacgctcggacagacaccatatgtagacattgacccatttgaaatggccgcttacctaaaggacgggtatcgcatcgcccagcctattaattgtccagatgaactattcgctgtcatggcctgttgctgggccctggatcctgaagaaaggccaaagttccagcaactcgtccaatgcctcactgaatttcacgccgctctgggggcttacgtttag

SEQ ID NO: 22141 - DNA, 2846 bp, Artificial Sequence
  derived and/or modified sequence
gcgtgggcggcgcggctggggcggccgggccggagttgcctcccgggggcccgcggcagggccccgccgccgccgccgctgctgcttctgcttgcgctgttgccgctgctgcccgcgcctggcgctgccgccgcccccgccccgcggcccccggagctgcagtcggcttccgcggggcccagcgtgagtctctacctgagcgaggacgaggtgcgccggctgatcggtcttgatgcagaactttattatgtgagaaatgaccttattagtcactacgctctatcctttagtctgttagtacccagtgagacaaatttcctgcacttcacctggcatgcgaagtccaaggttgaatataagctgggattccaagtggacaatgttttggcaatggatatgccccaggtcaacatttctgttcagggggaagttccacgcactttatcagtgtttcgggtagagctttcctgtactggcaaagtagattctgaagttatgatactaatgcagctcaacttgacagtaaattcttcaaaaaattttaccgtcttaaattttaaacgaaggaaaatgtgctacaaaaaacttgaagaagtaaaaacttcagccttggacaaaaacactagcagaactatttatgatcctgtacatgcagctccaaccacttctacgcgtgtgttttatattagtgtaggggtttgttgtgcagtaatatttctcgtagcaataatattagctgttttgcaccttcatagtatgaaaaggattgaactggatgacagcattagtgccagcagtagttcccaagggctgtctcagccatccacccagacgactcagtatctgagagcagacacgcccaacaatgcaactcctatcaccagctccttaggttatcctaccttgcggatagagaagaacgacttgagaagtgtcactcttttggaggccaaaggcaaggtgaaggatatagcaatatccagagagaggataactctaaaagatgtactccaagaaggtacttttgggcgtattttccatgggattttaatagatgaaaaagatccaaataaagaaaaacaagcatttgtcaaaacagttaaagatcaagcttctgaaattcaggtgacaatgatgctcactgaaagttgtaagctgcgaggtcttcatcacagaaatcttcttcctattactcatgtgtgtatagaagaaggagaaaagcccatggtgatattgccttacatgaattgggggaatcttaaattgtttttacgacagtgcaagttagtagaggccaataatccacaggcaatttctcagcaagacctggtacacatggctattcagattgcctgtggaatgagctacctggccagaagggaagtcatccacaaagacctggctgccaggaactgtgtcattgatgacacacttcaagttaagatcacagacaatgccctctccagagacttgttccccatggactatcactgtctgggggacaatgaaaacaggccagttcgttggatggctcttgaaagtctggttaataacgagttctctagcgctagtgatgtgtgggcctttggagtgacgctgtgggaactcatgactctgggccagactccctacgtggacattgaccccttcgagatggccgcatacctgaaagatggttaccgaatagcccagccaatcaactgtcctgatgaattatttgctgtgatggcctgttgctgggccttagatccagaggagaggcccaagtttcagcagctggtacagtgcctaacagagtttcatgcagccctgggggcctacgtctgactcctctccaatcccacaccatcaggaagaaggtgcctgtcggggctcacttgaagcctgtcagggatgctttgtatctaacacaacgccaacagaagcacatttgtcttccagaacaccgtgccttagaaatgctttagaatctgaactttttaagacagacttaataatgtggcatattttctagatatcacttttattaggttgaactgaaagggtttttgtaaattttttggccaaaattttttaaaacatacttactttggactaggggtacattcttacaaaataaataaacagtttttaaaattgtttagacacagatatttggaattagctatcttagtgccaactgctttttatttttttacttcatcaaggtgatgtaagtgactcacctttaaagtttttttagtgttattttttatcactactctgggaaatggtttgtcttcaagatgcaatacttttcttagtaaaggaaaaacagcataaaaagatacctggtctgccttgtacaagaaaaggcaatattagaggaagaaaatttaaagaaaagctagaggaaaaaaaaatttttttaaaaatacttattagaagcaaactgcccttgcatggaaaactgtttatttttttcagtgaaaaggaattctgctttcgtgtttttgggaaagcaggaactgagttcattacatctttaatttggcagaaattagcctttctgtgaaccagatgtggtttggggcagatctgtagtaaacaatggtgattttatttatttttactctctggaaaaggagataatacaattccagaaagtgaactcatatttctaaggttaagattcccttttattgcacctagaatagtgctatgcacagagcgggtgcttgagttgttgtcgttttttgtttgttttttaaatgtaaactggtaaattttgtgcttatcttcaaggctggcttaagtataaaattgttttttaaacacttgaaaaattaaaggatttgttttatatt

SEQ ID NO: 22142 - DNA, 2887 bp, Artificial Sequence
  derived and/or modified sequence
cggacgatgcagcgaggaggcggcggcggcggcggccatgcgtgggcggcgcggctggggcggccgggccggagttgcctcccgggggcccgcggctgagggccccgccgccgccgccgctgctgcttctgcttgcgctgttgccgctgctgcccgcgcctggcgctgccgccgcccccgccccgcggcccccggagctgcagtcggcttccgcggggcccagcgtgagtctctacctgagcgaggacgaggtgcgccggctgatcggtcttgatgcagaactttattatgtgagaaatgaccttattagtcactacgctctatcctttagtctgttagtacccagtgagacaaatttcctgcacttcacctggcatgcgaagtccaaggttgaatataagctgggattccaagtggacaatgttttggcaatggatatgccccaggtcaacatttctgttcagggggaagttccacgcactttatcagtgtttcgggtagagctttcctgtactggcaaagtagattctgaagttatgatactaatgcagctcaacttgacagtaaattcttcaaaaaattttaccgtcttaaattttaaacgaaggaaaatgtgctacaaaaaacttgaagaagtaaaaacttcagccttggacaaaaacactagcagaactatttatgatcctgtacatgcagctccaaccacttctacgcgtgtgttttatattagtgtaggggtttgttgtgcagtaatatttctcgtagcaataatattagctgttttgcaccttcatagtatgaaaaggattgaactggatgacagcattagtgccagcagtagttcccaagggctgtctcagccatccacccagacgactcagtatctgagagcagacacgcccaacaatgcaactcctatcaccagctccttaggttatcctaccttgcggatagagaagaacgacttgagaagtgtcactcttttggaggccaaaggcaaggtgaaggatatagcaatatccagagagaggataactctaaaagatgtactccaagaaggtacttttgggcgtattttccatgggattttaatagatgaaaaagatccaaataaagaaaaacaagcatttgtcaaaacagttaaagatcaagcttctgaaattcaggtgacaatgatgctcactgaaagttgtaagctgcgaggtcttcatcacagaaatcttcttcctattactcatgtgtgtatagaagaaggagaaaagcccatggtgatattgccttacatgaattgggggaatcttaaattgtttttacgacagtgcaagttagtagaggccaataatccacaggcaatttctcagcaagacctggtacacatggctattcagattgcctgtggaatgagctacctggccagaagggaagtcatccacaaagacctggctgccaggaactgtgtcattgatgacacacttcaagttaagatcacagacaatgccctctccagagacttgttccccatggactatcactgtctgggggacaatgaaaacaggccagttcgttggatggctcttgaaagtctggttaataacgagttctctagcgctagtgatgtgtgggcctttggagtgacgctgtgggaactcatgactctgggccagactccctacgtggacattgaccccttcgagatggccgcatacctgaaagatggttaccgaatagcccagccaatcaactgtcctgatgaattatttgctgtgatggcctgttgctgggccttagatccagaggagaggcccaagtttcagcagctggtacagtgcctaacagagtttcatgcagccctgggggcctacgtctgactcctctccaatcccacaccatcaggaagaaggtgcctgtcggggctcacttgaagcctgtcagggatgctttgtatctaacacaacgccaacagaagcacatttgtcttccagaacaccgtgccttagaaatgctttagaatctgaactttttaagacagacttaataatgtggcatattttctagatatcacttttattaggttgaactgaaagggtttttgtaaattttttggccaaaattttttaaaacatacttactttggactaggggtacattcttacaaaataaataaacagtttttaaaattgtttagacacagatatttggaattagctatcttagtgccaactgctttttatttttttacttcatcaaggtgatgtaagtgactcacctttaaagtttttttagtgttattttttatcactactctgggaaatggtttgtcttcaagatgcaatacttttcttagtaaaggaaaaacagcataaaaagatacctggtctgccttgtacaagaaaaggcaatattagaggaagaaaatttaaagaaaagctagaggaaaaaaaaatttttttaaaaatacttattagaagcaaactgcccttgcatggaaaactgtttatttttttcagtgaaaaggaattctgctttcgtgtttttgggaaagcaggaactgagttcattacatctttaatttggcagaaattagcctttctgtgaaccagatgtggtttggggcagatctgtagtaaacaatggtgattttatttatttttactctctggaaaaggagataatacaattccagaaagtgaactcatatttctaaggttaagattcccttttattgcacctagaatagtgctatgcacagagcgggtgcttgagttgttgtcgttttttgtttgttttttaaatgtaaactggtaaattttgtgcttatcttcaaggctggcttaagtataaaattgttttttaaacacttgaaaaattaaaggatttgttttatatt

SEQ ID NO: 22143 - protein, 1225 aa, Artificial Sequence
  derived and/or modified sequence
MKLRLPASPETHLDMLRHLYQGCQVVQGNLELTYLPTNASLSFLQDIQEVQGYVLIAHNQVRQVPLQRLRIVRGTQLFEDNYALAVLDNGDPLNNTTPVTGASPGGLRELQLRSLTEILKGGVLIQRNPQLCYQDTILWKDIFHKNNQLALTLIDTNRSRACHPCSPMCKGSRCWGESSEDCQSLTRTVCAGGCARCKGPLPTDCCHEQCAAGCTGPKHSDCLACLHFNHSGICELHCPALVTYNTDTFESMPNPEGRYTFGASCVTACPYNYLSTDVGSCTLVCPLHNQEVTAEDGTQRCEKCSKPCARVCYGLGMEHLREVRAVTSANIQEFAGCKKIFGSLAFLPESFDGDPASNTAPLQPEQLQVFETLEEITGYLYISAWPDSLPDLSVFQNLQVIRGRILHNGAYSLTLQGLGISWLGLRSLRELGSGLALIHHNTHLCFVHTVPWDQLFRNPHQALLHTANRPEDECVGEGLACHQLCARGHCWGPGPTQCVNCSQFLRGQECVEECRVLQGLPREYVNARHCLPCHPECQPQNGSVTCFGPEADQCVACAHYKDPPFCVARCPSGVKPDLSYMPIWKFPDEEGACQPCPINCTHSCVDLDDKGCPAEQRASPLTSIISAVVGILLVVVLGVVFGILIKRRQQKIRKYTMRRLLQETELVEPLTPSGAMPNQAQMRILKETELRKVKVLGSGAFGTVYKGIWIPDGENVKIPVAIKVLRENTSPKANKEILDEAYVMAGVGSPYVSRLLGICLTSTVQLVTQLMPYGCLLDHVRENRGRLGSQDLLNWCMQIAKGMSYLEDVRLVHRDLAARNVLVKSPNHVKITDFGLARLLDIDETEYHADGGKVPIKWMALESILRRRFTHQSDVWSYGVTVWELMTFGAKPYDGIPAREIPDLLEKGERLPQPPICTIDVYMIMVKCWMIDSECRPRFRELVSEFSRMARDPQRFVVIQNEDLGPASPLDSTFYRSLLEDDDMGDLVDAEEYLVPQQGFFCPDPAPGAGGMVHHRHRSSSTRSGGGDLTLGLEPSEEEAPRSPLAPSEGAGSDVFDGDLGMGAAKGLQSLPTHDPSPLQRYSEDPTVPLPSETDGYVAPLTCSPQPEYVNQPDVRPQPPSPREGPLPAARPAGATLERPKTLSPGKNGVVKDVFAFGGAVENPEYLTPQGGAAPQPHPPPAFSPAFDNLYYWDQDPPERGAPPSTFKGTPTAENPEYLGLDVPV

SEQ ID NO: 22144 - protein, 979 aa, Artificial Sequence
  derived and/or modified sequence
MELAALCRWGLLLALLPPGAASTQDNYLSTDVGSCTLVCPLHNQEVTAEDGTQRCEKCSKPCARVCYGLGMEHLREVRAVTSANIQEFAGCKKIFGSLAFLPESFDGDPASNTAPLQPEQLQVFETLEEITGYLYISAWPDSLPDLSVFQNLQVIRGRILHNGAYSLTLQGLGISWLGLRSLRELGSGLALIHHNTHLCFVHTVPWDQLFRNPHQALLHTANRPEDECVGEGLACHQLCARGHCWGPGPTQCVNCSQFLRGQECVEECRVLQGLPREYVNARHCLPCHPECQPQNGSVTCFGPEADQCVACAHYKDPPFCVARCPSGVKPDLSYMPIWKFPDEEGACQPCPINCTHSCVDLDDKGCPAEQRASPLTSIISAVVGILLVVVLGVVFGILIKRRQQKIRKYTMRRLLQETELVEPLTPSGAMPNQAQMRILKETELRKVKVLGSGAFGTVYKGIWIPDGENVKIPVAIKVLRENTSPKANKEILDEAYVMAGVGSPYVSRLLGICLTSTVQLVTQLMPYGCLLDHVRENRGRLGSQDLLNWCMQIAKGMSYLEDVRLVHRDLAARNVLVKSPNHVKITDFGLARLLDIDETEYHADGGKVPIKWMALESILRRRFTHQSDVWSYGVTVWELMTFGAKPYDGIPAREIPDLLEKGERLPQPPICTIDVYMIMVKCWMIDSECRPRFRELVSEFSRMARDPQRFVVIQNEDLGPASPLDSTFYRSLLEDDDMGDLVDAEEYLVPQQGFFCPDPAPGAGGMVHHRHRSSSTRSGGGDLTLGLEPSEEEAPRSPLAPSEGAGSDVFDGDLGMGAAKGLQSLPTHDPSPLQRYSEDPTVPLPSETDGYVAPLTCSPQPEYVNQPDVRPQPPSPREGPLPAARPAGATLERPKTLSPGKNGVVKDVFAFGGAVENPEYLTPQGGAAPQPHPPPAFSPAFDNLYYWDQDPPERGAPPSTFKGTPTAENPEYLGLDVPV

SEQ ID NO: 22145 - protein, 97 aa, Artificial Sequence
  derived and/or modified sequence
MSPAFRAMDVEPRAKGVLLEPFVHQVGGHSCVLRFNETTLCKPLVPREHQFYETLPAEMRKFTPQYKGQSQRPLVSWPSLPHFFPWSFPLWPQGSVA

SEQ ID NO: 22146 - DNA, 294 bp, Artificial Sequence
  derived and/or modified sequence
atgtcgcccgcatttcgggccatggatgttgagccccgggcgaagggggtccttctggagccattcgtgcaccaggttggggggcattcatgtgtgcttagatttaacgagacaaccctctgcaagccattagttccaagagagcatcaattctacgagacattaccagcagagatgagaaaattcacacctcagtataaggggcagtcgcaaaggccgttggtctcatggccttcactgccgcactttttcccctggtccttccctctgtggcctcaaggatctgtagcgtag

SEQ ID NO: 22147 - DNA, 294 bp, Artificial Sequence
  derived and/or modified sequence
atgagtccagcctttcgggctatggatgtcgagccacgggccaagggggttttgctcgaaccattcgtccaccaggtgggtgggcattcttgcgtgctgcgttttaacgagacgaccctttgcaagccattggtccctagagagcaccagttttatgaaaccttacctgccgagatgcgcaagtttactcctcaatataagggtcaatcccagcggccgctcgtctcttggccttccctccctcactttttcccctggagtttccctctgtggcctcagggttcagtggcttag

SEQ ID NO: 22148 - DNA, 294 bp, Artificial Sequence
  derived and/or modified sequence
atgagccctgccttccgggccatggatgtggagccccgggccaagggcgtgctgctggagccctttgtgcaccaggtgggcggccacagctgtgtgctgcgcttcaatgagaccaccctgtgcaagcccctggtgccccgggagcaccagttctatgagaccctgcctgctgagatgaggaagttcaccccccagtacaagggccagagccagaggcccctggtgtcctggcccagcctgccccacttcttcccctggagcttccccctgtggccccagggctctgtggcctag

SEQ ID NO: 22149 - DNA, 294 bp, Artificial Sequence
  derived and/or modified sequence
atgagccccgccttccgggccatggacgtggagccccgggccaagggggtgcttctcgaaccctttgtgcatcaggtcggcggacattcttgcgtgctaaggtttaacgagacaaccctgtgtaaacctctggtgccgcgggaacaccagttctacgagacgctgcctgctgaaatgaggaagttcacccctcagtataaaggccagtctcaacgacccctcgtcagctggccgtccctaccacactttttcccctggtctttcccgctctggccacagggctccgtagcctag

SEQ ID NO: 22150 - DNA, 294 bp, Artificial Sequence
  derived and/or modified sequence
atgagccccgccttccgggccatggacgtggagccccgggccaagggggtgctgctcgagcctttcgtgcatcaagttggcggccacagctgcgtgttgagatttaatgaaaccacactgtgcaagccactggtgcccagggagcatcagttttatgagaccctccctgctgagatgcggaagtttacgccccagtacaagggccaatcccagcggcccttagtgtcatggcccagcctgccccatttcttcccatggagcttcccactgtggccccaggggtctgttgcttag

SEQ ID NO: 22151 - DNA, 294 bp, Artificial Sequence
  derived and/or modified sequence
atgtctccagctttcagggctatggacgttgagcccagggcaaagggggtcctgctcgagcccttcgtgcatcaggtgggaggtcacagctgcgtcctgaggtttaatgaaaccaccctgtgtaaacctctggtgccccgtgaacaccagttctacgagaccctgcccgctgagatgcgcaagtttaccccacagtataaggggcagagccagcggccactggtgtcctggccttccttgccccacttttttccctggtcctttccactgtggcctcagggttctgtagcatag

SEQ ID NO: 22152 - DNA, 294 bp, Artificial Sequence
  derived and/or modified sequence
atgtcaccagcgttccgtgctatggacgtggaacctcgggctaagggtgtactattagagcctttcgtccaccaagtggggggacacagttgtgtgctaaggttcaacgaaacaacattgtgcaagcctttggtccctagagaacatcagttctacgaaactttacctgccgaaatgaggaagttcacaccacagtataaggggcagagccaaagacccctggtgtcatggcccagcctgcctcacttctttccgtggagtttccctctgtggccccagggatcagtggcctag

SEQ ID NO: 22153 - DNA, 294 bp, Artificial Sequence
  derived and/or modified sequence
atgagccccgccttcagagccatggacgtggagcccagagccaagggcgtgctgctggagcccttcgtgcaccaggtgggcggccacagctgcgtgctgagattcaacgagaccaccctgtgcaagcccctggtgcccagagagcaccagttctacgagaccctgcccgccgagatgagaaagttcaccccccagtacaagggccagagccagagacccctggtgagctggcccagcctgccccacttcttcccctggagcttccccctgtggccccagggcagcgtggcctag

SEQ ID NO: 22154 - protein, 183 aa, Artificial Sequence
  derived and/or modified sequence
MRANDALQVLGLLFSLARGSEVGNSQAVCPGTLNGLSVTGDAENQYQTLYKLYERCEVVMGNLEIVLTGHNADLSFLQWIREVTGYVLVAMNEFSTLPLPNLRVVRGTQVYDGKFAIFVMLNYNTNSSHALRQLRLTQLTGQFPMVPSGLTPQPAQDWYLLDDDPRLLTLSASSKVPVTLAAV

SEQ ID NO: 22155 - DNA, 552 bp, Artificial Sequence
  derived and/or modified sequence
atgagagccaacgacgccctgcaggtgctgggcctgctgttcagcctggccagaggcagcgaggtgggcaacagccaggccgtgtgccccggcaccctgaacggcctgagcgtgaccggcgacgccgagaaccagtaccagaccctgtacaagctgtacgagagatgcgaggtggtgatgggcaacctggagatcgtgctgaccggccacaacgccgacctgagcttcctgcagtggatcagagaggtgaccggctacgtgctggtggccatgaacgagttcagcaccctgcccctgcccaacctgagagtggtgagaggcacccaggtgtacgacggcaagttcgccatcttcgtgatgctgaactacaacaccaacagcagccacgccctgagacagctgagactgacccagctgaccggccagttccccatggtgcccagcggcctgaccccccagcccgcccaggactggtacctgctggacgacgaccccagactgctgaccctgagcgccagcagcaaggtgcccgtgaccctggccgccgtgtag

SEQ ID NO: 22156 - DNA, 381 bp, Artificial Sequence
  derived and/or modified sequence
atgagagccaacgacgccctgcaggtgctgggcctgctgttcagcctggccagaggcagcgaggtgggcaacagccaggccgtgtgccccggcaccctgaacggcctgagcgtgaccggcgacgccgagaaccagtaccagaccctgtacaagctgtacgagagatgcgaggtggtgatgggcaacctggagatcgtgctgaccggccacaacgccgacctgagcttcctgcagtggatcagagaggtgaccggctacgtgctggtggccatgaacgagttcagcaccctgcccctgcccaacctgagagtggtgagaggcacccaggtgtacgacggcaagttcgccatcttcgtgatgctgaactacaacaccaactag

SEQ ID NO: 22157 - DNA, 552 bp, Artificial Sequence
  derived and/or modified sequence
atgcgggccaacgacgcactgcaggtgctcgggctgctgtttagcttggccagggggagtgaagtggggaatagtcaagccgtgtgccccggaaccctgaacggcctttcagtgaccggtgatgcagaaaaccagtaccagaccctttacaaactctatgagcggtgcgaggttgtcatgggtaatctggagatcgtcttgacaggtcataacgcagacctcagttttctgcagtggatccgggaagtgaccggctacgtactcgtggccatgaatgagttctccactctcccactgccaaatctgagggttgtcaggggaacccaggtgtatgacgggaaattcgccatcttcgtgatgctgaattataatacaaactcatcgcacgcactcagacagcttagactcacacagttgacgggccaattcccaatggttccttcaggcctgactcctcagccagcccaggactggtatctgcttgatgatgacccgcgcttattaactctgtctgcttcaagcaaagttccagtaacactggccgccgtgtag

SEQ ID NO: 22158 - DNA, 381 bp, Artificial Sequence
  derived and/or modified sequence
atgcgggcaaatgacgcattgcaggttctgggtctactcttcagcctcgcacgcgggtctgaagtgggcaacagtcaggccgtgtgtcctgggacgctaaatggccttagtgtgaccggggacgccgagaatcagtaccagacgctttacaaactctacgaaagatgtgaagtcgtgatgggcaacctggagatagttctgacaggccataacgcagacctgagcttcctccagtggatcagagaagtgactggctacgttttggtggcaatgaatgaattcagcacactgcccctgcctaacctgagggtggtgaggggcacccaggtctatgacggaaaattcgccatctttgtgatgttgaattacaacacaaactag

SEQ ID NO: 22159 - DNA, 552 bp, Artificial Sequence
  derived and/or modified sequence
atgagggccaatgatgccctgcaggtgctgggcctgctcttcagcctggcccggggcagcgaggtgggcaacagccaggccgtgtgccccggcaccctgaatggcctgtctgtgactggagatgctgagaaccagtaccagaccctgtacaagctgtatgagcgctgtgaggtggtgatgggcaacctggagatcgtgctgaccggccacaatgctgacctgtccttcctgcagtggatccgggaggtgacaggctacgtgctggtggccatgaatgagttcagcaccctgcccctgcccaacctgcgggtggtgcggggcacccaggtgtatgatggcaagtttgccatctttgtgatgctgaactacaacaccaacagcagccacgccctgcggcagctgcggctgacccagctgaccggccagttccccatggtgcccagcggcctgaccccccagcctgcccaggactggtacctgctggatgatgacccccggctgctgaccctgagcgccagcagcaaggtgcctgtgaccctggccgctgtgtag

SEQ ID NO: 22160 - DNA, 381 bp, Artificial Sequence
  derived and/or modified sequence
atgagggccaatgatgccctgcaggtgctgggcctgctcttcagcctggcccggggcagcgaggtgggcaacagccaggccgtgtgccccggcaccctgaatggcctgtctgtgactggagatgctgagaaccagtaccagaccctgtacaagctgtatgagcgctgtgaggtggtgatgggcaacctggagatcgtgctgaccggccacaatgctgacctgtccttcctgcagtggatccgggaggtgacaggctacgtgctggtggccatgaatgagttcagcaccctgcccctgcccaacctgcgggtggtgcggggcacccaggtgtatgatggcaagtttgccatctttgtgatgctgaactacaacaccaactag

SEQ ID NO: 22161 - DNA, 552 bp, Artificial Sequence
  derived and/or modified sequence
atgcgggccaacgacgccctgcaggtgctgggcctgctgttcagcctggcccggggctccgaagtaggcaactcacaagctgtgtgccctggaacgctgaatggcctgtctgtaaccggcgacgcagaaaaccagtaccagactctatacaagctgtacgagagatgtgaggtggtgatgggcaatttggagatcgtccttacgggacacaatgccgacctatcctttctacagtggatcagagaggtgacaggttacgtcctagtcgctatgaacgaattttccactctcccactacccaaccttagagttgtccgaggaacccaggtatacgatggaaaattcgcaatcttcgtgatgttaaattacaacaccaattcttcacacgctctccggcagctccggctcacacaacttacaggtcagttcccaatggttccttccggcctgacgccccagccagcccaggattggtatctgctggacgatgatcctcggttactcaccctgagcgctagctccaaggtcccggtgacactggccgcagtgtag

SEQ ID NO: 22162 - DNA, 381 bp, Artificial Sequence
  derived and/or modified sequence
atgcgggccaacgacgccctgcaggtgctgggcctgctgttcagcctcgcaagggggtccgaagttggcaattctcaggccgtatgccccgggacactgaatggcctgtccgtaaccggcgatgccgagaaccaatatcagacattgtataagctgtatgaaagatgcgaagtcgttatgggaaacctcgagatcgttctaacagggcataacgcggacctgtcgttcctgcagtggatcagagaagttactggctatgtcctggtggccatgaacgagttttcaacactccccttacccaacttgcgcgtcgttcggggtacacaggtttatgacggaaaatttgctattttcgtcatgttgaattacaataccaactag

SEQ ID NO: 22163 - DNA, 552 bp, Artificial Sequence
  derived and/or modified sequence
atgagagcaaatgatgccctgcaggtcttgggattgttattcagcctggccagggggagcgaggtcggaaatagccaggctgtatgtcctggaaccctgaacggtctttccgttaccggagacgccgaaaatcagtaccaaactctgtacaaactgtatgaaagatgcgaggtagtcatgggcaacctcgagattgtgctaactggccacaacgcggatctatcgtttctccagtggattagggaggtcactggctatgttcttgtggccatgaacgagttctcaacacttcccctgcccaacctccgcgtcgtcaggggcacccaggtctatgacggcaaattcgcgatcttcgtcatgctcaattataacaccaactcctcccacgccttgcgccagctccgccttacacagttgacgggacagttcccaatggtgcctagtggtctgacacctcagcctgcacaagactggtatctgcttgacgacgacccccgtctgctgacacttagtgccagcagcaaggtgccagtaactcttgctgcagtttag

SEQ ID NO: 22164 - DNA, 381 bp, Artificial Sequence
  derived and/or modified sequence
atgcgggctaatgacgctctgcaggtactgggcctgctgttctcattggcaagaggatcagaggtcggtaatagccaggctgtgtgccccggtaccctgaacggactgagcgttactggagacgctgagaatcaataccagactctgtacaagttatacgaaaggtgcgaggtcgtgatgggcaacctagagattgtcttgaccggccataacgccgatctgtcattccttcaatggattcgggaggtgacaggctatgtactcgttgccatgaatgaattctcaacgctcccattaccgaatctgagagtggtgcgaggaacccaggtgtatgacggcaaattcgccatcttcgtgatgcttaactacaataccaattag

SEQ ID NO: 22165 - DNA, 1020 bp, Artificial Sequence
  derived and/or modified sequence
tccccggactccggctccggctccgattgcaatttgcaacctccgctgccgtcgccgcagcagccaccaattcgccagcggttcaggtggctcttgcctcgatgtcctagcctaggggcccccgggccggacttggctgggctcccttcaccctctgcggagtcatgagggcgaacgacgctctgcaggtgctgggcttgcttttcagcctggcccggggctccgaggtgggcaactctcaggcagtgtgtcctgggactctgaatggcctgagtgtgaccggcgatgctgagaaccaataccagacactgtacaagctctacgagaggtgtgaggtggtgatggggaaccttgagattgtgctcacgggacacaatgccgacctctccttcctgcagtggattcgagaagtgacaggctatgtcctcgtggccatgaatgaattctctactctaccattgcccaacctccgcgtggtgcgagggacccaggtctacgatgggaagtttgccatcttcgtcatgttgaactataacaccaactccagccacgctctgcgccagctccgcttgactcagctcaccggtcagttcccgatggttccttctggcctcacccctcagccagcccaagactggtacctccttgatgatgacccaagactgctcactctaagtgcctcttccaaggtgcctgtcaccttggccgctgtctaaaggtccattgctccctaagcaatagagggcccccagtagggggagctaggggcatctgctccagggaaaggaaccctgtgtccttgtggggctggagtcagagctggatctgttaaccgtttttctaatttcaaagtacagtgtaccggaggccaggcctgatggcttacacctgtaatcccagcattttgggaggccaaggagggcagatcacttgagatcaggagtttgagaccagcctggccaacatggcgaaaccctgtctctactaaaaatacaaaaaaataaaataaaataaaaaatt

SEQ ID NO: 22166 - DNA, 561 bp, Artificial Sequence
  derived and/or modified sequence
attcattacccttccctggatctgggggctttcggaatctcgacctccccttggcctatctcctgcagaaaaattaggcagccaccaattcgccagcggttcaggtggctcttgcctcgatgtcctagcctaggggcccccgggccggacttggctgggctcccttcaccctctgcggagtcatgagggcgaacgacgctctgcaggtgctgggcttgcttttcagcctggcccggggctccgaggtgggcaactctcaggcagtgtgtcctgggactctgaatggcctgagtgtgaccggcgatgctgagaaccaataccagacactgtacaagctctacgagaggtgtgaggtggtgatggggaaccttgagattgtgctcacgggacacaatgccgacctctccttcctgcagtggattcgagaagtgacaggctatgtcctcgtggccatgaatgaattctctactctaccattgcccaacctccgcgtggtgcgagggacccaggtctacgatgggaagtttgccatcttcgtcatgttgaactataacaccaact

SEQ ID NO: 22167 - protein, 1258 aa, Artificial Sequence
  derived and/or modified sequence
MPEQERQITAREGASRKILSKLSLPTRAWEPAMKKSFAFDNVGYEGGLDGLGPSSQVATSTVRILGMTCQSCVKSIEDRISNLKGIISMKVSLEQGSATVKYVPSVVCLQQVCHQIGDMGFEASIAEGKAASWPSRSLPAQEAVVKLRVEGMTCQSCVSSIEGKVRKLQGVVRVKVSLSNQEAVITYQPYLIQPEDLRDHVNDMGFEAAIKSKVAPLSLGPIDIERLQSTNPKRPLSSANQNFNNSETLGHQGSHVVTLQLRIDGMHCKSCVLNIEENIGQLLGVQSIQVSLENKTAQVKYDPSCTSPVALQRAIEALPPGNFKVSLPDGAEGSGTDHRSSSSHSPGSPPRNQVQGTCSTTLIAIAGMTCASCVHSIEGMISQLEGVQQISVSLAEGTATVLYNPSVISPEELRAAIEDMGFEASVVSESCSTNPLGNHSAGNSMVQTTDGTPTSVQEVAPHTGRLPANHAPDILAKSPQSTRAVAPQKCFLQIKGMTCASCVSNIERNLQKEAGVLSVLVALMAGKAEIKYDPEVIQPLEIAQFIQDLGFEAAVMEDYAGSDGNIELTITGMTCASCVHNIESKLTRTNGITYASVALATSKALVKFDPEIIGPRDIIKIIESKTSEALAKLMSLQATEATVVTLGEDNLIIREEQVPMELVQRGDIVKVVPGGKFPVDGKVLEGNTMADESLITGEAMPVTKKPGSTVIAGSINAHGSVLIKATHVGNDTTLAQIVKLVEEAQMSKNPNKHISQTEVIIRFAFQTSITVLCIACPCSLGLATPTAVMVGTGVAAQNGILIKGGKPLEMAHKIKTVMFDKTGTITHGVPRVMRVLLLGDVATLPLRKVLAVVGTAEASSEHPLGVAVTKYCKEELGTETLGYCTDFQAVPGCGIGCKVSNVEGILAHSERPLSAPASHLNEAGSLPAEKDAVPQTFSVLIGNREWLRRNGLTISSDVSDAMTDHEMKGQTAILVAIDGVLCGMIAIADAVKQEAALAVHTLQSMGVDVVLITGDNRKTARAIATQVGINKVFAEVLPSHKVAKVQELQNKGKKVAMVGDGVNDSPALAQADMGVAIGTGTDVAIEAADVVLIRNDLLDVVASIHLSKRTVRRIRINLVLALIYNLVGIPIAAGVFMPIGIVLQPWMGSAAMAASSVSVVLSSLQLKCYKKPDLERYEAQAHGHMKPLTASQVSVHIGMDDRWRDSPRATPWDQVSYVSQVSLSSLTSDKPSRHSAAADDDGDKWSLLLNGRDEEQYI

SEQ ID NO: 22168 - DNA, 3777 bp, Artificial Sequence
  derived and/or modified sequence
atgcccgagcaggagagacagatcaccgccagagagggcgccagcagaaagatcctgagcaagctgagcctgcccaccagagcctgggagcccgccatgaagaagagcttcgccttcgacaacgtgggctacgagggcggcctggacggcctgggccccagcagccaggtggccaccagcaccgtgagaatcctgggcatgacctgccagagctgcgtgaagagcatcgaggacagaatcagcaacctgaagggcatcatcagcatgaaggtgagcctggagcagggcagcgccaccgtgaagtacgtgcccagcgtggtgtgcctgcagcaggtgtgccaccagatcggcgacatgggcttcgaggccagcatcgccgagggcaaggccgccagctggcccagcagaagcctgcccgcccaggaggccgtggtgaagctgagagtggagggcatgacctgccagagctgcgtgagcagcatcgagggcaaggtgagaaagctgcagggcgtggtgagagtgaaggtgagcctgagcaaccaggaggccgtgatcacctaccagccctacctgatccagcccgaggacctgagagaccacgtgaacgacatgggcttcgaggccgccatcaagagcaaggtggcccccctgagcctgggccccatcgacatcgagagactgcagagcaccaaccccaagagacccctgagcagcgccaaccagaacttcaacaacagcgagaccctgggccaccagggcagccacgtggtgaccctgcagctgagaatcgacggcatgcactgcaagagctgcgtgctgaacatcgaggagaacatcggccagctgctgggcgtgcagagcatccaggtgagcctggagaacaagaccgcccaggtgaagtacgaccccagctgcaccagccccgtggccctgcagagagccatcgaggccctgccccccggcaacttcaaggtgagcctgcccgacggcgccgagggcagcggcaccgaccacagaagcagcagcagccacagccccggcagcccccccagaaaccaggtgcagggcacctgcagcaccaccctgatcgccatcgccggcatgacctgcgccagctgcgtgcacagcatcgagggcatgatcagccagctggagggcgtgcagcagatcagcgtgagcctggccgagggcaccgccaccgtgctgtacaaccccagcgtgatcagccccgaggagctgagagccgccatcgaggacatgggcttcgaggccagcgtggtgagcgagagctgcagcaccaaccccctgggcaaccacagcgccggcaacagcatggtgcagaccaccgacggcacccccaccagcgtgcaggaggtggccccccacaccggcagactgcccgccaaccacgcccccgacatcctggccaagagcccccagagcaccagagccgtggccccccagaagtgcttcctgcagatcaagggcatgacctgcgccagctgcgtgagcaacatcgagagaaacctgcagaaggaggccggcgtgctgagcgtgctggtggccctgatggccggcaaggccgagatcaagtacgaccccgaggtgatccagcccctggagatcgcccagttcatccaggacctgggcttcgaggccgccgtgatggaggactacgccggcagcgacggcaacatcgagctgaccatcaccggcatgacctgcgccagctgcgtgcacaacatcgagagcaagctgaccagaaccaacggcatcacctacgccagcgtggccctggccaccagcaaggccctggtgaagttcgaccccgagatcatcggccccagagacatcatcaagatcatcgagagcaagaccagcgaggccctggccaagctgatgagcctgcaggccaccgaggccaccgtggtgaccctgggcgaggacaacctgatcatcagagaggagcaggtgcccatggagctggtgcagagaggcgacatcgtgaaggtggtgcccggcggcaagttccccgtggacggcaaggtgctggagggcaacaccatggccgacgagagcctgatcaccggcgaggccatgcccgtgaccaagaagcccggcagcaccgtgatcgccggcagcatcaacgcccacggcagcgtgctgatcaaggccacccacgtgggcaacgacaccaccctggcccagatcgtgaagctggtggaggaggcccagatgagcaagaaccccaacaagcacatcagccagaccgaggtgatcatcagattcgccttccagaccagcatcaccgtgctgtgcatcgcctgcccctgcagcctgggcctggccacccccaccgccgtgatggtgggcaccggcgtggccgcccagaacggcatcctgatcaagggcggcaagcccctggagatggcccacaagatcaagaccgtgatgttcgacaagaccggcaccatcacccacggcgtgcccagagtgatgagagtgctgctgctgggcgacgtggccaccctgcccctgagaaaggtgctggccgtggtgggcaccgccgaggccagcagcgagcaccccctgggcgtggccgtgaccaagtactgcaaggaggagctgggcaccgagaccctgggctactgcaccgacttccaggccgtgcccggctgcggcatcggctgcaaggtgagcaacgtggagggcatcctggcccacagcgagagacccctgagcgcccccgccagccacctgaacgaggccggcagcctgcccgccgagaaggacgccgtgccccagaccttcagcgtgctgatcggcaacagagagtggctgagaagaaacggcctgaccatcagcagcgacgtgagcgacgccatgaccgaccacgagatgaagggccagaccgccatcctggtggccatcgacggcgtgctgtgcggcatgatcgccatcgccgacgccgtgaagcaggaggccgccctggccgtgcacaccctgcagagcatgggcgtggacgtggtgctgatcaccggcgacaacagaaagaccgccagagccatcgccacccaggtgggcatcaacaaggtgttcgccgaggtgctgcccagccacaaggtggccaaggtgcaggagctgcagaacaagggcaagaaggtggccatggtgggcgacggcgtgaacgacagccccgccctggcccaggccgacatgggcgtggccatcggcaccggcaccgacgtggccatcgaggccgccgacgtggtgctgatcagaaacgacctgctggacgtggtggccagcatccacctgagcaagagaaccgtgagaagaatcagaatcaacctggtgctggccctgatctacaacctggtgggcatccccatcgccgccggcgtgttcatgcccatcggcatcgtgctgcagccctggatgggcagcgccgccatggccgccagcagcgtgagcgtggtgctgagcagcctgcagctgaagtgctacaagaagcccgacctggagagatacgaggcccaggcccacggccacatgaagcccctgaccgccagccaggtgagcgtgcacatcggcatggacgacagatggagagacagccccagagccaccccctgggaccaggtgagctacgtgagccaggtgagcctgagcagcctgaccagcgacaagcccagcagacacagcgccgccgccgacgacgacggcgacaagtggagcctgctgctgaacggcagagacgaggagcagtacatctag

SEQ ID NO: 22169 - DNA, 3777 bp, Artificial Sequence
  derived and/or modified sequence
atgcctgaacaggagaggcaaattaccgcccgcgagggtgcctccagaaagattttatctaagctgtccctgcctacacgagcatgggagccagctatgaagaagtcttttgcatttgataatgtgggctacgagggaggcctcgacgggttagggccttcctcccaggtagccacaagtactgtgcggatcctcgggatgacctgccagagttgcgtgaagagtattgaggaccggatttcaaacctcaaaggcataatatcaatgaaagtgtcacttgagcagggaagcgccacagtgaagtacgttcctagtgtcgtctgtctgcaacaagtctgccaccagatcggcgatatgggctttgaagcatctattgctgaaggaaaggcagctagctggccatcgcgatcattacccgctcaagaagccgtggttaagctgcgcgttgaaggcatgacatgtcagtcttgtgtgtcctcaattgaaggaaaggtgaggaagttgcagggcgtggtaagagtcaaagtgagcctgagcaatcaggaggccgttattacttaccaaccatacctcatccagcctgaggacctccgtgatcatgtcaatgacatgggatttgaagcagccatcaaaagcaaggtggccccactcagccttgggcccattgacattgagagattgcagtccacaaatccaaagagacccctgtcgtctgctaatcaaaattttaacaactccgagaccctgggacaccaggggtcccacgtggtaaccctccagctgagaattgatggaatgcactgtaagtcatgcgtgctgaacattgaggaaaatatcggtcagctcctgggcgttcaaagcattcaggtgtcgctggagaataaaaccgctcaggtcaagtatgacccttcctgcacctcgcccgtggcactgcagagggcgattgaggctctacccccaggcaattttaaggtctccttgcccgatggtgctgaagggtcagggactgaccatcgaagctccagttctcacagtcccggcagtccccccaggaatcaggtgcagggtacctgttccaccactctgattgcgatagctgggatgacctgcgcctcctgtgtccactccatcgagggtatgattagccagctggaaggtgtccagcagatcagcgtgtctctcgcagaaggcaccgccactgtcctctataacccatctgtcatctcacctgaagaactacgggcagctatcgaagacatgggattcgaagcgtctgtagtgagtgaatcatgttcgaccaacccactcggtaaccattcagctggcaactcaatggttcagaccacggatggtaccccgacctctgttcaagaagtcgcccctcataccggtcgtctgcccgcaaaccacgcccccgatatcctcgctaagtctccgcagtctactcgagctgtggctccccagaagtgctttctgcagattaaaggcatgacttgcgctagctgtgtgagcaatattgagaggaacctgcagaaggaggccggcgtcctgagcgtgttagtcgcccttatggcaggaaaggccgaaattaagtacgatccggaggtgattcagcctctggagatcgcacagttcatccaggacttgggcttcgaggctgccgtgatggaggattacgcgggcagtgatggtaatattgagctcacaatcaccggtatgacttgtgcctcgtgtgtacacaatatcgagtctaaactgacacgcactaatggaataacctacgcctctgtcgctctggcaaccagcaaggctctcgttaagtttgaccctgagatcatcgggcctagggacattatcaagattattgagagcaagacttctgaggccctcgcaaaattaatgtctctgcaggccactgaggccactgtagtgacactgggcgaggacaacctgatcatcagagaagaacaagtacctatggaactcgtccagaggggggatatcgtgaaagtggtgcccggcggcaagtttcccgtcgatggaaaagttctggagggtaataccatggcggacgagagcctaatcactggcgaagcaatgccagtgactaaaaagcccgggtccaccgtgatcgccggttccatcaatgcccatgggtctgtgctcatcaaggccacccacgtcggcaatgacacaacattggcccagattgtcaagctcgtagaagaagcccaaatgagcaagaacccaaacaagcacatcagccaaactgaagtcatcattaggtttgcttttcaaacatctataactgtgctctgcatcgcatgtccatgttcccttggactggcgacaccgacagccgttatggtggggactggcgtcgccgctcagaatggcattctgataaaggggggaaaaccccttgagatggcacataaaatcaaaacggttatgtttgacaagactggcacaattacccatggcgtgcctagggtaatgagagtgctgctgctgggagacgtggccacacttccattaaggaaagtgttagccgtcgtgggaaccgccgaggccagttctgaacatcctctgggggtggctgttaccaaatactgcaaagaagaattgggaaccgaaacgctgggatactgcacagattttcaggccgtacctgggtgcggaataggatgtaaagtgtccaatgtggaaggcattttggcccactcagagaggcctctttccgcgccagcatcccacctcaacgaagcaggctccctgcccgccgaaaaggatgccgttccccagaccttctcggtgctgatcggcaatagagaatggctgcgaaggaacggtttgaccataagctccgatgtttcagatgctatgaccgatcatgagatgaagggtcaaacagctatactggtggcaattgacggagttctttgcggcatgatagccatcgccgacgctgtcaaacaggaagcggctctggccgtgcacacattacagtcaatgggggtggacgtcgtgttgatcaccggcgataatagaaaaactgcacgcgccatcgccacccaggtgggcatcaacaaggtattcgccgaagtgctgccctcacataaagtcgctaaggttcaagagcttcagaataagggtaagaaggtggctatggtgggcgacggggtgaacgatagcccggcattggcgcaggctgacatgggagtcgccattggaacagggactgacgtcgccatcgaagcagcggatgttgttttaatccggaacgatcttcttgacgttgtggccagcattcacctctcaaagcgcaccgtgaggcgtatccggattaatttagtgttggcactgatctataatttggtgggcatacccatagcagcaggcgtttttatgcccattggcatagttctgcagccgtggatgggatccgctgccatggccgcctcctcagtttcggtcgtcttatcatccctgcagctaaagtgttataaaaagcctgacctggaaagatatgaggcccaggcgcatggacacatgaaacccctgactgcctcgcaggtgtccgttcatatcgggatggatgaccggtggcgtgatagcccccgtgccactccatgggatcaggtgtcatatgtctcacaggtgagcttgagctcactcacctcagacaaaccaagcagacactccgctgccgccgacgatgacggagataagtggtctttattgctgaacggaagggatgaagagcaatatatctag

SEQ ID NO: 22170 - DNA, 6016 bp, Artificial Sequence
  derived and/or modified sequence
ttcccggacccctgtttgctttagagccgagccgcgccgatgccctcacactctgcgcctcctctcccgggactttaacaccccgctctcctccaccgaccaggtgaccttttgctctgagccagatcagagaagaattcggtgtccgtgcgggacgatgcctgagcaggagagacagatcacagccagagaaggggccagtcggaaaatcttatctaagctttctttgcctacccgtgcctgggaaccagcaatgaagaagagttttgcttttgacaatgttggctatgaaggtggtctggatggcctgggcccttcttctcaggtggccaccagcacagtcaggatcttgggcatgacttgccagtcatgtgtgaagtccattgaggacaggatttccaatttgaaaggcatcatcagcatgaaggtttccctggaacaaggcagtgccactgtgaaatatgtgccatcggttgtgtgcctgcaacaggtttgccatcaaattggggacatgggcttcgaggccagcattgcagaaggaaaggcagcctcctggccctcaaggtccttgcctgcccaggaggctgtggtcaagctccgggtggagggcatgacctgccagtcctgtgtcagctccattgaaggcaaggtccggaaactgcaaggagtagtgagagtcaaagtctcactcagcaaccaagaggccgtcatcacttatcagccttatctcattcagcccgaagacctcagggaccatgtaaatgacatgggatttgaagctgccatcaagagcaaagtggctcccttaagcctgggaccaattgatattgagcggttacaaagcactaacccaaagagacctttatcttctgctaaccagaattttaataattctgagaccttggggcaccaaggaagccatgtggtcaccctccaactgagaatagatggaatgcattgtaagtcttgcgtcttgaatattgaagaaaatattggccagctcctaggggttcaaagtattcaagtgtccttggagaacaaaactgcccaagtaaagtatgacccttcttgtaccagcccagtggctctgcagagggctatcgaggcacttccacctgggaattttaaagtttctcttcctgatggagccgaagggagtgggacagatcacaggtcttccagttctcattcccctggctccccaccgagaaaccaggtccagggcacatgcagtaccactctgattgccattgccggcatgacctgtgcatcctgtgtccattccattgaaggcatgatctcccaactggaaggggtgcagcaaatatcggtgtctttggccgaagggactgcaacagttctttataatccctctgtaattagcccagaagaactcagagctgctatagaagacatgggatttgaggcttcagtcgtttctgaaagctgttctactaaccctcttggaaaccacagtgctgggaattccatggtgcaaactacagatggtacacctacatctgtgcaggaagtggctccccacactgggaggctccctgcaaaccatgccccggacatcttggcaaagtccccacaatcaaccagagcagtggcaccgcagaagtgcttcttacagatcaaaggcatgacctgtgcatcctgtgtgtctaacatagaaaggaatctgcagaaagaagctggtgttctctccgtgttggttgccttgatggcaggaaaggcagagatcaagtatgacccagaggtcatccagcccctcgagatagctcagttcatccaggacctgggttttgaggcagcagtcatggaggactacgcaggctccgatggcaacattgagctgacaatcacagggatgacctgcgcgtcctgtgtccacaacatagagtccaaactcacgaggacaaatggcatcacttatgcctccgttgcccttgccaccagcaaagcccttgttaagtttgacccggaaattatcggtccacgggatattatcaaaattattgagagcaaaacctcagaagccctggctaaactcatgtctctccaagccacagaagccaccgttgtgacccttggtgaggacaatttaatcatcagggaggagcaagtccccatggagctggtgcagcggggcgatatcgtcaaggtggtccctgggggaaagtttccagtggatgggaaagtcctggaaggcaataccatggctgatgagtccctcatcacaggagaagccatgccagtcactaagaaacccggaagcactgtaattgcggggtctataaatgcacatggctctgtgctcattaaagctacccacgtgggcaatgacaccactttggctcagattgtgaaactggtggaagaggctcagatgtcaaagaaccccaacaagcacatctcccagacagaggtgatcatccggtttgctttccagacgtccatcacggtgctgtgcattgcctgcccctgctccctggggctggccacgcccacggctgtcatggtgggcaccggggtggccgcgcagaacggcatcctcatcaagggaggcaagcccctggagatggcgcacaagataaagactgtgatgtttgacaagactggcaccattacccatggcgtccccagggtcatgcgggtgctcctgctgggggatgtggccacactgcccctcaggaaggttctggctgtggtggggactgcggaggccagcagtgaacaccccttgggcgtggcagtcaccaaatactgtaaagaggaacttggaacagagaccttgggatactgcacggacttccaggcagtgccaggctgtggaattgggtgcaaagtcagcaacgtggaaggcatcctggcccacagtgagcgccctttgagtgcaccggccagtcacctgaatgaggctggcagccttcccgcagaaaaagatgcagtcccccagaccttctctgtgctgattggaaaccgtgagtggctgaggcgcaacggtttaaccatttctagcgatgtcagtgacgctatgacagaccacgagatgaaaggacagacagccatcctggtggctattgacggtgtgctctgtgggatgatcgcaatcgcagacgctgtcaagcaggaggctgccctggctgtgcacacgctgcagagcatgggtgtggacgtggttctgatcacgggggacaaccggaagacagccagagctattgccacccaggttggcatcaacaaagtctttgcagaggtgctgccttcgcacaaggtggccaaggtccaggagctccagaataaagggaagaaagtcgccatggtgggggatggggtcaatgactccccggccttggcccaggcagacatgggtgtggccattggcaccggcacggatgtggccatcgaggcagccgacgtcgtccttatcagaaatgatttgctggatgtggtggctagcattcacctttccaagaggactgtccgaaggatacgcatcaacctggtcctggcactgatttataacctggttgggatacccattgcagcaggtgtcttcatgcccatcggcattgtgctgcagccctggatgggctcagcggccatggcagcctcctctgtgtctgtggtgctctcatccctgcagctcaagtgctataagaagcctgacctggagaggtatgaggcacaggcgcatggccacatgaagcccctgacggcatcccaggtcagtgtgcacataggcatggatgacaggtggcgggactcccccagggccacaccatgggaccaggtcagctatgtcagccaggtgtcgctgtcctccctgacgtccgacaagccatctcggcacagcgctgcagcagacgatgatggggacaagtggtctctgctcctgaatggcagggatgaggagcagtacatctgatgacttcaggcaggcgggccggggcagggacttgcctccactcaccacaagctgagcaggacagccagcagcaggatgggctgagctagcctccagctttggggacttccgctccctggatatgtccagtcatcctgccctgcagcacgcggccttgtctgggtgcagctgggcttggcctggagaggacggccctgcctgcctcttggcctcacgggaccgtcagcatgggctttgtcttggactctagtccttggctggactgtagaaggtgagaggcgagtcaccctcctcacagacctctgcttggagtatttaggatgactgctgtgaaatggagaacagtttcatcaggaccaaaaaacctcactgggcctttccagagaactgcagacctcactgtcagggtctttctgatgacgcctgtctgtgtgcatcatgtttctgagaccacagtttacctcaggtgtgcctgttgctttcttcctgcatagtctgttcctttcttcgtacatagtctgttccttttctctcctgtgtgcttgtcagtggggacccctcgcaaccctgcctgtcacctgggagggtgggaccaatgtccttgtggtctttgctgctgctctcaggcgcttctccaatgctctggagtgtgcatttcagcttgaacctgcttcctggctcacacatccccagccagggagcttgccacactcttcttcaagttgaggagagttcttttttgcttaaagcccccttctccatggagtgttggcttctcaatagagtgttgttgctgaccagctggagtgagggcctcagagcctgacctgagagtccgtactcggcttcctgtggggtgtaggttctcgcgattcaggacgtccttccatatccctgcccagcctgtggtgcttgaaacgtttgccccatgggaaacgtatgtgtgcaggagcctccctgcacggcccaaggggcttcgttttcagtcttctgactgtcacctcgtggggttcagtagagaattcatgtgactagcgcctggccttgtgtggcttggaggaaatggtactgcccaaataggaggaaaacacagcctccctgagcctgcattctgcacgctgcccaggggcttcagaaaaggagtggccacagcaccccgaagggagcatctgtttacctggcagtggctctcagagcagcagaacgggttcagttttagactctgaagttggttgtgattgacagaaccctttgggagcaaactagtagagttggattaaattctgggtgaaacccttttctcccacacaaaatagttttagtgatttttttcattgtccattacttgccaggggcagttttagcagcacttttgatagattacgtctaatcctcccaaccaaccagcagggtagctattactgtccacattttacaggcaaggaaacaggctccaagaggctgaggactttgcccaggatgacatagccaatggacaagcagtgtctgtcagctgtgaaggcttcactcttattgtccttctaccttgaatagaagttttcctgataagaataaacgaggaaaaggtccttgcctcctggaagaacaaatctaccaggtgatctattcattgtttcaactcagaatgcacttgattcaggaggtcatctgaccttcaccttggatggttagtttcactttttacatatagtttttgcagggttttattttataaaatccaagcgcgctgttgattgtgttttccttgttttcagcccccccactccagcccgcagcacatttccgctgtccgtcagtaattgtgtcctctctttatgcttgcttggggaatgttgttttctgactaggctgatcattatctaaagaatctaattctgttgatttttaaaacttttaggaccataaacgttgtgttcatatatggacatggaaatatttatataattttatagaaaataaccttttagatggtcaaagtgtaaggagtttttttgtcagataatcatttctacttcaaaaacatttcatgcaatattagaataaagttcctgtcattcctct

SEQ ID NO: 22171 - DNA, 3777 bp, Artificial Sequence
  derived and/or modified sequence
atgcctgagcaggagcggcagatcacagcccgggagggcgccagcaggaagatcctgagcaagctgagcctgcccacccgggcctgggagcccgccatgaagaagagctttgcctttgacaacgtgggctatgagggcggcctggatggcctgggccccagcagccaggtggccaccagcacagtgcgcatcctgggcatgacctgccagagctgtgtgaagagcattgaagatcgcatcagcaacctgaagggcatcatctccatgaaggtgtccctggagcagggcagcgccaccgtgaagtatgtgcccagcgtggtgtgcctgcagcaggtgtgccaccagatcggggacatgggctttgaggccagcattgctgagggcaaggccgcctcctggcccagccgcagcctgcctgcccaggaggccgtggtgaagctgcgggtggagggcatgacctgccagagctgtgtgagcagcattgagggcaaggtgaggaagctgcagggcgtggtgcgggtgaaggtgtccctgagcaaccaggaggccgtcatcacctaccagccctacctgatccagcctgaggacctgcgggaccacgtgaatgacatgggctttgaggccgccatcaagagcaaggtggcccccctgagcctgggccccatcgacatcgagcggctgcagagcaccaaccccaagaggcccctgagcagcgccaaccagaacttcaacaacagcgagaccctgggccaccagggcagccacgtggtgaccctgcagctgagaattgatggcatgcactgcaagagctgtgtgctgaacattgaagaaaatattggccagctgctgggcgtgcagagcatccaggtgtccctggagaacaagacagcccaggtgaagtatgaccccagctgcaccagccctgtggccctgcagagggccatcgaggccctgcccccaggcaacttcaaggtgtccctgcctgatggagctgagggcagcggcacagaccacaggagcagcagcagccacagccctggcagccccccaagaaaccaggtgcagggcacctgcagcaccaccctgattgccatcgccggcatgacctgtgccagctgtgtgcacagcattgagggcatgatcagccagctggagggcgtgcagcagatctctgtgtccctggccgagggcacagccaccgtgctgtacaaccccagcgtcatcagccctgaggagctgcgggccgccatcgaggacatgggctttgaggcctctgtggtgtctgagagctgcagcaccaaccccctgggcaaccacagcgctggcaacagcatggtgcagaccacagatggcacccccacctctgtgcaggaggtggccccccacacaggccgcctgcctgccaaccacgccccagacatcctggccaagagcccccagagcaccagggctgtggccccccagaagtgcttcctgcagatcaagggcatgacctgtgccagctgtgtgagcaacatcgagaggaacctgcagaaggaggccggcgtgctgtctgtgctggtggccctgatggccggcaaggccgagatcaagtatgaccctgaggtgatccagcccctggagatcgcccagttcatccaggacctgggctttgaagctgctgtgatggaggactatgccggcagtgatggcaacatcgagctgaccatcaccggcatgacctgtgccagctgtgtgcacaacatcgagagcaagctgaccaggaccaacggcatcacctacgcctctgtggccctggccaccagcaaggccctggtgaagtttgatcctgagatcatcggcccccgggacatcatcaagatcatcgagagcaagaccagcgaggccctggccaagctgatgagcctgcaggccacagaggccaccgtggtgaccctgggggaggacaacctgatcatccgggaggagcaggtgcccatggagctggtgcagagaggagacatcgtgaaggtggtgcctgggggcaagtttcctgtggatggcaaggtgctggagggcaacaccatggctgatgagagcctcatcaccggggaggccatgcctgtgaccaagaagccaggcagcacagtgattgctggcagcatcaatgcccacggctctgtgctgatcaaggccacccacgtgggcaatgacaccaccctggcccagatcgtgaagctggtggaggaggcccagatgagcaagaaccccaacaagcacatcagccagacagaggtgatcatccgctttgccttccagaccagcatcaccgtgctgtgcatcgcctgcccctgcagcctgggcctggccacccccacagctgtgatggtgggcaccggggtggccgcccagaatggcatcctgatcaagggcggcaagcccctggagatggcccacaagatcaagacagtgatgtttgacaagacaggcaccatcacccatggagtgccccgggtgatgagggtgctgctgctgggagatgtggccaccctgcccctgaggaaggtgctggccgtggtgggcacagctgaggccagcagcgagcaccccctgggcgtggccgtgaccaagtactgcaaggaggagctgggcacagagaccctgggctactgcacagacttccaggccgtgcccggctgcggcatcggctgcaaggtgtccaatgtggagggcatcctggcccacagcgagcggcccctgagcgccccagccagccacctgaatgaagctggcagcctgcctgctgagaaggatgctgtgccccagaccttctctgtgctgattggcaaccgggagtggctgcggagaaatggcctgaccatcagcagtgatgtgtctgatgccatgacagaccacgagatgaagggccagacagccatcctggtggccattgatggagtgctgtgtggcatgattgccatcgcagatgctgtgaagcaggaggccgccctggccgtgcacaccctgcagagcatgggcgtggatgtggtgctgatcactggagacaacaggaagacagcccgggccatcgccacccaggtgggcatcaacaaggtgtttgctgaggtgctgcccagccacaaggtggccaaggtgcaggagctgcagaacaagggcaagaaggtggccatggtgggagatggagtgaatgacagccctgccctggcccaggccgacatgggcgtggccatcggcactggaacagatgtggccattgaagctgctgatgtggtgctgatcagaaatgacctgctggatgtggtggccagcatccacctgagcaagaggacagtgcggcgcatccgcatcaacctggtgctggccctgatctacaacctggtgggcatccccatcgctgctggggtcttcatgcccatcggcatcgtgctgcagccctggatgggcagcgctgccatggccgccagctctgtgtctgtggtgctgagcagcctgcagctgaagtgctacaagaagccagacctggagagatatgaggcccaggcccacggccacatgaagcccctgacagccagccaggtgtctgtgcacatcggcatggatgaccgctggagggacagcccccgggccaccccctgggaccaggtgtcctatgtgtcccaggtgtccctgagcagcctgaccagtgacaagcccagccgccacagcgctgctgctgatgatgatggagacaagtggagcctgctgctgaatggaagagatgaggagcagtacatctag

SEQ ID NO: 22172 - DNA, 3777 bp, Artificial Sequence
  derived and/or modified sequence
atgcccgagcaggagcggcagatcaccgcccgggagggcgccagccggaaaatcctctccaaactttcgctgccaacccgggcctgggaacccgccatgaagaagtcttttgcgttcgacaatgtgggttatgaaggcggcctggatggcctgggcccttcatctcaggtcgctacaagtactgtgcgaatacttgggatgacatgccaaagctgcgtgaaatcaatcgaagatcggatatcaaatctgaagggtattatctcaatgaaagttagtcttgagcaggggtccgctacggtcaaatacgtcccgagcgtggtgtgcctgcagcaggtgtgtcatcagattggcgatatggggtttgaggcttctatagctgaggggaaagcagcaagttggcccagccggtcattgccagctcaagaggccgttgtgaaactgagagtcgaagggatgacatgccagagctgtgtttcttccatagaggggaaagtgaggaaacttcagggagtggtgagagtgaaggtgagcttgagtaatcaagaagcagtgatcacctatcagccctatctgatacagcccgaggaccttagagaccacgttaatgatatgggattcgaggccgcgattaagagcaaagtggctccgctcagcctggggcctatcgacatagaaaggcttcagagcactaatccaaaacggcctctgtcatctgcgaatcagaactttaacaacagcgaaacacttggccaccagggcagtcatgtggtcactctgcaactgcgtatcgacggcatgcattgcaaaagctgtgtgctgaatatagaggagaacatagggcagctgttaggggttcagagtatccaggtttcgctggagaacaagactgctcaggttaagtatgatccgtcttgtaccagtcccgtggctttgcaacgggctatcgaggccctgccccccggcaacttcaaggtatcattgccggacggggcagaggggtccgggaccgaccataggtctagcagttcacactctccaggcagcccaccaagaaaccaagtgcagggaacttgctctactacccttatagccattgccggcatgacttgcgcttcgtgcgttcacagcattgaaggtatgattagccaattggagggggtgcaacagatcagcgtcagtttagcagagggaactgcaaccgtgctttacaatccaagtgtcatcagccccgaggaattgagagctgccattgaagacatgggatttgaggcctccgtggttagtgaatcctgttcaactaacccgctggggaaccacagcgccggtaacagtatggttcagaccactgacggtaccccaacctccgttcaggaggtggccccccatactggtaggctgccggccaaccatgctccggatatactcgccaagtcacctcaatccactcgggctgttgcccctcagaagtgcttcctgcaaatcaagggcatgacctgtgcgagctgtgtaagcaacatcgagcgcaatctccagaaggaggcaggggttctgtccgtgctggtcgctctgatggccggtaaggccgagatcaagtacgatcccgaagttattcagcctctggagatcgctcaatttattcaggatttgggcttcgaagccgccgttatggaggactacgcagggagcgacgggaatattgaattgacaatcacgggcatgacctgcgccagttgtgtgcataatattgagtccaagcttactcgcacaaacggcatcacgtacgcatccgttgcactggctacatcaaaagctctggtcaagtttgacccagagatcatcggccctcgtgatataatcaagatcatcgagagcaagacatctgaggcactggcaaaattaatgagcctgcaagccaccgaagccactgttgtgacactaggggaggataacctgatcatacgggaggagcaagtgccaatggaactggtgcaaaggggagatatcgtcaaggtggtcccagggggaaaattccctgtcgacggcaaagtgctcgaggggaatactatggcagacgagtctttgatcactggggaagcaatgccggtgaccaagaagccggggtccacagtgatcgccggtagcataaacgcccacgggagtgttctaattaaggccactcatgtgggcaacgatacaaccctcgctcagatcgtgaaactggtcgaagaggcccagatgtccaaaaacccgaataaacatatttctcaaacagaagtgatcattagattcgcgtttcagacgagcattacagttctgtgtattgcctgcccttgtagccttggactggccacgcccacagccgtgatggtggggacgggtgtcgcagcacagaatggaattctcatcaagggcggtaagccactagagatggcccacaagatcaaaactgtgatgtttgataagactggcactatcacgcacggtgttcctcgggtaatgagggttctcctgctaggcgacgtcgccacactgccgttgagaaaggtgttagcggttgtcggaacggcggaggcctcgagtgaacatcctctgggcgtagccgtgaccaagtactgcaaggaagagcttggcacagagactctgggctactgcactgatttccaagctgttcccggctgtgggatagggtgcaaggtgagcaacgtggaaggtattctcgcgcatagcgaacgacctctctcagctcctgcttctcatctcaacgaggccggcagcttaccagcagagaaagacgccgtgccgcaaaccttttctgtactaatcggcaatcgtgagtggttgaggcggaatggtctgacaatctcttccgacgtgagcgacgcaatgaccgatcacgagatgaaggggcaaaccgctattctggtagctattgatggggtgctgtgtgggatgattgccatcgcagatgctgttaaacaggaggcggccctagcagttcacaccttgcagtcaatgggggttgatgtagtgctcatcactggggataaccgtaaaaccgcccgggcaatagccacccaagtggggattaataaagtgtttgccgaggtgctcccctctcacaaagtagctaaagttcaggagcttcaaaacaaggggaaaaaagtggccatggtaggggatggggtcaatgactcacccgcccttgcgcaagctgacatgggtgtggccatagggaccgggacagacgtggctatcgaggcagccgacgtcgtgctcatccggaacgacctgctggatgtggtggcaagcatccacctgtcaaaacgtaccgtccgaagaatacggatcaatctcgtactagcgctgatctacaatctggttggaatccctatagctgctggggttttcatgccaattggcatcgtactgcaaccttggatgggcagcgccgccatggccgcgtcctccgtgagcgtggtgctgtctagcctgcaactgaagtgttataagaagccagatcttgagcgctacgaggcacaggcccatggccatatgaagccactgacagcatcgcaggttagcgtgcacatcggtatggacgatcgctggagggactcgcctagagcaaccccctgggaccaggttagctatgtcagccaagtttcactgtcaagtttgacatcagacaagccttctaggcattctgccgctgctgacgatgacggagataaatggtcattgcttctaaatgggcgggatgaggaacaatatatctag

SEQ ID NO: 22173 - DNA, 3777 bp, Artificial Sequence
  derived and/or modified sequence
atgccagaacaggaacgacagataacagctagggaaggggcttcccgaaagattttgtcgaaattaagtttacctacacgagcctgggaacccgctatgaaaaagagcttcgcctttgacaacgttggatatgaaggcggactggacggactgggccctagctctcaggtcgctacctcgaccgtgagaatccttgggatgacatgccagtcatgtgtaaaaagtatcgaggatcgcatctcaaacctaaagggcataatttcaatgaaggtctcccttgagcaggggagcgcaactgttaaatatgtgcccagcgtagtttgcttgcagcaggtgtgccaccagataggcgatatgggctttgaggcatctatagctgagggcaaagcggcttcatggccgtcacgttcacttcccgcacaagaggccgtggtgaaactccgcgtggagggaatgacatgccagagctgtgtgtccagcattgaggggaaggtacgaaagttacagggggtggtgagggtgaaggtatccttatccaaccaagaggccgtcatcacctaccagccctacctgattcagcctgaggacttgagagatcacgtcaacgacatgggcttcgaagccgctattaaatctaaggtggctccactgtccctcggacccatcgacattgaacgacttcagtcaactaaccctaagcgcccattaagttctgccaatcagaactttaacaattccgaaaccctgggacaccaggggtcccacgtcgtaacactgcagctgcgcatcgatggaatgcactgtaagagctgcgttctgaatattgaggagaacattggccagttgctgggcgtgcagagcatccaagtctctctggagaacaagaccgcccaggtaaaatatgaccccagctgcacctcgcctgtggcgttgcagagagcaattgaggctctcccccctggcaatttcaaagtttcattgccagatggggctgaggggtccggcactgatcatcgctctagcagctctcactcacccggatcccctcccaggaaccaagttcagggaacatgttctacaacactgattgcaatcgccggaatgacatgtgcatcctgcgtgcactctattgaaggtatgatctcacagctggagggcgtgcagcagatctcagtgtcactagccgaaggaaccgcaaccgtactgtacaatccctccgtcattagcccagaagaactccgggcagccatcgaagatatgggattcgaggcatctgtggtcagcgagagctgttctaccaaccctctgggaaaccattctgccggtaatagcatggtgcagacaaccgatggtacgcccacttccgttcaggaagtagcaccccataccggtcgacttcctgctaatcacgcaccagatatactggctaaatcaccacagtctacccgagctgtagccccacagaaatgtttccttcaaattaagggaatgacatgtgctagttgcgtatcaaatatcgagagaaatctacagaaagaggccggtgttctctcagtgttggttgcactgatggctggtaaagcagagattaagtatgaccccgaggtgattcagcccctggagatagctcaatttatccaggacttggggtttgaggccgcagtgatggaggattacgctggttctgatgggaacatcgagcttactataaccggaatgacttgtgcctcttgcgtccataatattgagagcaagttgacacggactaatggtattacatacgcatcagtggccctggccacctccaaggccctggtcaagtttgacccagagattatcgggccacgtgatatcattaagatcatcgagagtaaaacatcagaagctttagcaaaacttatgtccctgcaggccactgaagccacagtggttacactgggggaagacaacttgattatccgagaggagcaggtgccaatggaactggttcagcgcggagacatcgttaaagtggtgccgggtgggaaattcccagttgatggtaaagtcctcgaaggcaatacaatggctgatgagagcctgattaccggagaagcaatgccggttaccaagaaacctggctccactgtgatcgctggttctattaacgcacacggatctgtcctgatcaaagccacgcatgtcgggaacgataccacattggcgcagattgtgaagctagtcgaagaagcacagatgtcaaagaatccgaacaagcatatttcacagactgaggtaatcatccgcttcgccttccaaacatccataaccgtcttgtgcatcgcatgtccctgtagcctgggcctggccacacccacagctgtgatggtcgggacaggagtggcagcgcagaatggcatcctgatcaagggcggaaagcctctggagatggctcataagatcaaaacagtgatgttcgataaaactggaactatcactcatggagtccccagagtgatgcgggtgctgttgctcggagacgttgccaccctccccctgcgtaaagtgttggccgtcgtgggcactgccgaagctagctctgagcatcccctcggggtggcagttacaaaatactgtaaagaagaactgggtacagaaaccttaggatactgtaccgatttccaggctgttccaggatgtggcatcggatgcaaagtgtcaaacgtggaaggaatccttgcgcactcggaacggcctctcagtgcccctgcctctcacctgaatgaagcaggaagcctgcctgccgaaaaggatgctgtgccccagacattttcagtgctcatcggaaatagggagtggctgaggcgcaatggcctgactattagctctgatgtcagcgatgctatgactgaccatgagatgaaaggccagaccgccatattagtggccattgatggcgtgctttgtggcatgatcgcaatagccgatgcagtgaaacaggaggccgcacttgccgttcacacgctgcagagcatgggtgtcgacgtggtcttaataaccggcgataacaggaagactgccagagctatcgccacccaagttggtataaataaagtgttcgccgaagtgctgccgtctcacaaggtcgccaaggtacaggaactccagaataaaggcaagaaagtcgctatggtgggagatggcgtcaacgattcacctgcacttgcccaagccgacatgggggtcgccattgggactggaactgatgtggcaattgaagcagccgatgtggtccttattaggaacgaccttctggatgtcgtcgctagcatccacctgagcaaaagaacggtgagacggattagaatcaatctggttctcgcattaatttacaatctggtgggtatccccatcgccgctggggttttcatgcccatagggatcgtccttcaaccctggatgggcagtgccgctatggccgctagcagtgtgagcgtggtgctgtcctcactgcagcttaaatgctacaagaaaccggacttagagaggtacgaggcccaagcgcacgggcatatgaagccactgacagcatcccaggtgtctgtgcacatagggatggacgatcggtggcgcgacagtccgagagccacgccctgggatcaggtgagctacgtctcacaggtcagccttagttcactaacaagcgacaaaccttcaaggcacagtgcagccgctgatgacgatggtgacaagtggagcttacttctgaacggaagagacgaagaacaatacatttag

SEQ ID NO: 22174 - DNA, 3777 bp, Artificial Sequence
  derived and/or modified sequence
atgcctgagcaggaacgacagattaccgctagagagggcgcttccagaaagatcctaagtaagctatctctgcccaccagggcctgggagcctgccatgaagaagtcgtttgccttcgataatgtcggttacgaaggagggctcgatggcctgggccctagctcgcaggtggccactagcactgtccgcattctcgggatgacctgccagagttgcgtcaaatcaattgaagacaggatttcaaatttgaaaggcatcataagtatgaaagtaagcctcgaacagggcagcgctacagtgaagtatgtgccatctgtcgtgtgtctacagcaggtgtgtcatcagattggagatatggggttcgaagccagcattgcagagggtaaagctgcatcatggcccagcaggagcctgccagcgcaagaggccgttgtaaagttacgcgtggaagggatgacgtgtcagtcttgtgtgagttctatcgaaggcaaagtgcggaaactgcagggagttgtgagagtgaaagtctccttatccaaccaggaggcagttattacataccagccctatctgattcaacctgaagacctgagggaccacgtgaacgacatgggcttcgaggcagccattaaaagcaaggtcgccccactgagtcttgggccaatagacatcgaaagactccaaagcacaaatccaaaacggccgctctcttccgcaaatcagaacttcaataactcggaaaccctgggccaccagggaagccatgtggttactttgcagctccggattgacggtatgcactgtaagagctgcgtgctgaacattgaggaaaatatcggacagctgttaggggtgcaatcaattcaggtgagtttggaaaataagacagcccaggtcaagtatgaccctagttgtacatctcctgtggctctgcagagggctatcgaagcgttgccaccagggaactttaaggtttcattacccgatggagcagaaggttctggtaccgatcatagatcatccagctcacattctcccggaagcccacctcggaaccaggtccagggcacttgtagcaccacccttatagccattgccggtatgacttgcgctagttgtgttcatagtattgaggggatgatctcccagctcgagggggttcagcagatttctgtgtctcttgcagaaggtacagcaacagtactgtataacccttctgtgatctcccctgaggagctgcgggccgccatcgaagacatgggtttcgaggctagcgtcgtatctgaaagctgctccaccaatcccctgggcaatcactcggcaggaaacagtatggtgcaaacaaccgatgggacacccacaagcgtacaggaagtggctcctcacaccggccgactgcctgccaaccacgcaccagatattttggccaagtcaccacagtccactcgagctgtcgccccacagaagtgcttcttacagattaagggtatgacctgcgcctcatgcgtttcgaacattgagagaaaccttcagaaagaagcaggagtgctgagcgtcctagtcgcacttatggccggtaaggctgaaattaagtatgatcccgaggtgatccaacctctggaaattgcccagttcatccaggatttaggattcgaagcggctgtgatggaggactatgccggtagtgacgggaacattgaactgactattaccgggatgacatgtgcaagctgtgtgcacaacatcgagagtaagctgacccgaaccaatggaataacttacgctagcgtggcacttgctacctccaaggctctggtcaagttcgaccccgagattattgggccgcgagacattattaaaattattgagtcaaagacatcggaagccctggcaaagcttatgtctctccaggctacagaggctactgtggttactctgggagaagataatctcatcatcagagaagagcaagtacccatggagctggtgcaacgaggtgacatagtcaaggtagtgcccggggggaaatttcccgtcgacggaaaagtgttggaaggtaatactatggcagatgagtctctgataacaggggaagctatgccggtaactaagaaacctggtagcactgttatagctggaagcatcaacgcccacggcagtgtacttatcaaggctacccatgtgggtaacgacacaactctcgctcagattgtgaagctggtggaagaggctcaaatgtctaaaaatcccaataaacatatttcacaaacagaagtgatcatccggttcgctttccaaacctccatcactgtgttgtgcattgcctgcccgtgcagtctaggcttagcaacccccaccgccgtcatggttggaaccggagtggcagcccagaatggcatcctaattaagggcggaaagcctctcgaaatggcacataaaataaagactgtgatgtttgacaaaacaggaacaattactcacggggtgcccagagtgatgagagtactcctcctcggggacgtcgctactctcccactgcgaaaggtcttggccgttgtggggacagccgaggcctcgtcagagcaccctctgggcgttgccgttaccaaatattgcaaggaggaactcggtacagaaactctcgggtattgcactgactttcaagccgtgcctgggtgcgggattgggtgcaaagtgtcaaatgttgaagggatactcgcccattcggagagaccgttatctgcccccgctagccatctgaatgaggcaggatccctccctgccgagaaggatgccgtgccccagacattcagtgttctcataggtaatcgggagtggttgagaagaaacggactgacaatctccagcgacgttagtgatgcaatgacagatcacgaaatgaaaggtcaaaccgcaattttggtcgcgatcgatggcgtcctgtgcggaatgattgccatcgcggatgcggtgaagcaggaggcagccttggccgtacatacgctccaatcgatgggagttgacgtcgtgttgatcactggtgataacagaaagaccgcgagagctatcgctacccaggtgggtatcaataaggtcttcgcggaggtcctgccctcacataaggttgctaaagttcaggagctccaaaacaagggcaaaaaggtggctatggttggggacggcgtcaatgacagtccggcgctggcgcaggccgacatgggggtggctatcgggacaggtaccgacgttgcaattgaagcagctgacgtggtgctcatcagaaacgatttgctcgacgtcgtggcgtcgattcatctgtcaaagcgaaccgtcagaaggatacggataaatctcgtcctggcccttatatataacctggtgggcattcccatcgccgcaggggtatttatgcccataggcattgttctacaaccatggatggggtctgctgcaatggctgcgtccagtgtgtccgtggttttgagtagcctgcaacttaaatgttacaaaaagccagatctcgagcggtacgaggcgcaggcacacggtcatatgaaaccgctgaccgctagccaggtgagcgtccatattggtatggatgatagatggagagactccccccgcgctactccgtgggatcaggtgtcttacgtgtctcaagtgtcactgtctagcctgacatctgataagcctagcagacattcagcagccgcggatgacgacggcgacaaatggtcccttcttctcaacggacgtgatgaggagcagtacatttag

SEQ ID NO: 22175 - DNA, 3777 bp, Artificial Sequence
  derived and/or modified sequence
atgcccgagcaggagcgtcagatcaccgcacgagaaggggccagcagaaagattctcagcaagctgtccctgcctacaagagcatgggagccagcaatgaagaaaagtttcgcttttgacaatgtcggatatgaaggaggcctagacggtctgggcccatccagccaggttgcaacatccaccgtccgtattctgggaatgacctgtcagagctgtgttaagtcaatagaggaccggatcagtaatttgaagggtatcattagcatgaaagtcagcttggaacaaggatccgctactgtcaagtacgttccaagtgtggtgtgcctgcagcaagtctgtcaccaaattggggatatgggattcgaggcttccatcgcagaaggcaaagcagcctcctggccatcacgcagcctccccgctcaagaagctgtggtcaagctccgcgttgaaggaatgacctgccaatcttgcgtctctagcatagagggaaaggtgcgaaaactgcagggcgtggtcagggtaaaagtctccttgtccaatcaggaagccgtcataacttaccagccctacctaatacaacccgaggatctgcgagaccacgtgaacgatatgggttttgaagctgcgattaagagtaaagttgcaccactgtcgcttggacctattgatatagaacgcctccagagcaccaaccccaagaggcccctctcttcagcaaatcagaacttcaacaatagtgagaccctgggtcaccaaggaagccacgtcgtaactttgcaattgagaattgatggaatgcactgtaaatcctgtgtgctcaatattgaggaaaatattggccagttgctgggggtccagagcatccaggtctccctggagaataagaccgcacaggttaagtatgacccatcatgcacatctccagtcgcactgcagcgtgccatcgaagcccttccccctggaaactttaaagtctcactgcctgacggagctgaggggtccggtactgatcatcgctccagctctagtcatagccctgggtccccccctcgaaatcaggtgcaaggtacctgttctacgaccctgattgcaatcgccggtatgacatgtgccagctgtgtccactccatagaaggaatgatttcacaactggaaggagttcagcaaatcagcgtctcactggcagagggcacagcgacagtgctctacaatcctagtgtaatcagccccgaagaactgcgtgcagcaatcgaagatatgggtttcgaggcctcagtcgtgagtgagtcatgttcaacaaaccctctaggcaatcacagtgccggtaattccatggtgcagacaaccgatggtacccctacctcagtccaagaagtggcgccacatacagggaggttacccgcaaatcatgcacccgatatattagcgaaatctccccaaagcaccagggccgtcgccccacagaaatgtttccttcagatcaaaggaatgacctgcgcctcatgcgtgtctaacattgagcgaaaccttcagaaagaggcgggagtgttatcggtcctcgtggcactcatggcaggcaaggcagaaattaaatacgatccagaagtaattcagcctctggagatcgcgcagtttattcaggacctggggttcgaagcagccgtgatggaggattatgcagggagtgacggaaatattgagctaacaatcaccggtatgacctgtgcatcctgtgtgcataatatcgaaagcaagttaactagaacaaacggaattacatacgccagcgtggcccttgcaacatcgaaagctttggtgaagttcgacccagagatcatcggcccccgcgatattattaagatcatcgagagcaagacatctgaagccctggcaaaactgatgagcctacaggccaccgaagcaactgtggttaccttaggtgaggataatctgattataagagaagaacaggtaccaatggagctagtacaacggggggatatagttaaagtcgttcccggaggcaaattccctgtcgatggtaaggtgctggaaggaaacactatggccgacgaatcacttattaccggtgaggcaatgcccgtaaccaagaaacctggaagtaccgtaattgccggcagtataaacgcccacggaagtgtcttaatcaaagcaacccatgtggggaatgacaccacactggctcaaatcgtgaagctcgtggaagaagcgcagatgtctaaaaatcccaataagcatatctctcagaccgaagtcataatccgcttcgcttttcagactagtataaccgtcctctgcatcgcatgcccttgctctctcggattagcgacacctaccgcagtgatggtgggcacaggagtagccgcccagaacggaattttaatcaagggaggtaagcccctggagatggctcataagataaaaaccgtaatgtttgacaaaactggtaccattacgcatggagtgcccagagtgatgagagtcctgctgctaggagatgtcgctacactccccctgaggaaggtattagctgtcgtgggaacagcagaggcttcaagcgagcaccccttaggcgtggccgtcaccaaatattgcaaagaggaactggggactgagactttgggctactgcaccgactttcaagcagtcccaggttgtggcataggatgtaaggtctccaatgttgagggcatactcgcccattcagaaagaccgcttagcgctccagcatcccaccttaacgaagccgggtccctgccagcagaaaaagacgccgtgccccagaccttttctgtcctgatcggaaatcgtgaatggctgcgacgcaatggcttaacgatcagcagcgacgtgtcagacgccatgacggatcacgagatgaagggccagaccgctatcctggtggccatcgacggagtgttatgtggtatgattgctatcgctgatgcagtaaaacaggaggccgcactcgccgtacacaccttgcagtctatgggggtggatgtagtgcttattaccggagacaaccgcaagacggcccgagccattgccacacaggtgggaattaataaagtgtttgcagaagtcctgccttcccataaggtcgccaaagtgcaagaattgcaaaacaaagggaagaaagttgcaatggtgggagacggagtaaacgacagccctgcacttgctcaggctgatatgggcgtcgccatcggaactggaactgatgtagctatcgaagccgccgacgttgtgttgattaggaatgacttactcgacgttgttgcatccatccacttatctaagcgaaccgttcggcgcattcgtatcaatctcgtgctggctctcatatacaacttggtcggcatccctatagctgccggagtcttcatgcctataggaatcgtgttacaaccctggatggggtccgccgcaatggctgcttccagtgtgagcgttgtccttagcagcctgcaactcaagtgctacaagaaacccgatctggaaaggtacgaagctcaggcgcacggtcatatgaaacccctaacggctagccaagtgtctgtccacataggtatggacgataggtggagagactccccccgcgctaccccctgggaccaggttagctacgtgtcacaggtctcattatcttctttgacttccgataaaccctctaggcattctgccgcagccgacgacgatggagacaagtggagtctcttactgaatgggcgagatgaagaacagtatatctag

SEQ ID NO: 22176 - RNA, 3777 nt, Artificial Sequence
  derived and/or modified sequence
augccugagcaggaacgacagauuaccgcuagagagggcgcuuccagaaagauccuaaguaagcuaucucugcccaccagggccugggagccugccaugaagaagucguuugccuucgauaaugucgguuacgaaggagggcucgauggccugggcccuagcucgcagguggccacuagcacuguccgcauucucgggaugaccugccagaguugcgucaaaucaauugaagacaggauuucaaauuugaaaggcaucauaaguaugaaaguaagccucgaacagggcagcgcuacagugaaguaugugccaucugucgugugucuacagcaggugugucaucagauuggagauaugggguucgaagccagcauugcagaggguaaagcugcaucauggcccagcaggagccugccagcgcaagaggccguuguaaaguuacgcguggaagggaugacgugucagucuugugugaguucuaucgaaggcaaagugcggaaacugcagggaguugugagagugaaagucuccuuauccaaccaggaggcaguuauuacauaccagcccuaucugauucaaccugaagaccugagggaccacgugaacgacaugggcuucgaggcagccauuaaaagcaaggucgccccacugagucuugggccaauagacaucgaaagacuccaaagcacaaauccaaaacggccgcucucuuccgcaaaucagaacuucaauaacucggaaacccugggccaccagggaagccaugugguuacuuugcagcuccggauugacgguaugcacuguaagagcugcgugcugaacauugaggaaaauaucggacagcuguuaggggugcaaucaauucaggugaguuuggaaaauaagacagcccaggucaaguaugacccuaguuguacaucuccuguggcucugcagagggcuaucgaagcguugccaccagggaacuuuaagguuucauuacccgauggagcagaagguucugguaccgaucauagaucauccagcucacauucucccggaagcccaccucggaaccagguccagggcacuuguagcaccacccuuauagccauugccgguaugacuugcgcuaguuguguucauaguauugaggggaugaucucccagcucgaggggguucagcagauuucugugucucuugcagaagguacagcaacaguacuguauaacccuucugugaucuccccugaggagcugcgggccgccaucgaagacauggguuucgaggcuagcgucguaucugaaagcugcuccaccaauccccugggcaaucacucggcaggaaacaguauggugcaaacaaccgaugggacacccacaagcguacaggaaguggcuccucacaccggccgacugccugccaaccacgcaccagauauuuuggccaagucaccacaguccacucgagcugucgccccacagaagugcuucuuacagauuaaggguaugaccugcgccucaugcguuucgaacauugagagaaaccuucagaaagaagcaggagugcugagcguccuagucgcacuuauggccgguaaggcugaaauuaaguaugaucccgaggugauccaaccucuggaaauugcccaguucauccaggauuuaggauucgaagcggcugugauggaggacuaugccgguagugacgggaacauugaacugacuauuaccgggaugacaugugcaagcugugugcacaacaucgagaguaagcugacccgaaccaauggaauaacuuacgcuagcguggcacuugcuaccuccaaggcucuggucaaguucgaccccgagauuauugggccgcgagacauuauuaaaauuauugagucaaagacaucggaagcccuggcaaagcuuaugucucuccaggcuacagaggcuacugugguuacucugggagaagauaaucucaucaucagagaagagcaaguacccauggagcuggugcaacgaggugacauagucaagguagugcccggggggaaauuucccgucgacggaaaaguguuggaagguaauacuauggcagaugagucucugauaacaggggaagcuaugccgguaacuaagaaaccugguagcacuguuauagcuggaagcaucaacgcccacggcaguguacuuaucaaggcuacccauguggguaacgacacaacucucgcucagauugugaagcugguggaagaggcucaaaugucuaaaaaucccaauaaacauauuucacaaacagaagugaucauccgguucgcuuuccaaaccuccaucacuguguugugcauugccugcccgugcagucuaggcuuagcaacccccaccgccgucaugguuggaaccggaguggcagcccagaauggcauccuaauuaagggcggaaagccucucgaaauggcacauaaaauaaagacugugauguuugacaaaacaggaacaauuacucacggggugcccagagugaugagaguacuccuccucggggacgucgcuacucucccacugcgaaaggucuuggccguuguggggacagccgaggccucgucagagcacccucugggcguugccguuaccaaauauugcaaggaggaacucgguacagaaacucucggguauugcacugacuuucaagccgugccugggugcgggauugggugcaaagugucaaauguugaagggauacucgcccauucggagagaccguuaucugcccccgcuagccaucugaaugaggcaggaucccucccugccgagaaggaugccgugccccagacauucaguguucucauagguaaucgggagugguugagaagaaacggacugacaaucuccagcgacguuagugaugcaaugacagaucacgaaaugaaaggucaaaccgcaauuuuggucgcgaucgauggcguccugugcggaaugauugccaucgcggaugcggugaagcaggaggcagccuuggccguacauacgcuccaaucgaugggaguugacgucguguugaucacuggugauaacagaaagaccgcgagagcuaucgcuacccagguggguaucaauaaggucuucgcggagguccugcccucacauaagguugcuaaaguucaggagcuccaaaacaagggcaaaaagguggcuaugguuggggacggcgucaaugacaguccggcgcuggcgcaggccgacauggggguggcuaucgggacagguaccgacguugcaauugaagcagcugacguggugcucaucagaaacgauuugcucgacgucguggcgucgauucaucugucaaagcgaaccgucagaaggauacggauaaaucucguccuggcccuuauauauaaccuggugggcauucccaucgccgcagggguauuuaugcccauaggcauuguucuacaaccauggauggggucugcugcaauggcugcguccaguguguccgugguuuugaguagccugcaacuuaaauguuacaaaaagccagaucucgagcgguacgaggcgcaggcacacggucauaugaaaccgcugaccgcuagccaggugagcguccauauugguauggaugauagauggagagacuccccccgcgcuacuccgugggaucaggugucuuacgugucucaagugucacugucuagccugacaucugauaagccuagcagacauucagcagccgcggaugacgacggcgacaaauggucccuucuucucaacggacgugaugaggagcaguacauuuag

SEQ ID NO: 22177 - RNA, 3777 nt, Artificial Sequence
  derived and/or modified sequence
augcccgagcaggagcgucagaucaccgcacgagaaggggccagcagaaagauucucagcaagcugucccugccuacaagagcaugggagccagcaaugaagaaaaguuucgcuuuugacaaugucggauaugaaggaggccuagacggucugggcccauccagccagguugcaacauccaccguccguauucugggaaugaccugucagagcuguguuaagucaauagaggaccggaucaguaauuugaaggguaucauuagcaugaaagucagcuuggaacaaggauccgcuacugucaaguacguuccaaguguggugugccugcagcaagucugucaccaaauuggggauaugggauucgaggcuuccaucgcagaaggcaaagcagccuccuggccaucacgcagccuccccgcucaagaagcuguggucaagcuccgcguugaaggaaugaccugccaaucuugcgucucuagcauagagggaaaggugcgaaaacugcagggcguggucaggguaaaagucuccuuguccaaucaggaagccgucauaacuuaccagcccuaccuaauacaacccgaggaucugcgagaccacgugaacgauauggguuuugaagcugcgauuaagaguaaaguugcaccacugucgcuuggaccuauugauauagaacgccuccagagcaccaaccccaagaggccccucucuucagcaaaucagaacuucaacaauagugagacccugggucaccaaggaagccacgucguaacuuugcaauugagaauugauggaaugcacuguaaauccugugugcucaauauugaggaaaauauuggccaguugcuggggguccagagcauccaggucucccuggagaauaagaccgcacagguuaaguaugacccaucaugcacaucuccagucgcacugcagcgugccaucgaagcccuucccccuggaaacuuuaaagucucacugccugacggagcugagggguccgguacugaucaucgcuccagcucuagucauagcccugggucccccccucgaaaucaggugcaagguaccuguucuacgacccugauugcaaucgccgguaugacaugugccagcuguguccacuccauagaaggaaugauuucacaacuggaaggaguucagcaaaucagcgucucacuggcagagggcacagcgacagugcucuacaauccuaguguaaucagccccgaagaacugcgugcagcaaucgaagauauggguuucgaggccucagucgugagugagucauguucaacaaacccucuaggcaaucacagugccgguaauuccauggugcagacaaccgaugguaccccuaccucaguccaagaaguggcgccacauacagggagguuacccgcaaaucaugcacccgauauauuagcgaaaucuccccaaagcaccagggccgucgccccacagaaauguuuccuucagaucaaaggaaugaccugcgccucaugcgugucuaacauugagcgaaaccuucagaaagaggcgggaguguuaucgguccucguggcacucauggcaggcaaggcagaaauuaaauacgauccagaaguaauucagccucuggagaucgcgcaguuuauucaggaccugggguucgaagcagccgugauggaggauuaugcagggagugacggaaauauugagcuaacaaucaccgguaugaccugugcauccugugugcauaauaucgaaagcaaguuaacuagaacaaacggaauuacauacgccagcguggcccuugcaacaucgaaagcuuuggugaaguucgacccagagaucaucggcccccgcgauauuauuaagaucaucgagagcaagacaucugaagcccuggcaaaacugaugagccuacaggccaccgaagcaacugugguuaccuuaggugaggauaaucugauuauaagagaagaacagguaccaauggagcuaguacaacggggggauauaguuaaagucguucccggaggcaaauucccugucgaugguaaggugcuggaaggaaacacuauggccgacgaaucacuuauuaccggugaggcaaugcccguaaccaagaaaccuggaaguaccguaauugccggcaguauaaacgcccacggaagugucuuaaucaaagcaacccauguggggaaugacaccacacuggcucaaaucgugaagcucguggaagaagcgcagaugucuaaaaaucccaauaagcauaucucucagaccgaagucauaauccgcuucgcuuuucagacuaguauaaccguccucugcaucgcaugcccuugcucucucggauuagcgacaccuaccgcagugauggugggcacaggaguagccgcccagaacggaauuuuaaucaagggagguaagccccuggagauggcucauaagauaaaaaccguaauguuugacaaaacugguaccauuacgcauggagugcccagagugaugagaguccugcugcuaggagaugucgcuacacucccccugaggaagguauuagcugucgugggaacagcagaggcuucaagcgagcaccccuuaggcguggccgucaccaaauauugcaaagaggaacuggggacugagacuuugggcuacugcaccgacuuucaagcagucccagguuguggcauaggauguaaggucuccaauguugagggcauacucgcccauucagaaagaccgcuuagcgcuccagcaucccaccuuaacgaagccgggucccugccagcagaaaaagacgccgugccccagaccuuuucuguccugaucggaaaucgugaauggcugcgacgcaauggcuuaacgaucagcagcgacgugucagacgccaugacggaucacgagaugaagggccagaccgcuauccugguggccaucgacggaguguuaugugguaugauugcuaucgcugaugcaguaaaacaggaggccgcacucgccguacacaccuugcagucuauggggguggauguagugcuuauuaccggagacaaccgcaagacggcccgagccauugccacacaggugggaauuaauaaaguguuugcagaaguccugccuucccauaaggucgccaaagugcaagaauugcaaaacaaagggaagaaaguugcaauggugggagacggaguaaacgacagcccugcacuugcucaggcugauaugggcgucgccaucggaacuggaacugauguagcuaucgaagccgccgacguuguguugauuaggaaugacuuacucgacguuguugcauccauccacuuaucuaagcgaaccguucggcgcauucguaucaaucucgugcuggcucucauauacaacuuggucggcaucccuauagcugccggagucuucaugccuauaggaaucguguuacaacccuggaugggguccgccgcaauggcugcuuccagugugagcguuguccuuagcagccugcaacucaagugcuacaagaaacccgaucuggaaagguacgaagcucaggcgcacggucauaugaaaccccuaacggcuagccaagugucuguccacauagguauggacgauagguggagagacuccccccgcgcuacccccugggaccagguuagcuacgugucacaggucucauuaucuucuuugacuuccgauaaacccucuaggcauucugccgcagccgacgacgauggagacaaguggagucucuuacugaaugggcgagaugaagaacaguauaucuag

SEQ ID NO: 22178 - protein, 278 aa, Artificial Sequence
  derived and/or modified sequence
MGCCGCSGGCGSSCGGCGSGCGGCGSGCGGCGSGCGGSGSSCCVPVCCCKPVCCRVPTCSCSSCGKGGCGSSGGSKGGCGSCGGCKGGCGSCGGSKGGCGSCGGSKGGCGSCGGSKGGCGSGCGGCGSSCCVPVCCCKPMCCCVPACSCSSCGKGGCGSCGCSKGACGSCGGSKGGCGSCGGCKGGCGSCGGSKGGCGSGCGGCGSGCGVPVCCCSCSSCGSCAGSKGGCGSSCSQCSCCKPCCCSSGCGSSCCQSSCCKPCCSQSSCCVPVCCQCKI

SEQ ID NO: 22179 - DNA, 546 bp, Artificial Sequence
  derived and/or modified sequence
atgaggcccagcggcacctgtgccagctgtggcagtgaccccccaccacccacccaggtgcccagcagcagaaatgactgtggcagcacagtgcctgacaacccctttgtgaggaccctgccccacaccaccatgagcggccaccagctgcccccagctggcacccagaggcctggccctgctgcctgcctggtgcccggcagcctgcccagcctgcccagccagcccggcccctggggcgccctgggcacagctgctgctgagggcatgagctgcagcaacaccaggacagccctggagtttgccctcttccccaaggagatgctgctgggctcctggtacggctggggcctgagcctgtaccgccggggccgctgccaggacagcgcccaccctgaggaggacacctgcccccatggagagggcgccccagcccaggccggggagagcgtgcccagccagcagctgtgccaccaccctgctggcaactggggcggcctgtactgggtgattggcaaggccttcagcctggcctggaactgctag

SEQ ID NO: 22180 - DNA, 831 bp, Artificial Sequence
  derived and/or modified sequence
atgttggacggcaattctggcctgagctctgagaagatatcacacaatccctggagcctgcggtgccacaaacaacaactgagtagaatgcgctcagaatccaaggaccggaagctgtacaagttcctgctactggagaacgtcgtccaccacttcaaatatccatgtgtgctggatctgaaaatgggcactcgccagcacggcgatgatgcaagtgctgagaaggctgcgcgccagatgaggaagtgtgaacagtccacctccgcaacattaggggtccgcgtgtgcggcatgcaagtttatcagctggatactgggcactacctgtgccggaacaaatactatggtagaggactctcaatagagggcttccgcaacgcgctgtaccagtacttgcacaatgggctggatctcaggagggatctgtttgagcccatcctgtcgaaactgagggggctgaaggcggtcttagagagacaggcgtcttacaggttttatagtagctcgttactcgtgatctatgacggcaaggagtgtcgagcagaatcatgtttagacaggcgctctgagatgcgcctgaaacatttggacatggtgttacctgaagtggcctcctcatgcggtccgtctacatcaccaagcaacacatcgcccgaagcaggaccatcctcccagccaaaagttgacgtgcgcatgatagattttgcccactcaacctttaaaggctttagggatgatcctacagtccatgatggcccagatagaggctatgttttcgggcttgagaacttaatctccatcatggaacaaatgcgagacgagaaccaatag

SEQ ID NO: 22181 - DNA, 831 bp, Artificial Sequence
  derived and/or modified sequence
atgctagacggcaacagtggcttgtccagcgagaagatctcacataacccctggagcctcagatgtcataagcaacagttgtcccgaatgaggagcgagtcaaaggataggaaactgtacaagttcctgctcctggagaatgtcgttcatcatttcaagtacccctgcgtgctcgacctgaagatgggcacgcgacagcacggtgacgacgcgtccgccgaaaaggccgctcggcagatgagaaagtgcgaacagagtacttctgccaccttaggcgtcagggtgtgcggaatgcaggtgtatcagctggacacagggcattacctgtgtcgaaacaaatactatgggagaggcctgtctatcgaaggcttcagaaatgctctttaccagtacttgcacaacgggctggatcttagaagagatctgttcgaaccaatcttgtctaaacttaggggtctcaaggctgtgctcgaacgacaggccagctatcgattttattctagctccctgctggtgatatatgatggcaaagagtgccgagccgagagctgtctggaccgccgaagcgagatgcgtctgaagcatctggacatggtgctcccagaggtcgcctctagctgtggcccatcaacttccccctctaacaccagcccggaagctggtcctagcagccaaccaaaggtggatgtgcggatgatagacttcgcgcattccacttttaaaggttttagggatgacccgactgtacatgatgggcccgatcgggggtatgtgtttgggctcgaaaatcttatttctattatggaacaaatgagggatgaaaatcagtag

SEQ ID NO: 22182 - DNA, 831 bp, Artificial Sequence
  derived and/or modified sequence
atgctggatggcaacagcggcctgagcagcgagaagatcagccacaacccctggagcctgcgctgccacaagcagcagctgagcaggatgaggtctgagagcaaggacaggaagctgtacaagttcctgctgctggagaatgtggtgcaccacttcaagtacccctgtgtgctggacctgaagatgggcacccggcagcacggagatgatgccagcgctgagaaggccgcccggcagatgaggaaatgtgagcagagcaccagcgccaccctgggcgtgcgggtgtgtggcatgcaggtgtaccagctggacaccggccactacctgtgcaggaacaagtactacggccggggcctgagcattgagggcttcagaaatgccctgtaccagtacctgcacaacggcctggacctgcggcgggacctgtttgagcccatcctgagcaagctgcggggcctgaaggctgtgctggagcggcaggccagctaccgcttctacagcagcagcctgctggtgatctatgatggcaaggagtgcagagctgagagctgcctggacagaagaagtgagatgaggctgaagcacctggacatggtgctgcctgaggtggccagcagctgtggccccagcaccagccccagcaacaccagccctgaggccggccccagcagccagcccaaggtggatgtgaggatgattgactttgcccacagcaccttcaagggcttcagagatgaccccaccgtgcatgatggccctgaccggggctacgtgtttggcctggagaacctgatcagcatcatggagcagatgagagatgagaaccagtag

SEQ ID NO: 22183 - DNA, 831 bp, Artificial Sequence
  derived and/or modified sequence
atgctggacggcaacagcggcctgagcagcgagaagatcagccacaacccatggtctctgcgttgccacaaacaacagctgagcaggatgagatcggagtctaaagatcggaagttgtataaatttctcctgctggagaatgtggtccaccacttcaagtacccgtgcgtgctagatttgaagatgggcactcgccagcacggggacgatgcctcagctgagaaggcggccaggcagatgaggaaatgtgagcaatcaacctccgcaaccctgggagtgcgagtgtgcggaatgcaggtctatcaactagacacaggacattacctgtgtcggaacaaatactatggaagggggctgagcatagagggcttccgtaacgccctctaccaatatctgcacaacggtctcgatctgcggagggatttgttcgagcctatcctatctaagctgagggggctaaaggcagttctggagcgacaggcctcttatcgcttctactccagcagtttattggttatctacgacggcaaagaatgtcgagcggagtcctgcttggataggcggagtgagatgagactaaagcatctggacatggtcctcccagaggtcgcctcatcttgcggtcctagtacttcaccaagcaatacaagccccgaagctgggcctagttctcagccaaaagtggacgtacggatgatcgattttgcacattcaaccttcaaaggcttcagagacgatccaactgtccatgatggccccgaccgaggttacgtcttcggtttggagaatttgattagcattatggagcagatgcgggacgagaatcagtag

SEQ ID NO: 22184 - DNA, 831 bp, Artificial Sequence
  derived and/or modified sequence
atgctggacggcaacagcggcctgagcagcgagaagatcagccacaacccatggagcctcaggtgtcacaagcaacaactttcgaggatgcgctcggaaagcaaagaccgcaagctgtacaagttcctacttctcgagaatgtggtccaccacttcaagtatccctgcgttctggaccttaaaatgggtactcgtcagcacggcgacgatgctagtgccgagaaggccgcaaggcagatgagaaagtgcgaacagagcacctctgcgacactcggagtgagggtgtgcggaatgcaggtgtatcaattagatacgggacactacttgtgccgaaataagtactacgggcgcggcctgtctattgaagggtttaggaacgcactgtatcaatatctgcacaatggcctggacctccggcgggacctgttcgagccaatactgtccaagttacgggggcttaaagcggtgctggagaggcaggctagctaccgtttctactcttcaagcctgctggtcatatacgatggaaaggagtgccgagccgagagctgcctcgatcgccggagtgaaatgcgactaaagcatctggacatggtgttgcccgaagtcgcgagctcatgcggcccctctacctctcccagtaacacatccccagaggcaggaccatcgtcacaaccaaaagtcgacgtacggatgatcgacttcgctcactctacatttaaaggattcagagatgaccctaccgtacatgatggcccagatcgaggatacgtgttcggccttgagaacttgatctctatcatggagcaaatgcgagatgagaaccaatag

SEQ ID NO: 22185 - DNA, 831 bp, Artificial Sequence
  derived and/or modified sequence
atgttagatggtaatagtggcttgtcatctgaaaagatctcacacaacccgtggtctctgcgttgccacaagcaacagctgtcccggatgcgctcagaatcaaaagatcgaaagctgtacaagttcctcctgcttgagaatgtggttcatcacttcaaatacccatgcgtcctggatctgaagatgggaactagacagcacggggacgacgcctcagccgaaaaagccgcaagacaaatgagaaagtgcgaacagtccacatcagccactctcggagtacgggtctgcggcatgcaggtgtatcagttggatacaggtcactacctttgtcggaacaaatattacggcagaggcctgagtatcgaggggttccgtaatgccctatatcagtacctccataacgggttggacctcagaagggacctgttcgagcctattctctccaaactgcggggactcaaggccgttctcgagagacaagcctcctatcgattctacagctcatccttattagtgatctacgatggcaaggaatgcagggcagagagttgcttggatagaaggtccgagatgaggttaaaacatttggacatggtgcttcccgaggtcgcatcctcatgcgggccttctaccagcccttcgaatacctcgcctgaagccggtccatcctcacagcccaaggtggatgtccggatgatcgacttcgcccactctaccttcaaagggttccgagacgaccctaccgtccacgatggacccgaccggggatacgtgtttggcttagagaatctcatctctataatggagcagatgagagatgagaatcagtag

SEQ ID NO: 22186 - DNA, 831 bp, Artificial Sequence
  derived and/or modified sequence
atgctggacggcaattccgggctctcttcagagaagattagtcacaatccttggtcgttgcgctgtcacaaacagcagctgagccgaatgagatccgaatcgaaagacagaaaactgtataagttcctgcttctggaaaatgtcgtccaccatttcaagtacccatgcgtattggacttaaaaatgggaacccggcagcatggcgacgacgcctccgcggagaaggccgcacgacagatgaggaagtgtgaacaatctacatctgcaaccttgggcgtgagggtatgcggaatgcaggtctaccaactagatacgggtcattacctctgtaggaacaagtactacggtagaggcctgtctatcgagggcttccggaacgccctgtaccagtacttgcacaacggcctggatttgcgccgagacttattcgaacccattctgtctaaacttcgcggtttgaaggccgttttggagagacaagccagctatcgcttttatagctcctctctgttggtcatctatgacggtaaagagtgccgtgccgagtcgtgcttagaccggagatccgaaatgcgactgaagcatctggatatggttctccctgaggttgcaagtagttgcggcccatctactagcccgtcaaatacctcccctgaagctggaccctcctcccagccgaaagtggacgtccgcatgattgattttgctcactccacctttaagggcttcagggatgaccctactgtccacgatgggcctgatcgaggctacgttttcggcttagagaacctcatctctatcatggagcagatgcgggacgagaatcagtag

SEQ ID NO: 22187 - DNA, 831 bp, Artificial Sequence
  derived and/or modified sequence
atgctggacggcaacagcggcctgagcagcgagaagatcagccacaacccctggagcctgagatgccacaagcagcagctgagcagaatgagaagcgagagcaaggacagaaagctgtacaagttcctgctgctggagaacgtggtgcaccacttcaagtacccctgcgtgctggacctgaagatgggcaccagacagcacggcgacgacgccagcgccgagaaggccgccagacagatgagaaagtgcgagcagagcaccagcgccaccctgggcgtgagagtgtgcggcatgcaggtgtaccagctggacaccggccactacctgtgcagaaacaagtactacggcagaggcctgagcatcgagggcttcagaaacgccctgtaccagtacctgcacaacggcctggacctgagaagagacctgttcgagcccatcctgagcaagctgagaggcctgaaggccgtgctggagagacaggccagctacagattctacagcagcagcctgctggtgatctacgacggcaaggagtgcagagccgagagctgcctggacagaagaagcgagatgagactgaagcacctggacatggtgctgcccgaggtggccagcagctgcggccccagcaccagccccagcaacaccagccccgaggccggccccagcagccagcccaaggtggacgtgagaatgatcgacttcgcccacagcaccttcaagggcttcagagacgaccccaccgtgcacgacggccccgacagaggctacgtgttcggcctggagaacctgatcagcatcatggagcagatgagagacgagaaccagtag

SEQ ID NO: 22188 - protein, 1302 aa, Artificial Sequence
  derived and/or modified sequence
MTTKRSLFVRLVPCRCLRGEEETVTTLDYSHCSLEQVPKEIFTFEKTLEELYLDANQIEELPKQLFNCQSLHKLSLPDNDLTTLPASIANLINLRELDVSKNGIQEFPENIKNCKVLTIVEASVNPISKLPDGFSQLLNLTQLYLNDAFLEFLPANFGRLTKLQILELRENQLKMLPKTMNRLTQLERLDLGSNEFTEVPEVLEQLSGLKEFWMDANRLTFIPGFIGSLKQLTYLDVSKNNIEMVEEGISTCENLQDLLLSSNSLQQLPETIGSLKNITTLKIDENQLMYLPDSIGGLISVEELDCSFNEVEALPSSIGQLTNLRTFAADHNYLQQLPPEIGSWKNITVLFLHSNKLETLPEEMGDMQKLKVINLSDNRLKNLPFSFTKLQQLTAMWLSDNQSKPLIPLQKETDSETQKMVLTNYMFPQQPRTEDVMFISDNESFNPSLWEEQRKQRAQVAFECDEDKDEREAPPREGNLKRYPTPYPDELKNMVKTVQTIVHRLKDEETNEDSGRDLKPHEDQQDINKDVGVKTSESTTTVKSKVDEREKYMIGNSVQKISEPEAEISPGSLPVTANMKASENLKHIVNHDDVFEESEELSSDEEMKMAEMRPPLIETSINQPKVVALSNNKKDDTKETDSLSDEVTHNSNQNNSNCSSPSRMSDSVSLNTDSSQDTSLCSPVKQTHIDINSKIRQEDENFNSLLQNGDILNSSTEEKFKAHDKKDFNLPEYDLNVEERLVLIEKSVDSTATADDTHKLDHINMNLNKLITNDTFQPEIMERSKTQDIVLGTSFLSINSKEETEHLENGNKYPNLESVNKVNGHSEETSQSPNRTEPHDSDCSVDLGISKSTEDLSPQKSGPVGSVVKSHSITNMEIGGLKIYDILSDNGPQQPSTTVKITSAVDGKNIVRSKSATLLYDQPLQVFTGSSSSSDLISGTKAIFKFDSNHNPEEPNIIRGPTSGPQSAPQIYGPPQYNIQYSSSAAVKDTLWHSKQNPQIDHASFPPQLLPRSESTENQSYAKHSANMNFSNHNNVRANTAYHLHQRLGPARHGEMWAISPNDRLIPAVTRSTIQRQSSVSSTASVNLGDPGSTRRAQIPEGDYLSYREFHSAGRTPPMMPGSQRPLSARTYSIDGPNASRPQSARPSINEIPERTMSVSDFNYSRTSPSKRPNARVGSEHSLLDPPGKSKVPRDWREQVLRHIEAKKLEKIRVRVEKDPELGFSISGGVGGRGNPFRPDDDGIFVTRVQPEGPASKLLQPGDKIIQANGYSFINIEHGQAVSLLKTFQNTVELIIVREVSS

SEQ ID NO: 22189 - DNA, 3909 bp, Artificial Sequence
  derived and/or modified sequence
atgaccactaaaagatcactgttcgtaaggctggtaccgtgcaggtgccttcgcggcgaagaggagactgtgacgacactggattatagccactgttctttggaacaggtgcccaaagagatcttcacattcgagaaaaccctggaggagctgtatttggacgctaatcaaatcgaggagcttccaaagcagctttttaattgccagtctttgcataaactgtcacttcccgataatgatctgaccactctccccgccagcatcgccaatctaattaaccttcgggaattagacgttagcaaaaacggaatccaagaattccccgagaatatcaagaattgcaaggtgctaacaatcgttgaagctagcgtcaaccctattagcaaattgccagacggcttttctcaactactaaatttaactcagttgtatttaaacgacgccttcctcgagttcctacctgctaactttggtcgactgaccaagttgcagattctggagctgagggagaatcagctgaaaatgctccccaaaacgatgaatcgcctgacacagctggagcggttagatctcgggagtaacgaatttacagaagtgccagaggtcctagaacagctctccggtcttaaggagttttggatggacgcaaacagattgacatttatcccgggcttcatcggctccttaaagcagctgacctacctagatgtaagcaaaaataacatcgagatggtggaggaggggatcagcacctgcgagaatctacaggacttattgctgtcttccaacagcctgcagcagctgccggagactatcggctccttgaaaaacattaccacactgaagattgacgaaaatcagctcatgtatctcccagatagcatcggtgggctgatatccgtcgaggaacttgactgctctttcaatgaggttgaggcgctcccatcctctattggacagctcactaatctgagaacctttgctgccgaccataactatctccaacaacttcccccagagattggctcctggaagaatatcaccgtgttatttttgcacagcaacaagctggaaactctgccggaggagatgggtgacatgcaaaagctcaaagtgatcaatttgagtgacaataggctgaaaaacttgccctttagctttacaaagctgcaacaactgaccgccatgtggctctccgataaccaatcaaagcccctcatacccctccagaaagaaacagactctgaaactcagaagatggttttgaccaattacatgtttccacaacaacctcgtactgaggatgtgatgtttatcagcgacaacgagagctttaatcctagcctgtgggaagaacagagaaaacaaagagcccaggttgcattcgagtgcgatgaggataaggacgagagggaagctcctccaagggaaggcaacctgaagagatacccaacaccttatccagacgagctaaaaaacatggtcaagactgtacagacaattgtgcatcgcttaaaggacgaagagacgaatgaagactccggccgcgatttgaaacctcacgaggaccagcaggacatcaacaaggatgtaggcgtgaaaacttctgaaagcacaaccacagtcaagagtaaggtcgacgagagagagaagtacatgattggcaactcagtgcaaaaaatctcagaaccggaggccgaaatttctcccggatcactgccagtgactgcaaacatgaaggcctcagaaaaccttaagcacattgtgaatcacgacgatgtcttcgaagaatctgaggaactaagctccgacgaggagatgaaaatggccgaaatgcggccccctctgatcgagacaagcataaatcagcccaaagtggtcgcgctgtcaaacaataaaaaagacgacacaaaggagacagactccctcagtgatgaggtcacccataattcaaaccagaacaactctaactgtagctctccgagccggatgtccgactccgtcagcctgaacactgacagcagccaggacactagcctgtgttcacctgtcaagcagactcatatcgacatcaatagcaaaatccggcaggaggatgagaatttcaatagtttgcttcaaaacggtgacatactgaacagctctactgaggagaagttcaaagcccatgacaagaaggatttcaaccttcccgaatacgacctcaatgtggaagaacgcctggtcctaatcgagaagagcgtcgacagtacggccactgcagatgacactcataagctggaccacatcaacatgaatctgaacaagctgattaccaacgatacgtttcaacccgagatcatggagcggtcgaagacccaggatatagtcctcggtacgagtttccttagcataaatagtaaagaggaaaccgagcacctcgagaacggcaataagtacccaaacctcgaatctgtgaacaaggtcaacggtcatagcgaagagacatctcagagccctaaccggactgagccacatgactctgattgtagtgtggacctagggatttccaaatccacagaagatctgtcaccccagaagagtggaccagtgggtagcgtggtgaagtcccattccatcactaacatggagattggcggccttaagatctatgacattttgagcgacaacggcccacagcagccaagtactaccgtgaaaatcacaagtgcagtggacgggaaaaatatcgtgcggtccaagtctgctacactgctgtacgatcaacctttgcaggtgttcacaggcagttcaagttcaagcgacctaattagtgggaccaaggcaatcttcaagtttgattccaatcataaccccgaggagcctaatataatccgtgggcctaccagcgggccacaatcagctccccagatttatggacccccgcaatacaatattcaatattcctcgtccgctgcagtgaaggacaccctgtggcacagcaagcagaacccacagatcgaccacgcctcttttcccccccagctacttcctcgaagtgaatctaccgaaaatcagagctacgcgaaacacagtgctaatatgaacttttctaaccacaacaacgtgagagctaatacagcctaccacctccaccagcgcctcggccccgccaggcatggggaaatgtgggccatatctcctaatgatcgcctgattccggcagttacacggagcaccatacagcggcagtcctccgtttcaagcacagcatcagttaaccttggagaccctggctcaacccgtcgcgcccagattcccgagggcgactacctatcctatcgggaattccactctgcagggaggactccacctatgatgccagggtcccaaagacctttatccgccagaacctattccatcgatggccctaatgcctcccggccccagtcagctcgacccagcatcaatgaaattcccgagcggacaatgagcgtgtctgactttaactactctagaacatctccatcaaagaggcccaatgccagagtcgggtcagagcactcactgctagatccaccaggaaagtcaaaggtaccccgcgattggcgcgagcaggtcctgcgccacattgaggctaagaaactcgaaaaaatccgtgtgagggtggagaaggatcccgaactgggcttctcgatcagcggaggcgtgggcgggcgtgggaatccttttcggcctgatgatgacggcattttcgtcactcgagtgcagccagagggccctgcctcaaagctgctacagccgggtgataaaattattcaagctaacggttattcattcattaacatcgagcacggccaggccgtgagtttgctgaagacattccagaacaccgtggaattaattatcgtccgcgaggtaagttcttag

SEQ ID NO: 22190 - DNA, 3909 bp, Artificial Sequence
  derived and/or modified sequence
atgaccacgaagcgcagtctattcgtgcgcctggttccctgtaggtgtctacgaggagaggaagaaacagtgaccacccttgattattcccactgcagcctcgaacaggtgcctaaggagatttttacgttcgagaaaaccctggaggagctgtacctggatgcaaatcagattgaagaactgccaaaacagctctttaactgccagtccctgcataagctgtcactgcccgataacgatcttactaccctcccggccagtattgctaatctcattaacctcagagagcttgatgtgtcgaagaacgggatccaagaattccctgagaacatcaaaaattgcaaagttctgaccattgtggaggccagtgtgaatccgatctccaagctgcccgacgggttttctcagctgctgaatctaacgcaactttatctaaacgatgcctttctggagtttctcccagccaactttggaaggctgacaaagttacagatcctggaactgcgtgaaaaccagctaaaaatgttgcccaaaacaatgaataggctcactcaactggagaggctcgatttgggcagcaacgaattcaccgaggttcctgaggtcttagagcaactctctggcctgaaagagttctggatggacgctaacaggctcactttcatcccgggcttcatagggagcctgaaacaactcacctacctcgacgtgagcaaaaataatattgaaatggtagaggaggggatctcaacgtgcgagaatctccaggatctcctgctgagcagtaatagcctccagcagctgccagagacaatcgggtccctgaaaaacataacgacactgaagattgatgagaatcagctgatgtacctgccagattccattggaggcctcataagtgtggaagagctggactgctctttcaatgaagtcgaggctcttcccagttcaatagggcaactgactaatctgagaacctttgcagccgaccataattatttacagcagctgccccccgagatcggcagttggaagaacattacagtgttgtttctgcactcaaacaagctggagaccctgcccgaggaaatgggggacatgcaaaagctgaaggtgatcaacctcagtgacaaccgcctcaagaacctccctttctctttcacgaagttacagcagctaaccgcgatgtggttgtccgataaccaaagtaagccgttgattccgctccagaaagagacggactccgagacacagaaaatggttctgactaactacatgttcccccagcagcccagaaccgaggacgtcatgttcatctccgataatgagtccttcaaccccagcctgtgggaagaacagaggaaacagagggctcaggttgcctttgagtgtgacgaggataaggatgaacgagaagctccacctagggagggtaacctaaaacgctaccccaccccctatcccgatgagctgaagaatatggtaaaaaccgtgcagaccatagtccatcggctaaaagatgaggagactaacgaggactccggacgtgatctgaagccccacgaagaccagcaggatataaacaaggacgtgggggtcaagacatcagagagcaccaccacggttaaaagcaaggttgatgagcgggagaagtacatgattggtaattccgtccagaagatatcagagcccgaagctgagatttctcctggcagcctgcctgtgaccgccaacatgaaggcatccgaaaatcttaagcacattgtgaaccacgacgacgtgttcgaggagtccgaggaattgagttccgatgaggagatgaaaatggctgaaatgaggccaccgcttatcgagacaagcatcaatcagcctaaagtcgtggctctcagcaacaacaaaaaggacgacacgaaagaaaccgactcactttcggatgaagtgacccacaacagcaatcagaacaacagtaattgcagttcccctagtcggatgtctgatagcgtgagtctgaacacagatagctctcaggatacctctttgtgctcacccgtgaagcagacgcacatcgacatcaactcgaagattagacaggaggatgagaacttcaactcattgttacagaacggcgacattctgaacagttccacagaggagaaatttaaggcccacgataagaaggactttaacctgcccgagtatgatctgaacgtggaggaacgcctcgtgctgatcgaaaagagcgttgactcaaccgccactgctgacgacacgcacaagctggatcatatcaacatgaacttgaacaagttgatcaccaatgatacctttcaaccagagataatggaaaggagtaagactcaggatatagtactgggcacgtccttcttgagtatcaattcaaaggaggaaacggaacaccttgagaatggcaataagtacccaaacctggaatcggtgaacaaggtgaacggacactcagaagaaaccagccagagtcctaatcggaccgaaccacacgactcagattgttcagtcgatctgggtataagcaaatccacagaggacctgtccccccagaaatcaggcccagttggctccgttgtgaaatctcattccattaccaatatggaaatcggaggactcaagatttatgacatacttagcgacaacggcccgcagcaaccctctacaacagtgaagatcacaagcgcggtcgacgggaagaatattgtgcgatcaaaatcagcgaccctgctgtacgatcaacccttacaggtcttcacaggaagctcgtcaagttccgacctgatctcgggaaccaaggcgatcttcaagtttgacagcaaccacaaccccgaggaaccgaatatcattcggggacctacatctggaccacagagcgcaccccagatctatggtcccccacagtataatatacagtactccagcagcgctgcggtcaaggacaccttgtggcacagcaagcagaatccacagatagatcatgcgtcgttccccccgcaactcctacctcgaagcgagtcaaccgagaatcagagttacgctaaacacagcgcgaacatgaatttctcgaatcataacaacgttagagccaacaccgcataccacttgcaccagcgccttggaccagccagacacggagaaatgtgggcaatttctcccaatgatagactgattccagcagtgacacgatcaacaattcagaggcagtcttcagtcagtagcaccgcatcagtaaacctcggcgatcccgggagcacgcgacgagcacagatccctgagggggattatttgtcatacagggaatttcacagtgcaggcagaacacctccaatgatgcccggcagtcagcgcccactcagcgctagaacctacagcattgacggacctaatgccagtcgcccccagtcagctaggccgagcataaatgaaattcccgagaggaccatgtcagtttcagacttcaattattccagaaccagtccatctaaacgccccaatgccagggtcgggagcgaacacagccttctcgatcctcctggtaagtccaaagtgcccagggattggcgagagcaggtgttaagacacatcgaagcgaagaagctggagaagatccgcgtgcgagttgaaaaagacccagagctcggatttagtataagtggcggcgtgggcgggagagggaacccttttagaccagacgacgacggaatattcgtcaccagggtccagccagaagggcccgcaagcaagcttctccagcctggcgacaaaataatccaagctaatggctacagctttattaacattgagcacggccaggctgtctctctccttaaaacctttcaaaatacggttgaactcattatcgtcagggaggtgtctagctag

SEQ ID NO: 22191 - DNA, 3909 bp, Artificial Sequence
  derived and/or modified sequence
atgaccaccaagaggagcctgtttgtgcggctggtgccctgccgctgcctgcggggggaggaggagaccgtgaccaccctggactacagccactgcagcctggagcaggtgcccaaggagatcttcacctttgagaagaccctggaggagctgtacctggatgccaaccagatcgaggagctgcccaagcagctgttcaactgccagagcctgcacaagctgagcctgcctgacaatgacctgaccaccctgcctgccagcatcgccaacctgatcaacctgcgggagctggatgtgtccaagaatggcatccaggagttccctgagaacatcaagaactgcaaggtgctgaccatcgtggaggcctctgtgaaccccatcagcaagctgcctgatggcttcagccagctgctgaacctgacccagctgtacctgaatgatgccttcctggagttcctgcctgccaactttggccgcctgaccaagctgcagatcctggagctgcgggagaaccagctgaagatgctgcccaagaccatgaaccggctgacccagctggagcggctggacctgggcagcaatgagttcacagaggtgcctgaggtgctggagcagctgagcggcctgaaggagttctggatggatgccaaccggctgaccttcatccctggcttcatcggcagcctgaagcagctgacctacctggatgtgtccaagaacaacatcgagatggtggaggagggcatcagcacctgtgagaacctgcaggacctgctgctgagcagcaacagcctgcagcagctgcctgagaccatcggcagcctgaagaacatcaccaccctgaagattgatgagaaccagctgatgtacctgcctgacagcattggaggcctcatctctgtggaggagctggactgcagcttcaatgaggtggaggccctgcccagcagcatcggccagctgaccaacctgcggacctttgctgctgaccacaactacctgcagcagctgcccccagaaattggctcctggaagaacatcaccgtgctcttcctgcacagcaacaagctggagaccctgcctgaggagatgggagacatgcagaagctgaaggtgatcaacctgagtgacaaccggctgaagaacctgcccttctccttcaccaagctgcagcagctgacagccatgtggctgagtgacaaccagagcaagcccctcatccccctgcagaaggagacagattctgagacccagaagatggtgctgaccaactacatgttcccccagcagcccaggacagaagatgtgatgttcatcagtgacaatgaaagcttcaaccccagcctgtgggaggagcagaggaagcagagggcccaggtggcctttgaatgtgatgaggacaaggatgagcgggaggccccaccccgggagggcaacctgaagcgctaccccaccccctacccagatgagctgaagaacatggtgaagacagtgcagaccatcgtgcaccggctgaaggatgaggagaccaatgaagacagcggccgggacctgaagccccatgaggaccagcaggacatcaacaaggatgtgggcgtgaagaccagcgagagcaccaccaccgtgaagagcaaggtggatgagcgggagaagtacatgattggcaacagcgtgcagaagatcagcgagcctgaggccgagatcagccctggcagcctgcctgtgacagccaacatgaaggccagcgagaacctgaagcacatcgtgaaccatgatgatgtgtttgaggagagcgaggagctgagcagtgatgaggagatgaagatggccgagatgaggcctcccctgattgagaccagcatcaaccagcccaaggtggtggccctgagcaacaacaagaaggatgacaccaaggagacagacagcctgagtgatgaggtgacccacaacagcaaccagaacaacagcaactgcagcagccccagcaggatgtctgattctgtgtccctgaacacagacagcagccaggacaccagcctgtgcagccctgtgaagcagacccacatcgacatcaacagcaagatccggcaggaggatgagaacttcaacagcctgctgcagaatggagacatcctgaacagcagcacagaggagaagttcaaggcccatgacaagaaggacttcaacctgcctgaatatgacctgaatgtggaggagcggctggtgctgattgagaagtctgtggacagcacagccacagcagatgacacccacaagctggaccacatcaacatgaacctgaacaagctgatcaccaatgacaccttccagcctgagatcatggagaggagcaagacccaggacatcgtgctgggcaccagcttcctgagcatcaacagcaaggaggagacagagcacctggagaatggaaacaagtaccccaacctggagagcgtgaacaaggtgaatggccacagcgaggagaccagccagagccccaacagaacagagccccatgacagcgactgcagcgtggacctgggcatcagcaagagcacagaggacctgagcccccagaagagcggccctgtgggctctgtggtgaagagccacagcatcaccaacatggagatcggcggcctgaagatctatgacatcctgagtgacaatggcccccagcagcccagcaccaccgtgaagatcaccagcgctgtggatggcaagaacatcgtgcgcagcaagagcgccaccctgctgtatgaccagcccctgcaggtgttcaccggcagcagcagcagcagtgacctgatcagcggcaccaaggccatcttcaagtttgacagcaaccacaaccctgaggagcccaacatcatccggggccccaccagcggcccccagagcgccccccagatctacggccccccccagtacaacatccagtacagcagcagcgctgctgtgaaggacaccctgtggcacagcaagcagaacccccagattgaccacgccagcttccccccccagctgctgcccaggtctgagagcacagagaaccagagctatgccaagcacagcgccaacatgaacttcagcaaccacaacaacgtgcgggccaacacagcctaccacctgcaccagaggctgggccctgcccggcatggagagatgtgggccatcagccccaatgacaggctcatcccagctgtgaccaggagcaccatccagaggcagagctctgtgagcagcacagcctctgtgaacctgggggaccccggcagcacccggcgggcccagatccctgagggggactacctgagctaccgggagttccacagcgctggccgcaccccacccatgatgcctggcagccagaggcccctgagcgcccggacctacagcattgatggccccaatgccagccggccccagagcgcccggcccagcatcaatgagatccctgagaggaccatgtctgtgtctgacttcaactacagcaggaccagccccagcaagaggcccaatgcccgggtgggcagcgagcacagcctgctggaccccccaggcaagagcaaggtgccccgggactggagggagcaggtgctgcggcacatcgaggccaagaagctggagaagatccgggtgcgggtggagaaggaccctgagctgggcttcagcatctctggaggagtgggcggccggggcaaccccttccggccagatgatgatggcatctttgtgaccagggtgcagcctgagggccctgccagcaagctgctgcagcccggggacaagatcatccaggccaacggctacagcttcatcaacatcgagcacggccaggccgtgtccctgctgaagaccttccagaacacagtggagctgatcatcgtgcgggaggtgagcagctag

SEQ ID NO: 22192 - DNA, 3909 bp, Artificial Sequence
  derived and/or modified sequence
atgaccaccaagcggagcctgttcgtgcggctggtgccctgccggtgcctccgaggcgaagaagaaaccgttaccacattggactattcccattgttcactcgagcaggtgcccaaagaaatcttcaccttcgagaagacactcgaggagctgtacctggatgccaaccagattgaggaactgccgaaacagcttttcaattgtcagagcctgcataaactgtcgctgccagataatgacctgactaccttgcccgcaagcattgccaacctgattaacctcagggagctcgacgtgagtaagaatgggattcaggaatttcctgagaatatcaagaactgcaaagtgctgacgattgtcgaggcttctgttaatccaatttcaaagctccccgacggtttcagccagcttttgaatttaacccagctctacttgaacgatgctttcctagaatttctgcctgccaatttcggacggctgaccaagctgcagattcttgaattaagggagaatcagctcaaaatgctgcctaaaactatgaatcggctgactcaactggaacgcttggatctgggaagcaacgaattcaccgaggtgcctgaggttctggaacagctaagtggattaaaagagttctggatggatgccaatcgcctgaccttcattcctgggttcattgggtcactgaagcagctgacctacttagacgtgtcaaaaaacaatatcgagatggtcgaggagggtatatccacttgtgagaaccttcaggatttactactcagctccaattccttacagcagttgcccgagactatcggctccctgaagaatatcaccacgctgaagatcgatgaaaaccagctcatgtaccttccggatagcatcggtggactaatatctgtagaggaactggattgctcctttaacgaggtggaggccttgccgagctcaatcgggcaactgaccaatctccgtacctttgctgcagatcataactacctgcagcagctgcctccagaaatcggctcctggaaaaacatcaccgtactctttttacactctaataagctggaaacgctccctgaagagatgggagatatgcagaagctgaaggtaatcaacttatctgataataggctcaagaacctgcccttctcttttacgaagctccaacagctgacagccatgtggctttcagataatcaaagtaagcccctgattcccctgcagaaggaaaccgattccgagactcagaagatggtccttaccaattacatgttcccacagcagccaagaaccgaggatgtgatgttcatttctgacaacgagagttttaatccgagcctttgggaggagcagaggaaacaacgtgctcaagttgcattcgaatgtgacgaggataaggatgaacgggaagcacctccccgagaggggaatttgaaacgctatccaacaccatatccggatgaattgaagaacatggttaagaccgtccagacaatcgtgcatcggctcaaagacgaagagaccaatgaggattcaggacgtgatctaaaaccacatgaggatcagcaggacatcaataaagacgtgggggtgaagaccagcgaaagtactacaacagtgaaatctaaagtggatgagagggaaaagtatatgattggtaattccgtgcagaagatctccgagccagaagcagagatcagccctggaagcctccctgtaactgccaacatgaaggcgtcggagaatctgaaacatatcgttaatcatgatgacgtttttgaagagtctgaggaactctctagtgacgaggaaatgaagatggcggagatgaggcctccactgattgagacaagcattaaccaacccaaggtggtcgccctctctaataacaaaaaggacgatacgaaggaaacagactctttatctgatgaagtcacacacaattctaaccagaataacagcaactgttcttcaccctctaggatgtctgactcagtgtcgctgaatactgacagtagccaggacactagcctttgcagccctgttaaacagacccacatcgacataaattctaagataaggcaggaagatgaaaattttaactctctccttcagaatggcgatattcttaattcttccactgaagagaagtttaaagcccacgataagaaggacttcaacctcccggagtacgacctgaacgtggaggaacggctggtcctcatagagaaatccgtggactctacagccaccgctgacgacacccataaactggaccatatcaacatgaaccttaacaaactgataactaatgacacctttcagcccgaaataatggaaaggagcaaaacgcaggacatcgtgctcggcaccagtttcctgtcgatcaatagcaaagaggaaaccgaacatttggagaatgggaacaagtacccgaatctggagtccgttaacaaggtcaatggccattcggaggagacatctcagtcccctaacagaacggaaccccacgattccgactgctccgtggacctggggatatcgaagagcaccgaggatctgtctcctcaaaaatcaggacccgtcggaagcgtggtgaagtctcattccatcactaatatggaaattggaggcttgaagatctacgatattctgagcgataacgggccacagcaacccagcactactgtaaagatcacttctgctgttgacggaaagaacatagtgagatcaaaaagcgccaccctgttgtatgatcagccattgcaggtcttcaccggtagttccagttcttcggacctgattagcgggactaaggccatatttaagttcgacagcaaccacaaccctgaggagcctaacattataagagggcctacttccggaccccagtctgctccacaaatctatggtccgcctcagtataatatccagtatagctcctccgcagctgtaaaagacacactatggcattctaagcagaatccacaaatcgatcacgccagcttcccaccccaacttctgcctcgaagtgaatcaacagagaaccagtcctatgccaaacattccgccaatatgaatttttcaaaccataacaacgtgcgcgccaatacagcataccacctgcaccagaggttaggcccagccaggcatggggagatgtgggcaatctcacctaacgacagattaatccctgccgtcacaagaagcacaatacagcgacaatcttctgtctccagcacagcgtcagtgaaccttggggatcctggatcgacgcgcagagcccaaattcccgagggtgattacttgtcttatagagagttccattctgccgggcgcacaccccccatgatgccagggtcacagcggccactcagcgctcgcacctatagcattgatggacccaacgctagtcgcccacagagcgctcgaccttccatcaacgagatacctgaaaggaccatgagtgtgagtgactttaactactctcgtacaagcccatccaagaggccaaacgccagagtaggctccgagcatagcttgctcgacccccccggcaagagtaaggtcccccgggattggcgggaacaggtactccgtcatatcgaggccaaaaagctcgaaaagattagggtgcgtgttgagaaagacccagaattgggattctcgatctccgggggagtgggtggacggggtaaccccttccgcccggacgacgatggaatcttcgtgacgcgcgtgcagcctgagggccctgccagtaagctgctccagcctggtgataagattatccaggccaatggatacagtttcattaatatcgaacatggccaggccgtaagtcttcttaaaacttttcaaaacactgtcgagttgataatcgtccgcgaagtgtcaagctag

SEQ ID NO: 22193 - DNA, 3909 bp, Artificial Sequence
  derived and/or modified sequence
atgaccaccaagcggagcctgttcgtgcggctggtgccctgccggtgcctgcggggtgaggaggagaccgtaaccacactggactatagtcattgctccctcgaacaagtgcctaaggaaatttttacctttgagaaaaccttagaggagttatacctagacgcaaaccaaattgaagagcttccaaagcaactcttcaactgccagtccctccacaaactgagcctgccagataatgacctgacaaccttgcctgcttccattgccaaccttattaacctccgcgagctggatgtgtccaagaacggcatccaggagttccccgaaaatataaaaaactgtaaggtcctgactatcgtagaggcatccgtcaatcctatctccaagctccccgacggcttctcccagctcttgaacctcacccagctgtacctaaacgacgcatttttggagttcctgccggccaacttcggaaggcttactaagctgcagatcctagagctgcgtgaaaatcagcttaaaatgctgcccaagaccatgaaccgcctcactcagctggagcggctggacctaggatcaaacgaattcaccgaggtgccggaagttctggaacagctcagtggcctgaaagagttttggatggacgcaaatcggctgacgtttattcctggctttatcggatcccttaaacagttgacatacctcgatgtctctaagaataacatcgaaatggttgaggagggcatatccacatgcgagaacctgcaggatcttctgttatcgtccaactccctgcagcagctacccgagaccatcggatccctgaagaacatcactactctgaagatcgacgagaatcagctgatgtatttgccagacagtattggaggtctcatcagcgtcgaagagctagattgttcctttaacgaagttgaagccctgccctcaagcattggccagctcacaaatctgcggaccttcgcagcagaccataattatctgcaacagctccctcctgagatcggtagttggaagaatataacggtgctcttcctgcactctaacaaactggaaaccctgcctgaggagatgggggacatgcagaagctcaaagtgattaacctaagtgacaatcggctcaagaatctgcctttctctttcaccaaactgcagcagttgacagcaatgtggttatcagataaccagtccaagccactaattcccctgcaaaaggagacagactccgaaactcagaagatggttctaactaactatatgttcccccaacagccaaggaccgaggacgtcatgtttatctccgacaacgaaagtttcaacccctctctgtgggaggagcagcggaagcaaagagcgcaggttgcattcgaatgtgacgaagacaaggatgagagagaggcgcctccgagagaggggaacctcaaacgctacccaaccccctatccagatgaactcaaaaacatggtgaaaacggtccagaccatagtgcaccgtctaaaggatgaagaaacaaatgaagacagcggccgggacttaaagccacacgaggatcagcaggatattaataaagatgtgggtgtgaagacgtctgagtccacaaccaccgtgaagtcaaaggttgacgaacgagaaaaatacatgatagggaatagtgttcagaagatcagtgaacctgaggcggagatttctccggggtccttgcctgtaaccgccaacatgaaagcgagcgaaaatttgaagcacatcgtaaatcacgacgacgtgttcgaagaatctgaggagctcagtagtgatgaagagatgaaaatggctgagatgcgccctccgctgattgaaacaagcattaatcagcctaaggttgtggccctatcgaataataagaaggatgatacaaaagaaacagattcactctccgacgaggtaactcacaattccaatcagaacaattccaactgttcaagcccttcacggatgagtgattctgttagccttaacacagattcatcgcaggatacctctctttgtagtcccgttaagcagacccacatcgacattaatagtaagattcgtcaagaggacgagaatttcaatagcttgctgcagaacggtgatatcttaaatagcagtacggaggagaaattcaaggctcacgataaaaaggattttaacctgcccgaatatgatttgaatgtcgaggaaaggctggtgctgatcgaaaagtctgtggatagcacagcaacagccgatgacactcacaagttggaccacataaacatgaacttgaataaactgataacgaacgatactttccagccagaaataatggagaggagcaagacacaggacatagttcttggtaccagtttcctgtccatcaattccaaggaggagaccgagcacctggaaaacggaaataagtatccaaacctggagagcgtaaacaaggtgaacggtcacagcgaggaaaccagccagtcacctaataggaccgaaccgcatgatagcgactgctcagttgacctggggatatcaaaatctacagaggatcttagccctcagaaatcaggaccggtgggatcagtcgtgaaaagccattctatcacaaatatggaaatcggggggctgaaaatttacgacatactctctgataatgggccacagcagccttccaccacggtcaagattacaagtgcagtagacggaaagaacatagtccgcagcaagtctgccactttgctgtacgatcagccactgcaagtgttcacgggaagctcatcatcttctgatctaatctctggtaccaaggctatcttcaaattcgactccaaccacaatccagaagagccgaacatcatccgcggacccacatccggacctcagtcagcccctcagatctacgggcctccacagtacaatatccagtattcctcctcggctgccgtaaaggacaccctgtggcactctaaacagaatccgcaaattgatcatgcatcctttcctccccagctcctcccccgatcagagtcaactgaaaaccagtcctatgcgaagcactcggccaacatgaatttctcaaatcacaataatgtccgagccaatacagcctaccacctccaccaacggttggggcccgcgcgtcatggtgagatgtgggccatttctcccaatgatagactgattcccgctgtcacacgatccacaatacagcgacagagctcggtcagcagtactgcatctgtaaatcttggggatcccggctcaacccgacgagcccagatccccgagggtgattatctgagctaccgggagttccactcagccggcaggaccccacctatgatgcctggctcccagcgacccctcagtgctcggacatacagtatcgacggccctaacgcaagtagaccacaatccgcgagaccctcaattaacgagatccccgaaagaactatgagcgtctccgatttcaactactccagaaccagtccttccaagcgacccaacgctcgcgtgggctctgagcattccctgctggacccaccgggcaagtctaaagtgcctcgggactggagagagcaggtactccgtcacatagaggcaaagaagctcgagaaaattagggtgagagtggagaaagatcctgagttggggtttagcattagtgggggtgtgggcggacgaggcaatccgtttaggccagatgacgacggcatcttcgtgacacgcgtccaacctgaagggcccgcgagtaaattgcttcagccgggtgataaaataatacaggcgaacgggtactcttttatcaacatagaacacggccaggccgtgtctctgctgaagacgttccagaacacggtggaactgatcatcgtgcgggaggttagttcttag

SEQ ID NO: 22194 - DNA, 3909 bp, Artificial Sequence
  derived and/or modified sequence
atgacaacaaaaagatccctctttgtccgacttgtaccctgcagatgcctgaggggggaggaagaaacagtgacaactctcgattactctcactgcagtctggaacaagtgccaaaggaaatcttcaccttcgagaaaacacttgaggaactatacctggacgctaatcagattgaggaactgccaaaacagctgtttaactgtcagagcctccataagctgagcctgccggacaatgaccttacaacgctcccagccagcattgccaacctgatcaacttgagagaactcgacgtgagcaagaatggaatccaagagttcccagagaatattaagaactgcaaggtgcttactattgtggaggcctcggtaaacccaatcagtaaactgcccgacggattcagccagttactgaacctaacccagctttatctgaacgatgcttttcttgagttcttgcctgccaacttcggacgcctgacgaagttacaaatcttggagctgagggaaaaccagttaaagatgctcccgaaaaccatgaataggctgacccaactggagcgcctggacctgggctcaaacgaatttacagaagtgcccgaagtcctcgagcaattgtccgggctgaaagaattctggatggacgcaaatcggcttacattcatccccggttttattggctctcttaaacagctgacttacttagacgtgtccaagaacaatattgagatggtggaggagggaatcagcacgtgcgagaacctgcaggatttgctgctttctagcaacagtcttcaacagcttccagagaccataggttccttaaagaatatcacaacgcttaaaatcgatgaaaaccagctgatgtacctacccgactctatcgggggactcataagcgtggaggagctggactgttcctttaacgaggttgaggcgctgccaagcagcattgggcagctcacaaatctgagaacattcgctgctgatcacaactaccttcagcagctccccccagaaattggatcatggaagaacattactgttctgtttctccatagtaataagcttgaaaccttacccgaggagatgggggacatgcagaagctgaaggtgattaatctgagtgacaataggctgaagaacctgcctttcagtttcaccaagctgcagcagttaacagctatgtggttgtccgataatcagtctaaaccactgattccattacagaaggaaaccgatagtgagacccagaaaatggtattgaccaattatatgttcccgcagcagccaaggaccgaggatgtcatgtttatttcagataatgagtcattcaatcccagcctgtgggaagaacagcgcaagcagagagctcaggtagcgtttgagtgcgacgaggataaagatgagagggaagcaccccctagggaaggcaacctcaaacgatatcctactccctacccagatgagctcaagaacatggtgaaaacggtgcaaaccatcgtgcatcggctaaaagacgaagaaacaaacgaagacagtgggcgtgatctgaaacctcacgaggaccaacaggatatcaacaaggacgtgggcgttaagactagcgaatctaccactacagtgaaaagcaaagttgacgagcgtgaaaaatatatgattgggaacagcgtacagaaaatctcagaaccagaggcagagatatcacctggcagcctacccgtgaccgcgaatatgaaagcgagcgaaaatctgaagcacattgtcaaccacgacgatgtgttcgaagaaagtgaggagctgtcctcagatgaggagatgaagatggccgaaatgcggccaccccttatcgagacaagcatcaatcagccaaaagtcgtggcgctcagcaataataagaaagatgacacaaaggaaactgatagcttatctgacgaggtcactcacaattctaaccaaaacaattccaattgctcttcaccgagcaggatgtctgatagcgtatcacttaatacagactcgtcacaagatacttccctgtgtagccctgttaaacaaacccacattgacattaacagcaagatcagacaggaggacgaaaacttcaatagcctcctccaaaacggagacatactcaattcatccacagaagagaagttcaaggcgcacgataagaaagacttcaacttgccagagtatgatcttaacgtggaggagagacttgttctgattgagaagagcgtggacagcacggccaccgcggacgatacacataagttggaccacatcaatatgaatctcaacaagctcattacgaatgacactttccagcccgaaatcatggagaggagtaagacccaggatattgttctgggcaccagtttcctcagcatcaattcaaaagaggagaccgaacatttagagaacggcaataaataccccaatcttgaaagcgtgaacaaagtgaacggccacagtgaagagacttcccagtcacctaataggaccgaaccccatgatagcgattgctctgtagacctgggcattagcaagagtactgaagacttatccccccaaaagtctggacccgtgggttccgtcgtcaagtctcactccatcactaacatggaaattggaggattgaagatctacgacatcttgtctgacaacggaccacagcagccttccaccacagtcaagatcacatccgcagtggatggtaagaacattgtgcgatcaaagtctgctaccctcctctacgatcagcctttgcaggtctttacagggtcttcttcctcctctgatttgatctctggtactaaagcgatttttaagttcgacagcaaccacaaccctgaagaaccaaatatcattagaggtcccacaagtggaccacagagcgccccacagatctatggaccccctcagtataatattcagtattcatccagcgcagccgtaaaagatacattgtggcactctaaacagaatccgcagattgatcacgcctcgttccctccgcagttgctgccacggtcagaatcgacagagaatcagagctatgccaaacacagcgcaaacatgaacttttccaatcataacaacgttcgcgctaacacggcatatcacttgcaccagaggctcgggccagcacgccatggtgagatgtgggccattagtcccaacgaccggctgatcccagcagttacacggagcaccattcagaggcaatcctctgtatcatctactgccagtgtgaatctcggggatccaggcagcacgaggcgcgctcagattcccgagggcgattacttatcttatagggagtttcattctgctggtcggactccccctatgatgcctggctcccagagaccacttagtgccaggacctacagtatagacggacctaacgcaagcagaccacagtctgctcgcccaagcattaacgagatccccgaacgcacaatgtctgtgagcgactttaattactctcgtacaagtccttccaaacgacctaacgcacgggtgggctccgaacacagtctcttggaccctccgggtaagtcaaaggtacctagggactggagggagcaggtgctgaggcacattgaagccaagaaactcgagaagatcagggttagagtcgaaaaggatcctgaattaggctttagtattagcggaggggtcggtggccgtggaaatccgttcaggcccgacgacgacggaattttcgtgacgagggtgcagccagaagggccagctagcaagctgctacagcccggtgacaaaataatccaagctaacggttattctttcatcaacattgagcacggacaggcggttagcctgctcaagacctttcagaacactgttgagttaatcatcgtccgcgaggtgagcagctag

SEQ ID NO: 22195 - DNA, 3909 bp, Artificial Sequence
  derived and/or modified sequence
atgacaactaaacgatcactttttgttagactggtcccctgccgctgtcttcgaggcgaggaagaaaccgtgacaactttggactactctcactgttccttagaacaagtgcccaaagagatcttcaccttcgagaagacccttgaggaactgtatctggatgcaaaccaaatcgaagaacttcctaagcaactctttaactgtcagtctcttcataagttgtcgctgcccgacaacgaccttacaaccctaccagcttctatagccaacctgatcaacttgagagaactggacgtgagcaagaacgggatccaagagttccccgaaaacatcaaaaactgtaaggtgctcacgatcgttgaagcctctgtcaacccaatttctaagttgccggatgggttcagtcagctgcttaatctcactcagctatacttgaatgacgcatttcttgagttccttcccgcaaatttcggcaggttgacaaaacttcagattttggagcttcgcgaaaaccagttgaaaatgctcccgaaaacaatgaacaggttgactcagctcgaacgcttggaccttgggtccaatgaattcacggaagtacccgaggtcctagaacaattgagcgggctgaaagagttctggatggacgccaaccgtttgactttcatccctggcttcatcgggtcccttaagcaactcacgtacctggatgtctctaagaataacatcgagatggtggaagaaggtatctccacctgtgagaacctgcaggatctgttactctcctccaattctcttcagcagctgcccgagaccattggctcactgaaaaacattaccacactgaaaatcgacgaaaaccaactgatgtatttacccgacagcatcggcggactcatttcggttgaggagttggattgctcgtttaacgaggttgaggcactgccatctagcattggccagctcacaaatctcaggactttcgccgctgatcacaactatttgcagcaattgccaccagagataggctcatggaagaacatcaccgtccttttcttacactccaacaaattggagaccctgccagaagaaatgggtgacatgcagaagctgaaagtcatcaatctgagtgataaccggctgaaaaaccttccattctctttcacaaagctgcagcaactcacagctatgtggctctccgacaatcaatccaagcctctgatcccacttcagaaagaaaccgactctgagacccagaagatggttttgactaactatatgttccctcagcagcccagaacagaggatgtaatgtttattagtgataatgaaagcttcaacccctccctttgggaggagcaacgcaagcaaagagctcaagtggcctttgaatgtgacgaggacaaagacgagcgggaggcaccgccacgggagggcaatttaaagcggtaccctacaccataccctgacgagcttaaaaacatggtcaagacggtgcagacaattgtgcaccgattgaaggacgaagaaactaacgaagattcagggagagacctgaagcctcatgaggatcaacaagacattaacaaagatgtaggcgtgaaaacatctgaatcaaccaccacagtgaaatcaaaagtagacgagcgcgagaagtacatgatcggtaatagcgtgcagaagatctccgagcccgaagccgagatcagccccggatccttgcctgtgaccgctaacatgaaggccagcgagaacctgaagcatatcgttaatcatgacgatgtcttcgaggagtccgaagagcttagttccgacgaggaaatgaagatggcagaaatgcgcccacctctgatcgagacaagcattaaccaacctaaagtcgtagcacttagcaacaataaaaaggatgacaccaaggagaccgattccctgtcagacgaggttacccacaacagcaatcagaataactctaactgctcatctccaagtcgaatgtccgacagtgtgtccctgaataccgattccagccaggatacctcactctgctctcccgtcaagcagactcacatagatatcaattccaaaattcgccaggaggatgagaattttaatagcctgttgcagaatggggacatccttaactcctccacagaggagaaattcaaagcccatgataagaaggatttcaatcttccagaatatgatcttaacgtggaagagcggcttgtgctgattgaaaagtcagtggatagtactgcgaccgcggatgatactcacaagctggatcacatcaatatgaatctgaacaaattgatcaccaacgacacattccagcctgagattatggagcgcagcaagacccaggacattgttctcgggaccagcttcctgtccataaattcaaaggaagaaaccgaacatcttgagaacggaaacaaatatccgaacctggagtccgtgaacaaggtgaatgggcatagtgaggagacaagccaatctcccaacagaacagagcctcatgactcggactgtagcgtcgatttaggtatttcaaaatccacggaagacctcagcccgcagaagagcgggcctgtggggagtgtagtgaaaagtcacagtatcacaaatatggaaatcggcggattgaagatctacgatattcttagcgacaacggtccacaacagccatctaccaccgtgaagattacatccgccgtggatggcaagaacattgtgcgtagtaaaagtgccaccctactgtacgaccagcccctacaggtttttactggttctagctcctcgagtgacctgatttctggaaccaaagccatattcaagttcgatagcaatcacaacccagaagaacctaacatcatcagaggcccaaccagtggccctcagtccgccccacaaatatatggtcctccccagtacaatattcaatactcttcttccgctgctgtgaaagataccctttggcactctaaacaaaatcctcagatcgatcacgcgtccttccctcctcaactgctcccacgctctgagtccactgagaaccaatcttacgccaagcattccgccaacatgaatttcagtaatcataataatgtccgggctaacacagcttatcacctgcaccagcgcctcggtccggctaggcatggggaaatgtgggcgatatcacccaatgataggcttatcccggcagttacaagatccacgatacagcgccagagctctgtctcgagcaccgcttcggtaaatcttggcgaccctgggtccacccgcagagcgcagataccagagggggactacctgtcttaccgggagttccattccgcgggaagaacacctcccatgatgcctggcagccaacgacctttgagcgcgcgtacctacagcatcgacggacctaatgccagccggcctcaaagtgctagaccttcaattaacgagattcctgaaagaacaatgtcagttagtgactttaattatagtaggaccagccccagcaagagacccaacgcaagggtcggtagcgagcattcactgctagacccccctggcaaaagcaaggtacctcgggattggcgggaacaggtccttaggcacatcgaagctaagaagctggaaaagattagagttagagtcgaaaaagacccggaacttggtttttccatctcaggcggtgttggtggccgtgggaatccctttcgcccagatgatgacgggatcttcgttacccgtgttcagcccgagggacctgcaagtaaactgctgcagcctggggacaaaataatccaggcaaacgggtactcgttcatcaatattgagcacggacaagcggtgtccctgctcaagactttccagaacacagtggagctcatcatcgtgagagaagtttccagctag

SEQ ID NO: 22196 - DNA, 3909 bp, Artificial Sequence
  derived and/or modified sequence
atgaccaccaagagaagcctgttcgtgagactggtgccctgcagatgcctgagaggcgaggaggagaccgtgaccaccctggactacagccactgcagcctggagcaggtgcccaaggagatcttcaccttcgagaagaccctggaggagctgtacctggacgccaaccagatcgaggagctgcccaagcagctgttcaactgccagagcctgcacaagctgagcctgcccgacaacgacctgaccaccctgcccgccagcatcgccaacctgatcaacctgagagagctggacgtgagcaagaacggcatccaggagttccccgagaacatcaagaactgcaaggtgctgaccatcgtggaggccagcgtgaaccccatcagcaagctgcccgacggcttcagccagctgctgaacctgacccagctgtacctgaacgacgccttcctggagttcctgcccgccaacttcggcagactgaccaagctgcagatcctggagctgagagagaaccagctgaagatgctgcccaagaccatgaacagactgacccagctggagagactggacctgggcagcaacgagttcaccgaggtgcccgaggtgctggagcagctgagcggcctgaaggagttctggatggacgccaacagactgaccttcatccccggcttcatcggcagcctgaagcagctgacctacctggacgtgagcaagaacaacatcgagatggtggaggagggcatcagcacctgcgagaacctgcaggacctgctgctgagcagcaacagcctgcagcagctgcccgagaccatcggcagcctgaagaacatcaccaccctgaagatcgacgagaaccagctgatgtacctgcccgacagcatcggcggcctgatcagcgtggaggagctggactgcagcttcaacgaggtggaggccctgcccagcagcatcggccagctgaccaacctgagaaccttcgccgccgaccacaactacctgcagcagctgccccccgagatcggcagctggaagaacatcaccgtgctgttcctgcacagcaacaagctggagaccctgcccgaggagatgggcgacatgcagaagctgaaggtgatcaacctgagcgacaacagactgaagaacctgcccttcagcttcaccaagctgcagcagctgaccgccatgtggctgagcgacaaccagagcaagcccctgatccccctgcagaaggagaccgacagcgagacccagaagatggtgctgaccaactacatgttcccccagcagcccagaaccgaggacgtgatgttcatcagcgacaacgagagcttcaaccccagcctgtgggaggagcagagaaagcagagagcccaggtggccttcgagtgcgacgaggacaaggacgagagagaggccccccccagagagggcaacctgaagagataccccaccccctaccccgacgagctgaagaacatggtgaagaccgtgcagaccatcgtgcacagactgaaggacgaggagaccaacgaggacagcggcagagacctgaagccccacgaggaccagcaggacatcaacaaggacgtgggcgtgaagaccagcgagagcaccaccaccgtgaagagcaaggtggacgagagagagaagtacatgatcggcaacagcgtgcagaagatcagcgagcccgaggccgagatcagccccggcagcctgcccgtgaccgccaacatgaaggccagcgagaacctgaagcacatcgtgaaccacgacgacgtgttcgaggagagcgaggagctgagcagcgacgaggagatgaagatggccgagatgagaccccccctgatcgagaccagcatcaaccagcccaaggtggtggccctgagcaacaacaagaaggacgacaccaaggagaccgacagcctgagcgacgaggtgacccacaacagcaaccagaacaacagcaactgcagcagccccagcagaatgagcgacagcgtgagcctgaacaccgacagcagccaggacaccagcctgtgcagccccgtgaagcagacccacatcgacatcaacagcaagatcagacaggaggacgagaacttcaacagcctgctgcagaacggcgacatcctgaacagcagcaccgaggagaagttcaaggcccacgacaagaaggacttcaacctgcccgagtacgacctgaacgtggaggagagactggtgctgatcgagaagagcgtggacagcaccgccaccgccgacgacacccacaagctggaccacatcaacatgaacctgaacaagctgatcaccaacgacaccttccagcccgagatcatggagagaagcaagacccaggacatcgtgctgggcaccagcttcctgagcatcaacagcaaggaggagaccgagcacctggagaacggcaacaagtaccccaacctggagagcgtgaacaaggtgaacggccacagcgaggagaccagccagagccccaacagaaccgagccccacgacagcgactgcagcgtggacctgggcatcagcaagagcaccgaggacctgagcccccagaagagcggccccgtgggcagcgtggtgaagagccacagcatcaccaacatggagatcggcggcctgaagatctacgacatcctgagcgacaacggcccccagcagcccagcaccaccgtgaagatcaccagcgccgtggacggcaagaacatcgtgagaagcaagagcgccaccctgctgtacgaccagcccctgcaggtgttcaccggcagcagcagcagcagcgacctgatcagcggcaccaaggccatcttcaagttcgacagcaaccacaaccccgaggagcccaacatcatcagaggccccaccagcggcccccagagcgccccccagatctacggccccccccagtacaacatccagtacagcagcagcgccgccgtgaaggacaccctgtggcacagcaagcagaacccccagatcgaccacgccagcttccccccccagctgctgcccagaagcgagagcaccgagaaccagagctacgccaagcacagcgccaacatgaacttcagcaaccacaacaacgtgagagccaacaccgcctaccacctgcaccagagactgggccccgccagacacggcgagatgtgggccatcagccccaacgacagactgatccccgccgtgaccagaagcaccatccagagacagagcagcgtgagcagcaccgccagcgtgaacctgggcgaccccggcagcaccagaagagcccagatccccgagggcgactacctgagctacagagagttccacagcgccggcagaaccccccccatgatgcccggcagccagagacccctgagcgccagaacctacagcatcgacggccccaacgccagcagaccccagagcgccagacccagcatcaacgagatccccgagagaaccatgagcgtgagcgacttcaactacagcagaaccagccccagcaagagacccaacgccagagtgggcagcgagcacagcctgctggacccccccggcaagagcaaggtgcccagagactggagagagcaggtgctgagacacatcgaggccaagaagctggagaagatcagagtgagagtggagaaggaccccgagctgggcttcagcatcagcggcggcgtgggcggcagaggcaaccccttcagacccgacgacgacggcatcttcgtgaccagagtgcagcccgagggccccgccagcaagctgctgcagcccggcgacaagatcatccaggccaacggctacagcttcatcaacatcgagcacggccaggccgtgagcctgctgaagaccttccagaacaccgtggagctgatcatcgtgagagaggtgagcagctag

SEQ ID NO: 22197 - DNA, 6691 bp, Artificial Sequence
  derived and/or modified sequence
cggcggagatcctcgttggggctgggaaactcctgcaaaactcgagaccaggaagccagcccgcaccccaacccccaccaaagccacctactcttcttctgtgggaggccagtccacatccgctctcacccgagagagatattcagctggatccaaagtgactgatgaagggaaggaaatcatgtcaagcgaagccttgaaaaagctgccctgagacggtgtcccgccgaaagaatgttggctcaattaagaaacatcagggagataaattcaacccagtgtgtctaaaaatgactacaaaacgaagtttgtttgtgcggttggtaccatgtcgctgtctacgaggggaagaggagactgtcactactcttgattattctcattgcagcttagaacaagttccgaaagagatttttacttttgaaaaaaccttggaggaactctatttagatgctaatcagattgaagagcttccaaagcaactttttaactgtcagtctttacacaaactgagtttgccagacaatgatttaacaacgttaccagcatccattgcaaaccttattaatctcagggaactggatgtcagcaagaatggaatacaggagtttccagaaaatataaaaaattgtaaagttttgacaattgtggaggccagtgtaaaccctatttccaagctccctgatggattttctcagctgttaaacctaacccagttgtatctgaatgatgcttttcttgagttcttgccagcaaattttggcagattaactaaactccaaatattagagcttagagaaaaccagttaaaaatgttgcctaaaactatgaatagactgacccagctggaaagactggatttgggaagtaacgaattcacggaagtgcctgaagtacttgagcaactaagtggattgaaagagttttggatggatgctaatagactgacttttattccagggtttattggtagtttgaaacagctcacatatttggatgtttctaaaaataatattgaaatggttgaagaaggaatttcaacatgtgaaaaccttcaagacctcctattatcaagcaattcacttcagcagcttcctgagactattggttcgttgaagaatataacaacgcttaaaatagatgaaaaccagttaatgtatctgccagactctataggagggttaatatcagtagaagaactggattgtagtttcaatgaagttgaagctttgccttcatctattgggcagcttactaacttaagaacttttgctgctgatcataattacttacagcagttgcccccagagattggaagctggaaaaatataactgtgctgtttctccattccaataaacttgagacacttccagaggaaatgggtgatatgcaaaaattaaaagtcattaatttaagtgataatagattaaagaatttaccctttagctttacaaagctacagcaattgacagctatgtggctctcagataatcagtccaaacccctgatacctcttcaaaaagaaactgattcagagacccagaaaatggtgcttaccaactacatgttccctcaacagccaaggactgaggatgttatgtttatatcagataatgaaagttttaacccttcattgtgggaggaacagaggaaacagcgggctcaagttgcatttgaatgtgatgaagacaaagatgaaagggaggcacctcccagggagggaaatttaaaaagatatccaacaccatacccagatgagcttaagaatatggtcaaaactgttcaaaccattgtacatagattaaaagatgaagagaccaatgaagactcaggaagagatttgaaaccacatgaagatcaacaagatataaataaagatgtgggtgtgaagacctcagaaagtactactacagtaaaaagcaaagttgatgaaagagaaaaatatatgataggaaactctgtacagaagatcagtgaacctgaagctgagattagtcctgggagtttaccagtgactgcaaatatgaaagcctctgagaacttgaagcatattgttaaccatgatgatgtttttgaggaatctgaagaactttcttctgatgaagagatgaaaatggcggagatgcgaccaccattaattgaaacctctattaaccagccaaaagtcgtagcacttagtaataacaaaaaagatgatacaaaggaaacagattctttatcagatgaagttacacacaatagcaatcagaataacagcaattgttcttctccatctcggatgtctgattcagtttctcttaatactgatagtagtcaagacacctcactctgctctccagtgaaacaaactcatattgatattaattccaaaatcaggcaagaagatgaaaattttaacagccttttacaaaatggagatattttaaacagttcaacagaggaaaagttcaaagctcatgataaaaaagattttaacttacctgaatatgatttgaatgttgaagagcgattagttctaattgagaaaagtgttgactcaacagccacagctgatgacactcacaaattagatcatatcaatatgaatcttaataaacttataactaatgatacatttcaaccagagatcatggaaagatcaaaaacacaggatattgtgcttggaacaagctttttaagcattaattctaaagaggaaactgagcacttggaaaatggaaacaagtatcctaatttggaatccgtaaataaggtaaatggacattctgaggaaacttcccagtctcctaataggactgaaccacatgacagtgattgttctgttgacttaggtatttccaaaagcactgaagatctctcccctcagaaaagtggtccagttggatctgttgtgaaatctcatagcataactaatatggagattggagggctaaaaatctatgatattcttagtgataatggacctcagcagccaagtacaaccgttaaaatcacatctgctgttgatggaaaaaatatagtcaggagcaagtctgccacactgttgtatgatcaaccattgcaggtatttactggttcttcctcatcttctgatttaatatcaggaacaaaggcaattttcaagtttgattcaaatcataatcccgaagagccaaatataataagaggccccacaagtggcccacaatctgcacctcaaatatatggtcctccacagtataatatccaatacagtagcagtgctgcagtcaaagacactttgtggcactccaaacaaaatccccaaatagaccatgccagttttcctcctcagctccttcctagatcagagagcacagaaaatcaaagttatgctaaacattctgccaatatgaatttctctaatcataacaatgttcgagctaatactgcataccatttacatcagagacttggcccagcaagacatggggaaatgtgggccatctcaccaaacgaccgacttattcctgcagtaactcgaagtacaatccagcgacaaagtagtgtgtcctccacagcctctgtaaatcttggtgatccaggctctacaaggcgggctcagattcctgaaggagattatttatcatacagagagttccactcagcgggaagaactcctccaatgatgccaggatcacagagacccctttctgcacgaacatacagcatagatggtccaaatgcatcaagacctcagagtgctcgaccctctattaatgaaataccagagagaactatgtcagttagtgatttcaattattcacggactagtccttcaaaaagaccaaatgcaagggttggttctgagcattctttattagatcctccaggaaaaagtaaagttcctcgtgactggagagaacaagtacttcgacatattgaagccaaaaagttagaaaagattcgagtgagggttgaaaaggatccagaacttggatttagcatatcaggtggtgtcgggggtagaggaaacccattcagacctgatgatgatggtatatttgtaacaagggtacaacctgaaggaccagcatcaaaattactgcagccaggtgataaaattattcaggctaatggctacagttttataaatattgaacatggacaagcagtgtccttgctaaaaactttccagaatacagttgaactcatcattgtacgagaagtttcctcataagcactgtggacaaaaaaagcggggaagacagcaagatttattggaagatacttacaggggaaattaatattttgactatttttatatataaagaagaactcaaaaaattatgttcaaatttgtacattaatgaaataatggaacttgtggttagagggaaagaaccactgtacagaatataaaggagactgttgaattcataccatataaaacttgttaggtttttaaacatagcaatcaaggctacaaaaacaaacctgtgttgtttttgtatagattgtaggtttatttttggatttcatatacatgactgaactgtgtgcaaggcaatagttagccttgattttagcccagagacagatggcagagctatctctctcatagcttttatgcccttatttttattcaactggtattaatgtttttctcctgaaactactttttttgatgtgggcaagagatttgaagtgttggcttttgctatgtgcatattgaattgaagagtgagtaggtgaaggtggtgctggtgggttcactttccaaggccagactaaaacagttattttctataaaaatctggaagcaaagaatggggatggggagagctacgtggtagtatgtttttattaggagaataatgcaataaaatatgtaatgtcttttttataaagcaaaaaagacaataattgcatttatgagctcggcaggatctgttcttgtcatagccattgactatacatttgctactggtgattcagtttttaattttttagtcacaggaaatttttaactctactgtagatgcatgtccatgcattttctgtgttatggaaatccactgatttttttttttttttcaaatggtggtacttgcaatctgttttataattagtgctccatttaaatctaatttataatttttattttaagcagcaaatgaaacaaaaatggccagttttaagattgtgttgcctgtaacacaaaatgttacgaaggtttaggaaagcctctttgatttttgtttggccttgcattgccttggtaaagtaaaaggaaacagtacacttggagctaggaaaccaaagcaagctttgtgaaactggcacagtgatagagaattgctgtggagagttatagagcaaagggatgggtccttgaggcctgccagtgtgtaaaggtgttcaaataaagggctgtttctacaggtaacattaaatgtgaactcaacacttccagagtctttaaagggtttctatgtgtatcagtgtaatagtgttttaccaccaactgcctttctttgttcctagttactgtaacaaatatttgatgatagaggtttattaattttgtttatccagaccattaattttatttgtttttgttctatgtaatcaaataaaatttgagtaacatgtaatggtaaggattaatgcatggttatttggaccagaaaaaagtgccatagaagaccaataactgtttagttgaggctagtctggaacctttcattagagcaatatttggttattgcacttcatttttatttactaagaaatgcaatttgggaatttttaatctgttatgctttgtttatcaaccttgattttaattaagacttttataagactagcttaaaacaccaaccaacattatttttgcaaaagtgagttggactcactttccattcttgctagtcagagtaagtaggcagcacttttaaaaatatgtgaactcaaatattgcacttctttcaagatgttatcaattggttattgtactgtatagttttaataattttgattgaaaccctttaacaactctttgtaaattttaactcattttagttgattttcagtactatttacataggaattgatttttatggatatagtagaagaaatgtgctgtattttgataaaattcacttattgtatgtgtgttgtaatctaaaaaaaaaaagaatgacaaacagcttctttaagacaagtctcggtgttccctttattcttagtttgtttttaaatattaattttggcattctaaaatagctaacatttcttttattgatttcagattttcacaggcacattctacttttaatcagaaatatatttaataagtataattgtgaagttttcaactactttaccttgaaccacatataccaattataattttggaaaaggaattaagcctcacggaacaatggatcttcagcaaaccttaacttcattgtctgcacattacattgaagtattataaatgcaacagatgttatatgcactggcattttatcctactctagttagttaaaattttatagtattcttgcaacacataaagttgcgtaagaaactttaccaagaggagtattatagccaagttttctttgaaagtattggaaaactaaaattaaatgacaaggactttgaattagaattttgctgtaataaagtttcaaaatttgaataaaataattaaattttttgagg

SEQ ID NO: 22198 - DNA, 4374 bp, Artificial Sequence
  derived and/or modified sequence
agaatgttggctcaattaagaaacatcagggagataaattcaacccagtgtgtctaaaaatgactacaaaacgaagtttgtttgtgcggttggtaccatgtcgctgtctacgaggggaagaggagactgtcactactcttgattattctcattgcagcttagaacaagttccgaaagagatttttacttttgaaaaaaccttggaggaactctatttagatgctaatcagattgaagagcttccaaagcaactttttaactgtcagtctttacacaaactgagtttgccagacaatgatttaacaacgttaccagcatccattgcaaaccttattaatctcagggaactggatgtcagcaagaatggaatacaggagtttccagaaaatataaaaaattgtaaagttttgacaattgtggaggccagtgtaaaccctatttccaagctccctgatggattttctcagctgttaaacctaacccagttgtatctgaatgatgcttttcttgagttcttgccagcaaattttggcagattaactaaactccaaatattagagcttagagaaaaccagttaaaaatgttgcctaaaactatgaatagactgacccagctggaaagactggatttgggaagtaacgaattcacggaagtgcctgaagtacttgagcaactaagtggattgaaagagttttggatggatgctaatagactgacttttattccagggtttattggtagtttgaaacagctcacatatttggatgtttctaaaaataatattgaaatggttgaagaaggaatttcaacatgtgaaaaccttcaagacctcctattatcaagcaattcacttcagcagcttcctgagactattggttcgttgaagaatataacaacgcttaaaatagatgaaaaccagttaatgtatctgccagactctataggagggttaatatcagtagaagaactggattgtagtttcaatgaagttgaagctttgccttcatctattgggcagcttactaacttaagaacttttgctgctgatcataattacttacagcagttgcccccagagattggaagctggaaaaatataactgtgctgtttctccattccaataaacttgagacacttccagaggaaatgggtgatatgcaaaaattaaaagtcattaatttaagtgataatagattaaagaatttaccctttagctttacaaagctacagcaattgacagctatgtggctctcagataatcagtccaaacccctgatacctcttcaaaaagaaactgattcagagacccagaaaatggtgcttaccaactacatgttccctcaacagccaaggactgaggatgttatgtttatatcagataatgaaagttttaacccttcattgtgggaggaacagaggaaacagcgggctcaagttgcatttgaatgtgatgaagacaaagatgaaagggaggcacctcccagggagggaaatttaaaaagatatccaacaccatacccagatgagcttaagaatatggtcaaaactgttcaaaccattgtacatagattaaaagatgaagagaccaatgaagactcaggaagagatttgaaaccacatgaagatcaacaagatataaataaagatgtgggtgtgaagacctcagaaagtactactacagtaaaaagcaaagttgatgaaagagaaaaatatatgataggaaactctgtacagaagatcagtgaacctgaagctgagattagtcctgggagtttaccagtgactgcaaatatgaaagcctctgagaacttgaagcatattgttaaccatgatgatgtttttgaggaatctgaagaactttcttctgatgaagagatgaaaatggcggagatgcgaccaccattaattgaaacctctattaaccagccaaaagtcgtagcacttagtaataacaaaaaagatgatacaaaggaaacagattctttatcagatgaagttacacacaatagcaatcagaataacagcaattgttcttctccatctcggatgtctgattcagtttctcttaatactgatagtagtcaagacacctcactctgctctccagtgaaacaaactcatattgatattaattccaaaatcaggcaagaagatgaaaattttaacagccttttacaaaatggagatattttaaacagttcaacagaggaaaagttcaaagctcatgataaaaaagattttaacttacctgaatatgatttgaatgttgaagagcgattagttctaattgagaaaagtgttgactcaacagccacagctgatgacactcacaaattagatcatatcaatatgaatcttaataaacttataactaatgatacatttcaaccagagatcatggaaagatcaaaaacacaggatattgtgcttggaacaagctttttaagcattaattctaaagaggaaactgagcacttggaaaatggaaacaagtatcctaatttggaatccgtaaataaggtaaatggacattctgaggaaacttcccagtctcctaataggactgaaccacatgacagtgattgttctgttgacttaggtatttccaaaagcactgaagatctctcccctcagaaaagtggtccagttggatctgttgtgaaatctcatagcataactaatatggagattggagggctaaaaatctatgatattcttagtgataatggacctcagcagccaagtacaaccgttaaaatcacatctgctgttgatggaaaaaatatagtcaggagcaagtctgccacactgttgtatgatcaaccattgcaggtatttactggttcttcctcatcttctgatttaatatcaggaacaaaggcaattttcaagtttgattcaaatcataatcccgaagagccaaatataataagaggccccacaagtggcccacaatctgcacctcaaatatatggtcctccacagtataatatccaatacagtagcagtgctgcagtcaaagacactttgtggcactccaaacaaaatccccaaatagaccatgccagttttcctcctcagctccttcctagatcagagagcacagaaaatcaaagttatgctaaacattctgccaatatgaatttctctaatcataacaatgttcgagctaatactgcataccatttacatcagagacttggcccagcaagacatggggaaatgtgggccatctcaccaaacgaccgacttattcctgcagtaactcgaagtacaatccagcgacaaagtagtgtgtcctccacagcctctgtaaatcttggtgatccaggctctacaaggcgggctcagattcctgaaggagattatttatcatacagagagttccactcagcgggaagaactcctccaatgatgccaggatcacagagacccctttctgcacgaacatacagcatagatggtccaaatgcatcaagacctcagagtgctcgaccctctattaatgaaataccagagagaactatgtcagttagtgatttcaattattcacggactagtccttcaaaaagaccaaatgcaagggttggttctgagcattctttattagatcctccaggaaaaagtaaagttcctcgtgactggagagaacaagtacttcgacatattgaagccaaaaagttagaaaagattcgagtgagggttgaaaaggatccagaacttggatttagcatatcaggtggtgtcgggggtagaggaaacccattcagacctgatgatgatggtatatttgtaacaagggtacaacctgaaggaccagcatcaaaattactgcagccaggtgataaaattattcaggctaatggctacagttttataaatattgaacatggacaagcagtgtccttgctaaaaactttccagaatacagttgaactcatcattgtacgagaagtttcctcataagcactgtggacaaaaaaagcggggaagacagcaagatttattggaagatacttacaggggaaattaatattttgactatttttatatataaagaagaactcaaaaaattatgttcaaatttgtacattaatgaaataatggaacttgtggttagagggaaagaaccactgtacagaatataaaggagactgttgaattcataccatataaaacttgttaggtttttaaacatagcaatcaaggctacaaaaacaaacctgtgttgtttttgtatagattgtaggtttatttttggatttcatatacatgactgaactgtgtgcaaggcaatagttagccttgattttagcccagagacagatggcagagctatctctctcatagcttttatgcccttatttttatt

SEQ ID NO: 22199 - protein, 313 aa, Artificial Sequence
  derived and/or modified sequence
MTGKATPPSLYSWRGVLFTCLPAARTRKRKEMSRQTATALPTGTSKCPPSQRVPALTGTTASNNDLASLFECPVCFDYVLPPILQCQSGHLVCSNCRPKLTCCPTCRGPLGSIRNLAMEKVANSVLFPCKYASSGCEITLPHTEKADHEELCEFRPYSCPCPGASCKWQGSLDAVMPHLMHQHKSITTLQGEDIVFLATDINLPGAVDWVMMQSCFGFHFMLVLEKQEKYDGHQQFFAIVQLIGTRKQAENFAYRLELNGHRRRLTWEATPRSIHEGIATAIMNSDCLVFDTSIAQLFAENGNLGINVTISMC

SEQ ID NO: 22200 - protein, 298 aa, Artificial Sequence
  derived and/or modified sequence
MVIIIFLLPPYVFISEMSRQTATALPTGTSKCPPSQRVPALTGTTASNNDLASLFECPVCFDYVLPPILQCQSGHLVCSNCRPKLTCCPTCRGPLGSIRNLAMEKVANSVLFPCKYASSGCEITLPHTEKADHEELCEFRPYSCPCPGASCKWQGSLDAVMPHLMHQHKSITTLQGEDIVFLATDINLPGAVDWVMMQSCFGFHFMLVLEKQEKYDGHQQFFAIVQLIGTRKQAENFAYRLELNGHRRRLTWEATPRSIHEGIATAIMNSDCLVFDTSIAQLFAENGNLGINVTISMC

SEQ ID NO: 22201 - protein, 282 aa, Artificial Sequence
  derived and/or modified sequence
MSRQTATALPTGTSKCPPSQRVPALTGTTASNNDLASLFECPVCFDYVLPPILQCQSGHLVCSNCRPKLTCCPTCRGPLGSIRNLAMEKVANSVLFPCKYASSGCEITLPHTEKADHEELCEFRPYSCPCPGASCKWQGSLDAVMPHLMHQHKSITTLQGEDIVFLATDINLPGAVDWVMMQSCFGFHFMLVLEKQEKYDGHQQFFAIVQLIGTRKQAENFAYRLELNGHRRRLTWEATPRSIHEGIATAIMNSDCLVFDTSIAQLFAENGNLGINVTISMC

SEQ ID NO: 22202 - DNA, 2003 bp, Artificial Sequence
  derived and/or modified sequence
gtcccgtcggtctcggcgccgggaagaggcggtggcgctgcccgcggtggcgggggttggcgacggagcgcgttggtgccaggaccggggtccgaggcgcgctctccgcccacagaaatgagccgtcagactgctacagcattacctaccggtacctcgaagtgtccaccatcccagagggtgcctgccctgactggcacaactgcatccaacaatgacttggcgagtctttttgagtgtccagtctgctttgactatgtgttaccgcccattcttcaatgtcagagtggccatcttgtttgtagcaactgtcgcccaaagctcacatgttgtccaacttgccggggccctttgggatccattcgcaacttggctatggagaaagtggctaattcagtacttttcccctgtaaatatgcgtcttctggatgtgaaataactctgccacacacagaaaaagcagaccatgaagagctctgtgagtttaggccttattcctgtccgtgccctggtgcttcctgtaaatggcaaggctctctggatgctgtaatgccccatctgatgcatcagcataagtccattacaaccctacagggagaggatatagtttttcttgctacagacattaatcttcctggtgctgttgactgggtgatgatgcagtcctgttttggctttcacttcatgttagtcttagagaaacaggaaaaatacgatggtcaccagcagttcttcgcaatcgtacagctgataggaacacgcaagcaagctgaaaattttgcttaccgacttgagctaaatggtcataggcgacgattgacttgggaagcgactcctcgatctattcatgaaggaattgcaacagccattatgaatagcgactgtctagtctttgacaccagcattgcacagctttttgcagaaaatggcaatttaggcatcaatgtaactatttccatgtgttgaaatggcaatcaaacattttctggccagtgtttaaaacttcagtttcacagaaaataaggcacccatctgtctgccaacctaaaactctttcggtaggtggaagctagacacatgaaggtaaataaaaagaaaggctgttaaatacaggaaacagttgcatgtagtaacactaatatatttaaaaataagtcaacagtaaaccactgaaaaaatatatgtatatacacccaagatgggcatcttttgtattaagaaaggaagcattgtaaaataattctgagttttgtgtttgttgtagattgattgtattgttgaaaaagtttgtttttgcgtgggagtgtgtgcctgcgtgggtgtgtgcgtgtttgggtttttttcctttaactgacaagccatcttgagtggtcatgggccactgcttttccctttgtgagtcaatacatagtgctgctgtgtgctttttttgtgtgtatttgctaatttttattaattttagtttttcattaaataaatttgacttttctgtaattcaggtttttcctttttttgtaccattttaaagttagtatcttttgatatgcatatttgtttatggtaaaaaatttataacgtgttcaatattttcttttcccccattaatcagttcattagaaatattttaaaatcagctattttgtgaagccatgagttccagaaagtaaaggtgacatcggaaaaataatcaaaagctatttaaagcatctataaggtgctctctttctgtcttctacagatgagtcacacctttgagcttaatctttgaaaggttagagaataaattgatttttataaatactgcaaatcaggcttttgtttcctttttcagatatcttggacaaatcacatattttaaaatttgttcttgtatttattggttttgcagaagaaggcatcgtcatgcacagtatttgtaattaaaagcaaatcatttgtttaaaaaggcagtttgcaaaaaatgtttttggtcttttataattctcattaaaagaatatctggc

SEQ ID NO: 22203 - DNA, 942 bp, Artificial Sequence
  derived and/or modified sequence
atgaccggcaaggccaccccccccagcctgtacagctggagaggcgtgctgttcacctgcctgcccgccgccagaaccagaaagagaaaggagatgagcagacagaccgccaccgccctgcccaccggcaccagcaagtgcccccccagccagagagtgcccgccctgaccggcaccaccgccagcaacaacgacctggccagcctgttcgagtgccccgtgtgcttcgactacgtgctgccccccatcctgcagtgccagagcggccacctggtgtgcagcaactgcagacccaagctgacctgctgccccacctgcagaggccccctgggcagcatcagaaacctggccatggagaaggtggccaacagcgtgctgttcccctgcaagtacgccagcagcggctgcgagatcaccctgccccacaccgagaaggccgaccacgaggagctgtgcgagttcagaccctacagctgcccctgccccggcgccagctgcaagtggcagggcagcctggacgccgtgatgccccacctgatgcaccagcacaagagcatcaccaccctgcagggcgaggacatcgtgttcctggccaccgacatcaacctgcccggcgccgtggactgggtgatgatgcagagctgcttcggcttccacttcatgctggtgctggagaagcaggagaagtacgacggccaccagcagttcttcgccatcgtgcagctgatcggcaccagaaagcaggccgagaacttcgcctacagactggagctgaacggccacagaagaagactgacctgggaggccacccccagaagcatccacgagggcatcgccaccgccatcatgaacagcgactgcctggtgttcgacaccagcatcgcccagctgttcgccgagaacggcaacctgggcatcaacgtgaccatcagcatgtgctag

SEQ ID NO: 22204 - DNA, 897 bp, Artificial Sequence
  derived and/or modified sequence
atggtgatcatcatcttcctgctgcccccctacgtgttcatcagcgagatgagcagacagaccgccaccgccctgcccaccggcaccagcaagtgcccccccagccagagagtgcccgccctgaccggcaccaccgccagcaacaacgacctggccagcctgttcgagtgccccgtgtgcttcgactacgtgctgccccccatcctgcagtgccagagcggccacctggtgtgcagcaactgcagacccaagctgacctgctgccccacctgcagaggccccctgggcagcatcagaaacctggccatggagaaggtggccaacagcgtgctgttcccctgcaagtacgccagcagcggctgcgagatcaccctgccccacaccgagaaggccgaccacgaggagctgtgcgagttcagaccctacagctgcccctgccccggcgccagctgcaagtggcagggcagcctggacgccgtgatgccccacctgatgcaccagcacaagagcatcaccaccctgcagggcgaggacatcgtgttcctggccaccgacatcaacctgcccggcgccgtggactgggtgatgatgcagagctgcttcggcttccacttcatgctggtgctggagaagcaggagaagtacgacggccaccagcagttcttcgccatcgtgcagctgatcggcaccagaaagcaggccgagaacttcgcctacagactggagctgaacggccacagaagaagactgacctgggaggccacccccagaagcatccacgagggcatcgccaccgccatcatgaacagcgactgcctggtgttcgacaccagcatcgcccagctgttcgccgagaacggcaacctgggcatcaacgtgaccatcagcatgtgctag

SEQ ID NO: 22205 - DNA, 942 bp, Artificial Sequence
  derived and/or modified sequence
atgactgggaaggctacgcccccttccctgtattcatggcgtggagtcctcttcacttgtctccctgccgctcggaccaggaagcggaaagagatgtctagacaaactgctacagctctgcccactgggacaagtaaatgtccaccgtcacagcgcgtccccgcgctgacagggactaccgcaagcaacaacgacctggccagcttgtttgagtgccctgtttgtttcgactatgtcttgccccccattctgcagtgccaatctggacatctggtgtgtagcaattgtcgccctaaactgacgtgctgtccgacctgtcgcggcccactgggcagtattcgcaacttggcaatggaaaaagtcgctaactctgttctgtttccatgtaagtatgccagctccggctgcgagattacactgcctcataccgagaaagcggaccacgaggagctgtgcgagtttcgtccttattcatgcccatgcccgggcgcctcatgcaaatggcaggggtctctggacgccgtgatgccacatctgatgcaccagcataagtcgataaccacgctgcagggggaagacatcgttttccttgccactgacatcaacctcccgggagccgtggactgggtgatgatgcagagctgcttcgggtttcacttcatgctagtcctggagaagcaggaaaaatacgacggtcatcagcaattttttgctattgttcagctgattggcacacgcaagcaagctgaaaatttcgcttatcggctcgagctgaacggacatcggcgtaggctgacgtgggaagcaaccccccgttcaatccacgaaggaattgccaccgctatcatgaacagcgattgtctggtgtttgacaccagcatcgcccagctgtttgccgaaaacggtaacctgggaatcaacgttacaatttcaatgtgctag

SEQ ID NO: 22206 - DNA, 897 bp, Artificial Sequence
  derived and/or modified sequence
atggtcattattattttcctgttacccccctacgtgtttatttctgaaatgagtcgccagacagctaccgccttgcctactggtactagcaaatgtcccccgagccaaagggtgcctgcgttaaccggcactacagcttccaataacgacttggcatccctatttgaatgtccggtttgttttgactacgttctcccaccaattctgcagtgtcagtcgggacatcttgtctgctccaactgccgaccaaagttaacatgctgtcccacatgccgaggccccttaggctccatcaggaatctggcaatggagaaagtagccaacagtgtcctgttcccctgtaagtacgccagcagtggctgtgagattacccttccgcacaccgagaaggcggatcacgaagaactgtgcgaatttcgcccctattcttgcccatgtccaggcgccagctgtaagtggcaggggtccttagatgcagtgatgccccatctcatgcaccagcacaaatccattacaactctgcagggcgaggacatcgtttttctcgccactgatataaatctgccgggcgccgtcgattgggtgatgatgcagtcttgttttggattccattttatgctcgtgctggagaagcaggaaaagtacgacggccaccagcagttcttcgcaatcgtgcagcttattggcacccggaaacaggccgagaactttgcctacaggcttgagctgaacggacacagaagacggctgacatgggaagcgacacctcggtccatccatgagggaatcgcaaccgctatcatgaattccgactgtctcgtcttcgatacatccattgcccaactctttgctgaaaatggcaatctgggtatcaacgttacgatctccatgtgctag

SEQ ID NO: 22207 - DNA, 942 bp, Artificial Sequence
  derived and/or modified sequence
atgaccgggaaggccaccccacccagcctgtacagctggaggggcgtgctcttcacctgcctgcctgctgcccggaccaggaagaggaaggagatgagccggcagacagccacagccctgcccaccggcaccagcaagtgcccccccagccagagggtgcctgccctgaccggcaccacagccagcaacaatgacctggccagcctgtttgaatgtcctgtgtgctttgattatgtgctgccccccatcctgcagtgccagagcggccacctggtgtgcagcaactgccggcccaagctgacctgctgccccacctgccggggccccctgggcagcatccggaacctggccatggagaaggtggccaacagcgtgctcttcccctgcaagtatgccagcagcggctgtgagatcaccctgccccacacagagaaggctgaccacgaggagctgtgtgagttccggccctacagctgcccctgccctggggccagctgcaagtggcagggcagcctggatgctgtgatgccccacctgatgcaccagcacaagagcatcaccaccctgcagggcgaggacatcgtgttcctggccacagacatcaacctgcccggggctgtggactgggtgatgatgcagagctgcttcggcttccacttcatgctggtgctggagaagcaggagaagtatgatggccaccagcagttctttgccatcgtgcagctgattggcaccaggaagcaggccgagaactttgcctaccgcctggagctgaatggccacagaagaaggctgacctgggaggccacccccaggagcatccacgagggcatcgccacagccatcatgaacagcgactgcctggtgtttgacaccagcatcgcccagctgtttgctgaaaatggaaacctgggcatcaacgtgaccatctccatgtgctag

SEQ ID NO: 22208 - DNA, 897 bp, Artificial Sequence
  derived and/or modified sequence
atggtgatcatcatcttcctgctgcccccctacgtgttcatcagcgagatgagccggcagacagccacagccctgcccaccggcaccagcaaatgtcctcccagccagagggtgcctgccctgaccggcaccacagccagcaacaatgacctggccagcctgtttgagtgccctgtgtgctttgattatgtgctgccccccatcctgcagtgccagagcggccacctggtgtgcagcaactgccggcccaagctgacctgctgccccacctgccggggccccctgggcagcatccggaacctggccatggagaaggtggccaacagcgtgctcttcccctgcaagtatgccagcagcggctgtgagatcaccctgccccacacagagaaggctgaccacgaggagctgtgtgagttccggccctacagctgcccctgccctggggccagctgcaagtggcagggcagcctggatgctgtgatgccccacctgatgcaccagcacaagagcatcaccaccctgcagggagaagatattgtgttcctggccacagacatcaacctgcctggagctgtggactgggtgatgatgcagagctgcttcggcttccacttcatgctggtgctggagaagcaggagaagtatgatggccaccagcagttctttgccatcgtgcagctgattggcaccaggaagcaggctgaaaattttgcctaccgcctggagctgaatggccacagaagaaggctgacctgggaggccacccccaggagcatccacgagggcatcgccacagccatcatgaacagcgactgcctggtgtttgacaccagcatcgcccagctgtttgctgaaaatggaaacctgggcatcaacgtgaccatctccatgtgctag

SEQ ID NO: 22209 - DNA, 942 bp, Artificial Sequence
  derived and/or modified sequence
atgaccggcaaggccaccccccccagcctgtacagctggcggggcgtgcttttcacatgtctacctgcagctagaacccgcaaaaggaaggagatgtcccgtcaaactgctacagcattgccaacaggtacttcaaaatgcccaccaagccagagggtccccgctctgacgggaacaaccgcatccaataacgacttggcgagccttttcgaatgcccggtgtgttttgactatgttctgccgcctatcttgcagtgccagtctggacatctagtttgttcaaattgccgacccaagctaacctgctgtccaacctgcagaggcccactgggatctatcaggaatctggcaatggagaaagtggctaacagtgtcctgtttccctgcaaatatgcctctagcggatgcgaaatcactctgccacacaccgaaaaagcagaccacgaggagctgtgtgagttccgcccttattcttgcccatgtccaggggcatcttgtaagtggcagggatccctggacgctgtcatgccccacctgatgcatcagcataaaagcatcaccaccttgcaaggggaggacatagtgtttctcgccacggacatcaatctccccggcgctgtggactgggtgatgatgcagtcttgtttcgggtttcactttatgctcgtgctggaaaaacaggagaagtacgatggccaccagcagtttttcgcaatagtgcagctaatcgggacaagaaaacaggcagaaaattttgcctacagactggagctcaacggacatcggcgaagacttacctgggaggctacgccccggtctattcatgaaggcatcgcaactgctatcatgaattctgattgcctagtattcgacacttccattgcccagctgttcgccgagaacgggaatctgggtatcaatgtcaccatatctatgtgctag

SEQ ID NO: 22210 - DNA, 897 bp, Artificial Sequence
  derived and/or modified sequence
atggtgatcatcatcttcctgctgcccccctacgtgttcatcagcgagatgtctagacaaacggccaccgcgcttcctacgggtacctccaaatgtcctccatcccagcgcgtgcctgcactcaccgggaccacagcaagtaacaatgatctggctagtctgtttgaatgtccagtctgcttcgattatgtcctcccaccaatcctgcagtgccagtccggccacctcgtttgctccaattgccgacccaaactaacctgttgtccaacttgtcgcgggccattaggttcgatccgaaaccttgccatggaaaaggtggccaactccgtgttgtttccatgcaaatatgcctctagcggttgtgaaatcactcttccccatacggagaaggcagatcacgaggaattgtgtgaattccggccctactcttgcccgtgtccaggtgcatcatgcaaatggcaagggagcctcgacgctgtgatgccgcacctcatgcaccagcataaatcaatcacaaccctgcagggggaggatatcgtgtttctagctaccgatattaacctgcctggggccgtggactgggtgatgatgcagtcctgttttggctttcacttcatgcttgtgcttgaaaaacaagagaagtacgacggccatcagcagttctttgccattgtgcagttgatcggcactcgcaaacaggccgagaatttcgcatacaggctggaattgaatgggcatcgccggcgactcacttgggaagccacaccgcgcagtatccatgaggggatcgctactgccatcatgaattccgattgcctagtgtttgatacatctatcgcccagttgtttgcagagaatggtaatctgggtataaatgtgactataagtatgtgctag

SEQ ID NO: 22211 - DNA, 942 bp, Artificial Sequence
  derived and/or modified sequence
atgactggcaaggcaactcctccctccctctattcgtggcgaggcgtcctgttcacttgtttgccagccgcacggacccggaagcgaaaggaaatgagccggcagaccgcaacggccctaccaacgggtactagcaagtgtccgccatctcagcgcgtgccggcacttacagggaccactgcctccaataacgacctggcatcacttttcgagtgtcccgtttgttttgattacgtcctacctcctatcctacagtgccagtccggccacttagtctgctcaaactgtcggccaaagctgacctgctgcccaacgtgccgcggaccattgggctcaatcagaaatttagccatggagaaagtggctaactcagtgctgtttccttgtaagtatgcgagctcgggttgtgaaatcactttgccccatacagagaaagccgatcacgaggaactctgtgagtttaggccatactcctgtccatgccccggagcttcctgcaaatggcaaggcagtctggacgccgtcatgccacatctcatgcaccagcataagagcataaccacgctccaaggagaggatatcgtatttctcgccaccgacatcaacctccctggtgctgtcgattgggtcatgatgcagtcctgcttcggtttccacttcatgctcgtactggagaagcaagagaaatacgacggtcaccagcagttcttcgcgattgtccagctcattggcacccgtaagcaggccgaaaatttcgcgtatagactagagttaaatggacacagaagaagattaacctgggaggccaccccgagaagtatacacgagggaattgccacagccataatgaactcagactgccttgtctttgatacatctatcgcccaattatttgccgaaaacggaaacctgggtatcaacgtgacgatttccatgtgttag

SEQ ID NO: 22212 - DNA, 897 bp, Artificial Sequence
  derived and/or modified sequence
atggtcattatcattttccttctgcccccttacgtatttatctctgagatgagcagacagacagccactgccttacctaccggcacctccaaatgtcccccaagccagagagtgcctgctttaaccggcacaacggctagcaataacgatctggctagtctgtttgaatgtcccgtgtgcttcgactacgtgctgccaccaattttacagtgccaatctggacaccttgtgtgtagtaattgtagacctaaactcacctgctgccccacttgcagaggccctctcggttctataaggaacttggcgatggagaaagttgcaaattcagttttgtttccttgcaaatatgcatcaagtggctgcgagattactctgcctcatacagaaaaggcagaccatgaagagctgtgcgaattcaggccctatagttgcccctgccctggtgcaagctgcaagtggcaggggtcactggacgcggtgatgccccaccttatgcaccagcataaatcgatcacaacactacaaggtgaagacattgtctttctcgcaactgatatcaatcttcctggagccgttgattgggtgatgatgcagtcttgctttggtttccacttcatgctagttttggaaaagcaggaaaaatatgatggacaccagcagttttttgccattgtgcagcttattgggacgaggaaacaggctgagaacttcgcctacagacttgaactcaatggccatagaagaaggctgacctgggaggctacccctcgatctatccatgagggcatcgcgacggccataatgaatagcgactgcctggtctttgatacctccatcgcccagttattcgcagagaacgggaacctcggaattaacgttacaatttctatgtgctag

SEQ ID NO: 22213 - DNA, 2415 bp, Artificial Sequence
  derived and/or modified sequence
gcaggcaggctcctgcagtaactcttgagctggctcagggagcgcacttccttctcagccagcgcgtcgccccctgcatccgtggcctccactggagctgggcaggaccctacccagtgaatctggagaaaacaaacttgggagacagacgaaagcttagggcacattggaggacagcgcagctgtggctcccatttttggagatgcagtcgaatttgagctcacagggaggtgtggttgcctcctggggatggaaaggcttcctttctccacctctgtaactggtgcttctgagaagtaaatggtatttggatcctgacctcagacgcgaatttgggtcttctgtgcttaggagcagaaagagcccaggaggggcctgttcctttacttcttgggggaaacgcaatgcgtggcctgacttctcatgacgggaaaggctactccaccttctctgtactcctggaggggagtcttgttcacatgtttaccagcggccaggacaaggaagagaaaagaaatgagccgtcagactgctacagcattacctaccggtacctcgaagtgtccaccatcccagagggtgcctgccctgactggcacaactgcatccaacaatgacttggcgagtctttttgagtgtccagtctgctttgactatgtgttaccgcccattcttcaatgtcagagtggccatcttgtttgtagcaactgtcgcccaaagctcacatgttgtccaacttgccggggccctttgggatccattcgcaacttggctatggagaaagtggctaattcagtacttttcccctgtaaatatgcgtcttctggatgtgaaataactctgccacacacagaaaaagcagaccatgaagagctctgtgagtttaggccttattcctgtccgtgccctggtgcttcctgtaaatggcaaggctctctggatgctgtaatgccccatctgatgcatcagcataagtccattacaaccctacagggagaggatatagtttttcttgctacagacattaatcttcctggtgctgttgactgggtgatgatgcagtcctgttttggctttcacttcatgttagtcttagagaaacaggaaaaatacgatggtcaccagcagttcttcgcaatcgtacagctgataggaacacgcaagcaagctgaaaattttgcttaccgacttgagctaaatggtcataggcgacgattgacttgggaagcgactcctcgatctattcatgaaggaattgcaacagccattatgaatagcgactgtctagtctttgacaccagcattgcacagctttttgcagaaaatggcaatttaggcatcaatgtaactatttccatgtgttgaaatggcaatcaaacattttctggccagtgtttaaaacttcagtttcacagaaaataaggcacccatctgtctgccaacctaaaactctttcggtaggtggaagctagacacatgaaggtaaataaaaagaaaggctgttaaatacaggaaacagttgcatgtagtaacactaatatatttaaaaataagtcaacagtaaaccactgaaaaaatatatgtatatacacccaagatgggcatcttttgtattaagaaaggaagcattgtaaaataattctgagttttgtgtttgttgtagattgattgtattgttgaaaaagtttgtttttgcgtgggagtgtgtgcctgcgtgggtgtgtgcgtgtttgggtttttttcctttaactgacaagccatcttgagtggtcatgggccactgcttttccctttgtgagtcaatacatagtgctgctgtgtgctttttttgtgtgtatttgctaatttttattaattttagtttttcattaaataaatttgacttttctgtaattcaggtttttcctttttttgtaccattttaaagttagtatcttttgatatgcatatttgtttatggtaaaaaatttataacgtgttcaatattttcttttcccccattaatcagttcattagaaatattttaaaatcagctattttgtgaagccatgagttccagaaagtaaaggtgacatcggaaaaataatcaaaagctatttaaagcatctataaggtgctctctttctgtcttctacagatgagtcacacctttgagcttaatctttgaaaggttagagaataaattgatttttataaatactgcaaatcaggcttttgtttcctttttcagatatcttggacaaatcacatattttaaaatttgttcttgtatttattggttttgcagaagaaggcatcgtcatgcacagtatttgtaattaaaagcaaatcatttgtttaaaaaggcagtttgcaaaaaatgtttttggtcttttataattctcattaaaagaatatctggcaaattaaaaaaa

SEQ ID NO: 22214 - DNA, 3352 bp, Artificial Sequence
  derived and/or modified sequence
tttcacccccaagacaaatagtggcctgccattttccagcccaggtagcttcctgggaaaagttgcttgttttatctttgactcagcctggctagttacattgtcgattatttcttccagatgatatttacctgttaaataatgtttattactctgctgatgaatgttttcagcaacgctggagaaccctaggctgcaaggggttcttcacctgttgactccatcccccacccccagtatggcatatatctctgccgtgctatcatctttattctttcctttttcattgtctcttcctgactgtcctcctttgttcattatgtctgacacatattgtggattgaaagtagaacagaaagatatactttctctaccagactaaaaagttttgagatggccctccatttctcccatgcctcacttcaccttagttgtgtttttatttatttttatattttcgccaccttcactagcgagtacatcccctcactcttgaggtgggcactgatcagtaggaaataagattaatacctggctggtgataatttggggggaagacttaattagatagagatggataatgggatggcagcagacctttccccttgtgacccttcccctcatttccaaaatacacctctagagtagataattgcttaccattaagaagagttaatggaaggtgatactctgattctttggcattggaactacattcaatccgcggtatcctcggattagttctaggacccccttctccataccaaaacctgaggatgctcaagtccctgatagaaaatggtgtcatatttgtatgtgcatattctcttgtataatttaagtgatctctggattacttaatacaatgtaaacaatatgtaaatagttgttatagactgtattttaaaaattttgtattctttataaatttttctgaatattttcaatccatggctggtgaagtcctcggatgcagaccgtgtggatacagagtgccgattttatacaggagttcacctgtaactccctgtacctatcaacagctgactccaaattagaaagaaatagagtaagggagcctcagggagagtcctagcaaaacggattcgattaaacttcagttccttgtatagtttctttagttgtttatggtccattttctattttagcatttattattctatgtagtctatccaaagacgattaagggagttccacatgttttccggaacattttgaaaagagagcttatccagtgtacagatcctaataaagtgcacattcagtgtaattttatttttttaatatcttttttaatcctatttttcttcctcttttgctcagtaaattttgtatgaaactttaaaaggacttatggcatgtaaacattatttataaagtaagtcatggttataattatttttctcctgcctccttatgtatttatttcagaaatgagccgtcagactgctacagcattacctaccggtacctcgaagtgtccaccatcccagagggtgcctgccctgactggcacaactgcatccaacaatgacttggcgagtctttttgagtgtccagtctgctttgactatgtgttaccgcccattcttcaatgtcagagtggccatcttgtttgtagcaactgtcgcccaaagctcacatgttgtccaacttgccggggccctttgggatccattcgcaacttggctatggagaaagtggctaattcagtacttttcccctgtaaatatgcgtcttctggatgtgaaataactctgccacacacagaaaaagcagaccatgaagagctctgtgagtttaggccttattcctgtccgtgccctggtgcttcctgtaaatggcaaggctctctggatgctgtaatgccccatctgatgcatcagcataagtccattacaaccctacagggagaggatatagtttttcttgctacagacattaatcttcctggtgctgttgactgggtgatgatgcagtcctgttttggctttcacttcatgttagtcttagagaaacaggaaaaatacgatggtcaccagcagttcttcgcaatcgtacagctgataggaacacgcaagcaagctgaaaattttgcttaccgacttgagctaaatggtcataggcgacgattgacttgggaagcgactcctcgatctattcatgaaggaattgcaacagccattatgaatagcgactgtctagtctttgacaccagcattgcacagctttttgcagaaaatggcaatttaggcatcaatgtaactatttccatgtgttgaaatggcaatcaaacattttctggccagtgtttaaaacttcagtttcacagaaaataaggcacccatctgtctgccaacctaaaactctttcggtaggtggaagctagacacatgaaggtaaataaaaagaaaggctgttaaatacaggaaacagttgcatgtagtaacactaatatatttaaaaataagtcaacagtaaaccactgaaaaaatatatgtatatacacccaagatgggcatcttttgtattaagaaaggaagcattgtaaaataattctgagttttgtgtttgttgtagattgattgtattgttgaaaaagtttgtttttgcgtgggagtgtgtgcctgcgtgggtgtgtgcgtgtttgggtttttttcctttaactgacaagccatcttgagtggtcatgggccactgcttttccctttgtgagtcaatacatagtgctgctgtgtgctttttttgtgtgtatttgctaatttttattaattttagtttttcattaaataaatttgacttttctgtaattcaggtttttcctttttttgtaccattttaaagttagtatcttttgatatgcatatttgtttatggtaaaaaatttataacgtgttcaatattttcttttcccccattaatcagttcattagaaatattttaaaatcagctattttgtgaagccatgagttccagaaagtaaaggtgacatcggaaaaataatcaaaagctatttaaagcatctataaggtgctctctttctgtcttctacagatgagtcacacctttgagcttaatctttgaaaggttagagaataaattgatttttataaatactgcaaatcaggcttttgtttcctttttcagatatcttggacaaatcacatattttaaaatttgttcttgtatttattggttttgcagaagaaggcatcgtcatgcacagtatttgtaattaaaagcaaatcatttgtttaaaaaggcagtttgcaaaaaatgtttttggtcttttataattctcattaaaagaatatctggcaaattaaaaaaa

SEQ ID NO: 22215 - DNA, 2147 bp, Artificial Sequence
  derived and/or modified sequence
cagtgtgtggtatttagcgggggcgcgcggcgggctcgaggacgcgcgaaacggcggcggcggcggcggccaggggggagccggggcggccgttgcggggcgcgctctcgagaggcggcggcggcccagggtgtcccgtcggtctcggcgccgggaagaggcggtggcgctgcccgcggtggcgggggttggcgacggagcgcgttggtgccaggaccggggtccgaggcgcgctctccgcccacagaaatgagccgtcagactgctacagcattacctaccggtacctcgaagtgtccaccatcccagagggtgcctgccctgactggcacaactgcatccaacaatgacttggcgagtctttttgagtgtccagtctgctttgactatgtgttaccgcccattcttcaatgtcagagtggccatcttgtttgtagcaactgtcgcccaaagctcacatgttgtccaacttgccggggccctttgggatccattcgcaacttggctatggagaaagtggctaattcagtacttttcccctgtaaatatgcgtcttctggatgtgaaataactctgccacacacagaaaaagcagaccatgaagagctctgtgagtttaggccttattcctgtccgtgccctggtgcttcctgtaaatggcaaggctctctggatgctgtaatgccccatctgatgcatcagcataagtccattacaaccctacagggagaggatatagtttttcttgctacagacattaatcttcctggtgctgttgactgggtgatgatgcagtcctgttttggctttcacttcatgttagtcttagagaaacaggaaaaatacgatggtcaccagcagttcttcgcaatcgtacagctgataggaacacgcaagcaagctgaaaattttgcttaccgacttgagctaaatggtcataggcgacgattgacttgggaagcgactcctcgatctattcatgaaggaattgcaacagccattatgaatagcgactgtctagtctttgacaccagcattgcacagctttttgcagaaaatggcaatttaggcatcaatgtaactatttccatgtgttgaaatggcaatcaaacattttctggccagtgtttaaaacttcagtttcacagaaaataaggcacccatctgtctgccaacctaaaactctttcggtaggtggaagctagacacatgaaggtaaataaaaagaaaggctgttaaatacaggaaacagttgcatgtagtaacactaatatatttaaaaataagtcaacagtaaaccactgaaaaaatatatgtatatacacccaagatgggcatcttttgtattaagaaaggaagcattgtaaaataattctgagttttgtgtttgttgtagattgattgtattgttgaaaaagtttgtttttgcgtgggagtgtgtgcctgcgtgggtgtgtgcgtgtttgggtttttttcctttaactgacaagccatcttgagtggtcatgggccactgcttttccctttgtgagtcaatacatagtgctgctgtgtgctttttttgtgtgtatttgctaatttttattaattttagtttttcattaaataaatttgacttttctgtaattcaggtttttcctttttttgtaccattttaaagttagtatcttttgatatgcatatttgtttatggtaaaaaatttataacgtgttcaatattttcttttcccccattaatcagttcattagaaatattttaaaatcagctattttgtgaagccatgagttccagaaagtaaaggtgacatcggaaaaataatcaaaagctatttaaagcatctataaggtgctctctttctgtcttctacagatgagtcacacctttgagcttaatctttgaaaggttagagaataaattgatttttataaatactgcaaatcaggcttttgtttcctttttcagatatcttggacaaatcacatattttaaaatttgttcttgtatttattggttttgcagaagaaggcatcgtcatgcacagtatttgtaattaaaagcaaatcatttgtttaaaaaggcagtttgcaaaaaatgtttttggtcttttataattctcattaaaagaatatctggcaaattaaaaaaa

SEQ ID NO: 22216 - DNA, 939 bp, Artificial Sequence
  derived and/or modified sequence
atgaccggcaaggccaccccccccagcctgtacagctggcgcggcgtgctgttcacctgcctgcccgccgcccgcacccgcaagcgcaaggagatgagccgccagaccgccaccgccctgcccaccggcaccagcaagtgcccccccagccagcgcgtgcccgccctgaccggcaccaccgccagcaacaacgacctggccagcctgttcgagtgccccgtgtgcttcgactacgtgctgccccccatcctgcagtgccagagcggccacctggtgtgcagcaactgccgccccaagctgacctgctgccccacctgccgcggccccctgggcagcatccgcaacctggccatggagaaggtggccaacagcgtgctgttcccctgcaagtacgccagcagcggctgcgagatcaccctgccccacaccgagaaggccgaccacgaggagctgtgcgagttccgcccctacagctgcccctgccccggcgccagctgcaagtggcagggcagcctggacgccgtgatgccccacctgatgcaccagcacaagagcatcaccaccctgcagggcgaggacatcgtgttcctggccaccgacatcaacctgcccggcgccgtggactgggtgatgatgcagagctgcttcggcttccacttcatgctggtgctggagaagcaggagaagtacgacggccaccagcagttcttcgccatcgtgcagctgatcggcacccgcaagcaggccgagaacttcgcctaccgcctggagctgaacggccaccgccgccgcctgacctgggaggccaccccccgcagcatccacgagggcatcgccaccgccatcatgaacagcgactgcctggtgttcgacaccagcatcgcccagctgttcgccgagaacggcaacctgggcatcaacgtgaccatcagcatgtgc

SEQ ID NO: 22217 - protein, 522 aa, Artificial Sequence
  derived and/or modified sequence
MAFLDNPTIILAHIRQSHVTSDDTGMCEMVLIDHDVDLEKIHPPSMPGDSGSEIQGSNGETQGYVYAQSVDITSSWDFGIRRRSNTAQRLERLRKERQNQIKCKNIQWKERNSKQSAQELKSLFEKKSLKEKPPISGKQSILSVRLEQCPLQLNNPFNEYSKFDGKGHVGTTATKKIDVYLPLHSSQDRLLPMTVVTMASARVQDLIGLICWQYTSEGREPKLNDNVSAYCLHIAEDDGEVDTDFPPLDSNEPIHKFGFSTLALVEKYSSPGLTSKESLFVRINAAHGFSLIQVDNTKVTMKEILLKAVKRRKGSQKVSGPQYRLEKQSEPNVAVDLDSTLESQSAWEFCLVRENSSRADGVFEEDSQIDIATVQDMLSSHHYKSFKVSMIHRLRFTTDVQLGISGDKVEIDPVTNQKASTKFWIKQKPISIDSDLLCACDLAEEKSPSHAIFKLTYLSNHDYKHLYFESDAATVNEIVLKVNYILESRASTARADYFAQKQRKLNRRTSFSFQKEKKSGQQ

SEQ ID NO: 22218 - protein, 93 aa, Artificial Sequence
  derived and/or modified sequence
MAFLDNPTIILAHIRQSHVTSDDTGMCEMVLIDHDVDLEKIHPPSMPGDSGSEIQGSNGETQGYVYAQSVDITSSWDFGIRRRSNTAQRLERL

SEQ ID NO: 22219 - DNA, 1569 bp, Artificial Sequence
  derived and/or modified sequence
atggccttcctggacaaccccaccatcatcctggcccacatcagacagagccacgtgaccagcgacgacaccggcatgtgcgagatggtgctgatcgaccacgacgtggacctggagaagatccacccccccagcatgcccggcgacagcggcagcgagatccagggcagcaacggcgagacccagggctacgtgtacgcccagagcgtggacatcaccagcagctgggacttcggcatcagaagaagaagcaacaccgcccagagactggagagactgagaaaggagagacagaaccagatcaagtgcaagaacatccagtggaaggagagaaacagcaagcagagcgcccaggagctgaagagcctgttcgagaagaagagcctgaaggagaagccccccatcagcggcaagcagagcatcctgagcgtgagactggagcagtgccccctgcagctgaacaaccccttcaacgagtacagcaagttcgacggcaagggccacgtgggcaccaccgccaccaagaagatcgacgtgtacctgcccctgcacagcagccaggacagactgctgcccatgaccgtggtgaccatggccagcgccagagtgcaggacctgatcggcctgatctgctggcagtacaccagcgagggcagagagcccaagctgaacgacaacgtgagcgcctactgcctgcacatcgccgaggacgacggcgaggtggacaccgacttcccccccctggacagcaacgagcccatccacaagttcggcttcagcaccctggccctggtggagaagtacagcagccccggcctgaccagcaaggagagcctgttcgtgagaatcaacgccgcccacggcttcagcctgatccaggtggacaacaccaaggtgaccatgaaggagatcctgctgaaggccgtgaagagaagaaagggcagccagaaggtgagcggcccccagtacagactggagaagcagagcgagcccaacgtggccgtggacctggacagcaccctggagagccagagcgcctgggagttctgcctggtgagagagaacagcagcagagccgacggcgtgttcgaggaggacagccagatcgacatcgccaccgtgcaggacatgctgagcagccaccactacaagagcttcaaggtgagcatgatccacagactgagattcaccaccgacgtgcagctgggcatcagcggcgacaaggtggagatcgaccccgtgaccaaccagaaggccagcaccaagttctggatcaagcagaagcccatcagcatcgacagcgacctgctgtgcgcctgcgacctggccgaggagaagagccccagccacgccatcttcaagctgacctacctgagcaaccacgactacaagcacctgtacttcgagagcgacgccgccaccgtgaacgagatcgtgctgaaggtgaactacatcctggagagcagagccagcaccgccagagccgactacttcgcccagaagcagagaaagctgaacagaagaaccagcttcagcttccagaaggagaagaagagcggccagcagtag

SEQ ID NO: 22220 - DNA, 1569 bp, Artificial Sequence
  derived and/or modified sequence
atggcatttttggataatcctacgattattcttgcccatataagacagagccatgtgacctcggacgacacaggcatgtgcgaaatggttctgatagatcatgatgtagacctggagaagatccatcctcctagcatgccaggtgactcaggctcagaaattcaggggtccaatggcgaaactcagggctacgtgtacgcgcaaagcgtggatatcacctcctcatgggacttcggcattagaagacgttctaacacagcgcagcgactcgaacgactaaggaaggagagacaaaatcagataaaatgcaagaatatccagtggaaagaaagaaattccaaacagtcagcccaggaactgaagtcactgttcgagaaaaaatcactcaaagagaagcctccaatttcagggaagcaatccattctgtcagtgaggctggaacagtgccccctgcaacttaataacccattcaatgagtattccaaatttgatggcaaaggtcacgtgggcacgacagccacgaagaagatcgacgtctatctgccactacatagctcccaggacaggctgctcccaatgactgtggtgactatggcaagcgctagagtgcaagatctgattggactgatttgttggcaatacacttccgaggggcgggaaccgaagctaaatgacaacgtatcggcctactgcttgcacatcgcggaggacgatggcgaagtggacacagattttccacccctggatagtaacgagccgatacacaagtttgggttcagtaccctcgcacttgtggagaagtacagcagcccagggctgaccagcaaggaaagtttgttcgttaggattaatgcagcccacggcttctcattgatccaggtggataacactaaggttactatgaaggagatcctgctgaaggctgtgaaaaggagaaagggctctcaaaaagtcagcggaccacaatacaggctcgagaaacagtcagaaccaaacgtggcggtggatctcgattccacactggaatcacagtcagcttgggaattttgtctggtgcgagagaactctagtcgtgccgacggggtttttgaggaagattctcagatcgacattgccacagtgcaggacatgctgtcttctcatcattacaaatcttttaaggtatccatgatccatagactgcgcttcacaactgatgtccagctgggcatcagcggcgacaaagtggaaattgaccccgttactaaccagaaggccagcacaaaattctggattaagcagaagcccataagtatcgattctgatttgctctgtgcttgtgatcttgccgaagaaaaatccccctcccacgctatttttaagttaacctacctgtccaaccatgattataaacacctgtatttcgagtctgatgcggccaccgtgaacgaaatagttctcaaggtaaactatattctagaaagtcgcgcgtccaccgccagggccgactacttcgcacagaagcagaggaagttgaacagaagaacctcctttagtttccagaaagaaaagaagtctggacaacagtag

SEQ ID NO: 22221 - DNA, 1569 bp, Artificial Sequence
  derived and/or modified sequence
atggcttttttggacaaccctacaattatcttggctcacattaggcagtctcatgtgacatccgacgatacgggaatgtgcgaaatggtcctgatcgatcacgatgtcgatctcgaaaagatccacccgccctccatgccaggagactccggtagcgagatccagggatccaatggagagactcagggttacgtttatgctcagtccgtcgacatcacatcttcctgggattttggaatcagacgtcggtccaacacagcccagcgcctcgaaaggctgcgtaaagaacggcagaatcaaatcaagtgcaagaatattcaatggaaagagagaaattctaagcagagtgcgcaggagctcaaaagcctttttgagaagaagagcctgaaggagaaacctcccatttccgggaagcagagtatcctcagtgttaggcttgaacagtgtccccttcaacttaataacccattcaacgaatacagtaagttcgacggtaaaggacacgtcggaactactgcaacaaaaaaaatcgacgtatacctgcccctacacagttctcaggacaggcttctgcctatgaccgtggtgacgatggctagtgctcgcgtacaggacctcataggcttgatatgttggcaatatacatctgagggccgggagccaaagctgaatgacaacgttagcgcttactgccttcacattgctgaggatgatggcgaagttgataccgattttccccccttggacagcaacgaaccaatccataagtttggattcagtacgctggccctcgtggagaagtattctagccccggactaacatccaaggagtcgctctttgttcgcatcaacgctgcccacggctttagcctgatccaggtagacaatactaaagttacgatgaaggaaatcttgcttaaagccgtgaaacgacgtaagggcagccagaaggtctctggaccccagtatcggctggagaaacaaagcgagcctaacgtggcggtggatttggacagtaccctcgaatctcagagtgcctgggaattttgcctcgtcagggagaattcctctcgagctgatggcgtgttcgaagaggactcccagattgacattgcaaccgttcaggacatgctcagttcccaccactataaatctttcaaggtgtcaatgattcacaggctccggtttaccaccgatgttcagctcggcatttcaggagataaggtggagatcgatcccgtgactaaccagaaggcgtccacaaaattctggattaaacagaagcccatatccatcgattctgacttgttgtgtgcttgtgacttagccgaagagaagtctccttctcacgccatcttcaagcttacttatctgtccaaccatgattataaacatctgtacttcgaatccgacgctgcgacggtaaatgagatcgtattgaaagttaattacatacttgagtcgagagcttccactgcgcgagcagattatttcgctcagaagcaacgtaagcttaatcgtcgcacttccttctctttccaaaaggaaaaaaagagcggccaacagtag

SEQ ID NO: 22222 - DNA, 1569 bp, Artificial Sequence
  derived and/or modified sequence
atggccttcctggacaaccccaccatcatcctggcccacatccggcagagccacgtgaccagtgatgacaccggcatgtgtgagatggtgctgattgaccatgatgtggacctggagaagatccaccccccatccatgcctggggacagcggcagcgagatccagggcagcaatggagagacccagggctacgtgtatgcccagagcgtggacatcaccagctcctgggactttggcatcagaagaagaagcaacacagcccagaggctggagcggctgaggaaggagcggcagaaccagatcaagtgcaagaacatccagtggaaggagaggaacagcaagcagagcgcccaggagctgaagagcctgtttgagaagaagagcctgaaggagaagccacccatcagcggcaagcagagcatcctgtctgtgcggctggagcagtgccccctgcagctgaacaaccccttcaatgagtacagcaagtttgatggcaagggccacgtgggcaccacagccaccaagaagattgatgtgtacctgcccctgcacagcagccaggaccggctgctgcccatgacagtggtgaccatggccagcgcccgggtgcaggacctgattggcctcatctgctggcagtacaccagcgagggccgggagcccaagctgaatgacaacgtgtctgcctactgcctgcacatcgccgaggatgatggagaggtggacacagacttcccccccctggacagcaatgagcccatccacaagtttggcttcagcaccctggccctggtggagaagtacagcagccctggcctgaccagcaaggagagcctgtttgtgcgcatcaatgctgcccacggcttcagcctcatccaggtggacaacaccaaggtgaccatgaaggagatcctgctgaaggctgtgaagaggaggaagggcagccagaaggtgtctggcccccagtaccgcctggagaagcagagcgagcccaacgtggccgtggacctggacagcaccctggagagccagagcgcctgggagttctgcctggtgcgggagaacagcagcagagcagatggagtgtttgaggaggacagccagattgatattgccaccgtgcaggacatgctgagcagccaccactacaagagcttcaaggtgtccatgatccaccggctgcgcttcaccacagatgtgcagctgggcatcagcggggacaaggtggagattgatcctgtgaccaaccagaaggccagcaccaagttctggatcaagcagaagcccatcagcattgacagcgacctgctgtgtgcctgtgacctggccgaggagaagagccccagccacgccatcttcaagctgacctacctgagcaaccacgactacaagcacctgtactttgaaagtgatgctgccaccgtgaatgagatcgtgctgaaggtgaactacatcctggagagccgggccagcacagcccgggctgactactttgcccagaagcagaggaagctgaacagaaggaccagcttctccttccagaaggagaagaagagcggccagcagtag

SEQ ID NO: 22223 - DNA, 3395 bp, Artificial Sequence
  derived and/or modified sequence
tccggaacgccggggtgtggttccgggtcgtgtgcggctcggggtaatagggctgctgctcggccggccggcggcggcgagcagcaggggcatgagggctaacccgggaagcggcagctgagcgggccgggaggagcgccggtccccgtggatcccgagagtgcagagctcggggcaggggccgggaggcgtgggggagccgggccctcccctcaggaacgtgtcccggggccgacccggcccgtagtgtggaagcagcttcaggtaggtgagctcgtgaaacaatatgaagaggagaaaatagccttttaaggaaattggcccacagaaaggatggccttcttggacaatccaactatcattctagctcatattcgacagtcacatgtgaccagtgatgacacgggaatgtgtgagatggttctcattgatcatgatgttgacctagagaagattcatcctccttcaatgcctggagacagtgggtcagaaattcagggaagcaatggtgagactcagggctatgtatatgcccagtcagtcgatattacctcaagttgggactttggtattagaagacgctcaaacacagctcaaagattagaacgactccgaaaagagagacaaaaccagatcaaatgcaaaaatattcagtggaaagaaagaaattctaagcaatcagcccaggagttaaagtcactgtttgaaaaaaaatctctcaaagagaagcctccaatttctgggaagcagtcgatattatctgtacgcctagaacagtgccctctgcagctgaataacccttttaacgagtattccaaatttgatggcaagggtcatgtaggtacaacagcaaccaagaagatcgatgtctacctccctctgcactcgagccaggacagactgctgccaatgaccgtggtgacaatggccagcgccagggtgcaggacctgatcgggctcatctgctggcagtatacaagcgaaggacgggagccgaagctcaatgacaatgtcagtgcctactgcctgcatattgctgaggatgatggggaggtggacaccgatttccccccgctggattccaatgagcccattcataagtttggcttcagtactttggccctggttgaaaagtactcatctcctggtctgacatccaaagagtcactctttgttcgaataaatgctgctcatggattctcccttattcaggtggacaacacaaaggttaccatgaaggaaatcttactgaaggcagtgaagcgaagaaaaggatcccagaaagtttcaggccctcagtaccgcctggagaagcagagcgagcccaatgtcgccgttgacctggacagcactttggagagccagagcgcatgggagttctgcctggtccgcgagaacagttcaagggcagacggggtttttgaggaggattcgcaaattgacatagccacagtacaggatatgcttagcagccaccattacaagtcattcaaagtcagcatgatccacagactgcgattcacaaccgacgtacagctaggtatctctggagacaaagtagagatagaccctgttacgaatcagaaagccagcactaagttttggattaagcagaaacccatctcaatcgattccgacctgctctgtgcctgtgaccttgctgaagagaaaagccccagtcacgcaatatttaaactcacgtatctaagcaatcacgactataaacacctctactttgaatcggacgctgctaccgtcaatgaaattgtgctcaaggttaactacatcctggaatcgcgagctagcactgcccgggctgactactttgctcaaaaacaaagaaaactgaacagacgtacgagcttcagcttccagaaggagaagaaatccgggcagcagtgacactggcctccagcctcaatctgttccgtagctcagagcctgcctgccagggccaagtgccctagagtccacccggtgtcctgaagtcctcggggggaggccagcccctggctcactggcacagggcaggtgggctctcggggaaggtgtcgggggccccctaggagggagcgctggggacattgccatgggacggaagtctgcttggcagtggctttgataagcgatgcttgggggtcagaccaccccctagaggagccacgtgccgcccagccaccttcaatgcctgccaccctgcccgaggatgtacagagccgtgcccacacatttccttgcaacttgatcaaatttcttaaagcaaacaacaaaaatgtacatttctgtttttccttttaataaacaggtgtactctttatcatggttggtatgatggaccattctttggggcggaggattgattatgttactctctttaaaatctgttcccatattgaacaggcagattggaaaagctatggttcgatttctcagaagaaatgtttaggtcttagtcaatagttttaactatgccatttgtttaaatgagtgcatttgcttcgagggtagtgtcttactaaaagttaggaacagagacctagtggtgtgtccaaggccgtgtcactttccccttcagcacaccccagcttctgacctcagagcccaggagctgcgtggacagtgtggggtgccaggaggaggggcggtggctggtcctcaggcacgctgcactcccagccagacatggtctttccgtttcttaagtagcaagtgtaggtttcagctggcagttccacctgcatgttctctgcttcgctgccttggaaggggccacattccccattcctcttctccttacagcgcctgcctcctttttcaagcaggcggaaagctgctgtttctcacgtttcagggagaggggtgagcggagggagacctgtgtccgtgccgtccggctccctgggtgggaacaggcaagggatcagatgcccctgacaccacgcctctggccacaccagatgcctctgcagtcctcgacagcctcttcagtgtccctcctgcggtgatgtccttactgtccccagccagggccggggaccggtgtttcactgaggacctgcattagaaacattttttaaattgttgtacaggaagagatgtgtctaaaacagcatcttaaagctgagtgtatttctttgcacaaggggtcatgctgatgaattcttctttcattctgatctttgttcagccaacaggagcgtccttttctaatgtcttccattcctaccccccacccaaaaacaaaagaaatatttgtagcttgctatctgtatttgaatttttagcaattttatatttagatactttgaaaaatgtaaatgactaatttggtcattaaatcttgtgacatattcgatattaaaatgatattaaaataaaagtcatataaatacaca

SEQ ID NO: 22224 - DNA, 3131 bp, Artificial Sequence
  derived and/or modified sequence
gtaggtgagctcgtgaaacaatatgaagaggagaaaatagccttttaaggaaattggcccacagaaaggatggccttcttggacaatccaactatcattctagctcatattcgacagtcacatgtgaccagtgatgacacgggaatgtgtgagatggttctcattgatcatgatgttgacctagagaagattcatcctccttcaatgcctggagacagtgggtcagaaattcagggaagcaatggtgagactcagggctatgtatatgcccagtcagtcgatattacctcaagttgggactttggtattagaagacgctcaaacacagctcaaagattagaacgactccgaaaagagagacaaaaccagatcaaatgcaaaaatattcagtggaaagaaagaaattctaagcaatcagcccaggagttaaagtcactgtttgaaaaaaaatctctcaaagagaagcctccaatttctgggaagcagtcgatattatctgtacgcctagaacagtgccctctgcagctgaataacccttttaacgagtattccaaatttgatggcaagggtcatgtaggtacaacagcaaccaagaagatcgatgtctacctccctctgcactcgagccaggacagactgctgccaatgaccgtggtgacaatggccagcgccagggtgcaggacctgatcgggctcatctgctggcagtatacaagcgaaggacgggagccgaagctcaatgacaatgtcagtgcctactgcctgcatattgctgaggatgatggggaggtggacaccgatttccccccgctggattccaatgagcccattcataagtttggcttcagtactttggccctggttgaaaagtactcatctcctggtctgacatccaaagagtcactctttgttcgaataaatgctgctcatggattctcccttattcaggtggacaacacaaaggttaccatgaaggaaatcttactgaaggcagtgaagcgaagaaaaggatcccagaaagtttcaggccctcagtaccgcctggagaagcagagcgagcccaatgtcgccgttgacctggacagcactttggagagccagagcgcatgggagttctgcctggtccgcgagaacagttcaagggcagacggggtttttgaggaggattcgcaaattgacatagccacagtacaggatatgcttagcagccaccattacaagtcattcaaagtcagcatgatccacagactgcgattcacaaccgacgtacagctaggtatctctggagacaaagtagagatagaccctgttacgaatcagaaagccagcactaagttttggattaagcagaaacccatctcaatcgattccgacctgctctgtgcctgtgaccttgctgaagagaaaagccccagtcacgcaatatttaaactcacgtatctaagcaatcacgactataaacacctctactttgaatcggacgctgctaccgtcaatgaaattgtgctcaaggttaactacatcctggaatcgcgagctagcactgcccgggctgactactttgctcaaaaacaaagaaaactgaacagacgtacgagcttcagcttccagaaggagaagaaatccgggcagcagtgacactggcctccagcctcaatctgttccgtagctcagagcctgcctgccagggccaagtgccctagagtccacccggtgtcctgaagtcctcggggggaggccagcccctggctcactggcacagggcaggtgggctctcggggaaggtgtcgggggccccctaggagggagcgctggggacattgccatgggacggaagtctgcttggcagtggctttgataagcgatgcttgggggtcagaccaccccctagaggagccacgtgccgcccagccaccttcaatgcctgccaccctgcccgaggatgtacagagccgtgcccacacatttccttgcaacttgatcaaatttcttaaagcaaacaacaaaaatgtacatttctgtttttccttttaataaacaggtgtactctttatcatggttggtatgatggaccattctttggggcggaggattgattatgttactctctttaaaatctgttcccatattgaacaggcagattggaaaagctatggttcgatttctcagaagaaatgtttaggtcttagtcaatagttttaactatgccatttgtttaaatgagtgcatttgcttcgagggtagtgtcttactaaaagttaggaacagagacctagtggtgtgtccaaggccgtgtcactttccccttcagcacaccccagcttctgacctcagagcccaggagctgcgtggacagtgtggggtgccaggaggaggggcggtggctggtcctcaggcacgctgcactcccagccagacatggtctttccgtttcttaagtagcaagtgtaggtttcagctggcagttccacctgcatgttctctgcttcgctgccttggaaggggccacattccccattcctcttctccttacagcgcctgcctcctttttcaagcaggcggaaagctgctgtttctcacgtttcagggagaggggtgagcggagggagacctgtgtccgtgccgtccggctccctgggtgggaacaggcaagggatcagatgcccctgacaccacgcctctggccacaccagatgcctctgcagtcctcgacagcctcttcagtgtccctcctgcggtgatgtccttactgtccccagccagggccggggaccggtgtttcactgaggacctgcattagaaacattttttaaattgttgtacaggaagagatgtgtctaaaacagcatcttaaagctgagtgtatttctttgcacaaggggtcatgctgatgaattcttctttcattctgatctttgttcagccaacaggagcgtccttttctaatgtcttccattcctaccccccacccaaaaacaaaagaaatatttgtagcttgctatctgtatttgaatttttagcaattttatatttagatactttgaaaaatgtaaatgactaatttggtcattaaatcttgtgacatattcgatattaaaatgatattaaaataaaagtcatataaatacaca

SEQ ID NO: 22225 - DNA, 3045 bp, Artificial Sequence
  derived and/or modified sequence
ccgggtcgtgtgcggctcggggtaatagggctgctgctcggccggccggcggcggcgagcagcaggggcatgagggctaacccgggaagcggcagctgagcgggccgggaggagcgccggtccccgtggatcccgagagtgcagagctcggggcaggggccgggaggcgtgggggagccgggccctcccctcaggaacgtgtcccggggccgacccggcccgtagtgtggaagcagcttcagctcaaagattagaacgactccgaaaagagagacaaaaccagatcaaatgcaaaaatattcagtggaaagaaagaaattctaagcaatcagcccaggagttaaagtcactgtttgaaaaaaaatctctcaaagagaagcctccaatttctgggaagcagtcgatattatctgtacgcctagaacagtgccctctgcagctgaataacccttttaacgagtattccaaatttgatggcaagggtcatgtaggtacaacagcaaccaagaagatcgatgtctacctccctctgcactcgagccaggacagactgctgccaatgaccgtggtgacaatggccagcgccagggtgcaggacctgatcgggctcatctgctggcagtatacaagcgaaggacgggagccgaagctcaatgacaatgtcagtgcctactgcctgcatattgctgaggatgatggggaggtggacaccgatttccccccgctggattccaatgagcccattcataagtttggcttcagtactttggccctggttgaaaagtactcatctcctggtctgacatccaaagagtcactctttgttcgaataaatgctgctcatggattctcccttattcaggtggacaacacaaaggttaccatgaaggaaatcttactgaaggcagtgaagcgaagaaaaggatcccagaaagtttcaggccctcagtaccgcctggagaagcagagcgagcccaatgtcgccgttgacctggacagcactttggagagccagagcgcatgggagttctgcctggtccgcgagaacagttcaagggcagacggggtttttgaggaggattcgcaaattgacatagccacagtacaggatatgcttagcagccaccattacaagtcattcaaagtcagcatgatccacagactgcgattcacaaccgacgtacagctaggtatctctggagacaaagtagagatagaccctgttacgaatcagaaagccagcactaagttttggattaagcagaaacccatctcaatcgattccgacctgctctgtgcctgtgaccttgctgaagagaaaagccccagtcacgcaatatttaaactcacgtatctaagcaatcacgactataaacacctctactttgaatcggacgctgctaccgtcaatgaaattgtgctcaaggttaactacatcctggaatcgcgagctagcactgcccgggctgactactttgctcaaaaacaaagaaaactgaacagacgtacgagcttcagcttccagaaggagaagaaatccgggcagcagtgacactggcctccagcctcaatctgttccgtagctcagagcctgcctgccagggccaagtgccctagagtccacccggtgtcctgaagtcctcggggggaggccagcccctggctcactggcacagggcaggtgggctctcggggaaggtgtcgggggccccctaggagggagcgctggggacattgccatgggacggaagtctgcttggcagtggctttgataagcgatgcttgggggtcagaccaccccctagaggagccacgtgccgcccagccaccttcaatgcctgccaccctgcccgaggatgtacagagccgtgcccacacatttccttgcaacttgatcaaatttcttaaagcaaacaacaaaaatgtacatttctgtttttccttttaataaacaggtgtactctttatcatggttggtatgatggaccattctttggggcggaggattgattatgttactctctttaaaatctgttcccatattgaacaggcagattggaaaagctatggttcgatttctcagaagaaatgtttaggtcttagtcaatagttttaactatgccatttgtttaaatgagtgcatttgcttcgagggtagtgtcttactaaaagttaggaacagagacctagtggtgtgtccaaggccgtgtcactttccccttcagcacaccccagcttctgacctcagagcccaggagctgcgtggacagtgtggggtgccaggaggaggggcggtggctggtcctcaggcacgctgcactcccagccagacatggtctttccgtttcttaagtagcaagtgtaggtttcagctggcagttccacctgcatgttctctgcttcgctgccttggaaggggccacattccccattcctcttctccttacagcgcctgcctcctttttcaagcaggcggaaagctgctgtttctcacgtttcagggagaggggtgagcggagggagacctgtgtccgtgccgtccggctccctgggtgggaacaggcaagggatcagatgcccctgacaccacgcctctggccacaccagatgcctctgcagtcctcgacagcctcttcagtgtccctcctgcggtgatgtccttactgtccccagccagggccggggaccggtgtttcactgaggacctgcattagaaacattttttaaattgttgtacaggaagagatgtgtctaaaacagcatcttaaagctgagtgtatttctttgcacaaggggtcatgctgatgaattcttctttcattctgatctttgttcagccaacaggagcgtccttttctaatgtcttccattcctaccccccacccaaaaacaaaagaaatatttgtagcttgctatctgtatttgaatttttagcaattttatatttagatactttgaaaaatgtaaatgactaatttggtcattaaatcttgtgacatattcgatattaaaatgatattaaaataaaagtcatataaatacaca

SEQ ID NO: 22226 - DNA, 2977 bp, Artificial Sequence
  derived and/or modified sequence
tccggaacgccggggtgtggttccgggtcgtgtgcggctcggggtaatagggctgctgctcggccggccggcggcggcgagcagcaggggcatgagggctaacccgggaagcggcagctgagcgggccgggaggagcgccggtccccgtggatcccgagagtgcagagctcggggcaggggccgggaggcgtgggggagccgggccctcccctcaggaacgtgtcccggggccgacccggcccgtagtgtggaagcagcttcagcccaggagttaaagtcactgtttgaaaaaaaatctctcaaagagaagcctccaatttctgggaagcagtcgatattatctgtacgcctagaacagtgccctctgcagctgaataacccttttaacgagtattccaaatttgatggcaagggtcatgtaggtacaacagcaaccaagaagatcgatgtctacctccctctgcactcgagccaggacagactgctgccaatgaccgtggtgacaatggccagcgccagggtgcaggacctgatcgggctcatctgctggcagtatacaagcgaaggacgggagccgaagctcaatgacaatgtcagtgcctactgcctgcatattgctgaggatgatggggaggtggacaccgatttccccccgctggattccaatgagcccattcataagtttggcttcagtactttggccctggttgaaaagtactcatctcctggtctgacatccaaagagtcactctttgttcgaataaatgctgctcatggattctcccttattcaggtggacaacacaaaggttaccatgaaggaaatcttactgaaggcagtgaagcgaagaaaaggatcccagaaagtttcaggccctcagtaccgcctggagaagcagagcgagcccaatgtcgccgttgacctggacagcactttggagagccagagcgcatgggagttctgcctggtccgcgagaacagttcaagggcagacggggtttttgaggaggattcgcaaattgacatagccacagtacaggatatgcttagcagccaccattacaagtcattcaaagtcagcatgatccacagactgcgattcacaaccgacgtacagctaggtatctctggagacaaagtagagatagaccctgttacgaatcagaaagccagcactaagttttggattaagcagaaacccatctcaatcgattccgacctgctctgtgcctgtgaccttgctgaagagaaaagccccagtcacgcaatatttaaactcacgtatctaagcaatcacgactataaacacctctactttgaatcggacgctgctaccgtcaatgaaattgtgctcaaggttaactacatcctggaatcgcgagctagcactgcccgggctgactactttgctcaaaaacaaagaaaactgaacagacgtacgagcttcagcttccagaaggagaagaaatccgggcagcagtgacactggcctccagcctcaatctgttccgtagctcagagcctgcctgccagggccaagtgccctagagtccacccggtgtcctgaagtcctcggggggaggccagcccctggctcactggcacagggcaggtgggctctcggggaaggtgtcgggggccccctaggagggagcgctggggacattgccatgggacggaagtctgcttggcagtggctttgataagcgatgcttgggggtcagaccaccccctagaggagccacgtgccgcccagccaccttcaatgcctgccaccctgcccgaggatgtacagagccgtgcccacacatttccttgcaacttgatcaaatttcttaaagcaaacaacaaaaatgtacatttctgtttttccttttaataaacaggtgtactctttatcatggttggtatgatggaccattctttggggcggaggattgattatgttactctctttaaaatctgttcccatattgaacaggcagattggaaaagctatggttcgatttctcagaagaaatgtttaggtcttagtcaatagttttaactatgccatttgtttaaatgagtgcatttgcttcgagggtagtgtcttactaaaagttaggaacagagacctagtggtgtgtccaaggccgtgtcactttccccttcagcacaccccagcttctgacctcagagcccaggagctgcgtggacagtgtggggtgccaggaggaggggcggtggctggtcctcaggcacgctgcactcccagccagacatggtctttccgtttcttaagtagcaagtgtaggtttcagctggcagttccacctgcatgttctctgcttcgctgccttggaaggggccacattccccattcctcttctccttacagcgcctgcctcctttttcaagcaggcggaaagctgctgtttctcacgtttcagggagaggggtgagcggagggagacctgtgtccgtgccgtccggctccctgggtgggaacaggcaagggatcagatgcccctgacaccacgcctctggccacaccagatgcctctgcagtcctcgacagcctcttcagtgtccctcctgcggtgatgtccttactgtccccagccagggccggggaccggtgtttcactgaggacctgcattagaaacattttttaaattgttgtacaggaagagatgtgtctaaaacagcatcttaaagctgagtgtatttctttgcacaaggggtcatgctgatgaattcttctttcattctgatctttgttcagccaacaggagcgtccttttctaatgtcttccattcctaccccccacccaaaaacaaaagaaatatttgtagcttgctatctgtatttgaatttttagcaattttatatttagatactttgaaaaatgtaaatgactaatttggtcattaaatcttgtgacatattcgatattaaaatgatattaaaataaaagtcatataaatacaca

SEQ ID NO: 22227 - DNA, 1569 bp, Artificial Sequence
  derived and/or modified sequence
atggccttcctggacaaccccaccatcatcctggcccacatccggcagtctcacgtaacctccgacgacacagggatgtgtgagatggtacttattgatcatgacgtggacctggagaagattcacccgccctccatgcctggcgattctggatcggagattcaaggatccaatggtgagacccagggatacgtatacgcccagagtgttgacataacttcgtcctgggatttcggcattagaagaagaagcaacaccgcccaaagactggagagactgcgcaaggagcgtcagaaccagattaaatgcaagaatatacagtggaaggagcgcaacagcaagcagagcgcacaggagctgaagtctctgtttgagaagaaaagcctcaaagagaagcccccaatttcagggaaacaaagtatcctcagcgttagattggaacagtgtccccttcaactgaacaatcctttcaacgagtattcgaagttcgatggaaaaggccacgttgggaccacagccacaaagaaaattgatgtgtacctcccactgcattcgagccaagatcgcctattacccatgacggttgtgaccatggcttcagcacgggtgcaggacctcataggtcttatctgttggcaatacacctcagagggtcgggagcctaagttgaatgataacgtttcagcatattgcctccatatagcagaggacgatggggaagttgacactgattttccacctctcgactccaatgagcctattcacaagtttgggttcagcacccttgccctggttgagaagtactcatcccctggactgacttctaaggagagtttgtttgtccgcattaacgctgcacatggcttttctctcatccaggtggataacacaaaggtgaccatgaaagaaattttgctgaaagcagtaaagagacggaaggggtctcagaaagtgtccggtccccagtaccggcttgagaagcagagtgaacctaacgtggccgtggacttggattccacacttgaatcgcagtcggcttgggaattctgcctggtgcgggaaaattcctctcgggccgacggtgtgtttgaagaagacagccagatcgatattgcaaccgtccaggacatgttgagtagtcatcactacaaatcttttaaggtcagtatgatacacagactgaggttcaccaccgatgtccagcttggaattagcggcgacaaggtggagatcgatccagtcactaaccagaaggcttccactaagttttggatcaagcagaaacctatttccatcgacagtgacctgctgtgcgcctgcgacctggcagaagagaaatctccaagccacgcaattttcaagctcacatatctctcaaatcacgattacaaacacttgtactttgagtccgatgctgcaactgtgaacgaaattgtcctcaaggtcaactacatccttgagtctcgagcttcaaccgcacgggcggactacttcgcccagaaacagcgaaagttgaatcgcaggaccagcttcagcttccagaaggagaagaaatcaggccagcaatag

SEQ ID NO: 22228 - DNA, 1569 bp, Artificial Sequence
  derived and/or modified sequence
atggccttcctggacaaccccaccatcatcctggcccacatccggcaaagtcacgtgacgtcagacgacacgggcatgtgtgaaatggtcctgatcgaccatgatgtggatctggagaagatccacccacccagcatgccaggcgacagcggcagcgagatccagggaagcaatggtgagactcaaggctatgtgtatgctcaaagtgtggatatcacgagctcctgggatttcggcattagacgcaggagtaataccgcacaaagactcgaacgactgaggaaggaacgccagaaccagattaagtgcaaaaatatccaatggaaggagcgtaactctaaacagtctgcgcaggaattgaaatccctatttgaaaagaaaagcctgaaggaaaagcccccaatctccgggaagcagtctatcctgtcagtacggctggagcagtgtcctctgcaactgaataatcctttcaacgaatattcaaagtttgatggtaagggacacgttggcacaacagccacaaaaaagattgatgtatatctgcctctgcacagttctcaggataggctgctgcccatgacagttgtcaccatggcctcagccagggtccaggatctgatcggtctgatctgttggcagtatacatccgaagggcgcgaaccgaagctgaacgataatgtatcagcttattgtttgcacatcgcagaagacgatggcgaggttgacacagatttcccccctcttgatagcaatgagccaattcacaagtttggcttctcgacattggcattagttgagaagtactcgtctcccggacttacgtcaaaggaaagcctctttgtgaggataaacgccgctcacggattttccctgattcaggtggacaatacaaaagttactatgaaggagattttgttgaaggcggttaagcgtcgcaaaggctcacagaaagtcagcgggccacagtatagactggaaaagcagtctgagccgaatgtggccgtggacctggatagcactttagagtctcagtccgcgtgggaattctgcctggttagagaaaacagctctcgagccgatggggtgtttgaggaggacagtcagatagatattgcaacagtgcaggacatgttaagctcgcaccattataagtcattcaaagtatccatgatccaccgcttgagattcaccacagatgtacagctgggcatctcaggtgacaaggtagaaattgatcccgttacaaaccaaaaagcctctacaaagttttggatcaagcagaagcctattagcatcgactcagatctgttgtgtgcatgcgacctggccgaggaaaaatccccctctcacgccatcttcaagctgacctacctcagtaaccatgactacaaacatctctattttgaatcagacgccgctaccgtgaatgagattgtgctgaaagttaattacatccttgagtcacgtgcttcaacagctcgggccgactacttcgcacaaaaacagaggaaattgaaccgtaggacatccttcagtttccaaaaggagaaaaaatcaggacagcagtag

SEQ ID NO: 22229 - DNA, 1569 bp, Artificial Sequence
  derived and/or modified sequence
atggccttcttggacaaccccaccatcatccttgctcatatccgccagtcccacgtcacctctgacgacaccggtatgtgtgaaatggtgcttatcgaccacgatgtggacctggaaaaaattcaccctcccagcatgcctggcgattccggatccgaaatccaaggcagtaatggcgagacacaaggatatgtgtatgcccagtccgtggacataaccagctcatgggatttcgggattcgacgcagatctaacacagctcagcgtctggagcgacttaggaaggagagacagaaccagattaagtgcaaaaacatccagtggaaagaaagaaatagcaagcagtcagcccaggaactgaaaagtttgtttgaaaaaaaatccttgaaggagaagccacccatatcgggcaaacagtccattctttctgtgaggttggagcaatgccctcttcagttgaataacccattcaacgagtattcaaaatttgacgggaaaggacatgtcgggacaactgccaccaaaaaaatcgatgtttatctgccactgcactcgtcacaagatagactcctgccaatgacggttgtgaccatggcaagtgcgagggtccaggaccttatcggactgatctgttggcaatatacatcagaggggagggagcccaagcttaacgacaatgtgtccgcctattgtctacatattgccgaggatgacggcgaagtggatacggattttccacctttagattctaacgaacccattcacaaatttggcttcagcacgttggccctcgtggaaaaatattcttctcccggactaacgtcaaaggaaagcttgttcgtccgcattaacgcagcccatggctttagcctgatccaagtggacaacacaaaagtgaccatgaaggagattttactaaaggcagtgaagcggagaaagggtagtcagaaggtctctggccctcagtacagactggagaagcagagcgagccaaatgttgccgttgacttggacagtaccctggaaagtcaaagtgcctgggagttctgccttgtgagagagaacagctcccgggctgacggcgtgttcgaggaggactcgcagatcgatattgcaaccgtgcaggatatgttgtctagtcatcattacaagagttttaaagtctccatgatccacagactccggttcaccacagacgtacagcttgggataagtggggacaaagttgaaatcgatcccgtaaccaatcagaaggcgagtaccaaattctggatcaaacagaaacccatttccatagactccgatctactgtgcgcatgtgacctggcagaagagaagtctccctctcacgcgatcttcaagttgacctacctgagtaatcatgattacaaacatttatattttgagtccgacgctgctacggttaatgagatagttctgaaggtgaactacatccttgaatctcgcgctagtaccgcacgagctgactatttcgcgcaaaaacagcgtaaactgaatcgtaggacgagctttagctttcaaaaagagaagaagtctggccagcagtag

SEQ ID NO: 22230 - DNA, 1569 bp, Artificial Sequence
  derived and/or modified sequence
atggcatttctggataatcccactatcatcttagctcatattaggcaatcgcatgtcacatccgacgataccggcatgtgtgaaatggtcttaatcgatcatgacgttgatctcgaaaagatccatccgccatccatgcccggtgactcaggctccgagattcagggcagtaatggcgagactcaaggctatgtctatgcacagagcgtagatatcactagtagttgggatttcggtatccgtagacgtagtaataccgctcagaggctggagcggctgcgcaaggagagacagaaccagattaaatgcaaaaacattcagtggaaggagaggaacagtaaacagtccgcccaagaactgaaatctctttttgagaaaaagagtctaaaggaaaaacctcccattagcggcaagcaatccatattgagcgtccggctcgagcagtgccctcttcagttgaataaccccttcaacgaatacagcaagtttgatggcaaaggccatgtgggaacaacagctactaaaaagatagacgtctacctccccctgcattcctcccaggatcgcctcttgccaatgaccgtcgtcactatggcatcggccagagtccaggaccttatagggctcatttgttggcaatatactagtgagggtcgcgagccgaagctcaacgacaatgtgagcgcctactgcttgcacatagccgaagacgatggcgaggtagacactgacttcccacctctggattcaaacgaacctattcacaaattcggattctccacacttgcacttgtagaaaaatatagctcccctggcttaactagtaaggaatcactatttgttcggatcaacgcagcccacggattctcgctgatacaggttgataataccaaggtcactatgaaagaaatcctgctgaaggctgtcaaaaggagaaagggcagtcagaaggtgagtggacctcagtaccggctggaaaagcaatcagagccaaacgttgcagtggatctggattccacactggagagccagagtgcatgggaattttgtctggtgcgggagaacagttctagagctgatggcgtgtttgaagaagactctcagatcgatattgctacagtccaagatatgctttcatcccatcattacaaaagcttcaaagtaagcatgattcatcgcctgcggtttactaccgatgtgcaattggggatcagtggcgacaaggtcgagatcgatcccgtcaccaatcaaaaagcttccactaagttctggataaaacagaaacccataagtatagactccgacctgctgtgcgcatgcgatctggcagaagagaaatctcccagtcacgcaatctttaagctgacatacctgtcaaaccatgactataaacacctctacttcgagtctgacgctgccactgtgaatgaaatcgtattgaaggtcaactatatactcgagagccgcgcatccaccgccagagcagactattttgctcagaaacagagaaagctgaataggcgaacatccttcagcttccagaaagagaagaagagtgggcaacaatag

SEQ ID NO: 22231 - protein, 323 aa, Artificial Sequence
  derived and/or modified sequence
MAFLDNPTIILAHIRQSHVTSDDTGMCEMVLIDHDVDLEKIHPPSMPGDSGSEIQGSNGETQGYVYAQSVDITSSWDFGIRRRSNTAQRLERLRKERQNQIKCKNIQWKERNSKQSAQELKSLFEKKSLKEKPPISGKQSILSVRLEQCPLQLNNPFNEYSKFDGKGHVGTTATKKIDVYLPLHSSQDRLLPMTVVTMASARVQDLIGLICWQYTSEGREPKLNDNVSAYCLHIAEDDGEVDTDFPPLDSNEPIHKFGFSTLALVEKYSSPGLTSKESLFVRINAAHGFSLIQVDNTKVTMKEILLKAVKRRKGSQKVSGACD

SEQ ID NO: 22232 - DNA, 399 bp, Artificial Sequence
  derived and/or modified sequence
atggccttcctggacaaccccaccatcatcctggcccacatcagacagagccacgtgaccagcgacgacaccggcatgtgcgagatggtgctgatcgaccacgacgtggacctggagaagatccacccccccagcatgcccggcgacagcggcagcgagatccagggcagcaacgcccagagactggagagactgagaaaggagagacagaaccagatcaagtgcaagaacatccagtggaaggagagaaacagcaagcagagcgcccaggagctgaagagcctgttcgagaagaagagcctgaaggagaagccccccatcagcggcaagcagagcatcctgagcgtgagactggagcagtgccccctgcagctgaacaaccccttcaacgagtactag

SEQ ID NO: 22233 - DNA, 282 bp, Artificial Sequence
  derived and/or modified sequence
atggccttcctggacaaccccaccatcatcctggcccacatcagacagagccacgtgaccagcgacgacaccggcatgtgcgagatggtgctgatcgaccacgacgtggacctggagaagatccacccccccagcatgcccggcgacagcggcagcgagatccagggcagcaacggcgagacccagggctacgtgtacgcccagagcgtggacatcaccagcagctgggacttcggcatcagaagaagaagcaacaccgcccagagactggagagactgtag

SEQ ID NO: 22234 - DNA, 972 bp, Artificial Sequence
  derived and/or modified sequence
atggccttcctggacaaccccaccatcatcctggcccacatcagacagagccacgtgaccagcgacgacaccggcatgtgcgagatggtgctgatcgaccacgacgtggacctggagaagatccacccccccagcatgcccggcgacagcggcagcgagatccagggcagcaacggcgagacccagggctacgtgtacgcccagagcgtggacatcaccagcagctgggacttcggcatcagaagaagaagcaacaccgcccagagactggagagactgagaaaggagagacagaaccagatcaagtgcaagaacatccagtggaaggagagaaacagcaagcagagcgcccaggagctgaagagcctgttcgagaagaagagcctgaaggagaagccccccatcagcggcaagcagagcatcctgagcgtgagactggagcagtgccccctgcagctgaacaaccccttcaacgagtacagcaagttcgacggcaagggccacgtgggcaccaccgccaccaagaagatcgacgtgtacctgcccctgcacagcagccaggacagactgctgcccatgaccgtggtgaccatggccagcgccagagtgcaggacctgatcggcctgatctgctggcagtacaccagcgagggcagagagcccaagctgaacgacaacgtgagcgcctactgcctgcacatcgccgaggacgacggcgaggtggacaccgacttcccccccctggacagcaacgagcccatccacaagttcggcttcagcaccctggccctggtggagaagtacagcagccccggcctgaccagcaaggagagcctgttcgtgagaatcaacgccgcccacggcttcagcctgatccaggtggacaacaccaaggtgaccatgaaggagatcctgctgaaggccgtgaagagaagaaagggcagccagaaggtgagcggcgcctgcgactag

SEQ ID NO: 22235 - DNA, 399 bp, Artificial Sequence
  derived and/or modified sequence
atggctttcctagataaccctaccattattctggcacacatccgccaatcccacgtgacatccgatgatacgggcatgtgtgagatggtgctcatcgatcatgatgtggatctggaaaagattcacccgccaagcatgcctggcgattcaggcagcgagatccaaggtagcaatgcacaacgcttagaaagacttcgaaaggaacggcagaatcaaattaagtgtaagaatatccagtggaaagagagaaacagcaagcagagtgcacaggaactgaagtctctgttcgaaaagaaatcattgaaggagaagcctcccattagtggcaagcagagcatcttgtccgtacggctggagcagtgtcctctgcagctgaacaacccattcaatgagtactag

SEQ ID NO: 22236 - DNA, 282 bp, Artificial Sequence
  derived and/or modified sequence
atggcttttctcgataaccctactattatactggctcacattcgtcagagccacgttacaagtgacgacaccgggatgtgtgagatggttctgatcgaccatgacgtggatctggagaagatccacccccctagcatgcctggcgacagtggatcagagatccaaggctcgaatggtgagacccagggttatgtctatgcgcagtctgtcgatataactagtagttgggatttcggaatcagacggcgctccaacaccgcacagagactggaacgactctag

SEQ ID NO: 22237 - DNA, 972 bp, Artificial Sequence
  derived and/or modified sequence
atggcttttctggacaacccgactattattctggcgcacatcaggcagagccatgttacctcagatgacacagggatgtgcgaaatggtcttaatcgaccacgatgttgatctcgaaaagatccacccgccctcaatgccgggtgactctgggtcggagatacaggggtctaacggtgagacccagggctatgtgtacgcgcagtcagtggacatcactagctcatgggattttggaatacgacgacggagtaataccgcgcagagactcgagagactcaggaaggagcggcagaatcagatcaaatgcaaaaatattcagtggaaagagcgaaattcaaaacaatctgctcaggagctgaagagtttgttcgagaaaaaaagcctgaaagaaaaaccgcccatcagtggaaagcagtcaatccttagtgtcaggctggaacagtgccccttacagttgaacaatccctttaatgagtattccaaattcgatggtaagggacacgttggtacaactgcaacgaaaaagattgacgtctatctgcccctgcattcctcccaggataggctgcttcccatgactgtcgtgactatggcaagtgctagagtgcaagacctgataggattgatttgctggcagtacacttcagagggaagagagcctaaactgaacgataatgtgagcgcatactgcttgcacattgccgaggacgacggtgaggtggacaccgattttcctcccctagattcgaacgaacccatacacaaatttggcttctctacgctcgctctggtggagaaatattcgtcacccggcttaacatcaaaggagagcctctttgtccggataaacgctgctcacgggttctcactgatccaagtcgataacacaaaggtcacgatgaaagagatccttttaaaagcagtgaagcgcagaaagggaagtcagaaggtatccggcgcttgtgactag

SEQ ID NO: 22238 - DNA, 399 bp, Artificial Sequence
  derived and/or modified sequence
atggccttcctggacaaccccaccatcatcctggcccacatccggcagagccacgtgaccagtgatgacaccggcatgtgtgagatggtgctgattgaccatgatgtggacctggagaagatccaccccccatccatgcctggggacagcggcagcgagatccagggcagcaatgcccagaggctggagcggctgaggaaggagcggcagaaccagatcaagtgcaagaacatccagtggaaggagaggaacagcaagcagagcgcccaggagctgaagagcctgtttgagaagaagagcctgaaggagaagccacccatcagcggcaagcagagcatcctgtctgtgcggctggagcagtgccccctgcagctgaacaaccccttcaatgagtactag

SEQ ID NO: 22239 - DNA, 282 bp, Artificial Sequence
  derived and/or modified sequence
atggccttcctggacaaccccaccatcatcctggcccacatccggcagagccacgtgaccagtgatgacaccggcatgtgtgagatggtgctgattgaccatgatgtggacctggagaagatccaccccccatccatgcctggggacagcggcagcgagatccagggcagcaatggagagacccagggctacgtgtatgcccagagcgtggacatcaccagctcctgggactttggcatcagaagaagaagcaacacagcccagaggctggagcggctgtag

SEQ ID NO: 22240 - DNA, 972 bp, Artificial Sequence
  derived and/or modified sequence
atggccttcctggacaaccccaccatcatcctggcccacatccggcagagccacgtgaccagtgatgacaccggcatgtgtgagatggtgctgattgaccatgatgtggacctggagaagatccaccccccatccatgcctggggacagcggcagcgagatccagggcagcaatggagagacccagggctacgtgtatgcccagagcgtggacatcaccagctcctgggactttggcatcagaagaagaagcaacacagcccagaggctggagcggctgaggaaggagcggcagaaccagatcaagtgcaagaacatccagtggaaggagaggaacagcaagcagagcgcccaggagctgaagagcctgtttgagaagaagagcctgaaggagaagccacccatcagcggcaagcagagcatcctgtctgtgcggctggagcagtgccccctgcagctgaacaaccccttcaatgagtacagcaagtttgatggcaagggccacgtgggcaccacagccaccaagaagattgatgtgtacctgcccctgcacagcagccaggaccggctgctgcccatgacagtggtgaccatggccagcgcccgggtgcaggacctgattggcctcatctgctggcagtacaccagcgagggccgggagcccaagctgaatgacaacgtgtctgcctactgcctgcacatcgccgaggatgatggagaggtggacacagacttcccccccctggacagcaatgagcccatccacaagtttggcttcagcaccctggccctggtggagaagtacagcagccctggcctgaccagcaaggagagcctgtttgtgcgcatcaatgctgcccacggcttcagcctcatccaggtggacaacaccaaggtgaccatgaaggagatcctgctgaaggctgtgaagaggaggaagggcagccagaaggtgtctggggcctgtgactag

SEQ ID NO: 22241 - DNA, 693 bp, Artificial Sequence
  derived and/or modified sequence
gctcggggtaatagggctgctgctcggccggccggcggcggcgagcagcaggggcatgagggctaacccgggaagcggcagctgagcgggccgggaggagcgccggtccccgtggatcccgagagtgcagagctcggggcaggggccgggaggcgtgggggagccgggccctcccctcaggaacgtgtcccggggccgacccggcccgtagtgtggaagcagcttcaggtaggtgagctcgtgaaacaatatgaagaggagaaaatagccttttaaggaaattggcccacagaaaggatggccttcttggacaatccaactatcattctagctcatattcgacagtcacatgtgaccagtgatgacacgggaatgtgtgagatggttctcattgatcatgatgttgacctagagaagattcatcctccttcaatgcctggagacagtgggtcagaaattcagggaagcaatgctcaaagattagaacgactccgaaaagagagacaaaaccagatcaaatgcaaaaatattcagtggaaagaaagaaattctaagcaatcagcccaggagttaaagtcactgtttgaaaaaaaatctctcaaagagaagcctccaatttctgggaagcagtcgatattatctgtacgcctagaacagtgccctctgcagctgaataacccttttaacgagtat

SEQ ID NO: 22242 - DNA, 769 bp, Artificial Sequence
  derived and/or modified sequence
tgcggctcggggtaatagggctgctgctcggccggccggcggcggcgagcagcaggggcatgagggctaacccgggaagcggcagctgagcgggccgggaggagcgccggtccccgtggatcccgagagtgcagagctcggggcaggggccgggaggcgtgggggagccgggccctcccctcaggaacgtgtcccggggccgacccggcccgtagtgtggaagcagcttcagggttcttgctctattgaccaggctggagtgcagtggcacgatcacggctcactgcagcctcaacttcctggactcaagcgatcctcccacctcttcctccccagcagctgggactacaggcatgcactaccacggcctcccaaattgttgggattgtaagcatgaaccactgcatctggccaggcctggtaggtgagctcgtgaaacaatatgaagaggagaaaatagccttttaaggaaattggcccacagaaaggatggccttcttggacaatccaactatcattctagctcatattcgacagtcacatgtgaccagtgatgacacgggaatgtgtgagatggttctcattgatcatgatgttgacctagagaagattcatcctccttcaatgcctggagacagtgggtcagaaattcagggaagcaatggtgagactcagggctatgtatatgcccagtcagtcgatattacctcaagttgggactttggtattagaagacgctcaaacacagctcaaagattagaacgactcc

SEQ ID NO: 22243 - DNA, 1586 bp, Artificial Sequence
  derived and/or modified sequence
ggaacgccggggtgtggttccgggtcgtgtgcggctcggggtaatagggctgctgctcggccggccggcggcggcgagcagcaggggcatgagggctaacccgggaagcggcagctgagcgggccgggaggagcgccggtccccgtggatcccgagagtgcagagctcggggcaggggccgggaggcgtgggggagccgggccctcccctcaggaacgtgtcccggggccgacccggcccgtagtgtggaagcagcttcaggtaggtgagctcgtgaaacaatatgaagaggagaaaatagccttttaaggaaattggcccacagaaaggatggccttcttggacaatccaactatcattctagctcatattcgacagtcacatgtgaccagtgatgacacgggaatgtgtgagatggttctcattgatcatgatgttgacctagagaagattcatcctccttcaatgcctggagacagtgggtcagaaattcagggaagcaatggtgagactcagggctatgtatatgcccagtcagtcgatattacctcaagttgggactttggtattagaagacgctcaaacacagctcaaagattagaacgactccgaaaagagagacaaaaccagatcaaatgcaaaaatattcagtggaaagaaagaaattctaagcaatcagcccaggagttaaagtcactgtttgaaaaaaaatctctcaaagagaagcctccaatttctgggaagcagtcgatattatctgtacgcctagaacagtgccctctgcagctgaataacccttttaacgagtattccaaatttgatggcaagggtcatgtaggtacaacagcaaccaagaagatcgatgtctacctccctctgcactcgagccaggacagactgctgccaatgaccgtggtgacaatggccagcgccagggtgcaggacctgatcgggctcatctgctggcagtatacaagcgaaggacgggagccgaagctcaatgacaatgtcagtgcctactgcctgcatattgctgaggatgatggggaggtggacaccgatttccccccgctggattccaatgagcccattcataagtttggcttcagtactttggccctggttgaaaagtactcatctcctggtctgacatccaaagagtcactctttgttcgaataaatgctgctcatggattctcccttattcaggtggacaacacaaaggttaccatgaaggaaatcttactgaaggcagtgaagcgaagaaaaggatcccagaaagtttcaggtgcttgtgactaaattcactaatttcactggctgtcaaggctgtgttaaggaaaatgggtttgaactgctgtgggttttgagtactggactggatgtcagaaacctttgccatcacgggaaattctgtcactctggatttactgtctgttccccacagctaaattcctctgcagtgtgatttagcaccctggatccccatcaaccagttttggcatttatttgaatgcattaccccactggtttccataaactattttacaattgtttaaaataaatgactgtttatttccacaaaa

SEQ ID NO: 22244 - DNA, 399 bp, Artificial Sequence
  derived and/or modified sequence
atggccttcctggacaaccccaccatcatcctggcccacatccggcagtctcacgtgactagtgacgatactgggatgtgtgaaatggtgctcatcgatcatgacgtggacctggaaaaaatccaccccccaagtatgccaggtgacagcggctctgagattcagggtagcaacgcgcagcgtttggaaaggttaagaaaggagaggcaaaaccagattaagtgtaagaatattcaatggaaggagcgtaactcaaaacagtctgcgcaggagctcaaaagcctatttgagaagaagagcctcaaggagaaacccccaatcagtggtaaacagtcgattctgtctgtgcgcctggaacaatgtcccttgcaattgaataacccatttaacgagtattag

SEQ ID NO: 22245 - DNA, 282 bp, Artificial Sequence
  derived and/or modified sequence
atggccttcctggacaaccccaccatcatcctggcccacatccggcaatcccacgtcacgagtgatgacaccggcatgtgtgaaatggttctaatcgatcatgacgtcgatctggagaagatacaccctccttccatgcccggggatagtggatctgagatccaagggagtaatggtgagacacaggggtacgtgtatgctcagagcgtggatataacatcttcttgggactttggaattaggcggcggagtaacactgcccaacggcttgaaaggctgtag

SEQ ID NO: 22246 - DNA, 972 bp, Artificial Sequence
  derived and/or modified sequence
atggccttcctggacaaccccaccatcatcctggcccacatccggcagtcacacgtcacgagcgacgataccggaatgtgtgaaatggtattgattgaccacgacgttgatctggagaagatccacccccctagcatgccaggggacagcggaagtgagatccagggctcaaacggagagactcaggggtacgtctacgctcaatccgtggatattacaagctcttgggacttcggaatccggcggcgttctaacaccgcacagaggctggaaagactgcggaaagaaagacagaaccagatcaaatgtaagaacatccagtggaaagagcgtaattcaaaacagagcgcccaggaattgaaatctttgttcgaaaagaaatctcttaaagaaaaaccccccatctcggggaaacagagcatcctctccgtgcgcctggagcaatgtccactccagctcaacaaccctttcaatgaatatagcaaatttgacggaaagggccacgtaggaactactgccaccaaaaaaattgacgtgtacctgcccctgcattcctctcaggatcgtctcctccctatgacagtggtcactatggcctcggcccgcgttcaggatctcattggccttatctgttggcagtacacctcagaggggcgtgaacctaaactgaatgataacgtctctgcctactgtctacatatagctgaggacgacggtgaggtggatactgactttccccctctggacagcaacgaaccaatacataaatttggtttctccacattggcactggttgaaaagtactccagtcctggactcacctctaaagagtcgctgttcgttcggataaacgcagcgcacggctttagtctaatccaggtggataacacaaaagtgacgatgaaggagatcctcctgaaagcagtaaagaggaggaaggggtcccagaaggtgtctggggcctgcgattag

SEQ ID NO: 22247 - DNA, 399 bp, Artificial Sequence
  derived and/or modified sequence
atggcttttttggataaccccactattattttggcccacataaggcagagccatgtcacttcggatgatacgggaatgtgcgagatggtgttgattgaccatgacgtggacctggagaagatccacccgcctagtatgcctggcgacagtggctccgagattcaaggctcaaacgcacaaagattggagcggctcagaaaggagaggcagaaccagatcaaatgcaagaacatacagtggaaggagcgcaactcgaagcagagcgcacaggagcttaaatctctgttcgagaaaaagtcactgaaggaaaagccccctatcagtgggaaacagtccatcctctctgtgcggctcgaacaatgcccgctccagcttaataacccatttaacgagtactag

SEQ ID NO: 22248 - DNA, 282 bp, Artificial Sequence
  derived and/or modified sequence
atggcctttctggataatccaacgatcatattggcccacatcagacagtcacacgtgacatctgacgacacagggatgtgcgagatggttctgattgaccatgacgtggacctggagaaaatccacccaccatctatgccaggagatagtggaagtgaaatccagggtagtaacggcgagactcaaggctacgtgtacgcccagtctgtcgatatcactagtagctgggactttggaatccggaggagaagtaatacagcccagaggttggaacggttgtag

SEQ ID NO: 22249 - DNA, 972 bp, Artificial Sequence
  derived and/or modified sequence
atggcttttctcgacaaccccaccatcattctcgcccatatccgacagagccatgtcacatcagatgataccggcatgtgtgagatggtcctgatcgaccacgacgttgatctcgaaaaaatccatcccccaagtatgcctggggacagcgggagtgagatccaagggtcgaatggtgagacccaggggtatgtttatgcacagagtgtcgatatcacatcctcttgggattttggcattcggagaaggtcgaacacggctcaaaggctcgagaggctgaggaaggaacggcagaaccagattaagtgcaagaatattcagtggaaagagcgtaattccaagcagagtgcacaggaactcaagtctctgttcgagaaaaagagcctgaaggaaaaacccccaatttccggaaaacagtcaatcctgagcgtgcgattggagcagtgcccgctccaactcaacaacccttttaacgagtatagtaaattcgatggcaaaggtcatgtggggaccacagccacaaagaagatcgacgtatatctccccctccactcctcccaggatcgtcttctccccatgaccgttgtcacaatggcatccgctcgggtgcaggacctgatcggactcatatgctggcagtatacttccgaaggacgggagcccaagttaaacgataatgtcagtgcttactgcttgcatattgccgaagacgacggagaggtggacactgatttcccccctttggattcaaatgaacctatccataaatttggtttttctaccctggccctggtggaaaaatattcctccccaggacttactagcaaagaatccctcttcgtgaggatcaatgcggctcatggtttcagtcttatccaagtcgataatacaaaggtgacaatgaaagaaatcctgttgaaggcagtgaagaggcgcaagggttctcagaaagtatctggcgcatgcgactag

SEQ ID NO: 22250 - protein, 475 aa, Artificial Sequence
  derived and/or modified sequence
MAFLDNPTIILAHIRQSHVTSDDTGMCEMVLIDHDVDLEKIHPPSMPGDSGSEIQGSNGETQGYVYAQSVDITSSWDFGIRRRSNTAQRLERLRKERQNQIKCKNIQWKERNSKQSAQELKSLFEKKSLKEKPPISGKQSILSVRLEQCPLQLNNPFNEYSKFDGKGHVGTTATKKIDVYLPLHSSQDRLLPMTVVTMASARVQDLIGLICWQYTSEGREPKLNDNVSAYCLHIAEDDGEVDTDFPPLDSNEPIHKFGFSTLALVEKYSSPGLTSKESLFVRINAAHGFSLIQVDNTKVTMKEILLKAVKRRKGSQKVSGPQYRLEKQSEPNVAVDLDSTLESQSAWEFCLVRENSISGDKVEIDPVTNQKASTKFWIKQKPISIDSDLLCACDLAEEKSPSHAIFKLTYLSNHDYKHLYFESDAATVNEIVLKVNYILESRASTARADYFAQKQRKLNRRTSFSFQKEKKSGQQ

SEQ ID NO: 22251 - DNA, 1428 bp, Artificial Sequence
  derived and/or modified sequence
atggccttcctggacaaccccaccatcatcctggcccacatcagacagagccacgtgaccagcgacgacaccggcatgtgcgagatggtgctgatcgaccacgacgtggacctggagaagatccacccccccagcatgcccggcgacagcggcagcgagatccagggcagcaacggcgagacccagggctacgtgtacgcccagagcgtggacatcaccagcagctgggacttcggcatcagaagaagaagcaacaccgcccagagactggagagactgagaaaggagagacagaaccagatcaagtgcaagaacatccagtggaaggagagaaacagcaagcagagcgcccaggagctgaagagcctgttcgagaagaagagcctgaaggagaagccccccatcagcggcaagcagagcatcctgagcgtgagactggagcagtgccccctgcagctgaacaaccccttcaacgagtacagcaagttcgacggcaagggccacgtgggcaccaccgccaccaagaagatcgacgtgtacctgcccctgcacagcagccaggacagactgctgcccatgaccgtggtgaccatggccagcgccagagtgcaggacctgatcggcctgatctgctggcagtacaccagcgagggcagagagcccaagctgaacgacaacgtgagcgcctactgcctgcacatcgccgaggacgacggcgaggtggacaccgacttcccccccctggacagcaacgagcccatccacaagttcggcttcagcaccctggccctggtggagaagtacagcagccccggcctgaccagcaaggagagcctgttcgtgagaatcaacgccgcccacggcttcagcctgatccaggtggacaacaccaaggtgaccatgaaggagatcctgctgaaggccgtgaagagaagaaagggcagccagaaggtgagcggcccccagtacagactggagaagcagagcgagcccaacgtggccgtggacctggacagcaccctggagagccagagcgcctgggagttctgcctggtgagagagaacagcatcagcggcgacaaggtggagatcgaccccgtgaccaaccagaaggccagcaccaagttctggatcaagcagaagcccatcagcatcgacagcgacctgctgtgcgcctgcgacctggccgaggagaagagccccagccacgccatcttcaagctgacctacctgagcaaccacgactacaagcacctgtacttcgagagcgacgccgccaccgtgaacgagatcgtgctgaaggtgaactacatcctggagagcagagccagcaccgccagagccgactacttcgcccagaagcagagaaagctgaacagaagaaccagcttcagcttccagaaggagaagaagagcggccagcagtag

SEQ ID NO: 22252 - DNA, 1428 bp, Artificial Sequence
  derived and/or modified sequence
atggcatttctggacaatcctaccatcatcctggcgcatataagacaaagccatgtgacaagcgacgacaccgggatgtgtgagatggtcctgatcgatcacgacgtggacttggagaaaatccaccccccttcaatgcctggtgacagtggctccgaaattcagggtagcaacggcgaaacacaaggctatgtatacgcccaaagcgtggacataacttccagctgggatttcggtatccgacgcaggtctaatacagcccagcgtctggaaagacttcgcaaggaaaggcagaaccagatcaagtgcaagaacattcagtggaaagagcgtaattcgaagcaaagcgcccaggagctgaagtcactctttgaaaaaaagtcccttaaagagaagccccctatcagcggaaagcaaagcattttgtctgtgcggctcgagcagtgccccctgcagctaaataatccattcaacgaatattccaagtttgatgggaagggacacgtcgggacaacagcaactaagaaaattgacgtttatctgcccctgcactccagccaggatagactgctcccaatgaccgtggtaacgatggcctcagcgagggtgcaggatctgatcgggttgatctgctggcagtacactagcgaagggcgggagccaaagctgaacgacaacgtgagcgcatactgtctgcacatagcagaggatgacggggaggttgatactgattttccaccgctggacagtaatgagccgatacacaagtttggtttttcgacactcgccctggtggagaaatattcaagtcccggtctgactagtaaggaatctttgttcgtgcgcataaacgcagcccacgggttttcacttatacaagttgacaacacaaaagtgaccatgaaagaaattctgttgaaggcagtaaagcgacgaaaaggcagtcagaaagtgtccggaccccagtacaggctcgagaaacaatccgagccaaatgtagccgtggacctggattcaacattagaatcgcaatcagcttgggagttttgtctggtcagagagaatagtatatcaggcgataaggtcgagatagaccccgtgactaatcagaaagcatcaacaaaattttggataaagcaaaaacccatttccatagactctgacctgctgtgcgcctgcgacctcgcagaagagaagtctccttcacacgcaatttttaagttgacttacctttccaaccacgactataaacatctgtactttgagagcgacgctgctaccgtgaacgagatcgtgttgaaagttaattacatccttgaatcccgggcttctactgctcgcgccgattactttgcccagaagcagcggaagctgaaccggaggaccagcttttccttccagaaggagaagaaaagcggacagcaatag

SEQ ID NO: 22253 - DNA, 1428 bp, Artificial Sequence
  derived and/or modified sequence
atggccttcctggacaaccccaccatcatcctggcccacatccggcagagccacgtgaccagtgatgacaccggcatgtgtgagatggtgctgattgaccatgatgtggacctggagaagatccaccccccatccatgcctggggacagcggcagcgagatccagggcagcaatggagagacccagggctacgtgtatgcccagagcgtggacatcaccagctcctgggactttggcatcagaagaagaagcaacacagcccagaggctggagcggctgaggaaggagcggcagaaccagatcaagtgcaagaacatccagtggaaggagaggaacagcaagcagagcgcccaggagctgaagagcctgtttgagaagaagagcctgaaggagaagccacccatcagcggcaagcagagcatcctgtctgtgcggctggagcagtgccccctgcagctgaacaaccccttcaatgagtacagcaagtttgatggcaagggccacgtgggcaccacagccaccaagaagattgatgtgtacctgcccctgcacagcagccaggaccggctgctgcccatgacagtggtgaccatggccagcgcccgggtgcaggacctgattggcctcatctgctggcagtacaccagcgagggccgggagcccaagctgaatgacaacgtgtctgcctactgcctgcacatcgccgaggatgatggagaggtggacacagacttcccccccctggacagcaatgagcccatccacaagtttggcttcagcaccctggccctggtggagaagtacagcagccctggcctgaccagcaaggagagcctgtttgtgcgcatcaatgctgcccacggcttcagcctcatccaggtggacaacaccaaggtgaccatgaaggagatcctgctgaaggctgtgaagaggaggaagggcagccagaaggtgtctggcccccagtaccgcctggagaagcagagcgagcccaacgtggccgtggacctggacagcaccctggagagccagagcgcctgggagttctgcctggtgcgggagaacagcatcagcggggacaaggtggagattgatcctgtgaccaaccagaaggccagcaccaagttctggatcaagcagaagcccatcagcattgacagcgacctgctgtgtgcctgtgacctggccgaggagaagagccccagccacgccatcttcaagctgacctacctgagcaaccacgactacaagcacctgtactttgaaagtgatgctgccaccgtgaatgaaattgtgctgaaggtgaactacatcctggagagccgggccagcacagcccgggctgactactttgcccagaagcagaggaagctgaacagaaggaccagcttctccttccagaaggagaagaagagcggccagcagtag

SEQ ID NO: 22254 - DNA, 3252 bp, Artificial Sequence
  derived and/or modified sequence
ggaacgccggggtgtggttccgggtcgtgtgcggctcggggtaatagggctgctgctcggccggccggcggcggcgagcagcaggggcatgagggctaacccgggaagcggcagctgagcgggccgggaggagcgccggtccccgtggatcccgagagtgcagagctcggggcaggggccgggaggcgtgggggagccgggccctcccctcaggaacgtgtcccggggccgacccggcccgtagtgtggaagcagcttcaggtaggtgagctcgtgaaacaatatgaagaggagaaaatagccttttaaggaaattggcccacagaaaggatggccttcttggacaatccaactatcattctagctcatattcgacagtcacatgtgaccagtgatgacacgggaatgtgtgagatggttctcattgatcatgatgttgacctagagaagattcatcctccttcaatgcctggagacagtgggtcagaaattcagggaagcaatggtgagactcagggctatgtatatgcccagtcagtcgatattacctcaagttgggactttggtattagaagacgctcaaacacagctcaaagattagaacgactccgaaaagagagacaaaaccagatcaaatgcaaaaatattcagtggaaagaaagaaattctaagcaatcagcccaggagttaaagtcactgtttgaaaaaaaatctctcaaagagaagcctccaatttctgggaagcagtcgatattatctgtacgcctagaacagtgccctctgcagctgaataacccttttaacgagtattccaaatttgatggcaagggtcatgtaggtacaacagcaaccaagaagatcgatgtctacctccctctgcactcgagccaggacagactgctgccaatgaccgtggtgacaatggccagcgccagggtgcaggacctgatcgggctcatctgctggcagtatacaagcgaaggacgggagccgaagctcaatgacaatgtcagtgcctactgcctgcatattgctgaggatgatggggaggtggacaccgatttccccccgctggattccaatgagcccattcataagtttggcttcagtactttggccctggttgaaaagtactcatctcctggtctgacatccaaagagtcactctttgttcgaataaatgctgctcatggattctcccttattcaggtggacaacacaaaggttaccatgaaggaaatcttactgaaggcagtgaagcgaagaaaaggatcccagaaagtttcaggccctcagtaccgcctggagaagcagagcgagcccaatgtcgccgttgacctggacagcactttggagagccagagcgcatgggagttctgcctggtccgcgagaacagtatctctggagacaaagtagagatagaccctgttacgaatcagaaagccagcactaagttttggattaagcagaaacccatctcaatcgattccgacctgctctgtgcctgtgaccttgctgaagagaaaagccccagtcacgcaatatttaaactcacgtatctaagcaatcacgactataaacacctctactttgaatcggacgctgctaccgtcaatgaaattgtgctcaaggttaactacatcctggaatcgcgagctagcactgcccgggctgactactttgctcaaaaacaaagaaaactgaacagacgtacgagcttcagcttccagaaggagaagaaatccgggcagcagtgacactggcctccagcctcaatctgttccgtagctcagagcctgcctgccagggccaagtgccctagagtccacccggtgtcctgaagtcctcggggggaggccagcccctggctcactggcacagggcaggtgggctctcggggaaggtgtcgggggccccctaggagggagcgctggggacattgccatgggacggaagtctgcttggcagtggctttgataagcgatgcttgggggtcagaccaccccctagaggagccacgtgccgcccagccaccttcaatgcctgccaccctgcccgaggatgtacagagccgtgcccacacatttccttgcaacttgatcaaatttcttaaagcaaacaacaaaaatgtacatttctgtttttccttttaataaacaggtgtactctttatcatggttggtatgatggaccattctttggggcggaggattgattatgttactctctttaaaatctgttcccatattgaacaggcagattggaaaagctatggttcgatttctcagaagaaatgtttaggtcttagtcaatagttttaactatgccatttgtttaaatgagtgcatttgcttcgagggtagtgtcttactaaaagttaggaacagagacctagtggtgtgtccaaggccgtgtcactttccccttcagcacaccccagcttctgacctcagagcccaggagctgcgtggacagtgtggggtgccaggaggaggggcggtggctggtcctcaggcacgctgcactcccagccagacatggtctttccgtttcttaagtagcaagtgtaggtttcagctggcagttccacctgcatgttctctgcttcgctgccttggaaggggccacattccccattcctcttctccttacagcgcctgcctcctttttcaagcaggcggaaagctgctgtttctcacgtttcagggagaggggtgagcggagggagacctgtgtccgtgccgtccggctccctgggtgggaacaggcaagggatcagatgcccctgacaccacgcctctggccacaccagatgcctctgcagtcctcgacagcctcttcagtgtccctcctgcggtgatgtccttactgtccccagccagggccggggaccggtgtttcactgaggacctgcattagaaacattttttaaattgttgtacaggaagagatgtgtctaaaacagcatcttaaagctgagtgtatttctttgcacaaggggtcatgctgatgaattcttctttcattctgatctttgttcagccaacaggagcgtccttttctaatgtcttccattcctaccccccacccaaaaacaaaagaaatatttgtagcttgctatctgtatttgaatttttagcaattttatatttagatactttgaaaaatgtaaatgactaatttggtcattaaatcttgtgacatattcgatattaaaatgatattaaaataaaagtcatataaatacacac

SEQ ID NO: 22255 - DNA, 1428 bp, Artificial Sequence
  derived and/or modified sequence
atggccttcctggacaaccccaccatcatcctggcccacatccggcaatctcacgtgaccagtgacgatactggaatgtgtgagatggtgttgatcgatcacgacgtcgatctcgaaaagatccaccctccctctatgccaggcgattcaggatccgaaattcagggcagcaacggtgaaactcaggggtacgtgtatgcacagtcagtagacatcacgagctcttgggattttggtatacgtcgcagaagcaacaccgcccagcgcctcgaaagacttcggaaagagagacagaatcaaattaagtgcaagaatattcagtggaaagaacgtaacagcaaacagtcagcccaagaactcaaaagcctcttcgaaaaaaagtccttgaaagaaaagccaccaatttctggaaagcaatccatcctctccgtcagactggagcagtgtcccctccagctgaacaacccatttaatgaatattcgaagtttgacggcaagggccatgtgggaacaacagctacaaagaagatcgacgtttacctgcctctgcactcctcccaggacagactgctgcccatgaccgtggtcacgatggcgagcgccagagttcaagacctgattggactcatctgctggcagtacacttctgagggccgggagcctaagcttaacgataacgtctctgcttactgccttcatatcgccgaagacgatggtgaagtcgacactgactttccccctctggactcgaatgagcctatccacaaatttggcttttctactcttgcacttgtcgagaaatatagtagccctggtctcaccagcaaggagagtctgttcgttcgcattaacgccgctcatggattttccttgattcaggtcgacaacacgaaggtgaccatgaaggaaatcctgttaaaagccgtcaaacgcagaaaagggtcccaaaaggtgagcggtcctcagtaccggttggagaaacagtcagagccgaacgtggctgtagacctcgattctaccctcgagagtcagtctgcatgggagttctgccttgtgagagagaattcaatttccggcgacaaagtagagatagacccggtcaccaatcagaaagcttcaactaagttttggattaagcagaagcctatctcgatagattctgacttactctgcgcctgcgacctggccgaagaaaagagccctagccacgctatcttcaagctgacgtatctcagcaatcacgactacaaacatctctatttcgaatctgatgcagctaccgtcaatgaaatcgtcttaaaagtgaattacatactggaaagccgcgctagtacggctagggccgattatttcgcacagaagcaacggaaactaaatcgcagaacgagtttttcattccagaaagagaagaaatcaggccagcagtag

SEQ ID NO: 22256 - DNA, 1428 bp, Artificial Sequence
  derived and/or modified sequence
atggcttttttggataatcctacaataatactggcccacatacgtcaaagccatgtgacctcagatgatacaggaatgtgcgagatggtgcttatcgatcacgacgtcgatctggagaagatccaccccccatctatgccaggcgattctggtagcgagatccagggttcaaacggggagacacagggatatgtatatgcccagtcggtcgatatcaccagctcatgggatttcggaataagacgtagaagcaatacagcccagagactcgagaggctgcggaaggaaaggcagaatcagataaaatgcaagaacatccagtggaaggagcgcaatagtaaacagtcagcacaagagttaaagagtctattcgaaaaaaaaagcctcaaggagaagccccctatcagcggaaaacagagtatactcagtgtcaggttggagcagtgtccgctgcagctgaataatccatttaacgaatactccaagttcgacggcaaaggccatgtgggcactaccgccaccaagaagatcgatgtttaccttcctctccacagctcccaagatcggcttctccctatgacggtagtgactatggccagcgccagagtccaagatctgatagggctgatttgctggcagtatacttccgagggaagggaacccaaactaaatgataatgtgtcagcatactgtcttcatattgcagaagacgacggagaggtggatactgatttccctccgctggatagcaatgaacccattcataaatttgggttctccaccctcgcccttgtggagaaatacagcagtcccggactgaccagtaaagagtcactcttcgtgagaataaatgccgctcacggcttctctcttattcaagtggacaacacaaaagtgaccatgaaggagattttgcttaaggcagtgaagaggcgaaagggctctcagaaagtgtccggccctcagtatcggcttgaaaagcagtccgagcccaatgtagccgttgatctcgattctaccctggagagccagtccgcatgggaattttgcctcgtccgtgaaaacagcatctcaggcgataaggtcgagatagatcctgtcacgaatcaaaaagcaagcacgaagttctggataaaacagaagcccatttccatcgactctgaccttctgtgtgcctgcgatctcgcagaggagaagtctccttctcacgcaatctttaaactgacatacctcagcaatcacgattacaagcatttgtacttcgagagcgatgctgccactgtaaatgagatcgtgttaaaggtcaattatatcttggaaagccgtgccagtacggctcgggcagattatttcgcccagaagcagcgcaaactcaaccgtagaacatcatttagctttcagaaagagaagaagtccgggcaacagtag

SEQ ID NO: 22257 - protein, 458 aa, Artificial Sequence
  derived and/or modified sequence
MSILIIEAFYGGSHKQLVDLLQEELGDCVVYTLPAKKWHWRARTSALYFSQTIPISEHYRTLFASSVLNLTELAALRPDLGKLKKILYFHENQLIYPVKKCQERDFQYGYNQILSCLVADVVVFNSVFNMESFLTSMGKFMKLIPDHRPKDLESIIRPKCQVIYFPIRFPDVSRFMPKHKTTHLKKMLGLKGNGGAVLSMALPFQPEQRDSEDLLKNFNSECDTHCGLDTARQEYLGNSLRQESDLKKSTSSDNSSSHHGENKQNLTVDPCDILGGVDNQQRLLHIVWPHRWEHDKDPESFFKVLMHLKDLGLNFHVSVLGETFTDVPDIFSEAKKALGSSVLHWGYLPSKDDYFQVLCMADVVISTAKHEFFGVAMLEAVYCGCYPLCPKDLVYPEIFPAEYLYSTPEQLSKRLQNFCKRPDIIRKHLYKGEIAPFSWAALHGKFRSLLTTEPREDL

SEQ ID NO: 22258 - DNA, 1377 bp, Artificial Sequence
  derived and/or modified sequence
atgtcaattttgattatagaagctttctatggtgggtcccataagcagctcgtcgatctgctgcaagaagagctgggagattgtgtggtgtacacacttcccgccaagaagtggcactggagagctaggacctcagccctgtatttctcccagacaattccgatcagtgagcattaccggaccttattcgcaagtagcgtcctgaatctgacagaactcgctgcactgcggcccgacttgggaaagctaaagaaaatcctatacttccacgagaatcagctgatttatcccgtcaaaaagtgtcaggagcgggatttccagtatggctacaatcagatattgtcatgcctcgtggcggatgtggtagtgtttaattccgtgtttaatatggagagctttctgacgagtatgggtaagttcatgaaactgattcccgatcatcggccgaaggacctcgagtccataatcaggcccaaatgtcaggtaatctacttcccaatccggttccccgatgtcagtcggtttatgcctaagcacaagacaactcatttgaaaaaaatgctgggcctcaaggggaacggcggggctgtgttgtctatggctttgccatttcaacctgaacagagggattctgaggacctgctgaagaactttaactccgagtgcgatacccattgcggcctggatacggcccggcaggaatacctgggaaattccctgcggcaggagagtgatctcaagaaatcgaccagctccgacaacagctcatcacatcatggtgagaacaagcagaatctgaccgtggacccatgcgacatactcggaggagtggataatcagcagcgcctactgcatatcgtctggcctcatcgctgggagcacgataaggaccctgaaagtttctttaaagtgttgatgcacctgaaggacctaggtctcaactttcatgtcagtgttttaggagagacattcacagacgtgcccgatatcttttcagaggctaagaaagccttaggcagttccgtgctgcattgggggtacctgccctcaaaggacgactatttccaagtgttatgtatggcggacgttgtcatctccacagccaagcatgaattctttggcgttgcgatgttggaggctgtgtattgtggctgctacccactctgtccgaaagatctggtgtacccagagatatttcctgccgaatacctgtattctacaccagagcaactgtctaaacgtttgcaaaatttttgcaagcggccagacatcatccgcaagcacctttacaaaggggagatcgctccattttcctgggcggcccttcatggcaaatttcgatcactgttgaccaccgagccccgagaggatctgtag

SEQ ID NO: 22259 - DNA, 1377 bp, Artificial Sequence
  derived and/or modified sequence
atgtccatcctgatcatcgaagccttctacggcgggtcccataaacaactggtcgaccttctccaggaggagttgggggactgcgtagtgtacactttgcccgccaagaaatggcactggcgcgcccggacatcagcgttgtacttctctcagactatcccgatatccgaacattaccgcactctgttcgctagtagcgtgctcaatctaaccgagctggctgctctccgcccagacctggggaagctgaagaagatcttgtattttcatgagaaccaactcatctatccggtaaaaaagtgtcaggagagggattttcagtacggttacaaccagatcttgtcttgccttgtggctgacgtcgtggttttcaattcagttttcaatatggagtcattcctcacctctatgggcaagtttatgaaacttattcctgatcacaggccaaaggatctggaatcaatcatcaggcctaagtgtcaggttatctactttccaatcagatttcccgatgtttccagattcatgccaaagcataaaaccacacacctcaaaaagatgctaggtctcaaaggcaatggtggcgctgtgctttctatggccctcccctttcagccggagcagagagacagtgaagacctcttgaagaactttaatagtgagtgtgacacacattgtgggctggacaccgccagacaagaataccttggaaatagcctgaggcaagaatcggacttaaaaaagtccacgtccagtgataacagtagcagccaccatggagaaaacaaacaaaatttgacagttgatccttgtgacattctggggggggtggataaccagcagcgcctcttacatattgtgtggccacatcgctgggagcacgataaggatcctgaaagtttcttcaaagtgctcatgcacctgaaggatctggggttgaacttccatgtcagtgtcttgggcgagacatttacagacgttcccgatattttttctgaagccaaaaaagcactaggctccagcgtgctgcactggggctatctgccttccaaagatgattactttcaagttttatgcatggccgacgtggtgatttcaaccgccaagcacgagttcttcggggtggcaatgcttgaagcagtgtactgtggatgttatcctctttgtcctaaggacttggtctatcctgaaattttcccggcggagtatctctattccactcctgagcagttgtctaaacgtctccagaatttctgtaagcgcccagatatcattaggaaacacctgtacaaaggggagatcgcaccctttagttgggcagcgctgcacggaaagttcagatccctgctcaccacggagccacgagaggacttgtag

SEQ ID NO: 22260 - DNA, 1377 bp, Artificial Sequence
  derived and/or modified sequence
atgagcattttaattatcgaggccttctatgggggctctcacaaacagctggtcgacctgctccaggaagagctgggagactgtgtggtatacacattacctgctaagaaatggcactggcgggctagaacatccgccttatacttcagccagacaattcctatcagcgaacactatcgaactctgttcgcctcttcagtgctgaatctcactgaactagctgcactcagacctgacctgggcaagctcaagaaaatcctatatttccacgagaaccagctaatctatcctgtcaagaaatgtcaggagagagatttccagtatggatacaaccagatactgagctgcctggtcgccgatgtggtcgtgttcaattccgtgttcaacatggaaagcttcctaaccagtatggggaaattcatgaagctgattcctgatcatcgtccaaaggatttggagtcaatcatccgccctaagtgccaggtcatctacttccccatccggtttcctgacgtgtctcgctttatgcccaagcacaaaacaacgcatcttaagaaaatgctgggacttaaagggaacgggggggccgtgctcagcatggctctacccttccagcccgagcagcgcgatagtgaggatctgctgaagaattttaacagcgaatgcgatacgcactgcggtcttgacaccgcaaggcaggagtatctcggcaacagcttgcggcaggagtcggaccttaaaaagagcacatcttcagacaatagctcttctcatcacggagagaataagcagaacttaacggtggatccctgtgacatactgggtggagttgacaatcagcagaggctgttgcacatagtgtggcctcatcggtgggaacatgacaaggatccggaaagcttcttcaaggttcttatgcatctcaaggacctgggtctgaacttccatgtgtccgtgttgggcgagacattcacagacgtacctgacatctttagcgaggcaaagaaggcactcggatcaagtgttcttcactggggttaccttccttccaaagacgactactttcaagtgttgtgtatggcggatgtagtcatcagcaccgctaagcacgaattcttcggcgttgctatgcttgaagcggtttactgcggttgctatccactctgtccgaaagacctagtgtacccagagatttttcctgctgagtatctatactcaacccccgagcagctctccaagagactgcagaacttttgtaagagacctgacattatcagaaagcacctgtataaaggtgagattgccccattctcctgggcagcactgcacgggaagttccgtagtctgctcacaaccgagccaagggaggatctatag

SEQ ID NO: 22261 - DNA, 1377 bp, Artificial Sequence
  derived and/or modified sequence
atgagcatcttgatcatcgaagcattttatggaggatcgcacaagcagttagtggatctcctgcaggaggaactaggtgactgtgtggtctacactttgcctgctaaaaaatggcactggcgagcgaggaccagcgccctgtacttctcacagaccatacccatctcagaacactatcgcaccctctttgcctcttccgtcctgaacctgaccgaactggctgcattgaggccagacctgggaaagctcaaaaaaatcttgtatttccacgaaaaccaactgatttaccccgtgaaaaaatgccaagagcgtgacttccagtacggatataatcagatattaagctgcctcgtggcagatgttgtggtatttaatagcgtgttcaacatggaaagctttttgacttccatgggtaaattcatgaagcttattccagatcatcggcccaaggatcttgagagtattattagaccaaagtgtcaggtcatatacttccccatccgttttcctgacgtaagccgcttcatgccaaaacataagacgactcatcttaaaaagatgcttggcctcaaaggcaatggcggggcagtgttatcaatggccttgcctttccaacctgagcagagggattctgaagacctgctgaagaacttcaactctgaatgtgacacccactgtggactggatacagcacggcaagagtatctggggaactcccttagacaggagtcagatctgaagaagtctacaagctcagataactcatcttctcaccatggagaaaataagcagaaccttaccgtggacccttgcgatatcttagggggggtggacaaccagcagcgcctcttgcacatcgtatggccccaccgatgggagcacgacaaagatcctgaatcttttttcaaagtactgatgcaccttaaggatcttggcctgaattttcatgtgtccgtgctgggggagaccttcacggatgtgcctgatatcttttcggaagccaagaaggctttgggtagctctgtattacattggggctacctgccctcaaaagacgattatttccaggtgttgtgtatggctgatgtcgttatctccacagccaaacacgaattctttggggttgccatgctcgaggcagtctattgcggctgttatcccttatgccccaaagatctggtgtaccctgaaatttttcccgccgaatacctttactcaacacccgagcagctttcgaaaagactccagaatttctgtaagaggccggacatcataagaaaacacttatacaaaggtgagattgcacccttcagctgggccgctctacacggtaagtttaggagcctgctgactactgagcctcgggaggatctttag

SEQ ID NO: 22262 - DNA, 2607 bp, Artificial Sequence
  derived and/or modified sequence
atatggttgtctgagagcatcagaaaagaacctgctctggtcaggtatctctgcattagccagattggacatatgtaaagggacatcagtatatctggatcatcagattgtgcttcaagaagaccatagggaagaacgcattttcatcttgctgcaaaagttgcaatagaagatctgaaggtttgaatgggccaatgagtatcctcatcattgaagcattctatggaggctcccataaacagctggtggatcttcttcaagaagagttaggagactgtgtcgtttatacccttcctgcaaagaaatggcattggagagcccggacatctgctttatatttctctcagaccattcccatcagtgagcattacaggaccctctttgcaagttcagtgcttaacctgaccgaactggctgcccttcggcctgaccttgggaaactgaaaaagattctgtattttcacgagaaccagttgatatatcctgtcaagaaatgtcaggagagggatttccaatatggatacaaccaaattctttcatgcctggtggctgatgtggttgtattcaactcagtttttaatatggaatcatttctcacttccatgggaaaatttatgaagctgattcctgatcacagacccaaggatctggaaagcatcatcagacccaagtgccaagttatttactttcccatcaggtttcctgatgtgagcagattcatgcccaagcacaaaacaacccatttaaagaagatgctcggccttaaaggaaatggcggtgcggttctgtccatggcccttccttttcagccagagcagagagattcagaggatttattgaagaattttaattcagagtgtgatacacactgtggccttgatactgcacgacaagaatatttgggtaactcattaagacaggaatcagacttgaaaaaatccacctcgtcagataattcaagctctcatcatggtgaaaataaacaaaatctgactgttgatccctgtgacattttgggtggagttgataatcagcaaagactgctacacattgtctggcctcacaggtgggagcatgataaagatccagaaagcttttttaaggtattaatgcatcttaaagacttaggactcaatttccacgtgtctgtacttggagaaaccttcacagatgtcccagatattttttcagaggccaaaaaggcattgggatcttctgtcttacactggggctacttacccagcaaagatgactatttccaagtactgtgcatggctgatgttgtcatctcaacagctaagcatgaattctttggagtggcaatgttggaagctgtgtactgtgggtgttacccactttgtcctaaagatttggtttatcccgaaatatttccagctgaatatctgtattctacacctgaacagctttcaaaaaggctccagaatttctgcaagagaccagatattataagaaaacatctctataagggtgaaatcgctccgttttcttgggcagccctacatggtaaattcaggtctctgcttacaacagaacctagggaagatttgtgacagatggggctaagtcacaaacttgcagcctaaggcagaatctgaagaactttccagagtgtgcccatatttacctgatcagagagaaaagaaaatctgcagaggaagctgagcctggctgcttgtcatagctgacacagagccatctgccacaaacctgtggcggcttcagatctccaatccctgccaccaccccaactcaaattaaatacagattcctagagacgttatgatggttacacatgtcctcggcatcacatgtaggagactgttcaaaaaaaatatgtggcctgttgtataaccgcactcatgtatcccatatgtggtgccacattgaatttccggttgaatccgtttttatcctttgtactggatgacatggtgcctgaattctttcttttcgccgacacgatggcagccaaactgcagcttcaaacgctcacacttggctgggtttctacctaggttgccaggttatcatcggagccttcttgtgtcctcaaagggccacgaggcctgaaaggaggatcagaatgctttgggattaattgggcagccatcgcagaattgtttgtgggcaaagggctgctttagcacttttcttttagcaaattaatgactctcaggcacagggggttttaagtgaaggtattaataagaggtctggcaggtattcccatgattcacagagttacatttgcatttaattaatcttaaagttgcaagataaacagctgtaattcggacaaacatgacaaacacagtgaagccaactatcccataaaatgaacactgacatacttgttttaatttttttcccagcgtaaaaatagaaaaatcaaaatactcctaacaaaaccagtgattttgatagaaatatttctccaatatacttgcatccacctacaaatataaccttttcaagataaatcgcttatgatttcaatagtcaaactgctgtgtttgttgatgtaaagatgttttgaatggctagatggtaaaataaattcttaataaagtacccactgcaattttt

SEQ ID NO: 22263 - DNA, 2828 bp, Artificial Sequence
  derived and/or modified sequence
caggtatctctgcattagccagattggacatatgtaaagggacatcagtatatctggatcatcagattgtgcttcaagaagaccatagggaagaacgcattttcatcttgctgcaaaagttgcaatagaagatctgaaggtttgaatgggccaatgagtatcctcatcattgaagcattctatggaggctcccataaacagctggtggatcttcttcaagaagagttaggagactgtgtcgtttatacccttcctgcaaagaaatggcattggagagcccggacatctgctttatatttctctcagaccattcccatcagtgagcattacaggaccctctttgcaagttcagtgcttaacctgaccgaactggctgcccttcggcctgaccttgggaaactgaaaaagattctgtattttcacgagaaccagttgatatatcctgtcaagaaatgtcaggagagggatttccaatatggatacaaccaaattctttcatgcctggtggctgatgtggttgtattcaactcagtttttaatatggaatcatttctcacttccatgggaaaatttatgaagctgattcctgatcacagacccaaggatctggaaagcatcatcagacccaagtgccaagttatttactttcccatcaggtttcctgatgtgagcagattcatgcccaagcacaaaacaacccatttaaagaagatgctcggccttaaaggaaatggcggtgcggttctgtccatggcccttccttttcagccagagcagagagattcagaggatttattgaagaattttaattcagagtgtgatacacactgtggccttgatactgcacgacaagaatatttgggtaactcattaagacaggaatcagacttgaaaaaatccacctcgtcagataattcaagctctcatcatggtgaaaataaacaaaatctgactgttgatccctgtgacattttgggtggagttgataatcagcaaagactgctacacattgtctggcctcacaggtgggagcatgataaagatccagaaagcttttttaaggtattaatgcatcttaaagacttaggactcaatttccacgtgtctgtacttggagaaaccttcacagatgtcccagatattttttcagaggccaaaaaggcattgggatcttctgtcttacactggggctacttacccagcaaagatgactatttccaagtactgtgcatggctgatgttgtcatctcaacagctaagcatgaattctttggagtggcaatgttggaagctgtgtactgtgggtgttacccactttgtcctaaagatttggtttatcccgaaatatttccagctgaatatctgtattctacacctgaacagctttcaaaaaggctccagaatttctgcaagagaccagatattataagaaaacatctctataagggtgaaatcgctccgttttcttgggcagccctacatggtaaattcaggtctctgcttacaacagaacctagggaagatttgtgacagatggggctaagtcacaaacttgcagcctaaggcagaatctgaagaactttccagagtgtgcccatatttacctgatcagagagaaaagaaaatctgcagaggaagctgagcctggctgcttgtcatagctgacacagagccatctgccacaaacctgtggcggcttcagatctccaatccctgccaccaccccaactcaaattaaatacagattcctagagacgttatgatggttacacatgtcctcggcatcacatgtaggagactgttcaaaaaaaatatgtggcctgttgtataaccgcactcatgtatcccatatgtggtgccacattgaatttccggttgaatccgtttttatcctttgtactggatgacatggtgcctgaattctttcttttcgccgacacgatggcagccaaactgcagcttcaaacgctcacacttggctgggtttctacctaggttgccaggttatcatcggagccttcttgtgtcctcaaagggccacgaggcctgaaaggaggatcagaatgctttgggattaattgggcagccatcgcagaattgtttgtgggcaaagggctgctttagcacttttcttttagcaaattaatgactctcaggcacagggggttttaagtgaaggtattaataagaggtctggcaggtattcccatgattcacagagttacatttgcatttaattaatcttaaagttgcaagataaacagctgtaattcggacaaacatgacaaacacagtgaagccaactatcccataaaatgaacactgacatacttgttttaatttttttcccagcgtaaaaatagaaaaatcaaaatactcctaacaaaaccagtgattttgatagaaatatttctccaatatacttgcatccacctacaaatataaccttttcaagataaatcgcttatgatttcaatagtcaaactgctgtgtttgttgatgtaaagatgttttgaatggctagatggtaaaataaattcttaataaagtacccactgcaatttttaattagcatattcatttacatatagatgtatacatctacctatgtgtttctcactgaacgttttccttgtgacagagacaacaaatacaattgtttcttttccggatgaacaaggatctgttttgcaaatgtttgtaagatattatgacatttccaagattttctttgcattctggaaagcaggaggtaaacatttgtagtcattaaggtaaagtctgttgataaaccatcttctgtttactgacaggtaaattgtaacttt

SEQ ID NO: 22264 - DNA, 2954 bp, Artificial Sequence
  derived and/or modified sequence
ggacttgctggagatatagaaagggacctgacacagtttctggccttaaggagctctcattccagtggggaagaaaaaaactaaaataatgatgtccgagagcatcagaaaagaacctgctctggtcaggtatctctgcattagccagattggacatatgtaaagggacatcagtatatctggatcatcagattgtgcttcaagaagaccatagggaagaacgcattttcatcttgctgcaaaagttgcaatagaagatctgaaggtttgaatgggccaatgagtatcctcatcattgaagcattctatggaggctcccataaacagctggtggatcttcttcaagaagagttaggagactgtgtcgtttatacccttcctgcaaagaaatggcattggagagcccggacatctgctttatatttctctcagaccattcccatcagtgagcattacaggaccctctttgcaagttcagtgcttaacctgaccgaactggctgcccttcggcctgaccttgggaaactgaaaaagattctgtattttcacgagaaccagttgatatatcctgtcaagaaatgtcaggagagggatttccaatatggatacaaccaaattctttcatgcctggtggctgatgtggttgtattcaactcagtttttaatatggaatcatttctcacttccatgggaaaatttatgaagctgattcctgatcacagacccaaggatctggaaagcatcatcagacccaagtgccaagttatttactttcccatcaggtttcctgatgtgagcagattcatgcccaagcacaaaacaacccatttaaagaagatgctcggccttaaaggaaatggcggtgcggttctgtccatggcccttccttttcagccagagcagagagattcagaggatttattgaagaattttaattcagagtgtgatacacactgtggccttgatactgcacgacaagaatatttgggtaactcattaagacaggaatcagacttgaaaaaatccacctcgtcagataattcaagctctcatcatggtgaaaataaacaaaatctgactgttgatccctgtgacattttgggtggagttgataatcagcaaagactgctacacattgtctggcctcacaggtgggagcatgataaagatccagaaagcttttttaaggtattaatgcatcttaaagacttaggactcaatttccacgtgtctgtacttggagaaaccttcacagatgtcccagatattttttcagaggccaaaaaggcattgggatcttctgtcttacactggggctacttacccagcaaagatgactatttccaagtactgtgcatggctgatgttgtcatctcaacagctaagcatgaattctttggagtggcaatgttggaagctgtgtactgtgggtgttacccactttgtcctaaagatttggtttatcccgaaatatttccagctgaatatctgtattctacacctgaacagctttcaaaaaggctccagaatttctgcaagagaccagatattataagaaaacatctctataagggtgaaatcgctccgttttcttgggcagccctacatggtaaattcaggtctctgcttacaacagaacctagggaagatttgtgacagatggggctaagtcacaaacttgcagcctaaggcagaatctgaagaactttccagagtgtgcccatatttacctgatcagagagaaaagaaaatctgcagaggaagctgagcctggctgcttgtcatagctgacacagagccatctgccacaaacctgtggcggcttcagatctccaatccctgccaccaccccaactcaaattaaatacagattcctagagacgttatgatggttacacatgtcctcggcatcacatgtaggagactgttcaaaaaaaatatgtggcctgttgtataaccgcactcatgtatcccatatgtggtgccacattgaatttccggttgaatccgtttttatcctttgtactggatgacatggtgcctgaattctttcttttcgccgacacgatggcagccaaactgcagcttcaaacgctcacacttggctgggtttctacctaggttgccaggttatcatcggagccttcttgtgtcctcaaagggccacgaggcctgaaaggaggatcagaatgctttgggattaattgggcagccatcgcagaattgtttgtgggcaaagggctgctttagcacttttcttttagcaaattaatgactctcaggcacagggggttttaagtgaaggtattaataagaggtctggcaggtattcccatgattcacagagttacatttgcatttaattaatcttaaagttgcaagataaacagctgtaattcggacaaacatgacaaacacagtgaagccaactatcccataaaatgaacactgacatacttgttttaatttttttcccagcgtaaaaatagaaaaatcaaaatactcctaacaaaaccagtgattttgatagaaatatttctccaatatacttgcatccacctacaaatataaccttttcaagataaatcgcttatgatttcaatagtcaaactgctgtgtttgttgatgtaaagatgttttgaatggctagatggtaaaataaattcttaataaagtacccactgcaatttttaattagcatattcatttacatatagatgtatacatctacctatgtgtttctcactgaacgttttccttgtgacagagacaacaaatacaattgtttcttttccggatgaacaaggatctgttttgcaaatgtttgtaagatattatgacatttccaagattttctttgcattctggaaagcaggaggtaaacatttgtagtcattaaggtaaagtctgttgataaaccatcttctgtttactgacaggtaaattgtaacttt

SEQ ID NO: 22265 - DNA, 2659 bp, Artificial Sequence
  derived and/or modified sequence
gggcacggcgtcagcgcgtcgccggctgggccgcgccggtggccaggagggagagacaaggaggaggaggaggaggaggtatctctgcattagccagattggacatatgtaaagggacatcagtatatctggatcatcaggaatcatctttcttccagattgtgcttcaagaagaccatagggaagaacgcattttcatcttgctgcaaaagttgcaatagaagatctgaaggtttgaatgggccaatgagtatcctcatcattgaagcattctatggaggctcccataaacagctggtggatcttcttcaagaagagttaggagactgtgtcgtttatacccttcctgcaaagaaatggcattggagagcccggacatctgctttatatttctctcagaccattcccatcagtgagcattacaggaccctctttgcaagttcagtgcttaacctgaccgaactggctgcccttcggcctgaccttgggaaactgaaaaagattctgtattttcacgagaaccagttgatatatcctgtcaagaaatgtcaggagagggatttccaatatggatacaaccaaattctttcatgcctggtggctgatgtggttgtattcaactcagtttttaatatggaatcatttctcacttccatgggaaaatttatgaagctgattcctgatcacagacccaaggatctggaaagcatcatcagacccaagtgccaagttatttactttcccatcaggtttcctgatgtgagcagattcatgcccaagcacaaaacaacccatttaaagaagatgctcggccttaaaggaaatggcggtgcggttctgtccatggcccttccttttcagccagagcagagagattcagaggatttattgaagaattttaattcagagtgtgatacacactgtggccttgatactgcacgacaagaatatttgggtaactcattaagacaggaatcagacttgaaaaaatccacctcgtcagataattcaagctctcatcatggtgaaaataaacaaaatctgactgttgatccctgtgacattttgggtggagttgataatcagcaaagactgctacacattgtctggcctcacaggtgggagcatgataaagatccagaaagcttttttaaggtattaatgcatcttaaagacttaggactcaatttccacgtgtctgtacttggagaaaccttcacagatgtcccagatattttttcagaggccaaaaaggcattgggatcttctgtcttacactggggctacttacccagcaaagatgactatttccaagtactgtgcatggctgatgttgtcatctcaacagctaagcatgaattctttggagtggcaatgttggaagctgtgtactgtgggtgttacccactttgtcctaaagatttggtttatcccgaaatatttccagctgaatatctgtattctacacctgaacagctttcaaaaaggctccagaatttctgcaagagaccagatattataagaaaacatctctataagggtgaaatcgctccgttttcttgggcagccctacatggtaaattcaggtctctgcttacaacagaacctagggaagatttgtgacagatggggctaagtcacaaacttgcagcctaaggcagaatctgaagaactttccagagtgtgcccatatttacctgatcagagagaaaagaaaatctgcagaggaagctgagcctggctgcttgtcatagctgacacagagccatctgccacaaacctgtggcggcttcagatctccaatccctgccaccaccccaactcaaattaaatacagattcctagagacgttatgatggttacacatgtcctcggcatcacatgtaggagactgttcaaaaaaaatatgtggcctgttgtataaccgcactcatgtatcccatatgtggtgccacattgaatttccggttgaatccgtttttatcctttgtactggatgacatggtgcctgaattctttcttttcgccgacacgatggcagccaaactgcagcttcaaacgctcacacttggctgggtttctacctaggttgccaggttatcatcggagccttcttgtgtcctcaaagggccacgaggcctgaaaggaggatcagaatgctttgggattaattgggcagccatcgcagaattgtttgtgggcaaagggctgctttagcacttttcttttagcaaattaatgactctcaggcacagggggttttaagtgaaggtattaataagaggtctggcaggtattcccatgattcacagagttacatttgcatttaattaatcttaaagttgcaagataaacagctgtaattcggacaaacatgacaaacacagtgaagccaactatcccataaaatgaacactgacatacttgttttaatttttttcccagcgtaaaaatagaaaaatcaaaatactcctaacaaaaccagtgattttgatagaaatatttctccaatatacttgcatccacctacaaatataaccttttcaagataaatcgcttatgatttcaatagtcaaactgctgtgtttgttgatgtaaagatgttttgaatggctagatggtaaaataaattcttaataaagtacccactgcaattttt

SEQ ID NO: 22266 - DNA, 1377 bp, Artificial Sequence
  derived and/or modified sequence
atgagcatcctgatcatcgaggccttctacggcggcagccacaagcagctggtggacctgctgcaggaggagctgggggactgtgtggtgtacaccctgcctgccaagaagtggcactggagggcccggaccagcgccctgtacttcagccagaccatccccatcagcgagcactaccgcaccctgtttgccagctctgtgctgaacctgacagagctggccgccctgcggccagacctgggcaagctgaagaagatcctgtacttccacgagaaccagctgatctaccctgtgaagaagtgccaggagcgggacttccagtatggctacaaccagatcctgagctgcctggtggctgatgtggtggtgttcaacagcgtcttcaacatggagagcttcctgacctccatgggcaagttcatgaagctgatcccagaccaccggcccaaggacctggagagcatcatccggcccaagtgccaggtgatctacttccccatccgcttcccagatgtgagccgcttcatgcccaagcacaagaccacccacctgaagaagatgctgggcctgaagggaaatggaggagctgtgctgtccatggccctgcccttccagcctgagcagagggacagcgaggacctgctgaagaacttcaacagtgaatgtgacacccactgcggcctggacacagcccggcaggagtacctgggcaacagcctgcggcaggagagtgacctgaagaagagcaccagcagtgacaacagcagcagccaccacggggagaacaagcagaacctgactgtggacccctgtgacatcctgggcggcgtggacaaccagcagaggctgctgcacatcgtgtggccccaccgctgggagcatgacaaggaccctgagagcttcttcaaggtgctgatgcacctgaaggacctgggcctgaacttccacgtgtctgtgctgggggagaccttcacagatgtgcctgacatcttcagcgaggccaagaaggccctgggcagctctgtgctgcactggggctacctgcccagcaaggatgactacttccaggtgctgtgcatggctgatgtggtgatcagcacagccaagcatgagttctttggagtggccatgctggaggccgtgtactgcggctgctaccccctgtgccccaaggacctggtgtacccagagatcttccctgctgagtacctgtacagcaccccagagcagctgagcaagaggctgcagaacttctgcaagaggccagacatcatcaggaagcacctgtacaagggggagatcgcccccttctcctgggccgccctgcacggcaagttccgcagcctgctgaccacagagccccgggaggacctgtag

SEQ ID NO: 22267 - DNA, 1377 bp, Artificial Sequence
  derived and/or modified sequence
atgagcatcctgatcatcgaggccttctacggcggcagccacaagcagttggttgatttgctgcaagaagagttgggggactgcgtggtatatacactcccagctaaaaaatggcattggagagctcgcacctcggccttatactttagccagacaatccccatatcagagcattatcgtacgctcttcgccagctcagttctgaatttgacagagttagccgctttacggcctgatttggggaagttaaagaagatactgtacttccatgaaaatcagctgatctaccccgtcaaaaagtgtcaggagcgtgatttccagtacggctacaatcaaattctgtcatgcctggtggcggacgtggtcgtttttaacagtgtctttaatatggagtcatttctgacatccatggggaagttcatgaagctcattcctgaccatagaccgaaagatctcgagtctattattcggcccaagtgccaggtaatatactttcctatcaggtttcccgatgtgagtaggttcatgcctaagcacaagaccacccatctcaagaagatgcttggacttaaaggcaatggcggagctgtgctgagcatggccctccccttccagccggagcaacgcgacagtgaagaccttctcaagaattttaacagtgagtgtgacacacattgtggcctggatactgccagacaggagtacctcggcaattcgctgcgtcaggagagtgaccttaaaaaaagcacctcatccgataattcatcctcgcaccacggcgagaataaacagaacttgacagtcgacccctgtgacatcctgggtggggtagataatcaacagcgtttgctccatattgtatggccccaccgctgggagcatgataaagacccagagtcattctttaaggtgttaatgcacctgaaggatctgggacttaattttcacgtctctgtcctcggcgagactttcacagatgtgccggacattttcagcgaggcaaaaaaggcactgggctcctccgtgctgcattggggatatctgccatctaaagacgactatttccaggtcctgtgcatggcagacgtagtgatctcgactgccaagcacgaattttttggcgttgcaatgctcgaagctgtctactgtgggtgttacccactgtgtccaaaagacttagtctatcccgaaattttccctgcagaatatctgtacagtacccccgagcaattgtccaaacgccttcagaatttttgtaagagaccagatatcatacggaaacatctgtacaaaggtgaaatcgccccattctcctgggccgcactccacggcaaattccgatctttactaacaacggaaccaagagaggatttgtag

SEQ ID NO: 22268 - DNA, 1377 bp, Artificial Sequence
  derived and/or modified sequence
atgagcatcctgatcatcgaggccttctacggcggcagccacaagcagctggtcgatctcctccaggaagaattgggagactgcgtggtctacacacttccagctaaaaagtggcactggagagcccgcaccagtgccttatatttttctcagaccatccctatctccgagcactaccggaccctgtttgccagttccgttctgaacctgacagagttagccgctctgcgccctgatctgggcaaactcaagaaaatcctttactttcatgaaaatcagttgatatatccggtaaagaaatgccaagaaagagatttccagtatgggtataaccagatcctgtcttgtttggtagctgacgtggttgtgttcaattccgtctttaacatggagagctttttaacctcgatgggaaaattcatgaagctgatcccggaccaccgccccaaagacttggagagtataatccgaccaaaatgtcaggtgatctacttcccaatacgcttcccagatgtgtctagattcatgccgaagcataagacaacacacctgaaaaagatgctaggtttgaagggaaacggaggagccgtgctctccatggcccttccctttcagccagaacagagagacagcgaggacttactgaagaatttcaactctgagtgcgacacccactgtgggctggacacggcccgccaggaatatctggggaatagcctcaggcaggagagcgacctgaagaaatctacatcgtctgacaattccagctctcaccacggtgaaaacaagcagaatcttaccgtggatccatgcgacatccttggcggggttgacaatcagcagaggctgctgcatatcgtgtggccccatcggtgggagcacgacaaggacccagagtcgttctttaaagtcctaatgcaccttaaggatctgggtctcaattttcacgtgtctgtgctgggcgagactttcacagacgttcctgatattttcagtgaggctaagaaggccttgggcagttctgtgttacattggggttaccttccctcaaaggacgactatttccaggtgttgtgtatggctgacgtcgttatcagcactgctaagcacgagttctttggcgtggcgatgttggaagcggtgtattgcggatgttatccactttgccccaaagaccttgtttatcctgagatatttcccgccgaatacctatactccaccccagaacagctatccaaaagactacagaacttctgtaaaagaccggatattattcgcaaacacctctataagggggagatcgctccgttctcctgggctgcactgcacggtaagtttcgctccttactgacgacggagcctcgggaggacctgtag

SEQ ID NO: 22269 - DNA, 1377 bp, Artificial Sequence
  derived and/or modified sequence
atgagcatcctgatcatcgaggccttctacggcggcagccacaagcagctggtagatttgctccaggaagagctaggcgactgtgtagtttatacactgcccgcaaagaagtggcactggcgagcacgcacctccgcactatatttctcccaaactatccccatctcggaacactaccgaacgctctttgcctcgtccgttctgaatctgacagaacttgctgctctgaggcctgaccttggcaaactcaaaaagatattgtattttcacgaaaatcagctgatctatcccgtgaagaaatgccaggaacgtgatttccagtatggatacaatcagatcctctcttgtctggtggcagatgtggtggttttcaatagcgtgttcaacatggagtccttcctcacttctatgggtaagttcatgaagctgatccccgaccaccggcctaaggatcttgaatcaattattcggcccaaatgccaggtgatctatttcccgatacgatttcccgacgttagcagatttatgccaaaacacaagaccactcatctaaagaaaatgcttggactcaaagggaacgggggcgccgtgctatcaatggcgcttccattccaacccgagcagcgggattctgaagaccttttaaaaaatttcaattccgaatgcgatacccactgtggcttagataccgcaaggcaggaataccttgggaatagcctgcgccaggaaagcgatcttaaaaagagtacgtccagtgataacagtagcagtcaccatggggaaaacaaacagaacctgacggtcgatccatgtgatattctcggcggggttgacaatcagcaaaggttgctacacatcgtatggccccatcgatgggagcacgacaaggacccggaaagttttttcaaagtgctgatgcatctcaaggacttaggcctcaactttcacgtgtcggttttgggagagacgtttaccgatgtccctgatattttctccgaggccaaaaaagctttgggaagtagtgtactccattggggctaccttccttcaaaagatgactactttcaggtgttgtgcatggccgacgtcgtgatatcgaccgcgaaacatgaatttttcggcgttgcaatgcttgaagccgtctattgcggatgttatcccctttgccccaaggacctcgtgtaccccgaaattttcccagccgaatacttgtatagcacacctgaacagttgtctaagcgccttcagaacttttgtaagcggccagacattatacgcaagcacttgtataagggcgaaatcgctccatttagctgggcggccctgcacgggaaattcagaagcctgctgacaacagagccgcgagaagatctttag

SEQ ID NO: 22270 - DNA, 1377 bp, Artificial Sequence
  derived and/or modified sequence
atgagcatcctgatcatcgaggccttctacggcggcagccacaagcagctggtagatctgttacaggaggagctgggggactgcgtggtgtacactctgccagctaaaaaatggcactggcgcgcaaggacaagcgccctgtatttctcacagaccattccaatcagcgaacactataggacactgttcgcaagctccgtgctgaatcttactgagctcgcagctctcaggcctgaccttgggaagctcaagaagattctctatttccatgagaaccaattgatctaccctgtaaagaaatgtcaggagagggacttccagtacggttacaatcagattctctcttgcctggtcgccgatgtggtggtcttcaactccgtatttaatatggaatccttcctaacgtctatgggtaaatttatgaaactgatacccgatcacaggcccaaggatctggagtccatcattaggccgaagtgccaggtgatctatttccccattagattccctgatgtcagcagattcatgcctaaacacaagactacacatcttaagaagatgttgggccttaagggcaatggcggcgccgtgctgagcatggcactcccttttcagcctgagcagcgagatagcgaagatcttctgaagaactttaactcagagtgcgatacacactgtggtcttgacactgcgcgccaggaatacttgggcaactctctgcggcaggaaagcgatctgaagaaaagcacaagcagtgataacagctcctcacaccacggcgagaataaacagaacttaactgtcgacccttgtgatatcctgggaggagtggacaaccaacagaggctactccatatcgtttggccccaccggtgggaacatgataaggaccccgaatccttctttaaggttctcatgcacctcaaggacctggggttaaacttccacgtatccgttttgggcgaaactttcacggatgtccctgatattttttcagaagccaagaaggcactgggctcatcggtgcttcattgggggtatctcccctcaaaggacgattacttccaggttctttgcatggctgacgtggttataagcacagcaaaacacgagttttttggcgtcgcgatgctcgaagctgtgtattgtggatgctacccattatgccccaaggatttagtctatccagagattttccctgcagagtatttatactcaacccccgagcagcttagcaaaagattgcaaaacttttgcaagcggcccgacattattaggaaacacctgtacaaaggggaaatcgctccgttctcgtgggccgccctacacggaaagtttcggagcctgttgaccactgagccccgggaagatctctag

SEQ ID NO: 22271 - DNA, 1377 bp, Artificial Sequence
  derived and/or modified sequence
atgtcaatcctgattatcgaggccttttacgggggttcacataagcaattagttgaccttctgcaggaggaattgggggactgcgtggtttatacattgcctgcaaagaagtggcactggcgggctagaacgagcgccttgtatttttcacaaaccatccctatttcggaacactatcggaccttgttcgcgtccagtgtactcaatttgactgagctggctgctctcaggcctgatctgggcaagctgaagaaaatcttatattttcacgaaaatcagttaatctaccccgtgaagaaatgtcaagaaagagattttcaatacggctataatcagattctcagctgtttggtagccgacgtggtggtgtttaactcagtgtttaatatggagagttttcttacatctatgggcaagttcatgaagttgattcccgatcaccgacccaaggacctggagagcatcatccgtcctaaatgtcaggtcatttactttccgattcgattcccagacgtttccagattcatgccaaaacataaaaccactcacctgaagaagatgctcggcctaaaggggaatgggggtgcagtgctgagtatggcgctgccctttcagccagagcagagagattccgaagacttattaaagaacttcaattccgagtgtgatacgcactgtgggcttgataccgcccgacaggagtacttggggaattctttacggcaggaaagtgacctaaagaaaagcacaagctccgacaattctagctctcaccacggcgagaacaagcagaacctcactgtggacccctgcgatattctcggcggagtggacaaccagcagagactgctccacatcgtctggccgcacaggtgggagcatgacaaagatcctgagtcattctttaaagtgctcatgcacctgaaggacttagggctcaatttccacgtaagcgttttgggagagactttcaccgatgttcccgacatcttttccgaagccaaaaaagcgctgggatcctctgtactccactggggataccttcccagtaaggatgattattttcaggtgctgtgtatggctgacgtcgtaataagcactgcaaaacatgaattttttggagtagctatgttggaagccgtgtattgcggatgttaccccctctgccccaaagacttagtttatccagaaattttcccagcagaatacttgtactcaactcccgagcaattgagtaagagactccagaatttctgtaaacgcccagacattatacggaaacacctgtataagggcgaaattgctccgttcagctgggccgcactacacggaaaatttaggagtcttctgacgactgaacctagggaggatctgtag

SEQ ID NO: 22272 - DNA, 1377 bp, Artificial Sequence
  derived and/or modified sequence
atgtctattctcattatcgaggctttctacgggggttcacacaaacagttagtggacctgctccaagaggagttgggcgactgcgtggtctatacgttgcccgcaaagaagtggcactggcgtgcaagaacctccgctctttattttagccagaccatccctatctccgagcactacagaactctgtttgcgtcatccgtgctcaatctgaccgagctggccgctctccgccctgacctggggaaactgaagaagatactttattttcatgaaaaccagctgatttatcctgttaagaaatgtcaagaaagggattttcagtacggctacaaccagatactttcatgcttagtcgccgacgtggttgtgttcaactccgttttcaatatggagagttttctgacttctatgggcaaattcatgaaactgatcccggatcatcggccaaaggatctggaatccattatcaggcccaagtgccaggtgatatactttcccattcgattccctgacgtttcccggtttatgcccaagcacaaaacgactcatctgaagaaaatgctcggcttgaagggcaatggcggtgcagttctttccatggccctcccgtttcagcccgagcagcgagattctgaagacctactgaaaaatttcaactctgagtgtgacacccactgcggcctggacacagctaggcaagagtacctgggcaatagtctgaggcaggagtcagaccttaaaaagagcacctcctccgataactcatcctcacaccatggcgagaacaagcagaatctgaccgttgacccgtgcgatattctgggaggtgtagacaatcagcagcgcctactgcatattgtgtggcctcacagatgggagcatgacaaggatccagagtccttcttcaaagtgctcatgcacctgaaagacctgggccttaacttccatgttagtgtgctgggcgaaacttttactgatgttccagatatttttagcgaggccaaaaaggctctcggatcctcggtgctgcattggggatacctgcccagcaaggacgactacttccaggttctttgcatggccgatgtggtgatttccaccgccaaacacgagttttttggggtggccatgctcgaggccgtctattgcgggtgctatcccctctgtcctaaagatctcgtctatccggagatttttcctgcagaatatttatactccacaccagagcaactatccaaaaggttgcaaaatttttgtaagaggccagatattatccgtaaacatctctataagggggagatcgccccattttcttgggcagcgctgcatggaaaattccggtccttgctcaccacggagccacgtgaggacctctag

SEQ ID NO: 22273 - DNA, 1377 bp, Artificial Sequence
  derived and/or modified sequence
atgtcaattcttataattgaggctttctacggaggttcccataagcagctagttgacctgctgcaggaggaattgggggactgcgtggtctatacgctacccgcaaagaaatggcattggcgagctcggaccagcgcgctatacttttcacagactatccctatctcagagcactatcgcacactcttcgctagctccgtgctgaacctaacagagctcgccgctctcaggccagatctaggcaaactaaagaaaatcttatatttccatgagaaccagctgatctaccctgtgaagaagtgccaggagagagattttcaatacgggtacaaccagatactctcttgtctggtcgccgacgtggtggtctttaattctgttttcaatatggagagcttcctgacttcgatggggaaatttatgaagctgatcccggaccaccggcctaaggacttagaatccattattaggcctaaatgccaagtcatatatttcccaatccgcttccccgacgtctcccgattcatgccgaagcataagaccactcacctgaagaaaatgctcggacttaagggtaacggtggggctgttctgtccatggctctgccctttcagcctgagcagagggattccgaagacctgctgaagaacttcaactccgagtgtgatacacattgcggactcgacacagcccgtcaggagtatctggggaattcccttagacaggaatccgacctgaaaaaatcaacctccagtgataattcttccagccaccatggggaaaataagcagaacctgaccgtcgacccttgcgacatcttggggggagtggacaaccagcaaagactacttcatatcgtgtggccacaccgctgggagcacgataaagacccggagagcttcttcaaggtccttatgcatctgaaagacctggggttgaatttccatgtaagcgtgctgggagagacttttaccgacgtgcccgatatttttagcgaggccaaaaaggctctgggctctagtgtgcttcactgggggtatctccctagtaaggatgactactttcaggtcctgtgtatggctgacgtagtgatctctactgctaagcacgagtttttcggtgtcgcgatgctggaagcggtgtattgcgggtgttaccccctgtgccctaaggacctcgtataccccgagatattccctgcagaatacctctacagtacccccgagcaactgagcaaacggctccagaacttttgtaaaagacccgatataatcagaaagcacctctacaaaggcgagattgcacccttctcatgggctgccctgcacggcaaatttcggagcctgcttaccaccgaaccccgtgaggacttgtag

SEQ ID NO: 22274 - DNA, 1377 bp, Artificial Sequence
  derived and/or modified sequence
atgtccatcctgatcattgaggctttttacgggggtagccacaaacagctggtagacttacttcaggaagagcttggagactgcgtggtgtacaccctgccggctaaaaagtggcactggcgggcacggacttctgccttgtattttagccagactatccccattagcgaacattatcgtacactgtttgcatcttccgtgctcaatcttactgagctggcagctcttcggccagacttaggcaagttgaagaagatcctatacttccatgagaatcagctgatctaccctgtcaaaaaatgtcaagagagagatttccagtacgggtataatcagattctttcgtgtctcgtggccgacgtcgtggtctttaacagcgtgttcaatatggagagcttcctgacctctatggggaagtttatgaagttgatccctgatcacagacccaaggatctcgagagcattatacggcctaagtgtcaggtcatctattttcctatacgtttcccagatgtctctagatttatgccaaagcacaaaactacccacctgaagaagatgttaggcctgaaggggaacgggggagccgtcctgtctatggcgttgccgtttcagccagaacagagggacagcgaggatctgttaaaaaacttcaatagcgaatgcgacacccactgcggtcttgacacagccaggcaggaatatctaggcaattctctgcgccaagaaagtgatttaaagaagagcacctcatctgataattcaagttcccaccacggcgaaaacaagcagaatctgactgtcgatccgtgtgatatactgggcggagtggacaaccaacagaggctcctgcatatcgtgtggcctcacaggtgggaacatgataaagatccggagtccttttttaaggtgttaatgcacctgaaggacctgggcttaaatttccatgtatccgtgctcggcgaaaccttcacagacgtgccagatattttctccgaggcaaagaaggcattaggctcctccgtcttacactggggttacctcccttccaaagatgattactttcaggtcctgtgtatggccgatgtggttatctctacagcaaagcatgaattcttcggtgtggcaatgttagaggcagtgtattgtggatgctaccctctgtgcccaaaggacctggtgtaccccgagatcttccccgcagagtatctctactcaactccagagcagctgtcaaagaggttgcaaaacttttgtaagcggccagatattattcgtaaacacttgtataaaggcgaaattgcccctttttcctgggccgctctacacggtaagtttcgttctttactcaccaccgagcctcgggaagatctgtag

SEQ ID NO: 22275 - DNA, 1377 bp, Artificial Sequence
  derived and/or modified sequence
atgagcatcctgatcatcgaggccttctacggcggcagccacaagcagctggtggacctgctgcaggaggagctgggcgactgcgtggtgtacaccctgcccgccaagaagtggcactggagagccagaaccagcgccctgtacttcagccagaccatccccatcagcgagcactacagaaccctgttcgccagcagcgtgctgaacctgaccgagctggccgccctgagacccgacctgggcaagctgaagaagatcctgtacttccacgagaaccagctgatctaccccgtgaagaagtgccaggagagagacttccagtacggctacaaccagatcctgagctgcctggtggccgacgtggtggtgttcaacagcgtgttcaacatggagagcttcctgaccagcatgggcaagttcatgaagctgatccccgaccacagacccaaggacctggagagcatcatcagacccaagtgccaggtgatctacttccccatcagattccccgacgtgagcagattcatgcccaagcacaagaccacccacctgaagaagatgctgggcctgaagggcaacggcggcgccgtgctgagcatggccctgcccttccagcccgagcagagagacagcgaggacctgctgaagaacttcaacagcgagtgcgacacccactgcggcctggacaccgccagacaggagtacctgggcaacagcctgagacaggagagcgacctgaagaagagcaccagcagcgacaacagcagcagccaccacggcgagaacaagcagaacctgaccgtggacccctgcgacatcctgggcggcgtggacaaccagcagagactgctgcacatcgtgtggccccacagatgggagcacgacaaggaccccgagagcttcttcaaggtgctgatgcacctgaaggacctgggcctgaacttccacgtgagcgtgctgggcgagaccttcaccgacgtgcccgacatcttcagcgaggccaagaaggccctgggcagcagcgtgctgcactggggctacctgcccagcaaggacgactacttccaggtgctgtgcatggccgacgtggtgatcagcaccgccaagcacgagttcttcggcgtggccatgctggaggccgtgtactgcggctgctaccccctgtgccccaaggacctggtgtaccccgagatcttccccgccgagtacctgtacagcacccccgagcagctgagcaagagactgcagaacttctgcaagagacccgacatcatcagaaagcacctgtacaagggcgagatcgcccccttcagctgggccgccctgcacggcaagttcagaagcctgctgaccaccgagcccagagaggacctgtag

SEQ ID NO: 22276 - protein, 189 aa, Artificial Sequence
  derived and/or modified sequence
MTGTPGAVATRDGEAPERSPPCSPSYDLTGKVMLLGDTGVGKTCFLIQFKDGAFLSGTFIATVGIDFRNKVVTVDGVRVKLQIWDTAGQERFRSVTHAYYRDAQALLLLYDITNKSSFDNIRAWLTEIHEYAQRDVVIMLLGNKADMSSERVIRSEDGETLAREYGVPFLETSAKTGMNVELAFLAIAK

SEQ ID NO: 22277 - protein, 223 aa, Artificial Sequence
  derived and/or modified sequence
MTGTPGAVATRDGEAPERSPPCSPSYDLTGKVMLLGDTGVGKTCFLIQFKDGAFLSGTFIATVGIDFRNKVVTVDGVRVKLQIWDTAGQERFRSVTHAYYRDAQALLLLYDITNKSSFDNIRAWLTEIHEYAQRDVVIMLLGNKADMSSERVIRSEDGETLAREYGVPFLETSAKTGMNVELAFLAIAKELKYRAGHQADEPSFQIRDYVESQKKRSSCCSFM

SEQ ID NO: 22278 - DNA, 570 bp, Artificial Sequence
  derived and/or modified sequence
atgaccggaaccccaggcgctgtggctacccgtgatggtgaggctcctgaacgctcgccaccttgcagtccctcctacgacttaacgggcaaggttatgcttttaggtgataccggggtaggaaagacatgcttcctcatacagtttaaggatggcgcattcttgagcggcacatttatagctactgtgggcattgactttcgcaataaggtggttaccgtggacggcgttagagtgaaacttcagatctgggataccgccggacaggaaagattccgatcagtgacccatgcctactaccgggacgcgcaagctctcctgttgttgtatgacatcactaataagtcgtcattcgataacattagggcctggttgactgaaattcatgaatatgcacagcgggacgtagtcatcatgctcctgggaaataaggccgatatgtccagcgagagggtcatacgttcggaggacggagagactttggcacgcgagtatggggttccttttttagaaacctctgctaaaaccggtatgaatgtcgaactggcctttttggctatcgccaaatag

SEQ ID NO: 22279 - DNA, 672 bp, Artificial Sequence
  derived and/or modified sequence
atgaccggcactcccggagctgttgctactagagacggcgaagctccagaacgtagccccccttgttcgcccagctacgacctcacaggcaaggtcatgttgctgggcgacacaggggtgggtaagacctgctttctaatccaatttaaggacggagctttcctttcaggaacttttatcgctacggtgggaatcgatttccgaaacaaagtcgtgactgttgacggggtcagagtaaagctgcagatttgggacacagcggggcaggaacgattcagatccgtgacccatgcctactacagagacgcccaggcccttttgttactgtatgacatcaccaataaatccagtttcgataacattagggcatggctgactgagattcacgaatatgcccaaagggatgtcgtgatcatgctgctgggaaacaaagcagacatgtctagcgagcgggtcattaggtcggaggacggcgaaaccctagctcgagaatacggcgtcccctttctggagaccagcgccaaaactggaatgaacgtcgaactcgcatttctggctatcgcaaaggagctaaaatatagagctggacaccaggctgacgaaccgtcctttcagatcagggattacgtggagtctcagaaaaagcgctcttcttgctgctcctttatgtag

SEQ ID NO: 22280 - DNA, 672 bp, Artificial Sequence
  derived and/or modified sequence
atgacagggacccccggagccgttgcgactagagatggtgaggctccagagagatctccaccctgctccccttcctacgaccttaccggcaaggtcatgctgctgggggatactggagtaggaaagacttgctttctgattcagtttaaagatggggcctttctttcaggtacttttatcgctaccgtggggatagacttcagaaacaaggtggtgacagtggacggtgtgcgagtaaaattgcaaatctgggatacggccggccaggaacgcttcagaagcgtgacccatgcatactaccgcgacgctcaggcccttttactactgtacgacatcacaaataagtcctcttttgacaatatccgcgcttggttgaccgagatccatgaatatgcccagagagatgtggtgatcatgctgctggggaacaaagcagatatgagttcagagcgcgtgatcagatcggaagatggagagacgctggcgagagagtatggcgttccttttctagaaacgagcgctaaaaccggcatgaacgtcgagttggcctttctcgccattgccaaagagttgaaataccgcgcgggccatcaagccgatgagccctcatttcagatccgggattacgtcgaaagtcagaaaaaacgatcctcttgttgtagctttatgtag

SEQ ID NO: 22281 - DNA, 570 bp, Artificial Sequence
  derived and/or modified sequence
atgacaggcaccccaggagctgtggccaccagagatggagaggcccctgagaggagccccccctgcagccccagctatgacctgaccgggaaggtgatgctgctgggggacaccggggtgggcaagacctgcttcctgatccagttcaaggatggagccttcctgagcggcaccttcatcgccaccgtgggcatcgacttcaggaacaaggtggtgacagtggatggagtgcgggtgaagctgcagatctgggacacagctggccaggagcgcttccgctctgtgacccacgcctactacagagatgcccaggccctgctgctgctgtatgacatcaccaacaagagcagctttgacaacatccgggcctggctgacagagatccatgaatatgcccagagagatgtggtgatcatgctgctgggcaacaaggctgacatgagcagcgagagggtcatccgctcagaagatggagagaccctggcccgggagtatggagtgcccttcctggagaccagcgccaagacaggcatgaatgtggagctggccttcctggccatcgccaagtag

SEQ ID NO: 22282 - DNA, 672 bp, Artificial Sequence
  derived and/or modified sequence
atgacaggcaccccaggagctgtggccaccagagatggagaggcccctgagaggagccccccctgcagccccagctatgacctgaccgggaaggtgatgctgctgggggacaccggggtgggcaagacctgcttcctgatccagttcaaggatggagccttcctgagcggcaccttcatcgccaccgtgggcatcgacttcaggaacaaggtggtgacagtggatggagtgcgggtgaagctgcagatctgggacacagctggccaggagcgcttccgctctgtgacccacgcctactacagagatgcccaggccctgctgctgctgtatgacatcaccaacaagagcagctttgacaacatccgggcctggctgacagagatccatgaatatgcccagagagatgtggtgatcatgctgctgggcaacaaggctgacatgagcagcgagagggtcatccgctcagaagatggagagaccctggcccgggagtatggagtgcccttcctggagaccagcgccaagacaggcatgaatgtggagctggccttcctggccatcgccaaggagctgaagtacagagctggccaccaggctgatgagcccagcttccagatccgggactatgtggagagccagaagaagaggagcagctgctgcagcttcatgtag

SEQ ID NO: 22283 - DNA, 570 bp, Artificial Sequence
  derived and/or modified sequence
atgaccggcacccccggcgccgtggccacccgggacggcgaggccccggaacggtcccctccctgctcacccagttatgatctcacgggcaaggtgatgctgctcggggataccggggttggcaagacctgcttcctaattcagtttaaagacggggctttcctgtcaggtactttcatcgctacagttggcatagattttagaaacaaagtcgtaacagttgatggcgtgagggtcaagctgcagatctgggataccgctgggcaggaaagattcagaagcgtgacacacgcttactacagggacgcacaagcattgctgctcctgtacgacatcactaacaaaagctccttcgacaacatccgggcctggctcaccgagattcacgaatacgctcaacgcgacgttgttattatgctgctgggaaataaagctgatatgtcaagtgagagagttattaggagcgaagacggcgaaactctggccagggagtatggggtgccgtttctggagacttctgcaaaaacagggatgaatgtggaactagctttcctggcgattgctaagtag

SEQ ID NO: 22284 - DNA, 672 bp, Artificial Sequence
  derived and/or modified sequence
atgaccggcacccccggcgccgtggccacccgggacggcgaggcccccgaaagatctccaccatgtagtccctcatatgacttaaccgggaaggttatgttactcggcgacaccggcgtcggcaagacatgcttcctgatccaattcaaagacggagccttcctgtcaggcacgttcatcgccactgtggggattgatttccgaaataaggtggtgacagtggacggagtgcgcgtaaaacttcagatttgggatactgctgggcaggagaggtttcggagtgtgacacacgcctattatagggacgctcaagctctgctccttctttacgatattacaaacaagtcatctttcgacaatatccgggcctggctgacggagattcatgaatatgcgcaaagagacgtggttataatgctgctcggaaataaagccgatatgagcagcgagcgagtcattcgaagcgaagatggggaaactctggctcgcgaatatggggtgccctttctcgaaaccagcgccaagaccggtatgaacgtggaattggcatttctggcaattgcaaaggaactaaaataccgtgccgggcaccaggcggatgagcctagcttccagatccgagattacgtggagtctcagaagaaaagaagtagctgttgtagcttcatgtag

SEQ ID NO: 22285 - DNA, 672 bp, Artificial Sequence
  derived and/or modified sequence
atgaccggcacccccggcgccgtggccacccgggacggcgaggcccctgagcggtccccgccatgcagcccttcctatgatctgaccggaaaggtgatgttgttgggggacactggagtgggtaagacttgctttctgattcagttcaaagacggcgcttttctgagtggaacattcattgctaccgtcggcatcgactttcgaaataaagttgtaacagttgacggagttcgggtgaagctacaaatttgggacaccgcagggcaggagaggtttagatcagtgacacacgcctactacagagacgcgcaggctctgctgctcctctatgacatcaccaataagagctcatttgacaatattagagcctggcttaccgaaattcacgaatacgctcagcgcgatgtggtcatcatgctcttgggtaacaaagctgatatgtcttcagaaagagtcattagatcagaggatggtgagaccctggctagagaatacggggtgcctttccttgagacttcggccaaaacaggtatgaacgttgagttggctttcctagctatagcaaaagagttaaaatatcgtgctgggcatcaggcagacgaaccatctttccagatccgggattacgtagagagccagaagaagcgaagctcttgctgttcgtttatgtag

SEQ ID NO: 22286 - DNA, 570 bp, Artificial Sequence
  derived and/or modified sequence
atgacgggcacacccggagctgttgctacgagggatggggaagcacccgaaagatctcccccttgctcaccgtcatatgacctgactgggaaggtcatgttactcggagataccggtgtaggtaaaacctgcttcctcatccagtttaaagacggcgcattcctatctggaaccttcattgccacagtgggaatcgacttcaggaataaagttgtgactgtagacggcgtgcgtgttaaactgcagatttgggacactgctggccaggagaggtttcggagcgtcactcacgcatactatcgcgacgcccaagcccttctgttgctctatgatattaccaataaatcttctttcgacaatattcgtgcctggcttaccgagatccatgaatacgctcagagagacgttgtcattatgctactggggaataaggccgacatgagcagcgagagagtgatcagatctgaggacggagaaacgctcgcacgtgaatatggggtacctttcctggagacaagtgcaaagacaggcatgaacgtagagctcgcttttctggcgattgccaagtag

SEQ ID NO: 22287 - DNA, 672 bp, Artificial Sequence
  derived and/or modified sequence
atgactggcactccgggtgcagtggctactcgagacggcgaggctcccgaacgatctcccccttgcagccctagctatgatctgaccggcaaggtgatgcttctgggcgatactggtgtgggcaaaacttgttttctcattcagttcaaagacggtgcctttctgtctggaacctttattgctactgtcggaatcgattttcgaaacaaggtcgtgaccgtcgatggagttagagtgaagctgcagatatgggacaccgctggtcaggagcggttccggtcggtaacccacgcgtattatagggacgctcaggctctgctgctcctctacgacattacaaacaaatctagctttgacaacatccgcgcttggctcacagagattcacgaatatgctcagagagacgtcgtcatcatgttgctgggaaataaggccgacatgtcttcagagcgggtgatcaggtccgaagacggtgaaacattagcccgagagtacggcgtaccctttctggagactagtgcaaagacgggcatgaacgtcgaactcgcattcctcgctatcgcgaaggagctaaagtatcgagccggtcaccaggctgatgagccaagcttccagattcgcgactatgtcgagtctcagaagaaacgttccagttgttgttcatttatgtag

SEQ ID NO: 22288 - DNA, 672 bp, Artificial Sequence
  derived and/or modified sequence
atgacaggaactcccggtgctgttgcaacgagggatggcgaggcacctgaacggtccccaccatgctcgcccagctatgatcttaccggcaaggtcatgttgctgggggacaccggggtaggcaagacatgttttctcattcagtttaaagatggggcattcctatcaggaacgtttatcgcaaccgttggaatcgacttcaggaataaagtggtaaccgtggatggagtccgcgtaaagctgcagatttgggatactgcaggacaggaacgttttcgttcggtaacacatgcctactacagggacgcccaggcactgttgttgttgtatgatattaccaataagtccagtttcgacaacattagagcttggctaaccgagattcacgagtacgcccagagagatgtagtgatcatgctgctcggcaacaaggccgatatgtcttcggagagagtgattcggtccgaagatggcgagactctggcacgggaatatggagttccctttcttgaaacatctgctaagactggcatgaatgtggaacttgcctttcttgccatagccaaagaactgaaataccgcgctggccaccaggcagacgagccttctttccaaattagagactacgtggaaagtcagaagaaaagaagttcctgttgttcttttatgtag

SEQ ID NO: 22289 - DNA, 2858 bp, Artificial Sequence
  derived and/or modified sequence
ttcgcctgcgggccggcactgctcacctctcgtccagggacatgacgggcacgccaggcgccgttgccacccgggatggcgaggcccccgagcgctccccgccctgcagtccgagctacgacctcacgggcaaggtgatgcttctgggagacacaggcgtcggcaaaacatgtttcctgatccaattcaaagacggggccttcctgtccggaaccttcatagccaccgtcggcatagacttcaggaacaaggtggtgactgtggatggcgtgagagtgaagctgcagatctgggacaccgctgggcaggaacggttccgaagcgtcacccatgcttattacagagatgctcaggccttgcttctgctgtatgacatcaccaacaaatcttctttcgacaacatcagggcctggctcactgagattcatgagtatgcccagagggacgtggtgatcatgctgctaggcaacaaggcggatatgagcagcgaaagagtgatccgttccgaagacggagagaccttggccagggagtacggtgttcccttcctggagaccagcgccaagactggcatgaatgtggagttagcctttctggccatcgccaagtgagagctgggcagggaagggaagtgtgcggggcagggcggcacactccaggaatccagtagggcccggcccctggcccagcccctggacacacctgcattctgcaggctgaggtccatttgctctgggagcactgggccactgggagaggggagggggcggctcagctcctcaccccagcccagcccagcccagcccagcccattgtctcttcttcaagggaactgaaataccgggccgggcatcaggcggatgagcccagcttccagatccgagactatgtagagtcccagaagaagcgctccagctgctgctccttcatgtgaatcccagggggcagagaggaggctctggaggcacacaggatgcagccttccccctcccaggcctggcttattccaagaggctgagccaatggggagaaagatggaggactcactgcacagccgcttcctagcagggagctatactccaactcctacttgagttcctgcggtctccccgcatccacagggagggtaaaacacttagcttttattttaatagtacataatttaataccaaaaaaggcgcctggatccccaaaaaaccgaggctgggagctagtggcccttttgctttctaggacttggggggccggccctccctcctaagcataacaaaggtggtgttgctccagctcagccccaggggacacagatgcactttgggggtgagggcaggtaatgactccatcgcaccctcagttcagctggacagaggctcaggtgaccccagccttcactgtctcccgctctccaggagcttatcttcgccccatctcccaaataagtgggcccttgtgctgtgaggaagaccaaagcctcagggaagataagagatatggagatgggagggggaggacaaggggcagagagtagggtctagctggctatctctggccttactaacacccccctggaggcatgccccttttctccagcacacaagcacattggggcacctggaaatattggttccaggctcctgttctctggacttcagatcctgggggagcccctcccccccctgaatccctggcttagctaccttcctgcctgtgcacctaaaaacctcaggtcagaactaggaaaagagttttgtttttatttttttgaaatggagtctcgttctgtcgcccaggctgaggtgcagtagtgcaatctccgctcactacaacctccactccctggggctcaagcgatcctcccacctcagccgccgaagtagctgggactataggtgtgtaccatcacacctggctaatttttgtattttttgtagacacagggtttcgccatgttgcccaggctggtcttgaattcctgagctcaagcaacctgccggcctcggcctcccaaagtactgggattacacgcagaaggcaccatgcccaggctagatgtgtcttatcccaatcctttggcaggcatgcagctccacaggcgatttcttcaagcagctgaagtgtttagccctcctgggttaagagccagataaggagaaatccctttcctaggtttggaatgtgttgtgaaaaaaaagagaaatccctggctcctggagctggtgggagacaagattaagcaaacctcccctgacatgtatccctttgaccccaagctctgcctcctccctgaccacccatgccctttcctttaacttctcaaacagataccagggcctaaactgctttacctcccctcctactgagtcaggttaggtggtgggaggtcacccatttccgagttaaaccaatgcaatatgagtaaaacaaagtcatgtgggtatgtctggggtagagagaggggtagcaagttcatgtgtcctccttggtcacatatctcccaaagctccgatccctgccatgggaagtggacaggaaacatgaggtcatgacctgcaggcatctttactgcagctctgccggcctggagggggagagggggaggaagaagtatgcgctgcacatttctgaggctactgcatttgctttcaaggcagaaatcttgctctgagcagtcagcggctccagtttgggcccgataaggaagttctccgtggcctccctcaggcagagcagggaggaggctgacattgccagtctcttctggggcccaaggcaggttgcaggagatccaatcccatagacagctctgggcctcttgcatttgagtttttcagaattaaactgcagtattttggaaagca

SEQ ID NO: 22290 - DNA, 2617 bp, Artificial Sequence
  derived and/or modified sequence
gttcctgcgctctccttcgcctgcgggccggcactgctcacctctcgtccagggacatgacgggcacgccaggcgccgttgccacccgggatggcgaggcccccgagcgctccccgccctgcagtccgagctacgacctcacgggcaaggtgatgcttctgggagacacaggcgtcggcaaaacatgtttcctgatccaattcaaagacggggccttcctgtccggaaccttcatagccaccgtcggcatagacttcaggaacaaggtggtgactgtggatggcgtgagagtgaagctgcagatctgggacaccgctgggcaggaacggttccgaagcgtcacccatgcttattacagagatgctcaggccttgcttctgctgtatgacatcaccaacaaatcttctttcgacaacatcagggcctggctcactgagattcatgagtatgcccagagggacgtggtgatcatgctgctaggcaacaaggcggatatgagcagcgaaagagtgatccgttccgaagacggagagaccttggccagggagtacggtgttcccttcctggagaccagcgccaagactggcatgaatgtggagttagcctttctggccatcgccaaggaactgaaataccgggccgggcatcaggcggatgagcccagcttccagatccgagactatgtagagtcccagaagaagcgctccagctgctgctccttcatgtgaatcccagggggcagagaggaggctctggaggcacacaggatgcagccttccccctcccaggcctggcttattccaagaggctgagccaatggggagaaagatggaggactcactgcacagccgcttcctagcagggagctatactccaactcctacttgagttcctgcggtctccccgcatccacagggagggtaaaacacttagcttttattttaatagtacataatttaataccaaaaaaggcgcctggatccccaaaaaaccgaggctgggagctagtggcccttttgctttctaggacttggggggccggccctccctcctaagcataacaaaggtggtgttgctccagctcagccccaggggacacagatgcactttgggggtgagggcaggtaatgactccatcgcaccctcagttcagctggacagaggctcaggtgaccccagccttcactgtctcccgctctccaggagcttatcttcgccccatctcccaaataagtgggcccttgtgctgtgaggaagaccaaagcctcagggaagataagagatatggagatgggagggggaggacaaggggcagagagtagggtctagctggctatctctggccttactaacacccccctggaggcatgccccttttctccagcacacaagcacattggggcacctggaaatattggttccaggctcctgttctctggacttcagatcctgggggagcccctcccccccctgaatccctggcttagctaccttcctgcctgtgcacctaaaaacctcaggtcagaactaggaaaagagttttgtttttatttttttgaaatggagtctcgttctgtcgcccaggctgaggtgcagtagtgcaatctccgctcactacaacctccactccctggggctcaagcgatcctcccacctcagccgccgaagtagctgggactataggtgtgtaccatcacacctggctaatttttgtattttttgtagacacagggtttcgccatgttgcccaggctggtcttgaattcctgagctcaagcaacctgccggcctcggcctcccaaagtactgggattacacgcagaaggcaccatgcccaggctagatgtgtcttatcccaatcctttggcaggcatgcagctccacaggcgatttcttcaagcagctgaagtgtttagccctcctgggttaagagccagataaggagaaatccctttcctaggtttggaatgtgttgtgaaaaaaaagagaaatccctggctcctggagctggtgggagacaagattaagcaaacctcccctgacatgtatccctttgaccccaagctctgcctcctccctgaccacccatgccctttcctttaacttctcaaacagataccagggcctaaactgctttacctcccctcctactgagtcaggttaggtggtgggaggtcacccatttccgagttaaaccaatgcaatatgagtaaaacaaagtcatgtgggtatgtctggggtagagagaggggtagcaagttcatgtgtcctccttggtcacatatctcccaaagctccgatccctgccatgggaagtggacaggaaacatgaggtcatgacctgcaggcatctttactgcagctctgccggcctggagggggagagggggaggaagaagtatgcgctgcacatttctgaggctactgcatttgctttcaaggcagaaatcttgctctgagcagtcagcggctccagtttgggcccgataaggaagttctccgtggcctccctcaggcagagcagggaggaggctgacattgccagtctcttctggggcccaaggcaggttgcaggagatccaatcccatagacagctctgggcctcttgcatttgag

SEQ ID NO: 22291 - DNA, 1654 bp, Artificial Sequence
  derived and/or modified sequence
acatgacgggcacgccaggcgccgttgccacccgggatggcgaggcccccgagcgctccccgccctgcagtccgagctacgacctcacgggcaaggtgatgcttctgggagacacaggcgtcggcaaaacatgtttcctgatccaattcaaagacggggccttcctgtccggaaccttcatagccaccgtcggcatagacttcaggaacaaggtggtgactgtggatggcgtgagagtgaagctgcagatctgggacaccgctgggcaggaacggttccgaagcgtcacccatgcttattacagagatgctcaggccttgcttctgctgtatgacatcaccaacaaatcttctttcgacaacatcagggcctggctcactgagattcatgagtatgcccagagggacgtggtgatcatgctgctaggcaacaaggcggatatgagcagcgaaagagtgatccgttccgaagacggagagaccttggccagggagtacggtgttcccttcctggagaccagcgccaagactggcatgaatgtggagttagcctttctggccatcgccaaggaactgaaataccgggccgggcatcaggcggatgagcccagcttccagatccgagactatgtagagtcccagaagaagcgctccagctgctgctccttcatgtgaatcccagggggcagagaggaggctctggaggcacacaggatgcagccttccccctcccaggcctggcttattccaagaggctggtcttgaattcctgagctcaagcaacctgccggcctcggcctcccaaagtactgggattacacgcagaaggcaccatgcccaggctagatgtgtcttatcccaatcctttggcaggcatgcagctccacaggcgatttcttcaagcagctgaagtgtttagccctcctgggttaagagccagataaggagaaatccctttcctaggtttggaatgtgttgtgaaaaaaaagagaaatccctggctcctggagctggtgggagacaagattaagcaaacctcccctgacatgtatccctttgaccccaagctctgcctcctccctgaccacccatgccctttcctttaacttctcaaacagataccagggcctaaactgctttacctcccctcctactgagtcaggttaggtggtgggaggtcacccatttccgagttaaaccaatgcaatatgagtaaaacaaagtcatgtgggtatgtctggggtagagagaggggtagcaagttcatgtgtcctccttggtcacatatctcccaaagctccgatccctgccatgggaagtggacaggaaacatgaggtcatgacctgcaggcatctttactgcagctctgccggcctggagggggagagggggaggaagaagtatgcgctgcacatttctgaggctactgcatttgctttcaaggcagaaatcttgctctgagcagtcagcggctccagtttgggcccgataaggaagttctccgtggcctccctcaggcagagcagggaggaggctgacattgccagtctcttctggggcccaaggcaggttgcaggagatccaatcccatagacagctctgggcctcttgcatttgagtttttcagaattaaactgcagtattttggaaagca

SEQ ID NO: 22292 - DNA, 570 bp, Artificial Sequence
  derived and/or modified sequence
atgaccggcacccccggcgccgtggccaccagagacggcgaggcccccgagagaagccccccctgcagccccagctacgacctgaccggcaaggtgatgctgctgggcgacaccggcgtgggcaagacctgcttcctgatccagttcaaggacggcgccttcctgagcggcaccttcatcgccaccgtgggcatcgacttcagaaacaaggtggtgaccgtggacggcgtgagagtgaagctgcagatctgggacaccgccggccaggagagattcagaagcgtgacccacgcctactacagagacgcccaggccctgctgctgctgtacgacatcaccaacaagagcagcttcgacaacatcagagcctggctgaccgagatccacgagtacgcccagagagacgtggtgatcatgctgctgggcaacaaggccgacatgagcagcgagagagtgatcagaagcgaggacggcgagaccctggccagagagtacggcgtgcccttcctggagaccagcgccaagaccggcatgaacgtggagctggccttcctggccatcgccaagtag

SEQ ID NO: 22293 - DNA, 672 bp, Artificial Sequence
  derived and/or modified sequence
atgaccggcacccccggcgccgtggccaccagagacggcgaggcccccgagagaagccccccctgcagccccagctacgacctgaccggcaaggtgatgctgctgggcgacaccggcgtgggcaagacctgcttcctgatccagttcaaggacggcgccttcctgagcggcaccttcatcgccaccgtgggcatcgacttcagaaacaaggtggtgaccgtggacggcgtgagagtgaagctgcagatctgggacaccgccggccaggagagattcagaagcgtgacccacgcctactacagagacgcccaggccctgctgctgctgtacgacatcaccaacaagagcagcttcgacaacatcagagcctggctgaccgagatccacgagtacgcccagagagacgtggtgatcatgctgctgggcaacaaggccgacatgagcagcgagagagtgatcagaagcgaggacggcgagaccctggccagagagtacggcgtgcccttcctggagaccagcgccaagaccggcatgaacgtggagctggccttcctggccatcgccaaggagctgaagtacagagccggccaccaggccgacgagcccagcttccagatcagagactacgtggagagccagaagaagagaagcagctgctgcagcttcatgtag

SEQ ID NO: 22294 - protein, 159 aa, Artificial Sequence
  derived and/or modified sequence
MDKPRKENEEEPQSAPKTDEERPPVEHSPEKQSPEEQSSEEQSSEEEFFPEELLPELLPEMLLSEERPPQEGLSRKDLFEGRPPMEQPPCGVGKHKLEEGSFKERLARSRPQFRGDIHGRNLSNEEMIQAADELEEMKRVRNKLMIMHWKAKRSRPYPI

SEQ ID NO: 22295 - protein, 156 aa, Artificial Sequence
  derived and/or modified sequence
MDKPRKENEEEPQRPRPMRRGLRWSTLPKSSPPRSSLRRSSPRRRSSFLRSSCLSSCLRCSSRRSPQEGLSRKDLFEGRPPMEQPPCGVGKHKLEEGSFKERLARSRPQFRGDIHGRNLSNEEMIQAADELEEMKRVRNKLMIMHWKAKRSRPYPI

SEQ ID NO: 22296 - DNA, 1220 bp, Artificial Sequence
  derived and/or modified sequence
tcttttttttgcctgtccaccatctccctattaccctttggtcgagagggaaagcagaagaagtctgctggtcacagcggggcacctcgaggagaggacgactaggagcacacggcccggaaaggtccaggtcagggaagggaataactgtgcttgaagaagaaaattcccaacatggacaaaccacgcaaagaaaatgaagaagagccgcagagcgcgcccaagaccgatgaggagaggcctccggtggagcactctcccgaaaagcagtcccccgaggagcagtcttcggaggagcagtcctcggaggaggagttctttcctgaggagctcttgcctgagctcctgcctgagatgctcctctcggaggagcgccctccgcaggagggtctttccaggaaggacctgtttgaggggcgccctcccatggagcagcctccttgtggagtaggaaaacataagcttgaagaaggaagctttaaagaaaggttggctcgttctcgcccgcaatttagaggggacatacatggcagaaatttaagcaatgaggagatgatacaggcagcagatgagctagaagagatgaaaagagtaagaaacaaactgatgataatgcactggaaggcaaaacggagccgtccttatcctatttaatgtgttcggcctttaattctgttttgcctgctaatagtattgccattgccacctggactttctgtttgcattttcttaatgccttttcccatattctgaattttaactttttgtgaggctttattttagatgtttagcatgtaactcgcttaaagttgaggtttccccctaaaatctacaagtttccctctttcagtcatgagccctacacatttgcatgaaagatgtacattatatattgtgaaacgaaaaaagcaattttcaaatggtatatattgtatcccatttttgtaaaaaaaatgtatatttatatattaatatgcaaagaaaaagctaaaagtatagacttcaaaggcataacagtggttgtgtggtaagataataggtgattttttaaatttttgttttatctgaatttctcattttttcaggacaaacgttttacttgtgttgcaaaaatatataatgaaaaaatcacacaattttgaagaaaactgtcaatcagcttataacgacaatgtggcacttaataaatacttgtcagaactttaaaaaaaaaaaaaaaa

SEQ ID NO: 22297 - DNA, 480 bp, Artificial Sequence
  derived and/or modified sequence
atggacaagcccagaaaggagaacgaggaggagccccagagcgcccccaagaccgacgaggagagaccccccgtggagcacagccccgagaagcagagccccgaggagcagagcagcgaggagcagagcagcgaggaggagttcttccccgaggagctgctgcccgagctgctgcccgagatgctgctgagcgaggagagacccccccaggagggcctgagcagaaaggacctgttcgagggcagaccccccatggagcagcccccctgcggcgtgggcaagcacaagctggaggagggcagcttcaaggagagactggccagaagcagaccccagttcagaggcgacatccacggcagaaacctgagcaacgaggagatgatccaggccgccgacgagctggaggagatgaagagagtgagaaacaagctgatgatcatgcactggaaggccaagagaagcagaccctaccccatctag

SEQ ID NO: 22298 - DNA, 471 bp, Artificial Sequence
  derived and/or modified sequence
atggacaagcccagaaaggagaacgaggaggagccccagagacccagacccatgagaagaggcctgagatggagcaccctgcccaagagcagcccccccagaagcagcctgagaagaagcagccccagaagaagaagcagcttcctgagaagcagctgcctgagcagctgcctgagatgcagcagcagaagaagcccccaggagggcctgagcagaaaggacctgttcgagggcagaccccccatggagcagcccccctgcggcgtgggcaagcacaagctggaggagggcagcttcaaggagagactggccagaagcagaccccagttcagaggcgacatccacggcagaaacctgagcaacgaggagatgatccaggccgccgacgagctggaggagatgaagagagtgagaaacaagctgatgatcatgcactggaaggccaagagaagcagaccctaccccatctag

SEQ ID NO: 22299 - DNA, 480 bp, Artificial Sequence
  derived and/or modified sequence
atggataaacctagaaaagagaatgaagaggagcctcagtctgccccgaaaactgatgaggagcggcctcctgtggagcatagccctgaaaagcaaagccccgaagaacagtccagcgaagagcagtcttcagaggaggagttcttccccgaagaattactgccagagctgctgccagaaatgctcctgtccgaggaacgacccccccaagagggtctgtctcggaaggatctgtttgagggccgcccccccatggaacaacccccctgcggggtagggaaacacaagctcgaagaagggagtttcaaagaacggttagcgagaagcaggccccagtttcgcggtgacatacatggtcgcaacctgtctaacgaagagatgattcaggccgctgacgagctggaagagatgaagcgtgtgagaaataaactgatgatcatgcattggaaggccaagagatctcgtccatatcccatttag

SEQ ID NO: 22300 - DNA, 480 bp, Artificial Sequence
  derived and/or modified sequence
atggataaacccaggaaggaaaacgaggaggaaccacagtcagctccaaagactgatgaagagaggccccctgtggaacactccccagagaagcagagccccgaagaacagtcatcagaagagcagtcaagtgaagaagagttttttcctgaagaactgctgcccgaactgctgcccgagatgctgctgtccgaggaacggcctccacaggagggactgagcaggaaggatctgttcgaagggcgcccacccatggaacaacccccttgcggagtgggcaagcacaagcttgaagaaggttccttcaaggaaaggttggcccgttcccggccccagtttaggggtgacatccacggtcggaatctgagcaatgaggagatgatccaggccgctgatgagctcgaggagatgaaacgagtgcgaaataagctcatgatcatgcactggaaggccaaacgatctagaccttacccaatctag

SEQ ID NO: 22301 - DNA, 480 bp, Artificial Sequence
  derived and/or modified sequence
atggacaagccccgaaaggagaatgaggaagagcctcaatcggcaccaaaaaccgacgaggagagacctccagtggagcactcgcctgagaagcaatcccccgaggagcaatcctcggaggagcagtcaagcgaggaggaattcttccccgaagaacttttgccagagttacttccagaaatgctgctgtctgaggagcgacccccacaggagggactttcccggaaggatttgttcgagggaagacctccgatggaacagcccccgtgcggagtcgggaaacacaaacttgaggaaggctcatttaaggagcggctcgcccgtagcaggccccaatttcggggggatattcatgggcggaatctgtcaaacgaggaaatgatccaggcagccgacgagctggaagaaatgaaaagggtaagaaacaagctgatgattatgcactggaaagcaaaaaggagccgcccgtaccctatctag

SEQ ID NO: 22302 - DNA, 471 bp, Artificial Sequence
  derived and/or modified sequence
atggataaacctcgtaaagagaatgaggaagagccacagaggcctagacccatgcgaagaggccttcggtggtccaccctccccaaatcaagtcctccccggtcctcactgcggcggtcttccccgcgccgaaggagctctttcctgcgatcttcatgcctttcgagttgtctcagatgctccagccgaaggtcaccacaggagggcctcagcaggaaggacctgttcgagggccgacctccaatggaacagccgccgtgcggagtgggaaagcataaattggaggagggttccttcaaggagcgtctggcacggtcaaggcctcagtttcgaggcgacatccacggacgcaatttgagcaatgaggagatgatccaagctgcagacgaactagaagaaatgaagcgcgtcaggaacaaattgatgatcatgcattggaaagctaagagatcacgaccgtaccctatctag

SEQ ID NO: 22303 - DNA, 480 bp, Artificial Sequence
  derived and/or modified sequence
atggacaagcccaggaaagaaaatgaggaggagccccagagcgcccccaagacagatgaggagaggcctcctgtggagcacagccctgagaagcagagccctgaggagcagagcagcgaggagcagagcagcgaggaggagttcttccctgaggagctgctgcctgagctgctgcctgagatgctgctgtctgaggagcggcccccccaggagggcctgagcaggaaggacctgtttgagggccggccccccatggagcagcccccctgtggggtgggcaagcacaagctggaggagggcagcttcaaggagcggctggcccggagccggccccagttccggggggacatccacggcaggaacctgagcaatgaggagatgatccaggccgcagatgagctggaggagatgaagagggtgaggaacaagctgatgatcatgcactggaaggccaagaggagccggccctaccccatctag

SEQ ID NO: 22304 - DNA, 471 bp, Artificial Sequence
  derived and/or modified sequence
atggacaagcccaggaaagaaaatgaggaggagccccagaggccccggcccatgagaagaggcctgcgctggagcaccctgcccaagagcagcccccccaggagcagcctgcggcgcagcagcccccggcggcgcagcagcttcctgcggagcagctgcctgagcagctgcctgcgctgcagcagcagaagaagcccccaggagggcctgagcaggaaggacctgtttgagggccggccccccatggagcagcccccctgtggggtgggcaagcacaagctggaggagggcagcttcaaggagcggctggcccggagccggccccagttccggggggacatccatggaagaaacctgagcaatgaggagatgatccaggccgcagatgagctggaggagatgaagagggtgaggaacaagctgatgatcatgcactggaaggccaagaggagccggccctaccccatctag

SEQ ID NO: 22305 - DNA, 480 bp, Artificial Sequence
  derived and/or modified sequence
atggacaagccccggaaggagaacgaggaggagccccagagcgcccccaaaaccgatgaggagaggcccccagtggaacattcccctgaaaagcagtcccccgaagagcagtctagtgaagagcagagcagtgaggaagagttttttcccgaggaactcctgcccgaattactgccggaaatgctgctctccgaagagagacccccccaggaaggactgtctaggaaagacctgttcgaaggcagacctccaatggagcagcccccctgtggagttggtaaacataagctggaggagggttcttttaaggagaggcttgcccgcagccgcccccagtttcggggggacatccacgggcggaacctgagtaacgaggagatgatccaggcagctgatgagcttgaggaaatgaagagggtacggaataagttgatgatcatgcattggaaagctaagcggtcccgcccctatcctatttag

SEQ ID NO: 22306 - DNA, 480 bp, Artificial Sequence
  derived and/or modified sequence
atggacaagccccggaaggagaacgaggaggagccccagagcgcccccaagaccgatgaagagcgccctcccgtggagcactcaccggagaaacagagtccagaagagcaatcatcagaggagcagtcttccgaagaggaatttttcccggaagaactactcccggaactcttgcctgaaatgctcttgtccgaggaacgccctccccaggagggcctgtcccgcaaagatctcttcgaagggcgcccgcccatggaacagcctccctgtggggtcggaaagcacaaattagaggaaggttcctttaaggagcgcttagctcgtagtaggccccagttcagaggggatatccacgggcgaaacctcagtaacgaggaaatgatccaggctgccgacgagctcgaagaaatgaagcgcgtgaggaataagctgatgataatgcactggaaggccaaacgatctcgaccttatcccatctag

SEQ ID NO: 22307 - DNA, 480 bp, Artificial Sequence
  derived and/or modified sequence
atggacaagccccggaaggagaacgaggaggagccccagagcgcccccaaaaccgatgaggagcgccctcccgttgagcatagccccgagaaacagagcccagaagagcagagctctgaggagcaaagttccgaagaggaattctttcctgaagaacttctgcccgaactattgcccgagatgcttctgagcgaggagaggccaccccaggaaggtctgtcccgtaaggatttattcgaagggaggcctcccatggagcagccaccttgcggagttgggaagcacaagttggaggagggtagctttaaagaacggctggcacggtcccgcccccagttccgcggtgatatacacgggaggaatttaagtaatgaagaaatgatacaggcggcagatgagttagaagagatgaaaagggtgcgaaataagttaatgatcatgcactggaaggccaaacggtcacggccttaccctatttag

SEQ ID NO: 22308 - DNA, 471 bp, Artificial Sequence
  derived and/or modified sequence
atggacaagccccggaaggagaacgaggaggagccccagcggccccgaccaatgaggcggggactgaggtggtcaaccctccctaagagcagccctcctcgctcctctctgcgccgcagttcaccccgccggcgcagttcattcctgaggtcatcctgcttgtctagttgtttgagatgctcatcccggagaagcccacaggaggggctgagcagaaaagatttgttcgaggggaggcccccaatggagcaaccaccttgtggggtgggaaagcataaactagaggaggggtcctttaaggagcgcctcgcaaggtcaagacctcagtttagaggcgacattcatggccgaaacctgtctaacgaagaaatgatccaggctgccgatgaactcgaggaaatgaagcgggtgaggaacaaattgatgattatgcactggaaagctaagaggtccaggccataccctatatag

SEQ ID NO: 22309 - DNA, 480 bp, Artificial Sequence
  derived and/or modified sequence
atggacaagccgaggaaggagaacgaagaagaaccacagtccgccccaaagaccgatgaggaaagacctccagtggagcattctccggaaaagcagtcccctgaggagcagtcctccgaagagcaatcatccgaagaggagttttttccggaggaactgctccccgagctgctgccagaaatgttgctgtccgaagaaagaccaccccaagaggggctgagccgcaaagatcttttcgagggacgcccacctatggagcagcccccatgtggggtaggcaaacataagctggaagaaggctcctttaaggagcgtctggccagatctaggccacaattccgcggtgacattcacgggaggaatctgagcaacgaggagatgatccaggctgctgatgaactggaggagatgaaacgcgtaagaaacaagcttatgattatgcactggaaagcaaagcgcagtagaccttatcctatatag

SEQ ID NO: 22310 - DNA, 480 bp, Artificial Sequence
  derived and/or modified sequence
atggacaaacctcggaaggaaaacgaagaggaaccccagtcagctcctaagacagatgaggaacggccaccagtggaacacagtcctgaaaaacagagtcccgaggaacaaagctctgaggaacaatctagcgaagaggagtttttccccgaagaattgttacctgaactcctccctgaaatgctcctgagcgaggaaagacctccccaggaaggcctaagtcgcaaggaccttttcgaggggagaccccctatggagcaacctccgtgtggtgtcggcaaacataaactggaggaagggtcatttaaagaacgactagcgagatctcggccacagtttagaggagatattcatggtcgaaacctgtcgaacgaggagatgattcaagcggcagacgagctggaagagatgaaacgagtccgtaacaagttaatgattatgcattggaaagccaaacgctctaggccatacccaatttag

SEQ ID NO: 22311 - DNA, 480 bp, Artificial Sequence
  derived and/or modified sequence
atggataagccgagaaaggagaacgaagaagagccccaatctgccccaaaaactgacgaggagcgcccaccagtcgaacatagccccgagaaacagtcccctgaggagcagtcatccgaagagcagtcttcggaggaagaatttttccctgaggagttattgcccgagctcctgcccgagatgcttctcagcgaggagcgcccaccacaagaaggactttcccggaaggacttattcgaaggcaggcctccgatggagcagcctccatgtggcgtagggaagcacaaactggaggaaggatcttttaaagaaaggctggcacgctcgcgaccccagttcagaggggacatccatggcagaaacctgtcaaacgaagaaatgatacaggctgctgatgaactagaggaaatgaagagggtgaggaataaattaatgatcatgcactggaaggcgaaacgatccaggccttatccgatctag

SEQ ID NO: 22312 - DNA, 471 bp, Artificial Sequence
  derived and/or modified sequence
atggataaaccaagaaaagaaaacgaggaagagccccaacgccctagaccgatgaggcgaggattaagatggagcaccttaccaaaaagcagccccccaaggagttccctccggaggtctagccccagacgaagaagtagttttctgcggtcctcctgcctctcctcctgtctgcgttgctccagcagaaggtccccacaggaaggattaagcaggaaggaccttttcgaggggagacctccaatggagcagccgccttgcggggtggggaaacacaagctcgaggagggctcctttaaggaacgcctcgccaggagccgtcctcagtttcgaggagacattcacggacggaatttgagcaacgaggaaatgatccaagctgctgatgaacttgaggagatgaaaagagtgcgaaacaagctcatgataatgcactggaaggctaagcgcagcaggccttaccccatttag

SEQ ID NO: 22313 - DNA, 1164 bp, Artificial Sequence
  derived and/or modified sequence
ctttggtcgagagggaaagcagaagaagtctgctggtcacagcggggcacctcgaggagaggacgactaggagcacacggcccggaaaggtccagaataactgtgcttgaagaagaaaattcccaacatggacaaaccacgcaaagaaaatgaagaagagccgcagagcgcgcccaagaccgatgaggagaggcctccggtggagcactctcccgaaaagcagtcccccgaggagcagtcttcggaggagcagtcctcggaggaggagttctttcctgaggagctcttgcctgagctcctgcctgagatgctcctctcggaggagcgccctccgcaggagggtctttccaggaaggacctgtttgaggggcgccctcccatggagcagcctccttgtggagtaggaaaacataagcttgaagaaggaagctttaaagaaaggttggctcgttctcgcccgcaatttagaggggacatacatggcagaaatttaagcaatgaggagatgatacaggcagcagatgagctagaagagatgaaaagagtaagaaacaaactgatgataatgcactggaaggcaaaacggagccgtccttatcctatttaatgtgttcggcctttaattctgttttgcctgctaatagtattgccattgccacctggactttctgtttgcattttcttaatgccttttcccatattctgaattttaactttttgtgaggctttattttagatgtttagcatgtaactcgcttaaagttgaggtttccccctaaaatctacaagtttccctctttcagtcatgagccctacacatttgcatgaaagatgtacattatatattgtgaaacgaaaaaagcaattttcaaatggtatatattgtatcccatttttgtaaaaaaaatgtatatttatatattaatatgcaaagaaaaagctaaaagtatagacttcaaaggcataacagtggttgtgtggtaagataataggtgattttttaaatttttgttttatctgaatttctcattttttcaggacaaacgttttacttgtgttgcaaaaatatataatgaaaaaatcacacaattttgaagaaaactgtcaatcagcttataacgacaatgtggcacttaataaatacttgtcagaactttaaaaaaa

SEQ ID NO: 22314 - DNA, 1201 bp, Artificial Sequence
  derived and/or modified sequence
gcctgtccaccatctccctattaccctttggtcgagagggaaagcagaagaagtctgctggtcacagcggggcacctcgaggagaggacgactaggagcacacggcccggaaaggtccaggtcagggaagggaataactgtgcttgaagaagaaaattcccaacatggacaaaccacgcaaagaaaatgaagaagagccgcagagcgcgcccaagaccgatgaggagaggcctccggtggagcactctcccgaaaagcagtcccccgaggagcagtcttcggaggagcagtcctcggaggaggagttctttcctgaggagctcttgcctgagctcctgcctgagatgctcctctcggaggagcgccctccgcaggagggtctttccaggaaggacctgtttgaggggcgccctcccatggagcagcctccttgtggagtaggaaaacataagcttgaagaaggaagctttaaagaaaggttggctcgttctcgcccgcaatttagaggggacatacatggcagaaatttaagcaatgaggagatgatacaggcagcagatgagctagaagagatgaaaagagtaagaaacaaactgatgataatgcactggaaggcaaaacggagccgtccttatcctatttaatgtgttcggcctttaattctgttttgcctgctaatagtattgccattgccacctggactttctgtttgcattttcttaatgccttttcccatattctgaattttaactttttgtgaggctttattttagatgtttagcatgtaactcgcttaaagttgaggtttccccctaaaatctacaagtttccctctttcagtcatgagccctacacatttgcatgaaagatgtacattatatattgtgaaacgaaaaaagcaattttcaaatggtatatattgtatcccatttttgtaaaaaaaatgtatatttatatattaatatgcaaagaaaaagctaaaagtatagacttcaaaggcataacagtggttgtgtggtaagataataggtgattttttaaatttttgttttatctgaatttctcattttttcaggacaaacgttttacttgtgttgcaaaaatatataatgaaaaaatcacacaattttgaagaaaactgtcaatcagcttataacgacaatgtggcacttaataaatacttgtcagaactttaaaaaaa

SEQ ID NO: 22315 - DNA, 721 bp, Artificial Sequence
  derived and/or modified sequence
aggggaagtagcacagaggaagaggcaatactacccgagactagatgcggaccgtctctggcaaccaggaaaaggcaaatacaaagagaggtctgctggtcacagcggggcacctcgaggagaggacgactaggagcacacggcccggaaaggtccagaataactgtgcttgaagaagaaaattcccaacatggacaaaccacgcaaagaaaatgaagaagagccgcagagcgcgcccaagaccgatgaggagaggcctccggtggagcactctcccgaaaagcagtcccccgaggagcagtcttcggaggagcagtcctcggaggaggagttctttcctgaggagctcttgcctgagctcctgcctgagatgctcctctcggaggagcgccctccgcaggagggtctttccaggaaggacctgtttgaggggcgccctcccatggagcagcctccttgtggagtaggaaaacataagcttgaagaaggaagctttaaagaaaggttggctcgttctcgcccgcaatttagaggggacatacatggcagaaatttaagcaatgaggagatgatacaggcagcagatgagctagaagagatgaaaagagtaagaaacaaactgatgataatgcactggaaggcaaaacggagccgtccttatcctatttaatgtgttcggcctttaattctgttttgcctgctaatagtattgccattgcca

SEQ ID NO: 22316 - DNA, 1195 bp, Artificial Sequence
  derived and/or modified sequence
tcttttttttgcctgtccaccatctccctattaccctttggtcgagagggaaagcagaagaagtctgctggtcacagcggggcacctcgaggagaggacgactaggagcacacggcccggaaaggtccaggtcagggaagggaataactgtgcttgaagaagaaaattcccaacatggacaaaccacgcaaagaaaatgaagaagagccgcagcgcccaagaccgatgaggagaggcctccggtggagcactctcccgaaaagcagtcccccgaggagcagtcttcggaggagcagtcctcggaggaggagttctttcctgaggagctcttgcctgagctcctgcctgagatgctcctctcggaggagcccgcaggagggtctttccaggaaggacctgtttgaggggcgccctcccatggagcagcctccttgtggagtaggaaaacataagcttgaagaaggaagctttaaagaaaggttggctcgttctcgcccgcaatttagaggggacatacatggcagaaatttaagcaatgaggagatgatacaggcagcagatgagctagaagagatgaaaagagtaagaaacaaactgatgataatgcactggaaggcaaaacggagccgtccttatcctatttaatgtgttcggcctttaattctgttttgcctgctaatagtattgccattgccacctggactttctgtttgcattttcttaatgccttttcccatattctgaattttaactttttgtgaggctttattttagatgtttagcatgtaactcgcttaaagttgaggtttccccctaaaatctacaagtttccctctttcagtcatgagccctacacatttgcatgaaagatgtacattatatattgtgaaacgaaaaaagcaattttcaaatggtatatattgtatcccatttttgtaaaaaaaatgtatatttatatattaatatgcaaagaaaaagctaaaagtatagacttcaaaggcataacagtggttgtgtggtaagataataggtgattttttaaatttttgttttatctgaatttctcattttttcaggacaaacgttttacttgtgttgcaaaaatatataatgaaaaaatcacacaattttgaagaaaactgtcaatcagcttataacgacaatgtggcacttaataaatacttgtcagaacttt

SEQ ID NO: 22317 - protein, 503 aa, Artificial Sequence
  derived and/or modified sequence
MVSSVLCRCVASPPPDAAATAASSSASSPASVGDPCGGAICGGPDHRLRLWRLFQTLDVNRDGGLCVNDLAVGLRRLGLHRTEGELQKIVQAGDKDLDGQLDFEEFVHYLQDHEKKLRLVFKSLDKKNDGRIDAQEIMQSLRDLGVKISEQQAEKILKSMDKNGTMTIDWNEWRDYHLLHPVENIPEIILYWKHSTIFDVGENLTVPDEFTVEERQTGMWWRHLVAGGGAGAVSRTCTAPLDRLKVLMQVHASRSNNMGIVGGFTQMIREGGARSLWRGNGINVLKIAPESAIKFMAYEQIKRLVGSDQETLRIHERLVAGSLAGAIAQSSIYPMEVLKTRMALRKTGQYSGMLDCARRILAREGVAAFYKGYVPNMLGIIPYAGIDLAVYETLKNAWLQHYAVNSADPGVFVLLACGTMSSTCGQLASYPLALVRTRMQAQASIEGAPEVTMSSLFKHILRTEGAFGLYRGLAPNFMKVIPAVSISYVVYENLKITLGVQSR

SEQ ID NO: 22318 - DNA, 1512 bp, Artificial Sequence
  derived and/or modified sequence
atggtgagcagcgtgctgtgcagatgcgtggccagccccccccccgacgccgccgccaccgccgccagcagcagcgccagcagccccgccagcgtgggcgacccctgcggcggcgccatctgcggcggccccgaccacagactgagactgtggagactgttccagaccctggacgtgaacagagacggcggcctgtgcgtgaacgacctggccgtgggcctgagaagactgggcctgcacagaaccgagggcgagctgcagaagatcgtgcaggccggcgacaaggacctggacggccagctggacttcgaggagttcgtgcactacctgcaggaccacgagaagaagctgagactggtgttcaagagcctggacaagaagaacgacggcagaatcgacgcccaggagatcatgcagagcctgagagacctgggcgtgaagatcagcgagcagcaggccgagaagatcctgaagagcatggacaagaacggcaccatgaccatcgactggaacgagtggagagactaccacctgctgcaccccgtggagaacatccccgagatcatcctgtactggaagcacagcaccatcttcgacgtgggcgagaacctgaccgtgcccgacgagttcaccgtggaggagagacagaccggcatgtggtggagacacctggtggccggcggcggcgccggcgccgtgagcagaacctgcaccgcccccctggacagactgaaggtgctgatgcaggtgcacgccagcagaagcaacaacatgggcatcgtgggcggcttcacccagatgatcagagagggcggcgccagaagcctgtggagaggcaacggcatcaacgtgctgaagatcgcccccgagagcgccatcaagttcatggcctacgagcagatcaagagactggtgggcagcgaccaggagaccctgagaatccacgagagactggtggccggcagcctggccggcgccatcgcccagagcagcatctaccccatggaggtgctgaagaccagaatggccctgagaaagaccggccagtacagcggcatgctggactgcgccagaagaatcctggccagagagggcgtggccgccttctacaagggctacgtgcccaacatgctgggcatcatcccctacgccggcatcgacctggccgtgtacgagaccctgaagaacgcctggctgcagcactacgccgtgaacagcgccgaccccggcgtgttcgtgctgctggcctgcggcaccatgagcagcacctgcggccagctggccagctaccccctggccctggtgagaaccagaatgcaggcccaggccagcatcgagggcgcccccgaggtgaccatgagcagcctgttcaagcacatcctgagaaccgagggcgccttcggcctgtacagaggcctggcccccaacttcatgaaggtgatccccgccgtgagcatcagctacgtggtgtacgagaacctgaagatcaccctgggcgtgcagagcagatag

SEQ ID NO: 22319 - DNA, 1512 bp, Artificial Sequence
  derived and/or modified sequence
atggtttccagtgtcctatgccggtgcgttgccagcccccctcccgacgcagcggcaaccgcagccagttcctccgccagcagccctgcgtccgtgggggacccgtgcgggggagcaatctgcggaggtccggaccatcgcttacgcctgtggagactgtttcagacactggatgttaacagagacggcggtctgtgtgtgaacgacctagccgtgggtctgagacgtctgggtctgcatcgaacggagggtgagttgcagaagattgttcaagcaggtgataaagatttagatgggcaactcgattttgaggagttcgtccactacctgcaggatcacgagaaaaaactgcggctggtatttaaatcattagataagaaaaacgacgggaggattgatgcacaggagataatgcagtctctcagagacctgggggtgaagatctccgaacagcaggcagagaaaattctcaaatctatggacaaaaacgggacaatgaccattgactggaatgaatggcgggactaccacctgctgcatcctgtcgagaacatacccgagatcattctctattggaaacacagcactatttttgatgttggggaaaatctaactgtacccgatgagtttacagtcgaggagcgacaaactggaatgtggtggaggcaccttgtcgctggcggaggagctggcgcagtcagtaggacatgcaccgcccctctcgacaggttgaaagtactgatgcaggtacatgctagccgatccaacaacatggggattgtggggggtttcacacaaatgattagagagggcggtgcccgctccctgtggagaggcaacgggatcaatgttctgaaaatcgccccagagagcgcaatcaaatttatggcctatgagcagatcaagcgcctggtggggagtgaccaggagacgcttcgtatacatgagcgcttggtggctgggtcattggcaggggccatcgcccagtcttcaatctatcccatggaggtgctcaagacacgcatggctttgcgcaaaacaggacagtactcggggatgctggattgtgctcggcgtattctggctagggagggcgtagcggccttctataaggggtacgttcccaatatgctcggcatcattccttacgctggaatcgacctggccgtctacgagactctcaagaacgcttggctccagcactatgcagtgaactctgccgacccaggcgtctttgttctgttggcttgcggcacaatgtcctcgacatgtggccaactggcttcttatcccctggcactcgtccgtactcgcatgcaagcccaggctagcatcgagggcgcgccagaagtgaccatgagcagcttgtttaaacacatccttaggactgaaggggcatttggcctttatagaggcctggcacccaattttatgaaagtaatcccagcagtgtccatctcttatgttgtctatgagaatctgaaaataacgctgggagtccagagccgctag

SEQ ID NO: 22320 - DNA, 1512 bp, Artificial Sequence
  derived and/or modified sequence
atggtgtcctctgtgctgtgccgctgtgtggccagccccccaccagatgctgctgccacagctgccagcagcagcgccagcagccctgcctctgtgggggacccctgtggcggggccatctgtggcggccctgaccaccggctgcggctgtggaggctcttccagaccctggatgtgaacagagatggcggcctgtgtgtgaatgacctggccgtgggcctgcggcggctgggcctgcacaggacagaaggagagctgcagaagatcgtgcaggccggggacaaggacctggatggccagctggactttgaggagtttgtgcactacctgcaggaccacgagaagaagctgcggctggtgttcaagagcctggacaagaagaatgatggaagaattgatgcccaggagatcatgcagagcctgcgggacctgggcgtgaagatcagcgagcagcaggccgagaagatcctgaagtccatggacaagaatggcaccatgaccatcgactggaatgagtggagggactaccacctgctgcaccctgtggagaacatccctgagatcatcctgtactggaagcacagcaccatctttgatgtgggggagaacctgactgtgcctgatgagttcaccgtggaggagcggcagacaggcatgtggtggaggcacctggtggccggcggcggggccggggctgtgtccaggacctgcacagcccccctggaccggctgaaggtgctgatgcaggtgcacgccagccgcagcaacaacatgggcatcgtgggcggcttcacccagatgatccgggagggcggggcccggagcctgtggagaggaaatggcatcaacgtgctgaagatcgcccctgagagcgccatcaagttcatggcctatgagcagatcaagaggctggtgggcagtgaccaggagaccctgcgcatccacgagcggctggtggccggcagcctggccggggccatcgcccagagcagcatctaccccatggaggtgctgaagaccaggatggccctgaggaagacaggccagtacagcggcatgctggactgtgcccggcgcatcctggcccgggagggcgtggccgccttctacaagggctacgtgcccaacatgctgggcatcatcccctatgccggcatcgacctggccgtgtatgagaccctgaagaatgcctggctgcagcactatgctgtgaacagcgctgaccccggggtgtttgtgctgctggcctgtggcaccatgagcagcacctgtggccagctggccagctaccccctggccctggtgaggaccaggatgcaggcccaggccagcattgaaggagcccctgaggtgaccatgagcagcctcttcaagcacatcctgaggacagaaggagccttcggcctgtaccggggcctggcccccaacttcatgaaggtgatcccagctgtgtccatctcctatgtggtgtatgagaacctgaagatcaccctgggcgtgcagagcaggtag

SEQ ID NO: 22321 - DNA, 1512 bp, Artificial Sequence
  derived and/or modified sequence
atggtgagcagcgtgctgtgccggtgcgtggccagccccccccccgacgccgctgcgacggcggccagctccagcgccagctctccagcctctgtgggtgacccctgtgggggggcaatctgcggcgggcccgatcataggctgcggttgtggcgcctattccaaacattagatgttaatagggacgggggcctctgcgtgaacgacttagctgtggggcttcgaaggttgggcctccaccgcacagagggagaacttcagaagattgtacaagctggcgacaaagacttagatggccaactcgatttcgaagagtttgtgcactacctgcaggatcacgaaaaaaaactaaggctggtattcaagtccctagacaaaaaaaacgatgggaggatcgacgctcaggagatcatgcagtcacttagggacctgggtgtgaaaatctcagagcaacaggccgagaagatcctgaagtcaatggataagaatggaaccatgacgattgactggaatgagtggagggattaccacctgctccaccccgtggagaatatcccagaaatcatcttatactggaaacatagcactatctttgacgttggcgaaaacctcactgtgccagatgaattcactgtggaagagcgtcagaccggtatgtggtggcggcacctggtggcaggaggcggggctggggcggttagtaggacatgcaccgccccgctagaccggttgaaagtgttgatgcaagtccacgcgagccgctccaataacatgggaattgtggggggctttacccaaatgattcgggaagggggggctcgcagtctgtggcggggtaatggaatcaatgtgctgaaaatcgccccagagagtgcgatcaagtttatggcttatgagcagattaagcggctggtaggttctgatcaagagaccctccggattcatgagaggctggttgcaggcagtttggctggagcgatagctcagtcatctatctaccctatggaggttctgaaaacacgcatggcactacgcaagactggccagtacagcggcatgctcgattgtgcaagaagaatactggccagagaaggcgtggccgccttttataaaggctatgtgccaaatatgcttggaataataccttatgctggcatcgaccttgccgtctatgagactttgaaaaatgcatggctgcagcattatgccgttaatagtgccgacccaggcgtgttcgttctccttgcctgtggtacaatgagttctacctgcggacagttagctagctacccgctggcgttagtgcggacccgaatgcaggcccaggcctcaatagaaggcgcccccgaagtgaccatgagcagtctgttcaagcacattcttcgcacagagggtgcctttggcttataccggggcctggcccccaattttatgaaggtaatacctgcggtgagtatctcatacgttgtatatgagaatctaaagataactctcggagtacagtcaaggtag

SEQ ID NO: 22322 - DNA, 1512 bp, Artificial Sequence
  derived and/or modified sequence
atggtgagtagcgtgctgtgtcgatgtgtcgcctcgcctcctcctgacgcagctgcgaccgccgcttcctccagcgcaagctcccccgcaagcgtgggggatccatgcggcggtgccatctgcggcggacccgatcatcgattgcggctgtggagactttttcagacacttgatgtaaacagggacggaggcctgtgcgtaaatgatctggcagtcgggctgcgacggctgggattgcatcgtacggagggggaactgcagaagatagtccaggccggagataaggatctcgacggccagcttgattttgaggagtttgtgcactatctgcaggatcatgaaaagaaactcaggctggtgttcaaaagtcttgacaagaaaaacgacgggaggatcgacgcacaggaaatcatgcagtcactccgtgacctgggcgtgaaaatttccgagcaacaggccgagaaaattttgaagagcatggataaaaatggaacgatgaccatcgactggaacgagtggagggattaccacctcctgcatcctgtcgagaatattcccgaaattatactatattggaagcattccacgatttttgatgtcggcgaaaatctgaccgtaccggatgagttcacagtcgaagaacgacagactggaatgtggtggcggcacttggtcgcgggaggaggggcaggagccgtcagcaggacttgtaccgcaccattggacagactgaaggtgttgatgcaagtgcacgccagcagatccaacaatatggggatagtggggggatttactcagatgatacgcgaaggaggtgctcgatctctgtggagggggaacggcattaatgtacttaagatcgcaccagagagcgccatcaaattcatggcctatgaacagattaagcggctggttggatccgatcaggagacgctcaggatccacgaacgcttggtggctggatccctggccggtgcgatcgcacaaagctccatttaccccatggaagtgctgaaaacacggatggccctgaggaaaacgggacaatatagtggaatgctggactgtgcacggagaattcttgccagagagggcgtggctgctttttacaagggctatgtgcccaatatgctgggcataatcccttacgcaggaattgacctcgccgtgtatgaaacactgaagaacgcctggttgcagcactatgccgtgaattctgccgacccaggtgtgttcgtccttctagcctgcggcaccatgtcctctacatgcggtcaactggctagctatcccctggcgttagtcagaaccaggatgcaagcgcaggcaagcatcgagggtgcacccgaggtgacaatgtcctccctgttcaagcacattctgcgtacagagggcgcattcggcctataccgaggtctagccccaaattttatgaaggtaatccctgccgtgagcatctcttatgtcgtatacgagaacctcaaaattactctgggggtgcagtccagatag

SEQ ID NO: 22323 - DNA, 3431 bp, Artificial Sequence
  derived and/or modified sequence
tgccggcgtctccgagcccgcgctcccagctgcagagcgcctggcttgcctcccgcgcggtcaccgccggcccgccgcccccgctcccgcccgcgcccggagcccctgcctcgcgcccgatggtgagcagtgtgttgtgccgctgtgtggcctccccgccgccggacgccgccgccaccgccgcctcttcgtctgcctcatcgccggcgtccgtgggggacccctgcggcggcgctatctgcgggggcccggaccaccggctgcgcctgtggagactctttcagacgctcgacgtcaaccgggacggcggcctgtgtgtcaacgacctggcggtggggctgcggcgcctgggactgcaccgcaccgagggcgagctccagaaaattgtacaagctggagataaggaccttgatgggcagctagactttgaagaatttgtccattatctccaagatcatgagaagaagctgaggctggtgtttaagagtttggacaaaaagaatgatggacgcattgacgcgcaggagatcatgcagtccctgcgggacttgggagtcaagatatctgaacagcaggcagaaaaaattctcaagagcatggataaaaacggcacgatgaccattgactggaacgagtggagagactaccacctcctccaccccgtggaaaacatccccgagatcatcctctactggaagcattccacgatctttgatgtgggtgagaatctaacggtcccggatgagttcacagtggaggagaggcagacggggatgtggtggagacacctggtggcaggaggtggggcaggggccgtatccagaacctgcacggcccccctggacaggctcaaggtgctcatgcaggtccatgcctcccgcagcaacaacatgggcatcgttggtggcttcactcagatgattcgagaaggaggggccaggtcactctggcggggcaatggcatcaacgtcctcaaaattgcccccgaatcagccatcaaattcatggcctatgagcagatcaagcgccttgttggtagtgaccaggagactctgaggattcacgagaggcttgtggcagggtccttggcaggggccatcgcccagagcagcatctacccaatggaggtcctgaagacccggatggcgctgcggaagacaggccagtactcaggaatgctggactgcgccaggaggatcctggccagagagggggtggccgccttctacaaaggctatgtccccaacatgctgggcatcatcccctatgccggcatcgaccttgcagtctacgagacgctcaagaatgcctggctgcagcactatgcagtgaacagcgcggaccccggcgtgtttgtgctcctggcctgtggcaccatgtccagtacctgtggccagctggccagctaccccctggccctagtcaggacccggatgcaggcgcaagcctctattgagggcgctccggaggtgaccatgagcagcctcttcaaacatatcctgcggaccgagggggccttcgggctgtacagggggctggcccccaacttcatgaaggtcatcccagctgtgagcatcagctacgtggtctacgagaacctgaagatcaccctgggcgtgcagtcgcggtgacggggggagggccgcccggcagtggactcgctgatcctgggccgcagcctggggtgtgcagccatctcattctgtgaatgtgccaacactaagctgtctcgagccaagctgtgaaaaccctagacgcacccgcagggagggtggggagagctggcaggcccagggcttgtcctgctgaccccagcagaccctcctgttggttccagcgaagaccacaggcattccttagggtccagggtcagcaggctccgggctcacatgtgtaaggacaggacattttctgcagtgcctgccaatagcgagcttggagcctggaggccggcttagttcttccatttcacccttgcagccagctgttggccacggcccctgccctctggtctgccgtgcatctccctgtgccctcttgctgcctgcctgtctgctgaggtaaggtgggaggagggctacagcccacatcccaccccctcgtccaatcccataatccatgatgaaaggtgaggtcacgtggcctcccaggcctgacttcccaacctacagcattgacgccaacttggctgtgaaggaagaggaaaggatctggccttgtggtcactggcatctgagccctgctgatggctggggctctcgggcatgcttgggagtgcagggggctcgggctgcctggcctggctgcacagaaggcaagtgctggggctcatggtgctctgagctggcctggaccctgtcaggatgggccccacctcagaaccaaactcactgtccccactgtggcatgagggcagtggagcaccatgtttgagggcgaagggcagagcgtttgtgtgttctggggagggaaggaaaaggtgttggaggccttaattatggactgttgggaaaagggttttgtccagaaggacaagccggacaaatgagcgacttctgtgcttccagaggaagacgagggagcaggagcttggctgactgctcagagtctgttctgacgccctgggggttcctgtccaaccccagcaggggcgcagcgggaccagccccacattccacttgtgtcactgcttggaacctatttattttgtatttatttgaacagagttatgtcctaactatttttatagatttgtttaattaatagcttgtcattttcaagttcattttttattcatatttatgttcatggttgattgtaccttcccaagcccgcccagtgggatgggaggaggaggagaaggggggccttgggccgctgcagtcacatctgtccagagaaattccttttgggactggaggcagaaaagcggccagaaggcagcagccctggctcctttcctttggcaggttggggaagggcttgcccccagccttaggatttcagggtttgactgggggcgtggagagagagggaggaacctcaataaccttgaaggtggaatccagttatttcctgcgctgcgagggtttctttatttcactcttttctgaatgtcaaggcagtgaggtgcctctcactgtgaatttgtggtgggcgggggctggaggagagggtgggggactggctccgtccctcccagccttctgctgcccttgcttaacaatgccggccaactggcgacctcacggttgcacttccattccaccagaatgacctgatgaggaaatcttcaataggatgcaaagatcaatgcaaaaattgttatatatgaacatataactggagtcgtcaaaaagcaaattaagaaagaattggacgttagaagttgtcatttaaagcagccttctaataaagttgtttcaaagctg

SEQ ID NO: 22324 - protein, 489 aa, Artificial Sequence
  derived and/or modified sequence
MLQMLWHFLASFFPRAGCHGSREGDDREVRGTPAPAWRDQMASFLGKQDGRAEATEKRPTILLVVGPAEQFPKKIVQAGDKDLDGQLDFEEFVHYLQDHEKKLRLVFKSLDKKNDGRIDAQEIMQSLRDLGVKISEQQAEKILKSMDKNGTMTIDWNEWRDYHLLHPVENIPEIILYWKHSTIFDVGENLTVPDEFTVEERQTGMWWRHLVAGGGAGAVSRTCTAPLDRLKVLMQVHASRSNNMGIVGGFTQMIREGGARSLWRGNGINVLKIAPESAIKFMAYEQIKRLVGSDQETLRIHERLVAGSLAGAIAQSSIYPMEVLKTRMALRKTGQYSGMLDCARRILAREGVAAFYKGYVPNMLGIIPYAGIDLAVYETLKNAWLQHYAVNSADPGVFVLLACGTMSSTCGQLASYPLALVRTRMQAQASIEGAPEVTMSSLFKHILRTEGAFGLYRGLAPNFMKVIPAVSISYVVYENLKITLGVQSR

SEQ ID NO: 22325 - DNA, 1470 bp, Artificial Sequence
  derived and/or modified sequence
atgctgcagatgctgtggcacttcctggccagcttcttccccagagccggctgccacggcagcagagagggcgacgacagagaggtgagaggcacccccgcccccgcctggagagaccagatggccagcttcctgggcaagcaggacggcagagccgaggccaccgagaagagacccaccatcctgctggtggtgggccccgccgagcagttccccaagaagatcgtgcaggccggcgacaaggacctggacggccagctggacttcgaggagttcgtgcactacctgcaggaccacgagaagaagctgagactggtgttcaagagcctggacaagaagaacgacggcagaatcgacgcccaggagatcatgcagagcctgagagacctgggcgtgaagatcagcgagcagcaggccgagaagatcctgaagagcatggacaagaacggcaccatgaccatcgactggaacgagtggagagactaccacctgctgcaccccgtggagaacatccccgagatcatcctgtactggaagcacagcaccatcttcgacgtgggcgagaacctgaccgtgcccgacgagttcaccgtggaggagagacagaccggcatgtggtggagacacctggtggccggcggcggcgccggcgccgtgagcagaacctgcaccgcccccctggacagactgaaggtgctgatgcaggtgcacgccagcagaagcaacaacatgggcatcgtgggcggcttcacccagatgatcagagagggcggcgccagaagcctgtggagaggcaacggcatcaacgtgctgaagatcgcccccgagagcgccatcaagttcatggcctacgagcagatcaagagactggtgggcagcgaccaggagaccctgagaatccacgagagactggtggccggcagcctggccggcgccatcgcccagagcagcatctaccccatggaggtgctgaagaccagaatggccctgagaaagaccggccagtacagcggcatgctggactgcgccagaagaatcctggccagagagggcgtggccgccttctacaagggctacgtgcccaacatgctgggcatcatcccctacgccggcatcgacctggccgtgtacgagaccctgaagaacgcctggctgcagcactacgccgtgaacagcgccgaccccggcgtgttcgtgctgctggcctgcggcaccatgagcagcacctgcggccagctggccagctaccccctggccctggtgagaaccagaatgcaggcccaggccagcatcgagggcgcccccgaggtgaccatgagcagcctgttcaagcacatcctgagaaccgagggcgccttcggcctgtacagaggcctggcccccaacttcatgaaggtgatccccgccgtgagcatcagctacgtggtgtacgagaacctgaagatcaccctgggcgtgcagagcagatag

SEQ ID NO: 22326 - DNA, 1470 bp, Artificial Sequence
  derived and/or modified sequence
atgctacagatgctttggcattttcttgccagtttttttccccgggcaggctgtcacggctcgagagagggagatgatcgggaggttcgcgggacgccggccccggcgtggcgcgaccagatggcttcatttctgggtaaacaggatggccgtgccgaagctactgagaaaagaccaacaattctcctggtggttggacccgcagaacagtttccaaagaagatagtgcaggccggggacaaggatctggacggacaattggactttgaggaatttgttcactatttgcaggaccatgaaaaaaaattgagattggtcttcaagagtctggataagaaaaacgatggcaggatcgatgcgcaggaaattatgcagtcacttcgggacctcggagtgaaaatcagtgagcaacaggcagaaaagatcctaaagtctatggataagaatggaaccatgactatcgattggaacgaatggcgcgattaccacctgctgcaccccgtcgagaacatccctgaaattatcctgtattggaaacacagcacgatctttgatgtgggcgagaacctcactgtgcccgacgagttcaccgttgaagagcgccaaactggaatgtggtggcgccacctcgtcgccggcggaggcgcaggggcagtgagccggacatgtaccgctccgctggaccgcctgaaagtgttaatgcaggtccatgcctcacgtagtaataatatgggcatcgtggggggattcacccagatgatacgtgaaggcggagcacgctctctgtggaggggcaatggcattaatgtactcaagattgcgcccgaatcagccattaagtttatggcttacgaacagatcaagcgcctagtgggatctgaccaggaaaccttgcgcattcacgagcgcctcgtcgcgggctccctcgctggagctatcgcgcaaagctcaatatatccaatggaggtcttgaagactaggatggccctccgcaaaacaggccagtactccggaatgctcgattgtgctaggcggatccttgcaagggaaggagttgcggccttctataaggggtacgttccgaacatgctaggcattatcccttacgccggcattgacctggcagtctacgagaccctcaagaatgcttggcttcaacattacgccgtgaactcagctgacccaggagtgtttgtcctactggcctgcggcaccatgagcagtacctgtggccagctcgcctcctaccccctcgccctggtgaggactcgtatgcaggctcaggcatccattgaaggggctccagaggtcacaatgagcagtctgtttaaacacattctccggaccgagggcgcatttggcctgtatagaggcctggcccctaacttcatgaaagtgatccctgccgtgtctattagttacgttgtctatgagaacctcaagattaccctgggcgtgcagtcgcggtag

SEQ ID NO: 22327 - DNA, 1470 bp, Artificial Sequence
  derived and/or modified sequence
atgctgcagatgctgtggcacttcctggccagcttcttcccccgggccggctgccacggcagccgggagggagatgaccgggaggtgcggggcaccccagccccagcctggagggaccagatggccagcttcctgggcaagcaggacggccgggcagaggccacagagaagaggcccaccatcctgctggtggtgggccctgctgagcagttccccaagaagatcgtgcaggccggggacaaggacctggatggccagctggactttgaggagtttgtgcactacctgcaggaccacgagaagaagctgcggctggtgttcaagagcctggacaagaagaatgatggaagaattgatgcccaggagatcatgcagagcctgcgggacctgggcgtgaagatcagcgagcagcaggccgagaagatcctgaagtccatggacaagaatggcaccatgaccatcgactggaatgagtggagggactaccacctgctgcaccctgtggagaacatccctgagatcatcctgtactggaagcacagcaccatctttgatgtgggggagaacctgactgtgcctgatgagttcaccgtggaggagcggcagacaggcatgtggtggaggcacctggtggccggcggcggggccggggctgtgtccaggacctgcacagcccccctggaccggctgaaggtgctgatgcaggtgcacgccagccgcagcaacaacatgggcatcgtgggcggcttcacccagatgatccgggagggcggggcccggagcctgtggagaggaaatggcatcaacgtgctgaagatcgcccctgagagcgccatcaagttcatggcctatgagcagatcaagaggctggtgggcagtgaccaggagaccctgcgcatccacgagcggctggtggccggcagcctggccggggccatcgcccagagcagcatctaccccatggaggtgctgaagaccaggatggccctgaggaagacaggccagtacagcggcatgctggactgtgcccggcgcatcctggcccgggagggcgtggccgccttctacaagggctacgtgcccaacatgctgggcatcatcccctatgccggcatcgacctggccgtgtatgagaccctgaagaatgcctggctgcagcactatgctgtgaacagcgctgaccccggggtgtttgtgctgctggcctgtggcaccatgagcagcacctgtggccagctggccagctaccccctggccctggtgaggaccaggatgcaggcccaggccagcattgaaggagcccctgaggtgaccatgagcagcctcttcaagcacatcctgaggacagaaggagccttcggcctgtaccggggcctggcccccaacttcatgaaggtgatcccagctgtgtccatctcctatgtggtgtatgagaacctgaagatcaccctgggcgtgcagagcaggtag

SEQ ID NO: 22328 - DNA, 1470 bp, Artificial Sequence
  derived and/or modified sequence
atgctgcagatgctgtggcacttcctggccagcttcttcccccgggccggttgtcatgggtcccgggagggagacgatagggaagtgcgcgggacacccgctccggcttggcgggaccagatggcttcctttttggggaaacaggatggccgcgctgaggccaccgagaagagaccaactattttattggtcgtcggccctgcagagcagttcccgaagaagatcgtgcaggccggggacaaggatcttgacggacagctggatttcgaagagttcgtgcattacctgcaggatcacgagaaaaaactgaggctcgtctttaaatctctggacaaaaagaatgatggcagaatcgacgctcaggagatcatgcagtccctgcgcgacttgggtgtcaaaataagcgaacagcaggccgagaagatcctgaagagcatggataaaaatggcactatgaccatagactggaacgagtggcgagattatcatctgctccacccagtggagaatatccccgaaattattctgtattggaaacatagcacaattttcgatgtgggtgagaatttaaccgttcccgacgaattcaccgttgaggagcgccaaaccggcatgtggtggcggcacctggtagctggcggcggtgcaggagccgtatcacgaacctgcactgcccctctggatagactgaaagtgctgatgcaggttcatgcgtcccgctctaacaatatggggatcgtggggggcttcacgcaaatgatcagggagggcggggcacgcagtctctggcgagggaatggaattaacgtgctgaaaatagctcctgagagcgcaatcaaatttatggcatatgagcagattaaaaggctagtgggaagtgaccaggaaaccctccgtattcacgagcgcctggtcgccggttcattggctggcgccatagcgcagagcagcatctatcctatggaggtgttgaaaacacgcatggcccttaggaaaacaggtcagtatagcggtatgctcgactgcgcccgcagaattctggcacgcgagggggtagcagccttctacaaaggatatgtgcccaatatgctgggcataattccgtatgctggtatcgacctggcggtgtacgagactcttaagaatgcttggctccaacattatgccgtgaactcagctgaccccggggtcttcgtgctcctcgcctgcggcactatgagcagtacctgcggtcagctcgccagttatcctctggcattggttaggactcgcatgcaggcccaagctagtattgaaggtgcccccgaagtcaccatgagctccctgttcaaacatatactgcgcaccgagggagccttcggcctctaccgggggttggctcctaattttatgaaggtgatcccagccgtatccatcagctacgtggtgtatgaaaacctgaaaatcactctaggagtccagtcacggtag

SEQ ID NO: 22329 - DNA, 1470 bp, Artificial Sequence
  derived and/or modified sequence
atgctacagatgctatggcatttcctggcttccttcttccctcgggcaggttgccatggcagcagggagggagacgatcgggaggttagaggaacaccggcaccagcttggcgcgaccaaatggccagctttctgggtaaacaggacggtagggccgaggccacagagaagcggcctaccatcctgctcgtcgtaggccctgccgagcagtttcctaagaagatagttcaggctggcgataaagacctggacggacagttggactttgaggagttcgtacactatctgcaggaccatgagaagaaactgagactcgtatttaagtctctagataagaagaatgacggcaggatcgacgcccaggagattatgcagtcgctgagggacttgggagtgaagatttcggaacagcaggccgagaaaattctgaaatcaatggataagaacggaacaatgaccattgattggaacgaatggagggattaccacctccttcatcccgtggaaaacatccctgaaattatcctctactggaagcactctaccatctttgatgtgggtgagaacctcaccgttcccgacgagtttacagtcgaagaacgccagactggtatgtggtggcgtcacctcgttgccggtggcggagctggcgctgtaagccgcacatgcactgcccctctggaccgtctgaaagtgctgatgcaggtgcatgctagcaggagtaacaatatggggatcgtggggggatttacacagatgatacgggaaggtggcgcaagatcactttggcgcggaaacggtataaatgtgcttaaaattgcccctgaatccgctatcaaattcatggcttatgagcagattaagcggctggtgggttctgaccaggaaaccctgcgcatccatgaaagattggtcgcagggtcactggctggggctatcgcccagtcatccatttacccgatggaggtcttgaagacccgcatggctctgagaaagaccggccagtacagcgggatgctggactgcgctcgacgtatcttggctagggagggcgtggcagctttctacaaggggtacgtcccaaatatgctgggcatcattccctacgccggaatcgacttggcagtctatgagacactgaaaaacgcttggctgcagcactacgccgtgaacagtgctgacccaggggtgtttgtgctgctggcctgtgggacaatgagttcaacatgcggccagctggcctcctacccactagccctggtgagaacacgcatgcaggcgcaggcaagcatagagggagccccagaggtgacaatgagcagcttgttcaagcatatcttgagaacggagggggcattcggtctgtacagaggtcttgccccaaattttatgaaggtcatcccagcagtctccatttcatatgtggtgtacgagaacctgaagatcacccttggtgtacagtctaggtag

SEQ ID NO: 22330 - DNA, 3678 bp, Artificial Sequence
  derived and/or modified sequence
gcgaggacagctgaataactgggagctcgaagttgcttgctgcctccgggagtggtctgcttggctgtcgcgttttccttttctttttttttttttttaaaaaaaagccaaacgtttgctcaccatcacctgcagaagtgagtttttattgaagaagctccagctgctttctccttattgccggcagcctggcaagcctcccttagagtgagctacttctcaggccgggcacgacagcagtgctagcacatttgaaaaagcaggaaaccgcccctgcatgcagagcttccagcctgagaaccccaggcccgtcctcccagcagctgtgtagccagagagcgttggtactgtggtcacatccctcaaaagtgaacagtcgccatcagaggcgtttggaggagaccgtgatgttgcagatgctgtggcatttcctagctagctttttccccagggctgggtgccacggctccagagagggggacgatcgtgaagtcagaggcaccccagcccctgcctggagagaccagatggcaagctttttggggaaacaggacggaagggctgaggccacggaaaaaagacccaccattttgctggtggttggacctgcagagcagtttcctaagaaaattgtacaagctggagataaggaccttgatgggcagctagactttgaagaatttgtccattatctccaagatcatgagaagaagctgaggctggtgtttaagagtttggacaaaaagaatgatggacgcattgacgcgcaggagatcatgcagtccctgcgggacttgggagtcaagatatctgaacagcaggcagaaaaaattctcaagagcatggataaaaacggcacgatgaccattgactggaacgagtggagagactaccacctcctccaccccgtggaaaacatccccgagatcatcctctactggaagcattccacgatctttgatgtgggtgagaatctaacggtcccggatgagttcacagtggaggagaggcagacggggatgtggtggagacacctggtggcaggaggtggggcaggggccgtatccagaacctgcacggcccccctggacaggctcaaggtgctcatgcaggtccatgcctcccgcagcaacaacatgggcatcgttggtggcttcactcagatgattcgagaaggaggggccaggtcactctggcggggcaatggcatcaacgtcctcaaaattgcccccgaatcagccatcaaattcatggcctatgagcagatcaagcgccttgttggtagtgaccaggagactctgaggattcacgagaggcttgtggcagggtccttggcaggggccatcgcccagagcagcatctacccaatggaggtcctgaagacccggatggcgctgcggaagacaggccagtactcaggaatgctggactgcgccaggaggatcctggccagagagggggtggccgccttctacaaaggctatgtccccaacatgctgggcatcatcccctatgccggcatcgaccttgcagtctacgagacgctcaagaatgcctggctgcagcactatgcagtgaacagcgcggaccccggcgtgtttgtgctcctggcctgtggcaccatgtccagtacctgtggccagctggccagctaccccctggccctagtcaggacccggatgcaggcgcaagcctctattgagggcgctccggaggtgaccatgagcagcctcttcaaacatatcctgcggaccgagggggccttcgggctgtacagggggctggcccccaacttcatgaaggtcatcccagctgtgagcatcagctacgtggtctacgagaacctgaagatcaccctgggcgtgcagtcgcggtgacggggggagggccgcccggcagtggactcgctgatcctgggccgcagcctggggtgtgcagccatctcattctgtgaatgtgccaacactaagctgtctcgagccaagctgtgaaaaccctagacgcacccgcagggagggtggggagagctggcaggcccagggcttgtcctgctgaccccagcagaccctcctgttggttccagcgaagaccacaggcattccttagggtccagggtcagcaggctccgggctcacatgtgtaaggacaggacattttctgcagtgcctgccaatagcgagcttggagcctggaggccggcttagttcttccatttcacccttgcagccagctgttggccacggcccctgccctctggtctgccgtgcatctccctgtgccctcttgctgcctgcctgtctgctgaggtaaggtgggaggagggctacagcccacatcccaccccctcgtccaatcccataatccatgatgaaaggtgaggtcacgtggcctcccaggcctgacttcccaacctacagcattgacgccaacttggctgtgaaggaagaggaaaggatctggccttgtggtcactggcatctgagccctgctgatggctggggctctcgggcatgcttgggagtgcagggggctcgggctgcctggcctggctgcacagaaggcaagtgctggggctcatggtgctctgagctggcctggaccctgtcaggatgggccccacctcagaaccaaactcactgtccccactgtggcatgagggcagtggagcaccatgtttgagggcgaagggcagagcgtttgtgtgttctggggagggaaggaaaaggtgttggaggccttaattatggactgttgggaaaagggttttgtccagaaggacaagccggacaaatgagcgacttctgtgcttccagaggaagacgagggagcaggagcttggctgactgctcagagtctgttctgacgccctgggggttcctgtccaaccccagcaggggcgcagcgggaccagccccacattccacttgtgtcactgcttggaacctatttattttgtatttatttgaacagagttatgtcctaactatttttatagatttgtttaattaatagcttgtcattttcaagttcattttttattcatatttatgttcatggttgattgtaccttcccaagcccgcccagtgggatgggaggaggaggagaaggggggccttgggccgctgcagtcacatctgtccagagaaattccttttgggactggaggcagaaaagcggccagaaggcagcagccctggctcctttcctttggcaggttggggaagggcttgcccccagccttaggatttcagggtttgactgggggcgtggagagagagggaggaacctcaataaccttgaaggtggaatccagttatttcctgcgctgcgagggtttctttatttcactcttttctgaatgtcaaggcagtgaggtgcctctcactgtgaatttgtggtgggcgggggctggaggagagggtgggggactggctccgtccctcccagccttctgctgcccttgcttaacaatgccggccaactggcgacctcacggttgcacttccattccaccagaatgacctgatgaggaaatcttcaataggatgcaaagatcaatgcaaaaattgttatatatgaacatataactggagtcgtcaaaaagcaaattaagaaagaattggacgttagaagttgtcatttaaagcagccttctaataaagttgtttcaaagctga

SEQ ID NO: 22331 - protein, 1181 aa, Artificial Sequence
  derived and/or modified sequence
MFFYLSKKISIPNNVKLQCVSWNKEQGFIACGGEDGLLKVLKLETQTDDAKLRGLAAPSNLSMNQTLEGHSGSVQVVTWNEQYQKLTTSDENGLIIVWMLYKGSWIEEMINNRNKSVVRSMSWNADGQKICIVYEDGAVIVGSVDGNRIWGKDLKGIQLSHVTWSADSKVLLFGMANGEIHIYDNQGNFMIKMKLSCLVNVTGAISIAGIHWYHGTEGYVEPDCPCLAVCFDNGRCQIMRHENDQNPVLIDTGMYVVGIQWNHMGSVLAVAGFQKAAMQDKDVNIVQFYTPFGEHLGTLKVPGKEISALSWEGGGLKIALAVDSFIYFANIRPNYKWGYCSNTVVYAYTRPDRPEYCVVFWDTKNNEKYVKYVKGLISITTCGDFCILATKADENHPQEENEMETFGATFVLVLCNSIGTPLDPKYIDIVPLFVAMTKTHVIAASKEAFYTWQYRVAKKLTALEINQITRSRKEGRERIYHVDDTPSGSMDGVLDYSKTIQGTRDPICAITASDKILIVGRESGTIQRYSLPNVGLIQKYSLNCRAYQLSLNCNSSRLAIIDISGVLTFFDLDARVTDSTGQQVVGELLKLERRDVWDMKWAKDNPDLFAMMEKTRMYVFRNLDPEEPIQTSGYICNFEDLEIKSVLLDEILKDPEHPNKDYLINFEIRSLRDSRALIEKVGIKDASQFIEDNPHPRLWRLLAEAALQKLDLYTAEQAFVRCKDYQGIKFVKRLGKLLSESMKQAEVVGYFGRFEEAERTYLEMDRRDLAIGLRLKLGDWFRVLQLLKTGSGDADDSLLEQANNAIGDYFADRQKWLNAVQYYVQGRNQERLAECYYMLEDYEGLENLAISLPENHKLLPEIAQMFVRVGMCEQAVTAFLKCSQPKAAVDTCVHLNQWNKAVELAKNHSMKEIGSLLARYASHLLEKNKTLDAIELYRKANYFFDAAKLMFKIADEEAKKGSKPLRVKKLYVLSALLIEQYHEQMKNAQRGKVKGKSSEATSALAGLLEEEVLSTTDRFTDNAWRGAEAYHFFILAQRQLYEGCVDTALKTALHLKDYEDIIPPVEIYSLLALCACASRAFGTCSKAFIKLKSLETLSSEQKQQYEDLALEIFTKHTSKDNRKPELDSLMEGGEGKLPTCVATGSPITEYQFWMCSVCKHGVLAQEISHYSFCPLCHSPVG

SEQ ID NO: 22332 - DNA, 3546 bp, Artificial Sequence
  derived and/or modified sequence
atgttcttctacctgagcaagaagatcagcatccccaacaacgtgaagctgcagtgcgtgagctggaacaaggagcagggcttcatcgcctgcggcggcgaggacggcctgctgaaggtgctgaagctggagacccagaccgacgacgccaagctgagaggcctggccgcccccagcaacctgagcatgaaccagaccctggagggccacagcggcagcgtgcaggtggtgacctggaacgagcagtaccagaagctgaccaccagcgacgagaacggcctgatcatcgtgtggatgctgtacaagggcagctggatcgaggagatgatcaacaacagaaacaagagcgtggtgagaagcatgagctggaacgccgacggccagaagatctgcatcgtgtacgaggacggcgccgtgatcgtgggcagcgtggacggcaacagaatctggggcaaggacctgaagggcatccagctgagccacgtgacctggagcgccgacagcaaggtgctgctgttcggcatggccaacggcgagatccacatctacgacaaccagggcaacttcatgatcaagatgaagctgagctgcctggtgaacgtgaccggcgccatcagcatcgccggcatccactggtaccacggcaccgagggctacgtggagcccgactgcccctgcctggccgtgtgcttcgacaacggcagatgccagatcatgagacacgagaacgaccagaaccccgtgctgatcgacaccggcatgtacgtggtgggcatccagtggaaccacatgggcagcgtgctggccgtggccggcttccagaaggccgccatgcaggacaaggacgtgaacatcgtgcagttctacacccccttcggcgagcacctgggcaccctgaaggtgcccggcaaggagatcagcgccctgagctgggagggcggcggcctgaagatcgccctggccgtggacagcttcatctacttcgccaacatcagacccaactacaagtggggctactgcagcaacaccgtggtgtacgcctacaccagacccgacagacccgagtactgcgtggtgttctgggacaccaagaacaacgagaagtacgtgaagtacgtgaagggcctgatcagcatcaccacctgcggcgacttctgcatcctggccaccaaggccgacgagaaccacccccaggaggagaacgagatggagaccttcggcgccaccttcgtgctggtgctgtgcaacagcatcggcacccccctggaccccaagtacatcgacatcgtgcccctgttcgtggccatgaccaagacccacgtgatcgccgccagcaaggaggccttctacacctggcagtacagagtggccaagaagctgaccgccctggagatcaaccagatcaccagaagcagaaaggagggcagagagagaatctaccacgtggacgacacccccagcggcagcatggacggcgtgctggactacagcaagaccatccagggcaccagagaccccatctgcgccatcaccgccagcgacaagatcctgatcgtgggcagagagagcggcaccatccagagatacagcctgcccaacgtgggcctgatccagaagtacagcctgaactgcagagcctaccagctgagcctgaactgcaacagcagcagactggccatcatcgacatcagcggcgtgctgaccttcttcgacctggacgccagagtgaccgacagcaccggccagcaggtggtgggcgagctgctgaagctggagagaagagacgtgtgggacatgaagtgggccaaggacaaccccgacctgttcgccatgatggagaagaccagaatgtacgtgttcagaaacctggaccccgaggagcccatccagaccagcggctacatctgcaacttcgaggacctggagatcaagagcgtgctgctggacgagatcctgaaggaccccgagcaccccaacaaggactacctgatcaacttcgagatcagaagcctgagagacagcagagccctgatcgagaaggtgggcatcaaggacgccagccagttcatcgaggacaacccccaccccagactgtggagactgctggccgaggccgccctgcagaagctggacctgtacaccgccgagcaggccttcgtgagatgcaaggactaccagggcatcaagttcgtgaagagactgggcaagctgctgagcgagagcatgaagcaggccgaggtggtgggctacttcggcagattcgaggaggccgagagaacctacctggagatggacagaagagacctggccatcggcctgagactgaagctgggcgactggttcagagtgctgcagctgctgaagaccggcagcggcgacgccgacgacagcctgctggagcaggccaacaacgccatcggcgactacttcgccgacagacagaagtggctgaacgccgtgcagtactacgtgcagggcagaaaccaggagagactggccgagtgctactacatgctggaggactacgagggcctggagaacctggccatcagcctgcccgagaaccacaagctgctgcccgagatcgcccagatgttcgtgagagtgggcatgtgcgagcaggccgtgaccgccttcctgaagtgcagccagcccaaggccgccgtggacacctgcgtgcacctgaaccagtggaacaaggccgtggagctggccaagaaccacagcatgaaggagatcggcagcctgctggccagatacgccagccacctgctggagaagaacaagaccctggacgccatcgagctgtacagaaaggccaactacttcttcgacgccgccaagctgatgttcaagatcgccgacgaggaggccaagaagggcagcaagcccctgagagtgaagaagctgtacgtgctgagcgccctgctgatcgagcagtaccacgagcagatgaagaacgcccagagaggcaaggtgaagggcaagagcagcgaggccaccagcgccctggccggcctgctggaggaggaggtgctgagcaccaccgacagattcaccgacaacgcctggagaggcgccgaggcctaccacttcttcatcctggcccagagacagctgtacgagggctgcgtggacaccgccctgaagaccgccctgcacctgaaggactacgaggacatcatcccccccgtggagatctacagcctgctggccctgtgcgcctgcgccagcagagccttcggcacctgcagcaaggccttcatcaagctgaagagcctggagaccctgagcagcgagcagaagcagcagtacgaggacctggccctggagatcttcaccaagcacaccagcaaggacaacagaaagcccgagctggacagcctgatggagggcggcgagggcaagctgcccacctgcgtggccaccggcagccccatcaccgagtaccagttctggatgtgcagcgtgtgcaagcacggcgtgctggcccaggagatcagccactacagcttctgccccctgtgccacagccccgtgggctag

SEQ ID NO: 22333 - DNA, 3546 bp, Artificial Sequence
  derived and/or modified sequence
atgttcttttacctctctaaaaaaatcagcatcccaaacaatgttaagctgcagtgcgtatcttggaacaaagaacaggggttcatcgcttgtggtggggaagacgggctactgaaggttttaaagctagagacccaaacagatgatgccaagctgaggggccttgcagccccttctaacctgtccatgaaccagaccctggaggggcattccggaagcgtccaggttgtcacctggaatgaacagtatcaaaagctgaccaccagcgatgaaaacggactgatcattgtgtggatgctctacaaaggatcttggatcgaagagatgatcaataaccgtaataagtccgtggtcaggagtatgtcctggaacgccgacggccaaaagatatgcatcgtatatgaggatggagcagtaattgttggatcagtagatgggaacagaatctggggtaaggatctgaagggcatccagcttagccatgtgacctggtccgcagactccaaagtgctcctgttcggcatggccaacggcgagatccatatctatgataaccagggcaactttatgatcaaaatgaagctcagttgcttggtgaatgtcacgggggccatttctattgctggcatccactggtatcatggcaccgagggatatgttgagccagactgcccctgcctggccgtgtgctttgataacggcaggtgtcagattatgaggcacgagaatgaccagaatcccgttttaatcgatacggggatgtatgtagtaggcatccagtggaaccacatgggaagtgtcctagctgtggccggctttcagaaagcagcaatgcaggacaaggatgtgaatatcgtgcagttctacactcccttcggcgaacacctggggaccctgaaagtccctggaaaggagatttccgccctgtcttgggagggcggcgggttgaaaatcgcattagcagtcgactccttcatttacttcgcaaatatcaggcccaactataagtggggatactgcagtaacaccgtggtgtacgcctataccagaccagaccgaccagagtactgcgtggtgttctgggatactaaaaacaatgagaaatacgtgaagtatgttaagggactcatcagcatcacgacttgcggtgatttttgcatcttggctaccaaagccgatgagaaccatccacaggaggaaaacgagatggagactttcggagccacttttgtgcttgtactttgcaactccattggtacacctttagatccaaagtacatagacatcgtgccgctgtttgtggctatgacgaaaacccatgtcattgcggcatccaaggaagccttttacacctggcagtaccgggtggccaagaagctgaccgccctggagataaatcagatcacccgaagccgaaaagaaggccgagaaagaatttatcacgttgatgataccccctctggttctatggacggcgtcctggactattctaagacaatacagggtacccgcgatcctatatgtgctataactgccagtgacaaaattctgatcgtggggagagagtccggcaccattcagcgctactcactgccaaacgtgggactcattcagaagtacagtctcaactgtagagcgtaccagctgtctctgaattgtaactcttcccgactcgccatcatcgatatcagcggcgtcctcacctttttcgatctggacgctcgtgtaacagactcaactgggcagcaggtggtgggggaactcctgaaattagagcgccgcgatgtctgggacatgaagtgggccaaagacaatccagacttgttcgccatgatggagaagaccaggatgtacgtgttccggaatctcgacccggaagagcccatccagactagcgggtacatctgtaactttgaggatctggagatcaaatccgtgctgcttgacgagatcctgaaagatcctgagcaccccaataaagactacctcatcaactttgagatccgctccctccgggattctcgcgccctaatagagaaagtcggaatcaaggacgccagtcagtttattgaggataatccccaccccagactgtggcggctactggcagaagccgcactgcaaaagctggatctgtacaccgcagaacaggccttcgtcaggtgtaaagactaccaggggatcaaattcgtgaagcggttgggaaagctgctgagcgagtccatgaagcaagcggaagtcgttggctactttggaaggttcgaagaagccgagagaacttacttagaaatggaccggagggacctggcgatcggcctgcggctaaagcttggggattggttccgtgtattacaacttttaaaaaccgggtcaggtgatgctgatgactccctcctggagcaggcaaataacgctatcggcgattatttcgccgaccgacagaaatggcttaacgcggtgcagtactacgtccagggaaggaaccaggagcggttggcagaatgctattatatgctggaggactatgaaggattggaaaacctcgcaatttccctgcctgaaaaccataagttacttcccgaaatcgcgcagatgttcgtgcgtgtgggtatgtgtgagcaggccgtgactgccttccttaaatgcagccagcccaaagccgccgttgacacatgtgtgcatctgaatcagtggaataaggcagtcgaactagccaaaaaccattctatgaaagagatcggtagcctgctcgcccgttatgcttctcacctgcttgaaaaaaataagactctagatgcaatcgaactgtaccggaaagccaattatttctttgatgccgctaagctgatgttcaaaattgctgatgaggaagccaagaagggatccaaaccccttagggttaagaaactgtatgtgctgtcagctttgcttatcgaacaataccatgaacagatgaaaaacgctcagaggggaaaggtaaagggcaaatccagtgaagccacttcagcgctcgctggcctactggaagaagaagtcctctcaaccaccgaccgattcactgacaatgcttggaggggtgccgaggcgtatcacttttttatcctggcacagaggcaactctatgaggggtgcgtggacacggcactgaagacagccctgcacctgaaggattatgaggacattattcccccagtggaaatctattcattactggccttgtgcgcgtgtgcttccagagcattcggaacgtgctcaaaggccttcatcaagctgaagagcctagaaacactaagctccgaacagaagcaacagtatgaggatttggccctggaaatcttcaccaagcatacatcgaaagacaatcgcaagccggagctagattcgctgatggaaggcggggagggtaaactgccgacctgtgtggccacaggttcaccaataaccgagtatcagttctggatgtgttccgtgtgcaagcatggcgtcttagctcaagaaatatcccattattcattctgtccactttgccattcacccgtggggtag

SEQ ID NO: 22334 - DNA, 3546 bp, Artificial Sequence
  derived and/or modified sequence
atgttcttctacctgagcaagaagatcagcatccccaacaacgtgaagctgcagtgtgtgtcctggaacaaggagcagggcttcatcgcctgtggcggggaggatggcctgctgaaggtgctgaagctggagacccagacagatgatgccaagctgcggggcctggccgcccccagcaacctgtccatgaaccagaccctggagggccacagcggctctgtgcaggtggtgacctggaatgagcagtaccagaagctgaccaccagtgatgaaaatggcctcatcatcgtgtggatgctgtacaagggctcctggattgaggagatgatcaacaacagaaacaagtctgtggtgcgctccatgtcctggaatgctgatggccagaagatctgcatcgtgtatgaagatggagctgtgattgtgggctctgtggatggcaaccgcatctggggcaaggacctgaagggcatccagctgagccacgtgacctggagcgctgacagcaaggtgctgctgtttggcatggccaatggagagatccacatctatgacaaccagggcaacttcatgatcaagatgaagctgagctgcctggtgaatgtgactggagccatcagcattgctggcatccactggtaccacggcacagagggctacgtggagccagactgcccctgcctggccgtgtgctttgacaatggccgctgccagatcatgagacatgaaaatgaccagaaccctgtgctgattgacaccggcatgtatgtggtgggcatccagtggaaccacatgggctctgtgctggccgtggccggcttccagaaggccgccatgcaggacaaggatgtgaacatcgtgcagttctacaccccatttggagagcacctgggcaccctgaaggtgcctgggaaggagatcagcgccctgtcctgggagggcggcggcctgaagatcgccctggccgtggacagcttcatctactttgccaacatccggcccaactacaagtggggctactgcagcaacacagtggtgtatgcctacaccaggccagacaggcctgagtactgtgtggtgttctgggacaccaagaacaatgagaagtatgtgaagtatgtgaagggcctcatcagcatcaccacctgtggggacttctgcatcctggccaccaaggcagatgagaaccacccccaggaggagaatgagatggagaccttcggggccacctttgtgctggtgctgtgcaacagcatcggcacccccctggaccccaagtacattgatattgtgcccctgtttgtggccatgaccaagacccacgtgattgctgccagcaaggaggccttctacacctggcagtacagagtggccaagaagctgacagccctggagatcaaccagatcaccaggagcaggaaggagggccgggagcgcatctaccacgtggatgacaccccatctggctccatggatggagtgctggactacagcaagaccatccagggcacccgggaccccatctgtgccatcacagccagtgacaagatcctgattgtgggccgggagagcggcaccatccagcgctacagcctgcccaacgtgggcctcatccagaagtacagcctgaactgccgggcctaccagctgagcctgaactgcaacagcagccggctggccatcatcgacatcagcggcgtgctgaccttctttgacctggatgcccgggtgacagacagcacaggccagcaggtggtgggggagctgctgaagctggagaggagagatgtgtgggacatgaagtgggccaaggacaacccagacctgtttgccatgatggagaagaccaggatgtatgtgttcaggaacctggaccctgaggagcccatccagaccagcggctacatctgcaactttgaggacctggagatcaagtctgtgctgctggatgagatcctgaaggaccctgagcaccccaacaaggactacctgatcaactttgagatccgcagcctgcgggacagccgggccctgattgagaaggtgggcatcaaggatgccagccagttcatcgaggacaacccccacccccggctgtggaggctgctggccgaggccgccctgcagaagctggacctgtacacagctgagcaggcctttgtgcgctgcaaggactaccagggcatcaagtttgtgaagaggctgggcaagctgctgtctgagagcatgaagcaggccgaggtggtgggctacttcggccgctttgaggaggccgagaggacctacctggagatggaccggcgggacctggccatcggcctgcggctgaagctgggggactggttccgggtgctgcagctgctgaagacaggcagcggagatgctgatgacagcctgctggagcaggccaacaatgccatcggggactactttgctgaccggcagaagtggctgaatgctgtgcagtactacgtgcagggcaggaaccaggagcggctggccgagtgctactacatgctggaggactatgagggcctggagaacctggccatcagcctgcctgagaaccacaagctgctgcctgagatcgcccagatgtttgtgcgggtgggcatgtgtgagcaggccgtgacagccttcctgaagtgcagccagcccaaggctgctgtggacacctgtgtgcacctgaaccagtggaacaaggctgtggagctggccaagaaccacagcatgaaggagatcggcagcctgctggcccgctatgccagccacctgctggagaagaacaagaccctggatgccatcgagctgtacaggaaggccaactacttctttgatgctgccaagctgatgttcaagattgctgatgaggaggccaagaagggcagcaagcccctgcgggtgaagaagctgtatgtgctgagcgccctgctgattgagcagtaccacgagcagatgaagaatgcccagaggggcaaggtgaagggcaagagcagcgaggccaccagcgccctggccggcctgctggaggaggaggtgctgagcaccacagaccgcttcacagacaatgcctggagaggagctgaggcctaccacttcttcatcctggcccagaggcagctgtatgagggctgtgtggacacagccctgaagacagccctgcacctgaaggactatgaggacatcatcccccctgtggagatctacagcctgctggccctgtgtgcctgtgccagccgggccttcggcacctgcagcaaggccttcatcaagctgaagagcctggagaccctgagcagcgagcagaagcagcagtatgaggacctggccctggagatcttcaccaagcacaccagcaaggacaacaggaagccagagctggacagcctgatggagggcggggagggcaagctgcccacctgtgtggccaccggcagccccatcacagagtaccagttctggatgtgcagcgtgtgcaagcacggcgtgctggcccaggagatcagccactacagcttctgccccctgtgccacagccctgtgggctag

SEQ ID NO: 22335 - DNA, 3546 bp, Artificial Sequence
  derived and/or modified sequence
atgttcttctacctgagcaagaagatcagcatccccaacaacgtgaaacttcagtgcgtctcttggaacaaggagcaaggtttcatagcctgcggcggcgaagacggtttgctgaaagtcctcaaactggagactcagacagatgatgcaaagctcagaggtctggctgcaccttcaaacctgagcatgaatcagaccttggagggacatagcggtagtgtccaggtagtcacttggaacgagcagtatcaaaagttgaccacctccgacgagaacgggttgattattgtgtggatgctgtacaagggaagctggatagaagagatgattaataacaggaacaagtctgtggtccggagtatgagttggaatgctgacggccagaagatctgcatcgtctacgaggacggggccgtaatagtgggaagtgtggatggtaatcgaatctgggggaaggatctgaagggaattcagctgtcgcacgtcacatggtccgccgactccaaggtgcttctctttgggatggctaatggagagattcacatctatgataatcagggaaactttatgataaaaatgaagctttcatgtctggtcaacgtgaccggagccataagcatcgcaggaatacactggtatcatggcaccgaggggtacgtcgagcccgattgtccttgcctggcagtgtgcttcgataacggaaggtgccagattatgcggcacgagaatgatcagaaccccgtcttaattgacactggtatgtacgtggttgggattcagtggaatcacatgggtagtgttcttgccgttgccggcttccaaaaggccgcgatgcaggacaaggacgtgaatatcgtgcagttctataccccgtttggagagcacctcggcacccttaaggtcccaggtaaagagatcagtgcactgtcttgggaagggggagggctgaagatcgcactcgccgttgattcatttatttactttgccaatatccgccctaattataaatggggctactgtagtaacacggtggtgtacgcgtacacccgcccggacaggcccgagtattgtgttgtgttctgggataccaaaaataacgaaaaatacgtaaaatatgtaaaggggctcattagcatcaccacatgtggcgatttttgcatcctcgctaccaaggctgacgaaaaccatcctcaggaagaaaatgaaatggaaacatttggagccacatttgtgctggtgctttgcaactctattggaacgccactcgaccccaaatacattgatatcgtccccctgttcgtcgccatgaccaagacccacgtgattgcggctagcaaagaggccttctacacgtggcaatatcgggtcgctaagaagttgaccgctttggagatcaaccagataactcgttccagaaaagagggaagggagcggatatatcatgtagacgacaccccatccggctccatggatggcgtactggattattccaaaactatccaaggaacacgagatcctatttgcgctattaccgcaagtgacaaaatcctaatagtcggccgtgaatcaggaacaattcaaaggtactcattgcccaatgtggggctcatccagaagtactcactgaactgtcgagcataccagctctccctgaactgtaactcaagcagacttgctataatcgatatctcaggtgtgcttaccttctttgacttagatgcaagagtgacggacagtacagggcagcaggttgtcggcgagctcctcaagctggagaggcgggatgtatgggatatgaaatgggccaaagataatcccgatttgttcgcaatgatggaaaagacaaggatgtacgtctttcggaacctggaccctgaggaaccgattcagacctccggctatatctgcaattttgaagatctcgaaataaagagcgtgcttctggatgaaatacttaaggatcctgaacatccgaataaggattaccttatcaacttcgagataaggtcgcttcgagactccagagcgctgattgaaaaagtgggcatcaaggacgcctcgcagtttatagaggataacccacacccgagactgtggagattactcgccgaagctgcactccaaaagcttgacctatataccgctgagcaggccttcgttcggtgcaaagattatcagggcattaaattcgtgaaacgcctgggaaaactgctgagcgagtccatgaagcaggcggaggttgtgggctactttggcagatttgaggaggccgagagaacctacctggaaatggataggagagacctggctattggcctgcgcctgaagctcggcgactggttccgcgtactgcaactgctgaaaaccggatccggcgacgccgacgattctctgctagaacaggcaaacaacgccatcggggactacttcgccgatagacagaaatggctgaacgcggtccagtattatgtgcaagggcgcaatcaggaaagactggctgaatgttactacatgctggaagattacgaaggcctcgaaaaccttgccatctctctgcctgaaaaccacaagctgttaccagaaatcgctcagatgtttgtgcgggtggggatgtgtgagcaggccgttaccgcctttctgaagtgttctcagcctaaggcagccgtcgatacctgcgttcacctgaaccagtggaacaaggcggtggagctggccaagaatcatagcatgaaagaaattggctctctgctggcccggtatgcgtcacacctgctggagaaaaacaagacactcgacgctatagagttataccggaaagctaattattttttcgacgccgccaaactcatgttcaagatcgcagacgaagaggctaagaagggctcaaagccactgagggtgaaaaagctgtacgtgcttagcgcgctgttaatcgagcagtaccacgagcagatgaagaacgcacagagagggaaagttaagggtaagtctagcgaagccacttctgcccttgcagggctgctggaagaggaggtcttaagcacgactgacaggtttacagataatgcctggcgcggcgcggaagcctaccattttttcattctcgcccagcgacaactgtacgaggggtgtgttgataccgctctcaagacagccttgcacctgaaggattacgaggatattattcctcctgttgaaatctattcactgctggccctgtgtgcttgcgctagccgggccttcggcacttgctcaaaagctttcataaaactcaaatcactagaaactctgagtagtgaacagaagcagcaatatgaggatcttgcgctggagatatttaccaaacacaccagcaaggacaacagaaaacctgagctggactctcttatggagggaggtgagggaaagctcccaacttgtgtcgccactgggtctcccattactgaatatcagttctggatgtgcagcgtgtgcaagcacggtgtacttgctcaggagatcagtcactatagcttttgcccgttatgtcactcacctgttgggtag

SEQ ID NO: 22336 - DNA, 3546 bp, Artificial Sequence
  derived and/or modified sequence
atgttcttctatttatctaagaagatctcaataccaaataacgtcaaactccagtgtgtaagctggaacaaagagcagggattcatagcatgcggcggagaggatgggctcctgaaggtgctgaagctggaaacacagacagacgacgcaaaattgaggggcctagctgccccaagtaacctgagtatgaatcagaccctcgagggccactctgggagtgttcaggtcgtgacctggaacgagcaataccaaaagctgacaacatctgatgagaatgggctgataattgtttggatgctctataaagggtcatggatagaggagatgattaataacaggaataagagtgtagttcggtccatgtcatggaacgccgatggccagaagatttgcatcgtatatgaggacggggctgtgattgtaggttctgtggatggtaaccggatctggggtaaagacctcaagggcatacagctttctcacgtcacctggagtgcagattccaaggtactgctgttcggcatggctaacggcgagattcacatttacgacaaccaaggaaattttatgatcaaaatgaagctgtcttgccttgttaacgtgactggtgcgatcagtattgccggtattcattggtaccacggaaccgaaggttatgtagagcccgattgtccctgtctcgcggtctgttttgataacggaagatgccagatcatgagacacgaaaatgaccagaacccagtcctgatcgatacaggcatgtacgtagttgggattcagtggaaccacatgggctcggtcctggccgtagccggattccagaaggcagctatgcaggataaggatgtcaacattgtccagttttacactcccttcggggagcacctgggcacactaaaggtacctggcaaggaaatttccgccctttcctgggagggcggtggattgaagatcgccctggcagtggactctttcatctatttcgccaatataagacccaattacaaatggggttactgtagtaacaccgtggtgtatgcctataccagaccagacagaccagagtattgtgtagtgttctgggataccaagaataatgagaaatatgttaaatacgtcaagggcctgatctccataaccacctgcggcgatttctgtatcctggccacaaaggctgatgagaatcatccccaggaagaaaacgagatggagaccttcggtgctacctttgtcctggtcttgtgcaattctatagggacgccattggacccgaagtatattgatatcgtgcctttatttgtggctatgacaaaaacccatgtgatcgcagcctctaaggaggccttttatacctggcagtatagagtcgctaaaaagctcacggccctcgagatcaaccaaatcactcggtctaggaaggagggccgagaacgaatctaccatgtggacgatactccgagtgggtcaatggatggcgtgctcgactacagtaaaaccattcaggggacacgggatcctatctgtgcaataactgcttccgataaaattctgatcgtgggtagagaatctgggacaattcagcgctactcactgcctaacgtggggctcattcagaaatactctctcaactgccgggcataccaactctcgctcaactgcaatagtagccggttggccatcatagacatttctggcgtattgacttttttcgatctggacgcgcgtgtgacggactcaacaggtcagcaagttgtcggcgagctactgaaactcgaaaggagagacgtgtgggatatgaaatgggccaaagacaatcccgacctctttgcgatgatggagaaaacacgaatgtacgtgtttcggaatctcgacccggaagagccaatacagaccagcgggtacatatgcaactttgaggacctggagatcaaatcagtgctgttggacgagatactaaaagaccccgaacaccccaacaaggattacctgatcaactttgagatcagaagtctgagagactcccgcgctctcatcgaaaaggttgggatcaaagacgcatctcagttcatcgaagacaacccgcacccacggctgtggcgacttttggcagaggctgccctccagaaactcgacctgtacactgcagagcaggcctttgttcgttgtaaggactatcaaggtataaaatttgtaaaacgactgggcaaactgctgagcgaatcaatgaaacaagcggaagttgtgggctactttggccgatttgaggaagccgagagaacctacctggagatggatagacgcgacctcgcaatcgggctccgactaaagttgggggactggttccgagtgctgcagctattaaaaacagggagtggcgatgccgacgactccctcttagagcaggccaataacgccattggagattacttcgcggataggcagaagtggctgaacgccgttcagtattatgtccagggacgcaatcaggagagactggcggaatgttattacatgctagaggactatgaagggctggagaacttagctatcagcctgcccgagaatcacaaacttcttcctgaaatcgctcagatgtttgtacgagtgggtatgtgtgagcaggcagtgaccgcattcttgaaatgcagccagcccaaagcagccgtggatacttgtgtgcacctaaaccagtggaataaagcagtcgagctcgcaaagaaccactctatgaaggagattggcagtttgctggcaaggtacgctagccacctcctggaaaagaataagaccctggacgccattgaactatacaggaaagctaattatttcttcgatgccgcaaaactcatgtttaagatagcggatgaagaggcaaagaagggtagtaagcctttacgcgtgaaaaaactatatgtgctatccgcacttctgattgaacagtatcatgagcagatgaagaatgctcagaggggcaaggtgaagggtaagtcaagtgaagccacttcagcacttgcagggttgttagaagaagaggttctttccactacagataggtttaccgacaacgcgtggcgcggagctgaggcataccatttttttatcctcgctcagcgtcaactgtatgaaggctgcgtggacacagccctgaagacggctctccatctaaaggattacgaggatatcatcccaccagtagagatctactcattgcttgctctttgtgcctgtgcaagccgggcattcgggacctgtagcaaggcctttatcaaactcaagagtctggaaacactgagcagtgagcagaagcagcagtacgaggatcttgccctagaaatttttaccaagcacacttcgaaggacaaccgaaagccagaattagattccttaatggaaggtggcgagggaaagctgccgacgtgtgttgctactggctctcctatcactgagtatcagttctggatgtgtagtgtctgcaagcacggagtgcttgcacaagaaatcagtcattactcattttgtcccctttgccacagccccgtgggctag

SEQ ID NO: 22337 - DNA, 6960 bp, Artificial Sequence
  derived and/or modified sequence
gcggttgccagggcgacgggagctttccggagctgctggtactcccgattggagacgtagaaccgttacttgtcgagggccttagcggccgccgtgaccctctcggggatcccacgatgttcttctacctgagcaagaaaatttccattcccaataacgtgaagctgcagtgtgtatcctggaacaaggaacaagggttcatagcatgcggtggtgaagatggattactgaaagttttgaaattagagacgcagacagatgatgcaaaattgaggggccttgcagcccccagtaacctttctatgaatcagactcttgaaggtcatagtggttctgttcaagttgtaacatggaatgagcagtatcagaagttgactaccagtgatgaaaacgggcttatcattgtgtggatgttatataaaggctcttggattgaggagatgatcaacaatcgaaataaatcagttgttcgcagtatgagctggaatgctgacggacagaagatctgcattgtatatgaagatggggctgtgatagttggttcagtggatggcaatcgtatttggggaaaagacctgaagggtatacagctatcccatgtaacatggtctgcggacagtaaagtcttactttttggaatggcaaatggggaaatacacatttacgataatcaaggaaattttatgataaaaatgaaactgagttgtttggtgaatgtcactggagctatcagcattgctggaattcattggtaccatggcacagaaggctacgtggagcctgattgcccttgccttgctgtttgctttgataatggaagatgccaaataatgagacatgagaatgaccaaaatcccgttttgattgacactggcatgtacgtagtaggcatccagtggaaccacatgggcagcgtgttagctgtggcaggcttccagaaggcagccatgcaggacaaagatgtgaacattgtgcagttttacactccgtttggtgagcatctgggtactttgaaagttcctggaaaggaaatatctgcactatcttgggaaggaggtggactgaaaattgcactagctgttgattcctttatatattttgcaaacattcgacctaattataagtggggttattgctcaaacactgtagtttatgcatataccagacctgatcgtccagaatattgtgttgtcttctgggatacgaaaaacaatgaaaaatatgttaaatatgtgaagggtctcatttctattactacctgtggagatttctgcattttggctacaaaagctgatgaaaatcatcctcaggaggagaacgagatggagacatttggtgcaacgtttgtactagttctttgtaattctattggtacacccttggatcccaaatacattgatattgtaccattgtttgttgcaatgaccaaaacccatgtgatagcagcctcgaaagaagcattttatacctggcaatatcgtgtggcaaagaagctcacagcattggaaattaatcagatcacacggtctcgaaaagaagggagagaaagaatttatcatgttgatgataccccttctggatcaatggatggtgtgcttgattatagtaaaaccattcaaggcacaagggatccaatttgtgccataactgcatcagataagatattgattgtgggtcgtgaatctggcaccattcagagatacagtctacctaatgttggtttgattcaaaaatattcccttaattgtcgagcctaccagttatccttgaattgcaactctagccgtcttgctatcatagacatctcaggagttctgactttctttgacttggatgctcgagtaacggacagtacgggacagcaagtagttggagagttgttaaaattggaacgaagagatgtctgggatatgaagtgggccaaagataatcctgatttgtttgcaatgatggagaagacaagaatgtatgttttcagaaacttggatcctgaggaacccattcagacctctggatatatttgtaattttgaggatttagaaattaaatctgttcttttggatgagatattaaaggatccagaacatccaaacaaggattacctaattaactttgagattcggtctctgcgagatagccgagcactgattgagaaggttggaattaaagatgcatctcagttcatagaggacaatccacacccccgactttggcgcctactggctgaagcagctcttcagaaactggatctatacactgcagagcaagcatttgtgcgctgcaaagattaccaaggcattaagtttgtgaagcgcttgggcaaactactgagtgagtcaatgaaacaggctgaagttgttggctacttcggcaggtttgaagaggctgaaagaacgtatctcgagatggacagaagggatcttgctattggcctccggctgaaattgggggattggtttagagtactccagctcctgaaaactggatctggtgatgcagatgacagtctcctggaacaagccaacaatgccattggagactactttgctgatcgacaaaagtggttgaatgctgtacaatattatgtacaaggacggaaccaggaacgcttagctgaatgttactatatgttagaggattatgaagggttagagaaccttgccatttcacttccagaaaaccacaagttacttccagaaatagcacaaatgtttgtcagagttggaatgtgtgaacaagcagtgactgcatttttgaaatgtagtcaaccaaaggcagcagtagatacctgcgtacatctcaaccaatggaacaaagctgttgaattggctaaaaatcatagtatgaaagaaattggatctctgttagctaggtatgcatctcatttactggaaaagaataaaactcttgatgccatagaactctatcggaaagccaattacttttttgatgcagctaaactgatgtttaagattgcagatgaagaggcaaagaaaggaagtaaacctttacgtgtcaagaagctctatgtactgtcagccttacttatagagcaataccatgaacagatgaagaatgcccagcgaggaaaagttaaaggaaaaagttcagaggccacttctgccttggctggtttgctggaagaagaagttctgtctacaacagatcgtttcacagataatgcatggagaggggcagaggcttaccacttctttatacttgcacagaggcagctctatgagggatgtgtggacactgcactgaagacagctcttcacctgaaagactatgaagacatcatccctcctgtggagatctactctctgctagcactctgcgcatgcgccagcagagcctttgggacttgttcaaaagctttcattaaacttaaatctttagagaccctcagttcagaacagaaacagcagtatgaagaccttgctttagaaatcttcaccaaacatacttcaaaagataacagaaaacctgaattggacagccttatggaaggtggagaagggaaactgccaacatgcgttgccacaggaagcccaatcactgagtatcaattctggatgtgcagtgtatgcaaacacggtgtccttgctcaggaaataagccactacagcttctgccccttatgccatagtccagtgggataaaggaatgataaactgtatataactgtaaaatatatgtagcatatatacatggctatatgctgtatatgtaataaggtttatttctgtgagttttgtatgaaaatcagcctcattatttatagttgaatttttgcacaaaatatatgttaataaaataatttttatggcaatacaactgtgaaataataaggccgattttcatataaatgtatgaaaatcaaccatgttttctctcaccctctctcttttgtttatcttgtttttggttacatgataccatggaaatattccaaataaatttttttctcacagtgtcaaggtaactgaattcattaaaaaatcttgaagggagtagggagtgggggaagcatgggagtggggcaaagttgaatttagagaatttttataacccatgttacaaggaagttaaacaattgtaataatgaaatgagctttctctatagccatatttaattaaataagtgtcgaatgtcttctttattgtattttcagaagtgaggcgatggcattttaagacattttttacaatctgaattgtttctaatagccctattcttctattttaaaacctgtccttttagtctcatttaagagatggcatttggaatttacactttcatatgattgtgcagaaaacttgcctctatttataatgaagataacttaaacagaaatatccattttgtagttatagcttctgttgaaacattgtcactaagttggaccgtttatttacacaagtattgttgagggagtgattttttcttgatatgcgtctgttttcatttattattaatttgaaagataaacagttgtgatccataatggatcatttcttatgtcttttacatagctaataatgttctctgtttatttctcatgaattcccattttgtggctaaagaccagacctttgcactatttcatcaagattattttattgaggtttggcttacatatagtagaggcaatacatagagatacgcaactttgtttttgcagctacaatacactttctcaatctcatatgtttttgtcttgtagagacagagacaagttcagcatgttgcagattgggaatagtgagctatgagaagagatttagagcctagatgagcttaggatagagagtgggctcattggcctaaataaaaagagaagaccagaagtctttgaggtctctgtctctattcatgcgcctcgtggaaaattaccttggtacaatggtagcctctaaatagactgcctcgcaagctattccagaggtcatggaacagaaagccttataaaccaaataaaaattctcaaaatacattggtttattgaaccaatttgcaatacacagtgaggaacaaggagaaagcaatgatagattaacactgttagtgtaacgtgccagtggagtggaaagaccgcaacacctgaatcctgggttttgtaatgtttttatgtcctgactcacattctgtcacatacgctttcccctaatagtcgggttacaaaaaggaccagagtggccgcttgagccagatgactcaatcagatgaaatgtgcctgaggccaacgatgtacacttgctctatagaagggtgtcaggggcaagtacacttcaccacagcaatagcttgcctattagtctgctgagcagtcatgaattttattgtatttcttgggtaaggacaggccagaatgagtgtcaccagtgggtaattgaatcaacttctcacacatactgaaggctttatatgtctcatgcatacttagtgtatcatgaatatttggtatctttgtggcttttcatatttttagtgcttcatgaatatttggtatctcttgctcctttctatctgtggtcacacatacacgctctattaactttgcctaataagtctcctaggttactaacttacttacctaaatgtaacacaatgaattccagctttctcatttgttctataccagaatgggaaatttccccaaatcagaaaatcacatcctaacaaagaagtctgtctaagacagtacatctcctgttgaacttgcatctttccacaggactttctgtttttagggatgagactattctctgcttcatcaaggaaagagaaatgttcagggttgtagggatggcacacttattagttctgcctgtctgaaaggttcctgcaggacagtttggtcagagctgcaattcttagtccatggtctaatgcttgagtatctcttctttccctttcctgtctcaggaatcagctgagaattcattcgattgtcatgcctctagccccttactgtgatttgttggttgcactttcatttgctttagttctagaatcacctgttgactcctcagacttcacctaactttggaaactctcttttggaggcttctcatttccccctaattctgtgctgcctgagccctagaattttcccaccaacgaattattccaggtagatcctaagttgctggatctagttgatatttaaacaatatctagttgatatttctcattcagttggatccagaaaccagtatctctaaaaacaacctctcataccttgtggacctaattttgtgtgcgtgtgtgtgtgcgcgcatatgtatatagacaggcacatcttttttacttttgtaaaagcttatgcctctttggtatctatatctgtgaaagttttaatgatctgccataatgtcttggggacctttgtcttctgtgtaaatggtactagagaaaacacctatattatgagtcaatctagttggttttattcgacatgaaggaaatttccagataacaacactaacaaactctcccttgactagggggacaaagaaaagcaaaactgaccataaaaaacaattacctggtgagaagttgcataaacagaattaggtagtatattgaagacagcatcattaaacagttatgttgttctccttgcaaaaaacatgtactgacttcccgttgagtaatgccaagttgttttttttattataaaacttgcccttcattacatgtttcaaagtggtgtggtgggccaaaatattgaaatgatggaactgactgataaagctgtacaaataagcagtgtgcctaacaagcaacacagtaatgttgacatgcttaattcacaaatgctaatttcattataaattgttttgctaaaatacactttgaaactatttttctgtattccaagagctgagatcttagattttatgtagtattaagtgaaaaaatacgaaaataataaacattgaagaaaaaaataa

SEQ ID NO: 22338 - protein, 1092 aa, Artificial Sequence
  derived and/or modified sequence
MGAAGLLGVFLALVAPGVLGISCGSPPPILNGRISYYSTPIAVGTVIRYSCSGTFRLIGEKSLLCITKDKVDGTWDKPAPKCEYFNKYSSCPEPIVPGGYKIRGSTPYRHGDSVTFACKTNFSMNGNKSVWCQANNMWGPTRLPTCVSVFPLECPALPMIHNGHHTSENVGSIAPGLSVTYSCESGYLLVGEKIINCLSSGKWSAVPPTCEEARCKSLGRFPNGKVKEPPILRVGVTANFFCDEGYRLQGPPSSRCVIAGQGVAWTKMPVCEEIFCPSPPPILNGRHIGNSLANVSYGSIVTYTCDPDPEEGVNFILIGESTLRCTVDSQKTGTWSGPAPRCELSTSAVQCPHPQILRGRMVSGQKDRYTYNDTVIFACMFGFTLKGSKQIRCNAQGTWEPSAPVCEKECQAPPNILNGQKEDRHMVRFDPGTSIKYSCNPGYVLVGEESIQCTSEGVWTPPVPQCKVAACEATGRQLLTKPQHQFVRPDVNSSCGEGYKLSGSVYQECQGTIPWFMEIRLCKEITCPPPPVIYNGAHTGSSLEDFPYGTTVTYTCNPGPERGVEFSLIGESTIRCTSNDQERGTWSGPAPLCKLSLLAVQCSHVHIANGYKISGKEAPYFYNDTVTFKCYSGFTLKGSSQIRCKADNTWDPEIPVCEKGCQSPPGLHHGRHTGGNTVFFVSGMTVDYTCDPGYLLVGNKSIHCMPSGNWSPSAPRCEETCQHVRQSLQELPAGSRVELVNTSCQDGYQLTGHAYQMCQDAENGIWFKKIPLCKVIHCHPPPVIVNGKHTGMMAENFLYGNEVSYECDQGFYLLGEKKLQCRSDSKGHGSWSGPSPQCLRSPPVTRCPNPEVKHGYKLNKTHSAYSHNDIVYVDCNPGFIMNGSRVIRCHTDNTWVPGVPTCIKKAFIGCPPPPKTPNGNHTGGNIARFSPGMSILYSCDQGYLLVGEALLLCTHEGTWSQPAPHCKEVNCSSPADMDGIQKGLEPRKMYQYGAVVTLECEDGYMLEGSPQSQCQSDHQWNPPLAVCRSRSLAPVLCGIAAGLILLTFLIVITLYVISKHRARNYYTDTSQKEAFHLEAREVYSVDPYNPAS

SEQ ID NO: 22339 - DNA, 3279 bp, Artificial Sequence
  derived and/or modified sequence
atgggcgcagcggggctcctcggagtgttccttgcattagttgcccctggagtcttgggcatttcatgtggctctcctcctccaatcttgaatgggcgtatctcctactacagcacccccatcgccgtgggtaccgttattcggtattcttgttcaggaacgttccggttgattggggagaagagccttctctgcattaccaaagataaagtcgatgggacctgggataaacccgccccaaagtgtgagtacttcaataagtacagtagctgtcctgaacccatagttcctggcggctacaaaatccgcgggagtacaccatacagacacggcgattcagtgacttttgcatgcaaaacgaatttttccatgaatggaaacaaatcagtgtggtgccaggccaacaacatgtggggtccgacacgtttaccgacctgtgtgagcgtgttccccctggaatgtcctgcgctgccaatgattcacaatggccatcacacaagcgaaaacgtcggctccatcgcccctggactaagcgtaacgtactcatgcgaatccggatacctcctagtgggggaaaaaataattaactgcttgagtagtggaaagtggagcgccgtgcctccaacgtgcgaggaggctagatgtaagtccttaggccgttttcctaacggtaaagtgaaggaacctcctattctgagggttggtgtcaccgcgaatttcttctgtgatgagggatatcgtttacaggggcctccctcaagtcggtgtgtcatcgccggccagggggtggcctggacaaagatgccggtgtgtgaggagattttttgtccatctcccccacccattctgaatggacgtcacatcggcaatagcctcgccaatgtgtcatacggcagcatcgttacatatacatgtgatcccgatcctgaggaaggggtgaacttcatcctcattggggaatccacgctgcgatgcacggtggattcacagaagacaggtacatggagcgggcccgctccaagatgtgaactgagtactagcgctgtgcagtgtccgcacccccagattctgcgaggaagaatggtcagcggacagaaggaccgatacacatataatgacacggtgatcttcgcgtgcatgttcgggttcacacttaaaggatcaaagcaaatccggtgcaatgcccagggcacatgggagccttctgctccagtatgcgagaaggagtgccaggcgccgcctaatattcttaatgggcagaaagaggaccgccatatggttaggttcgatcccggcacctctataaaatacagttgtaacccaggatatgtcctcgtgggcgaggagtctattcagtgcacgtctgagggagtgtggacacccccggtgcctcagtgcaaagtagccgcctgtgaggccacaggacgacagcttctgacaaagccacaacaccaattcgttcgcccagatgtgaacagctcatgtggtgagggatacaagctcagcggatccgtgtatcaggagtgtcagggtacaatcccctggtttatggagattcgtctgtgtaaggagataacatgccctcctcctcctgtgatatataatggcgcccatacaggctcctctctggaggatttcccgtacggcactaccgttacctatacgtgcaaccctggccccgagcggggggtggaatttagcctcattggcgagtcaaccattaggtgcacctccaacgatcaggaaagggggacttggtctggccccgctcccctgtgcaagctctccctcctggccgtgcagtgctcccatgttcatattgccaatgggtataagatcagcggcaaagaggccccctacttttacaatgacacggtgacctttaaatgctactccgggttcacgctaaagggtagttcccagatccggtgcaaagccgataatacatgggatcctgagatccctgtctgtgagaagggctgccagagccctcccggactccaccatggccgccatacaggagggaatactgttttttttgtcagcggcatgaccgtcgactacacatgcgacccaggctaccttttggttgggaataagtctattcattgcatgccgtctggcaactggtctccgtcggcccctcggtgcgaggagacgtgccagcatgtgagacagtccctccaggaactgcccgcaggtagccgagtcgagctagtgaatacttcatgtcaggatggataccagctcacaggccacgcctaccaaatgtgccaggacgcggagaatgggatctggttcaaaaaaattcccctgtgcaaggtgattcactgccatccaccccctgtgatagtgaacggaaagcacacagggatgatggctgaaaatttcctctacggcaatgaagtgtcatacgaatgtgaccagggcttctatctgctgggagaaaagaaactgcagtgcaggtccgattcaaaaggccatggttcctggtccgggccgagtccccagtgccttcggtccccacccgtgaccaggtgtccgaatcctgaagtaaagcacggctacaaactgaataagacacattccgcatactcacataatgatatcgtctatgtcgactgtaacccagggttcatcatgaatggatctcgggtaataaggtgccatactgacaatacatgggtgcctggcgtgcctacctgtatcaagaaggccttcattgggtgcccccctccaccaaagaccccgaatggcaaccacaccggaggaaatatcgcccgttttagccccggcatgagcatcctttactcctgcgatcagggctacttgctggtgggcgaggcccttctactctgcactcatgaggggacatggtcccagcccgctccccactgcaaggaggtgaactgctcatcccccgcagatatggacggtattcaaaaagggcttgagcctagaaagatgtaccagtacggcgcagtggtgacactagagtgtgaagatggatatatgctggagggctctccgcagtcgcagtgtcaaagtgaccaccagtggaacccgcctcttgctgtctgtcgatcgaggtccctagcccccgttttatgcgggattgcagccggactgatactgctgacattccttattgtaataacactctatgtgatatctaagcaccgcgcccgtaattattacaccgatacttcacagaaagaagcatttcacctggaggcccgggaggtgtacagcgtggatccttacaaccccgcctcttag

SEQ ID NO: 22340 - DNA, 3279 bp, Artificial Sequence
  derived and/or modified sequence
atgggcgccgccggcctgctgggcgtcttcctggccctggtggcccctggggtgctgggcatcagctgtggcagccccccacccatcctgaatggccgcatctcctactacagcacccccatcgctgtgggcaccgtcatccgctacagctgcagcggcaccttccgcctcatcggggagaagagcctgctgtgcatcaccaaggacaaggtggatggcacctgggacaagccagcccccaagtgtgagtacttcaacaagtacagcagctgcccagagcccatcgtgcctgggggctacaagatccggggcagcaccccctaccgccacggggacagcgtgacctttgcctgcaagaccaacttctccatgaatggaaacaagtctgtgtggtgccaggccaacaacatgtggggccccacccggctgcccacctgtgtgtctgtgttccccctggagtgcccagccctgcccatgatccacaacggccaccacaccagtgaaaatgtgggcagcatcgcccctggcctgtctgtgacctacagctgtgagagcggctacctgctggtgggggagaagatcatcaactgcctgagcagcggcaagtggagcgctgtgccccccacctgtgaggaggcccgctgcaagagcctgggccgcttccccaacgggaaggtgaaggagccccccatcctgcgggtgggcgtgacagccaacttcttctgtgatgagggctaccgcctgcagggcccccccagcagccgctgtgtgattgctggccagggcgtggcctggaccaagatgcctgtgtgtgaggagatcttctgccccagccccccacccatcctgaatggccgccacatcggcaacagcctggccaacgtgtcctatggcagcatcgtgacctacacctgtgaccctgaccctgaggagggcgtgaacttcatcctgattggagagagcaccctgcgctgcaccgtggacagccagaagacaggcacctggagcggccctgccccccgctgtgagctgagcaccagcgctgtgcagtgcccccacccccagatcctgcggggccgcatggtgtctggccagaaggaccgctacacctacaatgacaccgtcatctttgcctgcatgtttggcttcaccctgaagggcagcaagcagatccgctgcaatgcccagggcacctgggagcccagcgcccctgtgtgtgagaaggagtgccaggccccacccaacatcctgaatggccagaaggaggacagacacatggtgcgctttgatcctggcaccagcatcaagtacagctgcaaccctggctacgtgctggtgggggaggagagcatccagtgcaccagcgagggcgtgtggaccccacctgtgccccagtgcaaggtggccgcctgtgaggccaccggccggcagctgctgaccaagccccagcaccagtttgtgcggccagatgtgaacagcagctgtggggagggctacaagctgagcggctctgtgtaccaggagtgccagggcaccatcccctggttcatggagatccggctgtgcaaggagatcacctgccccccacctcctgtgatctacaatggagcccacacaggcagcagcctggaggacttcccctacggcaccaccgtgacctacacctgcaaccctggccctgagcggggcgtggagttcagcctgattggagagagcaccatccgctgcaccagcaatgaccaggagcggggcacctggagcggccctgcccccctgtgcaagctgagcctgctggccgtgcagtgcagccacgtgcacatcgccaacggctacaagatcagcggcaaggaggccccctacttctacaatgacacagtgaccttcaagtgctacagcggcttcaccctgaagggcagcagccagatccgctgcaaggctgacaacacctgggaccctgagatccctgtgtgtgagaagggctgccagagccccccaggcctgcaccacggccgccacactggaggcaacacagtgttctttgtgtctggcatgacagtggactacacctgtgaccccggctacctgctggtgggcaacaagagcatccactgcatgcccagcggcaactggagccccagcgccccccgctgtgaggagacctgccagcacgtgcggcagagcctgcaggagctgcctgctggcagccgggtggagctggtgaacaccagctgccaggacggctaccagctgactggacatgcctaccagatgtgccaggatgctgaaaatggcatctggttcaagaagatccccctgtgcaaggtgatccactgccaccccccacctgtgattgtgaatggcaagcacacaggcatgatggccgagaacttcctgtatggaaatgaggtgtcctatgaatgtgaccagggcttctacctgctgggggagaagaagctgcagtgccgcagtgacagcaagggccacggctcctggagcggccccagcccccagtgcctgcggagcccccctgtgacccgctgccccaaccctgaggtgaagcacggctacaagctgaacaagacccacagcgcctacagccacaatgacatcgtgtatgtggactgcaaccctggcttcatcatgaatggcagcagggtcatccgctgccacacagacaacacctgggtgcctggggtgcccacctgcatcaagaaggccttcatcggctgccccccaccacccaagacccccaacggcaaccacactggaggcaacatcgcccgcttcagccctggcatgagcatcctgtacagctgtgaccagggctacctgctggtgggggaggccctgctgctgtgcacccatgagggcacctggagccagcctgccccccactgcaaggaggtgaactgcagcagccctgctgacatggatggcatccagaagggcctggagcccaggaagatgtaccagtacggggctgtggtgaccctggagtgtgaagatggctacatgctggagggcagcccccagagccagtgccagagcgaccaccagtggaacccccccctggccgtgtgccgcagccgcagcctggcccctgtgctgtgtggcattgctgctggcctcatcctgctgaccttcctgattgtcatcaccctgtatgtgatcagcaagcaccgggccaggaactactacacagacaccagccagaaggaggccttccacctggaggcccgggaggtgtacagcgtggacccctacaacccagccagctag

SEQ ID NO: 22341 - DNA, 3279 bp, Artificial Sequence
  derived and/or modified sequence
atgggcgccgccggcctgctgggcgtgttcctggccctggtggccccaggggtcctgggcatctcctgcgggtctcctcccccgattttaaacgggcgcattagctattatagtacccccatcgctgtgggaacggttattcgctacagctgcagtgggacgtttagacttattggagaaaagtcactcctttgtattacaaaggataaggtcgacggcacttgggacaagcctgcacctaagtgcgagtactttaacaaatatagctcatgtccagagcccattgtacccggagggtacaaaattagaggctcaaccccctaccggcatggcgacagcgtgacctttgcctgtaagactaatttttccatgaatggtaataagtccgtctggtgccaggcaaacaatatgtgggggcccactagattaccaacatgcgtgagcgtctttcccctcgagtgtcctgcactacccatgatccacaatggccaccacacttcagagaacgtgggatccatcgccccgggactgtccgtcacctacagctgtgagtctggatatctgctggtgggggagaaaataatcaattgcttatcgagtgggaagtggagtgcagtccctcctacctgcgaagaagcgcggtgcaaaagtctaggcagatttcccaatgggaaggtgaaggagccgcctattctgcgagtaggagtgaccgcgaacttcttctgtgacgagggctataggctgcaagggcctccctcctcaagatgtgtcattgccggtcagggcgtggcctggaccaaaatgccagtttgcgaagagattttttgccccagtccaccaccaattctgaatggacggcacatcggaaattctctggccaacgtgagttacggttctattgtcacatatacctgcgaccctgatcctgaggaaggcgttaattttattctgatcggagagtcgactctgcgctgtaccgtcgacagccagaaaaccggtacctggtctggacccgctcctcgctgcgagctgtctacttctgcggtgcagtgtccgcatccacaaattctgcgcggccgtatggtgagtggccagaaagatcgatacacttataatgacactgtgatctttgcttgcatgttcggcttcacactgaaagggtctaagcaaatcaggtgtaatgcacaaggaacctgggagccttcagcaccggtgtgcgaaaaggaatgtcaagcccccccgaatatcctgaatgggcaaaaggaggaccgccacatggtgcggttcgacccagggacatccattaagtacagctgtaatcccgggtacgttcttgttggggaggagtcaatccagtgcacctccgagggcgtgtggacccctcccgtcccccaatgtaaagtggctgcttgcgaggcaaccggacgtcagctgctgactaagccccagcaccagtttgtccggccggatgttaattcctcatgtggcgagggctacaaactaagcggctcggtttatcaggagtgccagggtacaataccatggttcatggaaatccggttatgcaaggaaatcacctgtcctccccctccagtgatatacaacggcgcgcacaccggatctagcctggaagactttccctacgggactaccgtgacatatacatgtaatccgggaccagaacgtggagtggaattcagcctaatcggtgagtccactatacggtgcacctctaatgatcaagagcgcggcacctggtctgggcctgcccctctgtgcaagctgagcttgctagctgtgcagtgctcccatgtccacatagctaacggctacaaaattagtggtaaggaagctccatacttttacaacgatactgtcacctttaaatgctattctggctttaccctgaagggatcttctcaaattcggtgtaaggccgataatacatgggacccagagatccccgtttgtgaaaaaggatgtcaatcacctcccggcctgcaccacggccgacacactggcgggaacacagtctttttcgtgagtggaatgactgtcgattacacctgtgaccccggttacctgctggtgggaaataagtctattcactgcatgccctcaggaaattggtctccatcagcccccagatgcgaggaaacctgtcaacacgttcggcagagtttgcaggagctgccagccgggagcagggtggaactagttaacactagctgccaggatggatatcagcttacgggtcacgcataccagatgtgtcaggatgcagagaatggaatctggtttaaaaagattccattgtgcaaagtcatccactgccaccccccaccagtgatcgtgaatgggaagcacactggcatgatggctgagaacttcctgtatggaaacgaagtttcatacgagtgcgatcaagggttttacctgctaggcgagaaaaaacttcagtgcaggtctgattcaaagggacacggaagttggagcggcccgagtccgcagtgtctccggtcacctccagtgacacggtgtccaaacccagaggtaaaacatgggtacaaactcaacaaaactcactcagcctatagtcacaacgatatcgtgtatgttgactgtaaccctggatttatcatgaacggttcaagggtgatcagatgccataccgataacacctgggtgccaggcgtcccaacgtgcataaagaaagccttcatcggctgtccgcctcctcctaaaactcccaatggcaaccatactggaggcaacatagccagattcagccctggaatgtccatcctctattcatgtgaccagggttacctattggtgggcgaggctttactgctatgcactcacgagggaacttggagccagcccgctccacattgcaaagaggtgaattgctcttcacctgctgacatggacggaatccagaagggactcgaaccccgcaagatgtatcagtatggggctgttgtaactttggagtgtgaagacggttatatgctggaaggctcaccacagtcacaatgccaatccgaccaccagtggaatcctcctctcgctgtgtgccgctctcgctccttagctcccgttctgtgtggcatcgcagccggactgatattactgaccttcttaatagtgattacgctgtatgtgatcagcaagcaccgggcccggaattactacacagacaccagtcagaaggaggcatttcatttagaggcacgggaggtgtactccgttgacccgtataaccccgctagctag

SEQ ID NO: 22342 - DNA, 3279 bp, Artificial Sequence
  derived and/or modified sequence
atgggagccgcaggacttctgggtgttttcctggccctcgttgcgccaggcgtgctgggcataagttgcggcagccccccaccgattctgaacgggcgaatcagctactattcaactcccatcgctgtgggcaccgtcatcaggtacagctgttctggaactttccgccttattggcgaaaagagtttgttgtgtattactaaggacaaggtagatggaacctgggacaaacccgctcccaaatgcgagtactttaataaatattcttcgtgccctgaacccatagtgcctggaggatacaagattagaggtagcacgccctatcgtcacggtgacagtgttacatttgcctgcaaaactaactttagcatgaatgggaacaagtccgtgtggtgccaagctaacaacatgtggggacccactaggcttccaacgtgtgtctcagtcttcccgctcgagtgtccggcactcccaatgattcataatggacatcatacttctgagaacgtcggctccatagcaccgggactgtcagtaacctatagctgcgagtccggctatctactggtcggcgagaagatcattaactgccttagttcaggcaaatggagtgccgtccctcctacatgtgaagaggcacgatgcaagagcctagggcgtttcccaaacggcaaggtgaaggaaccccctattctaagggtgggcgtgacagctaacttcttttgtgacgaagggtaccggctgcaaggcccaccttcctctcggtgtgtcatcgctggacagggcgtagcctggacaaagatgcccgtctgtgaagaaattttttgcccatctcctccgcctatcctgaacgggaggcatattggaaatagcctcgccaacgtgtcttacgggtcaattgttacgtacacttgtgaccccgaccccgaagaaggtgtgaattttatcctgattggcgagtcgaccttgcgatgcacagtggacagccagaaaaccggcacatggtctgggcctgccccacgctgcgagctctcgacgtccgctgtgcagtgccctcatccacaaatcctccgaggccgaatggtttctggccagaaggatcgctatacctataacgacacagtgattttcgcatgtatgttcggattcacactgaaggggtccaagcagattaggtgtaatgctcagggtacatgggaacccagcgcaccagtgtgtgaaaaggagtgtcaggccccaccgaacatccttaacggccaaaaagaggataggcatatggtgaggtttgatcccggaacttcaatcaaatacagttgcaacccagggtacgtgctggtgggggaagaatcaatccagtgtacgtctgaaggagtctggactccacctgttccccagtgtaaggtagccgcttgcgaagctacaggaaggcaactcctgacaaagcctcaacaccagtttgtaaggccggatgttaattccagctgcggtgagggatataagctatcaggaagcgtataccaggagtgtcagggaactattccttggtttatggagatacggctttgcaaggagatcacatgcccaccccctccagtcatctacaacggtgcacataccgggtcttctctggaggacttcccctatgggaccactgttacatatacttgtaatcccggtcctgagaggggagtggagttttcactgattggcgagtccacaatcaggtgcacatccaatgaccaagaacggggaacctggagcgggcctgcacccttatgtaaactttcgctgcttgcagttcagtgctctcacgtacatatagcaaatggttacaagatcagtgggaaagaggcaccctacttctacaatgatacagttactttcaagtgctactcagggtttactctgaaaggctcctctcagatccggtgtaaagccgacaatacttgggatccagagatccccgtgtgcgaaaaagggtgtcagtcaccacctggcctgcaccacggtagacatacaggtggcaatacagtgttcttcgtgagcgggatgaccgtagactacacttgtgacccaggctacctgttggtcggtaacaagtctatccactgcatgccctctggaaactggagccccagcgctcctcggtgtgaggagacatgtcaacatgtccgacagtcacttcaggagcttcctgccggatcacgggtagaactcgtgaacacctcttgccaggatggttatcagctaactgggcacgcctatcagatgtgccaggatgcagaaaatggcatttggttcaagaaaatccctctgtgcaaagtgatccattgtcacccacccccagtaatcgttaacggtaaacatactggtatgatggctgagaacttcctgtacggaaatgaggtgagctacgagtgcgaccagggcttctatctccttggtgagaaaaagttacagtgtagatcggactctaaagggcacgggtcatggtcaggcccaagccctcaatgtcttcggtccccccctgtgacgcggtgtcccaatccagaagtaaagcacggatacaaattaaataagacacactcagcctacagccataatgacatagtctacgttgactgcaatcctggttttataatgaacggatcacgggtcatccgctgccacactgataacacttgggtccccggagtccctacatgcataaagaaggcttttatagggtgtcccccacctccaaagacacccaacggcaatcacacaggtggaaacatcgcgagattttctcccggaatgtctattctgtactcttgcgatcagggatacctgctggtgggcgaagctttgttgctctgcacccacgagggcacgtggagtcagccggcaccccattgtaaggaggtgaactgcagctcaccagcggacatggacggtattcagaagggactggagcccaggaagatgtaccaatacggcgcagttgtcactctcgagtgcgaagacggctatatgttagaaggcagtccacagagtcaatgccagtctgaccaccagtggaatcctccattggcagtgtgccgaagtaggtctttggctccggtgttgtgtggcattgccgctggcctcattcttcttacattcctgatcgtcatcacactgtatgtgatctctaagcaccgcgctaggaactactacactgacacctcgcaaaaagaggctttccacctcgaggctcgggaggtgtacagcgtagatccgtataatcccgcaagttag

SEQ ID NO: 22343 - DNA, 4240 bp, Artificial Sequence
  derived and/or modified sequence
caccggcgccgcgtcagcccccaggccgcctgcaggtgtgcgctcagaactagcacgtgtgccggacactatttaagggcccgcctctcctggctcacagctgcttgctgctccagccttgccctcccagagctgccggacgctcgcgggtctcggaacgcatcccgccgcgggggcttcggccgtggcatgggcgccgcgggcctgctcggggttttcttggctctcgtcgcaccgggggtcctcgggatttcttgtggctctcctccgcctatcctaaatggccggattagttattattctacccccattgctgttggtaccgtgataaggtacagttgttcaggtaccttccgcctcattggagaaaaaagtctattatgcataactaaagacaaagtggatggaacctgggataaacctgctcctaaatgtgaatatttcaataaatattcttcttgccctgagcccatagtaccaggaggatacaaaattagaggctctacaccctacagacatggtgattctgtgacatttgcctgtaaaaccaacttctccatgaacggaaacaagtctgtttggtgtcaagcaaataatatgtgggggccgacacgactaccaacctgtgtaagtgttttccctctcgagtgtccagcacttcctatgatccacaatggacatcacacaagtgagaatgttggctccattgctccaggattgtctgtgacttacagctgtgaatctggttacttgcttgttggagaaaagatcattaactgtttgtcttcgggaaaatggagtgctgtcccccccacatgtgaagaggcacgctgtaaatctctaggacgatttcccaatgggaaggtaaaggagcctccaattctccgggttggtgtaactgcaaactttttctgtgatgaagggtatcgactgcaaggcccaccttctagtcggtgtgtaattgctggacagggagttgcttggaccaaaatgccagtatgtgaagaaattttttgcccatcacctccccctattctcaatggaagacatataggcaactcactagcaaatgtctcatatggaagcatagtcacttacacttgtgacccggacccagaggaaggagtgaacttcatccttattggagagagcactctccgttgtacagttgatagtcagaagactgggacctggagtggccctgccccacgctgtgaactttctacttctgcggttcagtgtccacatccccagatcctaagaggccgaatggtatctgggcagaaagatcgatatacctataacgacactgtgatatttgcttgcatgtttggcttcaccttgaagggcagcaagcaaatccgatgcaatgcccaaggcacatgggagccatctgcaccagtctgtgaaaaggaatgccaggcccctcctaacatcctcaatgggcaaaaggaagatagacacatggtccgctttgaccctggaacatctataaaatatagctgtaaccctggctatgtgctggtgggagaagaatccatacagtgtacctctgagggggtgtggacaccccctgtaccccaatgcaaagtggcagcgtgtgaagctacaggaaggcaactcttgacaaaaccccagcaccaatttgttagaccagatgtcaactcttcttgtggtgaagggtacaagttaagtgggagtgtttatcaggagtgtcaaggcacaattccttggtttatggagattcgtctttgtaaagaaatcacctgcccaccaccccctgttatctacaatggggcacacaccgggagttccttagaagattttccatatggaaccacggtcacttacacatgtaaccctgggccagaaagaggagtggaattcagcctcattggagagagcaccatccgttgtacaagcaatgatcaagaaagaggcacctggagtggccctgctcccctgtgtaaactttccctccttgctgtccagtgctcacatgtccatattgcaaatggatacaagatatctggcaaggaagccccatatttctacaatgacactgtgacattcaagtgttatagtggatttactttgaagggcagtagtcagattcgttgcaaagctgataacacctgggatcctgaaataccagtttgtgaaaaaggctgccagtcacctcctgggctccaccatggtcgtcatacaggtggaaatacggtcttctttgtctctgggatgactgtagactacacttgtgaccctggctatttgcttgtgggaaacaaatccattcactgtatgccttcaggaaattggagtccttctgccccacggtgtgaagaaacatgccagcatgtgagacagagtcttcaagaacttccagctggttcacgtgtggagctagttaatacgtcctgccaagatgggtaccagttgactggacatgcttatcagatgtgtcaagatgctgaaaatggaatttggttcaaaaagattccactttgtaaagttattcactgtcaccctccaccagtgattgtcaatgggaagcacacaggcatgatggcagaaaactttctatatggaaatgaagtctcttatgaatgtgaccaaggattctatctcctgggagagaaaaaattgcagtgcagaagtgattctaaaggacatggatcttggagcgggccttccccacagtgcttacgatctcctcctgtgactcgctgccctaatccagaagtcaaacatgggtacaagctcaataaaacacattctgcatattcccacaatgacatagtgtatgttgactgcaatcctggcttcatcatgaatggtagtcgcgtgattaggtgtcatactgataacacatgggtgccaggtgtgccaacttgtatcaaaaaagccttcatagggtgtccacctccgcctaagacccctaacgggaaccatactggtggaaacatagctcgattttctcctggaatgtcaatcctgtacagctgtgaccaaggctacctgctggtgggagaggcactccttctttgcacacatgagggaacctggagccaacctgcccctcattgtaaagaggtaaactgtagctcaccagcagatatggatggaatccagaaagggctggaaccaaggaaaatgtatcagtatggagctgttgtaactctggagtgtgaagatgggtatatgctggaaggcagtccccagagccagtgccaatcggatcaccaatggaaccctcccctggcggtttgcagatcccgttcacttgctcctgtcctttgtggtattgctgcaggtttgatacttcttaccttcttgattgtcattaccttatacgtgatatcaaaacacagagcacgcaattattatacagatacaagccagaaagaagcttttcatttagaagcacgagaagtatattctgttgatccatacaacccagccagctgatcagaagacaaactggtgtgtgcctcattgcttggaattcagcggaatattgattagaaagaaactgctctaatatcagcaagtctctttatatggcctcaagatcaatgaaatgatgtcataagcgatcacttcctatatgcacttattctcaagaagaacatctttatggtaaagatgggagcccagtttcactgccatatactcttcaaggactttctgaagcctcacttatgagatgcctgaagccaggccatggctataaacaattacatggctctaaaaagttttgccctttttaaggaaggcactaaaaagagctgtcctggtatctagacccatcttctttttgaaatcagcatactcaatgttactatctgcttttggttataatgtgtttttaattatctaaagtatgaagcattttctggggttatgatggctttacctttattaggaagtatggttttattttgatagtagcttcctcctctggtggtgttaatcatttcatttttacccttacttggtttgagtttctctcacattactgtatatactttgcctttccataatcactcagtgattgcaatttgcacaagtttttttaaattatgggaatcaagatttaatcctagagatttggtgtacaattcaggctttggatgtttctttagcagttttgtgataagttctagttgcttgtaaaatttcacttaataatgtgtacattagtcattcaataaattgtaattgtaaagaaaacatacaa

SEQ ID NO: 22344 - DNA, 3279 bp, Artificial Sequence
  derived and/or modified sequence
atgggcgccgccggcctgctgggcgtgttcctggccctggtggcccccggcgtgctgggcatcagctgcggcagccccccccccatcctgaacggcagaatcagctactacagcacccccatcgccgtgggcaccgtgatcagatacagctgcagcggcaccttcagactgatcggcgagaagagcctgctgtgcatcaccaaggacaaggtggacggcacctgggacaagcccgcccccaagtgcgagtacttcaacaagtacagcagctgccccgagcccatcgtgcccggcggctacaagatcagaggcagcaccccctacagacacggcgacagcgtgaccttcgcctgcaagaccaacttcagcatgaacggcaacaagagcgtgtggtgccaggccaacaacatgtggggccccaccagactgcccacctgcgtgagcgtgttccccctggagtgccccgccctgcccatgatccacaacggccaccacaccagcgagaacgtgggcagcatcgcccccggcctgagcgtgacctacagctgcgagagcggctacctgctggtgggcgagaagatcatcaactgcctgagcagcggcaagtggagcgccgtgccccccacctgcgaggaggccagatgcaagagcctgggcagattccccaacggcaaggtgaaggagccccccatcctgagagtgggcgtgaccgccaacttcttctgcgacgagggctacagactgcagggcccccccagcagcagatgcgtgatcgccggccagggcgtggcctggaccaagatgcccgtgtgcgaggagatcttctgccccagccccccccccatcctgaacggcagacacatcggcaacagcctggccaacgtgagctacggcagcatcgtgacctacacctgcgaccccgaccccgaggagggcgtgaacttcatcctgatcggcgagagcaccctgagatgcaccgtggacagccagaagaccggcacctggagcggccccgcccccagatgcgagctgagcaccagcgccgtgcagtgcccccacccccagatcctgagaggcagaatggtgagcggccagaaggacagatacacctacaacgacaccgtgatcttcgcctgcatgttcggcttcaccctgaagggcagcaagcagatcagatgcaacgcccagggcacctgggagcccagcgcccccgtgtgcgagaaggagtgccaggccccccccaacatcctgaacggccagaaggaggacagacacatggtgagattcgaccccggcaccagcatcaagtacagctgcaaccccggctacgtgctggtgggcgaggagagcatccagtgcaccagcgagggcgtgtggaccccccccgtgccccagtgcaaggtggccgcctgcgaggccaccggcagacagctgctgaccaagccccagcaccagttcgtgagacccgacgtgaacagcagctgcggcgagggctacaagctgagcggcagcgtgtaccaggagtgccagggcaccatcccctggttcatggagatcagactgtgcaaggagatcacctgcccccccccccccgtgatctacaacggcgcccacaccggcagcagcctggaggacttcccctacggcaccaccgtgacctacacctgcaaccccggccccgagagaggcgtggagttcagcctgatcggcgagagcaccatcagatgcaccagcaacgaccaggagagaggcacctggagcggccccgcccccctgtgcaagctgagcctgctggccgtgcagtgcagccacgtgcacatcgccaacggctacaagatcagcggcaaggaggccccctacttctacaacgacaccgtgaccttcaagtgctacagcggcttcaccctgaagggcagcagccagatcagatgcaaggccgacaacacctgggaccccgagatccccgtgtgcgagaagggctgccagagcccccccggcctgcaccacggcagacacaccggcggcaacaccgtgttcttcgtgagcggcatgaccgtggactacacctgcgaccccggctacctgctggtgggcaacaagagcatccactgcatgcccagcggcaactggagccccagcgcccccagatgcgaggagacctgccagcacgtgagacagagcctgcaggagctgcccgccggcagcagagtggagctggtgaacaccagctgccaggacggctaccagctgaccggccacgcctaccagatgtgccaggacgccgagaacggcatctggttcaagaagatccccctgtgcaaggtgatccactgccaccccccccccgtgatcgtgaacggcaagcacaccggcatgatggccgagaacttcctgtacggcaacgaggtgagctacgagtgcgaccagggcttctacctgctgggcgagaagaagctgcagtgcagaagcgacagcaagggccacggcagctggagcggccccagcccccagtgcctgagaagcccccccgtgaccagatgccccaaccccgaggtgaagcacggctacaagctgaacaagacccacagcgcctacagccacaacgacatcgtgtacgtggactgcaaccccggcttcatcatgaacggcagcagagtgatcagatgccacaccgacaacacctgggtgcccggcgtgcccacctgcatcaagaaggccttcatcggctgcccccccccccccaagacccccaacggcaaccacaccggcggcaacatcgccagattcagccccggcatgagcatcctgtacagctgcgaccagggctacctgctggtgggcgaggccctgctgctgtgcacccacgagggcacctggagccagcccgccccccactgcaaggaggtgaactgcagcagccccgccgacatggacggcatccagaagggcctggagcccagaaagatgtaccagtacggcgccgtggtgaccctggagtgcgaggacggctacatgctggagggcagcccccagagccagtgccagagcgaccaccagtggaacccccccctggccgtgtgcagaagcagaagcctggcccccgtgctgtgcggcatcgccgccggcctgatcctgctgaccttcctgatcgtgatcaccctgtacgtgatcagcaagcacagagccagaaactactacaccgacaccagccagaaggaggccttccacctggaggccagagaggtgtacagcgtggacccctacaaccccgccagctag

SEQ ID NO: 22345 - protein, 101 aa, Artificial Sequence
  derived and/or modified sequence
MKPHFRNTVERMYRDTFSYNFYNRPILSRRNTVWLCYEVKTKGPSRPRLDAKIFRGQVPRSFIRAPFQVLSSPFGQCAPPHGTAQVQWPPQLTAGREQGRP

SEQ ID NO: 22346 - DNA, 306 bp, Artificial Sequence
  derived and/or modified sequence
atgaaaccacacttcaggaataccgtggagcggatgtacagggacacatttagttataatttctacaatcggccaattctgagccgccgcaacacggtgtggttatgctacgaagtcaagactaaggggccctctcgacctcgcctagacgctaaaatcttcaggggacaggttccaagatcctttatccgcgcccctttccaggtcttatccagtcccttcggtcagtgtgcccctccccatgggacagcccaagttcagtggcctccgcagctgacggcaggacgggaacaggggagaccttag

SEQ ID NO: 22347 - DNA, 306 bp, Artificial Sequence
  derived and/or modified sequence
atgaagccccacttcaggaacacagtggagaggatgtacagagacaccttctcctacaacttctacaaccggcccatcctgagcagaagaaacacagtgtggctgtgctatgaggtgaagaccaagggccccagccggccccggctggatgccaagatcttccggggccaggtgcccaggagcttcatccgggcccccttccaggtgctgagcagccccttcggccagtgtgcccctcctcatggaacagcccaggtgcagtggccaccccagctgacagctggccgggagcagggccggccctag

SEQ ID NO: 22348 - DNA, 306 bp, Artificial Sequence
  derived and/or modified sequence
atgaagccccacttccggaacaccgtggagcggatgtaccgggacacattcagctataacttctacaaccggcccatcttaagcagaagaaacacagtttggctgtgttacgaagtgaaaactaaggggccgtctagaccccgactggatgccaaaatttttagggggcaggtgcctcggagctttatcagagcccctttccaggtgctgagctcacccttcggtcagtgcgctccacctcatggaaccgcccaagtccagtggcccccacagctgaccgcgggaagagagcagggtagaccttag

SEQ ID NO: 22349 - DNA, 306 bp, Artificial Sequence
  derived and/or modified sequence
atgaagccccattttcgcaataccgtggagaggatgtacagggacacttttagctacaatttctataatcgccctatcctctccaggaggaacaccgtatggctctgttatgaggtgaagacaaagggcccttcccgaccaagactggatgctaagattttccgcggacaggtgcctcggagctttataagagcaccctttcaagtgctctcctctccctttggccaatgcgctccaccccatggtacggcacaagtccagtggcccccacagctgactgcaggcagggagcagggtaggccctag

SEQ ID NO: 22350 - DNA, 616 bp, Artificial Sequence
  derived and/or modified sequence
ggaggtcactttagggagggctgtcctgaaacctggagcctggagcagaaagtgaaaccctggtgctccagacaaagatcttagtcgggactagccggccaaggatgaagcctcacttcagaaacacagtggagcgaatgtatcgagacacattctcctacaacttttataatagacccatcctttctcgtcggaataccgtctggctgtgctacgaagtgaaaacaaagggtccctcaaggccccgtttggacgcaaagatctttcgaggccaggtgcccaggtctttcatcagagccccatttcaagtgctcagtagcccctttggccagtgcgccccaccacatgggacagcgcaggtccagtggcctccccagctgaccgcaggcagggaacaaggcagaccctagagggccaggccacagcaggggctgaggatgcctggtgaatggatgcctgggagaatggatgccagaattcacgcatgaggctctgaacagggctgggaaaacttccaaacgaagggaagctcatgtcttggtgcactttgtgatgatgcttcaacagcaggactgagatggggacatttacaataaacagaaatgtatgggctcga

SEQ ID NO: 22351 - DNA, 306 bp, Artificial Sequence
  derived and/or modified sequence
atgaagccccacttcagaaacaccgtggagagaatgtacagagacaccttcagctacaacttctacaacagacccatcctgagcagaagaaacaccgtgtggctgtgctacgaggtgaagaccaagggccccagcagacccagactggacgccaagatcttcagaggccaggtgcccagaagcttcatcagagcccccttccaggtgctgagcagccccttcggccagtgcgcccccccccacggcaccgcccaggtgcagtggcccccccagctgaccgccggcagagagcagggcagaccctag

SEQ ID NO: 22352 - protein, 741 aa, Artificial Sequence
  derived and/or modified sequence
MPIAQLLELWKKIEVEPMEIETTEEDLNLDVEPTTEDTAEEEEGVVKEIDISHHVKEGFEKADPSQFELLKVLGQGSYGKVFLVRKVKGSDAGQLYAMKVLKKATLKVRDRVRSKMERDILAEVNHPFIVKLHYAFQTEGKLYLILDFLRGGDLFTRLSKEVMFTEEDVKFYLAELALALDHLHSLGIIYRDLKPENILLDEEGHIKITDFGLSKEAIDHDKRAYSFCGTIEYMAPEVVNRRGHTQSADWWSFGVLMFEMLTGSLPFQGKDRKETMALILKAKLGMPQFLSGEAQSLLRALFKRNPCNRLGAGIDGVEEIKRHPFFVTIDWNTLYRKEIKPPFKPAVGRPEDTFHFDPEFTARTPTDSPGVPPSANAHHLFRGFSFVASSLIQEPSQQDLHKVPVHPIVQQLHGNNIHFTDGYEIKEDIGVGSYSVCKRCVHKATDTEYAVKIIDKSKRDPSEEIEILLRYGQHPNIITLKDVYDDGKFVYLVMELMRGGELLDRILRQRYFSEREASDVLCTITKTMDYLHSQGVVHRDLKPSNILYRDESGSPESIRVCDFGFAKQLRAGNGLLMTPCYTANFVAPEVLKRQGYDAACDIWSLGILLYTMLAGFTPFANGPDDTPEEILARIGSGKYALSGGNWDSISDAAKDVVSKMLHVDPHQRLTAMQVLKHPWVVNREYLSPNQLSRQDVHLVKGAMAATYFALNRTPQAPRLEPVLSSNLAQRRGMKRLTSTRL

SEQ ID NO: 22353 - DNA, 2226 bp, Artificial Sequence
  derived and/or modified sequence
atgcccatcgcccagctgctggagctgtggaagaagatcgaggtggagcccatggagatcgagaccaccgaggaggacctgaacctggacgtggagcccaccaccgaggacaccgccgaggaggaggagggcgtggtgaaggagatcgacatcagccaccacgtgaaggagggcttcgagaaggccgaccccagccagttcgagctgctgaaggtgctgggccagggcagctacggcaaggtgttcctggtgagaaaggtgaagggcagcgacgccggccagctgtacgccatgaaggtgctgaagaaggccaccctgaaggtgagagacagagtgagaagcaagatggagagagacatcctggccgaggtgaaccaccccttcatcgtgaagctgcactacgccttccagaccgagggcaagctgtacctgatcctggacttcctgagaggcggcgacctgttcaccagactgagcaaggaggtgatgttcaccgaggaggacgtgaagttctacctggccgagctggccctggccctggaccacctgcacagcctgggcatcatctacagagacctgaagcccgagaacatcctgctggacgaggagggccacatcaagatcaccgacttcggcctgagcaaggaggccatcgaccacgacaagagagcctacagcttctgcggcaccatcgagtacatggcccccgaggtggtgaacagaagaggccacacccagagcgccgactggtggagcttcggcgtgctgatgttcgagatgctgaccggcagcctgcccttccagggcaaggacagaaaggagaccatggccctgatcctgaaggccaagctgggcatgccccagttcctgagcggcgaggcccagagcctgctgagagccctgttcaagagaaacccctgcaacagactgggcgccggcatcgacggcgtggaggagatcaagagacaccccttcttcgtgaccatcgactggaacaccctgtacagaaaggagatcaagccccccttcaagcccgccgtgggcagacccgaggacaccttccacttcgaccccgagttcaccgccagaacccccaccgacagccccggcgtgccccccagcgccaacgcccaccacctgttcagaggcttcagcttcgtggccagcagcctgatccaggagcccagccagcaggacctgcacaaggtgcccgtgcaccccatcgtgcagcagctgcacggcaacaacatccacttcaccgacggctacgagatcaaggaggacatcggcgtgggcagctacagcgtgtgcaagagatgcgtgcacaaggccaccgacaccgagtacgccgtgaagatcatcgacaagagcaagagagaccccagcgaggagatcgagatcctgctgagatacggccagcaccccaacatcatcaccctgaaggacgtgtacgacgacggcaagttcgtgtacctggtgatggagctgatgagaggcggcgagctgctggacagaatcctgagacagagatacttcagcgagagagaggccagcgacgtgctgtgcaccatcaccaagaccatggactacctgcacagccagggcgtggtgcacagagacctgaagcccagcaacatcctgtacagagacgagagcggcagccccgagagcatcagagtgtgcgacttcggcttcgccaagcagctgagagccggcaacggcctgctgatgaccccctgctacaccgccaacttcgtggcccccgaggtgctgaagagacagggctacgacgccgcctgcgacatctggagcctgggcatcctgctgtacaccatgctggccggcttcacccccttcgccaacggccccgacgacacccccgaggagatcctggccagaatcggcagcggcaagtacgccctgagcggcggcaactgggacagcatcagcgacgccgccaaggacgtggtgagcaagatgctgcacgtggacccccaccagagactgaccgccatgcaggtgctgaagcacccctgggtggtgaacagagagtacctgagccccaaccagctgagcagacaggacgtgcacctggtgaagggcgccatggccgccacctacttcgccctgaacagaaccccccaggcccccagactggagcccgtgctgagcagcaacctggcccagagaagaggcatgaagagactgaccagcaccagactgtag

SEQ ID NO: 22354 - DNA, 2226 bp, Artificial Sequence
  derived and/or modified sequence
atgcctatcgctcagctattggagttgtggaaaaagatcgaagtggaacccatggagattgagactaccgaagaagacttgaatctggatgtggagccaactaccgaggataccgcagaggaggaagagggagtcgtgaaagagatcgatatcagtcatcatgtgaaggagggattcgagaaggccgaccccagccaatttgaattgctgaaagtgctaggccagggcagctacgggaaggtgttcttggttcggaaagtgaaaggaagcgacgctggccaactttacgccatgaaggtgctgaaaaaggccaccctcaaggtgcgtgatcgggtgcgctccaagatggagagggacatcctggccgaagtgaatcaccctttcattgtgaagcttcattacgccttccaaaccgaggggaaactgtacctgatcttggattttttgaggggcggagatttgttcactcgtctgtcaaaagaggtcatgttcaccgaagaagacgttaagttttatctggccgaactggctttggcactcgatcatctgcactctctggggataatctatagagacctgaaaccagagaacatccttctggacgaagagggccatataaagatcacagactttggactttcaaaggaagccatcgatcatgacaagcgggcctactcattttgtgggacaatagaatatatggcgcccgaggtcgtgaaccggaggggacacactcagtccgccgactggtggagttttggagtgctgatgtttgagatgttgaccggatccctcccgttccagggcaaagacagaaaagagaccatggccctgatactaaaagccaagctcggcatgccacagtttcttagcggagaagcccagagcctgcttcgggccctctttaaaagaaacccatgtaatagactgggtgcaggcattgacggagtcgaggaaataaagcgccacccatttttcgtgacaatcgactggaatacactgtatcgtaaagagattaagcctcctttcaagccagcagtgggccgtcccgaggataccttccattttgatcctgagtttactgcaagaacacctaccgatagccctggcgtgcccccttcagccaatgcccatcatctgttcagggggtttagcttcgtggccagcagccttatccaggaaccatcacagcaggatttacacaaggtaccagtgcatccaattgtgcagcagctgcatggcaacaacattcattttacggatggctacgaaattaaggaggacatcggagtgggtagttattccgtgtgtaaacggtgcgtccacaaagccacagatacagagtacgctgtgaaaatcatcgacaagtccaaaagagatccctcagaagaaatcgaaatattgttgcgctatggacagcaccccaacatcattaccctgaaggacgtctacgacgacggcaaatttgtgtacttagtcatggaactcatgcgcggcggtgagctgctggaccgtatcctgaggcagagatactttagtgaaagagaggcgtcagacgtgttgtgtacaattacaaaaaccatggactatctgcactctcagggtgtggtccatagggacctgaaaccctctaacatactgtaccgcgacgaatccggctcacccgagagcattcgcgtgtgtgactttggctttgcaaagcagctgcgggcagggaatgggctactgatgacaccgtgttacacagctaattttgtagcaccagaagtcctcaagagacaaggttacgatgccgcatgcgacatctggtccctgggaatcctactttacacaatgctggctggattcactccttttgctaacggtccagacgacacacccgaagagattctggctcggattggatccggtaaatacgccctcagcggtggcaactgggacagtatcagcgacgctgctaaggacgtcgtatcaaagatgctccacgtagatcctcaccagagattgaccgctatgcaggtccttaagcatccatgggtggtgaaccgcgagtacctgtcacctaaccagctgagcagacaggacgtccacctggtcaagggcgccatggctgcaacttatttcgctctcaatcggacacctcaggcccctaggctggaacccgtactgtccagcaatcttgctcagaggaggggcatgaaaaggctgactagcacccggctctag

SEQ ID NO: 22355 - DNA, 2226 bp, Artificial Sequence
  derived and/or modified sequence
atgcccatcgcccagctgctggagctgtggaagaagattgaggtggagcccatggagattgagaccacagaggaggacctgaacctggatgtggagcccaccacagaggacacagctgaggaggaggagggcgtggtgaaggagattgacatcagccaccacgtgaaggagggctttgagaaggctgaccccagccagtttgagctgctgaaggtgctgggccagggcagctatggcaaggtgttcctggtgaggaaggtgaagggcagtgatgctggccagctgtatgccatgaaggtgctgaagaaggccaccctgaaggtgcgggacagagtgcgcagcaagatggagcgggacatcctggccgaggtgaaccaccccttcatcgtgaagctgcactacgccttccagacagagggcaagctgtacctgatcctggacttcctgcggggcggggacctcttcacccggctgagcaaggaggtgatgttcacagaagaagatgtgaagttctacctggccgagctggccctggccctggaccacctgcacagcctgggcatcatctacagagacctgaagccagagaacatcctgctggatgaggagggccacatcaagatcacagactttggcctgagcaaggaggccatcgaccatgacaagagggcctacagcttctgtggcaccatcgagtacatggcccctgaggtggtgaacagaagaggccacacccagagcgctgactggtggagctttggagtgctgatgtttgagatgctgaccggcagcctgcccttccagggcaaggacaggaaggagaccatggccctgatcctgaaggccaagctgggcatgccccagttcctgtctggagaggcccagagcctgctgcgggccctcttcaagaggaacccctgcaaccggctgggcgccggcattgatggagtggaggagatcaagaggcaccccttctttgtgaccatcgactggaacaccctgtacaggaaggagatcaagccacccttcaagccagctgtgggccggcctgaggacaccttccactttgatcctgagttcaccgcccggacccccacagacagccctggggtgccccccagcgccaatgcccaccacctgttccggggcttctcctttgtggccagcagcctcatccaggagcccagccagcaggacctgcacaaggtgcctgtgcaccccatcgtgcagcagctgcacggcaacaacatccacttcacagatggctatgagatcaaggaggacattggagtgggcagctacagcgtgtgcaagagatgtgtgcacaaggccacagacacagaatatgctgtgaagatcatcgacaagagcaagagggaccccagcgaggagattgagatcctgctgcgctatggccagcaccccaacatcatcaccctgaaggatgtgtatgatgatggcaagtttgtgtacctggtgatggagctgatgagaggaggagagctgctggaccgcatcctgcggcagcgctacttcagcgagcgggaggccagtgatgtgctgtgcaccatcaccaagaccatggactacctgcacagccagggcgtggtgcaccgggacctgaagcccagcaacatcctgtacagagatgagagcggcagccctgagagcatccgggtgtgtgactttggatttgccaagcagctgcgggctggaaatggcctgctgatgaccccctgctacacagccaactttgtggcccctgaggtgctgaagaggcagggctatgatgctgcctgtgacatctggagcctgggcatcctgctgtacaccatgctggccggcttcaccccatttgccaatggaccagatgacaccccagaggagatcctggcccgcatcggcagcggcaagtatgccctgagcggcggcaactgggacagcatcagtgatgctgccaaggatgtggtgtccaagatgctgcacgtggacccccaccagaggctgacagccatgcaggtgctgaagcacccctgggtggtgaaccgggagtacctgagccccaaccagctgagccggcaggatgtgcacctggtgaagggggccatggccgccacctactttgccctgaacagaacaccccaggccccccggctggagcctgtgctgagcagcaacctggcccagaggcggggcatgaagaggctgaccagcacccggctgtag

SEQ ID NO: 22356 - DNA, 2226 bp, Artificial Sequence
  derived and/or modified sequence
atgcccatcgcccagctgctggagctgtggaagaagatcgaggtggagcccatggagatagagacaacagaggaggacctgaatttggatgtggagcccacgacagaagatactgccgaggaagaggagggagttgtgaaagaaatcgacatatcacatcacgtcaaggaaggtttcgagaaggctgaccctagccagttcgagctcctcaaggtccttgggcagggaagttacggaaaagtgttcctggtacgaaaggtgaaggggtcagatgctggccagctttatgccatgaaagtcctcaagaaggctaccctgaaagttagggatcgtgtcagatccaagatggagcgcgacattctggcagaggttaaccacccattcatcgtgaagctgcattatgccttccagacagaaggcaaactatacctcatccttgattttctgcgaggtggagatttatttacccgactgagcaaggaggtgatgttcacagaagaagacgtgaagttttaccttgctgaactggcactggcactcgatcaccttcatagtctggggattatataccgcgacctgaaaccagaaaacatactcctggacgaagagggccacataaaaattacagatttcggtctcagtaaagaggctatcgaccatgataagcgtgcctattctttctgtggaaccatcgagtacatggcccccgaggtggtgaaccgcagggggcatactcagagcgctgattggtggtccttcggtgtcctaatgtttgagatgctgacggggtcactgccattccaggggaaagataggaaggaaactatggctctgatcctcaaagctaagctgggaatgccccagttcctctcaggcgaagcacagtcgctgctgagagccctgttcaagagaaacccttgcaaccggctcggcgcaggcatcgatggcgttgaggagataaaacggcacccattcttcgttacaatagactggaataccctttatcgtaaagagattaagcccccatttaagccggctgtcggtagacctgaggatacttttcattttgaccccgaattcaccgctagaacccctaccgacagtcccggcgtcccgcccagcgccaatgctcatcacttgtttaggggatttagctttgttgcatcttcccttatacaggaaccttctcaacaagatcttcataaagttccagtacaccctatcgtccaacaactgcacggcaacaacatccattttactgacgggtacgaaattaaggaggacattggcgtgggatcatattccgtatgcaagcgatgtgtccacaaagcaacagacactgaatacgctgttaagatcatcgataaatccaagcgcgacccaagtgaggagattgaaatattgcttcggtatgggcaacacccaaatattattactctgaaagacgtctacgatgacggaaagttcgtgtacttagtgatggaactgatgcgaggtggagaactgctggaccggatactgagacagcgatacttttctgagcgggaagcctctgacgtgctgtgtaccattacaaagacgatggactacttgcactcacaaggggttgtgcacagggatttgaaacccagcaacatactctatcgagatgagtccgggtcacctgaatctattcgggtgtgcgattttgggttcgctaagcagctaagggccggaaatgggttactgatgactccttgttacaccgctaatttcgttgcccctgaagtgctgaagcgacaggggtacgacgcggcatgtgacatttggtctttggggattctgctatatactatgctggccggattcacccctttcgccaacggcccagacgataccccagaagagatcttggcacgcataggctccgggaagtacgcattaagcgggggaaactgggatagcatcagtgatgcagcaaaagacgttgtgtcaaaaatgctacacgtggacccccaccagaggctaaccgcaatgcaggttcttaagcacccgtgggttgtgaacagagagtatctatctccaaaccagttatcaagacaggatgtccatctggtcaagggagccatggccgcgacatatttcgcccttaatagaaccccgcaggcaccccgactggaaccagtactgagctctaacctggcccaacgccgaggtatgaagaggcttacaagcactcgcctgtag

SEQ ID NO: 22357 - DNA, 2226 bp, Artificial Sequence
  derived and/or modified sequence
atgccaatagcccagctcctcgagctgtggaaaaagattgaggtggaacccatggagatcgagactaccgaggaggatttgaatttggacgtagaacccacgaccgaggacactgccgaagaggaggaaggcgtggtgaaggaaatagatatctctcatcatgtgaaggaagggtttgaaaaggctgatcccagccaattcgaactcctgaaagttctgggccaaggcagttacggaaaggtgtttctggtcaggaaagtgaaaggatctgatgcaggtcagttgtacgccatgaaggtcctcaaaaaagccacccttaaagtgagagatcgtgttcggagcaagatggaacgggacattctcgctgaggttaatcaccctttcatagtgaagttacactacgcttttcagacagagggaaaactgtaccttattctggacttccttagaggcggagacctgtttacacgattaagtaaggaggtcatgttcacagaagaggacgtgaaattttatctggcagaactagcgctagcactggatcacctgcactcccttggtatcatctaccgagatctcaaacctgaaaacatcctgctggacgaggagggtcacatcaagattaccgactttggactgtctaaagaagccatcgaccacgacaagcgtgcttatagcttttgtggcacaattgagtatatggccccagaagtggttaatcgcagaggccatacacaaagcgcagactggtggagcttcggagtgttgatgttcgaaatgctcacaggcagcttgccgttccagggaaaggatcggaaggagacaatggccttaatcctaaaggccaagttaggtatgccacagttcctgtcgggggaagctcagtctctcctgcgggcattgttcaagcgcaacccgtgtaatagattgggagccggaatcgatggtgtggaagaaatcaaaaggcacccctttttcgtgaccatagattggaacaccctatatcggaaagagatcaaacctccattcaaacctgctgttggcagaccagaggacactttccactttgaccccgagttcaccgcgaggactcccacagacagtcccggagtacccccaagtgcaaatgcccaccatctcttccgcggtttctccttcgtggcatcctccctgattcaggagccttcgcaacaggacttacacaaagtgccagtccacccgatagtgcagcagcttcacgggaataacattcacttcacagacggatacgagatcaaggaagatatcggcgtaggttcgtactctgtctgtaagcggtgcgtgcacaaggctacagacaccgaatatgctgtcaagattatcgacaagtccaaaagagaccccagcgaagaaatcgagatcctgctacggtatggtcagcacccgaacattattactctgaaggacgtttatgacgatggaaagtttgtgtacctcgtgatggaactgatgaggggcggagaacttcttgatcgaatactgcggcagcgctacttcagtgaacgggaggcgtccgacgtgctatgtaccatcaccaaaaccatggattacttgcactctcaaggcgttgtgcatagagacctaaagcctagcaacatcctctatcgggacgaatccggcagtcccgagagcattcgggtttgcgattttgggtttgccaagcaactgcgtgccggaaatggtctactgatgactccgtgctataccgccaatttcgtcgccccagaagtactgaagcgacaaggctacgacgcagcgtgcgatatatggagcctggggatactactgtataccatgcttgccggattcacaccattcgcaaacggacccgacgatacgcccgaggagattttggccagaatcggaagcggaaaatatgccttgtcaggaggaaactgggatagtattagcgacgccgcaaaggacgtcgtctcaaaaatgcttcacgtcgatcctcatcaacgcctgaccgctatgcaagtcctcaagcacccctgggtcgtgaatcgcgagtatttatctccaaaccaactcagtcgacaggacgtgcatctggtgaagggcgctatggccgctacctatttcgctcttaaccggaccccgcaagccccaagactggaaccagtgctaagctccaatttggctcagaggcgcggaatgaaaagactgacaagcacacggctgtag

SEQ ID NO: 22358 - DNA, 4137 bp, Artificial Sequence
  derived and/or modified sequence
aattcgaagctgcaagtgcagcgtttactctgccaaagtcgcagtacagattccgaagccgcagcgccgtcccctcctttcctcgccccagcccgagcgggaagcggcagcagctccccagagccctggcttggcagggaggggacggcgcccgagcagccatattgcagccccccgggtccctcctccggccggcgcaggccccgcgctcacgacctcctctgggagccggatctgtcctctccatcgccgccacccgccggcctctgcgtcccttggcttccgacatcccgtctggccgtccccctgtgccggtccgagcctctgtttatttcctttcctactatcaatactcgaccagcagaaaaggaaagtttaaaaatgccaatcgcacagttgctggaactatggaaaaagatcgaggtggagcctatggaaatagagaccacagaggaggatctcaacctggatgtggagcccaccacagaagacactgcagaagaagaagaaggcgtcgtgaaggagatagacatcagccatcatgtgaaggagggctttgagaaggcagatccttcccagtttgagctgctgaaggttttaggacaaggatcctatggaaaggtgttcctggtgaggaaggtgaaggggtccgacgctgggcagctctacgccatgaaggtccttaagaaagccaccctaaaagttcgggaccgagtgagatcgaagatggagagagacatcttggcagaagtgaatcaccccttcattgtgaagcttcattatgcctttcagacggaaggaaagctctacctgatcctggacttcctgcggggaggggacctcttcacccggctctccaaagaggtcatgttcacggaggaggatgtcaagttctacctggctgagctggccttggctttagaccatctccacagcctggggatcatctacagagatctgaagcctgagaacatcctcctggatgaagaggggcacattaagatcacagatttcggcctgagtaaggaggccattgaccacgacaagagagcgtactccttctgcgggacgatcgagtacatggcgcccgaggtggtgaaccggcgaggacacacgcagagtgccgactggtggtccttcggcgtgctcatgtttgagatgctcacggggtccctgccgttccaggggaaggacaggaaggagaccatggctctcatcctcaaagccaagctggggatgccgcagttcctcagtggggaggcacagagtttgctgcgagctctcttcaaacggaacccctgcaaccggctgggtgctggcattgacggagtggaggaaattaagcgccatcccttctttgtgaccatagactggaacacgctgtaccggaaggagatcaagccaccgttcaaaccagcagtgggcaggcctgaggacaccttccactttgaccccgagttcacagcgcggacgcccacagactctcctggcgtccccccgagtgcaaacgctcatcacctgtttagaggattcagctttgtggcctcaagcctgatccaggagccctcacagcaagatctgcacaaagtcccagttcacccaatcgtgcagcagttacacgggaacaacatccacttcaccgatggctacgagatcaaggaggacatcggggtgggctcctactcagtgtgcaagcgatgtgtgcataaagccacagacaccgagtatgccgtgaagatcattgataagagcaagagagacccctcggaagagattgagatcctcctgcggtacggccagcacccgaacatcatcaccctcaaggatgtctatgatgatggcaagtttgtgtacctggtaatggagctgatgcgtggtggggagctcctggaccgcatcctccggcagagatacttctcggagcgcgaagccagtgacgtcctgtgcaccatcaccaagaccatggactacctccattcccagggggttgttcatcgagacctgaagccgagtaacatcctgtacagggatgagtcggggagcccagaatccatccgagtctgcgacttcggctttgccaagcagctgcgcgcggggaacgggctgctcatgacaccctgctacacggccaatttcgtggccccggaggtcctgaagcgtcaaggctatgatgcggcgtgtgacatctggagtttggggatcctgttgtacaccatgctggcaggatttaccccttttgcaaatgggccagacgatacccctgaggagattctggcgcggatcggcagtgggaagtatgccctttctgggggaaactgggactcgatatctgacgcagctaaagacgtcgtgtccaagatgctccacgtggaccctcatcagcgcctgacggcgatgcaagtgctcaaacacccgtgggtggtcaacagagagtacctgtccccaaaccagctcagccgacaggacgtgcacctggtgaagggcgcgatggccgccacctactttgctctaaacagaacacctcaggccccgcggctggagcccgtgctgtcatccaacctggctcagcgcagaggcatgaagagactcacgtccacgcggctgtagcgggtgggaccctggccccagcgtcccctgccagcatcctcgtgggctcacagaccccggcctcggagcccgtctggcacccagagtgaccacaagtccagcagggaggcggcgcccgccctcgccgtgtccgtgttttctttttcagccccggagagggtcctgacctgggggcttctccaagcctcactgcgccagcctccccgcccgctctcttttctcccaagcgaaaccaaatgcgccccttcacctcgcgtgcccgtgcgaggccgggggcttctttcagagcccgcgggtcctctcatacatggcttctgtttctgccgagagatctgttttccaattatgaagccggtcggtttggtcagactcccgacacccacgtcccaggtacccggtgggaaagtggcagtgcgagggcgcagccattggtggttgcagggccccagagggctggggtgacctggcatcccggggctccccacgggctggatgacggggttggcactgtggcgtccaggaggagatgcctggttctgcccaaaataatccaaagagccgtttcctcctcgcccttcagtttttgcctgaggtgctgggtagcccatcctttcctctgtcccagattcaaatgaggagtaagagcccagacgagaggaaggcaggctggatctttgccttgagagctccgtgtcaccaggatggaagggggtgcctctcggaggagcctgtgtccacctccagtctcggctttccccggggggccaagcgcactgggctgccgtctgtccccagctcccgtggccacacagctatctggaggctttgcagggagtcgtgggttctcgcacctgctcagccctgtgtcggcttcctgtgtgctcacctaaagctgtggttttgctgtgttcacttcgatttttctggtctgtggagaaactgtgaattggagaaatggagctctgtggcttcccacccaaaccttctcagtccagctggaggctggagggagacacaggccccacccagcagactgaggggcagaggcacaggtgggagggcagcggagatcagcgtggacaggagcgatgcactttgtagatgctgtggctttgtgttgcgttttgtgtctctgttgcacagatctgttttttcacactgatccgtattcccctgggtgtgcacacagggcgggtgtggggcatttaggccatgctgtgctctacttcattgagtaaaatcgagtgagaggttccgggcagcaggatcgacgcccagtccagccggcagagggaacacacgggtccttcattgtcctgtaagggtgttgaagatgctccctggcggcccccaagcagactagatgggaggaggcgccgctcagcccctcaccctgcatcactgaagagcggcgcctctgcagcaagcagggcttcaggaggtgcccgctggccacagccaggttttccctaagaagatgttattttgttgggttttgttccccctccatctcgattctcgtacccaact

SEQ ID NO: 22359 - protein, 390 aa, Artificial Sequence
  derived and/or modified sequence
MFPAQAKENAGFSGCGGDTEIDWKAYMAEVEGVINGTYDYTQLQGDTGPLVYPAGFVYIFMGLYYATSRGTDIRMAQNIFAVLYLATLLLVFLIYHQTCKVPPFVFFFMCCASYRVHSIFVLRLFNDPVAMVLLFLSINLLLAQRWGWGCCFFSLAVSVKMNVLLFAPGLLFLLLTQFGFRGALPKLGICAGLQVVLGLPFLLENPSGYLSRSFDLGRQFLFHWTVNWRFLPEALFLHRAFHLALLTAHLTLLLLFALCRWHRTGESILSLLRDPSKRKVPPQPLTPNQIVSTLFTSNFIGICFSRSLHYQFYVWYFHTLPYLLWAMPARWLTHLLRLLVLGLIELSWNTYPSTSCSSAALHICHAVILLQLWLGPQPFPKSTQHSKKAH

SEQ ID NO: 22360 - DNA, 1173 bp, Artificial Sequence
  derived and/or modified sequence
atgttccccgcccaggccaaggagaacgccggcttcagcggctgcggcggcgacaccgagatcgactggaaggcctacatggccgaggtggagggcgtgatcaacggcacctacgactacacccagctgcagggcgacaccggccccctggtgtaccccgccggcttcgtgtacatcttcatgggcctgtactacgccaccagcagaggcaccgacatcagaatggcccagaacatcttcgccgtgctgtacctggccaccctgctgctggtgttcctgatctaccaccagacctgcaaggtgccccccttcgtgttcttcttcatgtgctgcgccagctacagagtgcacagcatcttcgtgctgagactgttcaacgaccccgtggccatggtgctgctgttcctgagcatcaacctgctgctggcccagagatggggctggggctgctgcttcttcagcctggccgtgagcgtgaagatgaacgtgctgctgttcgcccccggcctgctgttcctgctgctgacccagttcggcttcagaggcgccctgcccaagctgggcatctgcgccggcctgcaggtggtgctgggcctgcccttcctgctggagaaccccagcggctacctgagcagaagcttcgacctgggcagacagttcctgttccactggaccgtgaactggagattcctgcccgaggccctgttcctgcacagagccttccacctggccctgctgaccgcccacctgaccctgctgctgctgttcgccctgtgcagatggcacagaaccggcgagagcatcctgagcctgctgagagaccccagcaagagaaaggtgcccccccagcccctgacccccaaccagatcgtgagcaccctgttcaccagcaacttcatcggcatctgcttcagcagaagcctgcactaccagttctacgtgtggtacttccacaccctgccctacctgctgtgggccatgcccgccagatggctgacccacctgctgagactgctggtgctgggcctgatcgagctgagctggaacacctaccccagcaccagctgcagcagcgccgccctgcacatctgccacgccgtgatcctgctgcagctgtggctgggcccccagcccttccccaagagcacccagcacagcaagaaggcccactag

SEQ ID NO: 22361 - DNA, 1173 bp, Artificial Sequence
  derived and/or modified sequence
atgtttcccgcccaggctaaggaaaacgctggatttagtgggtgtggaggggatacggagatcgactggaaggcctacatggctgaggtggaaggagtaattaatgggacttatgattacacacaactgcaaggagataccggacccctagtctaccccgccggattcgtgtatatcttcatgggattgtattatgccactagcagaggcaccgacatcaggatggctcaaaacatcttcgccgtgctgtacttagcgacattgctgctggtctttctgatatatcatcagacctgtaaggttcctccattcgtgtttttctttatgtgttgcgccagttatcgcgtgcacagtatctttgtactgagactgttcaacgacccagttgcgatggtgcttctgtttttgagcataaatctccttttagcacagcgctggggctggggttgttgcttcttctcactggccgtcagcgtcaagatgaatgtcctgctgtttgcgccagggttgctttttttgctgctgactcagttcgggttccgaggtgcgctcccgaagttgggcatatgcgccggacttcaggtcgtgcttggcctgccatttctgctggaaaaccctagtgggtacctatccagatcatttgacctgggccgtcagttcctattccactggacagtcaattggcgctttctgcccgaggcgctgtttttgcatcgggcattccatctggctctcctgaccgcccaccttacactgctgctcctgtttgccttgtgtaggtggcaccggaccggtgagtcaattctgtcattattgagggatccatctaaacgcaaagttcccccccagcctctcacccccaatcagattgtgtccacactgttcacctctaatttcataggcatctgttttagccgaagtctgcattaccagttttacgtctggtactttcatacattaccctatctgctctgggctatgcccgcgcgctggctgacccaccttctgcgccttttggtccttggccttatcgaattgagctggaatacatacccttcaactagctgctcctccgcagcacttcacatctgccatgccgtgatcttgctccagctgtggctgggtcctcagcccttccctaagtctactcagcatagcaaaaaggcccattag

SEQ ID NO: 22362 - DNA, 1173 bp, Artificial Sequence
  derived and/or modified sequence
atgtttcctgcccaggccaaggaaaatgccggcttcagcggctgcggcggggacacagaaattgactggaaggcctacatggccgaggtggagggcgtcatcaatggcacctatgactacacccagctgcagggcgacaccggccccctggtgtacccagctggctttgtgtacatcttcatgggcctgtactatgccaccagccggggcacagacatccgcatggcccagaacatctttgctgtgctgtacctggccaccctgctgctggtgttcctgatctaccaccagacctgcaaggtgcccccatttgtgttcttcttcatgtgctgtgccagctacagagtgcacagcatctttgtgctgcggctcttcaatgaccctgtggccatggtgctgctcttcctgagcatcaacctgctgctggcccagcgctggggctggggctgctgcttcttcagcctggccgtgtctgtgaagatgaatgtgctgctgtttgcccctggcctgctcttcctgctgctgacccagtttggcttccggggggccctgcccaagctgggcatctgtgccggcctgcaggtggtgctgggcctgcccttcctgctggagaaccccagcggctacctgagccgcagctttgacctgggccggcagttcctgttccactggacagtgaactggaggttcctgcctgaggccctcttcctgcaccgggccttccacctggccctgctgacagcccacctgaccctgctgctgctgtttgccctgtgccgctggcacaggactggagagagcatcctgagcctgctgcgggaccccagcaagaggaaggtgcccccccagcccctgacccccaaccagatcgtgtccaccctcttcaccagcaacttcatcggcatctgcttcagccgcagcctgcactaccagttctacgtgtggtacttccacaccctgccctacctgctgtgggccatgcctgcccgctggctgacccacctgctgcggctgctggtgctgggcctcatcgagctgtcctggaacacctaccccagcaccagctgcagcagcgctgccctgcacatctgccacgccgtcatcctgctgcagctgtggctgggcccccagcccttccccaagagcacccagcacagcaagaaggcccactag

SEQ ID NO: 22363 - DNA, 1173 bp, Artificial Sequence
  derived and/or modified sequence
atgttccccgcccaggccaaggagaacgccggcttcagcggctgcgggggcgacaccgagattgactggaaggcatacatggcagaagtcgaaggggtgattaacgggacttacgactacactcagttgcaaggagacaccggaccccttgtgtatcctgccgggttcgtctacattttcatgggtttgtattacgccacgagcaggggaaccgacattaggatggctcagaatatctttgctgtcctctaccttgctaccctcctcctggtcttcctgatataccaccaaacgtgcaaggttcccccgtttgtgtttttctttatgtgctgtgcgtcttaccgagtgcacagcatttttgtactccgattgtttaacgatcctgttgctatggtcctcctgttcttatctattaatctgctgctcgctcagcgatggggctggggatgctgtttcttcagcttggccgtgagtgtgaagatgaatgtcctgctgttcgctccaggccttttgtttctgctgcttactcaattcggattcaggggtgccctgccaaaactcggaatctgtgctggccttcaggtggttttgggccttccgtttctgttggagaacccctctggctatttgagtaggtccttcgacctgggtaggcagtttctattccattggacagtgaactggagattcttgcccgaggctctctttcttcaccgcgcattccacctggccctcttgacagcccacctcacactgctcctcctgttcgcgctctgtagatggcataggactggggagtccattctgtccctgctccgagacccctcaaaacggaaagtgccgccccaaccgctgactccaaatcagattgttagcaccttgttcacatcaaactttattggcatctgcttctctaggtcattacactatcagttttacgtctggtacttccacactttgccttatctcctctgggcaatgcccgcccgctggctgacacacctcctccgactgcttgttctgggtctgatcgaactgagttggaatacatacccatctaccagttgtagcagtgccgccctacacatttgtcatgcagtgatcttgctgcagttatggctcggccctcagcccttccctaaatcaacacagcattctaagaaggcccattag

SEQ ID NO: 22364 - DNA, 1533 bp, Artificial Sequence
  derived and/or modified sequence
ttcgaagaatcctccggctgggaaaactatcgtccagaccctgaatcctccggctgtactgccaagtcatttcctagggccgcactcaaggtgtcagactcacgtgggctcatcactgcgtcctctcatattttcaatatgaatgacttttatcaggaaatctgaaaattagtgaaaggttcatttttctcagcatccggaaggctcgaagggcaggcaggaggggcgcgaacaggggctttgccctcctggagagacagcatgaacacagatgttcccagcgcaggcgaaggagaatgctggcttcagcggttgtgggggagacacagagattgactggaaggcctacatggccgaggtagaaggcgtcatcaatggtacctatgactatacccaactgcagggtgacaccggaccacttgtgtacccagctggtttcgtgtacatctttatggggttgtactatgccaccagccgaggcactgacatccgcatggcccagaacatctttgctgtgctctacctggctaccttgctgcttgtcttcttgatctatcaccagacctgcaaggtacctcccttcgtctttttcttcatgtgctgcgcctcttaccgtgtccactccatctttgtgctgcggctcttcaatgacccagtggccatggtgctgctcttcctcagtatcaacctcctgctggcccagcgctggggctggggttgctgctttttcagcctggcagtctctgtgaagatgaatgtgctgctcttcgcccctgggttactgtttcttctcctcacacagtttggcttccgtggggccctccccaagctgggaatctgtgctggccttcaggtggtgctggggctgcccttcctgctggagaaccccagcggctacctgtcccgctcctttgaccttggccgccagtttctgttccactggacagtgaactggcgcttcctcccagaggcgctcttcctgcatcgagccttccacctggccctgttgactgcccacctcaccctgctcctgctgtttgccctctgcaggtggcacaggacaggggaaagtatcttgtcgctgctgagggatccctccaaaaggaaggttccaccccagccccttacacccaaccagatcgtttctaccctcttcacctccaacttcattggcatctgcttcagccgctccctccactaccagttctacgtctggtatttccacacactgccctacctcctgtgggccatgcctgcacgctggctcacacacctgctcaggttgttggtgctggggctcatcgagctctcctggaacacatacccttccacatcctgcagctctgctgccctgcacatatgccatgccgtcatcctgctgcagctctggctgggcccgcagcctttccccaagagcacccaacacagcaagaaagcccactgaagtccacccctttccctcaggacctgagtctaccctcaggacctggggttggttggactctgcccttccaaataaaccttgctaagtcc

SEQ ID NO: 22365 - DNA, 1173 bp, Artificial Sequence
  derived and/or modified sequence
atgttccccgcacaggcgaaggaaaatgccggattttccgggtgcggaggagataccgaaatcgactggaaggcctatatggcggaggtggaaggggtgatcaacggcacttatgattacacccagctgcaaggcgataccggaccactggtgtatccagccggatttgtatacatattcatgggcctgtactacgccacatcccgtgggaccgacatcagaatggctcagaacatatttgccgttttgtacctggctacattattgctagtgttcctaatttatcatcagacttgtaaagtaccgcctttcgtattcttcttcatgtgctgcgcatcataccgggttcattcaatcttcgttctgaggctatttaacgatccggtggccatggtgctgctgttcttatccattaacctcctcctggcacagagatggggctggggctgttgttttttctcccttgctgtgtccgtcaagatgaatgtgctgctgttcgctccagggctgttatttctgctgctcactcagtttggatttagaggagcactccccaaactgggaatttgtgccggacttcaagtcgttctgggactcccttttctgttagagaatccctctggatacttgtccagatcatttgatctgggcaggcagtttctgtttcactggaccgtgaactggaggtttctccccgaggctctttttctccacagggctttccatttggcactgctgaccgcacacttaacgttactcctgctatttgccctgtgtaggtggcatagaacaggggaaagcattctcagtctgttgagagacccaagcaagaggaaggtcccccctcagccgttgactcccaatcagattgttagtactctgttcacaagcaatttcatcggtatttgcttctcaagaagcctgcactaccaattttatgtgtggtatttccacactttgccctatttactgtgggccatgccagccagatggttgacccacttgctcagactgctggtcctgggactgatagaactcagttggaacacttacccctccacatcatgtagcagcgccgctctgcacatctgccacgcagtgattttactgcagttgtggcttggccctcaaccgttccctaaatccacccagcactccaagaaggcccactag

SEQ ID NO: 22366 - DNA, 1149 bp, Artificial Sequence
  derived and/or modified sequence
atggccgcagcgcgcctcgcgagagcagctcctgcagcagccggcgctgcacttcacgcagcaggaggacggctgcctctcccagggggcggtggacaccacctgttaggtcactcgcagggggggatgtaccccgcgggattcgtgtacatattcatgggactgtattatgcgaccagccgcggaaccgatatcaggatggctcagaatatctttgccgtgctgtacctggccactctactactggtttttctcatttatcaccaaacttgcaaggttcccccgttcgttttttttttcatgtgctgtgcctcctatcgtgtgcattctattttcgtgcttcggctctttaacgacccagtggctatggtgctgttgtttctgtccattaacttactgctagcccagagatgggggtggggctgctgcttcttctctctagccgtgtctgtaaaaatgaatgttctgctatttgcaccaggtctgctgttcctgctgttgacccagttcggtttccgcggcgctttgcctaaactgggtatctgtgctggcctacaggttgtgctcggcttgcctttcctgctggagaatcctagtggctatctttcgcgctcattcgacctgggacgccagttcctattccactggactgtgaactggcgcttcctacctgaggcactcttcctccatagagctttccatctcgctctacttaccgcccacctgacactgcttctgctcttcgctctgtgtcgctggcacagaacaggcgagtcgatcctctcactgctacgcgacccaagcaagcggaaggtacctccacagcccttgactccgaatcagattgtcagcacactcttcacttctaacttcatagggatttgcttcagccgttcactgcactatcagttttatgtatggtacttccatacgctgccatacctgctgtgggccatgcctgccagatggctaacacacctactaagacttcttgtgctcggtctgatcgaactaagctggaacacctatcccagcacgagctgttccagcgcggcgctccatatttgccatgccgtgattctactgcagttgtggctgggacctcagcctttcccgaaaagcactcagcattccaagaaggcacactag

SEQ ID NO: 22367 - DNA, 1149 bp, Artificial Sequence
  derived and/or modified sequence
atggctgctgcccggctggcccgggccgccccagctgctgctggggccgccctgcacgccgccggcggccgcctgcccctgcccggcggcggcggccaccacctgctgggccacagccagggcggcatgtacccagctggctttgtgtacatcttcatgggcctgtactatgccaccagccggggcacagacatccgcatggcccagaacatctttgctgtgctgtacctggccaccctgctgctggtgttcctgatctaccaccagacctgcaaggtgcccccatttgtgttcttcttcatgtgctgtgccagctacagagtgcacagcatctttgtgctgcggctcttcaatgaccctgtggccatggtgctgctcttcctgagcatcaacctgctgctggcccagcgctggggctggggctgctgcttcttcagcctggccgtgtctgtgaagatgaatgtgctgctgtttgcccctggcctgctcttcctgctgctgacccagtttggcttccggggggccctgcccaagctgggcatctgtgccggcctgcaggtggtgctgggcctgcccttcctgctggagaaccccagcggctacctgagccgcagctttgacctgggccggcagttcctgttccactggacagtgaactggaggttcctgcctgaggccctcttcctgcaccgggccttccacctggccctgctgacagcccacctgaccctgctgctgctgtttgccctgtgccgctggcacaggactggagagagcatcctgagcctgctgcgggaccccagcaagaggaaggtgcccccccagcccctgacccccaaccagatcgtgtccaccctcttcaccagcaacttcatcggcatctgcttcagccgcagcctgcactaccagttctacgtgtggtacttccacaccctgccctacctgctgtgggccatgcctgcccgctggctgacccacctgctgcggctgctggtgctgggcctcatcgagctgtcctggaacacctaccccagcaccagctgcagcagcgctgccctgcacatctgccacgccgtcatcctgctgcagctgtggctgggcccccagcccttccccaagagcacccagcacagcaagaaggcccactag

SEQ ID NO: 22368 - DNA, 1149 bp, Artificial Sequence
  derived and/or modified sequence
atggccgccgcccggctggcccgggccgcccccgccgccgccggcgctgccctgcatgccgcagggggccgactccctcttcctggagggggcggtcatcaccttttgggacactctcagggaggtatgtatcctgcaggattcgtgtatatattcatgggcctgtattacgctacttctcgcggcactgacattagaatggcccagaacatctttgctgtcctgtacctggcgacactgctactcgtttttctcatctaccaccaaacctgtaaagtgcctcccttcgtgtttttctttatgtgctgtgcatcttatagagtccattcgattttcgtgttaagactttttaatgaccccgtggccatggtactattgttcctgtctatcaaccttcttttagctcagcgctggggctggggatgctgcttcttctcactcgccgtcagtgtcaagatgaacgtgctgctgttcgcgcccggtctcttattcctgctgctgacacaatttggcttccgaggagctctgccgaaactcggaatttgcgctggtctccaagttgttttagggttgcccttcctattggaaaacccgtccggatacctcagtcgctcgtttgacttggggagacagttcctgtttcactggactgtcaactggcgattcttgccggaggctctgttcctgcatcgagccttccatctggctctgctcacagcccacctgactcttttgcttctattcgccctgtgcagatggcacagaactggcgagagcatcttaagcctcctacgcgatccttcaaaacgaaaagtcccaccccaaccgctcactcccaatcagatcgtatctacactgttcacttcaaacttcatcgggatttgtttttctcggtctcttcattaccagttctatgtttggtattttcacaccctgccctatctgttgtgggctatgcctgcccggtggctaacacacctactacgcttactggtgctgggcctcatcgagttgagttggaatacataccctagcacctcttgcagctccgccgctctgcatatctgtcacgcggttattctcttgcagctgtggctggggccccagccattccctaagtccacccagcatagcaaaaaggcccattag

SEQ ID NO: 22369 - DNA, 1149 bp, Artificial Sequence
  derived and/or modified sequence
atggcggctgctcggctggcccgagcagctcccgctgcagccggagccgcactccacgctgctggaggccgtctgccactaccagggggaggcggacaccacttgttgggccactcacagggaggtatgtaccccgctggcttcgtctacattttcatggggctctactatgctacgagccggggtaccgacatcagaatggctcagaatattttcgcggtgttatatcttgcaactctgctgcttgtcttcctgatctatcatcagacatgcaaggtgccaccatttgtgttttttttcatgtgttgcgcatcatatcgcgttcattccatttttgtgctccgcttatttaacgatcccgttgccatggttcttctcttcctttctatcaatctgctcctggcgcagaggtggggctgggggtgttgctttttttcactagccgtatctgttaagatgaacgttctgctctttgcacccggtttattatttttactgctgacccagtttggctttcgcggagcgcttcccaagctgggcatatgtgctggcctgcaagtagtcctgggtcttcctttcctcctggagaacccctctgggtatctgtcccggtctttcgatttaggaaggcagttcttgtttcactggacagtaaactggaggttcctgcctgaggctctctttctgcaccgcgcttttcacttagctctcctcacggcccacctgactctacttctgctcttcgccctctgcagatggcataggacaggcgaaagcatcctctctctattaagagacccgtccaagcgtaaggtgcctccacaaccattgaccccaaatcagatcgtctcaacactgttcacgtcgaactttatcgggatctgtttctctagatctctgcactaccagttctacgtatggtatttccacaccctcccctatcttctctgggcaatgcccgctcgctggttgacccacctacttcggctgttggtgctcggcctgatagagctgagttggaacacttatccttctactagttgctcctccgctgccttgcatatttgccacgctgtgattttgctgcagctgtggttgggtcctcagccttttcccaaaagtactcaacattcaaaaaaggctcattag

SEQ ID NO: 22370 - DNA, 1452 bp, Artificial Sequence
  derived and/or modified sequence
acacaagcggcgcaccgttaagatggcggctgggctgcggaaacgcggccggtccggttccgcggcccaggcagagggactctgcaagcaatggctgcagcgcgcctggcaagagcggcgcctgctgctgcgggagccgcgctacacgctgctggtggccgcctgcctctgcctggcggaggtgggcatcaccttctgggtcattcacagggtggcatgtacccagctggtttcgtgtacatctttatggggttgtactatgccaccagccgaggcactgacatccgcatggcccagaacatctttgctgtgctctacctggctaccttgctgcttgtcttcttgatctatcaccagacctgcaaggtacctcccttcgtctttttcttcatgtgctgcgcctcttaccgtgtccactccatctttgtgctgcggctcttcaatgacccagtggccatggtgctgctcttcctcagtatcaacctcctgctggcccagcgctggggctggggttgctgctttttcagcctggcagtctctgtgaagatgaatgtgctgctcttcgcccctgggttactgtttcttctcctcacacagtttggcttccgtggggccctccccaagctgggaatctgtgctggccttcaggtggtgctggggctgcccttcctgctggagaaccccagcggctacctgtcccgctcctttgaccttggccgccagtttctgttccactggacagtgaactggcgcttcctcccagaggcgctcttcctgcatcgagccttccacctggccctgttgactgcccacctcaccctgctcctgctgtttgccctctgcaggtggcacaggacaggggaaagtatcttgtcgctgctgagggatccctccaaaaggaaggttccaccccagccccttacacccaaccagatcgtttctaccctcttcacctccaacttcattggcatctgcttcagccgctccctccactaccagttctacgtctggtatttccacacactgccctacctcctgtgggccatgcctgcacgctggctcacacacctgctcaggttgttggtgctggggctcatcgagctctcctggaacacatacccttccacatcctgcagctctgctgccctgcacatatgccatgccgtcatcctgctgcagctctggctgggcccgcagcctttccccaagagcacccaacacagcaagaaagcccactgaagtccacccctttccctcaggacctgagtctaccctcaggacctggggttggttggactctgcccttccaaataaaccttgctaagtccaactctgtgcaacctacatggaggtgggggcagccgatgcctggtccaggctgtgagggacacgtatggagcagataaagaattcactcaagcagtcctaagaggcactttattgcataggatt

SEQ ID NO: 22371 - DNA, 1149 bp, Artificial Sequence
  derived and/or modified sequence
atggccgccgccagactggccagagccgcccccgccgccgccggcgccgccctgcacgccgccggcggcagactgcccctgcccggcggcggcggccaccacctgctgggccacagccagggcggcatgtaccccgccggcttcgtgtacatcttcatgggcctgtactacgccaccagcagaggcaccgacatcagaatggcccagaacatcttcgccgtgctgtacctggccaccctgctgctggtgttcctgatctaccaccagacctgcaaggtgccccccttcgtgttcttcttcatgtgctgcgccagctacagagtgcacagcatcttcgtgctgagactgttcaacgaccccgtggccatggtgctgctgttcctgagcatcaacctgctgctggcccagagatggggctggggctgctgcttcttcagcctggccgtgagcgtgaagatgaacgtgctgctgttcgcccccggcctgctgttcctgctgctgacccagttcggcttcagaggcgccctgcccaagctgggcatctgcgccggcctgcaggtggtgctgggcctgcccttcctgctggagaaccccagcggctacctgagcagaagcttcgacctgggcagacagttcctgttccactggaccgtgaactggagattcctgcccgaggccctgttcctgcacagagccttccacctggccctgctgaccgcccacctgaccctgctgctgctgttcgccctgtgcagatggcacagaaccggcgagagcatcctgagcctgctgagagaccccagcaagagaaaggtgcccccccagcccctgacccccaaccagatcgtgagcaccctgttcaccagcaacttcatcggcatctgcttcagcagaagcctgcactaccagttctacgtgtggtacttccacaccctgccctacctgctgtgggccatgcccgccagatggctgacccacctgctgagactgctggtgctgggcctgatcgagctgagctggaacacctaccccagcaccagctgcagcagcgccgccctgcacatctgccacgccgtgatcctgctgcagctgtggctgggcccccagcccttccccaagagcacccagcacagcaagaaggcccactag

SEQ ID NO: 22372 - protein, 524 aa, Artificial Sequence
  derived and/or modified sequence
MGDEDDDESCAVELRITEANLTGHEEKVSVENFELLKVLGTGAYGKVFLVRKAGGHDAGKLYAMKVLRKAALVQRAKTQEHTRTERSVLELVRQAPFLVTLHYAFQTDAKLHLILDYVSGGEMFTHLYQRQYFKEAEVRVYGGEIVLALEHLHKLGIIYRDLKLENVLLDSEGHIVLTDFGLSKEFLTEEKERTFSFCGTIEYMAPEIIRSKTGHGKAVDWWSLGILLFELLTGASPFTLEGERNTQAEVSRRILKCSPPFPPRIGPVAQDLLQRLLCKDPKKRLGAGPQGAQEVRNHPFFQGLDWVALAARKIPAPFRPQIRSELDVGNFAEEFTRLEPVYSPPGSPPPGDPRIFQGYSFVAPSILFDHNNAAEIMCKIREGRFSLDGEAWQGVSEEAKELVRGLLTVDPAKRLKLEGLRGSSWLQDGSARSSPPLRTPDVLESSGPAVRSGLNATFMAFNRGKREGFFLKSVENAPLAKRRKQKLRSATASRRGSPAPANPGRAPVASKGAPRRANGPLPPS

SEQ ID NO: 22373 - protein, 705 aa, Artificial Sequence
  derived and/or modified sequence
TEANLTGHEEKVSVENFELLKVLGTGAYGKVFLVRKAGGHDAGKLYAMKVLRKAALVQRAKTQEHTRTERSVLELVRQAPFLVTLHYAFQTDAKLHLILDYVSGGEMFTHLYQRQYFKEAEVRVYGGEIVLALEHLHKLGIIYRDLKLENVLLDSEGHIVLTDFGLSKEFLTEEKERTFSFCGTIEYMAPEIIRSKTGHGKAVDWWSLGILLFELLTGASPFTLEGERNTQAEVSRRILKCSPPFPPRIGPVAQDLLQRLLCKDPKKRLGAGPQGAQEVRNHPFFQGLDWVALAARKIPAPFRPQIRSELDVGNFAEEFTRLEPVYSPPGSPPPGDPRIFQGYSFVAPSILFDHNNAVMTDGLEAPGAGDRPGRAAVARSAMMQQYELDLREPALGQGSFSVCRRCRQRQSGQEFAVKILSRRLEANTQREVAALRLCQSHPNVVNLHEVHHDQLHTYLVLELLRGGELLEHIRKKRHFSESEASQILRSLVSAVSFMHEEAGVVHRDLKPENILYADDTPGAPVKIIDFGFARLRPQSPGVPMQTPCFTLQYAAPELLAQQGYDESCDLWSLGVILYMMLSGQVPFQGASGQGGQSQAAEIMCKIREGRFSLDGEAWQGVSEEAKELVRGLLTVDPAKRLKLEGLRGSSWLQDGSARSSPPLRTPDVLESSGPAVRSGLNATFMAFNRGKREGFFLKSVENAPL

SEQ ID NO: 22374 - DNA, 2118 bp, Artificial Sequence
  derived and/or modified sequence
accgaggccaacctgaccggccacgaggagaaggtgagcgtggagaacttcgagctgctgaaggtgctgggcaccggcgcctacggcaaggtgttcctggtgagaaaggccggcggccacgacgccggcaagctgtacgccatgaaggtgctgagaaaggccgccctggtgcagagagccaagacccaggagcacaccagaaccgagagaagcgtgctggagctggtgagacaggcccccttcctggtgaccctgcactacgccttccagaccgacgccaagctgcacctgatcctggactacgtgagcggcggcgagatgttcacccacctgtaccagagacagtacttcaaggaggccgaggtgagagtgtacggcggcgagatcgtgctggccctggagcacctgcacaagctgggcatcatctacagagacctgaagctggagaacgtgctgctggacagcgagggccacatcgtgctgaccgacttcggcctgagcaaggagttcctgaccgaggagaaggagagaaccttcagcttctgcggcaccatcgagtacatggcccccgagatcatcagaagcaagaccggccacggcaaggccgtggactggtggagcctgggcatcctgctgttcgagctgctgaccggcgccagccccttcaccctggagggcgagagaaacacccaggccgaggtgagcagaagaatcctgaagtgcagcccccccttcccccccagaatcggccccgtggcccaggacctgctgcagagactgctgtgcaaggaccccaagaagagactgggcgccggcccccagggcgcccaggaggtgagaaaccaccccttcttccagggcctggactgggtggccctggccgccagaaagatccccgcccccttcagaccccagatcagaagcgagctggacgtgggcaacttcgccgaggagttcaccagactggagcccgtgtacagcccccccggcagccccccccccggcgaccccagaatcttccagggctacagcttcgtggcccccagcatcctgttcgaccacaacaacgccgtgatgaccgacggcctggaggcccccggcgccggcgacagacccggcagagccgccgtggccagaagcgccatgatgcagcagtacgagctggacctgagagagcccgccctgggccagggcagcttcagcgtgtgcagaagatgcagacagagacagagcggccaggagttcgccgtgaagatcctgagcagaagactggaggccaacacccagagagaggtggccgccctgagactgtgccagagccaccccaacgtggtgaacctgcacgaggtgcaccacgaccagctgcacacctacctggtgctggagctgctgagaggcggcgagctgctggagcacatcagaaagaagagacacttcagcgagagcgaggccagccagatcctgagaagcctggtgagcgccgtgagcttcatgcacgaggaggccggcgtggtgcacagagacctgaagcccgagaacatcctgtacgccgacgacacccccggcgcccccgtgaagatcatcgacttcggcttcgccagactgagaccccagagccccggcgtgcccatgcagaccccctgcttcaccctgcagtacgccgcccccgagctgctggcccagcagggctacgacgagagctgcgacctgtggagcctgggcgtgatcctgtacatgatgctgagcggccaggtgcccttccagggcgccagcggccagggcggccagagccaggccgccgagatcatgtgcaagatcagagagggcagattcagcctggacggcgaggcctggcagggcgtgagcgaggaggccaaggagctggtgagaggcctgctgaccgtggaccccgccaagagactgaagctggagggcctgagaggcagcagctggctgcaggacggcagcgccagaagcagcccccccctgagaacccccgacgtgctggagagcagcggccccgccgtgagaagcggcctgaacgccaccttcatggccttcaacagaggcaagagagagggcttcttcctgaagagcgtggagaacgcccccctgtag

SEQ ID NO: 22375 - DNA, 2118 bp, Artificial Sequence
  derived and/or modified sequence
accgaagcgaatctgacaggacatgaggagaaagtctccgttgagaatttcgaactgttgaaggttctcggcactggcgcatatgggaaagtctttcttgttcgcaaggccggtggccacgatgccgggaaactgtatgccatgaaggtgctaaggaaagctgcgctggtccagcgcgcaaaaactcaagagcatacacgcactgaacgtagtgtccttgaactggtgcgccaggcccccttcctggtaacactacattatgcatttcagacagacgcgaaactgcatttaatcctcgattacgttagcggcggggaaatgtttactcatctttatcaaagacaatactttaaggaggcagaggtgcgtgtgtatggcggagaaattgtcctggccctggaacatcttcacaagctggggattatatatagggatctgaaactagagaatgtgctgttggatagtgaagggcacattgtcttgaccgacttcggactcagcaaggagttcctgaccgaagagaaagaaagaacattctcgttctgtgggactatcgaatacatggcccccgagatcatccgctctaagactggacacgggaaggccgtagattggtggagtctcggaattctgctgtttgagcttttgacgggtgctagcccctttacgctggagggagagaggaacacgcaggccgaggtctcaagaagaattctcaagtgttccccccccttcccacctaggattggtcctgtcgcacaggatctgctccagagactgctgtgcaaggatcctaagaaacggctgggtgccggccctcagggagctcaggaagtgcggaaccacccgtttttccaaggattggactgggttgctctggctgcgcgtaagatcccagcgccctttagaccccagatacgcagcgagctcgatgtcgggaacttcgccgaggaattcacgagattggaacccgtctactcccctcccgggtctccacccccaggcgaccccaggatttttcagggttacagttttgtggcaccttccattctgttcgatcataataatgccgtgatgaccgacgggctcgaggctccaggtgctggtgaccggccaggtagggctgccgtcgctaggtccgctatgatgcaacagtatgagctggacctccgagagcccgccctcggtcagggctcattctccgtctgtcgaagatgcaggcagcggcagtccggacaggaattcgctgtgaagatactgtcaagacggcttgaggccaacacacaacgcgaggtggcagcactgcggctgtgtcaatcacacccaaatgtcgtgaatctacacgaagtgcaccatgaccagttgcatacttacctggtcctggaactgctgcgagggggcgagttgttagaacacatcaggaagaagcgccatttctccgagtctgaggcaagtcagattctccgaagcctggtgagtgccgtatcctttatgcatgaagaggctggtgtggtgcatcgtgacttgaagcccgagaatattctgtatgccgatgacactccgggcgcccccgttaaaatcatcgattttggcttcgccaggcttaggccccagtcccctggggtacctatgcagacaccctgcttcacacttcaatatgcagctcctgaattgctggcacagcagggatacgatgagtcttgcgacctgtggtctctgggcgtgatcctctatatgatgttatcgggacaggtccccttccagggcgctagcggacaaggcggccagagtcaggcagctgagatcatgtgcaaaatcagagaaggcaggttctctctggacggcgaggcttggcaaggcgtcagcgaggaggccaaagagttagtaagaggcttgcttacggttgaccctgctaagcgactgaagctggaaggccttaggggctcttcttggttacaggatggatcagcaagaagcagtccccctcttagaacccctgatgttctcgagagtagtgggccagctgtcagaagcggcctcaacgcaacattcatggcatttaatcgcgggaaacgcgaaggattctttttaaaatctgtcgagaacgcacccctctag

SEQ ID NO: 22376 - DNA, 2118 bp, Artificial Sequence
  derived and/or modified sequence
acagaggccaacctgaccggccacgaggagaaggtgtctgtggagaactttgagctgctgaaggtgctgggcactggagcctacggcaaggtgttcctggtgaggaaggccggcggccatgatgctgggaagctgtatgccatgaaggtgctgaggaaggccgccctggtgcagagggccaagacccaggagcacaccaggacagagaggtctgtgctggagctggtgcggcaggcccccttcctggtgaccctgcactacgccttccagacagatgccaagctgcacctgatcctggactatgtgtctggaggagagatgttcacccacctgtaccagaggcagtacttcaaggaggccgaggtgcgggtgtatggaggagaaattgtgctggccctggagcacctgcacaagctgggcatcatctacagagacctgaagctggagaatgtgctgctggacagcgagggccacatcgtgctgacagactttggcctgagcaaggagttcctgacagaggagaaggagaggaccttctccttctgtggcaccatcgagtacatggcccctgagatcatccgcagcaagacaggccacggcaaggctgtggactggtggagcctgggcatcctgctgtttgagctgctgactggagccagccccttcaccctggagggggagaggaacacccaggccgaggtgagccgccgcatcctgaagtgcagcccccccttccccccaagaattggccctgtggcccaggacctgctgcagaggctgctgtgcaaggaccccaagaagaggctgggcgccggcccccagggcgcccaggaggtgaggaaccaccccttcttccagggcctggactgggtggccctggccgccaggaagatcccagcccccttccggccccagatccgctctgagctggatgtgggcaactttgctgaggagttcacccggctggagcctgtgtacagccccccaggcagccccccacctggggacccccgcatcttccagggctacagctttgtggcccccagcatcctgtttgaccacaacaatgctgtgatgacagatggcctggaggcccctggggccggggaccggcccggccgggctgctgtggcccggagcgccatgatgcagcagtatgagctggacctgcgggagcccgccctgggccagggcagcttctctgtgtgccgccgctgccggcagaggcagagcggccaggagtttgctgtgaagatcctgagccggcggctggaggccaacacccagcgggaggtggccgccctgcggctgtgccagagccaccccaacgtggtgaacctgcacgaggtgcaccacgaccagctgcacacctacctggtgctggagctgctgcggggcggggagctgctggagcacatcaggaagaagaggcacttcagcgagagcgaggccagccagatcctgcggagcctggtgtctgctgtgtccttcatgcatgaggaggccggcgtggtgcaccgggacctgaagccagagaacatcctgtatgcagatgacacccctggggcccctgtgaagatcatcgactttggatttgcccggctgcggccccagagccctggggtgcccatgcagaccccctgcttcaccctgcagtatgctgcccctgagctgctggcccagcagggctatgatgagagctgtgacctgtggagcctgggcgtcatcctgtacatgatgctgagcggccaggtgcccttccagggcgccagcggccagggcggccagagccaggccgctgagatcatgtgcaagatccgggagggccgcttcagcctggatggagaggcctggcagggcgtgtctgaggaggccaaggagctggtgcggggcctgctgactgtggaccctgccaagaggctgaagctggagggcctgcggggcagctcctggctgcaggacggcagcgcccggagcagcccccccctgcggaccccagatgtgctggagagcagcggccctgctgtgcgcagcggcctgaatgccaccttcatggccttcaacagaggcaagcgggagggcttcttcctgaagtctgtggagaatgcccccctgtag

SEQ ID NO: 22377 - DNA, 2118 bp, Artificial Sequence
  derived and/or modified sequence
accgaggccaacctgaccggccacgaggagaaggtgagcgtggagaacttcgagctcctgaaggtcctcggcaccggggcatatgggaaagttttcttagtccgaaaggccgggggccatgacgcggggaagttgtacgcaatgaaggtgttaaggaaagccgctcttgtacaacgggccaaaacccaagaacacacccggacagaacgcagtgtcttggaactcgtcagacaagcaccgttcttggttactctgcattatgctttccagaccgacgccaaactgcacctgatcttggattacgtatctggcggcgagatgtttactcacctttaccagcgccagtacttcaaggaggcggaagttagagtgtatgggggagagattgtcctggcactggaacacctccacaagcttggcataatctacagggacctcaagcttgaaaatgtcttgcttgactctgaagggcatatagtgcttactgacttcggcctgtccaaagaatttctgactgaggaaaaggagagaacattctctttctgcgggaccatagagtatatggcccccgaaatcatccgtagcaagacagggcatggtaaagccgtcgattggtggtctttgggcatcctgctcttcgaactgctcaccggggccagtccgtttaccctagagggcgaaagaaacacacaagccgaggtctcccgccggatcctgaagtgctcaccgccatttcctcccagaattgggcctgtggcccaagatctcctgcagcggttactttgcaaggacccgaaaaaaagactgggggctgggccccagggagctcaggaggtgagaaatcatccattttttcaaggcttggattgggtggctcttgctgcccggaagattccagccccatttcggccacagattagatccgagctcgacgtgggcaacttcgccgaagagttcactcggttggagcctgtctacagcccccctggatctcccccaccaggtgatccgcggatttttcaggggtatagcttcgttgccccctccatcttgtttgaccacaacaatgctgtgatgactgacgggcttgaagcgccgggagcaggcgacaggccaggtagagctgccgtcgcccgttcagccatgatgcagcagtatgagcttgatctgagagaacccgctctgggacagggtagtttcagcgtctgccgtagatgtcgccagcgtcagtccgggcaggagtttgcggtgaaaatcttgagtcgtaggctcgaagctaacacccagagagaggtcgcagccctgcgcctttgccagagccatcccaacgtggtaaacctccatgaggtccatcacgaccagttgcacacttatttggtactggagcttctgagaggcggcgaacttctcgagcacatccggaaaaaacggcatttttctgagagcgaagcctcacagattcttcgcagcctggtttcagctgtctctttcatgcatgaggaggctggagtcgttcatcgagacctcaaaccggaaaatattctttacgccgacgacacccctggggcccccgttaagattatcgactttggtttcgctcgcctgcggcctcagagccccggggtgccaatgcagactccctgtttcacgctccagtatgcagctcccgagcttttagcccagcaagggtacgacgaaagttgcgacctttggagccttggcgtcattctgtacatgatgctgtccggccaggtccctttccagggtgcaagtggccaaggtggacagagccaggctgcagagattatgtgtaagattcgtgaaggtcggtttagcttagatggggaggcttggcagggcgtgtcggaggaggctaaagagttagttcgcggcctactgacagtcgatccagccaagcgattgaaactcgaagggctgcgaggaagttcttggctacaagatggaagcgctagatcaagcccccctttacgcacaccagatgtgctggagagctctgggcctgccgtacggagtggccttaatgctacttttatggcttttaatcgggggaagagagagggctttttcctgaaatctgtcgagaatgcaccgctgtag

SEQ ID NO: 22378 - DNA, 2118 bp, Artificial Sequence
  derived and/or modified sequence
acagaagccaacctgacagggcacgaggaaaaggtcagcgtggaaaacttcgagctcttgaaggtgctgggtacaggcgcttacggtaaggtgtttttagtgagaaaagctggagggcatgacgccggaaaactgtacgcaatgaaagttctgaggaaggccgcactagtccagagagctaaaacccaagagcatactaggacagaacgatcagttctagagctagtacgccaggccccttttttagtgaccctccactatgcctttcagactgatgccaagctgcacctgattctcgattatgtcagtggaggggagatgtttacccatctctaccagcgtcagtactttaaagaggccgaggtccgagtatatggaggcgaaatcgtgctcgccctagaacacctgcataagctgggcataatctaccgggacctgaaattggagaacgtccttcttgacagcgaaggtcacatcgttctgacggattttgggctcagcaaggaatttctaacagaagagaaggaacggaccttttctttctgtggcaccatagagtacatggctcctgaaataattaggtctaaaaccggacatggtaaagcagtagattggtggagtctcggcattcttctctttgaactcctgactggtgctagtcccttcacgttggagggcgaaagaaatacgcaagctgaagtgagtcggcgaatcctcaaatgtagcccacctttcccaccgaggatcggaccagttgctcaggatctgttgcagcgcctgctatgtaaggacccaaagaaaagactgggagctgggcctcagggagcccaggaagttagaaatcatccattcttccagggactggattgggttgccctggctgcacggaagattcccgctccctttagaccccagattagatcggagctagacgttggtaactttgccgaggaattcacccgcttagaacctgtgtattcccctcccggaagccccccaccgggagaccctaggatatttcagggttacagttttgtcgctccctctatactgtttgaccacaataatgccgttatgaccgacggtctcgaggcccctggggcaggcgaccgacctggtcgcgctgcagtggccaggtccgccatgatgcaacagtatgaattggacctgagggaacctgctcttgggcagggtagcttctctgtctgtcgccgatgtcgccaacgccaatcaggccaggagttcgccgttaagattctcagtaggagattggaggccaacacccagcgagaggtggccgcattgcgactgtgtcagagtcaccccaacgtggtcaatcttcatgaagttcaccatgatcagctccatacctacctcgttttggagttgctgagaggcggtgaactgctggaacatattagaaagaagaggcacttttctgaatcagaggcttcacaaatattacgttctcttgtgtctgccgtgtcctttatgcacgaggaggcaggggttgtgcaccgcgacctcaagccagagaacatattgtatgctgatgatacgccaggagcccctgtgaagatcatcgactttggattcgcccgattgagacctcagtctcctggagtgccaatgcaaaccccatgcttcacactgcaatacgcagcccctgagctgctggcccagcaaggctatgacgagtcctgcgacctatggtccctgggcgttatcctgtatatgatgcttagtggtcaggtccctttccagggcgcttcaggccagggcggtcagtctcaggctgccgaaataatgtgcaagattcgcgaggggagattttcgcttgatggcgaggcctggcaaggagtgtctgaggaggccaaggaactggtccgtggcctgctgaccgttgatccagcaaaaaggctaaagctggaggggcttagaggctcgtcatggctgcaggacggatctgctagaagcagtccaccccttcgaacgcctgacgtactggaaagtagcggcccagcagtacgctcagggttaaacgcaaccttcatggccttcaatcggggaaaacgggaggggttctttctgaagtcggttgagaacgcccctctctag

SEQ ID NO: 22379 - DNA, 2114 bp, Artificial Sequence
  derived and/or modified sequence
acagaagccaacctgaccgggcacgaggagaaggtgagcgtggagaacttcgagctgctcaaggtgctgggcacgggagcctacggcaaggtgttcctggtgcggaaggcgggcgggcacgacgcggggaagctgtacgccatgaaggtgctgcgcaaggcggcgctggtgcagcgcgccaagacgcaagagcacacgcgcaccgagcgctcggtgctggagctggtgcgccaggcgcccttcctggtcacgctgcactacgctttccagacggatgccaagctgcacctcatcctggactatgtgagcggcggggagatgttcacccacctctaccagcgccagtacttcaaggaggctgaggtgcgcgtgtatgggggtgagatcgtgctggccctggaacacctgcacaagctcggcatcatttaccgagacctgaaactggagaatgtgctgctggactccgagggccacattgtcctcacggacttcgggctgagcaaggagttcctgacggaggagaaagagcggaccttctccttctgtggcaccatcgagtacatggcccccgaaatcatccgtagcaagacggggcatggcaaggctgtggactggtggagcctgggcatcttgctcttcgagctgctgacgggggcctcgcccttcaccctggagggcgagaggaacacgcaggctgaggtgtctcgacggatcctgaagtgctcccctcccttcccccctcggatcgggcccgtggcgcaggacctgctgcagcggctgctttgtaaggatcctaagaagcgattgggcgcggggccccagggggcacaagaagtccggaaccatcccttcttccagggcctcgattgggtggctctggctgccaggaagattccagccccattccggccccaaatccgctcagagctggatgtgggcaactttgcggaggaattcactcggctggagcctgtctactcaccccctggcagccccccacctggggacccccgaatctttcagggatactcctttgtggcaccctccattctctttgaccacaacaacgcggtgatgaccgatgggctggaagcgcctggtgctggagaccggccaggtcgggcagcggtggccaggagcgctatgatgcagcagtacgagctggacctgcgggagcctgcgctgggccagggcagcttttctgtgtgtcgccgctgccgccagcgccagagcggccaggagttcgcagtcaagatcctcagtcgcaggctggaggcgaacacgcagcgcgaagtggctgccctgcgcctgtgccagtcacaccccaacgtggtgaatctgcacgaggtgcatcacgaccagctgcacacgtacctggtcctggagctgctgcggggcggggagctgctggagcacatccgcaagaagcggcacttcagcgagtcggaagcaagccagatcctgcgcagcctcgtgtcggccgtgagcttcatgcacgaggaggcgggcgtggtgcaccgcgacctcaagccggagaacatcctgtacgccgacgacacgcccggggccccggtgaaaatcatcgacttcgggttcgcgcggttgcggccgcagagtcccggggtgcccatgcagacgccctgcttcacgctgcagtacgctgcccccgagctgctggcgcagcagggctacgacgagtcctgcgacctctggagcctgggcgtcattctgtacatgatgctgtcggggcaggtccccttccagggggcctctggccagggcgggcagagccaggcggccgagatcatgtgcaaaatccgcgaggggcgcttctcccttgacggggaggcctggcagggtgtatccgaggaagccaaggagctggtccgagggctcctgaccgtggaccccgccaagcggctgaagctcgagggactgcggggcagctcgtggctgcaggacggcagcgcgcgctcctcgcccccgctccggacgcccgacgtgctcgagtcctctgggcccgcagtgcgctcgggtctcaacgccaccttcatggcattcaaccggggcaagcgggagggcttcttcctgaagagcgtggagaatgcacccct

SEQ ID NO: 22380 - protein, 310 aa, Artificial Sequence
  derived and/or modified sequence
MRRAALWLWLCALALSLQPALPQIVATNLPPEDQDGSGDDSDNFSGSGAGALQDITLSQQTPSTWKDTQLLTAIPTSPEPTGLEATAASTSTLPAGEGPKEGEAVVLPEVEPGLTAREQEATPRPRETTQLPTTHLASTTTATTAQEPATSHPHRDMQPGHHETSTPAGPSQADLHTPHTEDGGPSATERAAEDGASSQLPAAEGSGEQDFTFETSGENTAVVAVEPDRRNQSPVDQGATGASQGLLDRKEVLGGVIAGGLVGLIFAVCLVGFMLYRMKKKDEGSYSLEEPKQANGGAYQKPTKQEEFYA

SEQ ID NO: 22381 - protein, 89 aa, Artificial Sequence
  derived and/or modified sequence
MGILSVDLLITLQILPVFFSNCLFLALYDSVILLKHVVLLLSRSKSTRGEWRRMLTSEGLRCVWKSFLLDAYKQLNCPPSGFSKDGHIL

SEQ ID NO: 22382 - protein, 309 aa, Artificial Sequence
  derived and/or modified sequence
MGILSVDLLITLQILPVFFSNCLFLALYDSVILLKHVVLLLSRSKSTRGEWRRMLTSEGLRCVWKSFLLDAYKQLNCPPSGFSKDGHILCLVYEAYKSRLLVYSHLDLWMVKLGEDAPNSSVVHVSSTEGGDNSGNGTQEKIAEGATCHLLDFASPERPLVVNFGSATCPPFTSQLPAFRKLVEEFSSVADFLLVYIDEAHPSDGWAIPGDSSLSFEVKKHQNQEDRCAAAQQLLERFSLPPQCRVVADRMDNNANIAYGVAFERVCIVQRQKIAYLGGKGPFSYNLQEVRHWLEKNFSKRCKKTRLAG

SEQ ID NO: 22383 - DNA, 930 bp, Artificial Sequence
  derived and/or modified sequence
atgggaattctgtcagtagatctgttaattacactgcaaatcttaccagtgtttttttctaattgtttgttcctggccctttatgatagcgtaattctgctgaaacatgttgtgctgttactcagcagatccaagagcacaaggggggaatggcggcgaatgctgaccagcgagggcctccgatgcgtgtggaagtcctttctactggatgcatacaaacaattaaactgcccaccctcaggattttcaaaagacgggcacatcctatgactggtttatgaggcttataagagcagactcctggtgtactcacacttggacctgtggatggttaaactcggcgaggacgctccgaacagctcggtggtgcatgtgtcatccaccgagggcggggataatagtggtaacggaactcaagaaaaaatagccgagggtgctacatgccacctgctggattttgcaagtcctgagcgcccccttgttgtgaacttcggatcagcgacctgacccccctttactagtcagctaccagctttccgtaagctggtagaagaattctcctccgtggcagatttcctgcttgtgtacatcgatgaggcccatccgagtgacggttgggcaattccaggagacagcagcctgtccttcgaagtaaagaagcatcaaaaccaagaggatcggtgtgcagctgcccagcaactgcttgagcgattctcactgccgccccagtgcagggtggtagccgaccgcatggacaacaacgcgaacattgcctatggcgtggcttttgagagggtgtgtatagtgcagagacaaaagatagcatacctgggcggaaaaggtccattttcttacaacctccaggaggtgagacactggctcgaaaagaatttttccaaacggtgaaagaaaaccaggttggcggggtag

SEQ ID NO: 22384 - DNA, 912 bp, Artificial Sequence
  derived and/or modified sequence
atgggcatcctgtctgtggacctgctgatcaccctgcagatcctgcccgtcttcttcagcaactgcctcttcctggccctgtatgacagcgtcatcctgctgaagcacgtggtgctgctgctgagccgcagcaagagcaccagaggagagtggaggaggatgctgaccagcgagggcctgcgctgtgtgtggaagagcttcctgctggatgcctacaagcagctgaactgcccccccagcggcttcagcaaggatggccacatcctggtgtatgaggcctacaagagccggctgctggtgtacagccacctggacctgtggatggtgaagctgggagaagatgcccccaacagctctgtggtgcacgtgagcagcacagagggcggggacaacagcggaaatggcacccaggagaagattgctgagggcgccacctgccacctgctggactttgccagccctgagcggcccctggtggtgaactttggcagcgccacccccttcaccagccagctgcctgccttcaggaagctggtggaggagttcagctctgtggccgacttcctgctggtgtacattgatgaggcccaccccagtgatggctgggccatccctggggacagcagcctgagctttgaggtgaagaagcaccagaaccaggaggacagatgtgccgccgcccagcagctgctggagcgcttcagcctgcccccccagtgccgggtggtggccgacaggatggacaacaatgccaacatcgcctatggagtggcctttgagcgggtgtgcatcgtgcagaggcagaagatcgcctacctgggcggcaagggccccttctcctacaacctgcaggaggtgcgccactggctggagaagaacttcagcaagaagaagacccggctggccggctag

SEQ ID NO: 22385 - DNA, 930 bp, Artificial Sequence
  derived and/or modified sequence
atgggcatcctgagcgtggacctgctgatcaccctgcagatcctgccagtgttcttctccaactgtttatttctcgctttatatgattcggtgatcctcttaaagcacgtagtcttgctgctcagccgaagtaaatcaacccggggggaatggcggagaatgctcaccagcgaaggcctaagatgcgtctggaaatcattcctgcttgacgcgtataaacagttgaactgcccgccaagcggattttcaaaggacgggcacattctatgactcgtgtacgaggcctataagagcaggctgcttgtgtactcacatttagacctgtggatggtgaagttaggcgaggacgctccaaactctagtgtggtacatgtatcttccaccgagggaggagacaactccggcaacggaacccaagagaaaatcgcagagggtgccacctgtcacctcttagatttcgcctcccctgaaaggcccctggtggtgaatttcgggtcggccacatgaccaccttttacttcccagctacccgcatttcgcaaactggtggaagagttttcatctgtcgcggacttcctcctcgtctatattgatgaggcacacccctccgacggctgggccataccaggtgatagtagcttatccttcgaagtgaaaaagcaccagaaccaagaggacaggtgcgcagccgcacagcagctcttagaacggttttcactaccacctcagtgcagagtggtggccgacaggatggacaataacgctaacattgcatacggagtggcattcgagcgggtctgtatcgtgcagcggcagaagatcgcctatctggggggaaagggtccattctcctataatctgcaggaagtcagacattggctggagaaaaacttcagcaaacgttgaaagaagacccggttagccggttag

SEQ ID NO: 22386 - DNA, 930 bp, Artificial Sequence
  derived and/or modified sequence
atgggtattctttccgtggacttattgatcacattgcaaattctgccagtgtttttttccaattgcctctttctcgccctttatgacagcgtgatacttctcaagcacgttgtattactgctctcgaggtctaaatccaccaggggcgagtggcggagaatgctgacctctgaagggctccgctgcgtttggaaatctttcctcctggatgcatataaacagctcaactgtcctccatcagggttttcgaaggacggccacatcttgtgactggtgtacgaagcctacaagtctcggttgctcgtgtactctcatctggatctgtggatggtgaaattgggagaggacgcacctaatagtagcgttgtgcacgtctctagcacagagggaggagataattccggcaacggcacccaggaaaagattgctgagggggcaacctgccacttgttagatttcgcaagccccgaacgacctttggtggttaacttcggatctgcaacctgacctccttttacaagtcagttgccagcattcagaaaattagtcgaggaattttcctctgtggcggacttcctgctggtgtatattgacgaggcacatccttccgacggctgggccatccccggtgacagtagcctgtcatttgaggtaaaaaaacatcagaaccaggaagatcgatgcgccgctgcccagcagttgctcgagagattttcattaccacctcaatgtagggtggtcgcagacagaatggataataacgcaaatatagcttatggagtcgcttttgaaagagtgtgcatcgtgcagaggcagaagatagcttatctgggaggcaagggcccttttagctacaacctccaagaggtgcggcattggctggaaaaaaatttttctaagagatgaaaaaaaacgcggcttgccggatag

SEQ ID NO: 22387 - DNA, 930 bp, Artificial Sequence
  derived and/or modified sequence
atgggcatcctgagcgtggacctgctgatcaccctgcagatcctgcccgtgttcttcagcaactgcctgttcctggccctgtacgacagcgtgatcctgctgaagcacgtggtgctgctgctgagcagaagcaagagcaccagaggcgagtggagaagaatgctgaccagcgagggcctgagatgcgtgtggaagagcttcctgctggacgcctacaagcagctgaactgcccccccagcggcttcagcaaggacggccacatcctgtgactggtgtacgaggcctacaagagcagactgctggtgtacagccacctggacctgtggatggtgaagctgggcgaggacgcccccaacagcagcgtggtgcacgtgagcagcaccgagggcggcgacaacagcggcaacggcacccaggagaagatcgccgagggcgccacctgccacctgctggacttcgccagccccgagagacccctggtggtgaacttcggcagcgccacctgaccccccttcaccagccagctgcccgccttcagaaagctggtggaggagttcagcagcgtggccgacttcctgctggtgtacatcgacgaggcccaccccagcgacggctgggccatccccggcgacagcagcctgagcttcgaggtgaagaagcaccagaaccaggaggacagatgcgccgccgcccagcagctgctggagagattcagcctgcccccccagtgcagagtggtggccgacagaatggacaacaacgccaacatcgcctacggcgtggccttcgagagagtgtgcatcgtgcagagacagaagatcgcctacctgggcggcaagggccccttcagctacaacctgcaggaggtgagacactggctggagaagaacttcagcaagagatgaaagaagaccagactggccggctag

SEQ ID NO: 22388 - DNA, 1049 bp, Artificial Sequence
  derived and/or modified sequence
aagggaactgactcaggaggcagagaagatgggcatcctcagcgtagacttgctgatcacactgcaaattctgccagtttttttctccaactgcctcttcctggctctctatgactcggtcattctgctcaagcacgtggtgctgctgttgagccgctccaagtccactcgcggagagtggcggcgcatgctgacctcagagggactgcgctgcgtctggaagagcttcctcctcgatgcctacaaacagctaaattgtcctccatcaggttttagcaaagatggacacattttatgactagtatatgaagcttataaaagcagactactggtctactcacatttggatttatggatggtgaaattgggtgaggatgcccccaattccagtgtggtgcatgtctccagtacagaaggaggtgacaacagtggcaatggtacccaggagaagatagctgagggagccacatgccaccttcttgactttgccagccctgagcgcccactagtggtcaactttggctcagccacttgacctcctttcacgagccagctgccagccttccgcaaactggtggaagagttctcctcagtggctgacttcctgctggtctacattgatgaggctcatccatcagatggctgggcgataccgggggactcctctttgtcttttgaggtgaagaagcaccagaaccaggaagatcgatgtgcagcagcccagcagcttctggagcgtttctccttgccgccccagtgccgagttgtggctgaccgcatggacaataacgccaacatagcttacggggtagcctttgaacgtgtgtgcattgtgcagagacagaaaattgcttatctgggaggaaagggccccttctcctacaaccttcaagaagtccggcattggctggagaagaatttcagcaagagatgaaagaaaactagattagctggttaaaggtatgattataagagagcttattgttttaaaaagttatataaaggcaaggaaattaagaactgaatccatatttcaacagagccctatt

SEQ ID NO: 22389 - protein, 174 aa, Artificial Sequence
  derived and/or modified sequence
MAAGTSSYWEDLRKQARQLENELDLKLVSFSKLCTSYSHSSTRDGRRDSSDTTPLLNGSSQDRMFETMAIEIEQLLARLTGVNDKMAEYTNSAGVPSLNAALMHTLQRHRDILQDYTHEFHKTKANFMAIRERENLMGSVRKDIESYKSGSGVNNRRTELFLKEHDHLRKGFQW

SEQ ID NO: 22390 - protein, 248 aa, Artificial Sequence
  derived and/or modified sequence
MAAGTSSYWEDLRKQARQLENELDLKLVSFSKLCTSYSHSSTRDGRRDSSDTTPLLNGSSQDRMFETMAIEIEQLLARLTGVNDKMAEYTNSAGVPSLNAALMHTLQRHRDILQDYTHEFHKTKANFMAIRERENLMGSVRKDIESYKSGSGVNNRRTELFLKEHDHLRNSDRLIEETISIAMATKENMTSQRGMLKSIHSKMNTLANRFPAVNSLIQRINLRKRRDSLILGGVIGICTILLLLYAFH

SEQ ID NO: 22391 - DNA, 525 bp, Artificial Sequence
  derived and/or modified sequence
atggctgccggaacctcgagttattgggaggacttgaggaaacaagcacggcaattagagaacgagcttgacctcaagctggtctcctttagtaagctgtgcactagttattcacattcctcaacacgagacggacggcgggattcctctgataccaccccccttctgaacggcagctcccaggatcgcatgttcgagacaatggctattgagatagaacagttgcttgccaggctgactggggttaacgataaaatggctgaatacactaactctgccggcgttccaagcctgaatgcagctcttatgcacaccttgcagagacacagagatatactgcaagattacacacacgagtttcacaagacaaaggcaaattttatggcaatacgagaacgggagaacctgatgggcagtgtcaggaaggatatcgaaagctacaagtctggctccggggtcaataaccgccggaccgagttgttcctgaaggagcatgatcacctgcgcaaaggcttccagtggtag

SEQ ID NO: 22392 - DNA, 747 bp, Artificial Sequence
  derived and/or modified sequence
atggccgccggaacctctagttactgggaggaccttcggaagcaggccagacagctggaaaatgagctcgatctgaagctggtgagcttctcaaaactgtgtacctcctactcccacagttcaacccgggacggacgacgcgacagctcagatactaccccccttctgaacgggtcaagtcaggatcgcatgttcgagacaatggccatcgagatcgagcagctgttggccaggctgacaggcgttaacgataaaatggctgaatacaccaacagtgctggtgtaccaagtctgaatgcagcattgatgcacactttgcagagacacagggatatattacaggactacacacacgagtttcataagacgaaggctaatttcatggccatccgcgagagggagaatttgatgggatccgtccgcaaagacattgagtcatataagtccggtagtggtgttaacaaccgaagaaccgagttatttctgaaagaacatgaccatttgcggaacagcgaccgcttgattgaagagactatctctattgcaatggccacaaaggaaaatatgacctcccaacggggtatgctgaagtccatccactctaaaatgaacacgttggccaataggttccccgccgtgaatagcttaatccaaagaattaacctacgcaagcgtcgggacagcctcatactgggcggggtgatcgggatctgtactatactgctgctgctctacgcatttcactag

SEQ ID NO: 22393 - DNA, 5230 bp, Artificial Sequence
  derived and/or modified sequence
atcccggctgacgttggacgacaaagatggcggcagggaccagcagttactgggaaggtgagggcgagaaggcctccggatctcaggaaacaggctcgacagctggaaaatgaacttgacctgaaactagtttccttcagcaaactatgtacaagttacagtcatagcagtacccgagatggaagacgcgacagttctgatacaacaccccttttaaatggatcaagccaagacagaatgtttgagacaatggcgattgagattgaacaacttttggcaaggcttacaggggtaaatgataaaatggcagaatataccaacagtgcaggtgtcccctccttgaatgcagccctgatgcatacattacagcggcatagagacatattgcaggattatacacatgaattccataaaaccaaagcaaactttatggcaatacgggaaagggagaatcttatgggatcagtacgaaaagatattgagtcatataaaagtgggtctggagtaaacaacagaagaactgagctatttttgaaagaacatgaccaccttcgaaactcagatcgtctgatagaagagacaataagcattgctatggcaacaaaagaaaatatgacttcacagagaggaatgttgaagtcaattcacagcaaaatgaacactttggccaatcgttttcctgctgtaaacagcctgatccagaggatcaacctgaggaagcggcgggactcgctcatcctagggggtgttattgggatctgtaccatcctgttgctgctgtatgcgttccattgatgggacatcttcagggactcttgacagccaccgctttcacaccctggtctggaataaggaaacatcggagggagaagttgactgtcttgataattagcctgaccagcaggatgaatgcaagactgacagtgatggactctgtgacatggtcaggttgagctgaagccacagtttctctgtgctgtgttttctaacacatttttctgtttttaattaaaaaaaaaaaaaaaaggttttcagttgcttttgtctccctaggaggcaggtaaaccaatcaaaaacagagttttctgtgtttccatgatagtgttgaagcctaatgacaagccaggtcttacagctgggctcttcagaaaaccaggtttctacatccaaagactgcttttcttttagctgccagattggattgtgaataaaaataattcttccctctccctctccctctccccacggtctccctctttccacggtctccctctgatgccgagccgaagctggactgtactgctgccatctcggctcactgcaacctccctgcctgattctcctgcctcagcctgccgagtgcctgcaattgcaggcgagcgccgccacgcctgactgcctcggcctcccgaggtgccgggattgcagacggagtctcgttcactcagtgctcaatggtgcccaggctggagtgcagtggcgtgatctcggctcactacaacctccacctcccagccacctgccttggcctcccaaagtgccgagattgcagcctctgcccggccgccaccccgtctggaaagtgaggagcgcctctgcccggccgccatcccatctaggaagtgaggagcgcctcttcccagccgccatcccatctaggaagtgaggagcgtctctgcccggccgcccatcgtctgagatgtggggagcgcctctgccccgccgccccgtctgggatgtgaggagctcctctgcccggccgcgaccccgtctgggaggtgaggagcgtctctgtctggccaccccgtctgagaagtgaggagacctccgcccggcagccgccctgtctgagaagtgaggagcccctccgcccggcagccaccccatctgggaagtgaggagcgtctacgcccgggcagctgccccgtccgggagggaggtgggggggtcagccccccgcccggccagccgccccgtccgggagggaggtgggggggatcagccccccgcccggccagccgccccgtccgggagggaggtggggggcgcctctgcccggccgcccctgcccggccgcccctactgggaagtgaggagcccctctgcctggccaccaccccatctgggaggtgtgcccagcagctcattgagaacgggccatgatgacaatggcggttttgtggaatagaaaaggcggaaaggtggggaaaagattgagaaattggatggttgccgtgtctgtgtagaaagaagtagacatgggagacttttcattttgttctgtactaagaaaaattcttctgccttgggatcctgttgatctatgaccttacccccaacctggtgctctctgaaacatgtgctgtgtccactcagggttaaatggattaagggtggtgcaagatgtgctttgttaaacagatgcttgaaggcagcatgctccttaagagtcatcaccactccctaatctcaagtacccagggacacaaacactgcggaaggcggcagggtcctctgcctaggaaaaccagagacctttgttcacttgttgatctgctgaccttccctccactattgtcctatgaccctgccaaatccccctctgcgagaaacacccaagaatgatcaattaaaaaaaaaataatataataataattcttgtcctcttattttacactcataatgagaaatcacaagttctttcttgatgatctgtgctatagatttctactctgtctcctcaactctgttgatatttggggaaaattctgtttttcatagattctttgagatgctgatggaccagcttcagcatgtttgaggttgtctgaaatggagatcactgtaaaactgtctttttcttttaaattacaagtacactggggttaactgtattgctggaaaaacatcaagaatgacagtcttatatttaaggcaccagtcattgtttccattttttttttaattcttcccttggattaatattttctactgaaaagaaatgaaatctcagttccactatgataaaagaaacgaatcaccagtgtctgtcagtgcccccactgctcctcctcataccagcattgacactggtagctgaggaaggggactgctcaatttctaatgtgatctattcaagaagccacatataaaaaggcattgagggctcactgtccagagaattgcttttgtaaatgctccacaacgtatgggcaaaagtttaaggactactgcctgatgtaccaggaatcctgagttctgtgaaaatctgttcattccaaatctgttaagcatttccaaacatccagagaatggtttcactgttgagggtgcatgtggcagaatctgtctctctctgcacctgtcttctgttaccatccctggacagtgacagattttaagccagccaccagaattcttttcgagttaaccatttcttagtttctgtaaattcatgacttgtcttactgaactacagcctggtttgtagacttccaacatctacactgctgctcttcaccattggaattcactgtggtatttatagtattggcttcagtccgagccacaggcaataaaaggatatcagctgtagttctcagctacatcatggtgtatagatgctgttattcaggcgaacttgctcatgggtggactaacacctggtttggtacagagactgagaagtttttcattctggtgtcaaagttttgttacattatgggtgtgaagggcatttgatatatttttcttaactatggggtttatttttctaaatgtgggttgattgactgttaattgattcagggtacccttaaaagaaaagaagttttcccattgtgaaccttaaatgatcagagaagtaagttcattgattaaattctctgttgggagaacaaaacttttctcccttgacactttattatctttgatttttcaaagggccttgattggtggttgtgtctcggttaaaatttatgggactttgctatgtagttggcatttataaaatctgaagtatcataaataaagttatttatttaattatactaccagtcttttttactggtctgattcttttgtgcattcattaaagctgattgtgtgagagtgaactgggacacaagctagtctagctcactgcagccaagcaaaccctgttgatggctgatgggcctttccattagggttttgcttatgtgaagtaatggaattatgttggttattttctttatgaaaataaaccagttcttccaaggaagttaaaaggcttggtatggatgttggtgtcagataggtctgactaacctctccgtgctgcagcctatactaaggtgacccagggccacatgtagacagctaggccagtgctttttcctcttagggtttctttgcagaaagaaacctccagcaagggaagagaggtgtgtgtccacaggaaggggctccgtggggatcccatgaagggatttgagctctttcagctccatgtcatttaacttttttgtttaaccaccttggctttctctccttttttgctgtcctccttacggaccagttaccagattcagaggctaacagttagttacttgttaatgctagtcacagccaggaggtcagaaggaattttctacttctggatccaaatgttacctcttaggggaagttatgccccctcaactattgtcttattataatgaatctttcctttttggtccttttaagtaaccactcaaaacttttcatttcactgaaaaaatatgaaaaaccatgacaatagggctgggtgcagtggctcacgcctgtaatcttagcactttgggagaccaaggcaggcggatcgtttgaggccaggagtttgagaccagcctgggcaatgtagcaagactctgtctctgcaaaaaaaattaaaagatacctgagagctcactttaatatcaaggtatttgcatccattcccaccctgttagctcttaagggaggagggaaatcaattccaaccatactttcctgtgatggaagatgtttcctcttgaaaaaatgccaatacagatttttaaaacctattgttttccaaatgcactttgtaagtttttgcttttaaaatagcttcttggaaccaattttattgtatttgtacttaatttttgttctcatctaaatgtgcattttctgactgtatagaagaagctttggtatgtaatttaataataaattagaaatctaaatg

SEQ ID NO: 22394 - DNA, 1204 bp, Artificial Sequence
  derived and/or modified sequence
gttggacgacaaagatggcggcagggaccagcagttactgggaagatctcaggaaacaggctcgacagctggaaaatgaacttgacctgaaactagtttccttcagcaaactatgtacaagttacagtcatagcagtacccgagatggaagacgcgacagttctgatacaacaccccttttaaatggatcaagccaagacagaatgtttgagacaatggcgattgagattgaacaacttttggcaaggcttacaggggtaaatgataaaatggcagaatataccaacagtgcaggtgtcccctccttgaatgcagccctgatgcatacattacagcggcatagagacatattgcaggattatacacatgaattccataaaaccaaagcaaactttatggcaatacgggaaagggagaatcttatgggatcagtacgaaaagatattgagtcatataaaagtgggtctggagtaaacaacagaagaactgagctatttttgaaagaacatgaccaccttcgaaaaggttttcagtggtgaagataaacttgaataaggagataacttacacaagcagaaaaagcctcatctcttctggattcctttaatgccagtggtcatcaccaggtgtagatcagtcaccttttacccaggctgggaccaccaccttctcatctacagctcagatcgtctgatagaagagacaataagcattgctatggcaacaaaagaaaatatgacttcacagagaggaatgttgaagtcaattcacagcaaaatgaacactttggccagtatcctttttgaatgttcgcagtctgtgttttgagggtagaggggagaagtgtctgtgtgtgcttttatagggggcaggttgccatcatcagtagcagtagagcccatcagtaattgcataatatgaatatactgtgcattcctactttgtgaaagtttatgctctttagtaccattcctaaaagactgcacctcagaagtttcttactactagatgtagaagaaaaaaattataaatgtgaatttaaaaattatccaccaatttcttctacattttagaaagcttttaaattcatgttagaactccacactatacattattcttacctaaacatgataaattatatgcctttgttgtttttcccatttagagataagtcagtggcagatgcttggaagggggaaggaag

SEQ ID NO: 22395 - DNA, 5208 bp, Artificial Sequence
  derived and/or modified sequence
atcccggctgacgttggacgacaaagatggcggcagggaccagcagttactgggaagatctcaggaaacaggctcgacagctggaaaatgaacttgacctgaaactagtttccttcagcaaactatgtacaagttacagtcatagcagtacccgagatggaagacgcgacagttctgatacaacaccccttttaaatggatcaagccaagacagaatgtttgagacaatggcgattgagattgaacaacttttggcaaggcttacaggggtaaatgataaaatggcagaatataccaacagtgcaggtgtcccctccttgaatgcagccctgatgcatacattacagcggcatagagacatattgcaggattatacacatgaattccataaaaccaaagcaaactttatggcaatacgggaaagggagaatcttatgggatcagtacgaaaagatattgagtcatataaaagtgggtctggagtaaacaacagaagaactgagctatttttgaaagaacatgaccaccttcgaaactcagatcgtctgatagaagagacaataagcattgctatggcaacaaaagaaaatatgacttcacagagaggaatgttgaagtcaattcacagcaaaatgaacactttggccaatcgttttcctgctgtaaacagcctgatccagaggatcaacctgaggaagcggcgggactcgctcatcctagggggtgttattgggatctgtaccatcctgttgctgctgtatgcgttccattgatgggacatcttcagggactcttgacagccaccgctttcacaccctggtctggaataaggaaacatcggagggagaagttgactgtcttgataattagcctgaccagcaggatgaatgcaagactgacagtgatggactctgtgacatggtcaggttgagctgaagccacagtttctctgtgctgtgttttctaacacatttttctgtttttaattaaaaaaaaaaaaaaaaggttttcagttgcttttgtctccctaggaggcaggtaaaccaatcaaaaacagagttttctgtgtttccatgatagtgttgaagcctaatgacaagccaggtcttacagctgggctcttcagaaaaccaggtttctacatccaaagactgcttttcttttagctgccagattggattgtgaataaaaataattcttccctctccctctccctctccccacggtctccctctttccacggtctccctctgatgccgagccgaagctggactgtactgctgccatctcggctcactgcaacctccctgcctgattctcctgcctcagcctgccgagtgcctgcaattgcaggcgagcgccgccacgcctgactgcctcggcctcccgaggtgccgggattgcagacggagtctcgttcactcagtgctcaatggtgcccaggctggagtgcagtggcgtgatctcggctcactacaacctccacctcccagccacctgccttggcctcccaaagtgccgagattgcagcctctgcccggccgccaccccgtctggaaagtgaggagcgcctctgcccggccgccatcccatctaggaagtgaggagcgcctcttcccagccgccatcccatctaggaagtgaggagcgtctctgcccggccgcccatcgtctgagatgtggggagcgcctctgccccgccgccccgtctgggatgtgaggagctcctctgcccggccgcgaccccgtctgggaggtgaggagcgtctctgtctggccaccccgtctgagaagtgaggagacctccgcccggcagccgccctgtctgagaagtgaggagcccctccgcccggcagccaccccatctgggaagtgaggagcgtctacgcccgggcagctgccccgtccgggagggaggtgggggggtcagccccccgcccggccagccgccccgtccgggagggaggtgggggggatcagccccccgcccggccagccgccccgtccgggagggaggtggggggcgcctctgcccggccgcccctgcccggccgcccctactgggaagtgaggagcccctctgcctggccaccaccccatctgggaggtgtgcccagcagctcattgagaacgggccatgatgacaatggcggttttgtggaatagaaaaggcggaaaggtggggaaaagattgagaaattggatggttgccgtgtctgtgtagaaagaagtagacatgggagacttttcattttgttctgtactaagaaaaattcttctgccttgggatcctgttgatctatgaccttacccccaacctggtgctctctgaaacatgtgctgtgtccactcagggttaaatggattaagggtggtgcaagatgtgctttgttaaacagatgcttgaaggcagcatgctccttaagagtcatcaccactccctaatctcaagtacccagggacacaaacactgcggaaggcggcagggtcctctgcctaggaaaaccagagacctttgttcacttgttgatctgctgaccttccctccactattgtcctatgaccctgccaaatccccctctgcgagaaacacccaagaatgatcaattaaaaaaaaaataatataataataattcttgtcctcttattttacactcataatgagaaatcacaagttctttcttgatgatctgtgctatagatttctactctgtctcctcaactctgttgatatttggggaaaattctgtttttcatagattctttgagatgctgatggaccagcttcagcatgtttgaggttgtctgaaatggagatcactgtaaaactgtctttttcttttaaattacaagtacactggggttaactgtattgctggaaaaacatcaagaatgacagtcttatatttaaggcaccagtcattgtttccattttttttttaattcttcccttggattaatattttctactgaaaagaaatgaaatctcagttccactatgataaaagaaacgaatcaccagtgtctgtcagtgcccccactgctcctcctcataccagcattgacactggtagctgaggaaggggactgctcaatttctaatgtgatctattcaagaagccacatataaaaaggcattgagggctcactgtccagagaattgcttttgtaaatgctccacaacgtatgggcaaaagtttaaggactactgcctgatgtaccaggaatcctgagttctgtgaaaatctgttcattccaaatctgttaagcatttccaaacatccagagaatggtttcactgttgagggtgcatgtggcagaatctgtctctctctgcacctgtcttctgttaccatccctggacagtgacagattttaagccagccaccagaattcttttcgagttaaccatttcttagtttctgtaaattcatgacttgtcttactgaactacagcctggtttgtagacttccaacatctacactgctgctcttcaccattggaattcactgtggtatttatagtattggcttcagtccgagccacaggcaataaaaggatatcagctgtagttctcagctacatcatggtgtatagatgctgttattcaggcgaacttgctcatgggtggactaacacctggtttggtacagagactgagaagtttttcattctggtgtcaaagttttgttacattatgggtgtgaagggcatttgatatatttttcttaactatggggtttatttttctaaatgtgggttgattgactgttaattgattcagggtacccttaaaagaaaagaagttttcccattgtgaaccttaaatgatcagagaagtaagttcattgattaaattctctgttgggagaacaaaacttttctcccttgacactttattatctttgatttttcaaagggccttgattggtggttgtgtctcggttaaaatttatgggactttgctatgtagttggcatttataaaatctgaagtatcataaataaagttatttatttaattatactaccagtcttttttactggtctgattcttttgtgcattcattaaagctgattgtgtgagagtgaactgggacacaagctagtctagctcactgcagccaagcaaaccctgttgatggctgatgggcctttccattagggttttgcttatgtgaagtaatggaattatgttggttattttctttatgaaaataaaccagttcttccaaggaagttaaaaggcttggtatggatgttggtgtcagataggtctgactaacctctccgtgctgcagcctatactaaggtgacccagggccacatgtagacagctaggccagtgctttttcctcttagggtttctttgcagaaagaaacctccagcaagggaagagaggtgtgtgtccacaggaaggggctccgtggggatcccatgaagggatttgagctctttcagctccatgtcatttaacttttttgtttaaccaccttggctttctctccttttttgctgtcctccttacggaccagttaccagattcagaggctaacagttagttacttgttaatgctagtcacagccaggaggtcagaaggaattttctacttctggatccaaatgttacctcttaggggaagttatgccccctcaactattgtcttattataatgaatctttcctttttggtccttttaagtaaccactcaaaacttttcatttcactgaaaaaatatgaaaaaccatgacaatagggctgggtgcagtggctcacgcctgtaatcttagcactttgggagaccaaggcaggcggatcgtttgaggccaggagtttgagaccagcctgggcaatgtagcaagactctgtctctgcaaaaaaaattaaaagatacctgagagctcactttaatatcaaggtatttgcatccattcccaccctgttagctcttaagggaggagggaaatcaattccaaccatactttcctgtgatggaagatgtttcctcttgaaaaaatgccaatacagatttttaaaacctattgttttccaaatgcactttgtaagtttttgcttttaaaatagcttcttggaaccaattttattgtatttgtacttaatttttgttctcatctaaatgtgcattttctgactgtatagaagaagctttggtatgtaatttaataataaattagaaatctaaatg

SEQ ID NO: 22396 - DNA, 1011 bp, Artificial Sequence
  derived and/or modified sequence
ggacgacaaagatggcggcagggaccagcagttactgggaaggtgagggcgagaaggcctccggatctcaggaaacaggctcgacagctggaaaatgaacttgacctgaaactagtttccttcagcaaactatgtacaagttacagtcatagcagtacccgagatggaagacgcgacagttctgatacaacaccccttttaaatggatcaagccaagacagaatgtttgagacaatggcgattgagattgaacaacttttggcaaggcttacaggggtaaatgataaaatggcagaatataccaacagtgcaggtgtcccctccttgaatgcagccctgatgcatacattacagcggcatagagacatattgcaggattatacacatgaattccataaaaccaaagcaaactttatggcaatacgggaaagggagaatcttatgggatcagtacgaaaagatattgagtcatataaaagtgggtctggagtaaacaacagaagaactgagctatttttgaaagaacatgaccaccttcgaaactcagatcgtctgatagaagagacaataagcattgctatggcaacaaaagaaaatatgacttcacagagaggaatgttgaagtcaattcacagcaaaatgaacactttggccaatcgttttcctgctgtaaacagcctgatccagaggatcaacctgaggaagcggcgggactcgctcatcctagggggtgttattgggatctgtaccatcctgttgctgctgtatgcgttccattgatgggacatcttcagggactcttgacagccaccgctttcacaccctggtctggaataaggaaacatcggagggagaagttgactgtcttgataattagcctgaccagcaggatgaatgcaagactgacagtgatggactctgtgacatggtcaggttgagctgaagccacagtttctctgtgctgtgttttctaacacatttttctgtttttaattaaaaaaaaaaaaaaaa

SEQ ID NO: 22397 - DNA, 525 bp, Artificial Sequence
  derived and/or modified sequence
atggctgctggcaccagcagctactgggaggacctgaggaagcaggcccggcagctggagaatgagctggacctgaagctggtgtccttcagcaagctgtgcaccagctacagccacagcagcaccagagatggccggcgggacagcagtgacaccacccccctgctgaatggcagcagccaggacaggatgtttgagaccatggccatcgagattgagcagctgctggcccggctgactggagtgaatgacaagatggccgagtacaccaacagcgctggggtgcccagcctgaatgctgccctgatgcacaccctgcagaggcaccgggacatcctgcaggactacacccatgagttccacaagaccaaggccaacttcatggccatccgggagcgggagaacctgatgggctctgtgaggaaggacatcgagagctacaagagcggcagcggcgtgaacaacagaagaacagagctgttcctgaaggagcatgaccacctgaggaagggcttccagtggtag

SEQ ID NO: 22398 - DNA, 747 bp, Artificial Sequence
  derived and/or modified sequence
atggctgctggcaccagcagctactgggaggacctgaggaagcaggcccggcagctggagaatgagctggacctgaagctggtgtccttcagcaagctgtgcaccagctacagccacagcagcaccagagatggccggcgggacagcagtgacaccacccccctgctgaatggcagcagccaggacaggatgtttgagaccatggccatcgagattgagcagctgctggcccggctgactggagtgaatgacaagatggccgagtacaccaacagcgctggggtgcccagcctgaatgctgccctgatgcacaccctgcagaggcaccgggacatcctgcaggactacacccatgagttccacaagaccaaggccaacttcatggccatccgggagcgggagaacctgatgggctctgtgaggaaggacatcgagagctacaagagcggcagcggcgtgaacaacagaagaacagagctgttcctgaaggagcatgaccacctgaggaacagcgaccggctgattgaggagaccatcagcatcgccatggccaccaaggagaacatgaccagccagaggggcatgctgaagagcatccacagcaagatgaacaccctggccaaccgcttccctgctgtgaacagcctcatccagaggatcaacctgaggaagagaagagacagcctcatcctgggcggcgtgattggcatctgcaccatcctgctgctgctgtatgccttccactag

SEQ ID NO: 22399 - DNA, 525 bp, Artificial Sequence
  derived and/or modified sequence
atggccgccggcaccagcagctactgggaggacctgcggaagcaggcccggcagctcgagaacgagctggatctgaagctggttagctttagcaaactctgtacatcctatagtcacagcagcaccagggatggccggcgagattcaagcgatactaccccattattgaacgggtcttcccaggacaggatgttcgaaaccatggcaatcgaaattgaacagctgctggcaaggttgacgggtgtaaacgataaaatggccgagtacaccaactctgctggcgtgcctagtctgaacgccgctttgatgcataccctgcagcgccaccgggacatcttacaggattacacccatgagtttcataaaactaaagcgaatttcatggcaatccgggaacgagaaaatcttatgggcagcgtccgcaaggatatcgagagctataaaagtgggtctggtgtaaataacaggcgcacagagctgttccttaaggagcatgaccacctccggaagggttttcagtggtag

SEQ ID NO: 22400 - DNA, 747 bp, Artificial Sequence
  derived and/or modified sequence
atggccgccggcaccagcagctactgggaggacctgcggaagcaggctcgacagttggagaatgagctcgatctgaaactcgtgtcctttagcaaactctgcacctcctacagccactcaagcactcgggacgggagacgggattctagcgacacaacacccctcctgaacgggagctcccaggaccggatgtttgagacaatggctattgaaatcgagcagcttctagcccgacttaccggggtcaatgataagatggcggagtacactaattctgccggcgtcccgagtctgaatgccgccctgatgcatacgctccagcgccatagagacatcctccaggactatacccatgaatttcataagacaaaagctaactttatggccatcagagaacgcgagaatctcatgggctccgtgaggaaagacatcgagagttataaaagtggctcaggcgtgaataacagacgcactgaactgttcttgaaagaacacgaccaccttcggaacagcgaccggctgattgaggagacaatttcaatcgcgatggccactaaggagaatatgacatcacagcgtggtatgctgaaatctattcactccaaaatgaatacactggccaaccgattcccagctgtgaacagcctgatccagaggatcaatctgcgtaagaggagagacagtctgatcttaggaggtgtaataggaatatgtactattctgctgctgctgtatgcctttcattag

SEQ ID NO: 22401 - DNA, 525 bp, Artificial Sequence
  derived and/or modified sequence
atggctgcagggaccagctcgtactgggaagacctgcgaaaacaggctaggcagttggagaacgagctcgatttgaaactggtgtccttcagcaagctgtgtacatcgtattcccacagcagcacgagagatggaaggagggattctagtgatactactccccttctgaacgggtcttctcaggacagaatgttcgagacaatggccatcgaaatcgagcagttgctcgctcgcctgaccggcgtgaatgataaaatggcagaatataccaactctgccggagttccgagtctcaatgcggctttgatgcacaccctgcagaggcatagagatattttgcaggactatactcatgaatttcacaagacgaaagccaacttcatggccatccgggaaagagaaaacctcatggggtccgttagaaaggacatagagtcatacaaatctggctcgggggtcaacaaccgcagaaccgaattgtttctcaaggagcatgatcatcttcggaaagggtttcagtggtag

SEQ ID NO: 22402 - DNA, 747 bp, Artificial Sequence
  derived and/or modified sequence
atggccgctggcaccagctcatattgggaggacctgagaaagcaggctaggcaacttgaaaatgaactagacctgaagctcgtgagctttagtaagctctgcacctcttactcccacagttcaacgagagatgggaggcgggacagctctgacacaacgcctctgctgaatggtagctcacaagaccggatgttcgagacaatggctattgagatcgagcagttactggcccgactgacaggcgtgaacgacaagatggccgaatatacaaatagtgcaggcgtgcccagccttaacgccgcactgatgcacactctgcagagacaccgcgacattcttcaggattatacccatgagtttcacaagactaaggccaactttatggcaatcagggagagagaaaatttgatgggcagcgtcaggaaggacattgagtcatataaatcaggatctggagtgaataatagacgaacagagctctttctgaaagagcatgatcacctgcggaactctgaccgactgatcgaggagacaatcagtatagctatggctaccaaagaaaatatgacttctcagcgcggaatgcttaaaagcattcactctaagatgaataccctggccaaccgatttcccgctgtaaacagcctcatacagaggatcaatctgagaaagagacgagacagcttaattctagggggtgtgattggcatctgtacaatactgctgcttctgtatgcattccattag

SEQ ID NO: 22403 - DNA, 525 bp, Artificial Sequence
  derived and/or modified sequence
atggccgccggcaccagcagctactgggaggacctgagaaagcaggccagacagctggagaacgagctggacctgaagctggtgagcttcagcaagctgtgcaccagctacagccacagcagcaccagagacggcagaagagacagcagcgacaccacccccctgctgaacggcagcagccaggacagaatgttcgagaccatggccatcgagatcgagcagctgctggccagactgaccggcgtgaacgacaagatggccgagtacaccaacagcgccggcgtgcccagcctgaacgccgccctgatgcacaccctgcagagacacagagacatcctgcaggactacacccacgagttccacaagaccaaggccaacttcatggccatcagagagagagagaacctgatgggcagcgtgagaaaggacatcgagagctacaagagcggcagcggcgtgaacaacagaagaaccgagctgttcctgaaggagcacgaccacctgagaaagggcttccagtggtag

SEQ ID NO: 22404 - DNA, 747 bp, Artificial Sequence
  derived and/or modified sequence
atggccgccggcaccagcagctactgggaggacctgagaaagcaggccagacagctggagaacgagctggacctgaagctggtgagcttcagcaagctgtgcaccagctacagccacagcagcaccagagacggcagaagagacagcagcgacaccacccccctgctgaacggcagcagccaggacagaatgttcgagaccatggccatcgagatcgagcagctgctggccagactgaccggcgtgaacgacaagatggccgagtacaccaacagcgccggcgtgcccagcctgaacgccgccctgatgcacaccctgcagagacacagagacatcctgcaggactacacccacgagttccacaagaccaaggccaacttcatggccatcagagagagagagaacctgatgggcagcgtgagaaaggacatcgagagctacaagagcggcagcggcgtgaacaacagaagaaccgagctgttcctgaaggagcacgaccacctgagaaacagcgacagactgatcgaggagaccatcagcatcgccatggccaccaaggagaacatgaccagccagagaggcatgctgaagagcatccacagcaagatgaacaccctggccaacagattccccgccgtgaacagcctgatccagagaatcaacctgagaaagagaagagacagcctgatcctgggcggcgtgatcggcatctgcaccatcctgctgctgctgtacgccttccactag

SEQ ID NO: 22405 - protein, 1190 aa, Artificial Sequence
  derived and/or modified sequence
MKTRQNKDSMSMRSGRKKEAPGPREELRSRGRASPGGVSTSSSDGKAEKSRQTAKKARVEEASTPKVNKQGRSEEISESESEETNAPKKTKTEQELPRPQSPSDLDSLDGRSLNDDGSSDPRDIDQDNRSTSPSIYSPGSVENDSDSSSGLSQGPARPYHPPPLFPPSPQPPDSTPRQPEASFEPHPSVTPTGYHAPMEPPTSRMFQAPPGAPPPHPQLYPGGTGGVLSGPPMGPKGGGAASSVGGPNGGKQHPPPTTPISVSSSGASGAPPTKPPTTPVGGGNLPSAPPPANFPHVTPNLPPPPALRPLNNASASPPGLGAQPLPGHLPSPHAMGQGMGGLPPGPEKGPTLAPSPHSLPPASSSAPAPPMRFPYSSSSSSSAAASSSSSSSSSSASPFPASQALPSYPHSFPPPTSLSVSNQPPKYTQPSLPSQAVWSQGPPPPPPYGRLLANSNAHPGPFPPSTGAQSTAHPPVSTHHHHHQQQQQQQQQQQQQQQQQQQHHGNSGPPPPGAFPHPLEGGSSHHAHPYAMSPSLGSLRPYPPGPAHLPPPHSQVSYSQAGPNGPPVSSSSNSSSSTSQGSYPCSHPSPSQGPQGAPYPFPPVPTVTTSSATLSTVIATVASSPAGYKTASPPGPPPYGKRAPSPGAYKTATPPGYKPGSPPSFRTGTPPGYRGTSPPAGPGTFKPGSPTVGPGPLPPAGPSGLPSLPPPPAAPASGPPLSATQIKQEPAEEYETPESPVPPARSPSPPPKVVDVPSHASQSARFNKHLDRGFNSCARSDLYFVPLEGSKLAKKRADLVEKVRREAEQRAREEKEREREREREKEREREKERELERSVKLAQEGRAPVECPSLGPVPHRPPFEPGSAVATVPPYLGPDTPALRTLSEYARPHVMSPGNRNHPFYVPLGAVDPGLLGYNVPALYSSDPAAREREREARERDLRDRLKPGFEVKPSELEPLHGVPGPGLDPFPRHGGLALQPGPPGLHPFPFHPSLGPLERERLALAAGPALRPDMSYAERLAAERQHAERVAALGNDPLARLQMLNVTPHHHQHSHIHSHLHLHQQDAIHAASASVHPLIDPLASGSHLTRIPYPAGTLPNPLLPHPLHENEVLRHQLFAAPYRDLPASLSAPMSAAHQLQAMHAQSAELQRLALEQQQWLHAHHPLHSVPLPAQEDYYSHLKKESDKPL

SEQ ID NO: 22406 - protein, 775 aa, Artificial Sequence
  derived and/or modified sequence
GFLIHPLVVALQQPPLPVLPPLPLPPPPPPPPYGRLLANSNAHPGPFPPSTGAQSTAHPPVSTHHHHHQQQQQQQQQQQQQQQQQQQHHGNSGPPPPGAFPHPLEGGSSHHAHPYAMSPSLGSLRPYPPGPAHLPPPHSQVSYSQAGPNGPPVSSSSNSSSSTSQGSYPCSHPSPSQGPQGAPYPFPPVPTVTTSSATLSTVIATVASSPAGYKTASPPGPPPYGKRAPSPGAYKTATPPGYKPGSPPSFRTGTPPGYRGTSPPAGPGTFKPGSPTVGPGPLPPAGPSGLPSLPPPPAAPASGPPLSATQIKQEPAEEYETPESPVPPARSPSPPPKVVDVPSHASQSARFNKHLDRGFNSCARSDLYFVPLEGSKLAKKRADLVEKVRREAEQRAREEKEREREREREKEREREKERELERSVKLAQEGRAPVECPSLGPVPHRPPFEPGSAVATVPPYLGPDTPALRTLSEYARPHVMSPGNRNHPFYVPLGAVDPGLLGYNVPALYSSDPAAREREREARERDLRDRLKPGFEVKPSELEPLHGVPGPGLDPFPRHGGLALQPGPPGLHPFPFHPSLGPLERERLALAAGPALRPDMSYAERLAAERQHAERVAALGNDPLARLQMLNVTPHHHQHSHIHSHLHLHQQDAIHAASASVHPLIDPLASGSHLTRIPYPAGTLPNPLLPHPLHENEVLRHQLFAAPYRDLPASLSAPMSAAHQLQAMHAQSAELQRLALEQQQWLHAHHPLHSVPLPAQEDYYSHLKKESDKPL

SEQ ID NO: 22407 - DNA, 4360 bp, Artificial Sequence
  derived and/or modified sequence
cgccccccagaggcgccggagcccggaatcccgctcggagccagccagccgtcccgagctaccagcaggtttcattgaaaacagatcctgcaaaagttccaggtgcccacactggaaacttggagatcctgcttcccagaccacagctgtggggaacttggggtggagcagagaagtttctgtattcagctgcccaggcagaggagaatggggtctccacagcctgaagaatgaagacacgacagaataaagactcgatgtcaatgaggagtggacggaagaaagaggcccctgggccccgggaagaactgagatcgaggggccgggcctcccctggaggggtcagcacgtccagcagtgatggcaaagctgagaagtccaggcagacagccaagaaggcccgagtagaggaagcctccaccccaaaggtcaacaagcagggtcggagtgaggagatctcagagagtgaaagtgaggagaccaatgcaccaaaaaagaccaaaactgagcaggaactccctcggccacagtctccctccgatctggatagcttggacgggcggagccttaatgatgatggcagcagcgaccctagggatatcgaccaggacaaccgaagcacgtcccccagtatctacagccctggaagtgtggagaatgactctgactcatcttctggcctgtcccagggcccagcccgcccctaccacccacctccactctttcctccttcccctcaaccgccagacagcacccctcgacagccagaggctagctttgaaccccatccttctgtgacacccactggatatcatgctcccatggagccccccacatctcgaatgttccaggctcctcctggggcccctccccctcacccacagctctatcctgggggcactggtggagttttgtctggacccccaatgggtcccaaggggggaggggctgcctcatcagtggggggccctaatgggggtaagcagcaccccccacccactactcccatttcagtatcaagctctggggctagtggtgctcccccaacaaagccgcctaccactccagtgggtggtgggaacctaccttctgctccaccaccagccaacttcccccatgtgacaccgaacctgcctcccccacctgccctgagacccctcaacaatgcatcagcctctccccctggcctgggggcccaaccactacctggtcatctgccctctccccacgccatgggacagggtatgggtggacttcctcctggcccagagaagggcccaactctggctccttcaccccactctctgcctcctgcttcctcttctgctccagcgccccccatgaggtttccttattcatcctctagtagtagctctgcagcagcctcctcttccagttcttcctcctcttcctctgcctcccccttcccagcttcccaggcattgcccagctacccccactctttccctcccccaacaagcctctctgtctccaatcagccccccaagtatactcagccttctctcccatcccaggctgtgtggagccagggtcccccaccacctcctccctatggccgcctcttagccaacagcaatgcccatccaggccccttccctccctctactggggcccagtccaccgcccacccaccagtctcaacacatcaccatcaccaccagcaacagcaacagcagcagcagcagcagcagcagcagcagcagcagcagcagcagcatcacggaaactctgggccccctcctcctggagcatttccccacccactggagggcggtagctcccaccacgcacacccttacgccatgtctccctccctggggtctctgaggccctacccaccagggccagcacacctgcccccacctcacagccaggtgtcctacagccaagcaggccccaatggccctccagtctcttcctcttccaactcttcctcttccacttctcaagggtcctacccatgttcacacccctccccttcccagggccctcaaggggcgccctaccctttcccaccggtgcctacggtcaccacctcttcggctaccctttccacggtcattgccaccgtggcttcctcgccagcaggctacaaaacggcctccccacctgggcccccaccgtacggaaagagagccccgtccccgggggcctacaagacagccaccccacccggatacaaacccgggtcgcctccctccttccgaacggggaccccaccgggctatcgaggaacctcgccacctgcaggcccagggaccttcaagccgggctcgcccaccgtgggacctgggcccctgccacctgcggggccctcaggcctgccatcgctgccaccaccacctgcggcccctgcctcagggccgcccctgagcgccacgcagatcaaacaggagccggctgaggagtatgagacccccgagagcccggtgcccccagcccgcagcccctcgccccctcccaaggtggtagatgtacccagccatgccagtcagtctgccaggttcaacaaacacctggatcgcggcttcaactcgtgcgcgcgcagcgacctgtacttcgtgccactggagggctccaagctggccaagaagcgggccgacctggtggagaaggtgcggcgcgaggccgagcagcgcgcgcgcgaagaaaaggagcgcgagcgcgagcgggaacgcgagaaagagcgcgagcgcgagaaggagcgcgagcttgaacgcagcgtgaagttggctcaggagggccgtgctccggtggaatgcccatctctgggcccagtgccccatcgccctccatttgaaccgggcagtgcggtggctacagtgcccccctacctgggtcctgacactccagccttgcgcactctcagtgaatatgcccggcctcatgtcatgtctcctggcaatcgcaaccatccattctacgtgcccctgggggcagtggacccggggctcctgggttacaatgtcccggccctgtacagcagtgatccagctgcccgggagagggaacgggaagcccgtgaacgagacctccgtgaccgcctcaagcctggctttgaggtgaagcctagtgagctggaacccctacatggggtccctgggccgggcttggatccctttccccgacatgggggcctggctctgcagcctggcccacctggcctgcaccctttcccctttcatccgagcctggggcccctggagcgagaacgtctagcgctggcagctgggccagccctgcggcctgacatgtcctatgctgagcggctggcagctgagaggcagcacgcagaaagggtggcggccctgggcaatgacccactggcccggctgcagatgctcaatgtgactccccatcaccaccagcactcccacatccactcgcacctgcacctgcaccagcaagatgctatccatgcagcctctgcctcggtgcaccctctcattgaccccctggcctcagggtctcaccttacccggatcccctacccagctggaactctccctaaccccctgcttcctcaccctctgcacgagaacgaagttcttcgtcaccagctctttgctgccccttaccgggacctgccggcctccctttctgccccgatgtcagcagctcatcagctgcaggccatgcacgcacagtcagctgagctgcagcgcttggcgctggaacagcagcagtggctgcatgcccatcacccgctgcacagtgtgccgctgcctgcccaggaggactactacagtcacctgaagaaggaaagcgacaagccactgtagaacctgcgatcaagagagcaccatggctcctacattggaccttggagcacccccaccctccccccaccgtgcccttggcctgccacccagagccaagagggtgctgctcagttgcagggcctccgcagctggacagagagtgggggagggagggacagacagaaggccaaggcccgatgtggtgtgcagaggtggggaggtggcgaggatggggacagaaagcgcacagaatcttggaccaggtctctcttccttgtcccccctgcttttctcctcccccatgcccaacccctgtggccgccgcccctcccctgccccgttggtgtgattatttcatctgttagatgtggctgttttgcgtagcatcgtgtgccacccctgcccctccccgatccctgtgtgcgcgccccctctgcaatgtatgccccttgccccttccccacactaataatttatatatataaatatctatatgacgctcttaaaaaaacatcccaaccaaaaccaaccaaacaaaaacatcctcacaactccccaggaaaaaaaaaaaaaaaaaa

SEQ ID NO: 22408 - DNA, 3573 bp, Artificial Sequence
  derived and/or modified sequence
atgaagaccagacagaacaaggacagcatgagcatgagaagcggcagaaagaaggaggcccccggccccagagaggagctgagaagcagaggcagagccagccccggcggcgtgagcaccagcagcagcgacggcaaggccgagaagagcagacagaccgccaagaaggccagagtggaggaggccagcacccccaaggtgaacaagcagggcagaagcgaggagatcagcgagagcgagagcgaggagaccaacgcccccaagaagaccaagaccgagcaggagctgcccagaccccagagccccagcgacctggacagcctggacggcagaagcctgaacgacgacggcagcagcgaccccagagacatcgaccaggacaacagaagcaccagccccagcatctacagccccggcagcgtggagaacgacagcgacagcagcagcggcctgagccagggccccgccagaccctaccaccccccccccctgttcccccccagcccccagccccccgacagcacccccagacagcccgaggccagcttcgagccccaccccagcgtgacccccaccggctaccacgcccccatggagccccccaccagcagaatgttccaggccccccccggcgccccccccccccacccccagctgtaccccggcggcaccggcggcgtgctgagcggcccccccatgggccccaagggcggcggcgccgccagcagcgtgggcggccccaacggcggcaagcagcaccccccccccaccacccccatcagcgtgagcagcagcggcgccagcggcgccccccccaccaagccccccaccacccccgtgggcggcggcaacctgcccagcgcccccccccccgccaacttcccccacgtgacccccaacctgccccccccccccgccctgagacccctgaacaacgccagcgccagcccccccggcctgggcgcccagcccctgcccggccacctgcccagcccccacgccatgggccagggcatgggcggcctgccccccggccccgagaagggccccaccctggcccccagcccccacagcctgccccccgccagcagcagcgcccccgccccccccatgagattcccctacagcagcagcagcagcagcagcgccgccgccagcagcagcagcagcagcagcagcagcagcgccagccccttccccgccagccaggccctgcccagctacccccacagcttccccccccccaccagcctgagcgtgagcaaccagccccccaagtacacccagcccagcctgcccagccaggccgtgtggagccagggccccccccccccccccccctacggcagactgctggccaacagcaacgcccaccccggccccttcccccccagcaccggcgcccagagcaccgcccacccccccgtgagcacccaccaccaccaccaccagcagcagcagcagcagcagcagcagcagcagcagcagcagcagcagcagcagcagcaccacggcaacagcggcccccccccccccggcgccttcccccaccccctggagggcggcagcagccaccacgcccacccctacgccatgagccccagcctgggcagcctgagaccctacccccccggccccgcccacctgccccccccccacagccaggtgagctacagccaggccggccccaacggcccccccgtgagcagcagcagcaacagcagcagcagcaccagccagggcagctacccctgcagccaccccagccccagccagggcccccagggcgccccctaccccttcccccccgtgcccaccgtgaccaccagcagcgccaccctgagcaccgtgatcgccaccgtggccagcagccccgccggctacaagaccgccagcccccccggcccccccccctacggcaagagagcccccagccccggcgcctacaagaccgccaccccccccggctacaagcccggcagcccccccagcttcagaaccggcaccccccccggctacagaggcaccagcccccccgccggccccggcaccttcaagcccggcagccccaccgtgggccccggccccctgccccccgccggccccagcggcctgcccagcctgccccccccccccgccgcccccgccagcggcccccccctgagcgccacccagatcaagcaggagcccgccgaggagtacgagacccccgagagccccgtgccccccgccagaagccccagccccccccccaaggtggtggacgtgcccagccacgccagccagagcgccagattcaacaagcacctggacagaggcttcaacagctgcgccagaagcgacctgtacttcgtgcccctggagggcagcaagctggccaagaagagagccgacctggtggagaaggtgagaagagaggccgagcagagagccagagaggagaaggagagagagagagagagagagagagagaaggagagagagagagagaaggagagagagctggagagaagcgtgaagctggcccaggagggcagagcccccgtggagtgccccagcctgggccccgtgccccacagaccccccttcgagcccggcagcgccgtggccaccgtgcccccctacctgggccccgacacccccgccctgagaaccctgagcgagtacgccagaccccacgtgatgagccccggcaacagaaaccaccccttctacgtgcccctgggcgccgtggaccccggcctgctgggctacaacgtgcccgccctgtacagcagcgaccccgccgccagagagagagagagagaggccagagagagagacctgagagacagactgaagcccggcttcgaggtgaagcccagcgagctggagcccctgcacggcgtgcccggccccggcctggaccccttccccagacacggcggcctggccctgcagcccggcccccccggcctgcaccccttccccttccaccccagcctgggccccctggagagagagagactggccctggccgccggccccgccctgagacccgacatgagctacgccgagagactggccgccgagagacagcacgccgagagagtggccgccctgggcaacgaccccctggccagactgcagatgctgaacgtgaccccccaccaccaccagcacagccacatccacagccacctgcacctgcaccagcaggacgccatccacgccgccagcgccagcgtgcaccccctgatcgaccccctggccagcggcagccacctgaccagaatcccctaccccgccggcaccctgcccaaccccctgctgccccaccccctgcacgagaacgaggtgctgagacaccagctgttcgccgccccctacagagacctgcccgccagcctgagcgcccccatgagcgccgcccaccagctgcaggccatgcacgcccagagcgccgagctgcagagactggccctggagcagcagcagtggctgcacgcccaccaccccctgcacagcgtgcccctgcccgcccaggaggactactacagccacctgaagaaggagagcgacaagcccctgtag

SEQ ID NO: 22409 - DNA, 2328 bp, Artificial Sequence
  derived and/or modified sequence
ggcttcctgatccaccccctggtggtggccctgcagcagccccccctgcccgtgctgccccccctgcccctgcccccccccccccccccccccccctacggcagactgctggccaacagcaacgcccaccccggccccttcccccccagcaccggcgcccagagcaccgcccacccccccgtgagcacccaccaccaccaccaccagcagcagcagcagcagcagcagcagcagcagcagcagcagcagcagcagcagcagcaccacggcaacagcggcccccccccccccggcgccttcccccaccccctggagggcggcagcagccaccacgcccacccctacgccatgagccccagcctgggcagcctgagaccctacccccccggccccgcccacctgccccccccccacagccaggtgagctacagccaggccggccccaacggcccccccgtgagcagcagcagcaacagcagcagcagcaccagccagggcagctacccctgcagccaccccagccccagccagggcccccagggcgccccctaccccttcccccccgtgcccaccgtgaccaccagcagcgccaccctgagcaccgtgatcgccaccgtggccagcagccccgccggctacaagaccgccagcccccccggcccccccccctacggcaagagagcccccagccccggcgcctacaagaccgccaccccccccggctacaagcccggcagcccccccagcttcagaaccggcaccccccccggctacagaggcaccagcccccccgccggccccggcaccttcaagcccggcagccccaccgtgggccccggccccctgccccccgccggccccagcggcctgcccagcctgccccccccccccgccgcccccgccagcggcccccccctgagcgccacccagatcaagcaggagcccgccgaggagtacgagacccccgagagccccgtgccccccgccagaagccccagccccccccccaaggtggtggacgtgcccagccacgccagccagagcgccagattcaacaagcacctggacagaggcttcaacagctgcgccagaagcgacctgtacttcgtgcccctggagggcagcaagctggccaagaagagagccgacctggtggagaaggtgagaagagaggccgagcagagagccagagaggagaaggagagagagagagagagagagagagagaaggagagagagagagagaaggagagagagctggagagaagcgtgaagctggcccaggagggcagagcccccgtggagtgccccagcctgggccccgtgccccacagaccccccttcgagcccggcagcgccgtggccaccgtgcccccctacctgggccccgacacccccgccctgagaaccctgagcgagtacgccagaccccacgtgatgagccccggcaacagaaaccaccccttctacgtgcccctgggcgccgtggaccccggcctgctgggctacaacgtgcccgccctgtacagcagcgaccccgccgccagagagagagagagagaggccagagagagagacctgagagacagactgaagcccggcttcgaggtgaagcccagcgagctggagcccctgcacggcgtgcccggccccggcctggaccccttccccagacacggcggcctggccctgcagcccggcccccccggcctgcaccccttccccttccaccccagcctgggccccctggagagagagagactggccctggccgccggccccgccctgagacccgacatgagctacgccgagagactggccgccgagagacagcacgccgagagagtggccgccctgggcaacgaccccctggccagactgcagatgctgaacgtgaccccccaccaccaccagcacagccacatccacagccacctgcacctgcaccagcaggacgccatccacgccgccagcgccagcgtgcaccccctgatcgaccccctggccagcggcagccacctgaccagaatcccctaccccgccggcaccctgcccaaccccctgctgccccaccccctgcacgagaacgaggtgctgagacaccagctgttcgccgccccctacagagacctgcccgccagcctgagcgcccccatgagcgccgcccaccagctgcaggccatgcacgcccagagcgccgagctgcagagactggccctggagcagcagcagtggctgcacgcccaccaccccctgcacagcgtgcccctgcccgcccaggaggactactacagccacctgaagaaggagagcgacaagcccctgtag

SEQ ID NO: 22410 - DNA, 3573 bp, Artificial Sequence
  derived and/or modified sequence
atgaagaccagacagaataaggatagcatgagcatgaggagcggcaggaagaaagaggctcccggaccccgtgaggagctgcgcagtcgtggcagagcgtctcccggaggcgtaagcacctctagttcagatggcaaggcggagaaaagccgtcagaccgccaaaaaggcgagggtggaagaagcctccactcccaaggttaataaacagggacgaagtgaagaaatctcagaaagtgagagcgaggaaaccaatgcccccaaaaaaactaagacagaacaggagctcccgcgccctcagtcccccagcgacctcgactcattggacggccggtcattgaatgatgatggctcttccgacccaagagacattgatcaggacaatcgctcaacttcaccatctatctactccccggggtcagtggagaatgacagtgatagtagctcaggcctgagccagggaccggccagaccataccatccgccgccactctttcctccctccccacaacctcctgatagtacaccccgacaacccgaagccagtttcgagcctcaccctagcgtgacaccgactggctaccacgcccccatggaacctccaactagccgaatgttccaggcgccgcccggagcgcccccgccgcatccacagctgtaccctggcgggactggcggggtgctgtctgggcctcccatggggcctaaggggggcggagccgcctccagtgtcggtgggccaaacggcggcaaacaacaccctccacccaccacccccatcagcgtgtcttcttccggcgcttcaggtgccccccctacaaagccacccacaacccccgtcggcggagggaacctgccaagcgctccacctccagccaacttcccccatgttaccccaaatctccctccaccaccagccttgaggcccctcaataatgcatcggcctcccctcctggcttgggagctcagcctttgcccggtcacttgccctcgccacatgccatgggacagggaatgggaggtctcccacctggaccggaaaagggtccaacactcgcaccatcgccccattcacttcctccagcgtcatcttcagccccagcgccccccatgcgcttcccttactcatccagctcttccagctctgctgccgccagctcctcaagcagctcttcttcatccagtgcgagtcccttccccgcatcccaggctttgccgagctaccctcacagctttccccctcctacttccctttccgtttcaaaccagccaccaaaatatacccagccctcgctgcctagccaggctgtctggagccaaggcccacccccaccacccccatacgggaggctgctcgcgaacagcaatgcccatcctggacctttccccccctccacaggagctcagtctaccgcccatcctccagtgagcacacatcaccaccaccatcagcagcagcagcagcagcaacagcagcaacagcaacaacagcagcagcagcaacagcatcacgggaacagtggacctccaccccccggagccttccctcaccccttggaaggtggcagctcccatcatgcccacccatacgcaatgtccccatcactcgggtcacttcgaccttatccacccgggccagcccatctccctcctcctcattcccaggtctcctacagtcaagcgggaccaaacggcccccctgtgtcaagttctagtaactcttcctctagcacctcccagggatcctacccatgctcccatccgagtccctcccagggcccccagggagccccataccccttcccccccgtgcccactgttaccacttcatcagcaaccctcagtactgtgatcgcgacggtagcgtcatctccagccggctataaaacggcttccccccccgggcctccgccatatggcaagagggctccatccccgggagcctataagacagctacacccccgggatataagcctggatccccaccgtcattccggaccgggactccgccgggatacaggggaacctctccgcctgctggaccagggacattcaagcctgggtctccgaccgtgggtccaggccccttaccaccagcgggaccttccgggctcccatcactgcctcctcctccagcggccccggcatccgggccaccgctgtccgctacccaaatcaagcaggaaccggctgaagaatacgagacccccgagagccctgttcccccagctcgcagtccttcccccccacccaaggtcgtggacgtgcccagccacgcctcccaatccgcaagatttaacaagcacttagacaggggctttaacagctgcgcccgcagcgatctgtatttcgtacctctggagggaagcaaactcgccaagaaacgggctgatttggttgagaaagtcagacgggaagcagaacagagagcacgggaagagaaggagagggaacgtgagagagagcgcgaaaaggagagggagcgggaaaaggaacgcgaacttgagcggagcgtgaagctggctcaggaaggccgcgcacctgtggaatgcccctccctgggtcctgtaccgcatcgcccccccttcgagccaggcagtgccgtggccacagtgcctccctacctagggccagacaccccggccctgagaaccctctcagagtacgctcgtcctcacgtgatgagtcccggtaaccggaaccatccgttttatgttcctctaggcgccgtcgatccgggcctgctaggctacaacgtgcctgcactatactcttccgacccagctgccagggagagagagcgcgaagctagggaaagagatctgagagacaggctgaagcctggtttcgaggtaaaacccagtgagctggagcccctgcatggtgtgcctggtcctggccttgacccgttcccaaggcacggtgggttggccctgcagcccggtcctccgggcctccaccccttccccttccacccctctctcggaccactggaaagggagagacttgccctggctgctggcccagcactcaggcctgacatgtcatacgctgaaagactggctgcagagagacaacatgctgaaagggtcgcagcgctaggcaatgacccactagcacgcctgcagatgctgaacgtgacccctcatcaccatcagcatagccatatccacagtcacctccacctgcaccagcaggatgccatccatgccgcatctgccagcgtccatccacttatagatcctttagccagtggctctcaccttacacgcatcccataccctgctgggacgctgcctaatcctcttcttccccacccgctccacgaaaacgaggtcctgcggcatcagctgttcgcagcaccctacagggatctcccagcgagcctgtctgccccaatgagtgcggcgcaccaactacaagccatgcatgcgcagtcagcggagctgcagagactcgcactggagcagcagcagtggcttcatgcccaccatcccctgcatagcgtccctctacctgcccaggaagattactactcccatctgaaaaaagaatcagataagcctctttag

SEQ ID NO: 22411 - DNA, 3573 bp, Artificial Sequence
  derived and/or modified sequence
atgaaaactaggcagaacaaggacagcatgtcaatgaggagtggccggaaaaaggaggcccctggacctcgagaggaactacgcagcagaggacgcgcttcaccagggggagtgtctacttcatcaagcgacggtaaggcagagaaaagcagacagaccgcaaagaaggccagagtagaggaggctagtacacccaaagtgaataaacagggccgcagcgaggagatttcagagtcggaatccgaagaaaccaacgcccccaaaaaaaccaaaacagaacaggagttaccgagaccgcagagcccctcagacttagattctctcgacgggcgtagcctgaacgacgatggcagctccgaccccagggatatagaccaagacaaccggtctacgagccctagtatatactctccaggaagcgtggaaaacgattcagatagcagttctgggctgagtcaggggccggcccgaccgtatcatcctcctccactttttccccctagcccccagccacctgactccaccccaaggcagcctgaggccagttttgaaccacaccccagtgtgactccgacaggctaccatgcccctatggagccaccaacgtcacggatgtttcaggccccaccaggcgccccgcccccacatccccagttgtatccgggtggcaccggcggggtgctgagcggaccaccgatggggcccaaaggagggggggccgccagctctgtcggcggtccgaatggcggcaagcagcaccctcctccgaccactcccatctcagtgtcctcatccggtgcaagcggcgcgcctccaaccaagcctcccactacgccggtgggaggcgggaatcttcctagcgcgccaccgcccgcaaacttccctcacgtcactcctaacctaccacctccgcctgctctgagacctctcaataatgcttcagcatcccctcctggcctgggagcccagccactgcctggtcacctgccaagtccccacgctatggggcaaggcatggggggactccctcccggcccagagaagggtcctacactggccccatcaccccacagtttgccaccagccagttcatcggctcccgcgcctccaatgcgcttcccgtatagttccagttctagcagctccgctgctgcctcatctagctcctcctcatcctcatctagcgcctctcctttcccagccagccaggccctccctagctaccctcacagctttccaccccctacttccctgagcgtctccaaccaaccgccaaagtacacccagccctcacttccttcccaggccgtgtggtcacagggcccaccaccaccaccaccatacggccgcctgctagccaactcgaatgcccacccaggacccttccctcctagcactggcgcccaaagcacagcccaccccccagtgtccacgcaccaccaccaccatcagcagcagcagcagcagcagcagcagcagcagcaacaacaacagcagcagcaacaacatcatgggaactctggacccccgcctccaggcgcatttccacaccctctggagggaggctcgagccaccacgcccacccctatgctatgtcaccttctcttggatccctcaggccttatcccccggggcccgcacacctgccccctcctcactcacaagtgtcctatagccaggccggccctaacggaccgccggttagcagctcctcaaacagtagctcctctacaagccaaggatcttacccatgtagtcatccatctcccagccaggggccccagggcgcaccctatccattcccgcccgttcccaccgtgaccacatcgtctgctactctttctacagtgatagctacagtagcttcgagcccagcagggtataagacggcctcaccaccaggccctcctccctatggcaagcgggctccaagtcccggggcgtacaagacggctacacctccaggatataagcctgggtctccacctagcttccgaaccggtaccccacctggttacagagggacttcgcctcccgccggcccaggcaccttcaagcctgggtcccctacagtgggccccgggccactgccccctgcagggcccagtgggcttccaagtttacctcccccccctgctgcccccgctagcgggcccccccttagtgctacccagattaagcaggagcccgctgaggagtacgaaacaccagaatccccagtcccccccgcccggtcgccgtctcccccccctaaggtagtagacgtgccatcgcacgcgagccagtctgctcgatttaataaacatctggatcgcgggtttaactcatgcgctagatctgacctgtattttgtcccgcttgaaggctcaaaactggccaaaaagcgggcagacttggtggaaaaggtgcgccgcgaagcagagcagcgtgccagagaggagaaggagagggagcgagaacgagaacgcgagaaggagcgtgagcgggagaaagagcgcgaactcgagaggagcgttaagctggcccaggaggggcgggctcctgtggaatgtccaagcctcgggcctgttcctcacaggccaccctttgagcccggaagtgcagtggctaccgtacccccctacctcggccccgacacacctgccctccggaccctgtcagagtacgctaggcctcacgtgatgtcaccaggcaaccgcaaccatcctttctatgttcctctgggagccgtcgacccgggcctattgggatacaacgtgcctgccctctacagttcagatcccgcagctcgagaaagagaacgggaggcacgcgaacgggaccttagggatcggttaaagcccggtttcgaggttaaaccgtcagagcttgagcctctgcatggcgtgcccggccctggattagacccttttcctcgtcacggcggcctggcactgcagcctggccctcccggactccacccattcccttttcatccttcactgggaccactggagcgcgagcgactggctctggcagccggtccggccctccggccagacatgagttacgccgagagacttgccgcagagcggcagcatgccgagcgggtggccgcactgggaaacgacccattagctcgcctccagatgttaaacgtgacaccgcatcatcaccagcacagccatatacacagccatttacatcttcatcaacaggacgccatacatgcagcttctgcatcagtgcacccattgattgatcctttagctagtgggtctcacctcactaggatcccatacccagccggtacactcccaaacccactgctgccacacccgctgcacgagaacgaggtgctgaggcaccagctgttcgccgccccttatcgggacttacccgcttcactgagcgcccccatgtctgccgcccaccaactccaggccatgcatgcgcagtccgccgagcttcagagattagccctcgagcagcagcaatggctgcacgcacatcatccactgcacagcgtgcccctccccgcacaggaggattattattcgcatctcaagaaggaatcggataagcccttatag

SEQ ID NO: 22412 - DNA, 2328 bp, Artificial Sequence
  derived and/or modified sequence
ggtttccttattcaccccctcgtggtggcactacaacagcccccactgccagtcctgccacccttgcccctgccccccccccctccccctccaccctatggcagactcctggctaattctaacgcccaccccggaccattcccccctagcactggcgcccagagtaccgcccacccgccagttagcacccatcaccaccatcaccagcaacagcagcagcaacagcagcaacagcagcagcagcaacagcagcagcagcagcatcatggaaacagcgggcctccacctcccggcgctttccctcaccctctcgaggggggaagttcccatcacgcccatccctatgccatgagtccttctctgggctcactgaggccttatcccccggggcctgcccacctgccccctccgcactctcaagtatcctactcccaagcgggccctaacggaccacccgttagttcttcctctaactcctccagctctacttctcagggctcttatccatgctctcacccttctcccagccagggacctcaaggggccccctatccgttccccccagtccccactgtaacaacctctagcgcgaccttgagcaccgttatcgcaacagtggcaagcagccccgcggggtacaagaccgcatctcccccagggcccccgccttatggtaaacgagccccaagccctggtgcatataaaacagccaccccacctggatacaagcccgggtctcctccctctttccggaccggaacgcctcctgggtatcggggtacttccccgccggcaggaccggggacattcaagccagggtcacctactgtggggcctggacctctaccccccgcgggaccctccggtttaccctctctgccaccgccaccagctgcccccgcctctggaccccctctatcggccacacagattaagcaggaacccgccgaggaatacgaaacgccagaatcacctgtcccacccgcgaggtcgccctccccacccccgaaggtcgttgacgttccgtcacacgcctcccagtccgctagatttaacaagcatctcgatagagggtttaacagctgcgcacggtcagacctttatttcgttcctcttgagggcagcaaactcgcgaaaaagagggccgacttggttgagaaggttcggcgcgaggctgagcaacgtgccagggaggagaaagaacgggagcgagagagggagcgagagaaggagcgcgagagagagaaagaacgcgaattggagcggtctgtaaaattagcacaggagggcagggctcccgttgagtgtccttctttaggacccgtgcctcatcggcccccttttgaacccggaagcgcggttgccacagttccaccatatctgggccccgacacaccggcactcagaacacttagtgaatatgcaagaccacatgttatgtccccgggcaaccgaaaccatcccttttatgtgccactcggagccgtagaccctggtttgttgggctacaacgtaccagctctgtattcttcagaccctgctgcgcgggaaagggaaagggaggccagagaaagggatttgcgcgataggctgaaacctgggttcgaagtgaagcctagcgagctggagccactgcacggcgtaccaggaccaggtcttgatccatttcctcggcatggcgggttagcccttcagcccgggccaccaggactgcacccatttccatttcacccttccctgggtcctctagaacgggaacgcctagccttagcagcagggccagccctacggccagatatgagctatgctgagaggctggcggcagagaggcagcatgcagagcgcgtcgctgctctgggcaatgaccctctcgctaggctgcagatgctgaacgttaccccccaccatcatcagcacagccacatccactcacacttgcacttacatcaacaggacgcaattcacgctgcatcagccagcgtgcatccattgatagatcctcttgccagcggctcacatctaaccaggatcccttacccggcgggtaccctacctaaccctctcctacctcaccctttacatgagaatgaggttttgaggcatcagctgtttgccgcaccctacagagacctacctgcctcgctttctgccccaatgtcggcggcacatcagctccaggccatgcacgctcaatcagccgagctccagcggttagctctggagcagcagcagtggctgcacgcccaccatcccctacacagcgtgcccctgccggcccaggaggattactatagtcacctgaagaaagaatccgataagccactttag

SEQ ID NO: 22413 - DNA, 618 bp, Artificial Sequence
  derived and/or modified sequence
atgaactcttggccctggttgtttgattccaacttctgctctgccgttgagattatcttggagccagaaaagaagatcccaaacagcacccttcatttctgcgaagaactggtgcccaatagtggatctctctttggaaagaacatatgttgcgggaaacagtgctgtatctgcgacttgaagtccctgttagaactggaccgtgacggcgaatttcagcccgaaaggccgaaaaatagttgtcccgctctgctcaacgccatcagtcgtaggacaagcatattcccccctcccacctctcttttactgcctgtcactttggccagttctcagtgctgttgggccacgtccggctctgccggtggccgggggattgcaccaactcctggcgggcagccatgtggctcatctagaaagtctggcagttcatgcgcttggcgctggtctcctagcggcgggagcccatggccctgtagtagggctggaggcgcctggcgtcgacttggtaccagtctcgacacacatcctgctggatctagagcctgtcgcgccgttcaccagctggctggagagtccccaactccacgtcaggcaaggcggcccccattcccgacgtag

SEQ ID NO: 22414 - DNA, 3573 bp, Artificial Sequence
  derived and/or modified sequence
atgaagacccggcagaacaaggacagcatgtccatgaggagcggcaggaagaaggaggcccctggcccccgggaggagctgcggagccggggccgggccagccctggaggagtgtccaccagcagcagtgatggcaaggccgagaagagccggcagacagccaagaaggcccgggtggaggaggccagcacccccaaggtgaacaagcagggccgctctgaggagatcagcgagagcgagagcgaggagaccaatgcccccaagaagaccaagacagagcaggagctgccccggccccagagccccagcgacctggacagcctggatggccgcagcctgaatgatgatggcagcagtgacccccgggacatcgaccaggacaacagaagcaccagccccagcatctacagccctggctctgtggagaatgacagcgacagcagcagcggcctgagccagggccctgcccggccctaccaccccccacccctcttcccccccagcccccagcccccagacagcaccccccggcagcctgaggccagctttgagccccaccccagcgtgacccccaccggctaccacgcccccatggagccccccaccagcaggatgttccaggcccctcctggggcccccccaccccacccccagctgtacccaggcggcaccggcggcgtgctgagcggcccccccatgggccccaagggcggcggggccgccagctctgtgggcggccccaacggcggcaagcagcaccccccacccaccacccccatctctgtgagcagcagcggggccagcggggccccacccaccaagccacccaccacccctgtgggcggcggcaacctgcccagcgcccctcctccagccaacttcccccacgtgacccccaacctgcccccacctccagccctgcggcccctgaacaatgccagcgccagccccccaggcctgggcgcccagcccctgcccggccacctgcccagcccccacgccatgggccagggcatgggcggcctgcccccaggccctgagaagggccccaccctggcccccagcccccacagcctgcccccagccagcagcagcgccccagccccacccatgaggttcccctacagcagcagcagcagcagcagcgctgctgccagcagcagcagcagcagcagcagcagcagcgccagccccttccctgccagccaggccctgcccagctacccccacagcttccccccacccaccagcctgtctgtgagcaaccagccccccaagtacacccagcccagcctgcccagccaggccgtgtggagccagggccccccacctcctccaccctacggccgcctgctggccaacagcaatgcccaccctggccccttcccccccagcactggagcccagagcacagcccacccccctgtgtccacccaccaccaccaccaccagcagcagcagcagcagcagcagcagcagcagcagcagcagcagcagcagcagcagcaccacggcaacagcggccccccacctcctggggccttcccccaccccctggagggcggcagcagccaccacgcccacccctatgccatgagccccagcctgggcagcctgcggccctacccacctggccctgcccacctgcccccaccccacagccaggtgtcctacagccaggccggccccaacggcccccctgtgagcagcagcagcaacagcagcagcagcaccagccagggcagctacccctgcagccaccccagccccagccagggcccccagggcgccccctaccccttcccccctgtgcccaccgtgaccaccagcagcgccaccctgagcaccgtcatcgccaccgtggccagcagccctgctggctacaagacagccagccccccaggccccccaccctacggcaagagggcccccagccctggggcctacaagacagccaccccacctggctacaagccaggcagcccccccagcttcagaacaggcaccccacctggctaccggggcaccagccccccagctggccctggcaccttcaagccaggcagccccaccgtgggccctggccccctgcccccagctggccccagcggcctgcccagcctgcccccacctcctgctgccccagccagcggcccccccctgagcgccacccagatcaagcaggagcctgctgaggagtatgagaccccagagagccctgtgcccccagcccggagccccagccccccacccaaggtggtggatgtgcccagccacgccagccagagcgcccgcttcaacaagcacctggaccggggcttcaacagctgtgcccggagtgacctgtactttgtgcccctggagggcagcaagctggccaagaagagagctgacctggtggagaaggtgcggcgggaggccgagcagagggcccgggaggagaaggagcgggagcgggagcgggagcgggagaaggagcgggagcgggagaaggagcgggagctggagaggtctgtgaagctggcccaggagggccgggcccctgtggagtgccccagcctgggccctgtgccccaccggcccccatttgagcccggcagcgctgtggccaccgtgcccccctacctgggccctgacaccccagccctgcggaccctgtctgaatatgcccggccccacgtgatgagccctggcaacagaaaccaccccttctacgtgcccctgggcgctgtggaccccggcctgctgggctacaacgtgcctgccctgtacagcagtgaccctgctgcccgggagcgggagcgggaggcccgggagcgggacctgcgggaccggctgaagccaggctttgaggtgaagcccagcgagctggagcccctgcatggagtgcccggccctggcctggaccccttccccaggcatggaggcctggccctgcagcccggccccccaggcctgcaccccttccccttccaccccagcctgggccccctggagcgggagcggctggccctggccgccggccctgccctgcggccagacatgtcctatgcagagcggctggccgctgagcggcagcacgccgagcgggtggccgccctgggcaatgaccccctggcccggctgcagatgctgaatgtgaccccccaccaccaccagcacagccacatccacagccacctgcacctgcaccagcaggatgccatccatgctgccagcgcctctgtgcaccccctgattgaccccctggccagcggcagccacctgacccgcatcccctacccagctggcaccctgcccaaccccctgctgccccaccccctgcatgaaaatgaggtgctgcggcaccagctgtttgctgccccctacagagacctgcctgccagcctgagcgcccccatgtctgctgcccaccagctgcaggccatgcacgcccagagcgctgagctgcagaggctggccctggagcagcagcagtggctgcacgcccaccaccccctgcacagcgtgcccctgcctgcccaggaggactactacagccacctgaagaaggagagtgacaagcccctgtag

SEQ ID NO: 22415 - DNA, 2328 bp, Artificial Sequence
  derived and/or modified sequence
ggcttcctgatccaccccctggtggtggccctgcagcagccccccctgcctgtgctgccccccctgcccctgcccccacctcctcctcctccaccctacggccgcctgctggccaacagcaatgcccaccctggccccttcccccccagcactggagcccagagcacagcccacccccctgtgtccacccaccaccaccaccaccagcagcagcagcagcagcagcagcagcagcagcagcagcagcagcagcagcagcagcaccacggcaacagcggccccccacctcctggggccttcccccaccccctggagggcggcagcagccaccacgcccacccctatgccatgagccccagcctgggcagcctgcggccctacccacctggccctgcccacctgcccccaccccacagccaggtgtcctacagccaggccggccccaatggacctcctgtgagcagcagcagcaacagcagcagcagcaccagccagggcagctacccctgcagccaccccagccccagccagggcccccagggcgccccctaccccttcccccctgtgcccaccgtgaccaccagcagcgccaccctgagcacagtgattgccaccgtggccagcagccctgctggctacaagacagccagccccccaggccccccaccctacggcaagagggcccccagccctggggcctacaagacagccaccccacctggctacaagccaggcagccccccatccttcagaacaggcaccccacctggctaccggggcaccagccccccagctggccctggcaccttcaagccaggcagccccaccgtgggccctggccccctgcccccagctggccccagcggcctgcccagcctgcccccacctcctgctgccccagccagcggcccccccctgagcgccacccagatcaagcaggagcctgctgaggagtatgagaccccagagagccctgtgcccccagcccggagccccagccccccacccaaggtggtggatgtgcccagccacgccagccagagcgcccgcttcaacaagcacctggaccggggcttcaacagctgtgcccggagtgacctgtactttgtgcccctggagggcagcaagctggccaagaagagagctgacctggtggagaaggtgagaagagaggccgagcagagggcccgggaggagaaggagcgggagcgggagcgggagcgggagaaggagcgggagcgggagaaggagcgggagctggagaggtctgtgaagctggcccaggagggccgggcccctgtggagtgccccagcctgggccctgtgccccaccggcccccatttgagcccggcagcgctgtggccaccgtgcccccctacctgggccctgacaccccagccctgcggaccctgtctgaatatgcccggccccacgtgatgagccctggcaacagaaaccaccccttctacgtgcccctgggcgctgtggaccccggcctgctgggctacaacgtgcctgccctgtacagcagtgaccctgctgcccgggagcgggagcgggaggcccgggagcgggacctgcgggaccggctgaagccaggctttgaggtgaagcccagcgagctggagcccctgcacggcgtgcccggccctggcctggaccccttccccaggcatggaggcctggccctgcagcccggccccccaggcctgcaccccttccccttccaccccagcctgggccccctggagcgggagcggctggccctggccgccggccctgccctgcggccagacatgtcctatgcagagcggctggccgctgagcggcagcacgccgagcgggtggccgccctgggcaatgaccccctggcccggctgcagatgctgaatgtgaccccccaccaccaccagcacagccacatccacagccacctgcacctgcaccagcaggatgccatccacgccgccagcgcctctgtgcaccccctgattgaccccctggccagcggcagccacctgacccgcatcccctacccagctggcaccctgcccaaccccctgctgccccaccccctgcatgaaaatgaggtgctgcggcaccagctgtttgctgccccctacagagacctgcctgccagcctgagcgcccccatgtctgctgcccaccagctgcaggccatgcacgcccagagcgctgagctgcagaggctggccctggagcagcagcagtggctgcacgcccaccaccccctgcacagcgtgcccctgcctgcccaggaggactactacagccacctgaagaaggagagtgacaagcccctgtag

SEQ ID NO: 22416 - DNA, 3573 bp, Artificial Sequence
  derived and/or modified sequence
atgaagacccggcagaacaaggacagcatgagcatgcggagcggccgaaagaaagaagctccaggaccaagggaggagctgcgatctcggggccgggcttctcctggaggcgtcagtactagcagttcggatgggaaggcggaaaagtcaaggcagactgctaagaaagcccgggtcgaggaggccagcactccgaaagtgaataagcagggccgctctgaggagattagcgagtccgagtctgaagaaactaatgcacctaaaaagacaaaaaccgaacaagaattgcctcgtcctcagtccccctccgatctggattctttggacggccgcagtttgaacgacgacggttcatcagatcctcgggacatcgatcaggataatcgctccacgtctcctagcatctactcaccaggatccgtcgaaaatgacagcgatagttcttcagggctgagccagggtccagccagaccataccaccctcctcctctctttcctccttccccccaaccacccgactcaaccccacgccaacctgaagcctccttcgaacctcacccttcagtaacaccgacgggataccatgctcccatggagccgccaaccagccgcatgttccaggcccccccaggcgccccaccaccgcatccacagctgtatcccggcggtacaggaggtgtgctatccggtccaccaatgggtcctaaaggtggcggggcggcgtcttctgtgggggggcctaatggagggaagcagcatcccccccctaccacgcctattagtgtatcctcttccggcgcttctggagcgcctcctacaaagcctcccaccacgcccgtggggggtggtaacctgccttctgctcctccacccgctaattttccacacgtgacgccaaacctcccacctccgccagctcttaggcctttgaacaatgcgtcagcttccccaccaggcctgggagcacaaccactcccgggccatctgccaagcccccacgccatgggtcagggcatgggcggactcccacctgggccagaaaagggcccgacattggcccccagcccccactcgctgccccctgcttcaagctcagcacccgcccctcctatgaggttcccctatagctcgagttcctcctcttcggccgcagcatcgtccagctcttcatcgtcttcctcgtccgccagtccattcccagcctctcaggcgctgcctagttatccacacagcttccctccccccacttccctgagcgtgtcgaaccagccaccgaaatatactcagccgtccctgccaagccaagccgtctggagccagggacccccgcctcctcccccctacggaagactgctggccaactcaaacgcacaccccggcccttttccaccttccacaggggcccagtcaaccgcccatcccccggtcagcactcaccaccatcatcaccagcagcagcagcagcaacagcagcaacagcagcagcagcaacagcaacaacaacagcatcatggcaacagcggtccacctcctcctggcgccttccctcaccctctggagggcgggagctcccaccacgctcatccttacgctatgtcgcccagcctcgggtctctgcgcccctatccgcccgggcctgctcacctcccccccccgcacagccaggtgtcttactctcaggccggtcctaacgggcctcctgtgtcttcctcgtccaactcatcctcttctacctctcagggttcttatccctgtagccatccatcccccagccagggcccccagggagcgccttatccgttcccccctgtgcctaccgtcacaacatccagtgctacattaagtacagtgatcgccaccgtggcctcctcacccgcaggttacaaaacggcatctccacctgggccgccgccttacggcaagagggccccctcacctggggcatacaagactgctacgcccccaggctacaaaccgggctccccgccctcttttagaactggcacaccacctggttacaggggaaccagtccgccggcgggaccaggcacctttaagccagggagccctactgtggggcccggtcccctgccccccgccgggccctcaggcctgcccagcctccctcccccccctgccgcccctgcaagcgggccacctctgagcgctacccagataaagcaggagccagctgaggaatatgagacacctgagtcccccgtgcctcctgctagatctccatccccccccccaaaggtagtagatgtcccaagccacgcgtcgcagtcagctaggtttaacaagcacctcgaccgcgggtttaactcatgtgcacggtcagacctgtattttgtgccactggagggctccaagttagccaagaaaagagcagatctcgttgaaaaggtacgcagagaagccgagcagagggccagagaggagaaggaaagagaacgggaaagggaacgggaaaaagaacgggagagggagaaggagcgggagcttgaaagaagtgttaaattggctcaggagggtcgcgcacccgtggagtgtccttccctggggcccgtgccccatcggcctccttttgaacctggaagtgctgtggctactgttcctccgtacctgggccccgatacacccgcgctgaggacactcagcgagtacgctcggccccacgtcatgtcacctgggaaccgtaaccatccgttttatgtacctctcggcgcagtcgaccctggtctcctgggctacaatgtgcccgcactgtactcttccgaccccgccgcaagagagagggagagggaagcccgtgaaagggacctacgagatagacttaagccagggttcgaagtgaaaccgagtgaactggaaccattacacggagtgccaggcccggggcttgaccctttccctagacacggagggctggctttacagcctgggccacctggacttcacccattcccatttcacccttcccttgggcccctggaacgcgagcggctcgcattggctgctgggccagctttgaggcctgatatgagttatgccgaacgactggccgccgagcggcagcatgcggaaagggtggcagcactagggaacgacccattggcaagattgcagatgctgaacgtgactccccatcaccatcagcactcccatatccacagccatctccatctccatcaacaagacgcgatacacgctgctagcgccagcgtccaccccttaattgacccattggcatcaggaagccatttaactaggatcccatatcctgctggaactcttccgaatccgctgctgcctcatccccttcacgagaatgaggtgctccgacaccagctcttcgccgcgccctacagagatctgccagcaagcctatccgcccctatgtcagccgcacatcagcttcaagcaatgcatgcccagagcgccgaacttcaacgtctagcactggaacagcagcagtggttacatgcacatcacccattacacagcgtgcccctccccgctcaggaagactactattcccatctgaagaaggagtctgacaaacctctgtag

SEQ ID NO: 22417 - DNA, 3573 bp, Artificial Sequence
  derived and/or modified sequence
atgaagacccggcagaacaaggacagcatgagcatgcggagcggccggaagaaagaggctcctggcccgcgcgaggaactgcgtagtcgcggtcgggcctcacctggtggagtgagcacatcttctagcgacggaaaggccgagaagtccagacagactgccaaaaaggccagggttgaggaggcgtccaccccaaaagtaaataagcaaggtcggagtgaggagatatccgagtcagagtcggaagagactaacgcgcctaagaagacgaagaccgaacaggagctgcccagacctcagtctccttcggacctcgatagcttggatgggcgaagtttgaatgacgatgggagcagtgacccgcgagacatagatcaagacaaccgatccacctctccctctatctactcgcctggtagcgtcgagaacgactcagatagtagttcagggctatcccagggcccagcccgcccgtatcacccccctcctctgtttccacctagcccccagccccccgacagcactccaaggcagccagaggcctctttcgagcctcatccttccgtaacgccaactgggtaccatgcacctatggagccgcccacctcaaggatgttccaggccccacctggtgcaccccccccccatccacagctctatcccggtggcacaggcggcgttctgtcaggccctcctatgggacccaaggggggtggagcagcctcttccgtgggtggccccaatggtggaaaacagcaccctccacccacaacccctatctccgtgtcctcctccggcgcatccggcgccccgccaaccaaacctccaactaccccagtgggtgggggaaatctgccctcagccccgcctccagcgaactttcctcacgtaacacctaatttgccccccccacccgctctgcggccgctgaataatgcttctgcatccccgcctgggttgggtgctcaacctctgccaggacacttaccctctccacatgccatgggccagggaatgggcgggctgcctccagggcccgaaaagggtcctacgcttgcaccctctccgcacagtctcccgcccgcatcttctagcgcgccagcacctcccatgcgttttccttattcatcgtctagctcaagttctgcagccgcaagtagctccagttctagctcttcttcaagtgctagcccatttccagcctcacaggctttacccagttatccacactcatttcccccccccacttcattatccgtctcaaaccagcccccaaagtacactcagcctagcctgccgagccaggctgtgtggagccagggaccacctccgcccccaccatacggtaggctgttggccaatagcaatgctcacccaggccccttcccaccttccacaggagcccagtccaccgcccaccctccagtttcaacccatcaccaccaccatcagcagcaacaacaacaacaacagcaacaacaacagcaacagcagcaacagcaacagcatcacggaaactcgggtccccctccgcctggtgcgttccctcatcccctggagggcggctcatcacaccacgctcacccatacgctatgtctccgtctttaggctccctcagaccttaccctcccgggcctgcccacctgccccctccgcactcccaggtgagctacagtcaggccggtccaaatggacctccagtgagctcctcttccaactccagctcatctacttcgcagggcagttacccatgcagccacccatccccctcccaaggccctcagggagctccctaccctttcccacccgttcctaccgtgacaacatccagcgcaaccttatctacggtcatcgcaaccgtcgcctcctcccctgctggttacaagacggcatctcctccggggccacccccttatggaaagagagcacctagtcctggagcctataaaactgctacacctccaggctataagccaggatctcctccttccttcagaacaggtactcctccaggatacaggggcacctcaccacctgcaggacctgggacatttaaacctggatcccctaccgtaggtccggggccactcccccccgctgggcccagtggattgccttccctgccaccaccgccggctgcccctgcctccggaccaccactctccgctactcagataaagcaggagcctgccgaggagtatgagacacccgaatccccagtcccacctgcacggtctccgagcccacctcctaaagtggtagacgtcccttcccacgcatctcagtctgcccgctttaataagcacttggatagaggcttcaacagctgcgctaggtccgatctctattttgtccctctggaaggcagtaagctggctaaaaaaagggccgatctggtagagaaagttcggcgcgaggccgagcagcgcgcccgtgaagagaaagagcgagaaagagagcgagagcgcgaaaaggagagggaaagagagaaggagcgggagttagagcgaagtgtgaaactggcacaggaggggcgagcccctgtagagtgcccatccctgggacccgttccacataggccgccattcgaacctggtagtgctgtggcaactgtcccgccataccttggccctgacacgcccgcattaagaacgctgtcagaatatgcgagacctcatgtgatgagcccaggcaatagaaaccatcccttctatgtgccactgggagcggtggatcctggattgttaggatataatgtacccgccctgtatagctcggaccccgccgctagggaaagagaacgcgaggctcgggaacgagatctccgagatagactcaagccagggtttgaagtgaaaccaagcgagctggagcccctccatggtgtgcccggacctggactggatcctttccccagacatggcggccttgcactgcagcctggcccaccgggactccaccccttcccattccatccttctttggggccactcgagagagagagactggcattggctgccgggccggcattaaggcctgacatgtcatacgccgaaaggttggctgccgaacgacagcatgctgaaagagtagcagcactgggcaatgaccctcttgcgagactccagatgttaaatgtgaccccgcaccaccatcaacactcgcacattcacagtcatctgcacctacatcagcaggatgctatccacgccgcctcggcttcagttcacccgctcatagaccctcttgcgtcagggtcccacttaaccagaattccttacccagccggcaccttgcctaacccgctattacctcacccattacacgagaacgaggtactgcgccaccaactgtttgcggccccatacagagatttgcccgcttctcttagcgcccccatgagtgcggcacatcaactccaggcaatgcacgcccagtctgccgagctccagagacttgctctcgagcagcaacagtggttgcacgcccaccaccctttgcattctgtcccactacccgcccaggaagattattattcacatctcaaaaaggagtccgataagccactctag

SEQ ID NO: 22418 - DNA, 2328 bp, Artificial Sequence
  derived and/or modified sequence
ggcttcctgatccaccccctggtggtggccctgcagcagccccccctcccggtactcccccctttacctctgccgccacctcccccacctcccccctacggcagacttctcgcaaatagcaacgcacaccctggacctttccccccatccactggtgcgcaatctaccgcacatccacccgttagcacccaccaccaccatcatcagcagcagcaacaacagcagcagcagcagcagcagcagcagcagcagcaacaacagcatcatggcaattcaggcccaccacctccgggagcattcccacaccctttggagggcgggagcagtcaccacgcgcacccctacgctatgtcaccgagcttaggctcactaagaccataccctcctggccccgctcatttgccaccccctcatagtcaagtgtcctatagtcaggccgggcccaatggacctcccgtgtcttccagtagtaatagttcaagcagtacaagccaagggagctatccatgcagtcatcccagcccctcccagggtcctcagggcgcaccctatccctttcctcccgtgcctaccgtgaccactagcagcgcaactctttccactgtgatagcaacagtggcttcatcccccgccggctataaaactgcatcacctcccgggcctcctccctacggcaaaagagcgccttccccaggcgcctataaaaccgcaaccccacccggttataagcctggctcccccccatcattcaggacaggcacaccacccggatatcgcggaacctccccacctgccgggcccggtacctttaaacccggctcacccaccgtcggccccggtcctctgcctcccgcaggccccagtgggcttccttctctccctccgccacctgccgctccggcaagtggcccccccctttccgctactcagatcaagcaagagcccgccgaggagtatgagacccccgaatctccagtgccccccgctaggtcgccgtcgccgcctcctaaggtcgtggatgttccttcccacgccagccagtctgctcggtttaataaacacttggataggggcttcaattcttgtgctagaagtgatctgtattttgtccccctggaaggctctaagctcgccaaaaaaagagcagacttagtcgagaaggtgaggcgtgaggctgaacagagggctcgggaggaaaaagagcgagaaagagaaagggaaagagagaaagagcgggagagggagaaagaaagagaattagagcgttccgtcaaactcgcacaggaagggcgtgcaccggtggagtgcccgagtttagggcccgttccacaccgtccaccttttgagcctgggtctgccgtagctactgtgcccccttatctgggccccgatactccggctctgaggacactatctgaatacgcaagaccacatgtcatgtctccgggaaacagaaatcacccattctatgtgcccttgggggccgtggatcccggcctcctcggctataatgtccccgctctgtactcttccgatcctgctgcaagagagcgggaaagggaagcccgtgaacgggatttaagggaccgccttaagccagggtttgaggtaaagccatcagagctggagcccctgcacggtgtgcccggtcctggcctggacccattcccccgccacggagggctggctctccagcctggcccaccaggtctgcaccccttccctttccaccctagcctcggtcccctggagagagaacggctagcgctagctgccgggcctgccctccggcctgacatgagctatgcggagcgccttgcagcggaaaggcagcacgccgagcgcgtggccgctcttggaaacgatcctctggcccgcctgcagatgctaaacgtgacaccacatcatcaccagcactcccacatccattcacacctgcatctccatcagcaggacgccattcatgctgcatccgcaagcgtgcatcccctgatagacccactggcatcagggtcgcatctgacaaggatcccttaccctgcgggcaccctgcccaatcctctcctgcctcatccattgcacgaaaacgaagttttaagacaccagctctttgctgctccttatagagatttacctgcctcactgtccgcccctatgagtgccgcacaccaactacaggcgatgcacgctcagtctgcggaactccagcggttggccctcgagcaacaacagtggctgcatgcccaccatcctctgcactcagtgccattgccggcccaggaggactactactcgcatctcaagaaggaaagcgacaaacctctttag

SEQ ID NO: 22419 - DNA, 3573 bp, Artificial Sequence
  derived and/or modified sequence
atgaaaacaagacagaacaaggattcgatgtccatgaggagcggacggaagaaagaggcccctggcccacgcgaagagctgagatcaaggggcagggccagcccaggaggcgtcagcacctcgtcctctgatggcaaagccgaaaaaagtcggcagaccgcgaagaaggcaagggtggaggaggcatcgacccctaaggtgaataagcagggcagatccgaagagattagcgaaagcgaaagcgaggaaacaaacgccccaaaaaaaacaaaaacagaacaggagctgcccagaccacagtccccctctgacctggattcgttggatggacgaagccttaatgatgacggctcgtcagatccacgcgacatcgaccaagacaaccgaagtacaagcccatcaatttactcccccggttctgtagagaatgacagtgattcaagctcaggcttatcccaggggccagctaggccttatcacccccctccccttttccctccctcaccccagccaccagattctactcctagacaacctgaggcttctttcgagccccatccttcagttactccgaccgggtatcacgcgcctatggaacctcccacttcaaggatgttccaggctcccccaggggctcccccacctcacccccagctctacccagggggtaccggtggagtactcagtggacccccaatggggccaaaagggggtggtgctgcatcttccgtcggcggtccaaacgggggtaagcagcatcccccaccgaccacccccatatccgtctccagttcaggcgcaagcggcgcaccgcctacgaaacctccgaccactccggtcgggggtggaaatctgccgagcgcacctcctcccgctaactttcctcacgtcaccccgaatttgccccctcctcccgcactgaggcccttaaacaatgcctccgcctcacctcccggtttaggcgctcagcctttaccgggtcatctaccatctccacatgcgatggggcaaggaatgggcggtctcccccctgggccagaaaaaggtcccaccctggcaccaagcccacacagtctaccacccgcaagctccagcgcaccagcccctcctatgcggttcccatatagttccagttcttccagttccgccgcagcctcaagcagcagcagttccagcagttcctcggcaagcccatttcccgcttctcaggcacttccctcttacccccattccttccctccacctaccagcctgagtgttagtaaccagccccctaaatacactcaaccttcccttcccagtcaggcagtctggagccagggcccaccacccccaccaccctacggaagactcctggctaattcaaacgcccaccccggaccgtttcctcctagcactggcgcacagagcaccgcccatccacctgttagcacccaccaccaccatcaccaacagcagcagcagcagcagcagcagcaacagcagcagcagcaacagcagcagcagcatcacggcaacagcggacctccgcctccaggagctttcccccacccactggaggggggaagtagccaccacgcccacccatatgccatgagtccaagtcttggttctttgaggccttaccccccaggccctgcccatttgcccccaccacactcacaggtctcctactctcaggccggacctaatgggcctccagtcagcagcagtagcaacagttctagctccactagccagggatcctatccgtgttcacatccttcaccttcgcaaggccctcagggggctccttaccccttcccaccagtgcccaccgttacgacgtcctcagctacactcagcacggttatagccacagtggcttcttcccccgcaggttataagacggcctccccacctgggcctcccccatacggcaaaagggccccttcacccggtgcctataagaccgcaacccctccagggtataaacccggtagccccccatcgtttcggaccgggacaccacccggatacaggggtacgagtccaccagccggtcccggtacctttaagccaggttctccgactgttggacccggacctcttcctccggcaggcccttccggccttccaagcctgccacccccacctgccgctcctgcgagtggcccacctctgagcgctacacaaattaaacaggagcctgctgaggagtatgaaacccctgagtcaccagtccctccagctcggagccccagcccaccgcctaaagtggtcgacgtgccctcacacgcttcccagtctgcaagatttaataaacatttagatcggggttttaatagctgcgcacggagtgatttgtacttcgtgccgctcgaggggtccaagcttgcaaaaaagagagccgatctggtggaaaaagtgcgccgagaggctgagcagagagcacgtgaagaaaaagaaagggagcgcgagagagagagggagaaggagagagaacgggagaaggaacgagagctggagcggagtgtcaagctggcacaggagggaagggcacccgttgagtgcccgagtctcggccctgtcccacaccgtcctccatttgagccgggaagtgcagttgccacagtgccgccatacctgggacctgacacaccagccctgcgaacattgtctgaatatgccaggccacacgtaatgtcacctggaaataggaaccaccccttctacgtgcccctgggtgcagtggatccaggactcctggggtacaatgttccagcgttgtactcatccgatccagccgctcgggagcgtgaacgcgaagccagggagagagacttgagggaccgcttgaaacccggtttcgaagttaagccaagtgaacttgagccccttcacggggtccccggacctgggcttgatccattcccccgtcacggaggcttagccctccagcccggaccccctggcctccaccccttccccttccacccatctctcggacccctcgagcgggagcgtctggccctggcagcgggtcctgctctcagaccagacatgtcgtacgcggagcgcctggcagcagagagacagcatgcggagcgggtggctgcacttggcaacgacccattagcccgactgcagatgttgaacgttactccccatcaccatcagcattcccacattcactctcatctgcacttacatcagcaggatgcaatacatgcggcaagtgcttccgtacatcccctcatagaccccttagcctccggctcccatcttacacggataccatatcctgccggtactcttcccaacccactactacctcacccactgcacgagaacgaagttctgcgtcatcagctgtttgcggcaccctatcgggacttgcctgcctccttgtctgctccaatgtcagccgcacaccaacttcaggcaatgcacgctcagagcgccgaactccagagactagctttagaacagcagcagtggctgcacgcccaccaccccctgcattccgtccccttaccagctcaggaagattactattcccacttgaagaaggagagtgataaacctttgtag

SEQ ID NO: 22420 - DNA, 3573 bp, Artificial Sequence
  derived and/or modified sequence
atgaagacaagacagaacaaggactcaatgagtatgcgttctgggagaaagaaagaggcccctggacctagggaggagctcaggagcagggggagagcatcccccggaggggtcagcacaagctcatctgatggaaaagccgagaaatctcgtcagacagccaagaaggcgagggtggaggaagcaagcacacctaaggttaacaagcaaggcaggagcgaggaaataagcgagagcgaatcggaagaaacaaatgctccaaagaagaccaagacggagcaggagcttcctcgaccgcaaagcccatctgatctggactcactggacggaagatctctcaatgacgacgggtcctcagacccccgtgacattgatcaagacaataggagcacaagtccctctatatactccccgggatctgttgagaatgatagcgactcatcctctggtctgtctcagggacctgcacgcccttatcatcctcctcccctcttcccaccttctccgcagccccctgacagtactccgcgacagccagaagcttccttcgaaccgcatccaagcgtgacacccactgggtaccacgcacccatggagcctccaacctcccgcatgttccaggcccctcccggtgcgccaccaccccacccacagctgtatccaggaggcacaggtggagtgctgagtgggcctcccatgggaccaaagggcggaggcgctgccagcagcgttggagggcctaacggcggaaaacagcatcccccacctacgacacctatatcagtctccagctccggggctagcggggcacctccaaccaagcctccaacaacgccagtgggcggaggaaacctgccgagcgccccaccgcctgctaactttccgcacgtcacgccaaacctacccccacctcctgctctccggccactcaacaatgcatctgccagccccccaggactaggagctcaaccccttccgggacacctgccaagccctcacgccatgggtcaggggatgggcggactgccccctggcccagaaaaaggtcctaccctggcaccttcaccccatagcctcccgcctgcaagtagcagtgcccctgcccctccaatgaggttcccttatagctcctcgagtagtagctcagctgccgctagctcctccagtagctctagctcaagctcggcctccccattccctgcttcacaggctcttcctagctacccacactcatttccccctcccacctcattgagtgtgtccaatcagcctccgaaatacacccagccgtccctgcctagccaagcagtgtggtcgcagggtcccccacctcccccaccttacgggaggctcttagcaaatagtaatgcccaccccggtccattcccgccatctaccggtgcccagtcaacagcgcaccctccggtgtctactcaccaccatcaccatcagcagcaacagcaacaacagcaacagcagcagcagcagcagcagcagcagcagcagcaccatgggaactcaggtcccccacctccaggagcatttcctcaccccttggaaggagggagctcgcatcatgcccatccttacgctatgtcgcccagcctaggcagcctgaggccttaccccccaggacctgcccacctgccccctcctcatagtcaggtgtcatatagtcaggccggaccgaatggtcctcccgtttcctccagctctaactcctcttcttccacctcacagggctcatacccatgctcccaccctagcccatcgcagggacctcagggagccccttatccttttcctcctgtaccgaccgtaacaacatcatctgctacattgagcacagtaatcgcgacagtggcctcctcccctgcgggatacaagacggcctctccccctggacctcctccttacggaaaacgtgcccctagccctggggcatacaagactgcaacacccccagggtacaagccaggcagtccaccatcatttagaactggaaccccacctggctaccgcggaaccagtcctcccgctgggcctggcactttcaaacctggctcaccaactgttgggcctggacctttgcccccagccggaccctccggtctgccttcactgcctcctcctcctgcagcaccagcgtccgggccaccactgtcagccacccaaataaagcaggagccagctgaggaatacgagacccccgagtcccccgtcccacccgctcgtagcccatcacctcccccaaaagtcgtcgacgttccttcacatgcctcccagtccgcacgttttaacaagcatcttgatagaggcttcaattcatgcgccaggtcagacctgtatttcgttcctctcgaggggagtaagttagccaagaagagagccgatctggtggaaaaggtgcgcagagaagctgagcagcgcgctcgtgaggaaaaagaacgggaaagagaacgagagagggagaaggaacgcgaacgggagaaggagagagagctggaaaggtctgtgaagttggctcaggaaggcagggcaccggtcgagtgcccatccctggggccagttccacaccggccacctttcgaaccgggaagcgctgtggctactgttccaccctaccttggcccagatacgcctgctcttagaaccctctcggaatacgccagacctcacgtgatgtcccccggaaaccgcaaccaccccttctacgtccccctcggggcagttgatcctggcctgctgggctataatgtccccgcattgtactcctccgaccctgccgctcgcgagagggagagggaggccagggagagggacctgagagaccggctgaaacctggcttcgaggttaaaccgtcagagctcgaacctctacacggagtcccgggtccgggtctggatccgtttccgaggcatggcggactggcactgcaaccaggtccacctggacttcacccctttccgttccatcctagtctggggcctctggagcgtgagcgcctggctctggccgcagggccagccctgagacccgatatgagctatgctgaacggctggcggcagaacggcagcacgccgagcgagtcgctgctctgggtaatgacccactcgccaggttgcagatgctcaatgttactccccatcaccatcagcacagccacattcactcccacctgcacttgcaccagcaggacgccattcatgccgctagcgccagcgtacatccgcttattgatccattggcaagcggctcccatctgaccagaatcccataccctgccggtacactcccaaatccactgcttcctcatccacttcatgaaaacgaagtacttcggcatcagctttttgctgctccctacagggatctgcccgcaagtctctcagccccaatgtctgcagctcatcaactgcaagccatgcacgctcaatctgccgaattgcagagactcgctttggaacagcaacagtggcttcatgcccaccaccctcttcattctgtgcctcttcctgcccaggaagactactactctcatttaaagaaagaaagcgataagcccttgtag

SEQ ID NO: 22421 - DNA, 2328 bp, Artificial Sequence
  derived and/or modified sequence
ggttttctgatccaccccctggtggtggcgctccaacaacctcccctacccgtgctaccccctttgcctctgccgccaccccctcccccaccgccatacgggcgattactggccaacagcaatgcccatccagggcctttcccgccatctaccggagcgcagagtaccgcacaccctcctgtttccacccatcaccatcatcaccagcagcaacagcagcagcagcagcagcaacaacaacagcagcagcaacagcagcagcatcatgggaattccggtcctccacctccaggagcgtttccccatcccctggaaggagggagttctcaccacgcacacccctacgcaatgtctcctagcttgggatcgctgagaccgtaccccccaggaccagcacaccttccgccaccccactctcaggtcagttactcacaagctggccctaatggccctccagtgagcagctctagcaatagctcctctagcactagccagggatcatacccctgttctcacccttcaccttcccagggtccgcagggcgcaccatatccatttccccctgtgcccactgtgactacttcttccgccaccctgtccaccgttatcgcaaccgtcgctagcagtcccgctgggtataagaccgcttctcccccaggaccacccccatatggcaaaagagccccaagccctggcgcatataaaaccgccactccgcctggctacaagccgggatcacccccatcatttagaaccggcactcccccagggtataggggcaccagtcctcctgccggtcccggaacttttaaaccaggctctcccaccgtcggccctggtcccctgccaccggctggccctagcggactcccatctttgcctcctccaccggcagcccctgcatccgggcctccgctgagtgccacccagataaagcaagaacctgccgaggaatatgagacccccgaatcacctgtgccacccgctaggtccccgagcccccctcctaaggtcgtcgacgtcccctcccacgcaagtcagagtgcaagatttaacaagcacttggatagaggattcaattcatgcgccagaagcgacctgtacttcgtccctcttgagggtagcaaactagcaaagaaaagggccgacctggtcgagaaggtgcgtcgggaagctgaacaaagggcaagagaagaaaaggagagggagagagagcgcgagcgcgagaaggaaagggagagagaaaaagaaagagaattggaacgttctgtgaagttggcccaggaggggagagcccctgtggaatgccccagtttggggccagttccacatcgaccacctttcgaaccgggaagtgccgttgctacggtgccgccatatctaggccctgacactcccgctcttcggaccctgagtgaatacgcgcgtcctcatgtcatgagccccggtaataggaaccatcccttctatgtcccactgggagccgtggaccccggactgctggggtataatgtgccagctctttattcctcggatccagctgcccgtgagcgggaaagagaggctagggagagagacctgagagatcggctgaaaccaggcttcgaggtcaaaccaagcgaactagagcctcttcacggcgttcctggccctggactcgatccttttccgaggcacggcggtctagcacttcaaccgggtccaccaggtctacaccccttcccctttcatccctccttgggacccctggagcgggaacgcctcgctctagctgccggtcccgcactgagacccgatatgtcgtatgcagaacggttggcggctgagcgacagcatgccgagcgcgtcgctgctttggggaatgatcctctggcccgtctccagatgctgaatgtgaccccccaccatcatcagcatagccacatccattcacatctgcatttacaccaacaggacgccatccacgccgctagcgcctccgttcaccccctgattgatcccttagcttcaggctcgcacctcacaagaatcccttatcctgcagggactttgcctaacccgctcctgcctcaccccctccatgaaaacgaagtgcttcgacaccagctctttgctgccccatatagagacctgccagcctctctctctgcccctatgtccgccgcacaccaactgcaggcaatgcacgctcagagcgcagagttacagaggttagcactggaacagcagcagtggcttcacgctcaccaccccctccattcagtgccccttcctgcgcaggaggactactactctcatctcaagaaggaatctgataagccattgtag

SEQ ID NO: 22422 - DNA, 456 bp, Artificial Sequence
  derived and/or modified sequence
atgcacgccggtaaacgctcgcctctgacacaatccatctcttgtgtgtgtttaccagaactcggcgcactctgggaaattgagtctgccagggtaaacctgcgggtatctgggagggaagccagccgagagatggaaagttctcccaggccgcatcgaattgcgggtgtgaagaggttccttaagcacgcgggaaaatggagcctaagatggtttctgagtcctcgttggatacttcaattccggagatgggcacgcaaatggagtcggttcacacggtcttcgttccaagtgagatgggccgcagtgcccgcaggaaagtgctcccagcaccagggcttgagtgctgtggccactgcctcacctggcgtgttttgggagatggagtttgatgtgtcctccccattgaccgagggggctggctctcctatgagctcgaaacatgccggagaatag

SEQ ID NO: 22423 - DNA, 4293 bp, Artificial Sequence
  derived and/or modified sequence
gacgccatactggacgccaagtgggaggaacttcaaggctgtcccctgcgggcctcccgctctgcttctgcgaaggtttcattgaaaacagatcctgcaaaagttccaggtgcccacactggaaacttggagatcctgcttcccagaccacagctgtggggaacttggggtggagcagagaagtttctgtattcagctgcccaggcagaggagaatggggtctccacagcctgaagaatgaagacacgacagaataaagactcgatgtcaatgaggagtggacggaagaaagaggcccctgggccccgggaagaactgagatcgaggggccgggcctcccctggaggggtcagcacgtccagcagtgatggcaaagctgagaagtccaggcagacagccaagaaggcccgagtagaggaagcctccaccccaaaggtcaacaagcagggtcggagtgaggagatctcagagagtgaaagtgaggagaccaatgcaccaaaaaagaccaaaactgagcaggaactccctcggccacagtctccctccgatctggatagcttggacgggcggagccttaatgatgatggcagcagcgaccctagggatatcgaccaggacaaccgaagcacgtcccccagtatctacagccctggaagtgtggagaatgactctgactcatcttctggcctgtcccagggcccagcccgcccctaccacccacctccactctttcctccttcccctcaaccgccagacagcacccctcgacagccagaggctagctttgaaccccatccttctgtgacacccactggatatcatgctcccatggagccccccacatctcgaatgttccaggctcctcctggggcccctccccctcacccacagctctatcctgggggcactggtggagttttgtctggacccccaatgggtcccaaggggggaggggctgcctcatcagtggggggccctaatgggggtaagcagcaccccccacccactactcccatttcagtatcaagctctggggctagtggtgctcccccaacaaagccgcctaccactccagtgggtggtgggaacctaccttctgctccaccaccagccaacttcccccatgtgacaccgaacctgcctcccccacctgccctgagacccctcaacaatgcatcagcctctccccctggcctgggggcccaaccactacctggtcatctgccctctccccacgccatgggacagggtatgggtggacttcctcctggcccagagaagggcccaactctggctccttcaccccactctctgcctcctgcttcctcttctgctccagcgccccccatgaggtttccttattcatcctctagtagtagctctgcagcagcctcctcttccagttcttcctcctcttcctctgcctcccccttcccagcttcccaggcattgcccagctacccccactctttccctcccccaacaagcctctctgtctccaatcagccccccaagtatactcagccttctctcccatcccaggctgtgtggagccagggtcccccaccacctcctccctatggccgcctcttagccaacagcaatgcccatccaggccccttccctccctctactggggcccagtccaccgcccacccaccagtctcaacacatcaccatcaccaccagcaacagcaacagcagcagcagcagcagcagcagcagcagcagcagcagcagcagcatcacggaaactctgggccccctcctcctggagcatttccccacccactggagggcggtagctcccaccacgcacacccttacgccatgtctccctccctggggtctctgaggccctacccaccagggccagcacacctgcccccacctcacagccaggtgtcctacagccaagcaggccccaatggccctccagtctcttcctcttccaactcttcctcttccacttctcaagggtcctacccatgttcacacccctccccttcccagggccctcaaggggcgccctaccctttcccaccggtgcctacggtcaccacctcttcggctaccctttccacggtcattgccaccgtggcttcctcgccagcaggctacaaaacggcctccccacctgggcccccaccgtacggaaagagagccccgtccccgggggcctacaagacagccaccccacccggatacaaacccgggtcgcctccctccttccgaacggggaccccaccgggctatcgaggaacctcgccacctgcaggcccagggaccttcaagccgggctcgcccaccgtgggacctgggcccctgccacctgcggggccctcaggcctgccatcgctgccaccaccacctgcggcccctgcctcagggccgcccctgagcgccacgcagatcaaacaggagccggctgaggagtatgagacccccgagagcccggtgcccccagcccgcagcccctcgccccctcccaaggtggtagatgtacccagccatgccagtcagtctgccaggttcaacaaacacctggatcgcggcttcaactcgtgcgcgcgcagcgacctgtacttcgtgccactggagggctccaagctggccaagaagcgggccgacctggtggagaaggtgcggcgcgaggccgagcagcgcgcgcgcgaagaaaaggagcgcgagcgcgagcgggaacgcgagaaagagcgcgagcgcgagaaggagcgcgagcttgaacgcagcgtgaagttggctcaggagggccgtgctccggtggaatgcccatctctgggcccagtgccccatcgccctccatttgaaccgggcagtgcggtggctacagtgcccccctacctgggtcctgacactccagccttgcgcactctcagtgaatatgcccggcctcatgtcatgtctcctggcaatcgcaaccatccattctacgtgcccctgggggcagtggacccggggctcctgggttacaatgtcccggccctgtacagcagtgatccagctgcccgggagagggaacgggaagcccgtgaacgagacctccgtgaccgcctcaagcctggctttgaggtgaagcctagtgagctggaacccctacatggggtccctgggccgggcttggatccctttccccgacatgggggcctggctctgcagcctggcccacctggcctgcaccctttcccctttcatccgagcctggggcccctggagcgagaacgtctagcgctggcagctgggccagccctgcggcctgacatgtcctatgctgagcggctggcagctgagaggcagcacgcagaaagggtggcggccctgggcaatgacccactggcccggctgcagatgctcaatgtgactccccatcaccaccagcactcccacatccactcgcacctgcacctgcaccagcaagatgctatccatgcagcctctgcctcggtgcaccctctcattgaccccctggcctcagggtctcaccttacccggatcccctacccagctggaactctccctaaccccctgcttcctcaccctctgcacgagaacgaagttcttcgtcaccagctctttgctgccccttaccgggacctgccggcctccctttctgccccgatgtcagcagctcatcagctgcaggccatgcacgcacagtcagctgagctgcagcgcttggcgctggaacagcagcagtggctgcatgcccatcacccgctgcacagtgtgccgctgcctgcccaggaggactactacagtcacctgaagaaggaaagcgacaagccactgtagaacctgcgatcaagagagcaccatggctcctacattggaccttggagcacccccaccctccccccaccgtgcccttggcctgccacccagagccaagagggtgctgctcagttgcagggcctccgcagctggacagagagtgggggagggagggacagacagaaggccaaggcccgatgtggtgtgcagaggtggggaggtggcgaggatggggacagaaagcgcacagaatcttggaccaggtctctcttccttgtcccccctgcttttctcctcccccatgcccaacccctgtggccgccgcccctcccctgccccgttggtgtgattatttcatctgttagatgtggctgttttgcgtagcatcgtgtgccacccctgcccctccccgatccctgtgtgcgcgccccctctgcaatgtatgccccttgccccttccccacactaataatttatatatataaatatctatatgacgctctt

SEQ ID NO: 22424 - DNA, 4290 bp, Artificial Sequence
  derived and/or modified sequence
ccgccgccccccagaggcgccggagcccggaatcccgctcggagccagccagccgtcccgagctaccagcaggtttcattgaaaacagatcctgcaaaagttccaggtgcccacactggaaacttggagatcctgcttcccagaccacagctgtggggaacttggggtggagcagagaagtttctgtattcagctgcccaggcagaggagaatggggtctccacagcctgaagaatgaagacacgacagaataaagactcgatgtcaatgaggagtggacggaagaaagaggcccctgggccccgggaagaactgagatcgaggggccgggcctcccctggaggggtcagcacgtccagcagtgatggcaaagctgagaagtccaggcagacagccaagaaggcccgagtagaggaagcctccaccccaaaggtcaacaagcagggtcggagtgaggagatctcagagagtgaaagtgaggagaccaatgcaccaaaaaagaccaaaactgagcaggaactccctcggccacagtctccctccgatctggatagcttggacgggcggagccttaatgatgatggcagcagcgaccctagggatatcgaccaggacaaccgaagcacgtcccccagtatctacagccctggaagtgtggagaatgactctgactcatcttctggcctgtcccagggcccagcccgcccctaccacccacctccactctttcctccttcccctcaaccgccagacagcacccctcgacagccagaggctagctttgaaccccatccttctgtgacacccactggatatcatgctcccatggagccccccacatctcgaatgttccaggctcctcctggggcccctccccctcacccacagctctatcctgggggcactggtggagttttgtctggacccccaatgggtcccaaggggggaggggctgcctcatcagtggggggccctaatgggggtaagcagcaccccccacccactactcccatttcagtatcaagctctggggctagtggtgctcccccaacaaagccgcctaccactccagtgggtggtgggaacctaccttctgctccaccaccagccaacttcccccatgtgacaccgaacctgcctcccccacctgccctgagacccctcaacaatgcatcagcctctccccctggcctgggggcccaaccactacctggtcatctgccctctccccacgccatgggacagggtatgggtggacttcctcctggcccagagaagggcccaactctggctccttcaccccactctctgcctcctgcttcctcttctgctccagcgccccccatgaggtttccttattcatcctctagtagtagctctgcagcagcctcctcttccagttcttcctcctcttcctctgcctcccccttcccagcttcccaggcattgcccagctacccccactctttccctcccccaacaagcctctctgtctccaatcagccccccaagtatactcagccttctctcccatcccaggctgtgtggagccagggtcccccaccacctcctccctatggccgcctcttagccaacagcaatgcccatccaggccccttccctccctctactggggcccagtccaccgcccacccaccagtctcaacacatcaccatcaccaccagcaacagcaacagcagcagcagcagcagcagcagcagcagcagcagcagcagcagcatcacggaaactctgggccccctcctcctggagcatttccccacccactggagggcggtagctcccaccacgcacacccttacgccatgtctccctccctggggtctctgaggccctacccaccagggccagcacacctgcccccacctcacagccaggtgtcctacagccaagcaggccccaatggccctccagtctcttcctcttccaactcttcctcttccacttctcaagggtcctacccatgttcacacccctccccttcccagggccctcaaggggcgccctaccctttcccaccggtgcctacggtcaccacctcttcggctaccctttccacggtcattgccaccgtggcttcctcgccagcaggctacaaaacggcctccccacctgggcccccaccgtacggaaagagagccccgtccccgggggcctacaagacagccaccccacccggatacaaacccgggtcgcctccctccttccgaacggggaccccaccgggctatcgaggaacctcgccacctgcaggcccagggaccttcaagccgggctcgcccaccgtgggacctgggcccctgccacctgcggggccctcaggcctgccatcgctgccaccaccacctgcggcccctgcctcagggccgcccctgagcgccacgcagatcaaacaggagccggctgaggagtatgagacccccgagagcccggtgcccccagcccgcagcccctcgccccctcccaaggtggtagatgtacccagccatgccagtcagtctgccaggttcaacaaacacctggatcgcggcttcaactcgtgcgcgcgcagcgacctgtacttcgtgccactggagggctccaagctggccaagaagcgggccgacctggtggagaaggtgcggcgcgaggccgagcagcgcgcgcgcgaagaaaaggagcgcgagcgcgagcgggaacgcgagaaagagcgcgagcgcgagaaggagcgcgagcttgaacgcagcgtgaagttggctcaggagggccgtgctccggtggaatgcccatctctgggcccagtgccccatcgccctccatttgaaccgggcagtgcggtggctacagtgcccccctacctgggtcctgacactccagccttgcgcactctcagtgaatatgcccggcctcatgtcatgtctcctggcaatcgcaaccatccattctacgtgcccctgggggcagtggacccggggctcctgggttacaatgtcccggccctgtacagcagtgatccagctgcccgggagagggaacgggaagcccgtgaacgagacctccgtgaccgcctcaagcctggctttgaggtgaagcctagtgagctggaacccctacatggggtccctgggccgggcttggatccctttccccgacatgggggcctggctctgcagcctggcccacctggcctgcaccctttcccctttcatccgagcctggggcccctggagcgagaacgtctagcgctggcagctgggccagccctgcggcctgacatgtcctatgctgagcggctggcagctgagaggcagcacgcagaaagggtggcggccctgggcaatgacccactggcccggctgcagatgctcaatgtgactccccatcaccaccagcactcccacatccactcgcacctgcacctgcaccagcaagatgctatccatgcagcctctgcctcggtgcaccctctcattgaccccctggcctcagggtctcaccttacccggatcccctacccagctggaactctccctaaccccctgcttcctcaccctctgcacgagaacgaagttcttcgtcaccagctctttgctgccccttaccgggacctgccggcctccctttctgccccgatgtcagcagctcatcagctgcaggccatgcacgcacagtcagctgagctgcagcgcttggcgctggaacagcagcagtggctgcatgcccatcacccgctgcacagtgtgccgctgcctgcccaggaggactactacagtcacctgaagaaggaaagcgacaagccactgtagaacctgcgatcaagagagcaccatggctcctacattggaccttggagcacccccaccctccccccaccgtgcccttggcctgccacccagagccaagagggtgctgctcagttgcagggcctccgcagctggacagagagtgggggagggagggacagacagaaggccaaggcccgatgtggtgtgcagaggtggggaggtggcgaggatggggacagaaagcgcacagaatcttggaccaggtctctcttccttgtcccccctgcttttctcctcccccatgcccaacccctgtggccgccgcccctcccctgccccgttggtgtgattatttcatctgttagatgtggctgttttgcgtagcatcgtgtgccacccctgcccctccccgatccctgtgtgcgcgccccctctgcaatgtatgccccttgccccttccccacactaataatttatatatataaatatctatatgacgctctt

SEQ ID NO: 22425 - DNA, 3573 bp, Artificial Sequence
  derived and/or modified sequence
atgaaaacgagacagaataaagactccatgagtatgcgctccggacgcaaaaaggaggccccgggcccccgagaagaactacgaagtcggggtcgcgcttccccgggaggggtcagtacgtcctctagtgacggcaaggcagaaaaatctcggcagaccgccaaaaaagctcgcgtcgaggaggcttcaacaccaaaagtaaacaagcaggggcggagcgaggaaatttccgaatctgagtccgaagagaccaatgcaccaaagaagaccaaaacagaacaggaactgccaagacctcagagtccctcagacctcgattctctggatggtagatcgcttaacgacgatggtagctcggacccacgggacattgaccaggataatcgctctactagcccatctatctatagtcccggatctgttgagaacgactcagacagtagttcaggcctttcccaggggcctgcacggccctaccatcctccccccctgttcccacccagtccacagccaccagacagcacacctagacagccagaagcaagcttcgagccgcaccccagtgtgacccctaccggatatcatgcccccatggagcctcctacaagcaggatgttccaagcacctccaggagcacctcccccccatcctcagctatatcccggcgggactggcggtgtgctcagcggcccacccatgggacctaagggcggcggcgccgctagttctgtgggcggccccaatggcgggaaacagcacccccctccaactactcccattagtgttagttccagcggagctagcggggcgcctcctacgaagccccctaccacccccgtggggggtggcaatctcccgtccgcacccccacccgccaacttcccgcatgtgacccccaacctgcctcccccaccggccctgcggccactcaataatgccagcgcctcaccgcctggcctgggggcacagccactacccggtcacctcccttccccgcatgccatgggtcagggtatgggtggactcccaccaggaccagagaaaggcccgacgctggctccctcacctcatagcctcccccctgcgtcctcaagcgcaccagccccacccatgcgatttccctacagctcgtctagcagctctagcgcagcagccagttccagctcctcctcttcaagtagctccgcctcgccatttcccgcgagtcaggcccttcctagttatccacacagttttccacctccaactagtctgtctgtctcaaaccagcctcctaagtacactcagccctctctgcctagccaggcagtgtggagtcaagggcctcctccgcctcccccatatgggcgcttattggctaacagtaacgctcatccaggcccgtttcccccttccaccggcgcacaatctactgcccatcctcccgtgagtactcatcaccatcatcatcagcagcagcagcagcaacaacagcagcagcaacagcaacagcagcaacagcagcaacatcacggcaatagcgggccgcccccccccggtgcttttccgcatccactcgaaggcgggtctagccatcacgcgcatccatatgcaatgagtccatcactaggtagcctgcggccctatcccccaggcccagcacacctgcctcctccacactctcaggtctcgtattcacaagccggacccaacggccccccagttagtagcagctcgaatagcagctcctccacatcccagggctcatacccctgttctcacccctctcctagtcagggtccacaaggggccccctatcctttcccaccggtgccaaccgttaccaccagctccgctaccctgtccactgtgattgcaacggtagcttcttcgcctgcagggtacaaaacggcaagcccaccaggacctcctccttacggtaaacgggcaccttcaccaggcgcgtataaaacagcgactccgcctggctacaaacccgggagtcctccgtcatttcgaaccggaacgccccctggttacaggggtacctcccctcctgcagggcccggcactttcaagccgggtagcccaacagtaggccctggcccgctccctcctgccggaccaagtggattgccatccctgcccccgccccccgcagctcccgcatctgggcctcccctctcagccactcagatcaagcaggaaccagccgaagaatatgagacccctgagtctcccgtgccacctgccagatcacccagtcccccccccaaggtggtggatgtcccaagccacgcgagccagtccgctcgttttaataagcacctggaccgggggtttaactcctgcgccaggtctgatctgtacttcgttcccttggaggggtctaagctagctaagaagcgcgctgacttagtggagaaagtgcggcgtgaggccgagcaaagggctagggaggagaaagaacgagagagggagagagaacgggagaaagaacgggaaagggagaaggagcgtgaacttgagcgaagtgtgaagctggcacaggaaggccgtgccccagtggagtgcccttctctggggcccgtaccacaccgcccccctttcgagccaggctccgctgtggccacagtcccaccgtacctcggcccagacactccagcgttacgtacactatccgagtatgcacgcccacacgtgatgagccctggcaatcggaaccacccattttatgtgcccctgggcgcagtcgatcctggcttactgggttacaacgttcctgccttgtactcttcagatcccgctgcccgcgagagagagcgcgaggcacgcgagcgtgatttgagggatcgcctaaaacccgggttcgaagtgaagccatcagagctagaacctttacatggagttcccggacccgggctggaccccttccctcggcacggcggactagcgctacagccggggccccccggactccatccgtttccctttcacccatcgctgggtccgctggaaagggagcggctcgccctggccgccggtccagccctccgccctgatatgtcttacgcggaacgcctcgcggcagagcgccagcacgccgagcgggtggccgccttgggcaacgaccccctcgctcggctacagatgctcaacgtgaccccgcatcaccatcagcattcacacattcatagccacttacacctgcaccagcaagacgcgatacacgctgcttccgcctccgtccaccctttgattgacccgctcgctagcgggagtcaccttactcggattccttaccccgccgggacgttgcccaatccactccttccgcatcccctgcacgagaacgaggtgctgaggcatcagttgttcgccgccccataccgggatctacctgcaagtttgtcggccccaatgagtgcagcgcaccagctgcaggccatgcatgcacaatctgcagagctgcagagactagctctggagcagcagcaatggctgcacgctcaccatcctttgcactctgttccacttccggcacaagaggactactactctcacctgaaaaaagaaagtgacaagcctctctag

SEQ ID NO: 22426 - DNA, 3573 bp, Artificial Sequence
  derived and/or modified sequence
atgaaaactagacaaaacaaggactccatgagtatgaggagtggcagaaaaaaagaggccccaggcccacgggaggaactcagatcaaggggtagagcctctcctgggggcgtgagtacatctagctcagatggcaaggcagaaaagagccgacagaccgcgaagaaagctagggtagaagaagcttccaccccgaaagttaacaagcagggccgatctgaagagattagcgagtctgagtcggaagaaacaaacgctccaaaaaagactaaaactgagcaagaactcccccgacctcagtcgcctagtgacctcgatagtctggatgggcgcagtctcaatgatgacgggtcgagcgacccccgcgatatcgatcaggacaataggtccacctcaccttccatttatagccctgggtccgtagaaaacgattcagacagctcttccgggctttctcagggcccagcgcggccataccatccacctcctctctttcccccatcaccgcaaccaccagattctactccccgccagcccgaagcatcattcgagcctcacccaagcgttacacccaccgggtatcatgcccccatggagcctccgactagccgaatgttccaggctcctcccggcgctccgcccccgcacccgcagctgtatcccggagggactggaggcgtcttatccgggccccctatggggcccaaaggcgggggagctgccagcagtgttggcggtcccaatggaggcaagcagcatccccccccaacgacacctattagcgtcagcagtagtggagcttctggagcaccacccaccaaaccaccaaccacccctgtgggcggcggcaacctgcctagcgcccctccacctgccaatttcccgcatgtgactcccaaccttccacccccaccagctctccgcccattaaataatgcttcggcgtccccccccggactgggggcacaaccactgcccgggcatctgccgtcccctcacgcaatgggacagggcatgggaggtttgcctcccggtcctgagaaggggccaacactcgccccgtccccacactctttgcccccggcatcaagcagcgcccctgccccaccaatgcggtttccctactcgtcctcaagtagtagctctgccgctgcaagctcaagctccagcagctcttccagtagtgcctccccatttcccgcatcccaggcattgccttcgtatcctcacagctttccaccacccacctccttatcagtatctaatcagcctcctaaatacacccagccaagcctccctagccaggctgtgtggagtcaaggaccacctcccccccccccttatggccgactgctcgccaatagtaatgcccatcctggcccttttcctccctcgactggcgctcagagtaccgcccatccccccgtgtccacccaccaccatcaccaccagcaacagcagcagcaacaacagcagcaacaacaacagcagcagcagcaacagcaacatcatggaaactcagggccacctccacccggtgccttccctcatcccttggaaggagggagctctcaccacgcccacccctacgcgatgtccccctccctgggatccctgagaccttatccccccggacccgcccacctgcctccccctcattctcaagtgtcatatagtcaggcgggcccgaacggacctcccgtgtcaagcagtagtaatagcagcagtagcacttctcagggctcatacccctgtagccatccatcgccctcacaggggccccagggagcgccttatcctttcccccctgttcccaccgtgaccacttcttctgcaacacttagtaccgtcattgctactgttgctagctctccggccgggtataagactgcctcccctccggggccacctccttacggcaagcgcgcaccctctccaggagcttacaagacagcaacaccaccgggctataagcccggttcccccccaagctttaggactggaacaccgccaggttatcggggcacttcaccacctgctggacctggcaccttcaagcccgggtcaccaacggttggacctggccccttgccacccgctggcccgtctggactaccgtccttgccacctccacctgccgcacctgcatccggacctcctctgtctgccacacagataaagcaggaacccgctgaggagtacgaaaccccagagtcccctgtcccacccgcacgctctccgagtcccccaccgaaagtggtcgatgtgcccagccatgcttcacagtctgctcgctttaataaacatttggaccgcggatttaatagttgcgccagaagtgacctctattttgtgcctctggagggctcaaagttagcgaaaaagagagctgacctcgtggaaaaggttcgaagggaagcagagcaaagagctcgtgaggaaaaggagagagagcgagaacgcgaacgggagaaagagcgggaaagagagaaggagcgggagctggaaagatccgtgaaactcgcccaggagggccgtgcgccagtcgaatgtccgtctctcgggccagtgcctcacagaccccctttcgagcccggatcagccgtggcgaccgtgcctccctatctcggccctgatactcctgctttgagaaccttgagtgagtacgctcgccctcacgtgatgagccctggcaacagaaatcatcccttctatgtacccctcggcgctgtcgatcccgggctcttaggatacaatgttcccgccctgtatagcagcgaccctgccgctcgcgagagggaaagagaggctagggagagagacttacgggaccgcctgaagcccgggttcgaggttaaaccctctgagctggagccgctacacggagttccaggacctggcttagacccatttccgcggcacggcgggctggcattgcagcccggtccccctggcttacaccccttcccctttcacccttcccttgggcccctggaaagagaacggctggcccttgcggctggaccagccttgaggcctgacatgtcctatgcagaacggttggctgccgaacgacagcacgccgagagagtcgctgcacttgggaacgaccccctcgccaggctccagatgctgaatgtgaccccgcatcaccatcagcacagtcacattcactcacacctacacctgcaccagcaggacgcaattcatgctgcctctgcaagcgtccatcccctgattgatccacttgcaagcgggagtcacctgaccaggattccgtatcctgccggtactttgccaaatccactcctgccacatcctctccatgagaacgaggttctgaggcaccaactgtttgctgcaccgtaccgcgaccttccagctagcctgagtgcacccatgagcgctgcacatcagctgcaagccatgcatgcacagtctgctgagctgcagcgcttggcattggagcaacaacagtggctccacgctcatcatcctctccattccgtgccattgccagctcaagaagactattactcccatcttaaaaaggagtctgacaagccactatag

SEQ ID NO: 22427 - DNA, 3573 bp, Artificial Sequence
  derived and/or modified sequence
atgaagactaggcagaataaggattctatgtccatgcggtccggcaggaaaaaggaagccccagggccaagggaggaactgcggtcccggggcagagctagtcccgggggggtcagtactagctcctctgacggcaaggcagagaagtcccgacagaccgcaaagaaggcccgtgtggaggaggctagcactcccaaggtcaacaagcagggccgcagcgaagagatcagtgaatccgaaagtgaggagacaaatgccccgaagaaaaccaaaaccgaacaggagctgccgcgcccccagagcccgtcagatcttgacagcctggacggcagaagtcttaatgacgatggctctagtgatccccgtgatattgaccaggacaatcggagtacatctccatccatttactcccctggaagtgtggagaacgattcagacagttctagcggattatctcagggacctgcaagaccctaccacccaccgcccttgtttccaccatcacctcagcctcccgattctactccgaggcagcccgaagctagctttgagccccacccaagtgtgactcccactgggtatcatgccccaatggagcccccgacgagccgaatgtttcaggcgcctcccggggcacctcccccgcaccctcagctctaccccggtggtacgggtggggtcctctccggtccaccgatgggacccaaaggcggcggggcagctagctccgttggcggtcctaatgggggaaaacaacatcctccccccacaacacccatctccgtgtcatcctctggagcatcaggggcccccccgaccaagccccccaccacacccgtcggcggcggaaatctgccctcagcccccccccccgccaattttccccacgtgacccccaatttaccacctcctcctgccctaagaccgctgaataatgcttcagccagcccgccggggctaggagctcagccgttacctggccacctgccgagtccacacgcaatgggccagggcatgggcggactgccgccgggtccagagaaaggcccgacccttgccccctcgccacattctctgccacccgccagcagttcagcgccagcccctcccatgagatttccatactccagctcaagctctagcagtgctgcagccagctcttcgtcatctagctctagctccagtgccagccctttccccgcgtcccaggcactcccatcttacccccactcattcccaccacccaccagtttatccgtctctaaccagccacccaagtacacccaaccatcactaccaagccaggccgtgtggtctcaagggcctccccctcctcctccatacggccgcctgcttgcaaatagtaacgcacatcctggacccttccctccctctacaggagcgcaatccacggcacatccgcccgtgagcacgcatcaccatcaccatcaacagcagcaacagcagcaacaacagcaacagcaacaacaacaacagcaacagcaacatcacggaaatagcgggccaccaccccctggggccttccctcacccgctagaaggtgggtcttctcatcacgctcacccttatgccatgtcaccatccctagggagtctccgcccctatccccccggacctgcccatctgcctccgcctcattcacaggtcagttactcacaggccggtcccaatggaccaccagtctccagtagctccaattcgtcgtctagcacctcccagggatcgtacccttgttcgcacccgtcaccatctcaaggaccccagggtgctccttacccattccctcctgtgcctaccgtgaccacttcgagtgctaccttgtctactgtgatcgcaacagtcgcgtccagccctgccggctataaaacagcgtcaccaccagggccacccccttacggaaagcgggccccatcacccggagcgtataagacggctaccccccctggatataaacccggatcccctcccagtttccggaccggtacgccaccaggctaccgtgggacttcccctcccgccgggcctggcacctttaaacctggctccccaacggtggggcctgggcctctccctcctgccgggcctagtggactaccgtctttacctcccccgcccgccgcgcccgcttccggtcccccattatcggcaacccaaataaagcaggagcctgctgaagaatacgagacgcccgagtccccagtgccgcccgcaaggagtccgtctcccccgcctaaggttgtggacgtgccgtcccacgctagccaaagtgcgcggttcaacaaacatctggataggggcttcaactcttgcgcccgcagcgacctttattttgtgcccctggagggaagcaaactggctaagaagagggccgacctggttgagaaggtacgacgggaagccgaacagcgggctagggaggaaaaggagagagagcgggagagagagagagagaaagagcgcgaacgtgagaaggagcgtgagctggaacgcagcgtaaagttagcacaggagggcagggcccctgtcgaatgccctagtctgggaccagtgccgcatcgacctcccttcgaacctggttcagccgttgccaccgtccccccttatctcggccctgacacaccagccctccgcacattgtctgagtatgcacggcctcatgttatgagtcccggcaatcgcaaccatcctttctatgtaccactgggcgccgttgacccaggactgctgggatacaacgttccggccctctattcatctgacccagcagcaagggaaagggagagagaggctagagagagggacctgagggaccggttaaagccagggtttgaggtcaaaccgagcgagcttgagccattacacggcgtgccgggccccgggctggatccatttccccggcatgggggcttggccctgcaacctggccctccaggattgcacccttttcccttccacccctcactgggccccttagaaagagaacggttggccttagccgccgggcccgctctccgaccggatatgtcttatgcggaacggctagcggctgagcggcagcacgccgagagggtagccgctctcggcaacgatcctctggctcggctccaaatgcttaacgtgaccccccaccaccaccaacattcacatatccattcccacttgcacttgcatcagcaggatgcaattcatgcggcaagcgcatccgtgcaccctcttattgatccattggcatccgggtcacacctcacaaggatcccctatcccgctggtactctgcctaaccccctgctcccacatcccctccatgagaacgaggttctaagacaccaactgtttgctgctccatacagggatctgcccgcttccctaagtgcccccatgtcagcagctcatcagctccaggctatgcacgcccagtctgccgagctgcaacggctcgccctagaacagcagcagtggctccacgcccatcatccactgcattctgttcctttgccagctcaggaagattattattcccatttgaaaaaagaatccgacaagcccttatag

SEQ ID NO: 22428 - DNA, 3573 bp, Artificial Sequence
  derived and/or modified sequence
atgaagacccggcagaacaaggacagcatgagcatgcggagcggcaggaaaaaagaagcgcctggaccccgcgaggagttacggtctcgggggcgggcaagccctggcggcgtgagcacaagtagctcagatggtaaagcggaaaagtcacgccaaactgccaagaaggcccgagtcgaagaggcctctaccccgaaagtaaacaaacagggacgtagcgaggagatttccgagagtgaaagtgaggagaccaacgcgccaaagaagacgaaaactgagcaggagctccccagacctcaaagcccatcggaccttgactcgctcgacggtcgctctctgaacgatgacggctcaagcgatcccagggacattgaccaggacaacaggagcacatcaccgtctatatactcgcctggatcagtggagaacgattcagactcatcttccggtctatcccagggacctgcgcgaccatatcatccaccccccctctttccaccctcccctcaaccccctgacagcactcctcgacagccagaagcctccttcgaaccccacccaagtgttacccctaccgggtatcatgcccctatggagccgccaacttctaggatgtttcaggctccacctggagcccctccaccgcatccgcagctctatcccggtggcaccggcggagttctttctggccctccaatggggcctaagggtgggggcgcggcatcttccgttggcggcccaaacgggggaaagcagcatcctcctcccaccacccccatcagcgtgtctagctcaggggctagcggagctccacccaccaaacctcccaccaccccagtaggcggaggtaatctgccaagcgcacctcctccagccaactttccccatgtcacacctaatctgcctccccctcccgccctgcggcccttgaacaacgcatccgccagccctccaggactaggtgcccagccattacccggccacctaccatccccccatgctatggggcagggcatgggagggctcccccctggacctgagaaaggcccgacattggccccaagcccacattcgctcccacctgcatccagcagcgcccctgcgcccccaatgagatttccctacagttcttcctcaagttcctcagctgccgcgtcctcaagcagcagctcgtcttcttcgtctgcttcacccttccctgccagtcaggccctacccagctatccgcattcctttccaccccctacatcactgtctgtgagcaaccagccacctaaatacacacagccttctttgccatcacaggccgtatggagtcagggcccccctcccccccctccttacgggagactactcgccaatagcaacgcacacccaggcccattccctccctctactggcgcacagtctaccgcccacccaccagtctccacccaccatcatcaccatcaacagcagcagcagcagcaacagcaacagcaacagcaacagcaacagcagcagcagcatcacggaaatagcggcccacccccaccgggcgcattccctcaccccctcgagggagggagctcccatcacgcccatccatacgctatgagcccaagtctgggttccctgagaccgtatccacccggtcccgctcatctgcctccaccccacagccaggtcagctacagtcaagccggacctaatggacctcccgtttccagctcatcaaacagcagctcatcaacatctcaaggttcatacccctgctcccatccatctcccagccagggccctcagggggccccctacccctttccccctgtgcctacagtgactacatcatcagctacactgtccaccgtgatagcaactgtagcctctagcccagccggatataagactgcaagccctccaggtccccccccatacggaaagcgcgcgccaagccctggcgcctacaagacagcaacgccaccggggtataagcctggaagcccaccgtcctttaggaccgggacgccccccgggtacagaggaacgagccctccagcggggcctgggacgttcaagccaggctcccccactgttggacctggaccgctacctccagctggaccctcgggcctgcctagcctccctcctccccccgctgcaccagcttccggaccgccactctcagccacccagataaagcaggagcccgctgaagagtacgagacccccgaaagccctgtaccgcctgcaaggagcccatctccccctccaaaagttgttgatgtcccaagtcacgccagtcaatcagcccggtttaataaacacctggaccgcggcttcaactcatgtgcccggagcgatttgtacttcgtcccattagagggctctaagctagctaagaagagagccgacctcgtcgaaaaggtgcgccgcgaagcagagcagcgtgcgcgggaggaaaaggagcgcgaaagagagcgggagagggagaaggagcgagagcgcgaaaaggagcgtgagttggaacgctccgtcaaactcgcgcaggaggggcgagccccagtcgaatgtccgtctcttggccccgtgccacaccgacccccctttgaacctggaagcgcagtggctaccgtgcctccttacttaggccccgacacacccgccctaaggactctgagtgagtatgctcgcccacacgtgatgtctcctggcaataggaatcaccccttctacgtacccctaggagcagtagatcccggcctcctcggatacaatgttcccgcactgtattcatccgaccctgcggccagagaaagagaacgggaggcccgagagagagatctgcgcgacagactcaaacctggtttcgaagtgaaaccctcggagctagagccccttcacggagtgccaggacccggcctcgacccttttccccggcacggaggtctggcgctgcaacccggcccccctggtctgcacccatttccgttccatccgtctctagggcccctggaaagggagcgattggctctggccgctgggcctgctttaaggccggatatgtcttacgcagaaaggctggctgccgagaggcagcacgcagaaagagtggccgcactgggcaatgatccgttagctcgcttacagatgctgaacgttacaccccatcaccatcagcactcacacattcattcccatctgcacctgcaccagcaggacgcaatacacgcagcctccgctagtgtgcacccattaatcgaccccctcgcatctgggagtcacttgacccgcatcccctaccctgccggaacactgccgaacccccttctacctcatcccctgcatgaaaatgaggtgttacgccaccagttattcgccgctccgtatcgggatcttcctgcgtccctcagcgctccaatgtccgcggcgcaccagctgcaggccatgcatgcccagtctgcagaactgcagagactggctctcgagcaacaacagtggctgcacgcccaccatcctttacattccgttccactacctgcccaggaggattattactcccatctgaagaaagaatccgataagcctttgtag

SEQ ID NO: 22429 - DNA, 3573 bp, Artificial Sequence
  derived and/or modified sequence
atgaagacccggcagaacaaggacagcatgagcatgcggagcggcaggaaaaaggaggctcctggtccccgggaggagttgcggagtcggggccgcgcctcaccagggggcgtgagcacttcttcctccgacggtaaagcagagaaaagcagacagacggcgaaaaaggcacgcgtagaggaggcgtccacacccaaagtgaacaaacagggtaggtcagaagagattagtgagtcagagagcgaggaaacaaacgcccctaaaaaaacgaagaccgagcaggagctgcctcggccacaaagcccctccgacctggactcgctggatggtcggtcccttaatgatgatgggagttcagatccccgggacatagaccaggacaacaggtctaccagtccaagtatctacagtccagggtcagtggagaatgatagcgacagtagctcaggactctctcagggtcctgcccgcccttaccaccccccgcccttgttcccccccagccctcagccaccggattcaaccccacgccagccagaggcctcattcgagcctcatccctccgtgacgcccaccggctatcacgcccctatggagccacccacgagtagaatgttccaggcaccgccaggggccccaccgccgcacccacagctgtaccctggcgggacaggcggggtcctgagtgggccacctatgggccctaagggcggaggagctgcaagttcagtgggaggccccaacggcggtaaacaacatccccctcccacgactccaatctcggtttcaagctctggggctagtggcgccccacccacaaagccacccactaccccagttggaggaggtaacctcccgtcggctccgcctccggccaatttccctcacgtcaccccaaacttgcctccccccccagctctgcggccccttaataatgcctcggcttctcctcctggtctcggagctcaacctctgcccggtcacctgccatccccgcatgctatgggccaaggaatgggtgggctgccccctggtcccgaaaaggggcctacactggctccaagcccacattctctaccaccagcttcatcgtctgcccccgctccccccatgaggttcccctactcctcaagcagcagctcgtctgccgccgctagttctagttcttcaagctcctcttcttccgcctcaccatttcccgcgagccaggccctgccaagttacccccattcatttccacctccaacaagcttgtccgtttcaaatcagccccccaaatacacccaaccttcactgccaagtcaggctgtgtggtcacaggggccgcccccccctcctccatatggaagacttctcgccaacagcaatgcccatcctggaccctttcctccgagcacaggagcacagagtactgcccatcctcccgtcagtactcaccaccatcaccatcagcaacaacagcagcagcaacagcagcaacagcagcagcagcaacaacaacaacaacaccatggaaattcaggtccacccccgcccggggcatttccacaccccctcgaaggcggatccagccatcacgcccatccgtatgcaatgtcgccatctcttgggtcattgcgtccttaccccccagggcctgcccacctacctcctcctcattcccaggtgagctattcacaagcagggccaaacggcccaccagtgtcatcctcgagtaattcttctagtagcacttcccagggctcctacccttgtagccacccaagtccaagtcagggaccccaaggtgctccttacccattcccacctgttccaactgtgactacttctagtgccaccctgagcaccgtcatagccaccgtcgcttcttcacctgccggatacaaaaccgcttctccacccggacccccgccctatggaaaacgggcccctagccccggggcctataagaccgcaacacctcccgggtataaaccggggtcaccaccttccttcagaactggcacaccaccaggttacagggggacatcacctcccgccgggcccggaacttttaagccaggaagccctactgtaggcccagggcccctaccacctgctggaccatccgggcttccttcactccctccaccgcctgctgctccggcctcaggaccaccgctaagtgccacccagattaaacaggagccggcggaagaatacgaaactcccgaaagccctgtgcccccagcccgttcccctagcccgccaccgaaggttgtggacgtgccctcccacgcttcccagagtgcccgttttaataagcatctggacagaggcttcaattcatgtgcccgatccgacctctactttgtgcctctcgagggttctaaactggccaagaaacgggccgacctggtcgagaaggtgagaagggaagctgagcagagagcacgggaggagaaggagagggagagggaacgcgagagggagaaggagagagaacgcgaaaaggagagggagctcgagcgcagcgtgaaattggctcaggagggtagggctccagtcgaatgtcccagcctcggtccagtgccccacaggcctccttttgagcctgggtcagcagttgcaactgtacccccttatctgggtccggacaccccagcgttgagaaccttatcagagtatgcccggccacacgtcatgagcccaggcaatagaaatcaccccttttatgtcccacttggtgctgtcgatcctggccttctcggttataacgtgccagcactttattcgtctgatcctgccgcccgcgaacgggagcgcgaagcccgggagagagacctgagggatcggctgaagcctggattcgaggttaaacctagcgagctggagcccttgcatggcgtacccggacctgggttggacccttttccgcgtcatggggggctcgcccttcagccgggtccccccgggttgcaccctttcccctttcacccttcattgggtcccttggagcgcgagagattagccctggctgccggcccagccctgcgacccgacatgtcttatgcagaacgtctcgccgcagaaaggcagcatgccgagcgggtcgccgctctcggcaatgacccattagctcggctccagatgctaaacgtaacacctcaccaccaccagcactctcacattcactcccacttgcacctacaccagcaggatgccattcatgcggcctctgcctcagtgcacccactaatcgaccccctcgcctctggttcccacctgacgaggattccatatccagctgggacgctccctaacccactgttgcctcaccccctccacgaaaatgaagttttgaggcaccaattgtttgccgccccttacagagacctccctgcttctctgagcgcgcccatgtcggccgctcaccagctgcaagccatgcacgcacagagtgccgaactgcaacgattagctttagagcagcagcagtggttacatgcccaccaccccctccatagcgtgcccctgcctgcacaggaagattactactcccatttgaagaaagaaagcgacaaacctttatag

SEQ ID NO: 22430 - DNA, 3573 bp, Artificial Sequence
  derived and/or modified sequence
atgaagacccggcagaacaaggacagcatgagcatgcggagcggccgcaagaaggaggcgcctggacctagagaggaactgagatctcgaggaagggccagtcctggcggagtgagtacttcaagtagtgacggtaaagccgaaaaatcgcggcaaaccgccaaaaaagccagggtcgaagaagcttccacccctaaggtgaacaagcagggccggagcgaggaaattagcgagtcagaatcagaggagactaacgctcccaaaaagactaaaacagaacaggagctcccaagaccgcagagcccctccgatctggactccctggacgggagatcacttaacgacgacggctcctccgaccccagagacattgaccaggacaaccggagcacttccccatcgatctattctcccggtagcgtggaaaatgactctgattctagctccggactcagccaaggaccagcacggccgtaccatccacctcctctgtttccacctagtccacagccccccgattcaactccgaggcagcccgaggcttcattcgaaccgcatccctccgtgacacctactggttaccatgccccaatggagcctccaacttcacgaatgttccaggcaccgccaggcgcaccaccaccccatccacaattgtacccgggcggcacaggaggagtgctgtccggccctcctatggggccaaaaggaggcggcgccgcctcctctgtaggagggcctaatggcgggaagcagcacccaccgccaactacccccatttctgtgagcagcagtggagcatctggtgccccaccgaccaagccccccaccactccagtcggaggcgggaacctcccaagcgccccgccgcccgccaatttcccccacgtcaccccgaacctccctccccctccagcacttagacccctgaacaatgccagtgcgtccccacccggactgggagctcagcctctgcccgggcaccttccaagcccacatgctatgggtcagggtatgggagggcttccccccggcccagagaagggccctacacttgcccccagtccacattcattgcccccagcctcatcgtctgctccggcccctcctatgcgctttccatactctagttcttctagtagtagtgccgccgcaagctccagcagctcttcatcctcatcctccgcatccccattcccagcatcacaagcactccctagttatccccattccttcccgccccccacatcactgagtgtaagtaatcaaccccccaaatacactcagccctcgcttcccagccaagctgtctggagtcagggcccgccgcctcctccaccatacggacgtctgctcgctaactctaacgcgcatccaggcccctttccaccaagtacgggcgcccaatctaccgcacatcctccggtctccacacaccatcaccaccaccagcagcagcaacaacagcagcagcaacaacagcaacaacagcagcaacagcaacagcaccacggaaattcaggaccccctcccccaggcgcttttccacacccactcgagggcggcagctcccaccacgctcatccatacgccatgtcgccatcactggggagcctgcgcccctaccctccaggccctgcgcatctaccgcccccccactcacaggtgtcttacagccaggctgggccaaacggccctcccgtcagcagctctagcaattcttcgagttcgacgtcccagggatcgtatccttgcagccatccgtccccctcgcagggtcctcaaggggctccttatccctttcctcctgtgcccaccgtgactacgtcctcagcgactttgtctaccgtaatagcaactgtggccagcagtccagcaggttacaagactgcctcccctccaggtcctccaccttacgggaagcgcgcaccgtctcctggggcttataagacagcgacgccacctggctacaagccaggaagcccaccctcatttcggaccgggacaccccctgggtacagaggcacgtctccgcctgccggccccggcacctttaaaccgggaagtcctaccgtcgggcccggacccctgccacccgcaggaccatcaggactgcctagcctgccgcccccaccagctgctcctgcaagcggcccgcctctgtcagcgacacaaatcaaacaggaaccagccgaagagtacgaaacgccagagtcacccgtgcccccagccaggtcaccatccccccctcctaaggtggttgacgtaccatcccatgcctctcaaagcgcgaggttcaataagcatcttgaccgcggattcaattcctgcgctcgcagcgacttgtattttgtccctcttgagggaagcaagttagctaagaagcgggccgatctggttgagaaagttaggcgggaagccgaacagagggcgcgggaggagaaagagcgggaacgcgaaagagagcgcgagaaggaacgtgagagagagaaagaaagagagcttgaaaggagcgtgaagctggcccaagaaggtcgagcacctgtcgaatgcccaagcctgggccctgtgccccataggccaccctttgagcccggtagtgccgtggcgacagtgccaccttacctgggtcccgacactccagccttaagaacgttgtctgaatacgcaaggccccatgtgatgtcaccaggtaatagaaaccatccattttatgtacctcttggagccgtagatcctggacttctgggctacaatgtaccagccctgtattcatctgaccctgccgccagagaacgagaacgcgaggcaagggaaagagacctgcgcgatcggcttaaacccgggttcgaagtgaagccaagcgagttagaacctcttcacggggtacctggaccagggctggacccgtttccacggcatggaggactggcactacagcccggtcccccagggctgcaccccttcccgtttcacccatcactgggtcctctggagagagagagactggcccttgctgctggccccgctctgcggcccgacatgagctacgctgaacggctcgcagccgaaagacagcacgcggagagagtggccgccttaggcaatgaccctctagctcggctgcaaatgttaaacgtgactcctcaccatcaccagcattcccatatccacagccatctgcatttacatcagcaggacgctatacatgctgccagtgccagcgtacacccactgatcgacccacttgcctccggaagccacctgactcggataccataccccgccggtaccctgcccaatccattgttgccccacccacttcatgagaatgaggttctcaggcaccagctctttgcagcaccctatcgagaccttcccgcgtcactgagcgcccctatgagtgccgcccaccagctacaggctatgcatgcacagagtgccgagctgcagagactggcccttgagcagcagcaatggctgcacgcccatcaccctttgcatagcgttcccttgcctgcacaggaggattattattcgcacctgaagaaagagagtgacaagccactgtag

SEQ ID NO: 22431 - DNA, 3573 bp, Artificial Sequence
  derived and/or modified sequence
atgaagacacgtcagaacaaggattccatgtccatgcgatccggacggaaaaaagaagctccagggcctagagaggaacttagaagtcgaggacgggcatcccctggaggtgtgagtacatccagcagtgatggaaaggcagaaaagtctcgacaaacagcaaaaaaagccagggtggaggaggctagcaccccaaaagtgaacaaacagggcaggagcgaggaaatctccgaaagcgaatcggaggaaacaaacgctcccaaaaagacaaaaaccgaacaggagctgccacggccacagtcaccctccgacctagactccctggacgggagatcgctgaatgatgacgggagctcagatccgagggatatagatcaggataaccgctcaacttccccatcaatctattctccaggcagtgtggagaacgattccgactcatccagcgggctgtcccagggccctgcacggccatatcatcccccacctctatttccaccttctccccagcccccagacagcactccccgacagcctgaagcgagttttgaaccacacccaagcgtcactcccaccggctaccatgccccaatggagccacctaccagcagaatgtttcaagcccctcccggagcccctccccctcatcctcagctgtaccccggagggactgggggtgtgttgtcggggcctcccatgggaccaaaagggggtggggctgcctccagtgtaggcggtcccaatggcggaaagcaacatccccctcccacaaccccaatttccgtgtccagctcgggtgcgtcaggcgctccacctactaagccaccgacaaccccggtgggagggggaaatctgcccagtgctccccctccggctaattttccccatgtgacacccaacctgccccctcctcctgccctacgacctcttaataacgcttccgcttcacctccagggttaggggcacagcccctcccgggtcacctacctagcccacacgctatggggcagggaatgggcggtctgccgccaggaccggaaaagggacccacactggcaccttccccacattctctgccccctgcatcaagctctgcgcctgctcccccaatgcgcttcccctactcgtcgtcctctagttccagcgccgctgcttcatcatcctcatcctcctcttctagcagcgcatcccctttccctgccagtcaggctttaccgtcctacccacatagttttccccctcctacttcattatctgtgtctaaccagccacccaagtacacgcagcctagtctgccttctcaagccgtatggtctcagggccctcctcctccccctccctacggtagactgttggctaacagcaacgcacatccaggccctttccccccaagcacaggcgctcagtccaccgctcacccacctgtttccacacatcatcaccatcaccaacagcagcaacagcagcagcagcagcagcaacaacagcaacagcaacaacagcagcatcatggaaattctggacctcctcctcccggagcgtttcctcaccccctcgagggaggatcctctcatcatgcccacccatacgcaatgagtcccagtctgggcagcttacggccttacccaccaggccctgcacatttgcctccccctcactcccaagtctcgtacagccaggcgggacctaatggcccacctgtgtcttccagctctaacagctcctccagtacatctcagggcagctacccatgtagccaccccagcccttcacagggcccacagggtgccccatacccttttccgccagtccctactgtcacaacctcaagcgccaccttgtctactgtgatagccaccgtggcttcatcaccagccggatacaagacggccagccccccaggaccccctccgtacggcaaacgggcaccatccccaggggcttacaagacggccacaccgccaggatacaaacctggatctccacctagcttcaggacaggcacccccccaggttatcgaggtacatctccacccgcagggccaggcacgttcaagcctgggtcaccaacagtgggtcccggaccactgccacctgctggcccatctggcctgcccagcctccctccgccaccagccgctccagcttccggacccccactctctgcgactcagattaagcaggaacccgctgaggagtacgaaacccccgagagccctgtgccacccgctagaagtccctccccccctccaaaggtggttgacgtgcctagccatgccagtcagtcggccaggttcaataagcatcttgatagaggcttcaattcttgcgcccgatccgacctgtactttgttcccttagaaggatcgaagctagccaaaaagcgcgctgatttggttgagaaggtgagacgggaggctgaacagagggccagggaggagaaggagagagaaagagagcgcgagagggaaaaggagcgggaacgggaaaaggagcgagaactagagcgaagcgtgaagcttgcccaggagggacgagcccctgtagaatgcccctccttaggcccagtgcctcataggcccccatttgagccaggaagcgcggtagcgaccgttccaccttatctgggacccgacacacctgccctccggactctttctgagtacgctcggccacatgtaatgagtccgggaaaccggaatcatccattttatgtacctctcggagctgtagaccccggactcttagggtataacgtccctgcactgtactctagcgatcctgctgccagagagagagaacgcgaggccagagagcgtgatctgagggacaggctaaaaccgggattcgaagtgaaaccaagcgaactcgagccactccatggggttcctggccctggcctggaccctttccctcggcacgggggactggctctccaacccggtcctcccggtttacatccctttccctttcacccgagtctgggacccctcgaaagagagcgactcgccctggcggctggtcccgcactcagacctgacatgagctatgccgaaagattagccgcagaacgtcaacacgcggaacgcgttgcagccttggggaatgatcctctggcccgattacagatgctgaatgtgacccctcaccatcaccagcacagtcacatacactcccacttgcacttacaccagcaagacgcaatccacgcagcttccgccagcgttcacccactgatagacccgcttgcctcaggttcacacctgacccggatcccctaccctgccggaacacttcctaacccattactaccgcatcccttgcatgaaaatgaagtgctgcgccatcagttgttcgcagcgccttacagggacttaccagcaagcctgtccgcaccgatgagtgccgctcaccagcttcaggccatgcatgcacagagcgccgagctgcaacgtctagctctggaacagcaacagtggctccacgctcaccaccctttacattctgtccctttgcccgcacaggaggattattattcacacctgaaaaaagagtccgataagccattgtag

SEQ ID NO: 22432 - DNA, 3573 bp, Artificial Sequence
  derived and/or modified sequence
atgaaaaccaggcagaacaaagacagcatgtctatgaggagcggcagaaaaaaagaggctcccggtccacgcgaggagttgaggtcaagagggagagccagtcctggcggagtatctacatcctcatcggatgggaaagctgaaaagtcacgtcaaaccgctaagaaggccagagtagaagaggcgtccaccccgaaagtgaacaaacagggccgttcagaggagatctcagagtctgagtcggaagagacgaatgcccctaaaaaaaccaagaccgagcaggaactgcctagaccccagtcaccctccgacttggactccctggatggcagaagtctcaatgacgacggatccagcgatcccagagacatagaccaagacaaccgctcaacatctccaagcatatactctcctggatcggttgaaaatgactctgactctagttctggactgtctcaaggcccagcccgtccctatcatccaccccctctgtttcctccttctccccaacctcctgacagtaccccacgtcaaccagaagcaagcttcgagccacatcctagtgtaacacccaccgggtatcacgcccctatggagccgcctacatctcgcatgttccaagccccacctggggcaccacctccccacccacagctttatcctggcggtaccggaggcgttcttagcggcccacccatggggcctaagggcggtggggcagcttcctctgtgggcggtcctaatggcggaaaacaacaccctcctcccactacacccattagtgttagtagctccggcgcatcaggagcgccacctacaaaaccacccacgacccctgtgggcggtggaaacctcccctctgctccgcctccagccaattttcctcatgtaacccctaatctccctccacctcctgcgttgcgacctctaaataatgcaagtgcctctccccctgggctaggggctcagcccctgcctgggcatctgccctccccacatgctatggggcagggaatggggggtctgccgcctgggcctgaaaaagggcctaccttggccccatccccgcattccctgcctcccgcatcctccagtgcgccagctcccccaatgaggtttccgtattcatcctcgtcgagctcatcagcggctgctagtagcagcagctccagcagctcgtcaagtgcttccccgttcccggcttctcaagcgctgccatcctatcctcatagtttccccccacccacttcccttagcgtgtcgaaccagcctcccaagtacacccagcccagccttccctcacaagccgtgtggtcgcagggcccaccaccaccccctccttacggccgacttctggcaaactccaacgcacatccaggtccctttcctccctcaacgggggctcaatcaacagctcatcccccagtgtcaacccaccaccaccaccaccagcagcagcagcagcagcaacagcaacagcagcagcagcagcaacaacagcaacaacaccatggtaattccgggccacctccccctggcgcatttccacatcctttagagggcggatcttcccatcacgctcatccttatgcaatgtcgccaagcctgggctcactgcgcccttacccccctggccctgcccacctgccccctccccatagccaggtgtcatactctcaggcaggtccaaacggaccccctgtttcctccagttcaaattcttcgtcctcgaccagccagggtagctatccgtgttctcacccctcccccagccaggggccacagggagccccataccctttcccgcctgtcccaacggtaaccacctcttccgcaactctctccaccgtgatcgccactgtggcttcctcaccagcaggatacaaaacagcgtctccaccaggtccacctccttatggtaagcgcgctccctcccccggagcctataaaaccgctacgccaccaggctacaagccgggttcccccccatctttccggacaggcaccccaccaggataccgtgggacctcacctcctgcaggtcctggcaccttcaaacctggaagccccaccgtagggccagggcctctcccgccagccggtccatctggcctgcctagcttaccgccaccacccgctgcgccagctagtgggccaccgctgtccgcaacacagatcaaacaggagccagccgaggaatacgaaacacctgagtcccccgtacctcctgccaggagtccatcaccacctccaaaggtggtcgatgtcccttcccacgcttcacaaagcgcccgatttaacaaacatttggatcggggatttaactcctgcgcgaggagtgatctctactttgtgccactggaagggtccaaattggctaaaaaacgcgctgacctggtggagaaggtgagacgcgaagcagaacagcgagccagagaggagaaagagcgtgagagagagagagaaagagagaaagaacgcgagcgggagaaagagagagagctcgaaaggtccgtgaaactcgcgcaggagggccgagctcccgttgaatgtccatccctggggccagttccccacaggcccccttttgagcccggatccgccgtggcgacagtcccaccgtatcttggacccgatacacctgcactgcgcacgctgagcgaatacgccaggcctcacgtcatgagcccaggaaacagaaaccatcccttttacgtccccttgggagccgtggacccaggtctgctgggatacaatgtgccggctctttacagctcagaccccgcagccagagagagggaacgggaagctagagagagggaccttcgggatcgcctgaagcccggattcgaggtcaagccttccgagctggagcctctgcatggtgtcccaggaccaggcctggacccctttccccgtcatggcggtctggcccttcagcctggcccaccaggattgcatccatttccattccaccctagtctgggccctctcgaaagagaacgtctcgcccttgctgccggacccgcattacgccctgacatgtcatacgccgagcggctggcggctgagaggcaacatgcagagcgtgttgccgctctggggaacgatccactggccaggctacaaatgcttaatgtgactccacaccatcaccaacactcgcatatccattctcacctccacctccatcaacaggacgccattcacgccgcatctgcatctgtccatccattaatagatcccctggccagcggcagccacctcactcgtatcccttatccggcagggacccttcctaaccccttgctccctcaccccttacacgagaacgaagtgctgagacaccagctgttcgcggcaccttacagagacctccccgcaagcctgtccgctccaatgtcggctgctcatcagttacaggccatgcatgcccagtctgccgagcttcagcgcctggctctcgagcagcagcaatggctccacgcacatcaccccctgcactctgtacccttgcccgcacaggaagactactatagtcacctgaagaaggaatccgataaacctctgtag

SEQ ID NO: 22433 - DNA, 3573 bp, Artificial Sequence
  derived and/or modified sequence
atgaaaacccggcagaacaaggactctatgagcatgaggagtggccgaaagaaggaggctcccggtcctagagaggagctccgttcaagaggtcgtgcctccccaggaggagtctcgacatcaagtagtgacgggaaagccgaaaagtctcgccagactgcgaagaaggccagagtggaagaggcttccactcccaaggttaacaaacaaggcaggagcgaggagatcagtgaatctgaatccgaggaaaccaacgccccaaaaaagaccaagaccgaacaggaactgcccagaccacagtcgccaagcgacctggactcgttagatgggaggtcactaaatgacgacggctcttcagaccccagagatattgatcaggacaaccgttcgactagtcccagtatttacagccccggatctgtagaaaacgactctgacagttccagcggtctgtcccaagggcctgcacgaccatatcacccccctcctctcttcccaccctccccccaacccccagactccacccccaggcagcccgaggcatcttttgagccacacccctccgttactcccacgggctaccacgcccctatggaacccccaacatcccgcatgttccaagctcctccaggagcccctcctccacacccccaactgtatccaggcggaactggaggtgtgctgagtggtcccccaatgggccctaagggcggaggtgcagcgtcctctgtgggcggacccaacggcggaaaacagcaccctcccccaaccacccccatcagcgttagctcgagcggagctagcggcgctccaccaaccaaacctcccacaactcccgttggaggtggaaacctaccctccgcgcctccccctgcaaacttccctcacgtgactccgaacttgccaccccctcctgctctgagaccactgaacaatgctagtgcatcacctcctgggctgggcgctcagccactgccagggcacctgccttcaccacacgccatgggtcagggtatgggcggtctgcccccaggacccgagaagggtccgacactggctcccagtccccactcattgccacctgcctcatcctctgctcctgcacccccaatgcgcttcccttattcttcttcctcatccagcagcgcagccgcatcctcgagcagctcatccagttcctcaagcgcaagccctttccccgcaagtcaggccctgccctcctacccccattctttccctcctcccacaagcctctctgtctcaaaccagcccccaaaatacacccagcctagcctcccctctcaggccgtgtggtctcagggcccacctccgcctcccccatatgggaggctgttagctaattcgaacgcacaccccggacctttccctcccagtactggcgcacagagtaccgcccacccacccgtctcaacacatcaccatcaccaccaacagcagcaacagcagcaacagcaacaacagcagcaacagcagcagcaacaacagcatcatggcaacagcggacccccacctccgggagccttccctcaccccctggagggaggtagcagccaccatgcgcatccatacgcgatgtccccgagtctagggagtctgaggccataccctccaggacctgcccatctacctccaccccactctcaggtctcttacagccaggccggaccaaacgggcctccggtgtccagcagcagcaattcctcgtcttccacgtcccagggctcctatccatgcagtcatccaagtccctcccagggtccgcagggagcaccttaccccttccctccagtccctaccgtcactacatcctccgccacactctcaactgtgatagctacagttgcttcctctcccgcaggctacaaaacggcgtctccaccaggtccacccccttacggaaagcgtgctccttcacctggagcgtacaaaaccgctacccctcctggatacaagccaggatccccaccatccttccggaccggtaccccccctggatatcgtggcacaagccccccagcgggacctgggacgttcaaacctgggtcaccgaccgtaggccctgggcctcttccacccgcaggaccgagcggtttaccatccctccctcccccaccggcagccccagcttctggaccaccactatctgccactcagattaagcaggaacctgccgaggagtatgaaacgccagagtcccccgtccctccagcacgaagtccctcccccccaccgaaggtcgtggatgttccctcccacgcgtcccagtccgcccgattcaacaagcatctggataggggtttcaatagttgcgccaggtctgatctgtattttgtgccattagaagggtctaaattggctaagaaacgggctgacttagtggaaaaagtgcgtcgagaggctgagcaacgagccagagaggagaaggaaagagagagagagcgcgaacgggaaaaggagagggagagggaaaaggaaagggaactggaacggtccgtaaagcttgcccaagagggccgagcccctgtggaatgtcccagccttgggcctgtaccccaccgaccaccattcgaacccggaagtgccgtggctactgtccccccatatctgggtccagacactccagctcttagaaccctgagcgagtacgccaggcctcacgtcatgtcacccggtaaccgcaaccacccattctatgtaccactcggagccgttgatccagggctgctcggttataacgtccctgcactgtattccagtgacccggctgctcgcgaaagggaaagagaagcccgtgaacgggatcttagggacagattaaagcctgggttcgaagttaaaccatccgagctggagccccttcatggagttccgggtcctggacttgacccctttccgagacatgggggtctcgccctccagcctggaccccctggcctgcaccccttcccgttccatccctcccttgggcctctagaaagagaaaggctagccttagcagcgggacctgcactacggccagacatgagctatgccgagaggctcgcagccgaaaggcaacacgccgagcgggtggcggcattaggaaacgacccgcttgctaggctacagatgctcaacgtgacaccacatcaccatcaacattcacacatccactcacacctgcaccttcaccagcaggacgctatccacgcagcttcggcttccgtgcatcccctgatcgatccactcgcctcaggaagtcacctgacacgtatcccgtatcctgcgggaaccctaccaaacccgctgcttccacatccactgcatgaaaatgaagtgttgcgccatcagctattcgccgcaccctacagagacttgccggctagtctcagcgccccaatgtctgccgctcaccaattgcaggcaatgcacgcccagtccgctgagctgcagcggctcgctctggaacagcagcagtggctgcacgctcatcaccccttgcactctgtccctctccccgctcaggaagattactattctcatctgaagaaggagtcagataagcctctgtag

SEQ ID NO: 22434 - DNA, 2867 bp, Artificial Sequence
  derived and/or modified sequence
ggtttccttattcatcctctagtagtagctctgcagcagcctcctcttccagttcttcctcctcttcctctgcctccccccccaccacctcctccctatggccgcctcttagccaacagcaatgcccatccaggccccttccctccctctactggggcccagtccaccgcccacccaccagtctcaacacatcaccatcaccaccagcaacagcaacagcagcagcagcagcagcagcagcagcagcagcagcagcagcagcatcacggaaactctgggccccctcctcctggagcatttccccacccactggagggcggtagctcccaccacgcacacccttacgccatgtctccctccctggggtctctgaggccctacccaccagggccagcacacctgcccccacctcacagccaggtgtcctacagccaagcaggccccaatggccctccagtctcttcctcttccaactcttcctcttccacttctcaagggtcctacccatgttcacacccctccccttcccagggccctcaaggggcgccctaccctttcccaccggtgcctacggtcaccacctcttcggctaccctttccacggtcattgccaccgtggcttcctcgccagcaggctacaaaacggcctccccacctgggcccccaccgtacggaaagagagccccgtccccgggggcctacaagacagccaccccacccggatacaaacccgggtcgcctccctccttccgaacggggaccccaccgggctatcgaggaacctcgccacctgcaggcccagggaccttcaagccgggctcgcccaccgtgggacctgggcccctgccacctgcggggccctcaggcctgccatcgctgccaccaccacctgcggcccctgcctcagggccgcccctgagcgccacgcagatcaaacaggagccggctgaggagtatgagacccccgagagcccggtgcccccagcccgcagcccctcgccccctcccaaggtggtagatgtacccagccatgccagtcagtctgccaggttcaacaaacacctggatcgcggcttcaactcgtgcgcgcgcagcgacctgtacttcgtgccactggagggctccaagctggccaagaagcgggccgacctggtggagaaggtgcggcgcgaggccgagcagcgcgcgcgcgaagaaaaggagcgcgagcgcgagcgggaacgcgagaaagagcgcgagcgcgagaaggagcgcgagcttgaacgcagcgtgaagttggctcaggagggccgtgctccggtggaatgcccatctctgggcccagtgccccatcgccctccatttgaaccgggcagtgcggtggctacagtgcccccctacctgggtcctgacactccagccttgcgcactctcagtgaatatgcccggcctcatgtcatgtctcctggcaatcgcaaccatccattctacgtgcccctgggggcagtggacccggggctcctgggttacaatgtcccggccctgtacagcagtgatccagctgcccgggagagggaacgggaagcccgtgaacgagacctccgtgaccgcctcaagcctggctttgaggtgaagcctagtgagctggaacccctacatggggtccctgggccgggcttggatccctttccccgacatgggggcctggctctgcagcctggcccacctggcctgcaccctttcccctttcatccgagcctggggcccctggagcgagaacgtctagcgctggcagctgggccagccctgcggcctgacatgtcctatgctgagcggctggcagctgagaggcagcacgcagaaagggtggcggccctgggcaatgacccactggcccggctgcagatgctcaatgtgactccccatcaccaccagcactcccacatccactcgcacctgcacctgcaccagcaagatgctatccatgcagcctctgcctcggtgcaccctctcattgaccccctggcctcagggtctcaccttacccggatcccctacccagctggaactctccctaaccccctgcttcctcaccctctgcacgagaacgaagttcttcgtcaccagctctttgctgccccttaccgggacctgccggcctccctttctgccccgatgtcagcagctcatcagctgcaggccatgcacgcacagtcagctgagctgcagcgcttggcgctggaacagcagcagtggctgcatgcccatcacccgctgcacagtgtgccgctgcctgcccaggaggactactacagtcacctgaagaaggaaagcgacaagccactgtagaacctgcgatcaagagagcaccatggctcctacattggaccttggagcacccccaccctccccccaccgtgcccttggcctgccacccagagccaagagggtgctgctcagttgcagggcctccgcagctggacagagagtgggggagggagggacagacagaaggccaaggcccgatgtggtgtgcagaggtggggaggtggcgaggatggggacagaaagcgcacagaatcttggaccaggtctctcttccttgtcccccctgcttttctcctcccccatgcccaacccctgtggccgccgcccctcccctgccccgttggtgtgattatttcatctgttagatgtggctgttttgcgtagcatcgtgtgccacccctgcccctccccgatccctgtgtgcgcgccccctctgcaatgtatgccccttgccccttccccacactaataatttatatatataaatatctatatgacgctcttaaaaaaacatcccaaccaaaaccaaccaaacaaaaacatcctcacaactccccagg

SEQ ID NO: 22435 - DNA, 4279 bp, Artificial Sequence
  derived and/or modified sequence
caggtttcattgaaaacagatcctgcaaaagttccaggtgcccacactggaaacttggagatcctgcttcccagaccacagctgtggggaacttggggtggagcagagaagtttctgtattcagctgcccaggcagaggagaatggggtctccacagcctgaagaatgaagacacgacagaataaagactcgatgtcaatgaggagtggacggaagaaagaggcccctgggccccgggaagaactgagatcgaggggccgggcctcccctggaggggtcagcacgtccagcagtgatggcaaagctgagaagtccaggcagacagccaagaaggcccgagtagaggaagcctccaccccaaaggtcaacaagcagggtcggagtgaggagatctcagagagtgaaagtgaggagaccaatgcaccaaaaaagaccaaaactgagcaggaactccctcggccacagtctccctccgatctggatagcttggacgggcggagccttaatgatgatggcagcagcgaccctagggatatcgaccaggacaaccgaagcacgtcccccagtatctacagccctggaagtgtggagaatgactctgactcatcttctggcctgtcccagggcccagcccgcccctaccacccacctccactctttcctccttcccctcaaccgccagacagcacccctcgacagccagaggctagctttgaaccccatccttctgtgacacccactggatatcatgctcccatggagccccccacatctcgaatgttccaggctcctcctggggcccctccccctcacccacagctctatcctgggggcactggtggagttttgtctggacccccaatgggtcccaaggggggaggggctgcctcatcagtggggggccctaatgggggtaagcagcaccccccacccactactcccatttcagtatcaagctctggggctagtggtgctcccccaacaaagccgcctaccactccagtgggtggtgggaacctaccttctgctccaccaccagccaacttcccccatgtgacaccgaacctgcctcccccacctgccctgagacccctcaacaatgcatcagcctctccccctggcctgggggcccaaccactacctggtcatctgccctctccccacgccatgggacagggtatgggtggacttcctcctggcccagagaagggcccaactctggctccttcaccccactctctgcctcctgcttcctcttctgctccagcgccccccatgaggtttccttattcatcctctagtagtagctctgcagcagcctcctcttccagttcttcctcctcttcctctgcctcccccttcccagcttcccaggcattgcccagctacccccactctttccctcccccaacaagcctctctgtctccaatcagccccccaagtatactcagccttctctcccatcccaggctgtgtggagccagggtcccccaccacctcctccctatggccgcctcttagccaacagcaatgcccatccaggccccttccctccctctactggggcccagtccaccgcccacccaccagtctcaacacatcaccatcaccaccagcaacagcaacagcagcagcagcagcagcagcagcagcagcagcagcagcagcagcatcacggaaactctgggccccctcctcctggagcatttccccacccactggagggcggtagctcccaccacgcacacccttacgccatgtctccctccctggggtctctgaggccctacccaccagggccagcacacctgcccccacctcacagccaggtgtcctacagccaagcaggccccaatggccctccagtctcttcctcttccaactcttcctcttccacttctcaagggtcctacccatgttcacacccctccccttcccagggccctcaaggggcgccctaccctttcccaccggtgcctacggtcaccacctcttcggctaccctttccacggtcattgccaccgtggcttcctcgccagcaggctacaaaacggcctccccacctgggcccccaccgtacggaaagagagccccgtccccgggggcctacaagacagccaccccacccggatacaaacccgggtcgcctccctccttccgaacggggaccccaccgggctatcgaggaacctcgccacctgcaggcccagggaccttcaagccgggctcgcccaccgtgggacctgggcccctgccacctgcggggccctcaggcctgccatcgctgccaccaccacctgcggcccctgcctcagggccgcccctgagcgccacgcagatcaaacaggagccggctgaggagtatgagacccccgagagcccggtgcccccagcccgcagcccctcgccccctcccaaggtggtagatgtacccagccatgccagtcagtctgccaggttcaacaaacacctggatcgcggcttcaactcgtgcgcgcgcagcgacctgtacttcgtgccactggagggctccaagctggccaagaagcgggccgacctggtggagaaggtgcggcgcgaggccgagcagcgcgcgcgcgaagaaaaggagcgcgagcgcgagcgggaacgcgagaaagagcgcgagcgcgagaaggagcgcgagcttgaacgcagcgtgaagttggctcaggagggccgtgctccggtggaatgcccatctctgggcccagtgccccatcgccctccatttgaaccgggcagtgcggtggctacagtgcccccctacctgggtcctgacactccagccttgcgcactctcagtgaatatgcccggcctcatgtcatgtctcctggcaatcgcaaccatccattctacgtgcccctgggggcagtggacccggggctcctgggttacaatgtcccggccctgtacagcagtgatccagctgcccgggagagggaacgggaagcccgtgaacgagacctccgtgaccgcctcaagcctggctttgaggtgaagcctagtgagctggaacccctacatggggtccctgggccgggcttggatccctttccccgacatgggggcctggctctgcagcctggcccacctggcctgcaccctttcccctttcatccgagcctggggcccctggagcgagaacgtctagcgctggcagctgggccagccctgcggcctgacatgtcctatgctgagcggctggcagctgagaggcagcacgcagaaagggtggcggccctgggcaatgacccactggcccggctgcagatgctcaatgtgactccccatcaccaccagcactcccacatccactcgcacctgcacctgcaccagcaagatgctatccatgcagcctctgcctcggtgcaccctctcattgaccccctggcctcagggtctcaccttacccggatcccctacccagctggaactctccctaaccccctgcttcctcaccctctgcacgagaacgaagttcttcgtcaccagctctttgctgccccttaccgggacctgccggcctccctttctgccccgatgtcagcagctcatcagctgcaggccatgcacgcacagtcagctgagctgcagcgcttggcgctggaacagcagcagtggctgcatgcccatcacccgctgcacagtgtgccgctgcctgcccaggaggactactacagtcacctgaagaaggaaagcgacaagccactgtagaacctgcgatcaagagagcaccatggctcctacattggaccttggagcacccccaccctccccccaccgtgcccttggcctgccacccagagccaagagggtgctgctcagttgcagggcctccgcagctggacagagagtgggggagggagggacagacagaaggccaaggcccgatgtggtgtgcagaggtggggaggtggcgaggatggggacagaaagcgcacagaatcttggaccaggtctctcttccttgtcccccctgcttttctcctcccccatgcccaacccctgtggccgccgcccctcccctgccccgttggtgtgattatttcatctgttagatgtggctgttttgcgtagcatcgtgtgccacccctgcccctccccgatccctgtgtgcgcgccccctctgcaatgtatgccccttgccccttccccacactaataatttatatatataaatatctatatgacgctcttaaaaaaacatcccaaccaaaaccaaccaaacaaaaacatcctcacaactccccaggaa

SEQ ID NO: 22436 - protein, 467 aa, Artificial Sequence
  derived and/or modified sequence
MAALTIATGTGNWFSALALGVTLLKCLLIPTYHSTDFEVHRNWLAITHSLPISQWYYEATSEWTLDYPPFFAWFEYILSHVAKYFDQEMLNVHNLNYSSSRTLLFQRFSVIFMDVLFVYAVRECCKCIDGKKVGKELTEKPKFILSVLLLWNFGLLIVDHIHFQYNGFLFGLMLLSIARLFQKRHMEGAFLFAVLLHFKHIYLYVAPAYGVYLLRSYCFTANKPDGSIRWKSFSFVRVISLGLVVFLVSALSLGPFLALNQLPQVFSRLFPFKRGLCHAYWAPNFWALYNALDKVLSVIGLKLKFLDPNNIPKASMTSGLVQQFQHTVLPSVTPLATLICTLIAILPSIFCLWFKPQGPRGFLRCLTLCALSSFMFGWHVHEKAILLAILPMSLLSVGKAGDASIFLILTTTGHYSLFPLLFTAPELPIKILLMLLFTIYSISSLKTLFRRSFTLVAQAGVQWHDLS

SEQ ID NO: 22437 - DNA, 1404 bp, Artificial Sequence
  derived and/or modified sequence
atggctgccctaaccatcgctacagggactggtaactggttcagtgcactagccctgggggtgacactgctaaagtgtcttctcatcccaacataccacagcacagactttgaagttcatagaaactggctggcaatcacacacagtctgcctatatctcagtggtattacgaagcgacttccgagtggacactggattaccctccatttttcgcatggtttgaatatatcctgagccacgttgccaagtatttcgatcaggagatgctgaatgtgcacaatctgaactattccagttcccgtaccctactttttcagcggttctccgtcatcttcatggacgttctgttcgtctacgccgtacgggagtgctgtaaatgcattgacggcaagaaggttggcaaggagctcactgaaaagccaaaatttattttatccgtgcttctactgtggaatttcgggctgttaatcgtggaccatatccattttcaatacaatggcttcctttttggacttatgctcctgtcaatcgcccgtctcttccagaagcgacacatggaaggagccttcctctttgccgtcttattacacttcaaacatatttatctctatgtggcaccggcctatggcgtctatcttctacggagctactgttttaccgcgaataagcctgatggatctattcgttggaaaagcttctcttttgttagagtgatttcactggggctggtagtctttctagtgtcagcactgagtctgggcccctttctggcacttaatcagctgcctcaggtgttctcgcgtctctttccatttaagaggggcctgtgtcacgcgtactgggcgccaaacttctgggccctgtataacgctcttgacaaagttctgtccgtgattgggctcaaactcaaattcctggatccaaataatattcccaaggcgagtatgacatccggtctcgtgcagcaattccaacatacagtgctgcctagtgttaccccgcttgcaactctaatctgcactttgatcgcaatacttcctagcattttctgcctgtggtttaagccacagggtccccgcgggtttctgcgatgcctgacactgtgtgccctcagttccttcatgtttggctggcacgtccatgaaaaagcaatacttctcgccatcttacctatgtcattgttgagtgtgggtaaagccggggacgccagcatctttcttattttgacaactacaggtcattactccctttttccactgctgtttacagctcccgagctacctattaaaattctgctgatgttactcttcacgatttactctatttcgagcctgaaaacgcttttccggcggagcttcacgctagtggctcaagctggagtgcaatggcacgacctgtcatag

SEQ ID NO: 22438 - DNA, 1404 bp, Artificial Sequence
  derived and/or modified sequence
atggccgccctgaccatcgccaccggcaccggcaactggttcagcgccctggccctgggcgtgaccctgctgaagtgcctgctgatccccacctaccacagcacagactttgaggtgcacaggaactggctggccatcacccacagcctgcccatcagccagtggtactatgaggccaccagcgagtggaccctggactacccacccttctttgcctggtttgagtacatcctgagccacgtggccaagtactttgaccaggagatgctgaatgtgcacaacctgaactacagcagcagcaggaccctgctcttccagcgcttcagcgtcatcttcatggatgtgctgtttgtgtatgctgtgcgggagtgctgcaagtgcattgatggcaagaaggtgggcaaggagctgacagagaagcccaagttcatcctgtctgtgctgctgctgtggaactttggcctgctgattgtggaccacatccacttccagtacaacggcttcctgtttggcctgatgctgctgagcatcgcccggctcttccagaagaggcacatggagggcgccttcctgtttgctgtgctgctgcacttcaagcacatctacctgtatgtggccccagcctatggagtgtacctgctgcggagctactgcttcaccgccaacaagccagatggcagcatccgctggaagagcttctcctttgtgcgggtcatcagcctgggcctggtggtgttcctggtgtctgccctgagcctgggccccttcctggccctgaaccagctgccccaggtgttcagccgcctcttccccttcaagaggggcctgtgccacgcctactgggcccccaacttctgggccctgtacaatgccctggacaaggtgctgtctgtgattggcctgaagctgaagttcctggaccccaacaacatccccaaggcctccatgaccagcggcctggtgcagcagttccagcacacagtgctgcccagcgtgacccccctggccaccctcatctgcaccctgattgccatcctgcccagcatcttctgcctgtggttcaagccccagggcccccggggcttcctgcgctgcctgaccctgtgtgccctgagcagcttcatgtttggctggcacgtgcatgagaaggccatcctgctggccatcctgcccatgagcctgctgtctgtgggcaaggctggagatgccagcatcttcctgatcctgaccaccaccggccactacagcctcttccccctgctcttcaccgcccctgagctgcccatcaagatcctgctgatgctgctcttcaccatctacagcatcagcagcctgaagaccctcttccgccgctccttcaccctggtggcccaggccggcgtgcagtggcatgacctgtcctag

SEQ ID NO: 22439 - DNA, 1404 bp, Artificial Sequence
  derived and/or modified sequence
atggccgccctgaccatcgccaccggcaccggcaactggttcagcgcactcgcgctcggggtcacactgttgaaatgtctccttatccccacttaccattctaccgacttcgaggtccaccgcaactggctggccattactcatagtctgcccatctctcagtggtattacgaagccacctcggagtggaccctggattacccaccattttttgcctggtttgaatacattttgagccacgtagccaaatattttgaccaggagatgttgaacgttcacaatctaaattattctagcagtcggaccctgctttttcaaagattttccgtaatcttcatggatgtgttgttcgtgtacgcggtacgggagtgttgtaagtgcatcgacgggaaaaaggtaggaaaggagctaaccgagaaaccgaagtttatcctgtctgtgctgctgctttggaatttcggtctgctcatcgtggaccacatccactttcagtacaacggatttttgtttggtctgatgcttctctccattgctcgcctatttcagaagcggcatatggaaggagctttcctgtttgctgtgttgctgcacttcaagcacatttatttgtatgtcgcccctgcgtacggcgtgtatctgctgaggtcttattgcttcacagccaacaagccagacgggagcattcggtggaagtcattttctttcgtgagggtaatctccctgggtcttgtggttttcctggtgtcagccctgagtctgggacccttcctggccttgaaccagttgccccaggtgtttagtaggttgtttccctttaaacggggtctgtgccacgcctattgggccccaaacttctgggccctgtataacgccctggacaaggtcctcagcgtgatagggctcaaattgaagttcctggatcccaacaatatccccaaagctagtatgacgtctggattggtccaacagtttcagcataccgtccttccttctgtgaccccactggctacgctgatctgcaccttaatcgccattctgccatcaattttttgcctatggttcaaacctcaggggccacgtggctttttgcggtgtttaactctgtgcgcgctgtcatcttttatgttcggttggcatgtgcatgagaaggcgatcctgctggctattctgccaatgtccctgctctccgtgggcaaagcgggagatgcgtcaatcttcctcatccttaccactacaggacactattccctgtttcctttgctcttcactgccccagagctcccaattaagatcctgctcatgctcctcttcacaatatattcaatttcttcgctgaagaccctctttcgacgctcatttacactggtagctcaggctggggttcagtggcatgacctgagttag

SEQ ID NO: 22440 - DNA, 1404 bp, Artificial Sequence
  derived and/or modified sequence
atggcagccctcacaatagcgaccgggaccgggaactggttcagtgccctggcactgggtgtgacgttacttaagtgcctgctcatccctacataccatagtacagactttgaggtgcatcgaaactggcttgctataacacactcgctccccatttcccagtggtattatgaggctactagcgaatggacgctggattaccccccattcttcgcgtggttcgagtatatcctgtcccatgtggctaagtacttcgatcaggagatgcttaatgttcataatctgaactactcatcttccaggaccctgctcttccaaaggttttccgtgatttttatggacgtgctttttgtttacgcagtgcgtgaatgctgtaaatgcatagatggtaaaaaagtgggcaaggaactgactgagaagcctaagtttatactctcagtgctccttctttggaactttggtctgctcattgttgatcacatccatttccagtacaatggatttttgtttgggctgatgttactgagcattgctcgtctgtttcagaaaaggcatatggaaggcgcttttctcttcgccgtgctcttgcacttcaagcacatctatctgtatgtggcgccagcctatggggtgtatttgcttaggagctactgctttaccgctaacaaacccgacgggagtatccgctggaaaagtttttctttcgtcagagtgatctccctgggactcgttgtgtttctcgtctcagccctcagtttggggcctttcctagctctgaatcagctgcctcaggtcttttcgcggcttttcccgtttaaacgcggattgtgccacgcttactgggcaccaaatttctgggctctgtacaacgcactggacaaggtgctgagtgttatagggctaaagttaaaatttctagacccgaataatatcccaaaggcctctatgacaagcggcctcgtccagcagttccaacacactgtgttgccgagcgtgacacccctggcaactttgatctgtaccctgatcgccatactccccagcattttctgcctgtggttcaagccacaaggccctcggggatttctcaggtgcttgacactctgtgccctctccagcttcatgttcggctggcatgtgcacgagaaggcaatcctgctcgccatactgccgatgagtctgctgagtgtcggcaaggccggagacgcctccatattcctgattttgactacgactggccattactcattgttccctttactcttcaccgcgccagaattaccgattaaaattctgctaatgttgctgtttactatctactccatctcttctctcaaaacactgttccggaggagctttacactggtggctcaggcaggcgttcagtggcatgacctgtcctag

SEQ ID NO: 22441 - DNA, 1404 bp, Artificial Sequence
  derived and/or modified sequence
atggccgccctgaccatcgccaccggcaccggcaactggttcagcgccctggccctgggcgtgaccctgctgaagtgcctgctgatccccacctaccacagcaccgacttcgaggtgcacagaaactggctggccatcacccacagcctgcccatcagccagtggtactacgaggccaccagcgagtggaccctggactacccccccttcttcgcctggttcgagtacatcctgagccacgtggccaagtacttcgaccaggagatgctgaacgtgcacaacctgaactacagcagcagcagaaccctgctgttccagagattcagcgtgatcttcatggacgtgctgttcgtgtacgccgtgagagagtgctgcaagtgcatcgacggcaagaaggtgggcaaggagctgaccgagaagcccaagttcatcctgagcgtgctgctgctgtggaacttcggcctgctgatcgtggaccacatccacttccagtacaacggcttcctgttcggcctgatgctgctgagcatcgccagactgttccagaagagacacatggagggcgccttcctgttcgccgtgctgctgcacttcaagcacatctacctgtacgtggcccccgcctacggcgtgtacctgctgagaagctactgcttcaccgccaacaagcccgacggcagcatcagatggaagagcttcagcttcgtgagagtgatcagcctgggcctggtggtgttcctggtgagcgccctgagcctgggccccttcctggccctgaaccagctgccccaggtgttcagcagactgttccccttcaagagaggcctgtgccacgcctactgggcccccaacttctgggccctgtacaacgccctggacaaggtgctgagcgtgatcggcctgaagctgaagttcctggaccccaacaacatccccaaggccagcatgaccagcggcctggtgcagcagttccagcacaccgtgctgcccagcgtgacccccctggccaccctgatctgcaccctgatcgccatcctgcccagcatcttctgcctgtggttcaagccccagggccccagaggcttcctgagatgcctgaccctgtgcgccctgagcagcttcatgttcggctggcacgtgcacgagaaggccatcctgctggccatcctgcccatgagcctgctgagcgtgggcaaggccggcgacgccagcatcttcctgatcctgaccaccaccggccactacagcctgttccccctgctgttcaccgcccccgagctgcccatcaagatcctgctgatgctgctgttcaccatctacagcatcagcagcctgaagaccctgttcagaagaagcttcaccctggtggcccaggccggcgtgcagtggcacgacctgagctag

SEQ ID NO: 22442 - protein, 209 aa, Artificial Sequence
  derived and/or modified sequence
MMQEQQPQSTEKRGWLSLRLWSVAGISIALLSACFIVSCVVTYHFTYGETGKRLSELHSYHSSLTCFSEGTKVPAWGCCPASWKSFGSSCYFISSEEKVWSKSEQNCVEMGAHLVVFNTEAEQNFIVQQLNESFSYFLGLSDPQGNNNWQWIDKTPYEKNVRFWHLGEPNHSAEQCASIVFWKPTGWGWNDVICETRRNSICEMNKIYL

SEQ ID NO: 22443 - DNA, 630 bp, Artificial Sequence
  derived and/or modified sequence
atgatgcaagagcagcagcctcaatctacagaaaagcgcggctggttatccctgcgtctctggtctgtggcaggcataagtatcgctttgctgtccgcctgcttcatcgtttcttgtgtcgtgacataccattttacatacggagagaccggcaagagactgagcgagctccattcctaccactcttcattgacttgcttttcagaaggaacaaaagttcccgcatgggggtgctgtccggcatcgtggaaatcttttgggagtagctgctactttatttcttccgaggagaaagtatggagcaagtctgaacaaaactgtgtggagatgggggcccacctagtggtatttaatactgaagccgagcaaaacttcatcgtacagcagctgaacgaatcttttagctatttcctgggactgtcagatcctcagggcaacaataattggcagtggatcgacaagactccatacgaaaagaatgttagattctggcacctgggcgagcccaatcacagcgctgaacagtgtgcgtccatcgtcttctggaaacctacaggctggggttggaacgatgtcatctgcgagacaaggaggaattccatttgcgaaatgaataaaatctatttatag

SEQ ID NO: 22444 - DNA, 630 bp, Artificial Sequence
  derived and/or modified sequence
atgatgcaggagcagcagccccagagcacagagaagaggggctggctgagcctgcggctgtggagcgtggccggcatcagcatcgccctgctgagcgcctgcttcatcgtgtcctgtgtggtgacctaccacttcacctatggagagaccgggaagaggctgtctgagctgcacagctaccacagcagcctgacctgcttcagcgagggcaccaaggtgcctgcctggggctgctgcccagcctcctggaagagctttggcagcagctgctacttcatcagcagcgaggagaaggtgtggagcaagtctgagcagaactgtgtggagatgggcgcccacctggtggtgttcaacacagaagctgagcagaacttcatcgtgcagcagctgaatgaaagcttctcctacttcctgggcctgagtgacccccagggcaacaacaactggcagtggattgacaagaccccctatgagaagaatgtgcgcttctggcacctgggggagcccaaccacagcgctgagcagtgtgccagcatcgtgttctggaagcccaccggctggggctggaatgatgtgatctgtgagaccaggaggaacagcatctgtgagatgaacaagatctacctgtag

SEQ ID NO: 22445 - DNA, 630 bp, Artificial Sequence
  derived and/or modified sequence
atgatgcaggagcagcagccccagagcaccgagaagcggggctggctgtcccttaggctctggagtgttgccggcattagcattgcactgcttagcgcctgctttattgttagctgtgtggtcacttatcatttcacctatggggaaacggggaaaaggctctctgagctccactcttatcactcctcactgacttgcttcagcgagggaactaaggtcccagcatgggggtgttgtcccgcctcctggaagtcttttgggtcctcctgctacttcatcagcagcgaggagaaggtgtggtcgaagtctgagcagaattgcgtggagatgggcgcccatctcgttgtgttcaacaccgaagcagagcagaatttcatcgtgcagcaattgaatgaatcattttcttactttcttggcctgtcagatcctcaggggaataataattggcagtggattgacaaaacaccgtacgaaaaaaacgtgcgcttctggcatcttggcgaaccaaatcactcagccgaacagtgtgcctccatagtcttttggaaacccactggctggggctggaatgacgtgatttgtgagactcgccggaacagtatctgtgagatgaacaaaatttacctgtag

SEQ ID NO: 22446 - DNA, 630 bp, Artificial Sequence
  derived and/or modified sequence
atgatgcaagagcagcaacctcagtcaaccgagaaacgtggatggctttccttaaggctctggtcagtggccggaataagtattgctctgctgtccgcctgcttcattgtttcctgtgtagtcacgtaccattttacctacggagagaccggcaaacgactttctgagttgcactcataccattcatccctgacatgcttctccgaggggacaaaagttcccgcttggggatgctgccccgcttcttggaagagcttcggctcaagctgctattttatatcatccgaagagaaagtctggtcgaaatccgaacagaactgcgtggagatgggtgcccacttggtggtgtttaataccgaagccgagcagaacttcatcgttcagcagttgaacgaaagcttcagctactttctagggctgtcagatcctcaggggaataataactggcaatggatagataaaacaccatacgagaaaaatgtgagattttggcatttgggcgagcccaatcactccgccgagcagtgtgccagcatcgtcttctggaagccaacggggtggggttggaatgacgtcatctgcgaaacacggcgaaattccatttgtgagatgaacaagatctacctgtag

SEQ ID NO: 22447 - DNA, 1682 bp, Artificial Sequence
  derived and/or modified sequence
agttgtaattgtgacttcttcttttgaggtacacttaatgttggaagtctcttagtcctataagagtgtgtagcagtttgtccctgagctctagcttctttaaatgaagctgagtctctgggcaacatctttagggagagaggtacaaaaggttcctggaccttctcaacacagggagcctgcataatgatgcaagagcagcaacctcaaagtacagagaaaagaggctggttgtccctgagactctggtctgtggctgggatttccattgcactcctcagtgcttgcttcattgtgagctgtgtagtaacttaccattttacatatggtgaaactggcaaaaggctgtctgaactacactcatatcattcaagtctcacctgcttcagtgaagggacaaaggtgccagcctggggatgttgcccagcttcttggaagtcatttggttccagttgctacttcatttccagtgaagagaaggtttggtctaagagtgagcagaactgtgttgagatgggagcacatttggttgtgttcaacacagaagcagagcagaatttcattgtccagcagctgaatgagtcattttcttattttctggggctttcagacccacaaggtaataataattggcaatggattgataagacaccttatgagaaaaatgtcagattttggcacctaggtgagcccaatcattctgcagagcaatgtgcttcaatagtcttctggaaacctacaggatggggctggaatgatgttatctgtgaaactagaaggaattcaatatgtgagatgaataagatttacctatgagtagaagcttaattggaaagaagagaagaattactgacgtaattttttccctgacgtctttaaaattgaaccctatcatgaaatgataatttcttcctgaatttacacataatccttatgttatagaggttcacagaaatggaaagatacctgtttccctttaatcaatcttctcgtttcctcttttccattaatgatagaatgcacccttcctctctttgttccattctttcacttgttattcatttttttctttcttcacacttcattacacaaatatttattgtttcagagactgtactattttgtttgttagaagatttataaggcagtatcttttgaaaattatgactttccttcctcaatataccataaagaaatctttttggtcaagatggtagttggaactacaatcatctgaaggcctgacaagagttgaaagacatgttttctagatggctcactcacatggctggcaacttggtgttggctattaatgtaacctggaaataaattttattctgcagttagggatttggcattttatatatgttgattcaatcaagtttggcaagcagggtgttcgatactgctatatcctgtattcttggtttatttgttttatttctgagaaatatgtgttaagatctctcgctgattgggaatttgtctatttctcatttaaattttgtcaaatctttctttgcttgcaagcatttcttgttacccaaatctaatctattcctgaaaatatgatggttagcaaagtttgagataactagagcctgtaatccatcattttaaatggcaatgataatgacagtttatttttatgttatataaaaacctcaacaaattttccaaac

SEQ ID NO: 22448 - DNA, 630 bp, Artificial Sequence
  derived and/or modified sequence
atgatgcaggagcagcagccccagagcaccgagaagagaggctggctgagcctgagactgtggagcgtggccggcatcagcatcgccctgctgagcgcctgcttcatcgtgagctgcgtggtgacctaccacttcacctacggcgagaccggcaagagactgagcgagctgcacagctaccacagcagcctgacctgcttcagcgagggcaccaaggtgcccgcctggggctgctgccccgccagctggaagagcttcggcagcagctgctacttcatcagcagcgaggagaaggtgtggagcaagagcgagcagaactgcgtggagatgggcgcccacctggtggtgttcaacaccgaggccgagcagaacttcatcgtgcagcagctgaacgagagcttcagctacttcctgggcctgagcgacccccagggcaacaacaactggcagtggatcgacaagaccccctacgagaagaacgtgagattctggcacctgggcgagcccaaccacagcgccgagcagtgcgccagcatcgtgttctggaagcccaccggctggggctggaacgacgtgatctgcgagaccagaagaaacagcatctgcgagatgaacaagatctacctgtag

SEQ ID NO: 22449 - protein, 292 aa, Artificial Sequence
  derived and/or modified sequence
MSLYPSLEDLKAQTAFSANPANPAILSEASAPIPHDGNLYPRLYPELSQYMGLSLNEEEIRANVAVVSGAPLQGQLVARPSSINYMVAPVTGNDVGIRRAEIKQGIREVILCKDQDGKIGLRLKSIDNGIFVQLVQANSPASLVGLRFGDQVLQINGENCAGWSSDKAHKVLKQAFGEKITMTIRDRPFERTITMHKDSTGHVGFIFKNGKITSIVKDSSAARNGLLTEHNICEINGQNVIGLKDSQIADILSTSGTVVTITIMPAFIFEHIIKRMAPSIMKSLMDHTIPEV

SEQ ID NO: 22450 - DNA, 879 bp, Artificial Sequence
  derived and/or modified sequence
atgagcctgtaccccagcctggaggacctgaaggcccagaccgccttcagcgccaaccccgccaaccccgccatcctgagcgaggccagcgcccccatcccccacgacggcaacctgtaccccagactgtaccccgagctgagccagtacatgggcctgagcctgaacgaggaggagatcagagccaacgtggccgtggtgagcggcgcccccctgcagggccagctggtggccagacccagcagcatcaactacatggtggcccccgtgaccggcaacgacgtgggcatcagaagagccgagatcaagcagggcatcagagaggtgatcctgtgcaaggaccaggacggcaagatcggcctgagactgaagagcatcgacaacggcatcttcgtgcagctggtgcaggccaacagccccgccagcctggtgggcctgagattcggcgaccaggtgctgcagatcaacggcgagaactgcgccggctggagcagcgacaaggcccacaaggtgctgaagcaggccttcggcgagaagatcaccatgaccatcagagacagacccttcgagagaaccatcaccatgcacaaggacagcaccggccacgtgggcttcatcttcaagaacggcaagatcaccagcatcgtgaaggacagcagcgccgccagaaacggcctgctgaccgagcacaacatctgcgagatcaacggccagaacgtgatcggcctgaaggacagccagatcgccgacatcctgagcaccagcggcaccgtggtgaccatcaccatcatgcccgccttcatcttcgagcacatcatcaagagaatggcccccagcatcatgaagagcctgatggaccacaccatccccgaggtgtag

SEQ ID NO: 22451 - DNA, 879 bp, Artificial Sequence
  derived and/or modified sequence
atgtctctatatccgagcttagaagacctgaaggcacagacggctttctcagcaaaccctgccaaccctgccatcttgtccgaggcgtcagcacccatccctcacgacggaaacctctatcctagactttaccccgaactaagtcagtacatgggcctgtctcttaacgaggaggagatccgtgcgaacgtcgctgtggtaagtggagcccctttgcaaggtcaactcgtggctagaccttcaagcatcaactacatggttgcacctgtgactggcaatgacgttgggatcagaagagcagagatcaagcagggtattagagaagtgatcctgtgcaaagaccaggacggcaaaatcggactccgacttaagtctatagacaatggcatcttcgtacagctggtccaagcaaacagccctgcctctcttgttggcttaaggtttggcgatcaggtgttacagatcaacggggagaattgtgcaggttggagcagcgataaagcacacaaggttttgaagcaggccttcggggaaaaaatcaccatgacgatcagggatcgacctttcgaaagaaccatcacgatgcataaggattctaccggccacgtgggcttcatcttcaaaaatggcaaaattacatccatcgtgaaggattcctcggctgcaagaaatggtctcttgactgaacacaacatttgcgagatcaacggacaaaacgtcattggtctcaaggacagccagatcgctgatatcctgagtacttcgggaacagttgtgacaatcaccataatgcccgccttcatttttgagcacattatcaaacgtatggctccatccatcatgaagtccctgatggatcataccatcccagaagtatag

SEQ ID NO: 22452 - DNA, 879 bp, Artificial Sequence
  derived and/or modified sequence
atgagcctgtaccccagcctggaggacctgaaggcccagacagccttcagcgccaacccagccaacccagccatcctgtctgaggccagcgcccccatcccccatgatggcaacctgtacccccggctgtacccagagctgagccagtacatgggcctgagcctgaatgaggaggagatccgggccaacgtggccgtggtgtctggggcccccctgcagggccagctggtggcccggcccagcagcatcaactacatggtggcccctgtgactggaaatgatgtgggcatccggcgggcagagatcaagcagggcatccgggaggtgatcctgtgcaaggaccaggacggcaagattggcctgcggctgaagagcattgacaatggcatctttgtgcagctggtgcaggccaacagccctgccagcctggtgggcctgcgctttggagaccaggtgctgcagatcaacggggagaactgtgccggctggagcagtgacaaggcccacaaggtgctgaagcaggccttcggggagaagatcaccatgaccatccgggaccggccctttgagaggaccatcaccatgcacaaggacagcacaggccacgtgggcttcatcttcaagaatggcaagatcaccagcatcgtgaaggacagcagcgctgccagaaatggcctgctgacagagcacaacatctgtgagatcaatggccagaatgtgattggcctgaaggacagccagattgctgacatcctgagcaccagcggcaccgtggtgaccatcaccatcatgcctgccttcatctttgagcacatcatcaagaggatggcccccagcatcatgaagagcctgatggaccacaccatccctgaggtgtag

SEQ ID NO: 22453 - DNA, 879 bp, Artificial Sequence
  derived and/or modified sequence
atgagcctgtaccccagcctggaggacctgaaggcccagaccgccttcagcgctaacccggccaatcccgccattctttctgaagcatctgcaccaattccccatgatggtaatctctatccccgactttatccagagctctctcagtacatggggttgtccctgaatgaagaggagatcagggccaacgtggccgtcgtttctggagcccccctgcagggtcagctggtggcccgccccagtagtattaactacatggtcgccccggtcactggtaacgacgtgggtattcgtagggcagagatcaaacagggaattcgggaagtgatcttgtgcaaggatcaggatggtaagattggactgagacttaaaagcatagataatggtatatttgttcagttagttcaggctaattcccccgcctcactggtaggcctgcgattcggtgatcaggtgctccagatcaatggggaaaactgcgctggctggtccagcgataaagcccacaaagtgctcaaacaggctttcggagagaagataacaatgaccattagagataggccattcgagaggacaattactatgcacaaagatagcaccgggcatgtcgggttcatctttaagaatgggaagattacctcaattgtgaaggatagttccgccgcccgaaatggcctgttaaccgaacataacatttgtgaaatcaatggccagaacgtcatcggtctcaaagacagccagatcgcagatatcctgtcaactagtgggactgttgtcacaatcaccatcatgcccgccttcatttttgaacacatcatcaagagaatggccccgagcattatgaagtctctaatggatcacaccatcccagaagtttag

SEQ ID NO: 22454 - DNA, 879 bp, Artificial Sequence
  derived and/or modified sequence
atgtcactgtacccttctttggaggacttaaaggcccaaaccgcgtttagcgctaaccccgcaaacccagcaatcctgtccgaagccagcgcacctatcccacacgatggtaatttgtaccccagactctaccctgagctctcccagtatatggggctgagtctgaatgaggaggagatccgggcaaacgtggccgttgtatctggagctccgctgcagggccagctggtggccagaccatcttctatcaactacatggtggcaccagtaaccggcaatgacgtgggaattagacgggctgaaatcaagcaaggtatcagagaagtgattctttgcaaggaccaagatggaaagataggcctgagactcaagtctatcgataatgggatctttgtgcagctggtccaggccaactctcctgcatccttggtgggccttcgcttcggtgatcaagtactgcagataaacggtgagaattgcgcaggctggtcttccgacaaggcgcacaaagtcttgaagcaagccttcggagaaaagatcaccatgactatcagagatagacctttcgagcgcacaatcacaatgcataaggattctacaggccatgtcggcttcatcttcaaaaacgggaagatcaccagtatcgtcaaggattctagcgcagcccgaaacggcctccttactgagcataatatatgcgagataaacggtcaaaacgtgataggtctgaaagattcacaaatagccgatattctgagcacctctggtaccgttgttactatcactatcatgcccgctttcattttcgagcatattatcaaacggatggcaccttcaatcatgaagtcactgatggaccacaccatcccagaggtgtag

SEQ ID NO: 22455 - protein, 297 aa, Artificial Sequence
  derived and/or modified sequence
MSLYPSLEDLKVDKVIQAQTAFSANPANPAILSEASAPIPHDGNLYPRLYPELSQYMGLSLNEEEIRANVAVVSGAPLQGLVARPSSINYMVAPVTGNDVGIRRAEIKQGIREVILCKDQDGKIGLRLKSIDNGIFVQLVQANSPASLVGLRFGDQVLQINGENCAGWSSDKAHKVLKQAFGEKITMTIRDRPFERTITMHKDSTGHVGFIFKNGKITSIVKDSSAARNGLLTEHNICEINGQNVIGLKDSQIADILSTSGTVVTITIMPAFIFEHIIKRMAPSIMKSLMDHTIPEV

SEQ ID NO: 22456 - DNA, 894 bp, Artificial Sequence
  derived and/or modified sequence
atgagcctgtaccccagcctggaggacctgaaggtggacaaggtgatccaggcccagaccgccttcagcgccaaccccgccaaccccgccatcctgagcgaggccagcgcccccatcccccacgacggcaacctgtaccccagactgtaccccgagctgagccagtacatgggcctgagcctgaacgaggaggagatcagagccaacgtggccgtggtgagcggcgcccccctgcagggcctggtggccagacccagcagcatcaactacatggtggcccccgtgaccggcaacgacgtgggcatcagaagagccgagatcaagcagggcatcagagaggtgatcctgtgcaaggaccaggacggcaagatcggcctgagactgaagagcatcgacaacggcatcttcgtgcagctggtgcaggccaacagccccgccagcctggtgggcctgagattcggcgaccaggtgctgcagatcaacggcgagaactgcgccggctggagcagcgacaaggcccacaaggtgctgaagcaggccttcggcgagaagatcaccatgaccatcagagacagacccttcgagagaaccatcaccatgcacaaggacagcaccggccacgtgggcttcatcttcaagaacggcaagatcaccagcatcgtgaaggacagcagcgccgccagaaacggcctgctgaccgagcacaacatctgcgagatcaacggccagaacgtgatcggcctgaaggacagccagatcgccgacatcctgagcaccagcggcaccgtggtgaccatcaccatcatgcccgccttcatcttcgagcacatcatcaagagaatggcccccagcatcatgaagagcctgatggaccacaccatccccgaggtgtag

SEQ ID NO: 22457 - DNA, 894 bp, Artificial Sequence
  derived and/or modified sequence
atgtcattgtatccttcgttagaggatctgaaggtggacaaggtgatccaggcccagaccgcgttctccgccaaccccgcaaacccggcgattctgagcgaggcctccgcgcccattccacatgacggcaatctgtacccccgactctatcctgagctctcgcagtacatggggctctcccttaatgaggaggagattcgcgcaaacgtggccgtggtttctggcgcacccctgcaaggactggtggctcgacctagctccattaattacatggtcgcccccgtaactggcaatgacgttggcataagaagggccgaaatcaaacaaggaatccgagaggtgattctttgcaaggaccaggacgggaaaattgggctcagacttaagtccattgataacggcattttcgttcagctggtgcaggcaaactcccccgcatcactcgtcggactgcgttttggcgaccaggtgttgcagatcaatggagagaattgtgcaggctggtctagtgacaaagcccataaagtcctcaaacaggcctttggagaaaagatcaccatgacaataagggacagaccttttgaacggactatcactatgcacaaagatagtacaggccacgtcggttttatctttaagaatgggaaaattacctctatcgtgaaggatagtagcgctgctagaaacggcttgctgaccgagcataatatatgcgaaattaatggccagaacgtgattggtttgaaggatagccaaatcgctgacatattaagtacatccggcactgtggtaacaattaccatcatgcccgcgtttatttttgagcacattattaagcggatggccccatccatcatgaagtccctaatggatcataccattcccgaagtgtag

SEQ ID NO: 22458 - DNA, 894 bp, Artificial Sequence
  derived and/or modified sequence
atgagcctttatcccagccttgaagacctgaaggttgacaaagtaatccaggcgcagactgccttctccgctaacccagctaaccccgccattctctccgaagcgagcgctcccataccccacgacgggaacctctatccgcgcctgtatccggaactgtctcagtatatgggtctctcccttaatgaggaagagatccgggctaacgtggcggtggtatctggggcacctcttcagggcttggtggctcgaccatcgagcatcaactacatggtagctcctgtgactggcaatgatgttggcatccggagagcagagatcaagcaaggaatcagggaggtcattctttgcaaggaccaggacggtaagatcggactgcgcctgaagtcaatcgataatggcattttcgttcaactggttcaggccaacagccctgccagcctagtcgggttgcggtttggtgaccaggtgttgcagattaacggagagaactgcgcgggctggtcatctgataaagcacataaagtcctaaaacaggcattcggcgagaaaattactatgactattcgtgataggcctttcgagcgcacgatcacaatgcacaaggactcaacgggtcacgtgggcttcatctttaagaatggaaagattacctccatagttaaggactcaagcgcagccagaaatggtcttctgactgaacacaacatttgcgagatcaacggccagaacgtgattgggctgaaagattctcagatcgctgacatactaagcactagtgggacggtggtgacaattaccataatgcctgcattcatatttgagcacattatcaaaagaatggcccccagtatcatgaagagcctgatggaccataccatccccgaagtctag

SEQ ID NO: 22459 - DNA, 894 bp, Artificial Sequence
  derived and/or modified sequence
atgagcctgtaccccagcctggaggacctgaaggtggacaaggtgatccaggcccagacagccttcagcgccaacccagccaacccagccatcctgtctgaggccagcgcccccatcccccatgatggcaacctgtacccccggctgtacccagagctgagccagtacatgggcctgagcctgaatgaggaggagatccgggccaacgtggccgtggtgtctggggcccccctgcagggcctggtggcccggcccagcagcatcaactacatggtggcccctgtgactggaaatgatgtgggcatcagaagagctgagatcaagcagggcatccgggaggtgatcctgtgcaaggaccaggacggcaagattggcctgcggctgaagagcattgacaatggcatctttgtgcagctggtgcaggccaacagccctgccagcctggtgggcctgcgctttggagaccaggtgctgcagatcaatggagagaactgtgccggctggagcagtgacaaggcccacaaggtgctgaagcaggcctttggagagaagatcaccatgaccatccgggaccggccctttgagaggaccatcaccatgcacaaggacagcactggacatgtgggcttcatcttcaagaatggcaagatcaccagcatcgtgaaggacagcagcgctgccagaaatggcctgctgacagagcacaacatctgtgagatcaatggccagaatgtcatcggcctgaaggacagccagattgctgacatcctgagcaccagcggcaccgtggtgaccatcaccatcatgcctgccttcatctttgagcacatcatcaagaggatggcccccagcatcatgaagagcctgatggaccacaccatccctgaggtgtag

SEQ ID NO: 22460 - DNA, 894 bp, Artificial Sequence
  derived and/or modified sequence
atgagcctgtaccccagcctggaggacctgaaggtggacaaggtgatccaggcccagactgccttctctgccaatccggcgaatcctgcaatcttatcagaagcctcagcgcctatcccccacgatggcaacctatatcctagactctaccccgagctctcccagtacatgggactgagcttgaatgaagaggaaattcgcgccaatgtcgccgtggtcagtggagctcctctccaaggcctcgtggcgcgacctagcagcattaattacatggtggccccagtgactggtaacgatgtgggaatacgccgagccgaaatcaagcagggtatacgtgaagtgattctctgcaaggatcaggatggcaagattggattgagactgaagtccatagataacgggatattcgtgcagctggtgcaagcgaatagccccgccagtctcgtaggtctgcggttcggggaccaggtgctgcagataaacggcgaaaactgcgcaggatggtcttctgacaaagcccacaaggtgctgaaacaggcattcggagagaaaatcacaatgacaattcgggaccgaccctttgagcggactatcacaatgcacaaagactctactggtcacgttggcttcatctttaagaacgggaagataacaagcatcgtcaaggattcaagtgcggcacgaaacggcctgctgactgaacacaatatttgtgaaattaacggtcagaacgtgataggtcttaaagattctcagattgcagatatattatcgacttccgggacagtagttactattactattatgccagccttcatattcgagcatatcatcaagcggatggccccctctattatgaagtctctgatggaccatactattcctgaggtgtag

SEQ ID NO: 22461 - DNA, 894 bp, Artificial Sequence
  derived and/or modified sequence
atgagcctgtaccccagcctggaggacctgaaggtggacaaggtgatccaggctcaaacagcattttccgccaatcccgcaaacccggcaattttgtccgaagccagcgcccccatacctcacgacggtaacctgtatcctcgcctgtaccccgaactctcccagtacatgggcctgagcctgaatgaagaggagatacgggcgaacgtcgcagttgtgtccggagcccctctgcagggcttagtggcccgcccgagttccattaattacatggtggctcccgtgaccgggaacgacgttgggattagacgggcggaaatcaaacagggaatcagggaggttatcctgtgcaaagaccaggacggaaagatcgggcttcggctgaagtccattgataacggtatcttcgtccaactagtacaggcaaatagccccgcctcactggtcgggctccggttcggcgaccaggtgttacagatcaacggggaaaattgtgcaggttggagctccgacaaagcccacaaagtgctcaagcaggcattcggggagaagataactatgacgattcgagatcgccctttcgagcggactataaccatgcacaaagactctaccgggcatgtcggtttcatcttcaagaacgggaaaatcacaagtatcgttaaagactccagtgcggcacgcaacggtttacttacagagcataatatttgcgagatcaacgggcagaacgttatcggccttaaagattcacagattgctgatatcctctccactagcggcaccgtcgtgacaattactatcatgcccgccttcatttttgaacatattattaagcgaatggctcctagcatcatgaaaagtcttatggaccacacgattcccgaagtgtag

SEQ ID NO: 22462 - DNA, 894 bp, Artificial Sequence
  derived and/or modified sequence
atgtctctgtacccctccttagaggatcttaaagtggacaaagttatacaggcccagaccgccttcagcgccaatcccgctaatccagcgattctgtccgaggcgtctgcccctatcccacacgacgggaatctctatcctcggttgtaccctgaattaagccagtatatggggctgagcttgaatgaggaggaaattagggcaaatgtggccgtagtttcaggggctccacttcagggccttgtcgccagaccaagttccataaattacatggtcgcccctgtgaccggcaacgatgtgggaattcggcgagcagaaattaaacagggcattcgcgaggttatactgtgcaaggatcaggatggcaaaatcggcctgcggctgaagtcaatcgacaatggaatttttgtccagctggtgcaagccaactcacccgcttctctggtgggcctgaggttcggtgatcaggttctccaaattaatggggagaactgcgctggttggagttcagacaaggcacacaaagtcctgaaacaggccttcggggaaaaaataaccatgacaattcgcgacagaccgttcgagaggacaattactatgcataaggacagtacaggccatgtcggttttatattcaaaaatgggaagattacgtccatcgtgaaggatagttccgccgctcgaaacggtctgcttaccgaacataatatatgtgagataaatggccaaaacgtgataggcctaaaggattcccagattgcagacatcctgtccactagcgggacagtcgtgacaattactattatgcccgctttcatctttgaacatatcattaagcggatggcacctagcataatgaaaagccttatggatcacactattccagaggtatag

SEQ ID NO: 22463 - DNA, 894 bp, Artificial Sequence
  derived and/or modified sequence
atgtctctctaccctagtttggaggacctgaaggtagataaagttatacaagcccaaaccgcattttcagcaaatccagcaaatccagctattcttagtgaggcttccgcacccatcccccatgatggcaacctgtaccccagattgtatcccgagttgtcgcaatacatgggactcagtttgaacgaggaggaaatcagggccaacgtcgccgtggtttcgggtgctcccctgcagggtttggtggcgcgtccatcctcaatcaactacatggtggcacccgtcacaggcaatgacgtcggcattagacgggcagagatcaagcaggggattcgggaggttatcttatgtaaggatcaggatgggaagatcggcctgcgcttgaaatccatcgacaacggaatctttgtgcaactagtgcaggcaaactccccagcaagcctggtaggcctaaggttcggagatcaggtgctgcagataaatggagagaactgtgctgggtggagcagcgataaggcccacaaagtgctcaagcaggcattcggggaaaagataactatgaccataagggatcgacccttcgaaaggactatcacaatgcacaaggacagtaccggccatgttggctttatcttcaaaaatggtaagattacctctatagtgaaagactcctctgccgctcgtaatggtttgctgactgagcacaatatctgcgaaataaatggtcaaaatgtaatcggactcaaagacagccaaatagccgatatattgtccaccagtggcacagtcgttacaatcactattatgcctgcattcattttcgaacacatcataaaacggatggccccttccatcatgaaatctcttatggatcatactatacccgaggtgtag

SEQ ID NO: 22464 - protein, 709 aa, Artificial Sequence
  derived and/or modified sequence
MSGSRKEFDVKQILKIRWRWFGHQASSPNSTVDSQQGEFWNRGQTGANGGRKFLDPCSLQLPLASIGYRRSSQLDFQNSPSWPMASTSEVPAFEFTAEDCGGAHWLDRPEVDDGTSEEENESDSSSCRTSNSSQTLSSCHTMEPCTSDEFFQALNHAEQTFKKMENYLRHKQLCDVILVAGDRRIPAHRLVLSSVSDYFAAMFTNDVREARQEEIKMEGVEPNSLWSLIQYAYTGRLELKEDNIECLLSTACLLQLSQVVEACCKFLMKQLHPSNCLGIRSFADAQGCTDLHKVAHNYTMEHFMEVIRNQEFVLLPASEIAKLLASDDMNIPNEETILNALLTWVRHDLEQRRKDLSKLLAYIRLPLLAPQFLADMENNVLFRDDIECQKLIMEAMKYHLLPERRPMLQSPRTKPRKSTVGTLFAVGGMDSTKGATSIEKYDLRTNMWTPVANMNGRRLQFGVAVLDDKLYVVGGRDGLKTLNTVECYNPKTKTWSVMPPMSTHRHGLGVAVLEGPMYAVGGHDGWSYLNTVERWDPQARQWNFVATMSTPRSTVGVAVLSGKLYAVGGRDGSSCLKSVECFDPHTNKWTLCAQMSKRRGGVGVTTWNGLLYAIGGHDAPASNLTSRLSDCVERYDPKTDMWTAVASMSISRDAVGVCLLGDKLYAVGGYDGQAYLNTVEAYDPQTNEWTQVAPLCLGRAGACVVTVKL

SEQ ID NO: 22465 - DNA, 2130 bp, Artificial Sequence
  derived and/or modified sequence
atgtctggttcacgcaaagaattcgatgtgaaacagattctgaagatccgctggcggtggtttggtcaccaagcatctagcccaaatagcacagtagattcacagcagggggaattctggaaccgaggtcagacgggggccaatggcggtaggaaattccttgatccgtgctcgctgcagctcccactggcgtccattgggtacaggcgttcttctcaacttgacttccagaattctccatcttggccaatggcgtcaactagtgaagtgcccgcttttgagttcacagccgaagattgcggaggcgcccactggctggacagacctgaagtggacgatgggacttcagaagaggagaacgagtccgacagttctagctgtcgtacttccaattctagtcagaccctgagctcctgtcatacaatggaaccctgcacaagtgacgagttttttcaggctctgaatcacgcagaacaaacctttaaaaagatggagaattatctgcgccataagcagctgtgcgacgtgattctggtcgccggggaccgtcgcatacccgctcatagactagttttgagctcagtgagcgactattttgccgccatgttcactaacgacgtcagggaagcccggcaagaagagattaaaatggaaggagtcgaacccaactccctctggagcctgatccagtacgcctatacgggtcggcttgagctgaaagaggacaatatagagtgcttgttatccacagcatgcctgctgcagctttctcaggtcgttgaggcctgttgcaagttccttatgaaacagcttcatcccagcaactgcttgggtatccgctctttcgctgatgcccagggctgcactgaccttcacaaggtcgcccacaactacactatggaacacttcatggaggtgatacgcaatcaggagtttgtgcttctgcccgcgagcgaaatagctaaactcctggcatccgacgatatgaacattcccaacgaagagactattctcaatgctctgttgacatgggtgaggcacgacctggagcagcgccgcaaggacttaagcaagctgctggcctatattcgtttgccccttctagccccccagttccttgcggacatggaaaacaatgtcttgttccgtgatgatattgaatgccagaaactcatcatggaggccatgaagtatcacctcctccccgagagacggcccatgctgcaatcccctcgcacaaaacctagaaagagtacagtgggcaccctcttcgcggtgggcggaatggattccactaagggcgctacttccattgagaagtatgacctgcggaccaacatgtggacgcctgtcgccaacatgaacggacggcgtctccagttcggcgtcgctgtgttggatgacaagctttacgtggtgggcggaagagacggtctcaaaacgctcaatactgtcgagtgctataatcccaaaactaagacctggtctgtgatgccacctatgtccactcatcgccacggccttggcgtggcagtgctggaagggcctatgtacgccgtcggcgggcatgacggctggtcctacttaaacaccgtagaacgttgggaccctcaggcaagacagtggaattttgtcgccacaatgtcaacacctaggagcacggttggcgtggcagtgctatccggtaaactctacgcagtaggaggccgcgatggaagtagttgtctaaagagcgttgaatgttttgaccctcacactaacaaatggacactgtgtgcacagatgtcaaagagacgaggaggagtgggcgtgacgacatggaacggtttgctgtatgcaatcggagggcatgatgcccctgcatctaaccttacctcccggttgtccgactgcgtggagcgatacgacccgaagaccgatatgtggacagccgtggcttccatgagtatctctcgagacgctgtcggtgtgtgcctgttaggagacaaattatacgctgtcggaggttacgacgggcaagcctacttgaataccgtcgaagcctatgatccacagacgaacgaatggacacaagtggctccactgtgcctgggccgtgcgggcgcatgcgtggtcactgttaaactgtag

SEQ ID NO: 22466 - DNA, 1707 bp, Artificial Sequence
  derived and/or modified sequence
atggaaccgtgtacctccgatgaattcttccaggcccttaaccatgctgagcagacgttcaaaaagatggagaactacctacgtcacaagcagctgtgcgatgtaatcctggtggctggggaccgaaggattcccgcccaccggctcgtgctctcatctgttagcgattatttcgccgccatgttcacaaatgatgtgcgagaagccaggcaggaggagattaagatggagggagtcgagccaaactctttgtggtctctgatacagtacgcatatacaggacggctcgagctgaaagaagataatattgagtgtctgctgtcaacggcttgcctgctccagctgtcgcaggtcgtggaggcttgctgcaaattcctgatgaagcaactgcacccgagcaattgtctcggaattcgcagcttcgccgatgctcagggctgtacagaccttcataaggtggctcacaattacactatggaacacttcatggaagtgatcagaaaccaggagttcgtgttactgcctgcgtctgaaatcgccaagctgctagcgagtgatgacatgaatattcctaacgaagagactatcttgaacgccctgctcacctgggtgagacacgatctggagcagcgcaggaaagatctgtccaagctgctggcctatatccggctgcccctgttagccccgcaattcctggcagatatggagaataatgttcttttcagagatgatatcgaatgccagaagttaatcatggaagctatgaagtaccaccttcttcccgagcggaggcctatgctgcagtccccgcgcactaagccacgtaagagtaccgtggggacactttttgctgtgggagggatggattcaaccaagggggccactagtatcgaaaagtacgacctccggaccaatatgtggactccagtggccaacatgaacggccgaaggctacagttcggagtcgcagtactcgacgacaagctgtatgtcgtgggcgggagagatggactgaaaacactgaacactgtcgagtgctacaatcctaagaccaagacatggtccgttatgccgcctatgtccacacaccgccacggtcttggagtcgcagtgctagagggccctatgtacgcagtgggtggacatgatgggtggtcctacctgaacaccgtggaacggtgggatccacaggccagacaatggaacttcgtagctactatgtctacacctagaagcacggtaggtgtcgccgtcctgagcggtaagctctacgcggtcggcggccgggacgggtctagctgcctgaaatccgtggagtgcttcgatccacataccaataagtggaccctgtgtgcccagatgagcaagagaaggggtggcgttggcgtcaccacttggaacgggttactgtacgcaatcggggggcacgatgccccggcaagcaaccttacctcacgcctgagtgactgtgtcgaaaggtacgaccctaagacggatatgtggacagccgtcgcatcaatgtctatctcccgggatgccgtaggtgtttgtctcctcggcgataagctctatgctgtgggtggatacgatggccaggcttacctgaatacagtcgaagcttatgatccacagactaacgagtggactcaggtggcaccactgtgcttaggcagagccggcgcctgcgtagtgactgtgaaactgtag

SEQ ID NO: 22467 - DNA, 2926 bp, Artificial Sequence
  derived and/or modified sequence
ccgccgtgacccacggccgcctccggagcccgacgcggacttccaatagtagtcagacattatcatcctgtcatactatggagccatgtacatcagatgaatttttccaagcccttaatcatgccgagcaaacatttaaaaaaatggaaaactatttgagacataaacagttgtgtgatgtaattttagtcgctggtgatcgcagaattccagctcacagattggtgctctcctctgtctcagactattttgctgccatgtttactaatgatgtcagagaggcaagacaagaagaaataaaaatggaaggtgtagaaccaaattcgttgtggtccttgatccagtatgcttatacaggccgccttgaattaaaagaagataatattgagtgcctgttatctacagcttgccttcttcagctttcacaggttgtagaagcatgctgtaagtttttaatgaaacagcttcatccatccaactgtcttggaattcgttcttttgctgatgcccaaggttgtacagatttgcataaagtggctcacaattatactatggagcatttcatggaagtaatcagaaaccaggaatttgtattattaccagccagcgaaattgcaaagctcttggctagtgatgacatgaacattcctaatgaggagacaatattgaatgcacttcttacttgggtccgtcatgatttggaacagagacggaaagatctaagtaaacttttggcttatattaggctacctcttcttgcaccacagttcctggcagacatggaaaataatgtactttttcgggatgatatagaatgtcagaaactcattatggaagcaatgaagtaccatttattaccagagagacgacccatgttacaaagtcctcggacaaaacctaggaagtcaactgttggtacattatttgcagttgggggaatggattcaacaaaaggagcaacaagcattgaaaagtatgatctccgtacaaatatgtggactccagtagcaaatatgaatgggaggaggctacagttcggtgttgcagtgctagatgacaaactgtatgtggttggaggaagagatggactgaagactttgaatactgtagagtgctacaaccccaaaacaaaaacttggagtgtgatgccacctatgtccacacatagacatggccttggtgtggctgtactggaaggtcccatgtatgccgtaggaggacatgatggctggagctatctgaacacagtggaaagatgggaccctcaggctcgccagtggaattttgttgccactatgtctacccctaggagtacagtaggtgtggcagtactaagtggaaaactttatgcagttggtggtcgtgatggaagttcttgtctcaaatcagtagaatgttttgatcctcatactaataagtggacactgtgtgcacagatgtcaaaaaggagaggtggcgtaggagtgacgacctggaatggactgctgtatgctataggggggcacgatgctcccgcatccaacttgacttccagactctcagactgtgtggaaagatatgatcccaaaacagacatgtggactgcagtagcatccatgagcatcagcagagatgcagtgggggtctgtttacttggtgataagttatatgctgttggggggtatgatggacaggcataccttaatactgtggaggcttatgatccccagacaaatgagtggacccaggttgctccactgtgcctaggaagagctggagcttgtgttgtgactgtaaaattataatttagtgccccgttttctacatgaagacaccgtcttcctttattaatttagtataattattctatcaatggatacatttttagtaaatgtgcattgtcacaatcctgggcacaaagtgcctgatgtcaaaatgaagatagtaaaacaagggaggaagcagtggatggaccaggattaattcctttcatttcttagtaaattaaaacctgcagctggtggattgtgatcacacattcccgaagtaataagtgaggacgaatgcactgctctggaacataacccagtgctaactgggggtttcatttattcagtcaagcacatcttactcacatccagatttattttcctacagtgcaaacacaccagatgaaactttaaaatgttactttttgtaagcttatcataaatgagttgcagtaatttgtttgcttgtttgtttaaccacaaccactattttaatgatatactaaagataacactatttagttttttcagaaacatctgcattatatgtgtgttggttgtggattttgtttctaaaattggcttagtccaataaataaagaaaagcattaaggacttaaagcaacaataaccaaataaaaacttgataggatctttgaagtctatttaaatattcattccattacatctagactcaccaagaactacatgttatgatgttaagttgaagttgaaacatgatgttttgcattaaatttaagatatgcaaatttatgtagagaaaataaatgttatataccctataatctttcacctaattagtatttaattatatggatttgttttatattataaaagatgttttgattttgtcttttgatattgacaaaattgtttggatatccttatgttctcaagtctgtatctgcctcccctgccttatttcttatgttttgccacagttaacccattgtgcttctttgtaatcaaacagtttgtgggagaatgggcttattgaatgtctaaaaaataagtttaaagtgtttgttaccctaagttttttacatttttaaactctaattacatatgtgaatgttattactctcagtgaattgttattgtttgcaaaaatgcactgggcagtaacattttgtgataaatcctataagatataagtc

SEQ ID NO: 22468 - DNA, 2130 bp, Artificial Sequence
  derived and/or modified sequence
atgagcggcagcaggaaggagtttgatgtgaagcagatcctgaagatccgctggcgctggtttggccaccaggccagcagccccaacagcacagtggacagccagcagggcgagttctggaacagaggccagacaggagccaacggcggcaggaagttcctggacccctgcagcctgcagctgcccctggccagcatcggctacagaagaagcagccagctggacttccagaacagccccagctggcccatggccagcaccagcgaggtgcctgcctttgagttcaccgctgaggactgtggcggggcccactggctggacaggcctgaggtggatgatggcaccagcgaggaggagaatgaaagtgacagcagcagctgcaggaccagcaacagcagccagaccctgagcagctgccacaccatggagccctgcaccagtgatgagttcttccaggccctgaaccacgccgagcagaccttcaagaagatggagaactacctgcggcacaagcagctgtgtgatgtgatcctggtggccggggaccggcgcatcccagcccaccggctggtgctgagctctgtgtctgactactttgctgccatgttcaccaatgatgtgcgggaggcccggcaggaggagatcaagatggagggcgtggagcccaacagcctgtggagcctcatccagtatgcctacacaggccgcctggagctgaaggaggacaacattgaatgtctgctgagcacagcctgcctgctgcagctgagccaggtggtggaggcctgctgcaagttcctgatgaagcagctgcaccccagcaactgcctgggcatccgcagctttgctgatgcccagggctgcacagacctgcacaaggtggcccacaactacaccatggagcacttcatggaggtgatccggaaccaggagtttgtgctgctgcctgccagcgagatcgccaagctgctggccagtgatgacatgaacatccccaatgaggagaccatcctgaatgccctgctgacctgggtgagacatgacctggagcagaggaggaaggacctgagcaagctgctggcctacatccggctgcccctgctggccccccagttcctggccgacatggagaacaacgtgctcttcagagatgacatcgagtgccagaagctgatcatggaggccatgaagtaccacctgctgcctgagcggcggcccatgctgcagagccccaggaccaagcccaggaagagcacagtgggcaccctgtttgctgtgggcggcatggacagcaccaagggggccaccagcattgagaagtatgacctgcggaccaacatgtggacccctgtggccaacatgaatggaagaaggctgcagtttggagtggccgtgctggatgacaagctgtatgtggtgggcggcagagatggcctgaagaccctgaacacagtggagtgctacaaccccaagaccaagacctggagcgtgatgccacccatgagcacccaccgccacggcctgggcgtggccgtgctggagggccccatgtatgctgtgggcggccatgatggctggagctacctgaacacagtggagcgctgggacccccaggcccggcagtggaactttgtggccaccatgagcacccccaggagcacagtgggcgtggccgtgctgagcggcaagctgtatgctgtgggcggcagagatggcagcagctgcctgaagtctgtggagtgctttgacccccacaccaacaagtggaccctgtgtgcccagatgagcaagaggcggggcggcgtgggcgtgaccacctggaatggcctgctgtatgccatcggcggccatgatgccccagccagcaacctgaccagccggctgagtgactgtgtggagagatatgaccccaagacagacatgtggacagctgtggcctccatgagcatcagcagagatgctgtgggcgtgtgcctgctgggggacaagctgtatgctgtgggcggctatgatggccaggcctacctgaacacagtggaggcctatgacccccagaccaatgagtggacccaggtggcccccctgtgcctgggccgggccggggcctgtgtggtgacagtgaagctgtag

SEQ ID NO: 22469 - DNA, 1707 bp, Artificial Sequence
  derived and/or modified sequence
atggagccctgcaccagtgatgagttcttccaggccctgaaccacgccgagcagaccttcaagaagatggagaactacctgcggcacaagcagctgtgtgatgtgatcctggtggccggggaccggcgcatcccagcccaccggctggtgctgagctctgtgtctgactactttgctgccatgttcaccaatgatgtgcgggaggcccggcaggaggagatcaagatggagggcgtggagcccaacagcctgtggagcctcatccagtatgcctacacaggccgcctggagctgaaggaggacaacatcgagtgcctgctgagcacagcctgcctgctgcagctgagccaggtggtggaggcctgctgcaagttcctgatgaagcagctgcaccccagcaactgcctgggcatccgcagctttgctgatgcccagggctgcacagacctgcacaaggtggcccacaactacaccatggagcacttcatggaggtgatccggaaccaggagtttgtgctgctgcctgccagcgagatcgccaagctgctggccagtgatgacatgaacatccccaatgaggagaccatcctgaatgccctgctgacctgggtgagacatgacctggagcagaggaggaaggacctgagcaagctgctggcctacatccggctgcccctgctggccccccagttcctggccgacatggagaacaacgtgctcttcagagatgacatcgagtgccagaagctgatcatggaggccatgaagtaccacctgctgcctgagcggcggcccatgctgcagagccccaggaccaagcccaggaagagcacagtgggcaccctgtttgctgtgggcggcatggacagcaccaagggggccaccagcattgagaagtatgacctgcggaccaacatgtggacccctgtggccaacatgaatggccggcggctgcagtttggagtggccgtgctggatgacaagctgtatgtggtgggcggcagagatggcctgaagaccctgaacacagtggagtgctacaaccccaagaccaagacctggagcgtgatgccacccatgagcacccacagacatggcctgggcgtggccgtgctggagggccccatgtatgctgtgggcggccatgatggctggagctacctgaacacagtggagcgctgggacccccaggcccggcagtggaactttgtggccaccatgagcacccccaggagcacagtgggcgtggccgtgctgagcggcaagctgtatgctgtgggcggcagagatggcagcagctgcctgaagtctgtggagtgctttgacccccacaccaacaagtggaccctgtgtgcccagatgagcaagagaagaggaggagtgggcgtgaccacctggaatggcctgctgtatgccatcggcggccatgatgccccagccagcaacctgaccagccggctgagtgactgtgtggagagatatgaccccaagacagacatgtggacagctgtggcctccatgagcatcagcagagatgctgtgggcgtgtgcctgctgggggacaagctgtatgctgtgggcggctatgatggccaggcctacctgaacacagtggaggcctatgacccccagaccaatgagtggacccaggtggcccccctgtgcctgggccgggccggggcctgtgtggtgacagtgaagctgtag

SEQ ID NO: 22470 - DNA, 2130 bp, Artificial Sequence
  derived and/or modified sequence
atgagcggcagccggaaggagttcgacgtgaagcagatcctgaagattcggtggcgctggtttggacaccaggcatcctctcccaattctacagtagattctcaacagggggagttctggaacagaggtcaaacaggcgccaacggcgggagaaagttcctcgatccttgttccctccaactccctttggcatccatcggctataggaggtcttctcagctagattttcagaactccccctcttggcctatggcatctactagcgaggttcctgcatttgagttcacagccgaagattgcggaggagcccactggttagatagacctgaggtggacgatggcacaagcgaagaagaaaatgaaagtgactctagcagctgccgtacaagtaacagctcacagacattgtcctcatgccacaccatggaaccatgtaccagcgacgagtttttccaggctttgaatcatgctgagcaaacattcaaaaaaatggaaaattacctccgccataaacagctgtgcgatgtgattttggttgccggcgatcgcaggattcccgcacatcgtcttgttctgtcttctgtctccgattatttcgccgcaatgttcacaaatgacgtgcgagaagccagacaggaggaaattaagatggagggtgtagagcctaacagcctctggtcactgattcagtacgcctatacgggaagactcgagctgaaggaggacaatatcgagtgtttgctgtctaccgcatgcctgctgcagctgagtcaagttgtggaagcctgttgcaagtttttgatgaagcagctccacccaagcaactgtttgggaataaggtcgttcgcagatgcacaaggctgcaccgatttgcataaagtggcccataattatacaatggagcacttcatggaggtgatccgtaaccaggagttcgttcttctgcctgcttctgagatcgccaagcttttggcctccgatgacatgaatatccctaatgaggaaacgattttgaacgctctgctgacttgggtgcgccacgatttagagcagagacggaaagacctgtcaaaactcctagcttatatcagactgcctcttctggctccacagtttttggccgatatggagaataacgtactcttccgcgatgatattgagtgtcagaagctgatcatggaagccatgaagtatcacctcctgccggaaaggaggcccatgttgcaaagcccacggaccaagccacggaagtcaaccgtgggcacactcttcgctgtgggaggaatggattccaccaaaggcgcgacttctatagaaaagtacgatctccgcacaaacatgtggacccctgtcgccaacatgaacggcagacggctccaattcggggtggctgtcctggacgacaaactctatgttgttggggggagagatggcttgaagacgctgaacacagttgagtgctataatcctaagactaagacttggtccgtgatgccaccaatgtccactcacagacacggactcggggtagccgtgctggagggacccatgtacgccgtcggcggtcacgacggctggtcatacctgaatacggttgagcggtgggatccacaggcccgtcagtggaactttgtggctaccatgtctacgcctcgctctaccgtgggagtggccgtgctcagtggcaaactgtatgccgtgggtggcagggatggttcaagctgtttaaaatctgtcgagtgcttcgatcctcacacaaacaagtggaccctgtgcgcccagatgagcaagcgcaggggcggggtcggcgtcaccacctggaacggcctgctgtacgccattgggggacacgatgccccagcatcaaatttgactagtagactttcggattgtgtggaaaggtatgatcccaagaccgatatgtggacggccgtagcctctatgagcatcagcagggacgcagtcggagtatgccttctgggtgataagctgtatgccgtggggggctatgatggacaggcatatctgaacactgtggaggcctacgacccgcaaacgaacgaatggacacaagtggcaccactgtgccttggacgggctggagcctgcgttgtgacagtgaaactttag

SEQ ID NO: 22471 - DNA, 1707 bp, Artificial Sequence
  derived and/or modified sequence
atggagccctgcaccagcgacgagttcttccaggccctgaaccacgctgagcagactttcaaaaaaatggagaattatctgaggcacaagcagctttgtgacgtcatcctcgtggccggcgaccggaggatacccgctcaccgcctggtgttgtcatctgtctcagattacttcgctgccatgttcacaaatgatgtgagagaagcaaggcaggaagagatcaaaatggaaggcgtggagccaaactcactttggtccttgatacaatacgcctatactggtagacttgagctcaaagaggacaatattgagtgtctgctgtcaactgcttgcctgctccagttgtcacaggtagttgaagcatgctgcaagttcctgatgaagcaactgcatccctctaattgtcttggcataagatcttttgccgatgcccaggggtgtacggacctgcacaaggtcgctcacaattataccatggagcattttatggaagttattaggaaccaagaatttgtgttgctgccagcctctgagatcgcgaaactccttgcctcagacgatatgaatatccccaatgaggagaccatattgaacgccttgctgacctgggtgcgccatgatctggagcagagacgaaaggaccttagcaaattgctggcatatatcaggctgcctctgcttgcaccgcagtttctggccgacatggaaaacaacgttctcttccgtgacgatatagagtgccagaagctgataatggaagccatgaagtaccacctgctgcctgagcgcagaccgatgctgcagagccctcgcacgaaaccccggaaatccaccgtcgggactctgtttgccgtgggcgggatggatagtacaaaaggcgcaacgagcatcgagaagtatgacctgcgcactaatatgtggacgcctgttgcaaacatgaacggccgcaggctgcaattcggtgtggccgtgctggacgataagctttacgtggtaggaggcagggatgggctcaagacgctaaacacagttgaatgttataatcccaagacgaaaacctggtccgtgatgcctccgatgtctacacatcggcacggcctcggcgtggctgtgttggaagggccaatgtacgcagtgggtggacacgatggttggtcctacctcaatacggtcgagcgatgggacccccaggctcggcagtggaatttcgtcgccactatgagcacaccccggtctaccgttggcgtcgcagtacttagcggtaagctgtacgccgttggtggtagagacggctcttcttgtcttaaaagtgtagagtgttttgacccccacaccaacaagtggacactatgtgctcagatgagcaaaagacgtggcggtgtaggggtgactacctggaatggactgctatacgctatcggcggacacgacgcccccgcctccaacctgacctctcgcctgtctgattgcgtcgagagatatgacccgaagaccgacatgtggactgcggtcgctagcatgtcgatttcacgcgatgccgtcggagtttgcctacttggtgataagctgtacgcggtaggcggatacgatggtcaagcctatctcaacaccgtggaagcgtacgaccctcagacgaatgaatggacccaggttgcgcccctatgtttgggtagagcaggagcctgtgtcgtaacggtaaagctgtag

SEQ ID NO: 22472 - DNA, 2130 bp, Artificial Sequence
  derived and/or modified sequence
atgtccggctcgcggaaagaatttgacgttaaacagatactcaaaattagatggcgttggttcgggcaccaggcgagtagtccaaactcgactgtggacagccagcaaggcgagttttggaaccgcggtcagacaggcgcaaacgggggaagaaaatttctggatccgtgctccctgcagcttcccttggcaagtatcggttaccgcagaagttcacagctagattttcagaactctcccagttggccgatggccagcactagtgaggtgcccgcattcgaatttactgcagaggattgtggcggagctcactggcttgaccgcccagaagtcgacgatggaacatctgaggaggaaaacgagtcagattcaagctcatgccgcacatccaacagtagccaaacactgagctcctgccacacgatggaaccatgtacctctgacgagttttttcaggcactgaatcatgctgaacagacattcaaaaagatggaaaactacctcagacataagcagctgtgcgatgtcattctcgtggcgggagacaggaggatccccgcacacagattggtgctgagcagcgtgtccgactactttgctgccatgttcacaaatgatgtcagagaggccaggcaggaggaaatcaagatggagggcgttgagcccaacagtctgtggagcttgatccagtacgcgtatacagggagactggagctgaaggaagataatattgaatgtctgctcagtaccgcttgtctattgcagctttctcaggtggtagaagcttgttgtaagtttctgatgaaacagcttcatcccagcaactgcttaggcattagatcctttgccgacgcccagggctgtaccgacttacacaaggtcgcccacaactatacgatggaacacttcatggaggttatcaggaatcaggaattcgtcttgctccccgcttctgagatagcaaaactgctcgcgtctgacgacatgaatattcctaatgaggaaacaatcctgaacgccctgctgacatgggtacgccacgatctggagcagagacggaaagatctatctaaactgttggcctatattagattgccattacttgctccgcaattcctggcggatatggaaaacaatgtgctgtttagggatgacatcgagtgccagaaactgatcatggaggcgatgaaataccatctcttgccagagcgcagacccatgcttcagtcgcctaggaccaagccccgaaaatctaccgtgggtacactgttcgcagttggtggtatggactcaaccaagggagctacttcaattgaaaaatatgatctccggactaatatgtggaccccagtggccaacatgaatggaaggcggctgcagtttggggtggctgtgctggatgacaagctgtatgtcgttggcggtcgtgatgggctgaagacgctgaacacagtcgagtgctacaacccgaaaactaagacgtggagtgtaatgccacctatgagtacgcataggcacggcctgggggtggccgttctcgaaggccctatgtatgctgttggagggcacgatggctggtcttacttgaacactgtcgagcggtgggacccccaagccagacagtggaattttgtggctaccatgagcacccctagatcaaccgtgggggtggcggtgctgagcggcaaactgtacgctgtcgggggacgggatggaagctcctgtctgaagtcagtagaatgctttgatcctcacacaaacaaatggacattgtgtgctcagatgtcgaaaagaaggggcggtgttggggttaccacctggaacggcctgctctacgccatcggcggacacgatgcaccagcatcaaacttaacttccagactctccgattgcgttgagcgttatgaccctaaaaccgacatgtggactgcggtcgcttcaatgtccatcagccgagacgccgtgggggtctgcttgctgggtgataaactgtacgcggtcggtgggtatgatgggcaagcttacttgaacactgtggaggcatacgatccgcaaaccaatgagtggacacaggtagcccctctctgtctggggagagcgggagcgtgtgttgtcactgtcaagctgtag

SEQ ID NO: 22473 - DNA, 1707 bp, Artificial Sequence
  derived and/or modified sequence
atggagccctgtacaagtgacgagtttttccaggctttgaatcatgcagagcagacattcaagaagatggagaactatctacggcataagcagttgtgcgacgtcattctcgttgccggagaccgacgcatccccgctcacaggttggtgctctccagtgtaagcgattattttgccgcaatgtttacaaatgacgttcgagaggcacgtcaggaggaaattaaaatggagggggttgaaccgaactccctctggagcctaatccagtacgcgtacacgggcaggcttgagctcaaagaggacaatatcgaatgccttctctccactgcttgtctgctgcagctgagccaagtggttgaagcttgttgtaaattcctgatgaaacagctccacccttcaaactgcttgggcatccggtctttcgccgatgcacagggttgtaccgatcttcataaagtagctcacaactacacaatggagcatttcatggaggttatccggaaccaggagtttgttctactgccagcatcagagattgccaagctcctggccagtgatgatatgaacatacctaatgaagaaacaatcctcaacgccctactaacttgggtaagacacgacctggaacagaggaggaaagaccttagcaagctgctggcctacattagattgccactcctcgccccacagttcctggctgacatggaaaataacgtgctctttcgcgatgatatcgaatgtcaaaagttaatcatggaagccatgaagtaccacctgctgccagagcgacgccctatgttgcagtcgccacgaactaaacctaggaagtctacggtcggaaccctgtttgcagtcgggggaatggatagtaccaaaggtgccacatccattgagaaatacgaccttagaactaacatgtggacgcctgtggctaatatgaacggtagacgcctccagtttggcgtggccgttttagacgacaaactgtatgttgtgggcggaagagatggcctcaagacactgaacactgtggagtgttataatccaaagaccaaaacatggtccgtgatgcccccaatgtccactcacaggcatggactcggagtagcagtgttggaaggtccaatgtacgcggtcggaggtcatgatgggtggtcctatctgaacacggtggagcgatgggatccgcaggcgagacagtggaattttgtggccactatgagtacccctagatctacagtgggagtggccgtgttatccggaaaactctacgccgtcggaggcagagatggaagctcttgcctcaaatccgtggagtgcttcgacccccacactaacaaatggaccctgtgcgctcagatgagcaagcggcgagggggagtaggggtcactacatggaatggattattgtatgccattggaggccacgacgcaccagcttccaatctgacgtccaggttgtctgactgtgtggaacggtatgaccccaagaccgatatgtggactgccgtggcctctatgtccatctctagagacgcagtgggagtgtgtctgttaggagataagttatacgctgtgggcggatatgatggtcaggcgtacttgaacacagtcgaagcatatgacccccagaccaacgaatggacacaagtggctcctctgtgtcttggccgagccggagcttgtgtggtgaccgtgaagttgtag

SEQ ID NO: 22474 - DNA, 2130 bp, Artificial Sequence
  derived and/or modified sequence
atgagcggcagcagaaaggagttcgacgtgaagcagatcctgaagatcagatggagatggttcggccaccaggccagcagccccaacagcaccgtggacagccagcagggcgagttctggaacagaggccagaccggcgccaacggcggcagaaagttcctggacccctgcagcctgcagctgcccctggccagcatcggctacagaagaagcagccagctggacttccagaacagccccagctggcccatggccagcaccagcgaggtgcccgccttcgagttcaccgccgaggactgcggcggcgcccactggctggacagacccgaggtggacgacggcaccagcgaggaggagaacgagagcgacagcagcagctgcagaaccagcaacagcagccagaccctgagcagctgccacaccatggagccctgcaccagcgacgagttcttccaggccctgaaccacgccgagcagaccttcaagaagatggagaactacctgagacacaagcagctgtgcgacgtgatcctggtggccggcgacagaagaatccccgcccacagactggtgctgagcagcgtgagcgactacttcgccgccatgttcaccaacgacgtgagagaggccagacaggaggagatcaagatggagggcgtggagcccaacagcctgtggagcctgatccagtacgcctacaccggcagactggagctgaaggaggacaacatcgagtgcctgctgagcaccgcctgcctgctgcagctgagccaggtggtggaggcctgctgcaagttcctgatgaagcagctgcaccccagcaactgcctgggcatcagaagcttcgccgacgcccagggctgcaccgacctgcacaaggtggcccacaactacaccatggagcacttcatggaggtgatcagaaaccaggagttcgtgctgctgcccgccagcgagatcgccaagctgctggccagcgacgacatgaacatccccaacgaggagaccatcctgaacgccctgctgacctgggtgagacacgacctggagcagagaagaaaggacctgagcaagctgctggcctacatcagactgcccctgctggccccccagttcctggccgacatggagaacaacgtgctgttcagagacgacatcgagtgccagaagctgatcatggaggccatgaagtaccacctgctgcccgagagaagacccatgctgcagagccccagaaccaagcccagaaagagcaccgtgggcaccctgttcgccgtgggcggcatggacagcaccaagggcgccaccagcatcgagaagtacgacctgagaaccaacatgtggacccccgtggccaacatgaacggcagaagactgcagttcggcgtggccgtgctggacgacaagctgtacgtggtgggcggcagagacggcctgaagaccctgaacaccgtggagtgctacaaccccaagaccaagacctggagcgtgatgccccccatgagcacccacagacacggcctgggcgtggccgtgctggagggccccatgtacgccgtgggcggccacgacggctggagctacctgaacaccgtggagagatgggacccccaggccagacagtggaacttcgtggccaccatgagcacccccagaagcaccgtgggcgtggccgtgctgagcggcaagctgtacgccgtgggcggcagagacggcagcagctgcctgaagagcgtggagtgcttcgacccccacaccaacaagtggaccctgtgcgcccagatgagcaagagaagaggcggcgtgggcgtgaccacctggaacggcctgctgtacgccatcggcggccacgacgcccccgccagcaacctgaccagcagactgagcgactgcgtggagagatacgaccccaagaccgacatgtggaccgccgtggccagcatgagcatcagcagagacgccgtgggcgtgtgcctgctgggcgacaagctgtacgccgtgggcggctacgacggccaggcctacctgaacaccgtggaggcctacgacccccagaccaacgagtggacccaggtggcccccctgtgcctgggcagagccggcgcctgcgtggtgaccgtgaagctgtag

SEQ ID NO: 22475 - DNA, 1707 bp, Artificial Sequence
  derived and/or modified sequence
atggagccctgcaccagcgacgagttcttccaggccctgaaccacgccgagcagaccttcaagaagatggagaactacctgagacacaagcagctgtgcgacgtgatcctggtggccggcgacagaagaatccccgcccacagactggtgctgagcagcgtgagcgactacttcgccgccatgttcaccaacgacgtgagagaggccagacaggaggagatcaagatggagggcgtggagcccaacagcctgtggagcctgatccagtacgcctacaccggcagactggagctgaaggaggacaacatcgagtgcctgctgagcaccgcctgcctgctgcagctgagccaggtggtggaggcctgctgcaagttcctgatgaagcagctgcaccccagcaactgcctgggcatcagaagcttcgccgacgcccagggctgcaccgacctgcacaaggtggcccacaactacaccatggagcacttcatggaggtgatcagaaaccaggagttcgtgctgctgcccgccagcgagatcgccaagctgctggccagcgacgacatgaacatccccaacgaggagaccatcctgaacgccctgctgacctgggtgagacacgacctggagcagagaagaaaggacctgagcaagctgctggcctacatcagactgcccctgctggccccccagttcctggccgacatggagaacaacgtgctgttcagagacgacatcgagtgccagaagctgatcatggaggccatgaagtaccacctgctgcccgagagaagacccatgctgcagagccccagaaccaagcccagaaagagcaccgtgggcaccctgttcgccgtgggcggcatggacagcaccaagggcgccaccagcatcgagaagtacgacctgagaaccaacatgtggacccccgtggccaacatgaacggcagaagactgcagttcggcgtggccgtgctggacgacaagctgtacgtggtgggcggcagagacggcctgaagaccctgaacaccgtggagtgctacaaccccaagaccaagacctggagcgtgatgccccccatgagcacccacagacacggcctgggcgtggccgtgctggagggccccatgtacgccgtgggcggccacgacggctggagctacctgaacaccgtggagagatgggacccccaggccagacagtggaacttcgtggccaccatgagcacccccagaagcaccgtgggcgtggccgtgctgagcggcaagctgtacgccgtgggcggcagagacggcagcagctgcctgaagagcgtggagtgcttcgacccccacaccaacaagtggaccctgtgcgcccagatgagcaagagaagaggcggcgtgggcgtgaccacctggaacggcctgctgtacgccatcggcggccacgacgcccccgccagcaacctgaccagcagactgagcgactgcgtggagagatacgaccccaagaccgacatgtggaccgccgtggccagcatgagcatcagcagagacgccgtgggcgtgtgcctgctgggcgacaagctgtacgccgtgggcggctacgacggccaggcctacctgaacaccgtggaggcctacgacccccagaccaacgagtggacccaggtggcccccctgtgcctgggcagagccggcgcctgcgtggtgaccgtgaagctgtag

SEQ ID NO: 22476 - protein, 620 aa, Artificial Sequence
  derived and/or modified sequence
MAKPQGLVTFEDVAVDFTQEEWQYLNPPQRTLYRDVMLETYSNLVFVGQQVTKPNLILKLEVEECPAEGKIPFWNFPEVCQVDEQIERQHQDDQDKCLLMQVGFSDKKTIITKSARDCHEFGNILHLSTNLVASIQRPDKHESFGNNMVDNLDLFSRSSAENKYDNGCAKLFFHTEYEKTNPGMKPYGYKECGKGLRRKKGLSLHQRIKNGEKPFECTACRKTFSKKSHLIVHWRTHTGEKPFGCTECGKAFSQKSQLIIHLRTHTGERPFECPECGKAFREKSTVIIHYRTHTGEKPYECNECGKAFTQKSNLIVHQKTHTGEKTYECTKCGESFIQKLDLIIHHSTHTGKKPHECNECKKTFSDKSTLIIHQRTHTGEKPHKCTECGKSFNEKSTLIVHQRTHTGEKPYECDVCGKTFTQKSNLGVHQRTHSGEKPFECNECEKAFSQKSYLMLHQRGHTGEKPYECNECEKAFSQKSYLIIHQRTHTEEKPYKCNECGKAFREKSKLIIHQRIHTGEKPYECPVCWKAFSQKSQLIIHQRTHTGEKPYACTECGKAFREKSTFTVHQRTHTGEKPYKCTECGKAFTQKSNLIVHQRTHAGKKAHGRGHTRKSKFMAH

SEQ ID NO: 22477 - DNA, 168 bp, Artificial Sequence
  derived and/or modified sequence
tatgaatgtcctgtgtgttggaaagcttttagccagaagtcacagctcataatacatcagagaacgcacacgggagagaaaccctatgcatgcactgagtgtggcaaagccttccgagaaaagtcaacattcactgtacatcaaagaactcatactggagagaaaccc

SEQ ID NO: 22478 - DNA, 1863 bp, Artificial Sequence
  derived and/or modified sequence
atggccaagccccagggcctggtgaccttcgaggacgtggccgtggacttcacccaggaggagtggcagtacctgaaccccccccagagaaccctgtacagagacgtgatgctggagacctacagcaacctggtgttcgtgggccagcaggtgaccaagcccaacctgatcctgaagctggaggtggaggagtgccccgccgagggcaagatccccttctggaacttccccgaggtgtgccaggtggacgagcagatcgagagacagcaccaggacgaccaggacaagtgcctgctgatgcaggtgggcttcagcgacaagaagaccatcatcaccaagagcgccagagactgccacgagttcggcaacatcctgcacctgagcaccaacctggtggccagcatccagagacccgacaagcacgagagcttcggcaacaacatggtggacaacctggacctgttcagcagaagcagcgccgagaacaagtacgacaacggctgcgccaagctgttcttccacaccgagtacgagaagaccaaccccggcatgaagccctacggctacaaggagtgcggcaagggcctgagaagaaagaagggcctgagcctgcaccagagaatcaagaacggcgagaagcccttcgagtgcaccgcctgcagaaagaccttcagcaagaagagccacctgatcgtgcactggagaacccacaccggcgagaagcccttcggctgcaccgagtgcggcaaggccttcagccagaagagccagctgatcatccacctgagaacccacaccggcgagagacccttcgagtgccccgagtgcggcaaggccttcagagagaagagcaccgtgatcatccactacagaacccacaccggcgagaagccctacgagtgcaacgagtgcggcaaggccttcacccagaagagcaacctgatcgtgcaccagaagacccacaccggcgagaagacctacgagtgcaccaagtgcggcgagagcttcatccagaagctggacctgatcatccaccacagcacccacaccggcaagaagccccacgagtgcaacgagtgcaagaagaccttcagcgacaagagcaccctgatcatccaccagagaacccacaccggcgagaagccccacaagtgcaccgagtgcggcaagagcttcaacgagaagagcaccctgatcgtgcaccagagaacccacaccggcgagaagccctacgagtgcgacgtgtgcggcaagaccttcacccagaagagcaacctgggcgtgcaccagagaacccacagcggcgagaagcccttcgagtgcaacgagtgcgagaaggccttcagccagaagagctacctgatgctgcaccagagaggccacaccggcgagaagccctacgagtgcaacgagtgcgagaaggccttcagccagaagagctacctgatcatccaccagagaacccacaccgaggagaagccctacaagtgcaacgagtgcggcaaggccttcagagagaagagcaagctgatcatccaccagagaatccacaccggcgagaagccctacgagtgccccgtgtgctggaaggccttcagccagaagagccagctgatcatccaccagagaacccacaccggcgagaagccctacgcctgcaccgagtgcggcaaggccttcagagagaagagcaccttcaccgtgcaccagagaacccacaccggcgagaagccctacaagtgcaccgagtgcggcaaggccttcacccagaagagcaacctgatcgtgcaccagagaacccacgccggcaagaaggcccacggcagaggccacaccagaaagagcaagttcatggcccactag

SEQ ID NO: 22479 - DNA, 1863 bp, Artificial Sequence
  derived and/or modified sequence
atggcgaaaccccaaggactagtcacatttgaggatgtcgctgtagactttacccaagaagagtggcagtacctgaaccctcctcagagaaccctgtatagagacgtaatgctggagacctactcaaacctggttttcgtgggccagcaagtaaccaaaccaaacttaattttaaagttggaagtcgaagagtgccctgctgaggggaagattccattctggaactttcccgaggtgtgccaggtagacgagcaaatagaaagacagcatcaggatgaccaggataagtgtctgctgatgcaggttggcttttccgacaagaaaaccattatcaccaagagcgctcgggattgtcatgaattcggaaatattcttcacttaagtactaacctggtcgcctcaattcaaagacctgacaaacatgagtcctttgggaataatatggtcgacaacctggacctcttcagcaggagcagtgctgagaacaaatatgacaacggttgcgcaaagctgtttttccatactgaatatgagaaaacaaaccccggcatgaagccctacggatataaagaatgtggcaagggtttgcgacgaaagaagggcctcagcctgcaccagaggatcaagaacggggagaaaccttttgaatgcacggcttgccgaaaaaccttcagcaaaaagagccaccttatcgtccactggagaacacatactggagagaaaccatttgggtgcacagagtgcgggaaagcattctcccagaagagccagctaataattcatctgcgcacacacaccggggaacggcccttcgagtgccccgagtgtggtaaagcgtttagggagaaatctactgttatcattcactacaggacccacactggggagaaaccctatgagtgtaacgagtgcggcaaagcttttactcagaaatcaaacctgatcgtacatcagaagacccatacgggtgagaagacttacgaatgcactaagtgtggcgaaagctttattcaaaagctggacctaataattcatcactcaactcacacaggcaagaaacctcacgaatgtaatgagtgtaaaaagacattctccgacaaaagcacccttatcatccaccagaggacacatacgggagagaaaccccataaatgcacagagtgtggcaagagctttaatgaaaagtctaccctgatcgtacaccaacgcacccacactggggagaagccttacgaatgtgatgtgtgtggtaaaacattcacccaaaagtcaaacttaggcgtgcaccagcggacccactccggcgaaaaaccttttgaatgcaatgagtgcgagaaagcctttagccagaaatcttatctgatgcttcaccaacgcggtcatacaggagaaaaaccgtatgaatgtaatgagtgcgagaaggctttctctcagaaaagctatcttataattcaccagcgcactcacacagaagaaaagccatacaagtgtaatgagtgtggcaaagcgttcagagaaaagtccaagttgatcatccaccaacgtatacatacgggagaaaaaccttacgagtgtcccgtgtgttggaaagcattctcgcaaaaatctcagttgatcatccaccagagaacccatacaggcgagaagccttatgcctgcacagagtgcgggaaggcctttcgtgagaagtcaacctttacggtacatcagcgcacgcacacaggggaaaagccctataaatgcacggaatgtgggaaagcctttacacaaaagtccaatctcatcgtccaccaaagaacccacgcaggcaaaaaggctcatggcaggggtcatacacgtaagagcaagtttatggcccattag

SEQ ID NO: 22480 - DNA, 1863 bp, Artificial Sequence
  derived and/or modified sequence
atggccaagccccagggcctggtgacctttgaagatgtggccgtggacttcacccaggaggagtggcagtacctgaaccccccccagaggaccctgtacagagatgtgatgctggagacctacagcaacctggtgtttgtgggccagcaggtgaccaagcccaacctgatcctgaagctggaggtggaggagtgcccagctgagggcaagatccccttctggaacttccctgaggtgtgccaggtggatgagcagatcgagcggcagcaccaggatgaccaggacaagtgcctgctgatgcaggtgggcttcagtgacaagaagaccatcatcaccaagagcgcccgggactgccatgaatttggaaacatcctgcacctgagcaccaacctggtggccagcatccagaggccagacaagcatgagagctttggaaacaacatggtggacaacctggacctcttcagccgcagcagcgctgagaacaagtatgacaatggctgtgccaagctgttcttccacacagaatatgagaagaccaaccctggcatgaagccctacggctacaaggaatgtgggaagggcctgcggaggaagaagggcctgagcctgcaccagaggatcaagaatggagagaagccctttgagtgcacagcctgcaggaagaccttcagcaagaagagccacctgattgtgcactggaggacccacactggagagaagcccttcggctgcacagaatgtgggaaggccttcagccagaagagccagctgatcatccacctgcggacccacactggagagcggccctttgagtgcccagaatgtgggaaggccttccgggagaagagcaccgtcatcatccactaccgcacccacactggagagaagccctatgagtgcaatgaatgtgggaaggccttcacccagaagagcaacctgattgtgcaccagaagacccacactggagagaagacctatgagtgcaccaagtgtggggagagcttcatccagaagctggacctgatcatccaccacagcacccacacaggcaagaagccccatgagtgcaatgaatgcaagaagaccttcagtgacaagagcaccctcatcatccaccagaggacccacactggagagaagccccacaagtgcacagaatgtgggaagagcttcaatgagaagagcaccctgattgtgcaccagaggacccacactggagagaagccctatgaatgtgatgtgtgtgggaagaccttcacccagaagagcaacctgggcgtgcaccagaggacccacagcggggagaagccctttgagtgcaatgaatgtgagaaggccttcagccagaagagctacctgatgctgcaccagaggggccacactggagagaagccctatgagtgcaatgaatgtgagaaggccttcagccagaagagctacctgatcatccaccagaggacccacacagaggagaagccctacaagtgcaatgaatgtgggaaggccttccgggagaagagcaagctgatcatccaccagaggatccacactggagagaagccctatgagtgccctgtgtgctggaaggccttcagccagaagagccagctgatcatccaccagaggacccacactggagagaagccctatgcctgcacagaatgtgggaaggccttccgggagaagagcaccttcaccgtgcaccagaggacccacactggagagaagccctacaagtgcacagaatgtgggaaggccttcacccagaagagcaacctgattgtgcaccagaggacccacgccggcaagaaggcccacggccggggccacaccaggaagagcaagttcatggcccactag

SEQ ID NO: 22481 - DNA, 1863 bp, Artificial Sequence
  derived and/or modified sequence
atggccaagccccagggcctggtgaccttcgaggacgtggccgtggatttcacacaggaagaatggcaatatctgaaccccccccaacgcacactgtacagagatgtgatgctggaaacatatagcaacttagtgtttgtgggccaacaggtaaccaaacctaatctcattctgaaactggaggtggaggagtgccctgcagagggtaaaattcccttttggaactttcctgaagtgtgccaggtcgatgaacaaatcgaacgccagcaccaggacgaccaggataagtgcctcctcatgcaggtgggtttctccgacaaaaaaacaatcatcaccaaatcagcccgggactgtcacgagttcgggaatattttgcacttatccacaaatctcgtcgcctctatccaaaggccagataagcacgaaagttttgggaacaatatggttgataacctcgatctgtttagcaggagctcagctgagaacaagtatgataacggatgtgccaaactgtttttccacacagaatacgagaaaacgaaccccggcatgaaaccttacggttacaaagaatgtggtaaagggcttaggcggaagaagggtctaagtctgcaccagagaatcaagaatggagagaagcctttcgaatgcacggcctgcaggaaaactttttcaaaaaagtcacaccttatcgtccactggcggacgcacacaggagagaaaccattcggatgcactgagtgtgggaaggcctttagccagaagtcccaactaattattcatttgcggacacataccggggagcgaccatttgagtgccctgaatgcgggaaggcctttagagaaaaatcaactgtgatcattcactatcgcacccataccggagagaagccgtacgagtgcaatgaatgcgggaaagccttcacacaaaagagtaacctaattgtacaccagaagacccatactggcgaaaagacgtacgagtgtactaagtgcggggagtcgttcattcagaaactggacctaattatccaccactccacacacacgggtaaaaaacctcatgaatgtaatgagtgcaagaaaactttttccgacaagtctactctaattatccatcaaaggacacatacaggggaaaagccacataagtgcacagagtgcggcaagagcttcaatgagaagagcactcttatcgtccatcagaggacccataccggggagaagccttacgagtgtgacgtgtgtgggaaaacctttacacagaaaagcaatctgggagtgcaccagcggacgcatagcggggaaaaacctttcgaatgcaatgaatgcgaaaaggctttttcacagaaatcttacctgatgctgcaccagcgaggtcacaccggcgaaaaaccttatgaatgtaacgagtgcgagaaagccttcagccagaagagctatttgatcatacaccagcggactcacacagaagaaaagccctacaagtgcaatgagtgtgggaaggcctttcgcgaaaaaagtaagctgatcatccaccaacgaatacacaccggcgaaaagccatatgagtgtccagtgtgttggaaagccttttcccagaaatctcagttgatcattcaccagcgcacccacactggtgagaaaccctacgcatgcaccgaatgcggaaaagccttccgagagaagagcacttttactgttcaccagcgcacgcacaccggggagaagccctacaagtgcacagaatgtggaaaggcctttacccagaaaagtaatctcatagtgcaccagaggactcacgccggtaagaaggctcacgggaggggccacaccaggaagtcaaagttcatggcgcattag

SEQ ID NO: 22482 - DNA, 1863 bp, Artificial Sequence
  derived and/or modified sequence
atggctaagcctcaaggcctggttactttcgaagacgtcgctgtggacttcacgcaagaggaatggcagtacctcaatccaccccaacggactctttaccgagacgtaatgctcgaaacttattcaaatctggtgttcgttggccaacaggtaaccaagccaaatttaatcctgaagctggaggtggaggaatgcccagctgaagggaagatccccttctggaacttccccgaggtatgccaggtggatgagcaaattgagaggcagcatcaggatgatcaggacaaatgcctgctgatgcaagtgggcttttctgataaaaagactatcattaccaaatcagccagagattgccatgagtttggtaatatccttcatcttagcactaatcttgtcgccagtatccagcgccctgataaacatgagtcatttggaaacaatatggtggataacctggacctctttagccgttcatcggccgaaaacaaatatgacaacggctgtgctaagctgttctttcatactgaatatgagaagactaatcccggaatgaaaccctatgggtacaaggaatgtggcaaggggctgcggagaaagaagggcctgtctttgcatcaaaggataaaaaacggggaaaagccattcgaatgtacagcctgcaggaagactttttctaaaaaatcgcatttgattgtacactggcggactcacaccggagaaaagccgtttggctgtactgaatgcggcaaagcattctcccaaaagtcccagctcattatccacttgcggactcacacaggcgagcgcccatttgagtgtccagaatgcggtaaggctttccgcgagaaatctaccgtcattatccattatcgcactcacaccggtgaaaagccttacgagtgtaatgagtgcggtaaggctttcacccaaaaatctaatttgatcgtgcaccagaaaacacatacgggggagaaaacatacgagtgcaccaaatgcggtgagtcctttattcagaaattagatctgatcattcatcacagcactcacacaggaaagaagccacacgagtgcaacgagtgcaagaagaccttctctgacaagagcaccttgatcatccaccagcggactcacactggcgagaaaccacataagtgcactgagtgcgggaagtcctttaatgagaagagcacgcttatcgtgcaccagagaacccacactggcgaaaagccctacgaatgtgacgtatgcggcaagaccttcactcagaagagcaacctgggggtgcaccagagaacgcactcaggtgagaaaccatttgagtgtaatgaatgcgaaaaagccttttctcagaagtcatacctcatgctgcaccaacgcggacataccggggagaaaccctacgaatgtaacgagtgtgagaaagcgttttcccagaagagctacctcatcatacaccagcggactcacaccgaagaaaaaccctacaagtgtaacgagtgtggtaaggcctttcgagagaagtccaaactgattattcatcagcggattcatacaggcgagaagccctacgaatgtccagtctgttggaaagcgttttcccagaaatctcagcttattattcaccagcgcacgcataccggggagaagccttacgcctgcaccgagtgtggcaaggcattcagagagaagtctacatttactgtccaccagaggacccacacgggagaaaaaccgtacaagtgtacggagtgcgggaaagcttttacccagaaatctaacctgatagtccaccaacgaacacacgccggaaagaaggcacatggtcggggacacactcggaaatctaaattcatggctcattag

SEQ ID NO: 22483 - DNA, 3465 bp, Artificial Sequence
  derived and/or modified sequence
gtaacggtctcctgagcagcgagcagaaaatctgttatcgagagagacacagtgacctgcccctaaaggttcatgcgcatccctcagacccctctttagacgcgccccgcttctccctctgccctctccccttgcccaagccccgaggtgggggcctggtgtgaatgctccggccgaagtgaacctgcacccccgcacccgaaggcctctttccggcttctgggcaaggcggccccggtgagctcggccgtcacacatctctgctttttcccaagaagagcaggaaatggccaaaccccaggggctagtgacatttgaagatgtagctgtggatttcacccaggaggagtggcagtacctgaacccaccacagaggaccctgtacagagacgtgatgctggagacctacagcaacttggtctttgtggggcagcaggttaccaaaccaaacctcatcctcaagttggaggtagaagaatgcccggcagaaggaaaaatcccattttggaactttccagaagtctgtcaagttgatgaacagattgagaggcaacatcaggatgaccaagataaatgtctgctgatgcaagttggattttctgacaagaaaacaattatcaccaagagtgctcgtgactgtcatgagtttggaaacatacttcatctgagtacaaaccttgttgcttcaatacaaagacccgataaacacgaatcatttggaaataatatggtagataatttagacttatttagtagaagttctgcagaaaataaatatgataatggatgtgcaaaattgttcttccatactgagtatgagaaaacaaatcctggaatgaagccctatggctataaagagtgtgggaaaggtcttaggcgaaagaaaggccttagtctacatcagagaattaaaaatggagagaaaccctttgaatgtactgcatgtaggaaaaccttcagcaagaagtcacacctcattgtacattggagaactcatacgggagagaaaccttttggatgtaccgaatgtggaaaagcttttagccaaaaatctcagctcattatacacttgcgaactcatacaggagagagaccctttgagtgtcctgaatgtggaaaagccttcagagaaaagtcaactgtcatcatacattacaggactcacacaggagaaaaaccttatgaatgtaatgaatgtggaaaagccttcactcagaagtccaacctcattgtccatcagaaaacccacactggagagaaaacctatgaatgcactaaatgtggagaatctttcatacagaagcttgatctaattatacatcatagtacccatacaggaaagaaaccccatgaatgtaatgagtgtaagaaaactttcagtgataagtcaactctcattatacaccagagaactcatacgggagagaaacctcataaatgtactgaatgtgggaagtctttcaatgagaagtcaaccctcattgtgcatcaaagaactcatacaggagagaaaccctatgaatgtgatgtgtgtggaaaaaccttcacgcaaaagtcaaaccttggtgtacatcagagaactcattcaggagagaaaccctttgaatgtaatgaatgtgagaaagccttctctcagaagtcctacctcatgctgcatcagagaggtcatacaggagagaaaccttacgagtgcaatgaatgtgaaaaagcattttcacagaaatcatatctcattatacatcaaagaactcatacagaagaaaaaccctataaatgtaatgaatgtggcaaagccttcagagaaaagtcaaagctcattatacatcagagaattcatacaggagagaaaccttatgaatgtcctgtgtgttggaaagcttttagccagaagtcacagctcataatacatcagagaacgcacacgggagagaaaccctatgcatgcactgagtgtggcaaagccttccgagaaaagtcaacattcactgtacatcaaagaactcatactggagagaaaccctataaatgtacagaatgtgggaaagcctttacccaaaaatcaaaccttattgtacatcagcgaacccatgcaggaaagaaagcccatggaagaggccacactcggaagtcaaagttcatggcacattagagagctaatcagcagtatctattatggacactgaaagaaagttgtgtcaattttactcacattttaaaagtatattttgacttgtggtttaaatatgggagtaaattcagcctttcttcttttcatctcagtcataacccaaaagctacgggagaaaaagcagaagtgtaatctctgtatctgacaaaattaggagacagctgcaaccctaatgagagggctgccacaggcagaggaaatgaagcactggtgcaggagatttcagagtgagagtgctcaaggctgcaggtgcaagacagcactggtaaggactcttagctgaggttcgggatataccccgaggcgcggaaccatagatataacagtggtaacagtgcgtgggcaggtaggaggtaggatgtttcctagaccatttggggtctgaggagaaacaggctggggcctcgagaaggagtcactcagacaagccatatttttagaaagtagtctactgatgggagcaacagttatggcatgctgggggaagagaagggacttttccttgtgaagagccctacagctgcccctatttactgacttgggagaagtaaagtcagaaagaacgaacagctgtggggggaaaaaattctcagttgtcaaaaaaaaaaaaaactgatctgcttagaatgtggccctggtttcttttcccacatgaacctccagcaaatagcaagtccaggaaaaactcttctcattcaaagaggaattattcaaaagtaatcaaaaccacaaatgcatttggtttttgggccagcaattccacttctaggaatgtacatactcacacatgtacaaaatgatgaacatacagtattcattaatgcagcgtttgtgaaaacaaaagattggaagctgtttaaatgacaccatatcagggttctggttccctaaattgtggtatattcatacagcctactcctgggtagacaacaatgaataaataaggagaacttggaaaccatttatgtagtgatgtgggataaccttcagtttatgttattaggtaggaaaaataaggttgaggacagtgactgccatttgtatataaaaaggagaaaaatggtaagtacataattgtgaattcataagttatctctggaaagagacatgagaacctggtaaccctgattaccttgggaggggaaggggcagtggtggctggggggatggaattgagagggagacaactgtatcctttcatagcttttgaaaatgtgggtgtactatgtactatgtggatgtactaccttttcaaaaataaaacatttaaaaagcta

SEQ ID NO: 22484 - protein, 319 aa, Artificial Sequence
  derived and/or modified sequence
MAICPELAQTDKSALANLSDETETLKNSTDEVQTSSSFSSSGGRQSSPLTSGSKLEREKQTPSLEQGDTQSELLDYKNYEKKLSKKWINYLKLKDSNFERHQPDTKLPTEITRVSDEELNALQSYCTMKINLIHRRGDSKKKTSSRHKKLHLGLDVEASERDAFSCTVPDELLNRIYFKNMRTTPKQEAAAKQHISYQCPYCNRKRAELALSAFLKQKKTLLESFLLQERIDEHLHTKDFLTRIGEAHQDFPRLSDDPRIIWKRLTEKSHIRYSGFERSETEQKLQRDGNSACHLPFSLPFLKRLTLIKPELVIVNDNV

SEQ ID NO: 22485 - DNA, 960 bp, Artificial Sequence
  derived and/or modified sequence
atggccatctgccccgagctggcccagaccgacaagagcgccctggccaacctgagcgacgagaccgagaccctgaagaacagcaccgacgaggtgcagaccagcagcagcttcagcagcagcggcggcagacagagcagccccctgaccagcggcagcaagctggagagagagaagcagacccccagcctggagcagggcgacacccagagcgagctgctggactacaagaactacgagaagaagctgagcaagaagtggatcaactacctgaagctgaaggacagcaacttcgagagacaccagcccgacaccaagctgcccaccgagatcaccagagtgagcgacgaggagctgaacgccctgcagagctactgcaccatgaagatcaacctgatccacagaagaggcgacagcaagaagaagaccagcagcagacacaagaagctgcacctgggcctggacgtggaggccagcgagagagacgccttcagctgcaccgtgcccgacgagctgctgaacagaatctacttcaagaacatgagaaccacccccaagcaggaggccgccgccaagcagcacatcagctaccagtgcccctactgcaacagaaagagagccgagctggccctgagcgccttcctgaagcagaagaagaccctgctggagagcttcctgctgcaggagagaatcgacgagcacctgcacaccaaggacttcctgaccagaatcggcgaggcccaccaggacttccccagactgagcgacgaccccagaatcatctggaagagactgaccgagaagagccacatcagatacagcggcttcgagagaagcgagaccgagcagaagctgcagagagacggcaacagcgcctgccacctgcccttcagcctgcccttcctgaagagactgaccctgatcaagcccgagctggtgatcgtgaacgacaacgtgtag

SEQ ID NO: 22486 - DNA, 1445 bp, Artificial Sequence
  derived and/or modified sequence
aagacagctgggaaggcgtctcccggaagacgacctccgcagagctgatggcattgagatccattcccggaggggtcagctcctgacgggttcctgagccagtcttaacctgggcaaaggagatgaggagccgagcctgatgcattgtgatggccatctgcccagaattggcccaaacggacaaaagtgctcttgcaaacctttctgatgagactgagactttgaagaactctactgatgaggtacagacttccagctcattcagctcctctggaggacggcagtcctcgcccctgacctctgggagcaaactggagagggaaaagcagactccaagcttggaacaaggagacacacaatctgagcttttggactataaaaattatgaaaagaagttgagtaaaaaatggatcaactacctcaagctcaaagactctaactttgaacggcaccaaccagacaccaaacttccaacagaaatcactcgggtatcagatgaagaattgaatgccctgcagtcttattgcaccatgaagataaatttgattcatcgtagaggggattctaagaagaagacgagcagcagacataaaaagctgcatcttggattggatgtagaggcttcagagagagatgcctttagttgtactgtacccgatgaacttttgaacagaatctactttaaaaacatgaggacaacgccaaaacaggaggcagcagctaagcaacacatatcttatcagtgtccctattgtaacaggaaaagagcggagctggccctgtctgcctttctgaaacaaaagaagactttactggagtcatttctactccaagagagaatagatgaacatcttcataccaaagactttctcacccgtattggagaagcacatcaagactttcccaggctttcagatgaccccagaataatctggaaaagactgactgagaaaagtcatatcagatactctggttttgaaagatcagagacagagcagaagttgcagcgagatggaaatagtgcttgtcatttaccattttctctgccatttctcaagcgacttactctaatcaaaccagagctggtgattgttaatgataatgtgtaatgtggatagatgtctttgttgtgtatttgagtaattaccataatttctacaggcacttgggaaactaacttaagactttactatgcttccttcacagatttgaggactaagaactttcactttttttttcctattatagaaggcactgttgtagttggaatagttataaaaacttttacaaaattccaagagaactatgttggtagtttgggccaggatgttgatggtacagaagcaaagtagtatggggatgtaagagaaacttaaaaagtaataactgtctttggcgatcaaatggctatggggaattaataaatagtagatgtttgaaatgtt

SEQ ID NO: 22487 - DNA, 960 bp, Artificial Sequence
  derived and/or modified sequence
atggccatctgtccagaactagcccaaacggacaagagcgccctagcgaacctgagcgatgagactgagaccctaaaaaattctacagacgaagtccagaccagctcctcgttttcctccagcggaggacggcagtcatcaccactcacttctgggagcaagctcgaaagagaaaagcagacaccctccttggaacagggtgacacccagagcgaattgcttgattataaaaactacgagaagaaactgagcaagaagtggattaattacctcaagcttaaagactctaactttgagcgccaccagcccgacactaagcttccaactgagattacgcgcgtgagcgacgaggagcttaatgctctgcaatcatactgtaccatgaaaattaacctcattcaccggcggggtgattccaagaaaaagacgagtagtcgacacaagaaactccatttgggcctggatgtggaagcatctgaacgggacgcattcagctgcactgttcctgacgagttgttgaacaggatctacttcaaaaacatgagaacgacccccaagcaggaagcagccgccaaacagcatatctcataccagtgcccatactgtaaccgcaagagggctgagctggcgttgtccgcattcctcaaacaaaaaaagacactgctagagagtttcctgctccaggaacgcatcgacgagcacctccacactaaagattttctgaccaggatcggggaagcccatcaggacttccctcgactatcagacgacccccggataatctggaaacggctgacagaaaagtcacacatcaggtattccggttttgagcggagcgagaccgagcagaagttgcagcgggacggcaattcagcctgtcacctacctttctccctgccttttctgaagcgtttaaccctaattaagccagagttggtcatcgtaaacgacaacgtgtag

SEQ ID NO: 22488 - DNA, 960 bp, Artificial Sequence
  derived and/or modified sequence
atggccatctgcccagagctggcccagacagacaagagcgccctggccaacctgagtgatgaaacagagaccctgaagaacagcacagatgaggtgcagaccagcagcagcttcagcagcagcggcggccggcagagcagccccctgaccagcggcagcaagctggagcgggagaagcagacccccagcctggagcagggcgacacccagagcgagctgctggactacaagaactatgagaagaagctgagcaagaagtggatcaactacctgaagctgaaggacagcaactttgagcggcaccagcctgacaccaagctgcccacagagatcaccagggtgtctgatgaggagctgaatgccctgcagagctactgcaccatgaagatcaacctgatccacagaagaggagacagcaagaagaagaccagcagccgccacaagaagctgcacctgggcctggatgtggaggccagcgagagagatgccttcagctgcaccgtgcctgatgagctgctgaaccgcatctacttcaagaacatgaggaccacccccaagcaggaggccgccgccaagcagcacatctcctaccagtgcccctactgcaacaggaagagagctgagctggccctgagcgccttcctgaagcagaagaagaccctgctggagagcttcctgctgcaggagagaattgatgagcacctgcacaccaaggacttcctgacccgcatcggggaggcccaccaggacttcccccggctgagtgatgacccccgcatcatctggaagaggctgacagagaagagccacatccgctacagcggctttgagaggagtgaaacagagcagaagctgcagagagatggcaacagcgcctgccacctgcccttcagcctgcccttcctgaagaggctgaccctcatcaagccagagctggtgattgtgaatgacaacgtgtag

SEQ ID NO: 22489 - DNA, 960 bp, Artificial Sequence
  derived and/or modified sequence
atggccatctgccccgagctggcccagaccgacaagagcgccctggcaaatctctcggatgaaactgaaacactaaagaacagtacagatgaagtgcagacctcctcttcattctcctcatctggaggcagacagagcagcccgttgacttcggggagcaaattggaacgggagaaacagaccccatcacttgagcagggggacactcagtctgagcttctcgactacaagaattatgagaaaaagctgtccaaaaagtggataaactatctgaaactgaaagattctaacttcgagcggcaccagcccgacaccaaactgcctaccgaaatcacacgcgtctcagacgaagagctgaacgctctccagagctactgcaccatgaaaattaatcttatccaccgacgcggtgactccaagaaaaaaacatcttcccgccacaagaaactacatctgggactcgatgtggaagcatcagaaagggacgcatttagctgtaccgtacccgacgagctgctcaataggatctactttaagaacatgagaacaacccctaaacaggaagcagcggctaagcaacatatctcctaccagtgtccttactgtaatcgaaagcgcgccgagttggccctgagcgccttccttaaacaaaaaaagacactgcttgagtcgtttcttttgcaggaaaggatagacgagcatctgcatacaaaggattttctaacacggatcggcgaggctcaccaggactttcctcggctaagtgatgatcctaggatcatctggaaacggctgacagaaaagtcccatatacgatatagtggcttcgaaagaagcgaaaccgaacagaagttgcagcgcgacggtaatagcgcctgccacctgcccttttcgctgcctttcctaaaaaggctgacgctcatcaagccagagctggtcattgtcaatgataatgtgtag

SEQ ID NO: 22490 - DNA, 960 bp, Artificial Sequence
  derived and/or modified sequence
atggctatttgcccagagctggcacaaacagataagagtgcattggcgaacctctctgacgaaaccgaaactttgaagaacagcacagatgaagtgcaaacttcaagtagcttttcatcttcaggaggccgacagagcagccctctcaccagcggatcaaagctggaacgagagaagcagacaccctccctcgaacagggagacacccagagcgagctccttgactataaaaactacgagaagaagttatctaaaaagtggattaactatctcaaattaaaagacagcaattttgagaggcaccagccagacacaaagctgcctaccgaaatcacaagggtgagcgacgaggagctcaacgcgctccagagctattgcaccatgaagatcaacctcattcacagacgcggtgactccaaaaagaaaaccagctcaagacataagaaacttcatttgggactggatgtggaagcgagcgaacgggatgcctttagctgcacagtgccagacgagctgttgaaccgcatctactttaaaaacatgaggactacgccaaaacaggaagccgctgccaagcagcatatctcttaccaatgtccttattgcaacaggaagcgcgctgagctcgcactgagcgcctttcttaagcagaagaaaacactgcttgagtcatttttgttgcaagaaaggatcgatgaacacctgcacactaaagactttctcactcgtatcggggaagctcatcaagatttccctaggctgtccgacgaccctcgcatcatctggaaacgactgaccgagaagagccacatccgttacagcggttttgaacgctctgagacggagcagaagctccaacgggacggaaattccgcctgccatctgccgttcagcctgcccttcctaaagaggttaacactcattaaacccgagttagtgatcgtgaatgataatgtgtag

SEQ ID NO: 22491 - protein, 755 aa, Artificial Sequence
  derived and/or modified sequence
MTESASSTSGQEFDVFSVMDWKDGVGTLPGSDLKFRVNEFGALEVITDENEMENVKKATATTTWMVPTAQEVFSEKTGMPFRLKDPVKVEGLQFCENCCQYGNVDECLSGGNYCSQNCARHIKDKDQKEERDVEEDNEEEDPKCSRKKKPKLSLKADTKEDGEERDDEMENKQDVRILRGSQRARRKRRGDSAVLKQGLPPKGKKAWCWASYLEEEKAVAVPAKLFKEHQSFPYNKNGFKVGMKLEGVDPEHQSVYCVLTVAEVCGYRIKLHFDGYSDCYDFWVNADALDIHPVGWCEKTGHKLHPPKGYKEEEFNWQTYLKTCKAQAAPKSLFENQNITVIPSGFRVGMKLEAVDKKNPSFICVATVTDMVDNRFLVHFDNWDESYDYWCEASSPHIHPVGWCKEHRRTLITPPGYPNVKHFSWDKYLEETNSLPAPARAFKVKPPHGFQKKMKLEVVDKRNPMFIRVATVADTDDHRVKVHFDGWNNCYDYWIDADSPDIHPVGWCSKTGHPLQPPLSPLELMEASEHGGCSTPGCKGIGHFKRARHLGPHSAANCPYSEINLNKDRIFPDRLSGEMPPASPSFPRNKRTDANESSSSPEIRDQHADDVKEDFEERTESEMRTSHEARGAREEPTVQQAQRRSAVFLSFKSPIPCLPLRWEQQSKLLPTVAGIPASKVSKWSTDEVSEFIQSLPGCEEHGKVFKDEQIDGEAFLLMTQTDIVKIMSIKLGPALKIFNSILMFKAAEKNSHNEL

SEQ ID NO: 22492 - DNA, 4148 bp, Artificial Sequence
  derived and/or modified sequence
cacagcccgcagcgcgaccgtgagagaaagtttaaaagcgggcgtgttcctcccgggtccccgcggagggctgggggcgtcggtctgtccgtcgcgctcagagggaggtgggggtaactagccgctttccagggcgcggggaccgcggctctaccccacccttccacgggagacggaggttaaaaaataaatcatgactgaatctgcctctagcacaagtggtcaagagtttgatgtgttcagtgttatggactggaaagatggagtgggcacgttaccaggaagtgacttaaagtttcgggtaaatgagtttggagccctggaagttattacagatgagaatgagatggaaaatgttaaaaaagcaactgctaccaccacttggatggtaccaactgctcaagaagtcttttcagagaagactgggatgcctttcaggttgaaggatccagtgaaagtagaagggcttcagttctgtgagaactgttgtcagtatggcaacgtagatgagtgtctttctggaggaaactattgcagccagaattgtgctcggcacatcaaagataaagatcagaaggaagaaagggacgtagaagaagacaatgaggaagaagatcctaagtgtagtcggaagaaaaaaccaaaattatctctgaaagctgacaccaaggaggatggagaagagagagatgatgaaatggagaacaaacaagatgtaagaatcctgaggggttcgcagagagcacggaggaaaagacgaggggattcggctgtactaaagcagggtttgcctcctaaaggaaagaaagcgtggtgctgggcatcctacctggaagaggagaaagcggtggcagtgccggcgaagctgttcaaggagcatcaatcctttccatataacaaaaatggattcaaagttggcatgaaattagaaggcgtggatcctgagcatcagtctgtgtactgtgtcctcaccgtcgcggaggtttgtggataccggataaagcttcactttgatgggtattctgattgctatgacttctgggtgaatgcagacgctctggatatccacccagttgggtggtgtgagaaaaccggccacaaactccatcctccaaaagggtataaagaagaagaattcaattggcagacctatcttaagacatgtaaagctcaagctgctcctaagtcattatttgaaaatcagaatataacagtgatcccatcgggctttcgagttggtatgaagcttgaggcagtagacaaaaagaatccctcattcatctgtgttgctacggtaacagatatggtggacaatcgtttcctggtacattttgacaactgggatgagagctatgactattggtgtgaagcatcaagtccacatattcatccagttggttggtgtaaggaacatagaagaacccttattactccaccaggttatccaaatgtgaaacatttttcttgggataaatacttagaagaaaccaattctttacctgctcctgcaagagctttcaaagtgaaacctcctcatggattccagaaaaaaatgaagcttgaggttgtagacaaaaggaaccctatgtttattagagtagcaactgtggcagacacagatgatcaccgggtaaaagttcactttgatggctggaacaattgctatgattactggatagatgcagattctcctgatattcaccctgtaggctggtgttcaaaaacaggacatccccttcagcctcctttgagccccttagaattaatggaagcttcagaacatggtggatgctcaaccccgggatgtaaagggattggccatttcaagagagcgagacatctgggccctcacagtgctgccaactgtccctattcagaaatcaatttgaataaagaccgtatttttccagaccgcttaagtggtgagatgcctccggctagtccgtcatttccaagaaataaaaggacagatgcaaatgaaagctcttcttcccctgaaatcagagaccagcatgctgatgatgtcaaagaagactttgaagagagaacagaaagtgaaatgagaacatcacatgaagccagaggtgcccgggaagaacccaccgtccagcaggcacagcgtcggtcagctgtctttctgtcctttaagtccccaattccatgtctgcccttgcgctgggagcagcaaagcaaacttcttccaactgtcgcaggaatccctgccagtaaagtttccaaatggagcacagacgaggtgtcagaatttatacagagcttacctgggtgtgaagaacatggaaaggtatttaaagatgaacaaattgatggagaagcatttctacttatgactcaaacagacattgttaaaattatgagcattaaactgggccctgctctcaaaattttcaattccatcctgatgttcaaagctgcagagaagaattctcacaatgaactttgaagatggtgaattctgaataccatcagcattctgctttaaagctcatgttttattcaaagcacaaggacggttataactcctaagtgagaagtctccaaaactcaaaagagcaacactatcggattatttatattactcaagagacaatatatatgaattcttatgaaagtgcttgagcttttaaccaggtactgtctaacaacagtcatcttttggttctgttcactgagctaaatttatctttgtaaatctttttgagtctggggggtggggggaaggggggcttcattaattatttatggtaatggggggcagagtaagaacttttggcattttgtaaacattgttgaattctctttcatgtacactgtttctttttcaatactttcagaaacctttttatataatcaaatttcaatttaaaccaaattagtcgaaacctggctaagtttagccagtaggactgttatctgtattgttaattttgtgccatattttgaattgcaacattatgctaagtataactttgcaagtcatgatattgcctaactgcttgtcataattgtcagggctgaatagttgtaagaatgacttttctttgaatcagtatttttccttttgcacgcattatgaaatgttaaacaaattacttttcaccagcatctttactataattaccaaaaacatgtatataaaagaatgaaattgaaaaataaaatatataaacataaataaattaggtagtgtattttgagtggcatcagtctcactcatcttggtgccccggtgtttacaagagccagatggtgtcagaggagtacgcagttgtatgcagttatggttggggggaatgtttgtgagggtcttgaactatttatgagatgatcttgagcttctaattttcattgatgaaattgtggtggtttacagagactaagagctcattctgtcaacagaaacactaatctgtacagagcgctgtctcaggtcatgcattgtcctccaaacccaaaggtttttttcagggttggctagagagcgagtattgtgattttgctgaaaagacaaggtgtgaaggagcaacttcagttgacacaaaatttgaaatgctcacagatcagggaggtgatttcccaaagtaattgcccaagaacctccgttttggaaggattcctttttctgtagaatactttgcctcgatatataagcatacagatgcactttaaatgaaaacccttgattataaattgatagctggtagtgtttcttttgcaagaatgcatttctaaggcaaaaggtaaattattttgtccgtcttttgatgtactttctgattccaggattggatatttattcaaggactattttaaaaatagaaagtaagtttgtagcatgctgtctgaattctggggtaagttccacctcttctttagttgctttcgttttttatgatgtaggacttcctttgatatccctgttggaagtccattagcagtcctttgcatttgccaattcaaggtaaaacagggtcagtgacatctgcagtgtcccagtcatttatttgcatgaatctgcttaaataagttttttgttgctgttttttcttttttatgttttgttcagaatttgtacattcaagttgtacttgttatatctgacatgaatgaaataaaatcttaattacaga

SEQ ID NO: 22493 - DNA, 3243 bp, Artificial Sequence
  derived and/or modified sequence
gtttaaaagcgggcgtgttcctcccgggtccccgcggagggctgggggcgtcggtctgtccgtcgcgctcagagggaggtgggggtaactagccgctttccagggcgcggggaccgcggctctaccccacccttccacgggagacggagaacccttaggagaaatcttgagagtggacagcaattgtgaagatcgccagagagttctgtgtttcatcaccgccgaaaggttaaaaaataaatcatgactgaatctgcctctagcacaagtggtcaagagtttgatgtgttcagtgttatggactggaaagatggagtgggcacgttaccaggaagtgacttaaagtttcgggtaaatgagtttggagccctggaagttattacagatgagaatgagatggaaaatgttaaaaaagcaactgctaccaccacttggatggtaccaactgctcaagaagtcttttcagagaagactgggatgcctttcaggttgaaggatccagtgaaagtagaagggcttcagttctgtgagaactgttgtcagtatggcaacgtagatgagtgtctttctggaggaaactattgcagccagaattgtgctcggcacatcaaagataaagatcagaaggaagaaagggacgtagaagaagacaatgaggaagaagatcctaagtgtagtcggaagaaaaaaccaaaattatctctgaaagctgacaccaaggaggatggagaagagagagatgatgaaatggagaacaaacaagatgtaagaatcctgaggggttcgcagagagcacggaggaaaagacgaggggattcggctgtactaaagcagggtttgcctcctaaaggaaagaaagcgtggtgctgggcatcctacctggaagaggagaaagcggtggcagtgccggcgaagctgttcaaggagcatcaatcctttccatataacaaaaatggattcaaagttggcatgaaattagaaggcgtggatcctgagcatcagtctgtgtactgtgtcctcaccgtcgcggaggtttgtggataccggataaagcttcactttgatgggtattctgattgctatgacttctgggtgaatgcagacgctctggatatccacccagttgggtggtgtgagaaaaccggccacaaactccatcctccaaaagggtataaagaagaagaattcaattggcagacctatcttaagacatgtaaagctcaagctgctcctaagtcattatttgaaaatcagaatataacagtgatcccatcgggctttcgagttggtatgaagcttgaggcagtagacaaaaagaatccctcattcatctgtgttgctacggtaacagatatggtggacaatcgtttcctggtacattttgacaactgggatgagagctatgactattggtgtgaagcatcaagtccacatattcatccagttggttggtgtaaggaacatagaagaacccttattactccaccaggttatccaaatgtgaaacatttttcttgggataaatacttagaagaaaccaattctttacctgctcctgcaagagctttcaaagtgaaacctcctcatggattccagaaaaaaatgaagcttgaggttgtagacaaaaggaaccctatgtttattagagtagcaactgtggcagacacagatgatcaccgggtaaaagttcactttgatggctggaacaattgctatgattactggatagatgcagattctcctgatattcaccctgtaggctggtgttcaaaaacaggacatccccttcagcctcctttgagccccttagaattaatggaagcttcagaacatggtggatgctcaaccccgggatgtaaagggattggccatttcaagagagcgagacatctgggccctcacagtgctgccaactgtccctattcagaaatcaatttgaataaagaccgtatttttccagaccgcttaagtggtgagatgcctccggctagtccgtcatttccaagaaataaaaggacagatgcaaatgaaagctcttcttcccctgaaatcagagaccagcatgctgatgatgtcaaagaagactttgaagagagaacagaaagtgaaatgagaacatcacatgaagccagaggtgcccgggaagaacccaccgtccagcaggcacagcgtcggtcagctgtctttctgtcctttaagtccccaattccatgtctgcccttgcgctgggagcagcaaagcaaacttcttccaactgtcgcaggaatccctgccagtaaagtttccaaatggagcacagacgaggtgtcagaatttatacagagcttacctgggtgtgaagaacatggaaaggtatttaaagatgaacaaattgatggagaagcatttctacttatgactcaaacagacattgttaaaattatgagcattaaactgggccctgctctcaaaattttcaattccatcctgatgttcaaagctgcagagaagaattctcacaatgaactttgaagatggtgaattctgaataccatcagcattctgctttaaagctcatgttttattcaaagcacaaggacggttataactcctaagtgagaagtctccaaaactcaaaagagcaacactatcggattatttatattactcaagagacaatatatatgaattcttatgaaagtgcttgagcttttaaccaggtactgtctaacaacagtcatcttttggttctgttcactgagctaaatttatctttgtaaatctttttgagtctggggggtggggggaaggggggcttcattaattatttatggtaatggggggcagagtaagaacttttggcattttgtaaacattgttgaattctctttcatgtacactgtttctttttcaatactttcagaaacctttttatataatcaaatttcaatttaaaccaaattagtcgaaacctggctaagtttagccagtaggactgttatctgtattgttaattttgtgccatattttgaattgcaacattatgctaagtataactttgcaagtcatgatattgcctaactgcttgtcataattgtcagggctgaatagttgtaagaatgacttttctttgaatcagtatttttccttttgcacgcattatgaaatgttaaacaaattacttttcaccagcatctttactataattaccaaaaacatgtatataaaagaatgaaattgaaaaataaaatatataaacataaa

SEQ ID NO: 22494 - DNA, 3165 bp, Artificial Sequence
  derived and/or modified sequence
gcattgcgcccgcagccctggaccatttgtcaggactactcgtgagacggagaaaaaaaaaagagaaaatttggggaacccttaggagaaatcttgagagtggacagcaattgtgaagatcgccagagagttctgtgtttcatcaccgccgaaaggttaaaaaataaatcatgactgaatctgcctctagcacaagtggtcaagagtttgatgtgttcagtgttatggactggaaagatggagtgggcacgttaccaggaagtgacttaaagtttcgggtaaatgagtttggagccctggaagttattacagatgagaatgagatggaaaatgttaaaaaagcaactgctaccaccacttggatggtaccaactgctcaagaagtcttttcagagaagactgggatgcctttcaggttgaaggatccagtgaaagtagaagggcttcagttctgtgagaactgttgtcagtatggcaacgtagatgagtgtctttctggaggaaactattgcagccagaattgtgctcggcacatcaaagataaagatcagaaggaagaaagggacgtagaagaagacaatgaggaagaagatcctaagtgtagtcggaagaaaaaaccaaaattatctctgaaagctgacaccaaggaggatggagaagagagagatgatgaaatggagaacaaacaagatgtaagaatcctgaggggttcgcagagagcacggaggaaaagacgaggggattcggctgtactaaagcagggtttgcctcctaaaggaaagaaagcgtggtgctgggcatcctacctggaagaggagaaagcggtggcagtgccggcgaagctgttcaaggagcatcaatcctttccatataacaaaaatggattcaaagttggcatgaaattagaaggcgtggatcctgagcatcagtctgtgtactgtgtcctcaccgtcgcggaggtttgtggataccggataaagcttcactttgatgggtattctgattgctatgacttctgggtgaatgcagacgctctggatatccacccagttgggtggtgtgagaaaaccggccacaaactccatcctccaaaagggtataaagaagaagaattcaattggcagacctatcttaagacatgtaaagctcaagctgctcctaagtcattatttgaaaatcagaatataacagtgatcccatcgggctttcgagttggtatgaagcttgaggcagtagacaaaaagaatccctcattcatctgtgttgctacggtaacagatatggtggacaatcgtttcctggtacattttgacaactgggatgagagctatgactattggtgtgaagcatcaagtccacatattcatccagttggttggtgtaaggaacatagaagaacccttattactccaccaggttatccaaatgtgaaacatttttcttgggataaatacttagaagaaaccaattctttacctgctcctgcaagagctttcaaagtgaaacctcctcatggattccagaaaaaaatgaagcttgaggttgtagacaaaaggaaccctatgtttattagagtagcaactgtggcagacacagatgatcaccgggtaaaagttcactttgatggctggaacaattgctatgattactggatagatgcagattctcctgatattcaccctgtaggctggtgttcaaaaacaggacatccccttcagcctcctttgagccccttagaattaatggaagcttcagaacatggtggatgctcaaccccgggatgtaaagggattggccatttcaagagagcgagacatctgggccctcacagtgctgccaactgtccctattcagaaatcaatttgaataaagaccgtatttttccagaccgcttaagtggtgagatgcctccggctagtccgtcatttccaagaaataaaaggacagatgcaaatgaaagctcttcttcccctgaaatcagagaccagcatgctgatgatgtcaaagaagactttgaagagagaacagaaagtgaaatgagaacatcacatgaagccagaggtgcccgggaagaacccaccgtccagcaggcacagcgtcggtcagctgtctttctgtcctttaagtccccaattccatgtctgcccttgcgctgggagcagcaaagcaaacttcttccaactgtcgcaggaatccctgccagtaaagtttccaaatggagcacagacgaggtgtcagaatttatacagagcttacctgggtgtgaagaacatggaaaggtatttaaagatgaacaaattgatggagaagcatttctacttatgactcaaacagacattgttaaaattatgagcattaaactgggccctgctctcaaaattttcaattccatcctgatgttcaaagctgcagagaagaattctcacaatgaactttgaagatggtgaattctgaataccatcagcattctgctttaaagctcatgttttattcaaagcacaaggacggttataactcctaagtgagaagtctccaaaactcaaaagagcaacactatcggattatttatattactcaagagacaatatatatgaattcttatgaaagtgcttgagcttttaaccaggtactgtctaacaacagtcatcttttggttctgttcactgagctaaatttatctttgtaaatctttttgagtctggggggtggggggaaggggggcttcattaattatttatggtaatggggggcagagtaagaacttttggcattttgtaaacattgttgaattctctttcatgtacactgtttctttttcaatactttcagaaacctttttatataatcaaatttcaatttaaaccaaattagtcgaaacctggctaagtttagccagtaggactgttatctgtattgttaattttgtgccatattttgaattgcaacattatgctaagtataactttgcaagtcatgatattgcctaactgcttgtcataattgtcagggctgaatagttgtaagaatgacttttctttgaatcagtatttttccttttgcacgcattatgaaatgttaaacaaattacttttcaccagcatctttactataattaccaaaaacatgtatataaaagaatgaaattgaaaaataaaatatataaac

SEQ ID NO: 22495 - DNA, 2268 bp, Artificial Sequence
  derived and/or modified sequence
atgaccgagtctgcatcgagcacgtccggccaagaattcgacgtgttttccgtgatggattggaaagacggcgtgggcacattgcccgggtctgatctgaagttccgagtcaacgagtttggcgcgcttgaagtgattactgatgaaaatgagatggaaaatgtgaaaaaagctactgctacaacaacctggatggtgcccacggcacaagaagttttttccgagaaaactggaatgccatttcgtctcaaagatcccgtcaaggtggaagggctgcaattttgcgaaaactgctgtcagtatggtaatgtggatgaatgtctctccggcggcaactactgcagccagaattgtgccaggcacatcaaggataaggaccagaaggaagagcgcgacgtagaagaggacaacgaagaagaagatcctaagtgtagtcgcaaaaaaaagccaaagctgagtctgaaggccgacacaaaggaagatggcgaggaacgtgatgatgaaatggagaataaacaggacgtgagaatcctgcggggtagccagagagcgcggcgcaagaggcggggcgattctgccgtcctgaagcagggcctccccccaaagggcaaaaaggcttggtgctgggcgagttacctggaggaggagaaggcggtagcagtgcctgccaagttattcaaggaacatcagtcttttccatacaacaagaatggctttaaagtgggcatgaaattggaaggggtggatccagagcatcagtctgtgtactgcgtgctgacagtcgccgaggtgtgtggttacaggatcaagcttcatttcgatggctactccgactgctacgatttctgggtaaacgctgacgccttggacatccaccccgtgggatggtgtgagaagaccggtcacaaactgcatcctcctaagggctataaggaggaggagtttaactggcaaacgtatttaaagacttgtaaagcacaggctgcacccaagtccctcttcgaaaaccaaaatattaccgtcattccatcgggattcagggtcgggatgaagttagaagctgttgataaaaaaaaccctagctttatatgcgttgcaacagtcactgacatggtagataatcgattcctcgttcacttcgacaactgggatgagtcttatgattattggtgcgaggcgtcttcgcctcacattcatccagtaggatggtgtaaagagcaccgacgaactttaatcaccccccccggatatcctaatgtgaaacatttcagttgggataagtatctcgaagaaacgaattcactgcccgctcctgcccgagctttcaaagtgaagcccccacacggatttcagaaaaaaatgaagcttgaggtcgtggataaacgaaaccccatgttcatcagagtggccactgtggccgataccgacgaccatagagtcaaagttcattttgacggatggaacaactgctatgattactggatcgatgccgacagccccgatattcaccctgtgggctggtgcagcaaaacaggtcaccccttgcagccaccactgtcccccctggagcttatggaggcctccgagcacggaggctgtagtacccctggctgcaaaggaataggccatttcaaacgcgctcggcacctcgggccacactccgcagctaactgtccatattcggagatcaacttgaacaaggaccggatctttcccgaccgcctgagcggggagatgccccccgcgtcaccctcattcccacggaacaaacgtaccgacgccaacgagtcatcttcgtccccagagatcagggatcaacacgccgacgatgtgaaggaggacttcgaggagcgcaccgaatccgaaatgcggacgtctcatgaggcgcgcggggccagagaggaacctaccgtacagcaggctcagcgacgtagtgccgtttttctcagctttaaatctcccatcccttgcctgccgctgagatgggagcaacaatcaaagctcctaccaaccgttgcaggcatccctgcctcaaaggtcagcaagtggagcaccgatgaggtgagcgaatttatccagtccctccctgggtgcgaagagcacggaaaagtgtttaaggacgaacagattgacggtgaggccttcctcctgatgacccaaacagacatcgtcaagatcatgtcaatcaaactgggcccggcactgaaaatttttaacagcattctcatgtttaaggccgcagagaagaattcccataacgagctttag

SEQ ID NO: 22496 - DNA, 2268 bp, Artificial Sequence
  derived and/or modified sequence
atgactgaatcagcctctagcaccagcgggcaggagttcgacgttttcagcgtaatggactggaaggatggtgttggtaccctgcctggctcagatctcaagttccgcgtgaatgaattcggggccctggaagtgattactgacgaaaatgaaatggagaatgtgaagaaggcaacagcaacaactacttggatggtgccgacggcgcaggaagtatttagtgagaaaaccggcatgccatttaggctaaaggacccagtcaaggtggaaggactgcaattttgcgaaaattgctgtcagtacggtaatgtggatgagtgcttgagcggagggaattactgttctcaaaattgcgccagacacattaaggataaagaccagaaggaggagagggacgttgaggaagataacgaggaggaggatcccaagtgttctaggaagaaaaagcccaagctcagtctcaaggctgacactaaggaggacggggaggagcgggacgatgagatggagaacaaacaggatgtacggatcttacgcggcagccagcgggcacgccggaaaaggagaggagatagtgcagttttaaagcagggcctgccccctaaaggcaaaaaagcatggtgttgggcctcctatctggaggaggaaaaggccgtcgctgtgcccgcgaaacttttcaaggagcatcagagtttcccttataataagaatggtttcaaggttggcatgaaactcgagggggtcgaccctgaacaccagtccgtctactgcgtgttgactgtcgccgaggtgtgcggataccgaatcaaactacattttgacggatacagtgactgctacgacttctgggtgaacgccgatgctctggacattcatccagtgggatggtgtgaaaagactggtcataagctgcacccgcctaagggctacaaagaggaggaattcaactggcagacctaccttaagacctgcaaagcccaggccgcccctaagtcgctttttgaaaatcagaacatcacagtaattccgagcggatttcgggttgggatgaagctggaggcagtcgacaagaagaacccatccttcatttgtgtcgcaacggttacggatatggttgataataggtttcttgtgcactttgacaattgggacgagagttatgactattggtgcgaggctagttcccctcacattcaccctgtgggctggtgcaaggagcaccgtcggacactgatcacaccaccaggctatcccaatgtcaagcatttttcttgggataagtatctcgaagagaccaactctctgccggccccggcccgcgcgtttaaagtcaaaccaccgcatgggtttcagaaaaaaatgaagctggaggtggtcgataagcgaaatccaatgttcatcagggtggcaactgttgcagacaccgatgaccatagagtcaaggttcactttgacgggtggaataactgctacgactattggattgacgcggattcacccgatatccacccagtgggttggtgtagtaaaacaggacacccactgcagcctcccttaagccctctagagctgatggaggcctctgaacacggcggatgttctacacccggatgcaaggggatcggccatttcaagcgggcacgccacctcggaccacattcagcggcgaactgcccttatagcgaaatcaacctcaacaaagacagaattttccccgaccggctgagcggtgaaatgcctcctgcatccccatcatttccgagaaacaaacggacagacgccaatgaaagcagctctagccctgaaattcgagatcagcatgcagacgacgtgaaggaggactttgaggagcggactgaatcggagatgcgcacctcacatgaagctaggggcgcccgggaggaaccgactgtccaacaggcccagcgccgatcagccgtgtttctgtctttcaagtccccaatcccgtgtctaccgctgagatgggagcagcagagcaagttgctacccactgtggccggcatccctgcttcaaaagttagtaaatggtcaacagacgaagttagtgagtttatccagagcctgcccgggtgcgaggagcatgggaaagtgtttaaggatgaacagatagacggagaagctttcctgcttatgacccagaccgatattgttaagattatgtccattaaactcggccctgctctgaagatctttaattccattctcatgttcaaggccgccgaaaagaacagccacaacgaactatag

SEQ ID NO: 22497 - DNA, 2268 bp, Artificial Sequence
  derived and/or modified sequence
atgacggagtccgcatcgtccaccagcgggcaggagtttgacgttttttcggtgatggactggaaggatggcgtcggcacgctgcctggtagcgatttgaagtttcgggtgaacgaattcggcgctctggaagttataactgatgaaaacgagatggagaatgtgaaaaaggcaaccgcgaccaccacgtggatggtgccaacggcacaggaggtgtttagtgaaaaaacaggaatgccattccgacttaaagaccccgtcaaggtagagggtttacagttttgtgagaattgctgtcaatacgggaatgtggatgagtgtttatccggcggcaactactgttctcaaaactgcgctaggcacattaaagacaaggaccagaaagaagaaagggatgtggaagaggataatgaagaggaagatcccaagtgttcccggaagaaaaagcccaaactctcgctgaaggcagacactaaggaagatggagaagaaagggatgatgaaatggagaacaagcaagacgtgagaatcctccgcggttcacaacgagccagacggaaacgcaggggggactctgctgtactaaaacaagggcttccacccaagggaaagaaggcctggtgttgggcatcctacctggaagaagagaaggcagtagctgttcctgcgaaattgttcaaagaacaccagtcctttccttataataagaacggtttcaaggtggggatgaagctcgaaggcgtggatcctgagcaccagtccgtctattgtgtgctgaccgtcgccgaggtgtgcggttacaggattaagctccatttcgacggatacagcgactgttacgacttttgggtcaatgccgatgccctggatatccacccggtgggttggtgtgaaaaaacggggcataagcttcatccccccaaggggtataaggaagaggagttcaattggcagacgtacctgaagacttgcaaggctcaggccgcaccgaaaagcctatttgagaaccaaaatattactgtgattccgagcggcttccgggtgggaatgaagttagaggcagtagataagaagaatccctcgttcatttgcgtggcaaccgtgactgacatggttgacaatagatttttagtgcacttcgataattgggacgaaagttacgactactggtgcgaagcctccagccctcacattcaccccgtggggtggtgcaaggaacacagacgcaccttaatcacgccccccggttacccgaatgttaaacatttcagctgggataagtacctcgaggaaaccaacagcctgcccgctccggccagagcctttaaagttaaacccccccacggattccagaaaaaaatgaagctggaggtcgtggacaagcgcaatcccatgttcattcgggttgccactgttgccgatactgacgatcatcgtgtcaaggtgcatttcgatggatggaacaactgttatgattactggatcgatgctgacagccccgacatccaccccgtggggtggtgctccaaaaccggccatcctctgcagccaccccttagccccctggaactgatggaagcatccgagcacggcggatgctctacccccgggtgcaagggcattggtcacttcaagcgggcccgccatctcggcccccactctgctgccaactgcccatacagcgagataaatttgaataaggaccgaatcttccccgacagactgtctggggaaatgccaccagcaagcccgtctttcccccgcaataagcgcacagacgccaacgagtctagcagtagtcctgaaattagagaccagcacgctgacgatgtgaaagaggatttcgaagaaagaacagagtcagagatgagaactagccatgaggctcggggagctagggaggagcctactgtgcagcaagcccaacgacgctcagccgttttcttgtcattcaagtcccctatcccgtgcctgcctctccggtgggagcagcagtctaagctgttaccgacagtagcgggcatacccgcctctaaagtaagtaaatggtcgaccgatgaagtaagcgagttcatccagtcccttcctggttgcgaggaacacggaaaggtgttcaaggacgagcagattgacggagaggccttcctgctgatgacgcaaaccgacatcgtgaagatcatgtctattaagcttggacccgcgcttaagatcttcaactctatcctgatgtttaaggctgcagaaaagaattctcacaatgaactctag

SEQ ID NO: 22498 - DNA, 2268 bp, Artificial Sequence
  derived and/or modified sequence
atgacagagagcgccagcagcaccagcggccaggagtttgatgtgttttctgtgatggactggaaggatggagtgggcaccctgcccggcagtgacctgaagttccgggtgaatgaatttggagccctggaggtgatcacagatgaaaatgagatggagaatgtgaagaaggccacagccaccaccacctggatggtgcccacagcccaggaggtgttcagcgagaagacaggcatgcccttccggctgaaggaccctgtgaaggtggagggcctgcagttctgtgagaactgctgccagtatggaaatgtggatgagtgcctgagcggcggcaactactgcagccagaactgtgcccggcacatcaaggacaaggaccagaaggaggagagagatgtggaggaggacaatgaggaggaggaccccaagtgcagcaggaagaagaagcccaagctgagcctgaaggctgacaccaaggaggatggagaggagagagatgatgagatggagaacaagcaggatgtgcgcatcctgcggggcagccagagggcccggaggaagagaagaggagacagcgctgtgctgaagcagggcctgccccccaagggcaagaaggcctggtgctgggccagctacctggaggaggagaaggctgtggccgtgcctgccaagctgttcaaggagcaccagagcttcccctacaacaagaatggcttcaaggtgggcatgaagctggagggcgtggaccctgagcaccagagcgtgtactgtgtgctgactgtggccgaggtgtgtggctaccgcatcaagctgcactttgatggctacagcgactgctatgacttctgggtgaatgctgatgccctggacatccaccctgtgggctggtgtgagaagacaggccacaagctgcacccccccaagggctacaaggaggaggagttcaactggcagacctacctgaagacctgcaaggcccaggccgcccccaagagcctgtttgagaaccagaacatcaccgtcatccccagcggcttccgggtgggcatgaagctggaggccgtggacaagaagaaccccagcttcatctgtgtggccaccgtgacagacatggtggacaaccgcttcctggtgcactttgacaactgggatgagagctatgactactggtgtgaggccagcagcccccacatccaccctgtgggctggtgcaaggagcacaggaggaccctcatcaccccacctggctacccaaatgtgaagcacttctcctgggacaagtacctggaggagaccaacagcctgcctgccccagcccgggccttcaaggtgaagccaccccacggcttccagaagaagatgaagctggaggtggtggacaagaggaaccccatgttcatccgggtggccaccgtggccgacacagatgaccaccgggtgaaggtgcactttgatggctggaacaactgctatgactactggattgatgctgacagcccagacatccaccctgtgggctggtgcagcaagacaggccaccccctgcagccccccctgagccccctggagctgatggaggccagcgagcacggcggctgcagcaccccaggctgcaagggcatcggccacttcaagagggcccggcacctgggcccccacagcgctgccaactgcccctacagcgagatcaacctgaacaaggaccgcatcttcccagaccggctgagcggggagatgcccccagccagccccagcttccccaggaacaagaggacagatgccaatgaaagcagcagcagccctgagatccgggaccagcacgcagatgatgtgaaggaggactttgaggagaggacagaaagtgagatgaggaccagccatgaggcccggggggcccgggaggagcccaccgtgcagcaggcccagaggagatctgctgtgttcctgtccttcaagagccccatcccctgcctgcccctgcgctgggagcagcagagcaagctgctgcccaccgtggccggcatcccagccagcaaggtgtccaagtggagcacagatgaggtgtctgagttcatccagagcctgcccggctgtgaggagcacggcaaggtgttcaaggatgagcagattgatggagaggccttcctgctgatgacccagacagacatcgtgaagatcatgagcatcaagctgggccctgccctgaagatcttcaacagcatcctgatgttcaaggctgctgagaagaacagccacaatgagctgtag

SEQ ID NO: 22499 - DNA, 2268 bp, Artificial Sequence
  derived and/or modified sequence
atgaccgagagcgccagcagcaccagcggccaggagttcgacgtgttttccgttatggactggaaagatggagtaggaaccctgccaggctcggacctgaagttccgcgtcaatgaattcggagcactcgaggtcatcactgatgaaaacgagatggaaaacgtgaagaaagcgaccgcaactacaacttggatggtgccgaccgctcaggaggttttttctgagaagacaggcatgcctttccgtctgaaggaccccgtgaaagtggaagggttacagttttgcgaaaactgttgccaatacggaaatgtggacgaatgtctgagcggcggcaattactgtagccagaattgcgcgcgccatattaaggataaggaccaaaaggaagaacgtgacgtcgaggaagacaatgaggaagaagatccgaaatgttcacgaaaaaaaaaaccaaaactaagcttgaaagctgatactaaagaagatggagaggaaagggatgatgaaatggagaacaaacaggatgtgcggattctgcggggatctcagagagcaaggcggaagaggaggggagatagcgctgtcttgaaacaaggccttcctccaaagggcaagaaggcatggtgttgggcttcctacctcgaagaggagaaagcggtggccgtgccagccaaactttttaaggaacatcagtcttttccttataataagaacggcttcaaagtaggtatgaaattggagggcgtggaccctgagcatcagagtgtgtactgtgtgcttactgtggcagaggtttgtggctatagaattaagcttcactttgatggatactccgactgctatgatttttgggtcaacgcagatgcactggatatccacccagtaggctggtgtgaaaaaactggccacaagttgcaccctcctaaaggctacaaagaggaagagttcaactggcagacatatctgaaaacatgcaaagcacaggcagccccaaaaagcctgttcgaaaatcagaacatcaccgtaattccaagtggcttccgagttggtatgaaactggaagccgttgataaaaaaaatccgagcttcatttgtgttgccacagtgaccgacatggtggataaccggtttcttgtgcattttgacaattgggatgagtcttatgattactggtgtgaagcaagtagcccacacatccacccagtgggttggtgcaaggagcatagacgtacgctcatcacaccaccagggtaccctaacgttaagcacttctcgtgggataagtacctggaagaaactaactccctccctgctcctgcacgcgcatttaaggttaagcccccccatggattccagaagaagatgaaattggaggtcgtcgataagaggaatcccatgttcattcgagtggcaaccgtcgcagatacagacgatcatagggtgaaggttcatttcgacggatggaataactgctacgattactggatcgacgcggatagcccggacattcaccctgtcggctggtgcagtaagacagggcacccattgcagccacccctctcacccctcgaactgatggaagcctccgaacatgggggatgttctacacctgggtgtaagggcataggtcacttcaagagagccagacaccttgggccacatagtgccgctaattgcccttactctgagattaatctgaataaggaccgcatctttcccgatcgtctctccggcgagatgcctcctgcgtctccctctttcccccgtaataaaaggactgatgccaacgagtcatcatcttctcccgagatccgggaccagcacgccgacgacgtgaaggaagacttcgaagaacgcactgagtccgagatgcggacaagccacgaggcccgcggtgccagggaagagccgaccgtccagcaagcacagaggagaagcgccgtgtttctctcatttaagagcccgatcccatgcctcccactgagatgggagcagcaatccaaactgctgccaactgtggcaggaatccccgctagtaaggtgtctaagtggagtactgacgaagtgagcgaatttattcaaagtctgccaggatgtgaagaacatggcaaagtctttaaagacgagcagatcgacggagaagctttcttgttaatgacccaaactgacattgtgaaaattatgtccattaaactcggtcctgccttgaaaatttttaatagtattcttatgtttaaggccgcagagaaaaactcccacaatgagctctag

SEQ ID NO: 22500 - DNA, 2268 bp, Artificial Sequence
  derived and/or modified sequence
atgaccgagagcgccagcagcaccagcggccaggagttcgacgtgttttcggtgatggactggaaagatggagtggggacattgcctggatctgacttgaagtttagggtaaatgagttcggagccctggaagtgatcacagatgagaacgagatggagaatgtcaagaaggccacagctactacaacttggatggtccccaccgctcaggaagtcttctctgagaagaccggaatgcccttcagactgaaggatccagtgaaggtggaagggttgcagttctgcgaaaactgttgtcaatatggtaatgtggacgaatgtttatccggcggcaactattgtagccagaattgtgcacgacatattaaagacaaagatcagaaagaagagagggatgttgaggaagataacgaggaggaagaccccaaatgttccagaaagaagaagccgaaactgagcctaaaggctgacaccaaagaggacggagaggaacgcgatgatgagatggaaaataaacaagacgtgaggattcttagagggtcgcagagagcaaggagaaagcggaggggtgattccgcagtactcaaacagggccttcctcccaaaggcaagaaagcctggtgctgggccagttacctggaagaagagaaagccgtagccgtacccgccaaactgttcaaagaacaccaatcctttccatacaacaagaacggtttcaaagtgggaatgaaactcgagggcgtcgaccccgaacaccagagcgtgtactgtgtgctcacagtggcagaggtctgtggctataggatcaaacttcactttgatggttatagtgattgctacgatttctgggtgaacgctgacgccttggacatccatccggtggggtggtgcgaaaaaaccggacataagctccatcctcctaagggctacaaggaagaagagtttaactggcaaacatatctcaaaacatgtaaggcccaggccgctccaaagagcctttttgagaatcagaatatcacagtgattccttcgggtttccgggtgggcatgaaattagaggcagttgataagaagaacccttccttcatttgcgtggctacagtgacggacatggtggataaccgcttcctggttcacttcgacaattgggacgagagctacgactactggtgtgaggcttcaagcccccacattcatccggtcgggtggtgtaaggagcatcggcgcacactgattactcctcctggctacccaaatgttaaacacttttcctgggacaagtacctcgaagaaactaattctctgcccgcacccgccagagcctttaaagtgaaaccgccacatgggttccagaagaaaatgaaactggaagtcgtggataaaaggaatccaatgtttatacgtgttgcaactgtggcggataccgatgaccatagagttaaggtccattttgatggatggaacaactgctacgattattggatcgatgctgatagcccggacatacatcctgtgggatggtgcagcaaaacaggccaccctctgcaaccccccctgtccccactggagttgatggaagcaagcgaacatgggggctgctccactcctgggtgcaaaggcattggccactttaagagagcaaggcacctggggccacactcagcggctaattgcccttacagcgagatcaacttaaacaaggaccgcatctttccagaccggctgagcggagagatgccccctgcctcgccctcgtttcccagaaacaagcgcacggacgccaacgagtcaagttcctcgccggagatcagagatcagcacgctgacgacgttaaggaagatttcgaggagagaacggagagtgagatgagaacatcacacgaggctagaggcgcacgggaagaacctaccgtacagcaggcacagcggcgatctgccgtgttcctgagctttaaatcgccaatcccgtgcctaccactgcgttgggaacaacagagcaaactgcttccaactgtcgctggcattcccgcatccaaagtgagtaaatggtctactgatgaggtgtcagagtttatccagagtctgcccggttgtgaggaacacggaaaagtgttcaaagatgagcagatagacggtgaggccttcttgttgatgactcagactgacattgtgaagataatgagtattaagctgggccccgcacttaagatcttcaacagcatacttatgttcaaagccgccgaaaagaactctcacaacgagttatag

SEQ ID NO: 22501 - DNA, 2268 bp, Artificial Sequence
  derived and/or modified sequence
atgaccgagagcgccagcagcaccagcggccaggagttcgacgtgttcagcgtgatggattggaaagacggtgtcggaactctaccaggcagcgacctgaagtttcgcgtgaacgagttcggagccctggaagtgataacagatgaaaatgagatggaaaacgttaaaaaagcaaccgccacaaccacatggatggttcctaccgcgcaggaagtcttcagtgaaaaaaccgggatgccatttagactcaaggaccccgtgaaggtagaagggctgcagttttgtgagaattgctgtcagtatggaaacgtggatgagtgcctgtcaggagggaattattgctcccagaactgcgctaggcatatcaaagacaaggaccagaaagaagagcgcgacgtcgaggaggataatgaggaagaagacccaaagtgtagccggaaaaaaaaaccaaagctgtctctgaaagctgatacgaaagaagatggcgaagaacgggacgatgagatggagaacaaacaggacgtgcgcatcctccgcggaagccagcgagcacggcggaagcgccgcggtgattctgcggttctgaagcaggggctgcctccaaagggtaagaaagcttggtgttgggcatcatatctagaggaagaaaaagcggttgccgttcctgcaaaactgtttaaagagcaccaaagcttcccgtacaacaaaaacgggtttaaggtgggaatgaaactcgagggagtagatcccgagcatcaatctgtctattgcgtgctgacagtcgccgaggtatgcggctaccggattaaactgcactttgacggttactccgattgctacgacttctgggtcaacgcagatgctctcgatattcaccccgtggggtggtgcgagaagactgggcacaaactgcaccccccgaagggctacaaagaagaggagtttaactggcagacctatttaaagacttgcaaggcccaggcagctcccaagtctctttttgagaaccaaaacatcactgtgataccttcgggttttcgagtgggcatgaagctggaagccgttgacaagaaaaaccccagttttatctgcgtcgcaacagtgaccgatatggttgacaatcggttcctcgtccactttgacaattgggatgagtcgtacgattactggtgcgaagccagctccccgcacattcatcccgttggttggtgtaaggagcatagaaggacactcatcacgcctccaggatatcccaacgtaaaacacttcagctgggataaatacttggaggagacaaattccctgccagccccagcacgcgccttcaaggttaagcctccccacggattccagaaaaaaatgaaactggaggtggtggacaagagaaacccgatgttcattcgcgtcgccacagttgcggatacagacgatcaccgtgttaaggtacattttgacgggtggaataattgctacgactattggatcgacgctgattcccccgatattcatccggttgggtggtgctctaagacagggcaccccctgcagccgccactctccccactggagctcatggaagccagtgagcatgggggctgctcaactcctggctgtaagggcattggtcatttcaagcgggcaagacatctgggccctcactcagcagctaactgcccctattctgaaatcaacttaaacaaggacagaattttccccgaccgcctcagcggtgagatgccaccagcatctcctagcttcccaaggaacaagcgcaccgacgcgaatgagtcctctagctctcctgaaattagggaccagcacgccgacgacgttaaggaggattttgaagaacgcacagaatccgaaatgaggacctctcacgaagcacgcggagcgcgcgaagagcctactgtgcaacaagcacagcggaggagtgccgtgtttttgtctttcaaatcaccgatcccctgcctgccccttagatgggaacagcagtccaagttattgcctacagtcgctggcataccagcctccaaagtctcaaaatggtccactgacgaggtatccgagtttatccagagtctccctggatgcgaggaacacggtaaggtctttaaggacgaacaaattgacggtgaggcgtttttgcttatgacccaaacagatattgttaagatcatgagcataaaactgggacctgctctgaaaattttcaattccattctcatgttcaaagcagccgagaagaactcccacaacgaactgtag

SEQ ID NO: 22502 - DNA, 2268 bp, Artificial Sequence
  derived and/or modified sequence
atgaccgagtctgcaagctccacctccggccaggaatttgatgtgttctctgtgatggactggaaggacggggtgggcaccttgcccggatccgatcttaagtttagagtgaatgagttcggggctctggaagtcatcacagatgaaaacgaaatggagaacgtcaaaaaagcaacggccacgaccacctggatggtgcccaccgcccaagaggtcttcagtgagaagacaggtatgcccttcagattgaaggatcccgtgaaagtcgaggggctgcagttctgtgaaaattgttgccagtacggaaatgttgacgagtgcctctcaggtgggaactattgtagccagaactgtgctcgccacatcaaggacaaggaccagaaagaagaacgggatgtggaggaagacaatgaagaagaagatcccaagtgttctcgtaaaaagaagcctaaactatctttaaaagccgatacaaaggaagatggggaagagcgagatgacgaaatggaaaacaaacaagatgttagaatcttgcgaggtagccagcgggctcgcaggaagagaaggggggactctgccgtcctcaaacaaggacttcctcccaaagggaagaaagcttggtgctgggcgtcctacttggaggaggagaaagccgtggccgtgccggctaagttatttaaggaacaccagagcttcccctacaataagaatggctttaaagtgggaatgaaactggagggggtggatcctgaacatcagagcgtgtactgcgttctgacggtggctgaggtgtgtggttacaggattaagctgcactttgatggatattcagactgttacgatttttgggtcaacgcagacgcgttagatatccaccccgttgggtggtgtgaaaaaacaggacacaaactccaccctcccaaggggtataaagaggaggagtttaactggcagacctatctaaagacttgtaaagcacaggcagcaccaaaaagcctgttcgagaatcagaatatcaccgttatccccagcggttttagagtaggtatgaagcttgaggctgtggacaagaaaaatccttcttttatatgcgtggccacagttacagacatggtggataatagatttctcgttcattttgacaactgggatgagagctatgactattggtgtgaagccagttcacctcacatccaccctgttggttggtgtaaagaacatcggcgaacacttatcacgcctccagggtatccgaatgtgaaacacttttcttgggataagtatcttgaggagactaattctctgccggctcccgctcgagcctttaaggttaagcccccacacggcttccaaaaaaaaatgaagttagaggtcgtcgacaagagaaatcccatgttcatccgcgttgccaccgtggccgacacagatgatcaccgcgtcaaagttcatttcgacggctggaacaactgttatgactattggattgatgccgacagtccggatatccacccggttggttggtgttctaagaccggtcaccctctgcagcccccactctcccctttagagttaatggaagcgtcagaacatgggggatgcagcactcctgggtgtaagggaataggtcatttcaaacgcgcaaggcacctcggcccacattcagctgcgaattgtccgtacagtgaaattaaccttaacaaagatagaatattcccggataggctgagcggtgagatgccccctgcttccccgagcttcccacgcaataagcgcaccgatgccaatgaatcctcttcctcaccggaaattagggatcagcacgccgacgatgtaaaagaggactttgaagagaggaccgaaagcgaaatgaggactagccatgaagcacggggtgcccgagaagagccaactgtgcagcaggcccagagacgctccgcagtattcctgagcttcaaatcccccattccgtgcctccccctccggtgggaacagcaatctaagttgctccccacagtggccggaattcccgcttctaaggtctccaaatggtcaacagacgaggtgtctgagttcatacagtccttgccgggttgtgaggaacacggaaaagtgtttaaggatgaacagatcgacggagaggcattcctgttgatgactcagacagacatcgtgaaaattatgtcaatcaagctcggccctgcccttaaaatttttaattccatcctgatgttcaaggcagcagagaagaatagccacaatgagctctag

SEQ ID NO: 22503 - DNA, 2268 bp, Artificial Sequence
  derived and/or modified sequence
atgaccgaatctgcctcaagtacaagcggacaggagtttgacgtgtttagcgtcatggactggaaggatggagtggggacacttccgggaagcgacctaaaatttcgcgtgaatgaattcggggctctggaggttataactgatgaaaatgaaatggaaaatgtgaagaaggcaaccgccactaccacctggatggtgccgacagctcaagaggtgttctcggagaaaaccggtatgccctttcgcctgaaggacccggtgaaagtggaggggctgcaattctgcgagaactgctgtcaatacggaaatgtggacgagtgtctctccgggggaaactattgttctcaaaactgtgccaggcacattaaagacaaagatcaaaaggaggagcgggatgtagaagaagataatgaagaggaagaccctaagtgttcccggaagaaaaagccaaagctgtcattgaaggcagacactaaggaagacggagaagaacgcgatgatgagatggaaaacaagcaggacgtgagaatccttaggggctctcaaagggccaggcgcaagcgtcgtggcgattcagccgtgctcaagcagggtctgccacctaaggggaaaaaagcgtggtgctgggctagctacttggaggaggagaaagctgtagctgttcctgccaaactgtttaaagagcaccagtctttcccctataacaagaatggcttcaaagtcgggatgaagctggagggcgtggaccctgagcatcagtcagtgtattgcgttctcactgtcgctgaggtgtgtgggtatcgaatcaagctacacttcgacggctacagtgactgctacgatttttgggtgaacgcagacgccttggatatacaccctgttggctggtgtgagaaaaccggacataaactccatccaccaaaggggtataaagaagaagaattcaactggcagacctacttaaagacctgcaaagcccaggcagcacccaagagtctgtttgagaatcagaacattaccgttataccctcaggctttcgcgtgggtatgaaactggaggcagtggacaaaaaaaatccctcctttatttgtgttgcaaccgtcaccgacatggtagataatagattcctggtgcattttgacaactgggatgaaagctacgactactggtgcgaggctagttctcctcacatccaccctgtgggatggtgcaaagaacaccgtcggactttaatcacacccccagggtaccctaacgtcaagcacttctcgtgggacaagtatctcgaggagactaattcactgcctgcgccagccagggccttcaaggtgaaaccccctcacgggttccagaagaagatgaagctcgaggtcgtcgataagaggaaccctatgttcataagggtagcaaccgtggccgacacagatgatcatcgcgtcaaagtgcatttcgacggctggaacaattgttatgattattggatcgatgccgactcccctgatatccacccagttggatggtgcagtaagactggccatcccctgcagccaccactttccccattggagcttatggaggcatctgaacatgggggttgttcgacgccaggttgcaaaggtattgggcacttcaaaagggctcggcacctaggaccgcacagtgcagccaactgcccttattcagaaattaatctgaataaagatagaatcttccctgacagactgtctggtgaaatgcctcctgctagcccaagttttccaaggaataaaaggaccgacgcaaatgaaagcagcagctctcctgagatcagggatcagcacgcagacgacgttaaagaggacttcgaggagagaaccgaaagcgagatgcgcacatcccacgaagccaggggcgcacgggaggaaccgaccgtgcagcaggcacaacggagatctgcggtttttctatcatttaaaagcccaatcccttgtttacctcttagatgggagcagcagagtaaactcctgcccacagtagcagggataccagcaagcaaggtgagcaagtggagcaccgacgaggttagcgaatttattcaaagtctgcctggttgtgaagaacatgggaaagttttcaaggatgaacagatcgatggcgaggcttttctattgatgacccagactgatatcgttaaaatcatgtctatcaagttgggcccagctctgaaaattttcaacagtattctgatgttcaaagctgctgaaaagaattcacataacgaactgtag

SEQ ID NO: 22504 - DNA, 2268 bp, Artificial Sequence
  derived and/or modified sequence
atgactgagagcgcctcctccactagtgggcaggaattcgatgtgttttccgtgatggattggaaggatggagtgggcactctgcctggctcagacctcaaattcagggtgaatgaattcggggcactggaggtcatcaccgacgaaaatgaaatggaaaatgtgaagaaggcgaccgcaacaacaacatggatggtccctactgcccaagaggtgttcagcgagaagaccggaatgcccttccgcctaaaagatcctgtcaaagtcgaaggattacagttttgcgagaactgttgccagtacggcaatgttgacgaatgcctgtccggaggaaactactgtagccagaattgcgcaagacacattaaagacaaagaccagaaggaagaacgcgatgtggaagaagacaatgaggaagaggaccctaagtgttcaaggaaaaagaagccaaagctatctctaaaggcagatacaaaggaggatggagaagaacgggacgatgagatggaaaataagcaagatgttcgcatactccggggaagtcaaagagcacggaggaagaggcgcggagattcagccgttcttaagcaaggactccccccaaagggtaagaaagcctggtgttgggcaagctatctcgaagaagaaaaagcagtagccgtgcctgcaaaactgttcaaagaacaccagtcctttccttacaataagaacggtttcaaagtgggcatgaaactggagggggtggaccccgaacatcaatctgtgtattgcgtacttactgtcgcggaggtgtgtggctatagaattaaactccattttgatgggtactctgactgttatgacttctgggtcaatgcagatgccctagatatccatcccgtgggctggtgcgaaaaaacaggacataagctgcacccccctaaggggtacaaagaagaagaattcaactggcagacctatctgaagacttgtaaggcccaggctgcaccgaagtcattattcgaaaaccagaatattaccgtcattccttctggttttagagtcggcatgaaactagaagcagtggataaaaagaatccatcgttcatttgtgtggctaccgtgaccgatatggtcgacaaccggttcttggtgcatttcgacaactgggacgaatcctacgactactggtgtgaagcaagttcccctcacatacatccagtaggatggtgtaaagaacatagacgaactctgatcacaccaccgggttatcccaacgtgaaacatttttcctgggataagtacttggaagaaacaaatagcctgcccgcacctgcaagggcctttaaggtgaagccacctcacggttttcagaagaaaatgaagctggaggtggtcgacaagcgaaacccaatgtttatcagagtggccacagtggctgacacagatgaccaccgtgtgaaagtgcacttcgatggctggaataactgctacgattactggatagacgcagacagcccggatattcatcccgtcgggtggtgtagtaagaccggtcaccctctgcagccccctctgagtcccctggagctgatggaagcctcggaacacggcggatgctccacccctggatgcaagggaatcggtcactttaaacgcgcacgccacttaggtccgcattctgcagcaaactgtccatacagcgaaattaacctgaataaggacagaatctttccggatcgactatctggggaaatgccccctgcgagtcccagttttcctcggaacaaaaggaccgacgctaatgaaagctcctcttcaccagaaatcagagaccagcatgccgacgacgtgaaggaggactttgaggagcggactgagagcgagatgcgcacctcccatgaagctaggggggctagagaggagccgaccgtccagcaagcacagcgacggtcagccgtttttttgtcatttaagagccccatcccttgtctcccgctgaggtgggagcagcaatctaaacttcttcccacagtcgcgggaatcccagcctcaaaggtgtcgaagtggtccactgatgaagtgtctgagtttattcagtccctgcctgggtgcgaagaacatggcaaggttttcaaggacgaacagattgacggcgaggcctttctgctgatgacgcaaaccgacatcgttaaaatcatgagcatcaaacttggccctgccttgaaaatctttaacagcattctcatgtttaaggccgctgagaagaatagccataatgaactgtag

SEQ ID NO: 22505 - DNA, 2268 bp, Artificial Sequence
  derived and/or modified sequence
atgaccgagagcgccagcagcaccagcggccaggagttcgacgtgttcagcgtgatggactggaaggacggcgtgggcaccctgcccggcagcgacctgaagttcagagtgaacgagttcggcgccctggaggtgatcaccgacgagaacgagatggagaacgtgaagaaggccaccgccaccaccacctggatggtgcccaccgcccaggaggtgttcagcgagaagaccggcatgcccttcagactgaaggaccccgtgaaggtggagggcctgcagttctgcgagaactgctgccagtacggcaacgtggacgagtgcctgagcggcggcaactactgcagccagaactgcgccagacacatcaaggacaaggaccagaaggaggagagagacgtggaggaggacaacgaggaggaggaccccaagtgcagcagaaagaagaagcccaagctgagcctgaaggccgacaccaaggaggacggcgaggagagagacgacgagatggagaacaagcaggacgtgagaatcctgagaggcagccagagagccagaagaaagagaagaggcgacagcgccgtgctgaagcagggcctgccccccaagggcaagaaggcctggtgctgggccagctacctggaggaggagaaggccgtggccgtgcccgccaagctgttcaaggagcaccagagcttcccctacaacaagaacggcttcaaggtgggcatgaagctggagggcgtggaccccgagcaccagagcgtgtactgcgtgctgaccgtggccgaggtgtgcggctacagaatcaagctgcacttcgacggctacagcgactgctacgacttctgggtgaacgccgacgccctggacatccaccccgtgggctggtgcgagaagaccggccacaagctgcacccccccaagggctacaaggaggaggagttcaactggcagacctacctgaagacctgcaaggcccaggccgcccccaagagcctgttcgagaaccagaacatcaccgtgatccccagcggcttcagagtgggcatgaagctggaggccgtggacaagaagaaccccagcttcatctgcgtggccaccgtgaccgacatggtggacaacagattcctggtgcacttcgacaactgggacgagagctacgactactggtgcgaggccagcagcccccacatccaccccgtgggctggtgcaaggagcacagaagaaccctgatcaccccccccggctaccccaacgtgaagcacttcagctgggacaagtacctggaggagaccaacagcctgcccgcccccgccagagccttcaaggtgaagcccccccacggcttccagaagaagatgaagctggaggtggtggacaagagaaaccccatgttcatcagagtggccaccgtggccgacaccgacgaccacagagtgaaggtgcacttcgacggctggaacaactgctacgactactggatcgacgccgacagccccgacatccaccccgtgggctggtgcagcaagaccggccaccccctgcagccccccctgagccccctggagctgatggaggccagcgagcacggcggctgcagcacccccggctgcaagggcatcggccacttcaagagagccagacacctgggcccccacagcgccgccaactgcccctacagcgagatcaacctgaacaaggacagaatcttccccgacagactgagcggcgagatgccccccgccagccccagcttccccagaaacaagagaaccgacgccaacgagagcagcagcagccccgagatcagagaccagcacgccgacgacgtgaaggaggacttcgaggagagaaccgagagcgagatgagaaccagccacgaggccagaggcgccagagaggagcccaccgtgcagcaggcccagagaagaagcgccgtgttcctgagcttcaagagccccatcccctgcctgcccctgagatgggagcagcagagcaagctgctgcccaccgtggccggcatccccgccagcaaggtgagcaagtggagcaccgacgaggtgagcgagttcatccagagcctgcccggctgcgaggagcacggcaaggtgttcaaggacgagcagatcgacggcgaggccttcctgctgatgacccagaccgacatcgtgaagatcatgagcatcaagctgggccccgccctgaagatcttcaacagcatcctgatgttcaaggccgccgagaagaacagccacaacgagctgtag

SEQ ID NO: 22506 - protein, 749 aa, Artificial Sequence
  derived and/or modified sequence
MEEESGEELGLDRSTPKDFHFYHMDLYDSEDRLHLFPEENTRMRKVVQAEMANESRGAGDGKAQRDLQEEVDELVHLYGLEDDHELGDEFVDENIPRTGVSEYPPYMMKRRDPAREQRDWRLSGEAAEAEDLGFGGWGSAGQCQDLREAYRYTHGRASEEYECYVIPEEEDEEEAADVFCVTCKTPIRAFQKVFDEHKEHEVIPLNEALESAKDEIHKNMYKLEKQIIEMENFANHLEEVFITVEENFGKQEQNFESHYNEILETLAQKYEEKIQALGEKKKEKLEALYGQLVSCGENLDTCKELMETIEEMCHEEKVDFIKDAVAMADRLGKFLKTKTDVEISAQPEFEDQTLDFSDVEQLMGSINTIPAPSAPVINPQVPNSATGSSVRVCWSLYSDDTVESYQLSYRPVQDSSPGTDQAEFTVTVKETYCSVTNLVPNTQYEFWVTAHNRAGPSPSSERAVYMTAPSPPIIKTKEIRSCEEAVLICWESGNLNPVDSYTVELTQAESPEASGVTESVVGIPTCESVVQLQPGRSYIIYVRALNMGGPSVRSEPATVHTIGSYFRLNKDTCHPWLTISEDGLTAVRSERRTPARELSPSDTHFTRCVAVMGNLIPVRGHHYWEVEVDEHLDYRVGVAFADVRKQEDLGANCLSWCMRHTFASSRHKYEFLHNRTTPDIRITVPPKKIGILLDYEHSKLSFFNVDLSQHLYTFSCQLHEFVHPCFSLEKPGCLKVHNGISMPKHVTFY

SEQ ID NO: 22507 - protein, 101 aa, Artificial Sequence
  derived and/or modified sequence
MEEESGEELGLDRSTPKDFHFYHMDLYDSEDRLHLFPEENTRMRKVVQAEMANESRGAGDGKAQRDLQEEVDELVHLYGLEDDHELGDEFVDENIPRTGVS

SEQ ID NO: 22508 - DNA, 2250 bp, Artificial Sequence
  derived and/or modified sequence
atggaggaggagagcggcgaggagctgggcctggacagaagcacccccaaggacttccacttctaccacatggacctgtacgacagcgaggacagactgcacctgttccccgaggagaacaccagaatgagaaaggtggtgcaggccgagatggccaacgagagcagaggcgccggcgacggcaaggcccagagagacctgcaggaggaggtggacgagctggtgcacctgtacggcctggaggacgaccacgagctgggcgacgagttcgtggacgagaacatccccagaaccggcgtgagcgagtaccccccctacatgatgaagagaagagaccccgccagagagcagagagactggagactgagcggcgaggccgccgaggccgaggacctgggcttcggcggctggggcagcgccggccagtgccaggacctgagagaggcctacagatacacccacggcagagccagcgaggagtacgagtgctacgtgatccccgaggaggaggacgaggaggaggccgccgacgtgttctgcgtgacctgcaagacccccatcagagccttccagaaggtgttcgacgagcacaaggagcacgaggtgatccccctgaacgaggccctggagagcgccaaggacgagatccacaagaacatgtacaagctggagaagcagatcatcgagatggagaacttcgccaaccacctggaggaggtgttcatcaccgtggaggagaacttcggcaagcaggagcagaacttcgagagccactacaacgagatcctggagaccctggcccagaagtacgaggagaagatccaggccctgggcgagaagaagaaggagaagctggaggccctgtacggccagctggtgagctgcggcgagaacctggacacctgcaaggagctgatggagaccatcgaggagatgtgccacgaggagaaggtggacttcatcaaggacgccgtggccatggccgacagactgggcaagttcctgaagaccaagaccgacgtggagatcagcgcccagcccgagttcgaggaccagaccctggacttcagcgacgtggagcagctgatgggcagcatcaacaccatccccgcccccagcgcccccgtgatcaacccccaggtgcccaacagcgccaccggcagcagcgtgagagtgtgctggagcctgtacagcgacgacaccgtggagagctaccagctgagctacagacccgtgcaggacagcagccccggcaccgaccaggccgagttcaccgtgaccgtgaaggagacctactgcagcgtgaccaacctggtgcccaacacccagtacgagttctgggtgaccgcccacaacagagccggccccagccccagcagcgagagagccgtgtacatgaccgcccccagcccccccatcatcaagaccaaggagatcagaagctgcgaggaggccgtgctgatctgctgggagagcggcaacctgaaccccgtggacagctacaccgtggagctgacccaggccgagagccccgaggccagcggcgtgaccgagagcgtggtgggcatccccacctgcgagagcgtggtgcagctgcagcccggcagaagctacatcatctacgtgagagccctgaacatgggcggccccagcgtgagaagcgagcccgccaccgtgcacaccatcggcagctacttcagactgaacaaggacacctgccacccctggctgaccatcagcgaggacggcctgaccgccgtgagaagcgagagaagaacccccgccagagagctgagccccagcgacacccacttcaccagatgcgtggccgtgatgggcaacctgatccccgtgagaggccaccactactgggaggtggaggtggacgagcacctggactacagagtgggcgtggccttcgccgacgtgagaaagcaggaggacctgggcgccaactgcctgagctggtgcatgagacacaccttcgccagcagcagacacaagtacgagttcctgcacaacagaaccacccccgacatcagaatcaccgtgccccccaagaagatcggcatcctgctggactacgagcacagcaagctgagcttcttcaacgtggacctgagccagcacctgtacaccttcagctgccagctgcacgagttcgtgcacccctgcttcagcctggagaagcccggctgcctgaaggtgcacaacggcatcagcatgcccaagcacgtgaccttctactag

SEQ ID NO: 22509 - DNA, 2250 bp, Artificial Sequence
  derived and/or modified sequence
atggaggaagagagtggagaagagctgggcttagaccgttccacacccaaagactttcacttctaccacatggatctgtacgatagtgaggaccgactccatttatttccagaagaaaacacccgcatgaggaaggtagtccaggcagaaatggccaacgagtccaggggggccggtgacgggaaggcacaaagagatctacaggaggaagtcgacgagctcgtgcacttgtacggcctcgaagacgaccatgaactgggtgatgagttcgtggacgaaaacattccacggacaggcgtgagtgagtacccgccatatatgatgaaacgacgggacccggcgcgcgagcagagagactggagactgtccggagaggcagctgaggccgaggatctgggctttggagggtgggggtccgcaggacaatgtcaagacctgcgcgaggcttaccgttatacacatggacgggcttctgaggagtacgagtgctacgtgatccctgaggaggaagacgaggaggaggcagcggatgtgttctgcgtgacctgcaaaacacctatccgggccttccagaaggtgttcgacgagcataaagagcacgaggtgattcccttaaacgaggccctcgagagtgcaaaagatgagatccacaagaatatgtacaagctggaaaagcagatcatcgagatggagaatttcgcaaatcacctggaggaggtgtttatcacagtcgaagagaacttcgggaagcaggaacagaacttcgaaagccattataacgagattctagaaactctggcgcaaaagtacgaggaaaaaattcaagctctgggcgaaaagaagaaagaaaaacttgaggcactatatggacaattggtgtcctgcggcgagaacctggacacctgcaaggaacttatggaaaccatcgaggaaatgtgtcatgaggagaaggtggactttatcaaggatgctgtcgccatggctgacaggctcggcaaattccttaaaaccaagaccgatgtagagatcagtgcccagccggaattcgaagatcagactctggacttctcagatgttgagcagctgatggggagcatcaacactattccagcccctagcgcaccggtgattaatcctcaggtccctaacagcgccaccggtagtagcgtgagagtatgttggagcttatactccgatgacacagtagaatcgtaccagctgtcataccgtcccgttcaggatagttctcctggtactgatcaggccgagttcactgtcaccgtgaaggaaacatactgctccgtaactaacctggttcctaatactcagtacgagttttgggtgactgcccacaatcgagcaggcccctccccttcatctgagcgggcagtgtacatgacggctcccagcccccctattattaagaccaaggaaatcagatcttgcgaagaagctgtactcatctgttgggagtccggcaacctgaatcccgtggattcttacactgtggagcttacgcaggccgaatcccccgaagcatctggtgtgacagagagcgtggttggtattccaacttgcgaatctgtggttcaactacaaccagggcgctcttatataatttacgtgcgggcacttaacatgggaggcccaagcgtgcggtcagaaccagctaccgttcacaccattgggagctactttagactgaacaaagacacctgtcatccgtggcttacaatatcagaagacggcttgaccgccgtgcgctcagaaaggcgcacccccgcgcgcgaactcagcccttcagatactcatttcactcgctgtgtggcagttatgggaaatttgatacccgtgagaggccatcactattgggaggtcgaggtggacgaacacctcgactaccgggtgggagtcgcttttgcggatgtgcggaaacaggaggacctgggagcaaattgcctctcttggtgcatgagacacacattcgcctcctcacggcacaagtatgagtttctccataaccgcacaaccccagatatacggatcaccgtcccaccaaagaagattgggatcctccttgattacgagcactcaaaactgagttttttcaatgtagacctctctcagcatttgtatacatttagttgccagctccacgaattcgtgcatccatgcttctctctggaaaaacctggttgtcttaaggtgcacaatggaatcagcatgccaaaacatgtgactttttactag

SEQ ID NO: 22510 - DNA, 6418 bp, Artificial Sequence
  derived and/or modified sequence
atgcagaggtcactaggaaggaaagcctgctgaacacagattcaattttctagcagaactccaggtcctctgagttaaaggaagcatttatggacgcttagcagggcccagatattcactattaagtgtccaggaaggatctttcttatataaaggtgcttctgaggacttccagagttacaatggaggaggaatcgggggaggaactggggctggacaggtctactcccaaggatttccacttttaccacatggacctgtatgactctgaagacagactgcacctctttccagaagagaacactaggatgaggaaagtagtccaagctgaaatggccaatgagtcaagaggagcaggggatggtaaggctcaaagagaccttcaagaggaagtggatgaacttgtccacttatatggacttgaagatgatcatgaattaggggatgagtttgttgatgaaaacatacccagaacaggggtttcagaatatcctccttatatgatgaagaggagagacccagccagggagcagagagactggagacttagtggagaggcagcggaggccgaggacctgggcttcggagggtggggctcagcaggccagtgccaggacttgcgggaagcctataggtacacacacggccgtgccagcgaggagtatgaatgctatgtcatccccgaggaagaggatgaagaagaagctgctgatgtcttctgtgtcacttgtaagactccaataagagcttttcagaaggtttttgatgaacataaggagcatgaagtgatcccactcaatgaagcactggaaagtgccaaggatgaaattcacaaaaacatgtacaaattggaaaagcagataattgagatggaaaactttgcaaatcatttggaggaggttttcatcactgtggaggagaattttggaaaacaagaacaaaactttgagtcacattacaacgagatcttggaaacacttgctcaaaaatatgaggaaaaaatacaagctctaggggagaaaaagaaagagaagctggaagccttatatggacaactggtcagctgtggagaaaacctagatacttgcaaagaactgatggaaacaatagaggagatgtgtcacgaggagaaggtggatttcataaaggatgcagtggctatggctgacagactcgggaaattcctgaaaacaaaaacagacgtggaaatctctgcacagcctgagtttgaagaccagaccttggatttctctgatgtggagcagctgatgggctccattaacaccattccagctccttctgctccagtcataaatccacaggtccctaactcagccacaggttcctcagtccgagtgtgctggagcttatactccgacgacactgtggagagctatcagctgtcctaccggccagtgcaggacagctcacctgggacggaccaagcagagtttacagtgactgtcaaagaaacatattgctcagtgacaaaccttgtgccaaatacccagtatgaattttgggtcacagctcacaacagggctggccccagcccctctagcgagcgtgcagtgtacatgacagcaccttctccccccattattaaaaccaaagagataaggagctgtgaagaggctgtgctgatttgctgggagtctgggaacctgaatcctgtggactcgtacactgtggagctgacccaggctgaaagtccagaagcctcgggtgtaactgagtctgttgtgggcatcccgacctgcgagtccgtggtgcagctgcagccggggcggagctacattatctatgtgcgagccctcaatatggggggccccagcgtgaggagcgagccagctacagtccacaccataggaagctactttcgcctaaacaaggacacttgccatccctggctgaccatttctgaagacggacttacggctgtacgaagtgaaaggagaacccccgccagggagctgtcacccagcgacactcacttcaccaggtgtgttgctgtcatgggaaatctaattccagtccgagggcaccattactgggaggtggaggtggatgagcatttggactacagagttggtgtggcctttgcagatgtccgtaaacaggaggatctgggagcaaattgcctctcctggtgcatgaggcacacatttgcatcatcaaggcataagtatgaatttctgcacaacagaacaactccagatataagaataacagttccaccaaagaagattggcattctattagactatgaacattcaaagttgtcatttttcaatgtggacctttctcagcatctatatacatttagttgtcagcttcacgaatttgtgcatccctgtttttctttggaaaagcctgggtgtctaaaggtacataatggcatttcaatgccaaaacatgtcactttctattagaacattctgatgtccagtttcctgtcttccatgcctacccctctcgcagctgctcacgccttagctggctgaacctggcacttaagcaccatgtgcccagcacaatttatggctcatgctattatctgactggtgtgctagcgctcatttcacccaacctggattctagtcctgtgtgctgctacctgtgtgctgctaggatagtcattaccaggcccagctgtaaaataaaggctcagactaaacgaactcaaaagtctttgaagctgtcaaactatattcgtgtatatgcaaaatatcttgagtttccaagacctagagagcttgggagaggacgagggtagtcttaatggctccagcagcaccagtacacccatgcatttcatgagtcagccaagaatacacttgagaaggcgagaggctgtctgtagagaaccagggaagctgtgtgcccttctcaatgtcttctaccctcgttttcccaatagtgagcagcactgtggtgaggtcccttccactgtgtactctgcatacagggtattccctgttccactcctacacagtatgcaccactctctaattttgaaattacctctataatgcctaattccatgaagggagggacagtgcctgttttgttcattgctagatcaccaagggctaacacataacagctgtcaccaagtatttgttgaataaattagtatcttcttcagccactgctctttggcctcttactgctctccatgtgaaggatggcagggctctttcaaaactacagcaaaggacctatggccaagaaatgggaaaaaacctagaatggaggcagcgtgaaagaacagaagggcatctgtggcatattagcaaatgcacaacaattttttaaaagaaattaacagcccaccaaagggcaaagctgagcacgggaaggaagactgatctctagctaggcagctttcaggcatcctgcctcactgcccccaggccattctgtgagctcaatgcccaactccatcagctacattcctggttctcctgttcaagtttccagttgccacttaagctctgcacacacagcattttcaaagcttgtgagtgaagctgcagaataattccatttgtgaagcaattacaattcagtatcatgtcccacagatgcctctaaacccagatatgccctaatctcatcatttaaggttttgtgtttaaaaaaaaaaagtccacttttcttttttctggcgaaaccccgtctctactaaaaatacaaaaaattagccgggcatggtggtgggcgcctgtaatcccagctactcaggaggctgaggcaggagaattgcttgaacccgggggcagaggctgcagtgagccgagattgtgccactgcactccagccttggcaacaagagcgcaactctgtctcaaaaacaaacaaacaaacaaacaaaaaacctctgatgttttccagcacctgcaaagtctgacaaactgaaagactctcatctcctactaaactctgcctactcgtataaatggcagctcagattcctgaattaacaattcacactgacaatttaataactcgttatacacacacacacctatcctgccaagctggactgtctactctgaaacaagggacagcagatgtaagcacagaaatagttccagttataaacaattaaaagatacatatcatgtatatttaaaaatgttctcggccgggcgcggtggctcacgcctgtaatcccagcactttggggggccaaggtggatggatcacaaggtcaggagatcgagaccatcctggctaatacggtgaaaccccgtctctactaaaaatacaaaaaaattagccgggactggtggcgggcgcctgtagtcccagctactcgggaggctgaggcaggagaatggcgtgaacccgggaggtggagcttgcagtgagccgagatggctcacagatcaagactccatctcaaaaaaaaaaaaaaaaaaagttctcagctactgaaatagaaactaccaagtaagaaacaggatatcacagagaaggcaagtttgaattcagggttctaataggctttatggaatactacacgttagtatgaacacggataaatggattaaaaactcaacacgtataaagttttaattaaatttttatttgaccaagaaaaaactgtctagaattgcctgacatttaaaatccacttaaagcagattagcaacttcaagcatcacaattattcagcataaagagcctttgttgaaacatctttctcatttatttagaagaaaacatctagaacagaaccaagcaaaacttttgtatttttgtaaaaaatctcaattcctgaaactactataaacaatctactgaaactgtattcagcaagggacagatttacctcaaggccatgttcacctgcaacctgctgataagtctgttaaaaaacaaagcaaaaaaaagagtttttaaaaattagaccactgtagccacaatccctaacactggacagttaaaacaaaagttatcaaaatctgttcttttcttagctttacctgtatcactttataactcctgagaaagtcattcacataagctgtggcctccccaccttaacaaaggggaaaaagaatatgtaaaaccaccacagaatcttggcgtaaactaacatgggtttagtaatacagagtacagtattcaggatttaaggcacccttacaagtcagaattggaaagttggtttgagacttgcaatctaaaatgacactgatttctgataaaattaaatgacttttatttagaaaagtgtgtttaataaattacttcctgctggttcaaatgacacacaatcactttgtatacatccaataagatatttctgaagtgtatacttggtcaaaagtaaaaagcagagcaaatgcatggacagtggggccttcttcttaatacttctcatcctccaaaatctgttaaaatcatcatcttccacaactcacacactggaagctgtccacagcacaattcactgtgatgtggcattctgtaaataagactacattggtcttgatgcaaggcggttcagctaccagactgcactataagaaaagtcctctcctcaacttaccaagaaaacttcgccaatttctagtcaccttcctatcaattagtagagcaagattctcacatgttcactatgtctttctccagttttctcatctataagtgtactactcctattttctataggaagacaatggaaagcgtgtaattgctgttggtagataagtaggtcttgaatttattttgcaaacaagacctgttctatctaccttttcatttaggaggctaaaagcagagtcagcttgatttcaaggactctattttcttagtctccagaagaacataaccaaatccagcttttaaaacactgtcctttaacaagtcaagatactcaaataaagatcatgtataacttcaagctataggagattaactctgtacatatgcttgtttcactgtaaccaatggttaattaatctaaatgcaagagaaaagttatttggaaagaagaccccagctggtcagcatcttttctgtcatcaggaagtctcctggaaggagtatgactatgacctgggcacaacaactgcccctaagttagtacttattttagagttgctactgaacaggtggtggttcttgtcaagtatatcatgtctgactactttactgcttgttttctgctatcaccagttccagaaaaaaaaaaaaaaaaaattaagcccaactcactaattgattgctttttcattttcccagactgtgacagaatcatggtttttagctctattttcaccttactcaaatcctggaggaattaaactatcatttatttgaaatgttacaaattagcctgcagttgattcaaacaacatgtagtcactcagacatagcaaataaaaatgttttggtatatgaa

SEQ ID NO: 22511 - DNA, 2250 bp, Artificial Sequence
  derived and/or modified sequence
atggaggaggagagcggggaggagctgggcctggacaggagcacccccaaggacttccacttctaccacatggacctgtatgattctgaggaccggctgcacctgtttcctgaggagaacaccaggatgaggaaggtggtgcaggccgagatggccaatgaaagcagaggagctggagatggcaaggcccagagggacctgcaggaggaggtggatgagctggtgcacctgtatggcctggaggatgaccacgagctgggagatgaatttgtggatgagaacatccccaggactggagtgtctgagtacccaccctacatgatgaagaggcgggaccctgcccgggagcagagggactggaggctgtctggagaggccgctgaggccgaggacctgggctttggaggctggggcagcgctggccagtgccaggacctgcgggaggcctaccgctacacccacggccgggccagcgaggagtatgagtgctacgtgattcctgaggaggaggatgaggaggaggccgcagatgtgttctgtgtgacctgcaagacccccatccgggccttccagaaggtgtttgatgagcacaaggagcacgaggtgatccccctgaatgaggccctggagagcgccaaggatgagatccacaagaacatgtacaagctggagaagcagatcatcgagatggagaactttgccaaccacctggaggaggtgttcatcaccgtggaggagaactttgggaagcaggagcagaactttgagagccactacaatgagatcctggagaccctggcccagaagtatgaggagaagatccaggccctgggggagaagaagaaggagaagctggaggccctgtatggccagctggtgtcctgtggggagaacctggacacctgcaaggagctgatggagaccatcgaggagatgtgccacgaggagaaggtggacttcatcaaggatgctgtggccatggctgaccggctgggcaagttcctgaagaccaagacagatgtggagatcagcgcccagcctgagtttgaggaccagaccctggacttcagtgatgtggagcagctgatgggcagcatcaacaccatcccagcccccagcgcccctgtgatcaacccccaggtgcccaacagcgccaccggcagctctgtgcgggtgtgctggagcctgtacagtgatgacacagtggagagctaccagctgagctacagacctgtgcaggacagcagccctggaacagaccaggccgagttcaccgtgacagtgaaggagacctactgcagcgtgaccaacctggtgcccaacacccagtatgagttctgggtgacagcccacaacagagctggccccagccccagcagcgagagagctgtgtacatgacagcccccagcccccccatcatcaagaccaaggagatccgcagctgtgaggaggccgtgctgatctgctgggagagcggcaacctgaaccctgtggacagctacacagtggagctgacccaggccgagagccctgaggccagcggcgtgacagaatctgtggtgggcatccccacctgtgagagcgtggtgcagctgcagcccggccgcagctacatcatctacgtgcgggccctgaacatgggcggccccagcgtgcgctctgagcccgccaccgtgcacaccatcggcagctacttccggctgaacaaggacacctgccacccctggctgaccatcagtgaagatggcctgacagctgtgcgctcagaaagaaggaccccagcccgggagctgagccccagcgacacccacttcacccgctgtgtggccgtgatgggcaacctgatccctgtgcggggccaccactactgggaggtggaggtggatgagcacctggactacagagtgggcgtggcctttgctgatgtgaggaagcaggaggacctgggcgccaactgcctgtcctggtgcatgaggcacacctttgccagcagccgccacaagtatgagttcctgcacaacagaaccaccccagacatccgcatcaccgtgccccccaagaagattggcatcctgctggactatgagcacagcaagctgtccttcttcaacgtggacctgagccagcacctgtacaccttcagctgccagctgcatgaatttgtgcacccctgcttcagcctggagaagccaggctgcctgaaggtgcacaacggcatctccatgcccaagcacgtgaccttctactag

SEQ ID NO: 22512 - DNA, 2250 bp, Artificial Sequence
  derived and/or modified sequence
atggaggaggagagcggcgaggagctgggcctggaccggagcaccccaaaggattttcacttttatcacatggacctatatgactccgaggaccgactgcatctttttcccgaggaaaacacacgcatgcggaaagtggtacaagcggaaatggcaaacgagtcaagaggggctggtgatggcaaagcacagagagacctccaggaggaggtggatgagctcgtgcacctgtacggcctggaagacgatcacgaacttggtgacgaattcgtggatgagaatattccgcggacaggcgtgagcgaatatcccccctacatgatgaaaagacgagacccagccagggagcagcgcgattggcggttgtccggtgaggccgcagaggccgaggacctggggttcggcgggtgggggtccgccggacagtgtcaggatctgagagaggcctaccgttatacccatggtcgagcttctgaggagtatgagtgttacgtcatccctgaagaagaagatgaagaggaggccgccgacgtgttctgcgtcacctgtaaaactccgatccgcgcctttcagaaggtgtttgatgagcataaagaacatgaagtcattccgctgaacgaggcgttagagagtgccaaggacgaaatccacaagaatatgtataaactggaaaaacagataatcgagatggagaacttcgcaaatcacttggaggaagtgtttattactgtcgaggaaaactttggcaagcaggaacagaattttgaatctcactacaacgaaattctggagacactcgcgcagaaatacgaggaaaaaattcaggcacttggggaaaagaaaaaagagaaacttgaggccctgtacggacagctggtgtcctgtggagagaacttagacacctgtaaagagttaatggaaacaatagaagagatgtgccacgaggaaaaagtagactttataaaggatgcggtcgctatggccgatagactcggcaagtttttgaagaccaagactgatgtagaaatctctgcccagcccgagttcgaagaccaaacactggatttctccgacgtggaacagctcatgggtagcatcaacacaataccagccccttctgctcccgtgatcaatcctcaagtcccaaactcagcaaccggaagcagcgtgcgcgtttgttggtcattgtactccgatgacaccgtggagtcatatcaactttcctaccgccctgtgcaggatagcagccccggcacagatcaggcagagttcactgttaccgtgaaggagacttattgctccgtgactaatttagtgccaaatacacaatacgagttctgggtgaccgctcataacagggccggcccctcaccgtcatccgaacgggccgtttatatgactgccccgagcccccccatcataaagacaaaagaaatcaggtcttgcgaagaggccgttctcatctgctgggaaagcgggaacctcaaccctgttgattcatacaccgtcgagctgacgcaggccgagtcacctgaggccagcggagtcacagaaagcgtggttggtatccctacatgcgaatcggtggtacaactgcagccggggcgcagttatattatttacgttagggccctgaacatggggggcccctccgttagaagcgaacccgccactgtgcacaccataggttcttatttccgactgaataaagacacctgtcatccatggctgaccattagcgaagacggtctgacagcggttcgatctgagagacgcacccctgccagggaactttcacctagtgatacacattttaccaggtgcgtcgcagtcatgggaaatctcatccctgtacgcggccaccattattgggaggtggaagtcgatgaacatctggattacagggtaggtgtggctttcgcagacgtgcgaaaacaggaggacttgggcgcaaattgcctcagttggtgtatgcgccacacattcgccagcagcaggcataagtacgaattcttacataaccgtaccacgccagacattcgtattacggtgccacctaaaaagattggtattctgctggactatgaacattctaaactgtccttcttcaacgtagacttaagccagcatttgtacaccttctcatgccagctccacgaatttgtgcatccctgtttcagtctggaaaagccgggctgtcttaaggtgcacaatggaattagtatgcctaagcatgttaccttctattag

SEQ ID NO: 22513 - DNA, 2250 bp, Artificial Sequence
  derived and/or modified sequence
atggaggaggagagtggcgaagagctgggactggacaggtcaacccccaaggacttccatttctaccacatggatttgtatgatagcgaggacaggttgcaccttttcccggaagaaaatacccggatgaggaaagtagttcaagccgagatggcaaatgagtctaggggtgccggagacggcaaagctcagagagatcttcaagaggaagtcgatgagctagtccatctttacggtctggaagacgaccacgaactgggtgacgaattcgtcgacgagaatattcctaggactggcgtgagtgaatatcccccatacatgatgaagcgcagggacccagccagggaacagagagattggcgattgtccggggaagctgcggaagccgaagatcttggctttgggggttggggcagcgcaggtcaatgtcaggacctgagagaagcatacagatacactcatggacgcgcttccgaagagtatgagtgctacgtaatccctgaagaggaggacgaggaagaggcagcagatgtgttttgcgttacgtgtaagactccaatcagggccttccagaaggtgtttgacgagcacaaagagcacgaagtaatccccctgaacgaggccttggaatccgcaaaagacgagattcacaaaaacatgtataagctggaaaagcagattatagagatggaaaactttgccaatcacctggaagaagtgttcatcactgtggaggagaacttcggcaaacaggagcagaatttcgaatcacactacaacgaaattttagagaccctcgcacaaaagtacgaggagaagattcaagccttaggagagaagaaaaaggaaaaattagaagcactttatgggcaactcgtcagttgcggggaaaacctggacacgtgcaaagagttaatggaaacaattgaggagatgtgccatgaggagaaagtggacttcatcaaagatgcagtggctatggcggatcgccttggtaaatttctgaagaccaaaacagatgtggagatcagcgcacaacctgagttcgaagatcagaccttggacttctccgacgtggagcagctgatggggtccatcaacaccatcccagcgccatccgccccagttatcaatcctcaagtgcctaacagtgctacggggagtagcgtccgggtctgttggtccttatatagcgacgacacagtagaatcataccaactttcctaccggcctgtgcaggacagtagcccgggaaccgaccaggcagaattcacagtcacagtgaaggaaacatactgttcagtgaccaacctggtccccaacacccagtacgagttctgggtcacggcacacaaccgagcaggccctagcccttctagcgaacgcgctgtgtacatgacagcaccctcaccgccaattatcaagaccaaggaaattcgcagctgcgaagaagccgtactcatttgttgggaaagcggcaacctcaatccggtagactcatacacagtggaactgacacaagctgaatctcccgaggcctccggagtaaccgaatctgtcgttggcatccccacctgcgaatccgtggttcagctgcagcccggaagatcatacattatatacgtccgagccctcaatatgggcggaccttctgttcggagcgaacctgcaactgtccataccatcggctcgtacttccgcctcaacaaagatacttgccatccctggttaacaatcagtgaagatgggctgaccgctgtccggagtgaacgcagaacacctgcccgagagctgagtccctccgacacgcactttaccagatgtgtagctgtcatgggaaacttaatacccgtccggggacatcattactgggaagtagaagtggatgagcatctagactaccgggtcggcgtggcatttgcagatgttcggaagcaggaggacctgggtgcgaattgcctcagctggtgcatgcgccacacttttgcgagcagcaggcacaagtatgagtttcttcacaatagaactacccccgacatcaggatcactgtgcctcctaagaaaattgggatcctcctggattacgagcattctaaactaagcttttttaacgtggatctgtctcagcacctttatactttttcctgtcaactccatgaatttgtgcatccgtgttttagtttagaaaagcccggatgtctcaaggtacacaatggcatatcaatgcctaagcatgtgacgttttattag

SEQ ID NO: 22514 - protein, 612 aa, Artificial Sequence
  derived and/or modified sequence
MDVSLCPAKCSFWRIFLLGSVWLDYVGSVLACPANCVCSKTEINCRRPDDGNLFPLLEGQDSGNSNGNASINITDISRNITSIHIENWRSLHTLNAVDMELYTGLQKLTIKNSGLRSIQPRAFAKNPHLRYINLSSNRLTTLSWQLFQTLSLRELQLEQNFFNCSCDIRWMQLWQEQGEAKLNSQNLYCINADGSQLPLFRMNISQCDLPEISVSHVNLTVREGDNAVITCNGSGSPLPDVDWIVTGLQSINTHQTNLNWTNVHAINLTLVNVTSEDNGFTLTCIAENVVGMSNASVALTVYYPPRVVSLEEPELRLEHCIEFVVRGNPPPTLHWLHNGQPLRESKIIHVEYYQEGEISEGCLLFNKPTHYNNGNYTLIAKNPLGTANQTINGHFLKEPFPESTDNFILFDEVSPTPPITVTHKPEEDTFGVSIAVGLAAFACVLLVVLFVMINKYGRRSKFGMKGPVAVISGEEDSASPLHHINHGITTPSSLDAGPDTVVIGMTRIPVIENPQYFRQGHNCHKPDTWVFSNIDNHGILNLKDNRDHLVPSTHYIYEEPEVQSGEVSYPRSHGFREIMLNPISLPGHSKPLNHGIYVEDVNVYFSKGRHGF

SEQ ID NO: 22515 - DNA, 1839 bp, Artificial Sequence
  derived and/or modified sequence
atggacgtttcactctgccctgcaaaatgcagtttctggcgcatcttcttgctaggtagtgtgtggttagactacgtgggaagcgtgctcgcttgtcccgcgaattgcgtgtgttcgaaaaccgagatcaattgtcgccggcccgatgacggcaatcttttccccctgctggaggggcaggattcgggcaatagcaacggcaatgcttctattaacattacagatatcagtagaaacatcacgagcatacatattgaaaattggagaagtttgcatacactgaacgctgtcgacatggaactgtacaccggtctccagaagcttacaattaagaactccggcctgcgctcaatccagccccgggctttcgcaaaaaacccacaccttcgatatataaacctaagtagcaatcgactgaccactctgtcatggcagctatttcagacactcagcctgcgggagcttcaactggaacagaatttttttaactgttcttgcgacattagatggatgcaactgtggcaagagcagggcgaagccaagctaaacagccagaacttatactgcatcaacgccgacggctcccaactgccactttttcggatgaatataagccaatgtgacctacccgaaatctcagtgagccacgtcaatctcacggttcgcgagggggacaatgccgtgattacctgtaatggctctggtagccccctgccagacgtcgactggatcgtgacagggctccaaagtattaatacacaccagaccaacttgaattggacgaatgtgcacgctattaatctgacactagtaaacgtgacctctgaggataacggttttaccctcacatgtatcgccgagaatgtcgtcggaatgagcaacgcttctgttgcccttacggtgtattatccaccacgggtcgtctctctggaggagcccgaactgagattggaacactgcatcgagttcgtcgtgagaggcaatcctcctcccaccctccactggttacacaatggccaacctttgcgggagtccaagataatccacgttgaatattaccaggaaggagagatctccgaggggtgtctgctgttcaacaaaccaacgcattacaacaacgggaactacaccttaattgcaaagaatcctttggggactgccaatcagaccatcaatgggcactttctgaaggagccgttcccagaatcaactgataactttatcctcttcgacgaggtgtcccccacccctcccattactgttacacacaagcccgaggaggatacatttggagtctccatcgccgtgggactggcagcgtttgcatgtgtattgctggtcgtgctctttgtgatgataaacaaatatggccgcagatctaagtttggaatgaaaggtccagttgccgtcatcagtggcgaagaggacagcgcctcccctttacaccacatcaatcacggcatcaccactccatcgtctctggatgccggacctgacaccgtcgtcatcggaatgacgcgcattcccgtcatcgaaaacccccagtattttcggcaagggcacaactgccacaagccagacacttgggttttcagtaacatcgacaatcacgggattctgaaccttaaggataaccgtgaccaccttgtgccttctacgcactacatctacgaagaaccagaagttcagtcaggggaagtgagctatcctcggtcgcacgggttccgcgagattatgttgaaccctattagcctgcctggacattctaagccactgaatcacggaatctatgtcgaagatgtgaacgtatattttagcaaaggccgtcacgggttttag

SEQ ID NO: 22516 - DNA, 1839 bp, Artificial Sequence
  derived and/or modified sequence
atggatgtttctctgtgtcccgcgaagtgttccttttggaggatcttcttattaggctccgtttggctcgattatgtgggatccgtcctagcttgccccgcaaattgcgtctgcagtaaaacagagattaactgccgcagaccggatgatgggaatttatttccactgcttgagggccaggatagcggtaattcgaacggaaatgcctccatcaacatcacagacattagccgaaacatcacatcaatccatatagaaaattggcgctccctgcataccctcaatgcagtcgatatggaactgtataccggcctccagaagctgactatcaaaaactcaggtctcaggtccatccagccacgcgcattcgctaagaatcctcatctgcggtatattaatctgagtagcaaccgtctgaccacactgtcttggcaactcttccaaacgctttctttaagagagctccagctggagcagaatttcttcaactgctcttgcgacatccgatggatgcagttgtggcaggagcaaggggaggctaaactgaactcacagaatctgtattgtattaatgctgacggctcacagctgccattattcagaatgaacattagtcagtgtgatttaccggagatttcggtttcccacgttaatcttaccgtccgggagggagacaacgccgtgattacctgcaatggctctgggtcccccctgccagacgtcgattggatagtcactggcctccaaagcataaacacacaccagaccaatctcaattggacaaatgtccatgccattaacctcactttggtcaacgttacgtctgaggacaacggattcactcttacctgcatcgcagaaaatgtggtgggtatgtctaatgcctcagtggccctgactgtatactacccacctagggtggtgagcctggaagagcctgagttacggctggaacattgcatcgagttcgtggtgcggggcaatccaccgccaaccctacattggctacataatggccagcctctccgcgaaagcaaaatcatacatgtcgagtattaccaagagggcgagataagtgaaggttgtctcctcttcaacaaacctacccattataataacgggaactacaccctgatcgctaagaacccactgggcaccgcaaaccagacgataaatggccattttctgaaagagccgttccctgaatctaccgacaacttcattcttttcgatgaagtgtcacccacccccccaataacagtcacccacaaacctgaagaggataccttcggggtgagcatagcggtcggactggctgctttcgcttgcgtcctgctcgtcgttctgttcgtcatgattaacaaatatggcaggaggtccaagtttggaatgaaggggcccgttgccgtcatctccggcgaggaggacagcgccagccccttgcaccacatcaaccacggcatcacgacgccgagtagcctagatgccggacccgacactgtggtgatcggaatgactcgtatcccggtaatcgagaacccccaatacttccgtcagggccataattgccacaagcctgacacctgggtctttagcaacattgataatcatgggatccttaaccttaaagataatcgtgaccatctggtaccttctacccactatatttacgaagaaccagaggtgcagagtggggaggtgtcctatccacggtcacacggattcagggaaataatgctcaacccgataagcctccctgggcattcgaagccgctgaaccatggcatttatgtggaggatgtcaatgtatatttttcaaaggggcggcacggattctag

SEQ ID NO: 22517 - DNA, 1839 bp, Artificial Sequence
  derived and/or modified sequence
atggatgtgtccctgtgcccagccaagtgcagcttctggaggatcttcctgctgggctctgtgtggctggactatgtgggctctgtgctggcctgcccagccaactgtgtgtgcagcaagacagagatcaactgccggcggccagatgatggcaacctcttccccctgctggagggccaggacagcggcaacagcaatggaaatgccagcatcaacatcacagacatcagcaggaacatcaccagcatccacatcgagaactggaggagcctgcacaccctgaatgctgtggacatggagctgtacacaggcctgcagaagctgaccatcaagaacagcggcctgcggagcatccagccccgggcctttgccaagaacccccacctgcgctacatcaacctgagcagcaaccggctgaccaccctgtcctggcagctgttccagaccctgagcctgcgggagctgcagctggagcagaacttcttcaactgcagctgtgacatccgctggatgcagctgtggcaggagcagggcgaggccaagctgaacagccagaacctgtactgcatcaatgctgatggcagccagctgcccctcttcaggatgaacatcagccagtgtgacctgcctgagatctctgtgagccacgtgaacctgactgtgcgggagggggacaatgctgtgatcacctgcaatggcagcggcagccccctgcctgatgtggactggatcgtgacaggcctgcagagcatcaacacccaccagaccaacctgaactggaccaacgtgcacgccatcaacctgaccctggtgaatgtgaccagcgaggacaatggcttcaccctgacctgcatcgcagaaaatgtggtgggcatgagcaatgcctctgtggccctgactgtgtactacccaccccgggtggtgtccctggaggagcctgagctgcggctggagcactgcattgaatttgtggtgcggggcaaccccccacccaccctgcactggctgcacaacggccagcccctgcgggagagcaagatcatccacgtggagtactaccaggagggggagatcagcgagggctgcctgctcttcaacaagcccacccactacaacaatggaaactacaccctgattgccaagaaccccctgggcacagccaaccagaccatcaatggccacttcctgaaggagcccttccctgagagcacagacaacttcatcctgtttgatgaggtgagccccaccccacccatcaccgtgacccacaagccagaggaggacaccttcggcgtgtccattgctgtgggcctggccgcctttgcctgtgtgctgctggtggtgctgtttgtgatgatcaacaagtatggccgccgcagcaagtttggcatgaagggccctgtggccgtcatcagcggggaggaggacagcgccagccccctgcaccacatcaaccacggcatcaccacccccagcagcctggatgctggccctgacacagtggtgattggcatgacccgcatccctgtgattgagaacccccagtacttccggcagggccacaactgccacaagccagacacctgggtgttcagcaacatcgacaaccacggcatcctgaacctgaaggacaacagagaccacctggtgcccagcacccactacatctatgaggagcctgaggtgcagagcggggaggtgtcctaccccaggagccacggcttccgggagatcatgctgaaccccatcagcctgcccggccacagcaagcccctgaaccacggcatctacgtggaggatgtgaatgtgtacttcagcaagggccgccacggcttctag

SEQ ID NO: 22518 - DNA, 1839 bp, Artificial Sequence
  derived and/or modified sequence
atggacgtgagcctgtgccccgccaagtgcagcttctggcggatcttcctgttgggaagtgtgtggcttgattacgtcggttcagtgctcgcctgccctgcgaattgcgtctgttctaaaaccgagatcaactgccgcaggccagatgatgggaacctgttccccttgttagagggtcaggatagcggtaattctaacggaaatgcttcaatcaatatcaccgacatttcgcgtaacatcacctctatccacatcgagaattggcgatcgctgcatactttgaacgccgtggatatggagttatatacaggactgcagaaacttacgattaaaaattccgggctgaggagcatccaaccacgcgcctttgctaagaaccctcacctccggtatatcaacctgtcctcaaaccggctgaccacgcttagctggcaactattccagactctctcacttagagaactgcagctagagcagaactttttcaattgttcttgtgatatacgctggatgcagctgtggcaggaacagggcgaggcaaaacttaactcccagaatctctactgtattaacgccgatggaagtcaactgccacttttcaggatgaatatctcacagtgcgacctcccagaaatctctgtttcgcatgtgaatctcacagtgcgcgagggtgacaacgcagttatcacttgcaacggatcgggtagccctcttcccgacgttgattggattgtgacaggcctacagagcattaacacacaccagactaatttgaactggacaaacgtacacgccattaatttaaccctagtgaacgtaacgtctgaagacaacggatttactctcacatgtatcgctgagaatgtggtaggtatgtctaacgcatccgtggctctaactgtatactatccccctcgcgtggtaagcttggaagagcccgagttacggctggaacactgtatagagtttgtcgtgcgaggcaacccgccaccaacgctgcattggctgcacaatgggcagccacttcgggagagcaaaattattcacgtggagtactatcaagaaggtgaaatcagcgaagggtgtctgctgtttaataagccaactcactacaacaatggtaactataccctgatcgccaagaatcctctgggcacagcgaatcagaccattaatgggcatttcttgaaggaaccctttccagagagcactgacaatttcattctgtttgatgaggtgtcaccaactcctccaataacagtcacccacaagcctgaggaagatacctttggcgtctctatagccgttggactggctgcgttcgcatgtgtgctgctcgtggtgctgtttgttatgattaacaagtacgggcggagatcaaaattcggcatgaaaggtccagtcgccgtgatcagtggtgaagaggactccgcatctccccttcaccatattaaccacggaatcacaactccctcatccttggatgccggaccagatacggtcgtcatcggcatgaccaggatacccgttatagaaaatccacaatacttccgccagggccataattgtcacaagcccgacacttgggtgttcagcaacatcgataaccatggcatcctgaacctgaaagacaatcgggaccatttggtgccttccacacactatatctacgaagagcctgaagtccagagcggggaagttagctatccgcgctctcatggatttcgggaaatcatgcttaatccgatctccttacccggacactccaaacctctcaaccacgggatttacgttgaggatgtaaacgtgtacttttccaaaggcagacacggtttttag

SEQ ID NO: 22519 - DNA, 1839 bp, Artificial Sequence
  derived and/or modified sequence
atggacgtgagcctgtgccccgccaagtgcagcttctggcggatctttcttttaggatcggtctggctcgattacgttggatcggtactcgcgtgccctgctaattgcgtatgcagcaagactgagattaactgtcgaagacctgatgatgggaaccttttccccctgcttgagggccaggatagtggaaacagtaatggcaacgcgtctatcaacataacagacatctcccgaaacatcacgagcatacacatcgagaactggagaagcttgcacacactcaatgccgtggatatggaactgtacactggcttgcagaagcttaccatcaaaaacagtgggctacggagtattcagcctagagcattcgcaaagaatccacacctgaggtacattaatttaagctctaaccggctgacaactctctcttggcagttgttccagacactttcgcttagggagctacaattggaacaaaatttctttaactgttcatgcgacattcggtggatgcagctgtggcaggagcagggtgaagctaagctgaactctcaaaacctgtattgcatcaacgccgacggctctcaattgcccttgttccggatgaacatatcccagtgtgatctgccagagatttcagtctcccacgtaaacttgactgtgcgggagggcgataacgctgttatcacgtgtaatggttcaggcagccctttgccagacgttgactggatcgtaaccggcttgcagtcaattaacacccaccagacaaatctgaactggacaaatgtgcacgctatcaacttaacactggtcaatgtgactagcgaggacaacggattcaccctgacatgtattgccgagaacgttgtggggatgagcaatgcatctgtcgcactgacagtttactatcccccccgcgtggtgagcctcgaggaaccagagctgcgtctggaacattgcatcgaattcgtggtgaggggaaatcccccaccaacgctgcactggctgcacaatggacagcctctgcgcgagtcaaaaattatccatgttgaatactatcaggaaggagagatttctgaggggtgcctgctttttaataagccaacgcactacaataatggtaattacacactcatcgctaaaaacccactgggcaccgctaatcagacaattaatgggcatttcctgaaggaaccgttccccgaaagtaccgataattttatcctgttcgacgaggtgtcccccacaccccctatcaccgtcacacataagcccgaggaggacacgtttggggtctcaattgcggtgggactcgccgccttcgcctgcgtcctgctcgtagtgctttttgtgatgatcaacaagtacggccgccgctcaaaatttggcatgaaaggcccagttgctgtcatctctggcgaggaggactctgcctcccctctgcatcatattaaccacggtattacaaccccctcctcacttgacgccggtcccgacaccgtcgttatcggaatgacccggatacccgtcatcgagaatccacagtacttccggcaggggcacaattgccataagcccgacacctgggtgttctcgaatatagataatcacggcatccttaatctgaaggataacagggatcatctggttccgtcaacccactatatttatgaggagccagaggtccagtccggcgaggtatcctacccccggtcccacgggttcagagagatcatgcttaatcctatctcactcccagggcacagcaagcccctgaatcatggcatatatgttgaggatgtcaacgtatatttttccaagggcagacacggcttctag

SEQ ID NO: 22520 - DNA, 3979 bp, Artificial Sequence
  derived and/or modified sequence
gatcgccgagccggccaccatgcccggcagaccgcgccactaggcgctcctcgcggctcccacccggcggcggcggcggcggcggcggcgtccgcgatggtttcagacgctgaaggattttgcatctgatcgctcggcgtttcaaagaagcagcgatcggagatggatgtctctctttgcccagccaagtgtagtttctggcggattttcttgctgggaagcgtctggctggactatgtgggctccgtgctggcttgccctgcaaattgtgtctgcagcaagactgagatcaattgccggcggccggacgatgggaacctcttccccctcctggaagggcaggattcagggaacagcaatgggaacgccagtatcaacatcacggacatctcaaggaatatcacttccatacacatagagaactggcgcagtcttcacacgctcaacgccgtggacatggagctctacaccggacttcaaaagctgaccatcaagaactcaggacttcggagcattcagcccagagcctttgccaagaacccccatttgcgttatataaacctgtcaagtaaccggctcaccacactctcgtggcagctcttccagacgctgagtcttcgggaattgcagttggagcagaactttttcaactgcagctgtgacatccgctggatgcagctctggcaggagcagggggaggccaagctcaacagccagaacctctactgcatcaacgctgatggctcccagcttcctctcttccgcatgaacatcagtcagtgtgaccttcctgagatcagcgtgagccacgtcaacctgaccgtacgagagggtgacaacgctgttatcacttgcaatggctctggatcaccccttcctgatgtggactggatagtcactgggctgcagtccatcaacactcaccagaccaatctgaactggaccaatgttcatgccatcaacttgacgctggtgaatgtgacgagtgaggacaatggcttcaccctgacgtgcattgcagagaacgtggtgggcatgagcaatgccagtgttgccctcactgtctactatcccccacgtgtggtgagcctggaggagcctgagctgcgcctggagcactgcatcgagtttgtggtgcgtggcaaccccccaccaacgctgcactggctgcacaatgggcagcctctgcgggagtccaagatcatccatgtggaatactaccaagagggagagatttccgagggctgcctgctcttcaacaagcccacccactacaacaatggcaactataccctcattgccaaaaacccactgggcacagccaaccagaccatcaatggccacttcctcaaggagccctttccagagagcacggataactttatcttgtttgacgaagtgagtcccacacctcctatcactgtgacccacaaaccagaagaagacacttttggggtatccatagcagttggacttgctgcttttgcctgtgtcctgttggtggttctcttcgtcatgatcaacaaatatggtcgacggtccaaatttggaatgaagggtcccgtggctgtcatcagtggtgaggaggactcagccagcccactgcaccacatcaaccacggcatcaccacgccctcgtcactggatgccgggcccgacactgtggtcattggcatgactcgcatccctgtcattgagaacccccagtacttccgtcagggacacaactgccacaagccggacacgtgggtcttttcaaacatagacaatcatgggatattaaacttgaaggacaatagagatcatctagtcccatcaactcactatatatatgaggaacctgaggtccagagtggggaagtgtcttacccaaggtcacatggtttcagagaaattatgttgaatccaataagccttcccggacattccaagcctcttaaccatggcatctatgttgaggatgtcaatgtttatttcagcaaaggacgtcatggcttttaaaaactccttttaagcctccttgttttgatgtcaccttggtaggctgggccctctgagaggttggaagctctaggcattgttctctttggatccagggatgctaagtagaaactgcatgagccaccagtgccccggcaccctttaacaccaccagatgggtgttttcccccatccaccactggcagggttgccccttccctccaatcatcactgtgctccttttttcccggcctacgaggcagctcctgccactatctttagagccaataaagagaattaaaaacctgtgcaccaggagcatcttttaaatacactagccattctcttgctttacaaaaacaacctaaccatcacaagaaagcctgatgaagtccagccgtgctccagcctcactttccctgcttggaagcgtggggtctccctggctctcccaggataccatgctgtcctcttagtgacctcgtcgccctgcaacctccagtggggaagagtcacagagagcacctaagcagaggtggagacggcgcggtaagaggagggggagccaggctcaagtattggcaccaagttaggtctcagaggaaagaatggaaaccaatcactttacatttttatttttattttcggtggaaaaatcatccttttttgggacatacttgccccctacttcctcttctctctggaacggctcacaatgagtgtgacattagaaaactccttgcagaggagagtttctccaggctcttcctgggcccttagatctgcagttccgacaagctttggctgcaggaggttttacccatgaactggccatcctactaggaccacaagggaccaagggaatcagggacaaaggcccttcctgccagcccatgatcccgggattggctctcttcccctacttccacttattcttgactctgagaacttttggaacccaatggaatcagcatttcaaggtcaagatgaactgaaggggaagagaagtaaaacttggcctcctccagcccctctcatggcaccaatggaagtgtcctcctgttctctggtcaatatgtgtgtttactttgcttgctttgactcatgccttactccatggccaccctctcccaaagagggggctcgcttcccccattttcaacttgatccactgaggagagggaagggggtgactttcccttcttcagtaggaaaggcacatttgtagggcctgaaactctcccgtatttgctgactcattggtggagtagacttctggctcccagctccactggcccatggggcctccattgtatgaagtcagcataggctgcccacctaatggtggagagcatgaaactgggagcatcctgtggggggcttgtgggggaaaaaggtggttgttttaacccaccgttgttttggggtggtgttgcacactagtagagaatagagtctatgcctttggcaaatttaactgggagtttggattcccacttaagggttttacttcttgggtcctgtggatggtggttcttcgtgtcaggatcccagcccgattctgcaaatgcctccatggggtttaaaaacatgaggctttccaagttcttgcccagtatctggggcagcctccagagtatcacctgggagttcaggttctctccagggctccaggtgtgtgtttatctcgccccctccagctctcctcatcctgctccccattgctccatgtcaggctgttccccattgtgccctgctgatgctttgggtccagggcctcctcccaagtgtggctttaaggagtaagcttgaggatgatgttttttaattattgtaaatcattacctcatttccagcctcccaggctccatccatcccagcatcttttattctgccattttcctcaccttgtgctatgacaatggggcgttgtgtttccacagagacttataggagtgttcagtgtatagtttcttaataaacactttattttctaatg

SEQ ID NO: 22521 - DNA, 2123 bp, Artificial Sequence
  derived and/or modified sequence
tcggagatggatgtctctctttgcccagccaagtgtagtttctggcggattttcttgctgggaagcgtctggctggactatgtgggctccgtgctggcttgccctgcaaattgtgtctgcagcaagactgagatcaattgccggcggccggacgatgggaacctcttccccctcctggaagggcaggattcagggaacagcaatgggaacgccagtatcaacatcacggacatctcaaggaatatcacttccatacacatagagaactggcgcagtcttcacacgctcaacgccgtggacatggagctctacaccggacttcaaaagctgaccatcaagaactcaggacttcggagcattcagcccagagcctttgccaagaacccccatttgcgttatataaacctgtcaagtaaccggctcaccacactctcgtggcagctcttccagacgctgagtcttcgggaattgcagttggagcagaactttttcaactgcagctgtgacatccgctggatgcagctctggcaggagcagggggaggccaagctcaacagccagaacctctactgcatcaacgctgatggctcccagcttcctctcttccgcatgaacatcagtcagtgtgaccttcctgagatcagcgtgagccacgtcaacctgaccgtacgagagggtgacaacgctgttatcacttgcaatggctctggatcaccccttcctgatgtggactggatagtcactgggctgcagtccatcaacactcaccagaccaatctgaactggaccaatgttcatgccatcaacttgacgctggtgaatgtgacgagtgaggacaatggcttcaccctgacgtgcattgcagagaacgtggtgggcatgagcaatgccagtgttgccctcactgtctactatcccccacgtgtggtgagcctggaggagcctgagctgcgcctggagcactgcatcgagtttgtggtgcgtggcaaccccccaccaacgctgcactggctgcacaatgggcagcctctgcgggagtccaagatcatccatgtggaatactaccaagagggagagatttccgagggctgcctgctcttcaacaagcccacccactacaacaatggcaactataccctcattgccaaaaacccactgggcacagccaaccagaccatcaatggccacttcctcaaggagccctttccagagagcacggataactttatcttgtttgacgaagtgagtcccacacctcctatcactgtgacccacaaaccagaagaagacacttttggggtatccatagcagttggacttgctgcttttgcctgtgtcctgttggtggttctcttcgtcatgatcaacaaatatggtcgacggtccaaatttggaatgaagggtcccgtggctgtcatcagtggtgaggaggactcagccagcccactgcaccacatcaaccacggcatcaccacgccctcgtcactggatgccgggcccgacactgtggtcattggcatgactcgcatccctgtcattgagaacccccagtacttccgtcagggacacaactgccacaagccggacacgtgggtcttttcaaacatagacaatcatgggatattaaacttgaaggacaatagagatcatctagtcccatcaactcactatatatatgaggaacctgaggtccagagtggggaagtgtcttacccaaggtcacatggtttcagagaaattatgttgaatccaataagccttcccggacattccaagcctcttaaccatggcatctatgttgaggatgtcaatgtttatttcagcaaaggacgtcatggcttttaaaaactccttttaagcctccttgttttgatgtcaccttggtaggctgggccctctgagaggttggaagctctaggcattgttctctttggatccagggatgctaagtagaaactgcatgagccaccagtgccccggcaccctttaacaccaccagatgggtgttttcccccatccaccactggcagggttgccccttccctccaatcatcactgtgctccttttttcccggcctacgaggcagctcctgccactatctttagagccaataaagagaatt

SEQ ID NO: 22522 - DNA, 1839 bp, Artificial Sequence
  derived and/or modified sequence
atggatgtatcactttgcccggctaagtgtagcttctggcgcatcttcctcctcggtagcgtgtggctcgattacgtggggagcgtcctagcctgcccagctaattgcgtctgctctaagactgagatcaactgtagaagaccggatgacggtaatctgttccccctcctggaggggcaggacagtggtaactctaatggaaacgcatctattaacattacagatataagcagaaacataactagtatccacatcgaaaattggagaagcctgcatactcttaacgccgtcgatatggagctctacaccggcctccaaaagctcaccataaagaattccgggttgagaagcatccagcctcgggcattcgctaagaatcctcaccttcgctacatcaatttgtcgagcaatcgcctgacaaccctgagctggcagctgttccagacccttagcttgagagaattgcagcttgaacaaaattttttcaactgctcatgcgatatccgctggatgcagttatggcaggaacaaggagaagccaaactgaactcacagaacttgtactgtatcaacgcagacggctcccagctaccattgtttcggatgaacatcagtcagtgtgatctccccgaaatctccgtctcccacgtgaatctgacagtcagggagggcgacaacgctgtgatcacatgcaatggctctggatccccactgcccgatgtggattggatcgttaccggtctgcagtccattaacacgcaccagacaaacctcaactggaccaacgtgcatgcaataaacctcacactggtgaatgttacctctgaggacaatggctttaccctgacttgcatcgcagaaaacgttgtagggatgtctaacgcttcagtggctcttaccgtctactacccgccacgcgtggtttccctggaggaacctgagctaagactggaacactgtatagaatttgtagtgcgagggaatcccccacccactttgcattggttgcacaatggccagcctctcagagagtcgaaaataatccatgtcgaatactaccaggaaggagaaatttccgaaggatgtctgctgttcaataaacccacccactataacaacggtaattacacactgatcgccaaaaatccgctgggcactgccaaccaaacaatcaatggccacttcttaaaggagccgttccctgaaagcactgacaattttattctgttcgacgaggtgagtcccacccccccaataaccgtcacacataagcccgaagaggatacgttcggagtaagtatcgcagtgggcctcgccgcttttgcctgcgtactgttagtggtgctgtttgtgatgattaacaagtacgggagaagatccaaattcggcatgaaaggtccagtagccgtgattagcggggaagaggactcggcctctccactgcaccacattaaccatgggataaccacccctagctcactcgatgcaggacctgatacagttgtgatcggcatgacaagaataccggtcatcgagaatcctcagtactttcgacaagggcataactgtcataaacccgacacctgggtcttcagtaacatcgacaaccacggcattctgaatcttaaagacaacagagaccaccttgttccatccacacattacatatacgaagagcctgaagttcagtcaggtgaagtctcctaccctcgctcccacggatttagagagataatgttgaatcccataagcctgcccggacattccaagcccttgaaccatggcatctatgttgaagacgttaacgtgtattttagcaagggcagacacggattttag

SEQ ID NO: 22523 - DNA, 1839 bp, Artificial Sequence
  derived and/or modified sequence
atggacgtctccttgtgtcctgcaaagtgctcgttctggcgaatctttctactcgggtcagtgtggctggactacgtaggctctgtgctggcgtgccctgctaactgcgtgtgcagcaagacagagatcaattgccgccgacccgacgacgggaatctgttccccctgctcgagggtcaggattctggtaatagcaatggtaacgcatctatcaacattacagacattagtcggaatattacgagcattcatatcgagaattggagatccttacatactctcaacgcggtggacatggagctgtacaccgggctgcagaaattgacaatcaaaaatagcggcctgagaagtattcagcctagagcctttgctaagaaccctcacctcagatacataaacctttcctccaaccgtctgaccacattgagctggcagctgtttcagactctcagccttagagaattacaactggaacagaatttcttcaactgctcctgcgatattcggtggatgcagctctggcaggagcaaggcgaagctaaactgaacagccaaaacctatattgtatcaatgctgacgggagccagttgcctctttttcgcatgaatatttctcagtgtgaccttcccgaaatcagcgtctctcatgttaacctgaccgtcagggagggagataacgctgtaattacatgtaatgggtctgggagcccactgcctgacgtagactggatcgttaccgggctccagtccatcaatactcatcaaactaacctgaattggaccaacgttcatgcgatcaatttaacattggtcaacgtcacttcggaggataatggttttaccctcacatgcatcgccgagaatgtggtcggtatgagcaacgccagcgtagctctgactgtctactacccacctagagttgtttctctcgaggagcctgagctaagattggaacattgcatcgagttcgtcgtgcggggtaacccacctcccactttgcattggctgcacaatgggcagcccttgcgggaatcaaagattattcacgtggaatattaccaggagggagagattagcgaggggtgtctgctttttaataagccaacacattataataacggcaactacacactgatagctaaaaacccattggggactgccaatcagactatcaacggacattttttaaaggagccgttccccgagtcaactgacaactttatcctctttgatgaagtaagccccacaccccctatcacagtgacacataaacctgaggaagatacgttcggggtcagcattgccgttggactcgcggctttcgcctgcgtgctgttagtggtgttgtttgttatgatcaataagtacggtcgaagaagtaagtttggcatgaaggggcctgtagcagtcatttctggcgaggaagacagtgcctctcctttgcatcacatcaaccacggaataacaacgccaagctccctggatgcaggtcctgacacagtggttatcgggatgacccgcattcctgtaatagaaaacccacagtactttcgtcaaggtcacaattgtcacaagccagatacatgggtgttttccaacattgataaccatggcatccttaatcttaaagacaatcgggatcaccttgttccttcaacccattacatttatgaggagccagaagtgcagtccggagaggtcagctaccccagatctcatggctttagggagataatgcttaaccccatttcacttccagggcacagtaagcccctgaaccacggaatctacgtcgaagatgttaatgtgtacttcagcaaaggccgtcacggcttttag

SEQ ID NO: 22524 - DNA, 1839 bp, Artificial Sequence
  derived and/or modified sequence
atggacgtgagcctgtgccccgccaagtgcagcttctggagaatcttcctgctgggcagcgtgtggctggactacgtgggcagcgtgctggcctgccccgccaactgcgtgtgcagcaagaccgagatcaactgcagaagacccgacgacggcaacctgttccccctgctggagggccaggacagcggcaacagcaacggcaacgccagcatcaacatcaccgacatcagcagaaacatcaccagcatccacatcgagaactggagaagcctgcacaccctgaacgccgtggacatggagctgtacaccggcctgcagaagctgaccatcaagaacagcggcctgagaagcatccagcccagagccttcgccaagaacccccacctgagatacatcaacctgagcagcaacagactgaccaccctgagctggcagctgttccagaccctgagcctgagagagctgcagctggagcagaacttcttcaactgcagctgcgacatcagatggatgcagctgtggcaggagcagggcgaggccaagctgaacagccagaacctgtactgcatcaacgccgacggcagccagctgcccctgttcagaatgaacatcagccagtgcgacctgcccgagatcagcgtgagccacgtgaacctgaccgtgagagagggcgacaacgccgtgatcacctgcaacggcagcggcagccccctgcccgacgtggactggatcgtgaccggcctgcagagcatcaacacccaccagaccaacctgaactggaccaacgtgcacgccatcaacctgaccctggtgaacgtgaccagcgaggacaacggcttcaccctgacctgcatcgccgagaacgtggtgggcatgagcaacgccagcgtggccctgaccgtgtactacccccccagagtggtgagcctggaggagcccgagctgagactggagcactgcatcgagttcgtggtgagaggcaaccccccccccaccctgcactggctgcacaacggccagcccctgagagagagcaagatcatccacgtggagtactaccaggagggcgagatcagcgagggctgcctgctgttcaacaagcccacccactacaacaacggcaactacaccctgatcgccaagaaccccctgggcaccgccaaccagaccatcaacggccacttcctgaaggagcccttccccgagagcaccgacaacttcatcctgttcgacgaggtgagccccaccccccccatcaccgtgacccacaagcccgaggaggacaccttcggcgtgagcatcgccgtgggcctggccgccttcgcctgcgtgctgctggtggtgctgttcgtgatgatcaacaagtacggcagaagaagcaagttcggcatgaagggccccgtggccgtgatcagcggcgaggaggacagcgccagccccctgcaccacatcaaccacggcatcaccacccccagcagcctggacgccggccccgacaccgtggtgatcggcatgaccagaatccccgtgatcgagaacccccagtacttcagacagggccacaactgccacaagcccgacacctgggtgttcagcaacatcgacaaccacggcatcctgaacctgaaggacaacagagaccacctggtgcccagcacccactacatctacgaggagcccgaggtgcagagcggcgaggtgagctaccccagaagccacggcttcagagagatcatgctgaaccccatcagcctgcccggccacagcaagcccctgaaccacggcatctacgtggaggacgtgaacgtgtacttcagcaagggcagacacggcttctag

SEQ ID NO: 22525 - protein, 256 aa, Artificial Sequence
  derived and/or modified sequence
MQAVVPLNKMTAISPEPQTLASTEQNEVPRVVTSGEQEAILRGNAADAESFRQRFRWFCYSEVAGPRKALSQLWELCNQWLRPDIHTKEQILELLVFEQFLTILPGEIRIWVKSQHPESSEEVVTLIEDLTQMLEEKDPVSQDSTVSQEENSKEDKMVTVCPNTESCESITLKDVAVNFSRGEWKKLEPFQKELYKEVLLENLRNLEFLDFPVSKLELISQLKWVELPWLLEEVSKSSRLDIHGAVKKMQMFSEAE

SEQ ID NO: 22526 - DNA, 2434 bp, Artificial Sequence
  derived and/or modified sequence
gcaggcgcagtggtccccgcaggcttgcgcgcgcactcgctgcgggacaagcttctggaagctctttgcggtggcgttggtgctgtttgcggatgctgatgcagtttctgcaggactgtaaactggattcctggaacctttgatattcctggctgtgtatagtgcctgttggtggactgtactgatactcaactagagtgtgaagggactggattcctgcccctgagacacaatgcaagctgtagtgcccttgaacaagatgacagccatctcaccagaacctcaaactctggcctcgactgaacaaaatgaggtcccaagagtggttacttctggggaacaagaagctattttaagaggaaatgctgctgatgcagagtctttcagacagaggtttaggtggttttgttactcagaagtagctggacccaggaaagctctgagtcaactctgggagctctgcaatcagtggctgagaccagacattcacacgaaagaacagattttagagcttctggtgtttgagcagttcctgaccattttgcctggggagatcaggatttgggtaaagtcacaacatcctgagagtagtgaggaagtggtgaccctaatagaagatttgacccagatgcttgaagaaaaagatccagtctctcaagattctactgtttcccaagaggagaactcaaaagaggataaaatggtcactgtttgtcccaatactgagtcctgtgaatctataacattgaaggatgtagctgtgaacttttcaagaggagagtggaagaagctggagccttttcaaaaggagctatataaggaagtgctactggaaaacctcaggaacctagaatttctggactttccagtttcaaaattagagttgatttcccagctaaagtgggttgaattgccatggctgctggaagaagtctcaaaaagctcccgactagacatacatggagcagtaaaaaagatgcagatgttctctgaggctgaataagaccatgctctgccttcttgtttcaactgttacacagagatgaccagaggatggggccactgcagtgcagttcaagaggctctggttcggggaagagctggatggagtatgaatcccaactctgggggtattagctagtggagtggccataggcaagttacttaacacttctgaacctccttttgtctttcataaaataaaagctactaggatgagttgttttaaggatttcagattatagtctatgtgagatatgtgcaaacatgtacatatttcccctagaagcaatggttttcagccttggtggtgaccttatagaacataaatattgtgaataatgaaaatccactgaatctaataagggacttgtatcggtaagatgtaaagaactcttggccaggtgtggtggctcatgcctataatcccagcactttgggaggccaaggcaggtggatcacctgaggtcaggagttcgagaccaacctggccaacatgacgaaactccgtctctatttaaaatacaaaaattagctgggcatggtggtgcatgcctgtaatcccagctactcgggaggctgaggcaggagaatcacttgaactcgggaggtggaggttgcagtgagccaagatcgcgccactgcactccagcctggatgacagagcaaaaaactgtctcaaaaaaaaaaaaaatcttacaacctcacaaataacctagttcaaaaatgggcaaagattttgaacagatatttctccaaagaagatatacaaatggcaaatacatacgttgaaagatccttaatattgttagccatagggaaatgcaagtcaaactcaaatcagaatgaaatatcacttcaaacctactaggatggttataataaaaaagacagacaatagcacgtgttggtgagtatgtagagaagttggaaccctcatacactgcttgtgggaatgtaaagtactgtagccactttgcaaaacagtttgacagctcctcaaaatgttaaacatgaaattatcatatgacccagcaattctactcataggtatatacttaaaagaaatgaaaaatccacacaaaaacctctgcatgaatgttcatagtaacattatacttcatagccagaaagtataagctaatacccatcaggctgggtgtggtggctcacgcctgtaatcctagcactttgggaggccgagttgggaggtttgcttgagcccaggagttccagaccagcctgggcaacatggcgaaaccccatctctactaaaaatataaaaattagttgcgtgtggtggcacatccctatagtcccagctacttgggaggctgaggtggaaggactgcttgagcgagggaggtcgaggctgcagtgagccacgatcacaccactgcactccagcctaggtgacagagtgagatcctgtctc

SEQ ID NO: 22527 - DNA, 735 bp, Artificial Sequence
  derived and/or modified sequence
atgcaggccgtggtgcccctgaacaagatgaccgccatcagccccgagccccagaccctggccagcaccgagcagaacgaggtgcccagagtggtgaccagcggcgagcaggaggccatcctgagaggcaacgccgccgacgccgagagcttcagacagagattcagatggttctgctacagcgaggtggccggccccagaaaggccctgagccagctgtgggagctgtgcaaccagtggctgagacccgacatccacaccaaggagcagatcctggagctgctggtgttcgagcagttcctgaccatcctgcccggcgagatcagaatctgggtgaagagccagcaccccgagagcagcgaggaggtggtgaccctgatcgaggacctgacccagatgctggaggagaaggaccccgtgagccaggacagcaccgtgagccaggaggagaacagcaaggaggacaagatggtgaccgtgtgccccaacaccgagagctgcgagagcatcaccctgaaggacgtggccgtgaacttcagcagaggcgagtggaagaagctggagcccttccagaaggagctgtacaaggaggtgctgctggagaacctgagaaacctggagttcctggacttccccgtgagcaagctggagctgatcagccagctgaagtgggtggagctgccctggctgctggaggaggtgagcaagagcagcagactgggcagcgtgatctag

SEQ ID NO: 22528 - DNA, 771 bp, Artificial Sequence
  derived and/or modified sequence
atgcaggccgtggtgcccctgaacaagatgaccgccatcagccccgagccccagaccctggccagcaccgagcagaacgaggtgcccagagtggtgaccagcggcgagcaggaggccatcctgagaggcaacgccgccgacgccgagagcttcagacagagattcagatggttctgctacagcgaggtggccggccccagaaaggccctgagccagctgtgggagctgtgcaaccagtggctgagacccgacatccacaccaaggagcagatcctggagctgctggtgttcgagcagttcctgaccatcctgcccggcgagatcagaatctgggtgaagagccagcaccccgagagcagcgaggaggtggtgaccctgatcgaggacctgacccagatgctggaggagaaggaccccgtgagccaggacagcaccgtgagccaggaggagaacagcaaggaggacaagatggtgaccgtgtgccccaacaccgagagctgcgagagcatcaccctgaaggacgtggccgtgaacttcagcagaggcgagtggaagaagctggagcccttccagaaggagctgtacaaggaggtgctgctggagaacctgagaaacctggagttcctggacttccccgtgagcaagctggagctgatcagccagctgaagtgggtggagctgccctggctgctggaggaggtgagcaagagcagcagactggacatccacggcgccgtgaagaagatgcagatgttcagcgaggccgagtag

SEQ ID NO: 22529 - DNA, 537 bp, Artificial Sequence
  derived and/or modified sequence
atgcaggccgtggtgcccctgaacaagatgaccgccatcagccccgagccccagaccctggccagcaccgagcagaacgaggtgcccagagtggtgaccagcggcgagcaggaggccatcctgagaggcaacgccgccgacgccgagagcttcagacagagattcagatggttctgctacagcgaggtggccggccccagaaaggccctgagccagctgtgggagctgtgcaaccagtggctgagacccgacatccacaccaaggagcagatcctggagctgctggtgttcgagcagttcctgaccatcctgcccggcgagatcagaatctgggtgaagagccagcaccccgagagcagcgaggaggtggtgaccctgatcgaggacctgacccagatgctggaggagaagggcgagatctacagatggagagaggaggccggcgacatcgccagcaagagcgagagcaagttcctgaagagaagacagttcaccgccaaggaggagagcgaggtgagaagctgggactgggtgtag

SEQ ID NO: 22530 - DNA, 735 bp, Artificial Sequence
  derived and/or modified sequence
atgcaggctgtggtgcccctaaataagatgactgcaatttccccggagccacaaactctcgcttccactgagcagaacgaggtaccacgagttgtcacctcgggggaacaggaagccatactgaggggtaatgccgcagatgctgaaagctttagacaaagattcagatggttttgctattcagaagtggcaggaccccgtaaggctctctcccagctctgggaactgtgcaatcaatggttgagacctgatattcacactaaagagcagatcctagagttgcttgtgtttgagcagttcctcaccatcttgccgggcgagatcagaatctgggtcaagagtcagcatcctgagtcgagcgaagaggtcgtaaccttaatagaggacctaacccagatgctggaggagaaagaccctgtcagccaggactccacagtaagccaagaggagaactccaaggaggacaaaatggtaacagtgtgtccaaataccgaatcctgtgaatcaattacgttaaaagacgtcgccgtcaatttctcaaggggagagtggaaaaaattagaacctttccaaaaggagctctataaggaagtgttgctggagaatcttcgcaacctcgagttcttagattttcccgtgtcgaagctggagttaatctctcagttaaaatgggtagagttgccgtggttgttggaagaagtttctaaatcgtctcggctcggatccgttatttag

SEQ ID NO: 22531 - DNA, 771 bp, Artificial Sequence
  derived and/or modified sequence
atgcaggctgttgtaccactaaacaagatgacggcaatttctcctgagccacagacgcttgcatccaccgagcagaacgaggttcccagagtcgtcacatctggcgagcaggaagctatattgcgggggaacgctgcagatgccgagtcgtttcggcagcgattcaggtggttttgttattcagaggtggctggcccccgaaaagcactcagtcagttgtgggagctctgcaaccagtggttgagaccggacatccacaccaaggaacagatcctggagttgctggtctttgaacagttcctgacaattttgccaggcgaaataaggatctgggtcaaatcacagcaccccgagagctcggaggaagtcgtgacgttgatagaggatctgacacagatgctcgaggaaaaagacccagtgagccaagacagcactgtgagccaagaggagaactctaaagaagataagatggtgacggtgtgtccaaacaccgagtcatgtgagagtatcactttaaaagacgtggctgtgaatttttcccggggcgaatggaagaagctggagccctttcagaaggaactttacaaggaggtcctcttagagaacctgagaaatctcgaattcctcgactttcccgtatccaagctggagttgatttcccagctaaaatgggttgagttaccctggttgctcgaggaggtctcaaaaagttccagactggatatccatggcgcagtgaagaagatgcagatgttttcagaggccgagtag

SEQ ID NO: 22532 - DNA, 537 bp, Artificial Sequence
  derived and/or modified sequence
atgcaggccgtagttccattgaataaaatgacagccattagtccggagccacagacactcgcgtccaccgaacaaaacgaggttccccgtgtcgtgacaagtggggagcaggaggcgattctacggggtaatgcagcagacgccgagtcattccggcagcgattccgatggttctgctactccgaggtggccggtcctcggaaggcactgagccagctgtgggaactttgtaatcaatggctcaggcctgacattcatactaaggaacagatccttgagttgcttgtctttgagcagttcctaacaattctgccaggtgagatcagaatctgggttaagagtcagcaccccgagtcctccgaagaggtggtgactctcatcgaagaccttactcagatgcttgaggagaaaggcgagatctatcggtggcgtgaagaggcaggagacatagcaagtaagagcgagtcaaaattcctcaaaaggcgccaattcacggctaaggaggaatccgaagtgcgcagttgggactgggtgtag

SEQ ID NO: 22533 - DNA, 735 bp, Artificial Sequence
  derived and/or modified sequence
atgcaggccgtggtgcccctgaacaagatgacagccatcagccctgagccccagaccctggccagcacagagcagaatgaggtgccccgggtggtgaccagcggggagcaggaggccatcctgcggggaaatgctgctgatgctgagagcttccggcagcgcttccgctggttctgctacagcgaggtggccggccccaggaaggccctgagccagctgtgggagctgtgcaaccagtggctgcggccagacatccacaccaaggagcagatcctggagctgctggtgtttgagcagttcctgaccatcctgcctggagagatccgcatctgggtgaagagccagcaccctgagagcagcgaggaggtggtgaccctgattgaggacctgacccagatgctggaggagaaggaccctgtgtcccaggacagcacagtgtcccaggaggagaacagcaaggaggacaagatggtgacagtgtgccccaacacagagagctgtgagagcatcaccctgaaggatgtggccgtgaacttcagcagaggagagtggaagaagctggagcccttccagaaggagctgtacaaggaggtgctgctggagaacctgaggaacctggagttcctggacttccctgtgtccaagctggagctgatcagccagctgaagtgggtggagctgccctggctgctggaggaggtgtccaagagcagccggctgggcagcgtcatctag

SEQ ID NO: 22534 - DNA, 771 bp, Artificial Sequence
  derived and/or modified sequence
atgcaggccgtggtgcccctgaacaagatgacagccatcagccctgagccccagaccctggccagcacagagcagaatgaggtgccccgggtggtgaccagcggggagcaggaggccatcctgcggggaaatgctgctgatgctgagagcttccggcagcgcttccgctggttctgctacagcgaggtggccggccccaggaaggccctgagccagctgtgggagctgtgcaaccagtggctgcggccagacatccacaccaaggagcagatcctggagctgctggtgtttgagcagttcctgaccatcctgcctggagagatccgcatctgggtgaagagccagcaccctgagagcagcgaggaggtggtgaccctgattgaggacctgacccagatgctggaggagaaggaccctgtgtcccaggacagcacagtgtcccaggaggagaacagcaaggaggacaagatggtgacagtgtgccccaacacagagagctgtgagagcatcaccctgaaggatgtggccgtgaacttcagcagaggagagtggaagaagctggagcccttccagaaggagctgtacaaggaggtgctgctggagaacctgaggaacctggagttcctggacttccctgtgtccaagctggagctgatcagccagctgaagtgggtggagctgccctggctgctggaggaggtgtccaagagcagccggctggacatccatggagctgtgaagaagatgcagatgttttctgaggccgagtag

SEQ ID NO: 22535 - DNA, 537 bp, Artificial Sequence
  derived and/or modified sequence
atgcaggccgtggtgcccctgaacaagatgacagccatcagccctgagccccagaccctggccagcacagagcagaatgaggtgccccgggtggtgaccagcggggagcaggaggccatcctgcggggaaatgctgctgatgctgagagcttccggcagcgcttccgctggttctgctacagcgaggtggccggccccaggaaggccctgagccagctgtgggagctgtgcaaccagtggctgcggccagacatccacaccaaggagcagatcctggagctgctggtgtttgagcagttcctgaccatcctgcctggagagatccgcatctgggtgaagagccagcaccctgagagcagcgaggaggtggtgaccctgattgaggacctgacccagatgctggaggagaagggggagatctaccgctggagggaggaggccggggacatcgccagcaagtctgagagcaagttcctgaagaggcggcagttcaccgccaaggaggagagcgaggtgcgctcctgggactgggtgtag

SEQ ID NO: 22536 - DNA, 735 bp, Artificial Sequence
  derived and/or modified sequence
atgcaggccgtggtgcccctgaacaagatgaccgccatcagccccgaaccacaaacactcgcctccaccgaacaaaatgaagtccctagagtggtgacctcaggggagcaggaggccattctgaggggcaacgccgctgatgctgagagttttcgacagaggtttcgttggttttgctattcagaagtggccggaccccgcaaggcactgtcccagctgtgggagctgtgcaaccaatggttgagaccagacatccacaccaaggagcaaatcttggagctgctggtgttcgagcagtttctcaccatccttccaggggagatcaggatttgggtgaaatctcagcacccggaatctagtgaggaagtggtcaccctgattgaggacctaacacaaatgcttgaagagaaggaccccgtgtcacaagactccaccgtgagccaggaagaaaactcaaaagaggacaagatggtgaccgtgtgcccaaatacagaaagttgcgagtccattacactgaaagacgtggccgttaatttcagcaggggcgaatggaaaaaactggaacccttccagaaagagttatacaaagaggtcctcctggagaaccttagaaacctggagttccttgatttccccgtttctaagttggaactcatcagtcagctgaaatgggtggaattaccttggctcctcgaagaagtaagcaaatcaagcagactaggaagcgtcatctag

SEQ ID NO: 22537 - DNA, 771 bp, Artificial Sequence
  derived and/or modified sequence
atgcaggccgtggtgcccctgaacaagatgaccgccatcagccccgagccacaaactctcgccagtaccgagcagaacgaagttcccagagtcgtcacctcaggggagcaggaagcaattctgaggggcaatgcagccgacgccgaatcctttcggcagcgcttccggtggttctgctactctgaggtggccgggccccgcaaagctctatcacaactctgggaactatgtaaccagtggttaaggcctgacatccacacgaaggagcagattctggagttactcgtgtttgagcaattcctcacgatactacccggggaaatcaggatctgggttaagagccagcaccccgagtccagtgaggaggtggtcacgcttatagaggacttaacccagatgttggaagagaaggacccagttagtcaggacagcacagtgtctcaagaggaaaacagcaaagaggacaaaatggtgactgtgtgtccgaacacagagtcttgtgaatcaattaccttaaaagatgtggccgtgaacttctcacggggggaatggaaaaagttggagccatttcagaaggagctgtataaggaggtgcttctggaaaatctgaggaatctggaatttcttgattttccagtgagcaagctggagctaatttctcaactcaaatgggtcgagctgccctggctgctggaggaggtgagcaaaagctcccggctggatattcatggcgcagtgaaaaagatgcagatgttttccgaagccgagtag

SEQ ID NO: 22538 - DNA, 537 bp, Artificial Sequence
  derived and/or modified sequence
atgcaggccgtggtgcccctgaacaagatgaccgccatcagccccgaacctcagacacttgcatctacagagcagaatgaggttccccgcgttgtgacatcaggagaacaggaagccatccttcgggggaacgccgccgatgccgagtcctttaggcagcgctttagatggttttgctacagcgaagtggccggcccaagaaaggccctcagtcagttgtgggagttatgtaatcagtggctaaggcccgatattcacactaaggagcagatccttgaactcctggtttttgagcagtttttaactattttgcccggcgagattcgaatctgggtcaaatcccaacatccagaaagctcagaagaagtcgtaaccttgatcgaggatcttacacaaatgctggaagaaaaaggagaaatctaccgttggcgggaggaggccggcgatatagcatccaagagtgaaagcaaattcctgaaaagaaggcaatttaccgccaaggaagagtcagaggtacggtcatgggattgggtgtag

SEQ ID NO: 22539 - DNA, 735 bp, Artificial Sequence
  derived and/or modified sequence
atgcaggccgtagttcctctgaacaaaatgacagctatctcacccgagccacagaccctggcctccacggagcagaacgaagtgccgagggtggtaacttctggggaacaggaagccatactgaggggtaacgcagcagatgcggagagtttcaggcagcggttccgatggttctgctactccgaagttgctggtccaagaaaagctctgtcccagttgtgggagctctgtaaccaatggctccggccagacatacacacgaaagaacagatattagagctgctggtgttcgagcagttccttacaatcctgccgggagaaataagaatatgggttaaatcccagcatccggagagcagtgaggaagtggtcactcttatagaggatctaactcagatgcttgaggagaaagatccagtgagtcaggactctacagtgtcccaggaggagaattccaaggaggataaaatggttacagtctgccccaatactgagtcctgtgaatcgatcacactcaaggacgtggcggtcaatttcagtaggggcgagtggaaaaaattggaaccattccagaaggaactctacaaagaggtactgctggagaacttgaggaatctggagtttttggattttcccgtctcaaaactggagctgatttctcagcttaaatgggttgaacttccgtggttgctcgaagaagtttctaagtcgtcaaggttaggttctgtgatatag

SEQ ID NO: 22540 - DNA, 771 bp, Artificial Sequence
  derived and/or modified sequence
atgcaagccgtcgtccctctcaacaaaatgactgccatcagcccggagccccaaactctggcatcgacggaacagaacgaagtgccaagggtggtgaccagcggcgagcaggaggcaattctgcggggaaatgctgctgacgccgagtccttcagacaacgtttccgttggttttgctacagtgaagtggcaggaccaaggaaggctctgagccaactgtgggagctctgcaatcagtggctccggcctgacattcatactaaagagcaaatcctagagctgctggtgtttgaacagtttttgacaatcctgcccggagaaattaggatctgggtcaaatcacaacatcctgaaagctcggaggaggtggtgacactcatcgaggacctgactcagatgctggaggagaaagacccagtctcacaggacagcaccgtatcccaggaggagaactccaaagaagacaagatggtgaccgtctgtcccaataccgaatcttgcgagagtatcacactcaaggacgtggccgtgaacttctctcgcggtgagtggaaaaagctagagcctttccagaaggagctgtataaagaagtgctgttagagaacctaaggaacctggagtttctggatttcccagtaagtaaactggagctgatcagccaactgaaatgggtggaactcccatggctgctggaggaagtatccaaaagctctcggctggacattcatggggcagtgaagaagatgcagatgttttccgaagctgaatag

SEQ ID NO: 22541 - DNA, 537 bp, Artificial Sequence
  derived and/or modified sequence
atgcaggcagtggtccccctgaacaagatgaccgccatctcacccgagccacaaacactggcctcaaccgaacagaacgaagtgccacgcgttgtaacttctggcgagcaggaggccatactgcgcggaaatgcagccgatgcagagtcttttcggcagagatttcgttggttctgctatagtgaggtcgcaggccctagaaaggcgttgtctcagctgtgggagctgtgcaatcagtggctgagaccagacattcacaccaaagaacagatcctcgagctgttggtgttcgagcagtttcttaccatattgccgggagaaataaggatttgggttaaatctcagcaccctgagtcctccgaggaagtcgtgacacttattgaggatctgacacagatgttagaggagaagggggaaatctaccgatggcgcgaggaggccggagacatcgcaagtaagagcgaaagcaagttcttaaaacgcagacaattcacagcaaaggaggaatccgaagtacggtcctgggattgggtctag

SEQ ID NO: 22542 - DNA, 1239 bp, Artificial Sequence
  derived and/or modified sequence
gcgcactcgctgcgggacaagcttctggaagctctttgcggtggcgttggtgctgtttgcggatgctgatgcagtttctgcaggactgtaaactggattcctggaacctttgatattcctggctgtgtatagtgcctgttggtggactgtactgatactcaactagagtgtgaagggactggattcctgcccctgagacacaatgcaagctgtagtgcccttgaacaagatgacagccatctcaccagaacctcaaactctggcctcgactgaacaaaatgaggtcccaagagtggttacttctggggaacaagaagctattttaagaggaaatgctgctgatgcagagtctttcagacagaggtttaggtggttttgttactcagaagtagctggacccaggaaagctctgagtcaactctgggagctctgcaatcagtggctgagaccagacattcacacgaaagaacagattttagagcttctggtgtttgagcagttcctgaccattttgcctggggagatcaggatttgggtaaagtcacaacatcctgagagtagtgaggaagtggtgaccctaatagaagatttgacccagatgcttgaagaaaaagatccagtctctcaagattctactgtttcccaagaggagaactcaaaagaggataaaatggtcactgtttgtcccaatactgagtcctgtgaatctataacattgaaggatgtagctgtgaacttttcaagaggagagtggaagaagctggagccttttcaaaaggagctatataaggaagtgctactggaaaacctcaggaacctagaatttctggactttccagtttcaaaattagagttgatttcccagctaaagtgggttgaattgccatggctgctggaagaagtctcaaaaagctcccgactaggaagtgtgatttgataaaggttcaataagagaatgaggctgggtgtggtggctcatgcctgtaatcccagcactttgggaggccaaggcaggtggatcacctgaggtcaggaattgaagaccagcctgaccaacatggagaagccccatctctactaaaaatacaaaattagctgggcgtggtggtacatgcctgtaatccaggctacttgggaggctgaggcaggagaatcgcttgaacctgggaggcagagattgcggtgagccaagatcgcacattgcatccagcctgggcaacaagagcaaaactccgtctc

SEQ ID NO: 22543 - DNA, 2433 bp, Artificial Sequence
  derived and/or modified sequence
gcaggcgcagtggttcccgcaggcttgcgcgcgcactcgctgcgggacaagcttctggaagctctttgcggtggcgttggtgctgtttgcggatgctgatgcagtttctgcaggactgtaaactggattcctggaacctttgatattcctggctgtgtatagtgcctgttggtggactgtactgatactcaactagagtgtgaagggactggattcctgcccctgagacacaatgcaagctgtagtgcccttgaacaagatgacagccatctcaccagaacctcaaactctggcctcgactgaacaaaatgaggtcccaagagtggttacttctggggaacaagaagctattttaagaggaaatgctgctgatgcagagtctttcagacagaggtttaggtggttttgttactcagaagtagctggacccaggaaagctctgagtcaactctgggagctctgcaatcagtggctgagaccagacattcacacgaaagaacagattttagagcttctggtgtttgagcagttcctgaccattttgcctggggagatcaggatttgggtaaagtcacaacatcctgagagtagtgaggaagtggtgaccctaatagaagatttgacccagatgcttgaagaaaaagatccagtctctcaagattctactgtttcccaagaggagaactcaaaagaggataaaatggtcactgtttgtcccaatactgagtcctgtgaatctataacattgaaggatgtagctgtgaacttttcaagaggagagtggaagaagctggagccttttcaaaaggagctatataaggaagtgctactggaaaacctcaggaacctagaatttctggactttccagtttcaaaattagagttgatttcccagctaaagtgggttgaattgccatggctgctggaagaagtctcaaaaagctcccgactagacatacatggagcagtaaaaaagatgcagatgttctctgaggctgaataagaccatgctctgccttcttgtttcaactgttacacagagatgaccagaggatggggccactgcagtgcagttcaagaggctctggttcggggaagagctggatggagtatgaatcccaactctgggggtattagctagtggagtggccataggcaagttacttaacacttctgaacctccttttgtctttcataaaataaaagctactaggatgagttgttttaaggatttcagattatagtctatgtgagatatgtgcaaacatgtacatatttcccctagaagcaatggttttcagccttggtggtgaccttatagaacataaatattgtgaataatgaaaatccactgaatctaataagggacttgtatcggtaagatgtaaagaactcttggccaggtgtggtggctcatgcctataatcccagcactttgggaggccaaggcaggtggatcacctgaggtcaggagttcgagaccaacctggccaacatgacgaaactccgtctctatttaaaatacaaaaattagctgggcatggtggtgcatgcctgtaatcccagctactcgggaggctgaggcaggagaatcacttgaactcgggaggtggaggttgcagtgagccaagatcgcgccactgcactccagcctggatgacagagcaaaaaactgtctcaaaaaaaaaaaaatcttacaacctcacaaataacctagttcaaaaatgggcaaagattttgaacagatatttctccaaagaagatatacaaatggcaaatacatacgttgaaagatccttaatattgttagccatagggaaatgcaagtcaaactcaaatcagaatgaaatatcacttcaaacctactaggatggttataataaaaaagacagacaatagcacgtgttggtgagtatgtagagaagttggaaccctcatacactgcttgtgggaatgtaaagtactgtagccactttgcaaaacagtttgacagctcctcaaaatgttaaacatgaaattatcatatgacccagcaattctactcataggtatatacttaaaagaaatgaaaaatccacacaaaaacctctgcatgaatgttcatagtaacattatacttcatagccagaaagtataagctaatacccatcaggctgggtgtggtggctcacgcctgtaatcctagcactttgggaggccgagttgggaggtttgcttgagcccaggagttccagaccagcctgggcaacatggcgaaaccccatctctactaaaaatataaaaattagttgcgtgtggtggcacatccctatagtcccagctacttgggaggctgaggtggaaggattgcttgagcgagggaggtcgaggctgcagtgagccacgatcacaccactgcactccagcctaggtgacagagtgagatcctgtctc

SEQ ID NO: 22544 - DNA, 800 bp, Artificial Sequence
  derived and/or modified sequence
gaagctctttgcggtggcgttggtgctgtttgcggatgctgatgcagtttctgcaggactgtaaactggattcctggaacctttgatattcctggctgtgtatagtgcctgttggtggactgtactgatactcaactagagtgtgaagggactggattcctgcccctgagacacaatgcaagctgtagtgcccttgaacaagatgacagccatctcaccagaacctcaaactctggcctcgactgaacaaaatgaggtcccaagagtggttacttctggggaacaagaagctattttaagaggaaatgctgctgatgcagagtctttcagacagaggtttaggtggttttgttactcagaagtagctggacccaggaaagctctgagtcaactctgggagctctgcaatcagtggctgagaccagacattcacacgaaagaacagattttagagcttctggtgtttgagcagttcctgaccattttgcctggggagatcaggatttgggtaaagtcacaacatcctgagagtagtgaggaagtggtgaccctaatagaagatttgacccagatgcttgaagaaaaaggtgagatttatagatggagggaggaagcgggagacattgcctcaaagtccgaaagtaaattcctcaaaagaaggcaatttactgctaaagaggagtctgaggttagaagttgggactgggtttgaatcagccctgccatttactgtgtgattttgggcaagctgtgtaaactctcagaatgtaaatatttttatctgttaaaaagggatttta

SEQ ID NO: 22545 - protein, 559 aa, Artificial Sequence
  derived and/or modified sequence
MRTTKVYKLVIHKKGFGGSDDELVVNPKVFPHIKLGDIVEIAHPNDEYSPLLLQVKSLKEDLQKETISVDQTVTQVFRLRPYQDVYVNVVDPKDVTLDLVELTFKDQYIGRGDMWRLKKSLVSTCAYITQKVEFAGIRAQAGELWVKNEKVMCGYISEDTRVVFRSTSAMVYIFIQMSCEMWDFDIYGDLYFEKAVNGFLADLFTKWKEKNCSHEVTVVLFSRTFYDAKSVDEFPEINRASIRQDHKGRFYEDFYKVVVQNERREEWTSLLVTIKKLFIQYPVLVRLEQAEGFPQGDNSTSAQGNYLEAINLSFNVFDKHYINRNFDRTGQMSVVITPGVGVFEVDRLLMILTKQRMIDNGIGVDLVCMGEQPLHAVPLFKLHNRSAPRDSRLGDDYNIPHWINHSFYTSKSQLFCNSFTPRIKLAGKKPASEKAKNGRDTSLGSPKESENALPIQVDYDAYDAQVFRLPGPSRAQCLTTCRSVRERESHSRKSASSCDVSSSPSLPSRTLPTEEVRSQASDDSSLGKSANILMIPHPHLHQYEVSSSLGYTSTREHLG

SEQ ID NO: 22546 - DNA, 1680 bp, Artificial Sequence
  derived and/or modified sequence
atgcgaaccacgaaggtctataaactagtcattcataaaaaggggtttggaggcagtgacgatgagctggtggtaaaccccaaagtattcccacatatcaagcttggggatatagttgaaatcgcccaccctaacgacgagtattcacccttgctcctgcaggtaaagagcttgaaggaagatctgcaaaaggagactatctccgtcgaccaaaccgtgacgcaggtgtttcgcctccgcccataccaagacgtgtatgtgaatgtggtggaccctaaagacgttaccctggatctggtcgagctgaccttcaaggaccagtacattggtcgcggagatatgtggagattaaaaaaatccttagtttctacatgtgcgtatattacccagaaggtggaatttgcaggcatccgagcacaagctggtgagctctgggtgaagaacgagaaggttatgtgtgggtatatttccgaggatactagagtggtcttcaggtcgacctcagcgatggtgtacatattcatccagatgtcatgtgagatgtgggacttcgatatctacggagacctctattttgaaaaagccgtgaatggttttctggccgatctgttcaccaaatggaaagagaagaactgctcccacgaagtcaccgtggtactgttctctcgcaccttttacgacgccaaatctgtcgatgagttcccggaaatcaatagagccagtattcgccaagatcataaagggagattttatgaagatttctacaaagtggtggtccaaaatgaacgaagagaagagtggacttctttgttagtgactatcaaaaagctgtttattcagtacccagtcttggtgcgcctcgaacaggcagaagggtttccccagggggacaattcgacatcagcccaaggcaattacctcgaggcgatcaatctatccttcaacgttttcgataaacactatatcaacaggaattttgaccggactggacaaatgtctgtcgttatcactccaggggtgggggtctttgaggtggatcgcttattgatgatccttactaagcagcgcatgatcgacaacggcattggtgttgacctggtctgtatgggcgaacaacccctccacgctgttcccctctttaaactgcacaatcgatccgctcctcgcgattccagattgggggacgattacaatatcccccattggataaaccattccttctatacttctaaaagccagcttttctgcaactcttttacccccaggatcaaactggctggcaagaagcctgcgtccgaaaaggctaagaatggccgggatacgtcactgggcagtccaaaggagtcggagaatgcactgcccattcaggtggattatgacgcctacgacgcacaggtgtttcgcctaccaggccctagtagagcccagtgtctgaccacatgtcgcagtgtacgggagcgcgaaagccattcccggaaaagtgccagctcctgtgatgttagcagtagtccctcactgccctctagaactctcccaacggaggaggtgcgctcacaggcatcggatgatagctccctgggtaaaagcgccaatatccttatgatacctcacccccatctccatcaatatgaggtgagcagttctctgggttacacgtccactcgcgaacatctaggatag

SEQ ID NO: 22547 - DNA, 138 bp, Artificial Sequence
  derived and/or modified sequence
atgagaacaactaaggtttataagctggtcatacacaaaaagggtttcggcggtagcgatgatgagcttgtggtgaaccccaaggtcttcccccacatcaaactgggagatatcgttgagattgctcacccgaattag

SEQ ID NO: 22548 - DNA, 1680 bp, Artificial Sequence
  derived and/or modified sequence
atgaggaccaccaaggtgtacaagctggtgatccacaagaagggctttggaggcagtgatgatgagctggtggtgaaccccaaggtgttcccccacatcaagctgggggacatcgtggagatcgcccaccccaatgatgagtacagccccctgctgctgcaggtgaagagcctgaaggaggacctgcagaaggagaccatctctgtggaccagacagtgacccaggtgttccggctgcggccctaccaggatgtgtatgtgaatgtggtggaccccaaggatgtgaccctggacctggtggagctgaccttcaaggaccagtacatcggccgcggggacatgtggaggctgaagaagagcctggtgtccacctgtgcctacatcacccagaaggtggagtttgctggcatccgggcccaggccggggagctgtgggtgaagaatgagaaggtgatgtgtggctacatcagcgaggacaccagggtggtgttccgcagcaccagcgccatggtgtacatcttcatccagatgagctgtgagatgtgggactttgacatctatggagacctgtactttgagaaggctgtgaatggcttcctggccgacctcttcaccaagtggaaggagaagaactgcagccatgaggtgacagtggtgctcttcagcaggaccttctatgatgccaagtctgtggatgagttccctgagatcaacagagccagcatccggcaggaccacaagggccgcttctatgaggacttctacaaggtggtggtgcagaatgaaagaagagaggagtggaccagcctgctggtgaccatcaagaagctgttcatccagtaccctgtgctggtgcggctggagcaggccgagggcttcccccagggcgacaacagcaccagcgcccagggcaactacctggaggccatcaacctgtccttcaacgtgtttgacaagcactacatcaacagaaactttgacagaacaggccagatgtctgtggtgatcaccccaggagtgggcgtgtttgaggtggaccggctgctgatgatcctgaccaagcagaggatgattgacaatggcatcggcgtggacctggtgtgcatgggagagcagcccctgcatgctgtgcccctcttcaagctgcacaacagaagtgccccccgggacagccggctgggagatgactacaacatcccccactggatcaaccacagcttctacaccagcaagagccagctgttctgcaacagcttcaccccccgcatcaagctggccggcaagaagccagccagcgagaaggccaagaatggccgggacaccagcctgggcagccccaaggagagtgaaaatgccctgcccatccaggtggactatgatgcctatgatgcccaggtgttccggctgcccggccccagccgggcccagtgcctgaccacctgccgctctgtgcgggagcgggagagccacagcaggaagagcgccagcagctgtgatgtgagcagcagccccagcctgcccagcaggaccctgcccacagaggaggtgcgcagccaggccagtgatgacagcagcctgggcaagagcgccaacatcctgatgatcccccacccccacctgcaccagtatgaggtgagcagcagcctgggctacaccagcacccgggagcacctgggctag

SEQ ID NO: 22549 - DNA, 138 bp, Artificial Sequence
  derived and/or modified sequence
atgaggaccaccaaggtgtacaagctggtgatccacaagaagggctttggaggcagtgatgatgagctggtggtgaaccccaaggtgttcccccacatcaagctgggggacatcgtggagatcgcccaccccaactag

SEQ ID NO: 22550 - DNA, 1680 bp, Artificial Sequence
  derived and/or modified sequence
atgcggaccaccaaggtgtacaagctggtgatccacaagaagggctttgggggctctgacgacgaactcgttgtgaaccccaaagtgtttccacatatcaaactgggggatatagtggagatagcccaccctaatgatgagtactcccctctcctgcttcaggtgaaatctctgaaagaggatcttcaaaaggaaacaatatcagtcgaccaaaccgtcacgcaagttttccgtcttcggccctaccaggacgtgtacgtcaacgtggttgaccctaaggacgtgactctggatttggtggagttaaccttcaaggaccagtacattggccgtggagacatgtggcgccttaagaagtccctggtatcaacatgtgcctacataactcagaaggttgagtttgccggaatcagggcccaagccggcgaactgtgggtcaagaacgagaaggttatgtgcggttatatctctgaagatactagagtcgtgttcagatccaccagcgccatggtctatatttttattcaaatgtcttgcgaaatgtgggatttcgacatttacggcgacttatattttgagaaggccgttaacggttttctggcggacctgttcaccaaatggaaagagaaaaattgtagccatgaagtgacagtagttctgttctctcgtaccttctacgatgccaagagcgtcgacgaatttcccgaaatcaaccgcgcctccatacgacaagatcataaaggccgattctacgaggacttctacaaggtggtggtacaaaatgaaagacgagaagaatggaccagtctactagtgacgatcaaaaagcttttcatccagtatccggtgctagtacggctggagcaggcagaggggtttccccaaggagacaattcaacatcagcccagggcaattatctggaggctatcaacctgagcttcaatgtcttcgacaaacactacataaacagaaactttgacaggacaggtcagatgtcggtggtgatcactccaggggtcggggttttcgaagtggaccggttactgatgatccttaccaaacagaggatgattgacaacggaatcggggttgacctggtgtgcatgggcgagcagccactgcacgccgtgccgctgtttaaactccacaatcgctcagcaccaagagactcacgactgggagatgactacaacattccacattggataaatcattccttctacacctccaagtctcagctgttttgcaactcctttacccctaggatcaagctcgccggtaaaaaacccgcctctgagaaggctaagaatggacgcgacactagtctgggtagccctaaggaatccgagaacgcacttcccatccaggttgattatgatgcctacgatgcccaagtgttcaggttgcccggcccgtcaagggcacagtgtctgactacatgccgctccgtgagagagagagagagccattctaggaaatctgcctcctcttgtgacgtgagttcctccccctctttaccaagccgcactttacccactgaagaagtgagaagtcaggcatcagacgactcctcccttgggaagagcgccaacatcttaatgattccccacccccatcttcatcaatatgaggtatcttcttcacttggatacacctccacgagggagcacctgggctag

SEQ ID NO: 22551 - DNA, 138 bp, Artificial Sequence
  derived and/or modified sequence
atgcggaccaccaaggtgtacaagctggtgatccacaagaagggctttggtggatccgacgacgagctcgtggttaatcctaaggtgttcccacatatcaaactcggcgacatagtggagatagcccaccctaactag

SEQ ID NO: 22552 - DNA, 1680 bp, Artificial Sequence
  derived and/or modified sequence
atgcgaaccacgaaagtgtacaagcttgtgattcacaagaagggttttggaggaagcgatgacgaactggttgtcaatccaaaagtttttccccacatcaaattaggcgatattgttgagatcgcccatccaaatgacgagtactcgccccttcttttgcaggttaagagccttaaagaggatctgcaaaaagaaaccatctctgtggaccagaccgtgacgcaggttttcagactgaggccataccaagatgtctacgttaatgtggtggatcccaaagatgtcactctagacctggtcgaacttacgttcaaggaccagtatatcggtcggggagatatgtggcggctgaagaagagcctcgtctcaacctgtgcttatattacgcagaaggtggaattcgctgggattcgggcacaggctggggaactttgggtaaagaacgaaaaggtgatgtgtggctatatatcagaggatacacgagttgtcttcagatccacttctgcgatggtgtacatcttcattcaaatgagctgcgaaatgtgggacttcgacatctatggggatctttattttgagaaagccgtaaacggtttcctggcggatctttttaccaagtggaaagaaaagaactgcagccacgaggttactgtagtcctcttcagcaggactttttatgatgcaaaatccgtggatgagtttccagagataaacagagccagcatccgccaagatcacaagggaagattctatgaggacttctacaaggtagttgtacagaacgaacgtagagaggagtggacaagcctgctggtcacaattaagaagctctttatccagtatccagttctcgtgagattggagcaggcggaggggttcccacaaggcgacaactcaacctcagcccaggggaactacttggaggccatcaatctcagtttcaatgtttttgacaagcactatattaacagaaactttgaccgaacggggcagatgtccgtcgttattactccaggggtaggtgtgtttgaggttgaccgcctgttgatgatcttgaccaaacaaaggatgatcgataatggcatcggtgtggacctggtttgcatgggggaacagcctctgcacgcagtgccactgtttaaactccacaaccggtccgcaccacgcgacagtagattaggcgacgactacaatattcctcactggattaaccatagtttttacacttcgaagagccagctattttgcaattcatttacacccaggataaagctcgcaggaaagaagccagcgtccgagaaggccaagaacgggagagacaccagtctcggctccccgaaggagtccgagaatgccttacccatacaggtcgattatgatgcctacgatgcacaggtattccgactgcctggtccctcgagagcccagtgcctcactacctgccgatctgtgagagagcgcgaatctcactccagaaaaagcgcgagcagttgcgacgtctcgtctagtccatctctgccctcgcgaaccctccctacagaggaggtgaggtcacaagcgtcggacgattccagcctcggcaagtcagccaacatattaatgataccacacccccatctgcaccaatatgaagtctctagcagcctgggttatacaagtacacgggagcatctgggttag

SEQ ID NO: 22553 - DNA, 138 bp, Artificial Sequence
  derived and/or modified sequence
atgcggacaacaaaggtttacaagctggtgattcacaaaaaaggcttcggcggatctgatgacgagttggtcgtgaaccctaaagttttccctcacatcaagctgggcgacatcgtcgaaatcgcccacccaaactag

SEQ ID NO: 22554 - DNA, 1680 bp, Artificial Sequence
  derived and/or modified sequence
atgagaaccaccaaggtgtacaagctggtgatccacaagaagggcttcggcggcagcgacgacgagctggtggtgaaccccaaggtgttcccccacatcaagctgggcgacatcgtggagatcgcccaccccaacgacgagtacagccccctgctgctgcaggtgaagagcctgaaggaggacctgcagaaggagaccatcagcgtggaccagaccgtgacccaggtgttcagactgagaccctaccaggacgtgtacgtgaacgtggtggaccccaaggacgtgaccctggacctggtggagctgaccttcaaggaccagtacatcggcagaggcgacatgtggagactgaagaagagcctggtgagcacctgcgcctacatcacccagaaggtggagttcgccggcatcagagcccaggccggcgagctgtgggtgaagaacgagaaggtgatgtgcggctacatcagcgaggacaccagagtggtgttcagaagcaccagcgccatggtgtacatcttcatccagatgagctgcgagatgtgggacttcgacatctacggcgacctgtacttcgagaaggccgtgaacggcttcctggccgacctgttcaccaagtggaaggagaagaactgcagccacgaggtgaccgtggtgctgttcagcagaaccttctacgacgccaagagcgtggacgagttccccgagatcaacagagccagcatcagacaggaccacaagggcagattctacgaggacttctacaaggtggtggtgcagaacgagagaagagaggagtggaccagcctgctggtgaccatcaagaagctgttcatccagtaccccgtgctggtgagactggagcaggccgagggcttcccccagggcgacaacagcaccagcgcccagggcaactacctggaggccatcaacctgagcttcaacgtgttcgacaagcactacatcaacagaaacttcgacagaaccggccagatgagcgtggtgatcacccccggcgtgggcgtgttcgaggtggacagactgctgatgatcctgaccaagcagagaatgatcgacaacggcatcggcgtggacctggtgtgcatgggcgagcagcccctgcacgccgtgcccctgttcaagctgcacaacagaagcgcccccagagacagcagactgggcgacgactacaacatcccccactggatcaaccacagcttctacaccagcaagagccagctgttctgcaacagcttcacccccagaatcaagctggccggcaagaagcccgccagcgagaaggccaagaacggcagagacaccagcctgggcagccccaaggagagcgagaacgccctgcccatccaggtggactacgacgcctacgacgcccaggtgttcagactgcccggccccagcagagcccagtgcctgaccacctgcagaagcgtgagagagagagagagccacagcagaaagagcgccagcagctgcgacgtgagcagcagccccagcctgcccagcagaaccctgcccaccgaggaggtgagaagccaggccagcgacgacagcagcctgggcaagagcgccaacatcctgatgatcccccacccccacctgcaccagtacgaggtgagcagcagcctgggctacaccagcaccagagagcacctgggctag

SEQ ID NO: 22555 - DNA, 138 bp, Artificial Sequence
  derived and/or modified sequence
atgagaaccaccaaggtgtacaagctggtgatccacaagaagggcttcggcggcagcgacgacgagctggtggtgaaccccaaggtgttcccccacatcaagctgggcgacatcgtggagatcgcccaccccaactag

SEQ ID NO: 22556 - DNA, 2395 bp, Artificial Sequence
  derived and/or modified sequence
ggcgtaggcggggtatctggaggaggcgcagggaacctggagagggtccagccctcagtgccccggccagaggcgggaaggggctctagagcttcgggaggcaagatgacttctctgccccaagcttggaacagctaaagggaaaaacagtgcaagatgagaacaacaaaggtctacaaactcgtcatccacaagaagggctttgggggcagtgatgatgagctagttgtgaaccccaaagtgttccctcacatcaagcttggagacattgtagagattgcacaccccaacgatgaatacagccctctgcttttgcaggtcaagtctcttaaggaagatttacagaaggaaactatcagtgtggaccagactgtgactcaagtgttccggctgagaccttatcaggatgtctatgttaatgtcgtagaccctaaggatgtgacccttgacctagtggaattaacttttaaggatcagtatattggccgtggggatatgtggcgactaaagaaaagtttggtcagcacatgtgcctatatcacccagaaggtggagtttgctggcatcagagcacaggctggtgaactgtgggttaagaatgagaaggtcatgtgtggctacatcagtgaagataccagggtggtgtttcgttctacgtcggctatggtttacatatttattcagatgagctgtgaaatgtgggattttgatatttatggggatttgtattttgagaaagctgtgaatggtttccttgctgatctatttaccaagtggaaggagaagaactgtagtcatgaagtgacagtggtcctgttttctagaactttctatgatgcaaaatctgttgatgaatttcctgaaataaaccgagcctcaattcgacaggatcacaaggggagattctatgaagacttttacaaagtggtggtgcagaatgagagaagagaagaatggacttcacttctcgtaaccattaaaaaactcttcatccagtatccagtgttggtgcgactggaacaggcagagggctttcctcaaggagataattctacctcagcacaaggaaactacctggaggccatcaatctgtcattcaatgtgtttgataagcactacatcaaccgcaactttgaccgaactgggcagatgtcagtggtgatcacgcccggggtgggtgtctttgaagtggaccgcctactcatgatcctgaccaagcagcggatgatagataatggaattggtgtggatttggtgtgcatgggagagcaaccgttacatgctgtcccattgttcaagctccataatcggagtgctccccgtgattctcgtctgggcgatgactataatatccctcactggataaaccacagtttctacacatccaaaagccagctcttttgtaatagtttcaccccacgaataaaactggcaggaaagaagcccgcctctgagaaagcaaaaaatggccgtgatacatctctcgggagtccaaaagaatctgagaacgcccttcccatccaagtagattatgacgcctatgacgctcaagtgttcaggctgcccggcccatcccgggcccagtgcctcaccacctgcagatctgtgcgagagcgagagagtcacagtcgaaagagtgccagctcctgtgatgtttcatccagcccttccctaccaagccgcacactgcccactgaggaagtgaggagccaggcttctgacgacagctccctaggcaagagtgccaacatcctgatgatcccacacccccacctgcaccagtatgaagtcagcagctccttgggatacaccagcactcgagagcacctaggataaagtgcagtgatgcaatcacagctcacctcagtgcggccttgaactcctggactcaatcgatcctcccacctctgcctcccaagtaactgggactatagcatgccaccacacccagctgattatcatatttttttttgtagaggtggggaagtgcagtgatgcaatcacagctcacctcagtgcggccttgaactcctggactcaattgatcctcccacttctgcctcccaagtaactgggactatagcatgccaccacacccagctgattatcatatttttttttgtagaggtggggttttaccattcccaggctggtcttgaactcctggactcgagggatccacccattggcctccaaaagtgctgagattacaggcatgaaccaatgttaccgcaccctgcctctattatactattttttgtttagcctttcttcatccatcatttaactgtatgcctttccatatgttaatggaaagcttttcttaggcctagggtcaaaagggtttatttccttatgatttccatttgtgccatatataaaacaacctctgtct

SEQ ID NO: 22557 - DNA, 236 bp, Artificial Sequence
  derived and/or modified sequence
gccccggggcggagccaccggagcggcgcgggttctcagggaggcaagatgacttctctgccccaagcttggaacagctaaagggaaaaacagtgcaagatgagaacaacaaaggtctacaaactcgtcatccacaagaagggctttgggggcagtgatgatgagctagttgtgaaccccaaagtgttccctcacatcaagcttggagacattgtagagattgcacaccccaacga

SEQ ID NO: 22558 - DNA, 558 bp, Artificial Sequence
  derived and/or modified sequence
atgcagcagaagagccagaagaaggccgagctgctggacaacgagaagcccgccgccgtggtggcccccatcaccaccggctacaccgtgaagatcagcaactacggctgggaccagagcgacaagttcgtgaagatctacatcaccctgaccggcgtgcaccaggtgcccaccgagaacgtgcaggtgcacttcaccgagagaagcttcgacctgctggtgaagaacctgaacggcaagagctacagcatgatcgtgaacaacctgctgaagcccatcagcgtggagggcagcagcaagaaggtgaagaccgacaccgtgctgatcctgtgcagaaagaaggtggagaacaccagatgggactacctgacccaggtggagaaggagtgcaaggagaaggagaagcccagctacgacaccgagaccgaccccagcgagggcctgatgaacgtgctgaagaagatctacgaggacggcgacgacgacatgaagagaaccatcaacaaggcctgggtggagagcagagagaagcaggccaagggcgacaccgagttctag

SEQ ID NO: 22559 - DNA, 606 bp, Artificial Sequence
  derived and/or modified sequence
atgcccctgcagctgaagaaccccagactgagacagaagagcagaaccagatgcaacaagagccagaagaaggccgagctgctggacaacgagaagcccgccgccgtggtggcccccatcaccaccggctacaccgtgaagatcagcaactacggctgggaccagagcgacaagttcgtgaagatctacatcaccctgaccggcgtgcaccaggtgcccaccgagaacgtgcaggtgcacttcaccgagagaagcttcgacctgctggtgaagaacctgaacggcaagagctacagcatgatcgtgaacaacctgctgaagcccatcagcgtggagggcagcagcaagaaggtgaagaccgacaccgtgctgatcctgtgcagaaagaaggtggagaacaccagatgggactacctgacccaggtggagaaggagtgcaaggagaaggagaagcccagctacgacaccgagaccgaccccagcgagggcctgatgaacgtgctgaagaagatctacgaggacggcgacgacgacatgaagagaaccatcaacaaggcctgggtggagagcagagagaagcaggccaagggcgacaccgagttctag

SEQ ID NO: 22560 - DNA, 558 bp, Artificial Sequence
  derived and/or modified sequence
atgcagcagaaatcccagaaaaaggctgaattactcgataacgaaaagccggcggccgtggttgctcccataaccacaggatacactgtgaagatttccaattacggctgggatcagtctgacaagtttgttaaaatttacatcacgttaactggggtgcaccaggttcctactgagaatgtgcaggtgcatttcacagagagatccttcgaccttctggtgaaaaacctgaacggaaaaagttactctatgatagtaaacaacctgcttaaacccataagcgtcgaaggaagcagtaagaaggtgaagacagatacagtgcttatcctttgcagaaagaaggttgaaaacactagatgggactatttgacacaggtggagaaggaatgtaaagagaaggagaagccctcctacgatacggagaccgaccccagcgaggggctgatgaacgtcctcaagaagatttacgaagacggagatgacgatatgaaacggacaattaacaaggcatgggtcgaatcccgggagaagcaagctaaaggtgacaccgagttctag

SEQ ID NO: 22561 - DNA, 558 bp, Artificial Sequence
  derived and/or modified sequence
atgcagcagaagtcacaaaaaaaggcggaactgctggataacgaaaaacctgccgccgtggtcgcccccatcactactggttacaccgtgaagatatcaaactatggctgggaccagtctgacaaattcgtgaagatttatatcaccctcacaggtgtgcatcaggttccaacagagaacgtgcaagtgcactttaccgagagatcgtttgacctgttagtaaagaacctcaacggcaaatcctactctatgatcgtgaataaccttctcaagcccatttccgttgaaggatcctccaaaaaggtaaagaccgataccgttctgattctgtgcaggaaaaaggtcgagaatactcggtgggactacttgacgcaggtggaaaaggagtgcaaggaaaaagagaagccatcttacgacacggaaacggatccatctgagggtctcatgaatgttctgaagaagatttacgaagatggcgacgacgacatgaagagaaccataaacaaagcttgggttgaaagccgggaaaagcaggccaagggagacaccgagttctag

SEQ ID NO: 22562 - DNA, 606 bp, Artificial Sequence
  derived and/or modified sequence
atgcctctccagctcaagaatcccaggttaagacaaaagtccaggacccgttgcaacaagtcgcagaaaaaggctgagctgcttgacaacgagaagcccgcggctgtcgtcgccccaataaccacggggtacaccgtcaagatttccaattacggatgggatcagagcgataagttcgtgaaaatttacattaccctgaccggggtccaccaggtgcctactgagaacgtgcaagttcactttacagagcgctccttcgacttgttggtgaagaacttgaacggcaagagctactctatgattgttaataacctgctgaaacctatatcagttgagggcagctccaagaaggtgaagaccgataccgtgctgatcctctgtcgaaaaaaagtggagaatacacgctgggactatctcactcaggtggaaaaagaatgtaaagaaaaggagaagccctcctacgacaccgagactgatcctagcgagggtcttatgaatgtcttgaagaaaatctacgaggatggagatgacgatatgaaacggacaataaataaagcttgggtcgagtctcgggaaaagcaggcaaagggggataccgaattctag

SEQ ID NO: 22563 - DNA, 558 bp, Artificial Sequence
  derived and/or modified sequence
atgcagcagaagagccagaagaaggccgagctgctggacaatgagaagccagctgctgtggtggcccccatcaccaccggctacacagtgaagatcagcaactacggctgggaccagagcgacaagtttgtgaagatctacatcaccctgactggagtgcaccaggtgcccacagaaaatgtgcaggtgcacttcacagagaggagctttgacctgctggtgaagaacctgaatggcaagagctacagcatgattgtgaacaacctgctgaagcccatctctgtggagggcagcagcaagaaggtgaagacagacacagtgctgatcctgtgcaggaagaaggtggagaacacccgctgggactacctgacccaggtggagaaggagtgcaaggagaaggagaagcccagctatgacacagaaacagaccccagcgagggcctgatgaatgtgctgaagaagatctatgaagatggagatgatgacatgaagaggaccatcaacaaggcctgggtggagagccgggagaagcaggccaagggggacacagagttctag

SEQ ID NO: 22564 - DNA, 606 bp, Artificial Sequence
  derived and/or modified sequence
atgcccctgcagctgaagaacccccggctgcggcagaagagcaggacccgctgcaacaagagccagaagaaggccgagctgctggacaatgagaagccagctgctgtggtggcccccatcaccaccggctacacagtgaagatcagcaactacggctgggaccagagcgacaagtttgtgaagatctacatcaccctgactggagtgcaccaggtgcccacagaaaatgtgcaggtgcacttcacagagaggagctttgacctgctggtgaagaacctgaatggcaagagctacagcatgattgtgaacaacctgctgaagcccatctctgtggagggcagcagcaagaaggtgaagacagacacagtgctgatcctgtgcaggaagaaggtggagaacacccgctgggactacctgacccaggtggagaaggagtgcaaggagaaggagaagcccagctatgacacagaaacagaccccagcgagggcctgatgaatgtgctgaagaagatctatgaagatggagatgatgacatgaagaggaccatcaacaaggcctgggtggagagccgggagaagcaggccaagggggacacagagttctag

SEQ ID NO: 22565 - DNA, 558 bp, Artificial Sequence
  derived and/or modified sequence
atgcagcagaagagccagaagaaggccgagctgctggacaacgagaagcctgccgctgtcgtcgcacctatcactactggctacacagtcaagatatcaaactatggttgggaccaatccgacaagtttgtgaagatatacataacactgaccggggtgcatcaggtgccaactgagaatgtgcaagtacatttcaccgagaggtcctttgacctcctggtcaaaaaccttaatggtaagtcttactctatgatagtcaataatctgctgaagccaatctctgtcgagggatcgagtaagaaggttaagactgatacagtccttattctgtgcaggaaaaaggttgagaacacccgctgggactacctgactcaggtggaaaaagaatgtaaggaaaaggagaagccaagctatgatacagagaccgacccgagcgaggggctgatgaatgtgctgaaaaagatatatgaggacggcgacgatgacatgaaacgtaccatcaacaaagcctgggtcgaatccagagaaaaacaggcaaagggggacaccgagttttag

SEQ ID NO: 22566 - DNA, 558 bp, Artificial Sequence
  derived and/or modified sequence
atgcagcagaagagccagaagaaggccgagctgctggacaacgagaagcctgctgccgtggtggcccccatcaccactgggtacacagtcaagatctcaaactacgggtgggaccagtccgacaaatttgtgaaaatctatatcacgctgactggggtgcaccaagttccaaccgaaaatgtccaggttcatttcactgagagaagcttcgacctcctggtaaagaatctgaacgggaagagctacagcatgattgtcaacaatcttttgaagccaatcagcgttgaaggaagctctaaaaaggtcaaaacggacacagtgctgatcctttgccgaaagaaagtcgaaaacacacggtgggactacttgacacaggtcgagaaagaatgcaaggagaaggaaaaaccttcttatgacactgaaacagacccatccgagggcctcatgaacgtgctgaagaagatatacgaggatggggacgacgacatgaagcgtaccatcaacaaggcctgggtggagtcacgggaaaaacaggctaagggggacaccgagttttag

SEQ ID NO: 22567 - DNA, 606 bp, Artificial Sequence
  derived and/or modified sequence
atgcccctgcagctgaagaacccccggctgcggcagaagagccggacgagatgcaataaatcccaaaaaaaagctgaactgctggataacgaaaaaccagctgccgtggtggcccctatcaccaccggatatacagtcaagatttcaaactacgggtgggatcagtccgataagttcgtgaaaatttatatcacactcaccggagtgcaccaggtgcctaccgagaatgtccaggtgcactttactgaaagatctttcgatctccttgttaagaaccttaacgggaaaagctactcaatgatcgtgaataacctgctaaaaccaatctccgtcgaagggagctccaagaaagtgaagacagataccgtgctcatcctctgccgcaagaaggtggagaatacaagatgggactatctcacccaagtggagaaggagtgtaaggagaaggagaaaccctcatacgacacagagactgatcccagcgaggggctgatgaatgtgctaaagaaaatatatgaagatggcgatgacgacatgaagcgcaccattaacaaagcctgggtggaatctcgcgagaagcaggcgaagggcgacacagagttttag

SEQ ID NO: 22568 - DNA, 558 bp, Artificial Sequence
  derived and/or modified sequence
atgcagcagaagtcgcagaagaaagccgagctgctcgacaacgaaaagcctgctgccgtggttgctccaattacaacgggctacactgtaaagatcagcaactacgggtgggatcagtccgacaaatttgtcaagatctacattaccctaaccggggtgcatcaggttcccactgaaaacgtgcaggtccatttcaccgaacggagtttcgatttactcgttaaaaacttaaacggaaaatcatattccatgatcgtgaacaatcttctgaaaccaatctcagtggagggaagctccaagaaggtgaagaccgataccgtgctgatcctgtgcagaaaaaaggtggagaacaccaggtgggattatctgacccaggtcgaaaaggagtgtaaagaaaaagagaagccctcatatgacacggaaacagatccttctgaggggctgatgaacgtgcttaagaaaatttatgaggacggagatgacgatatgaaacgcacgattaataaggcttgggtggaatctcgggaaaaacaggcaaagggtgatacagagttttag

SEQ ID NO: 22569 - DNA, 558 bp, Artificial Sequence
  derived and/or modified sequence
atgcagcagaagagccaaaagaaagcggagctgctggacaacgagaagcccgcagctgtggttgcccctatcactaccggctacacagttaaaatctcaaactacgggtgggatcagtccgacaagttcgtgaaaatctacatcacgctgaccggagtccaccaagtacccaccgagaatgtacaggtgcactttactgagaggtcattcgatctgctggtcaaaaatttaaatggtaaaagctactccatgattgtcaataacctgttgaagccgatttccgtggaagggtcaagcaagaaggtgaaaaccgacacagtgctgatcctgtgccgtaaaaaggtcgagaataccaggtgggattatttgacacaagtggagaaagagtgtaaagaaaaggaaaagcctagctatgacacagagacagatccatcagagggcctgatgaacgtgctgaaaaagatctacgaggatggcgacgacgatatgaaaagaaccataaacaaggcctgggtggagtcacgagaaaagcaggcgaagggagatactgagttctag

SEQ ID NO: 22570 - DNA, 606 bp, Artificial Sequence
  derived and/or modified sequence
atgccactgcagttgaagaatccaagattgcgtcagaaatcaaggacgcgatgcaacaagtctcagaaaaaggctgagcttctggataacgagaagcctgccgctgttgtcgcccctataacaactgggtacactgttaagatctccaactatggctgggaccagagcgacaaattcgttaaaatctatattacactcaccggcgtgcatcaagttccaactgagaacgtgcaggtccatttcacagaacgctcgtttgaccttctggttaagaatctcaatggcaagtcatacagtatgatcgtgaataacctcctgaagccaatttccgtggaaggatccagcaaaaaagtgaagacagacacagtgttgatcttgtgccgaaaaaaagtagaaaacactagatgggactacctgacccaggtagagaaggagtgtaaggagaaagagaaaccatcctacgataccgagacagacccatccgagggtcttatgaatgtcttgaagaagatctacgaggacggggacgatgacatgaaacgtacaataaacaaagcctgggttgaaagtagggaaaaacaggctaaaggcgacacagaattctag

SEQ ID NO: 22571 - DNA, 2534 bp, Artificial Sequence
  derived and/or modified sequence
aaactcactgaaaatcaaaccgctaccattaggagccctccacgcttaacatatccgttctttctcgtttgaaagtaaccaggctgctcctccccatttttcgccttcttctcgcggaggctgagagactaaccttacacaacatggcggcctggtgtgtctggtgtcctagagcggacgaaagcaggtgactctctagtcaacttccgacttggactccgaagatcgctacagaaagatctagaagaggtaaaggtgttgctggaaaaggctactaggaaaagagtacgtgatgcccttacagctgaaaaatccaagattgagacagaaatcaagaacaagatgcaacaaatcacagaagaaagcagaacttcttgataatgaaaaaccagctgctgtggttgctcccattacaacgggctatacggtgaaaatcagtaattatggatgggatcagtcagataagtttgtgaaaatctacattaccttaactggagttcatcaagttcccactgagaatgtgcaggtgcatttcacagagaggtcatttgatcttttggtaaagaatctaaatgggaagagttactccatgattgtgaacaatctcttgaaacccatctctgtggaaggcagttcaaaaaaagtcaagactgatacagttcttatattgtgtagaaagaaagtggaaaacacaaggtgggattacctgacccaggttgaaaaggagtgcaaagaaaaagagaagccctcctatgacactgaaacagatcctagtgagggattgatgaatgttctaaagaaaatttatgaagatggagacgatgatatgaagcgaaccattaataaagcctgggtggaatcaagagagaagcaagccaaaggagacacggaattttgagactttaaagtcgttttgggaactgtgatgtgatgtggaaatactgatgtttccagtaagggaatattggtgagctgcatatataaatttgacagatagctatttacatagccttctaagtaaaggcaatgaattctccatttcctactggaggatttatttaaataaaatatgcttattaaacactcctgcaaagatggttttattagtaccctggtcattttgttcaaggaagggttatattgcattctcacgtgaaatataaaaagcaagtcttgcccaataaaaacgctacattgtgtgtattttttgttcagctaagaattggaaaagtatttgcttgccttttaagttactgacatcagcttccaccagtgtaaaaattgagtaaaacctgaagttttgcataaaatgcaaatcggtgcctgtgcttgaaggttgctgtagagcatctgaccccttattaccaccttaagcaatgtatatgccatgcattaccatgcactaattcaatcacaggtgtttctatctagatttaaatatatttgtcaatgaatgtggaatagaaaatctaaacatgacaataatagacatatctttgtatggtaccagttagttttgccgtggatcagatggtttataaaagtaataaccataaagcaaaaaataatttgaaagcccgtctattcctatgctcaataaagttaagtttttcttcattagaacagttttatgatttatttgtctaggagtatgtcagaaaaatcaggcttttagtaggaattactcctattccccctgaagtcaggaccagtgcctgtgatctccattactttattttcctggaggtattagccaacacagttagatcagagaaagcaattgaagccaggcatgaaggctggcgcccgtaatcccagctactaaggctggaggatcacttcagcccaggagtttaaggctgcagtgagctatgatgatgccactgtactgcagcttgggtaacagattgagaacctgtctcattaaaaaaaaaaaaaaaaaaaaagccgttagacacacaggaaaaatccagaagggtaaactaaactaaagctacaattaatatgggaatttggaagaagtggtaggatttaaaatacagaaacagtttatgtataggatagctataagtaaatactgaaacacattatgcctctgtaattggggttgacacatgaacagaatagcagacacaatgcatatgaaagttacagaatatggtaaaagtggggtaaagatgggtttttaatgatactaagataactgaaaataggcatatagatatattccaagccgcctgacgatctaattgtaaaaagtaaagcatacaaatactagaagaaaatggaggaaaacgacattatatgtgacttaaaacctagaagaaataaataaaactattgatcaattttaactacataaaaatgtttataggacaagaaaaaccccaccataacccaaggcaaacaatgtattgacaggattccaataattaagaatacttcatacaaaaagaaatgtaaatgacctttaacatgtaaagatgctcaccttgttcagaagagaataaaccagtgtttttacctttcacttg

SEQ ID NO: 22572 - protein, 556 aa, Artificial Sequence
  derived and/or modified sequence
MMNKLYIGNLSPAVTADDLRQLFGDRKLPLAGQVLLKSGYAFVDYPDQNWAIRAIETLSGKVELHGKIMEVDYSVSKKLRSRKIQIRNIPPHLQWEVLDGLLAQYGTVENVEQVNTDTETAVVNVTYATREEAKIAMEKLSGHQFENYSFKISYIPDEEVSSPSPPQRAQRGDHSSREQGHAPGGTSQARQIDFPLRILVPTQFVGAIIGKEGLTIKNITKQTQSRVDIHRKENSGAAEKPVTIHATPEGTSEACRMILEIMQKEADETKLAEEIPLKILAHNGLVGRLIGKEGRNLKKIEHETGTKITISSLQDLSIYNPERTITVKGTVEACASAEIEIMKKLREAFENDMLAVNTHSGYFSSLYPHHQFGPFPHHHSYPEQEIVNLFIPTQAVGAIIGKKGAHIKQLARFAGASIKIAPAEGPDVSERMVIITGPPEAQFKAQGRIFGKLKEENFFNPKEEVKLEAHIRVPSSTAGRVIGKGGKTVNELQNLTSAEVIVPRDQTPDENEEVIVRIIGHFFASQTAQRKIREIVQQVKQQEQKYPQGVASQRSK

SEQ ID NO: 22573 - DNA, 3291 bp, Artificial Sequence
  derived and/or modified sequence
cggaggaggcgaggagcgccgggtaccgggccgggggagccgcgggctctcggggaagagacggatgatgaacaagctttacatcgggaacctgagccccgccgtcaccgccgacgacctccggcagctctttggggacaggaagctgcccctggcgggacaggtcctgctgaagtccggctacgccttcgtggactaccccgaccagaactgggccatccgcgccatcgagaccctctcgggtaaagtggaattgcatgggaaaatcatggaagttgattactcagtctctaaaaagctaaggagcaggaaaattcagattcgaaacatccctcctcacctgcagtgggaggtgttggatggacttttggctcaatatgggacagtggagaatgtggaacaagtcaacacagacacagaaaccgccgttgtcaacgtcacatatgcaacaagagaagaagcaaaaatagccatggagaagctaagcgggcatcagtttgagaactactccttcaagatttcctacatcccggatgaagaggtgagctccccttcgccccctcagcgagcccagcgtggggaccactcttcccgggagcaaggccacgcccctgggggcacttctcaggccagacagattgatttcccgctgcggatcctggtccccacccagtttgttggtgccatcatcggaaaggagggcttgaccataaagaacatcactaagcagacccagtcccgggtagatatccatagaaaagagaactctggagctgcagagaagcctgtcaccatccatgccaccccagaggggacttctgaagcatgccgcatgattcttgaaatcatgcagaaagaggcagatgagaccaaactagccgaagagattcctctgaaaatcttggcacacaatggcttggttggaagactgattggaaaagaaggcagaaatttgaagaaaattgaacatgaaacagggaccaagataacaatctcatctttgcaggatttgagcatatacaacccggaaagaaccatcactgtgaagggcacagttgaggcctgtgccagtgctgagatagagattatgaagaagctgcgtgaggcctttgaaaatgatatgctggctgttaacacccactccggatacttctccagcctgtacccccatcaccagtttggcccgttcccgcatcatcactcttatccagagcaggagattgtgaatctcttcatcccaacccaggctgtgggcgccatcatcgggaagaagggggcacacatcaaacagctggcgagattcgccggagcctctatcaagattgcccctgcggaaggcccagacgtcagcgaaaggatggtcatcatcaccgggccaccggaagcccagttcaaggcccagggacggatctttgggaaactgaaagaggaaaacttctttaaccccaaagaagaagtgaagctggaagcgcatatcagagtgccctcttccacagctggccgggtgattggcaaaggtggcaagaccgtgaacgaactgcagaacttaaccagtgcagaagtcatcgtgcctcgtgaccaaacgccagatgaaaatgaggaagtgatcgtcagaattatcgggcacttctttgctagccagactgcacagcgcaagatcagggaaattgtacaacaggtgaagcagcaggagcagaaataccctcagggagtcgcctcacagcgcagcaagtgaggctcccacaggcaccagcaaaacaacggatgaatgtagcccttccaacacctgacagaatgagaccaaacgcagccagccagatcgggagcaaaccaaagaccatctgaggaatgagaagtctgcggaggcggccagggactctgccgaggccctgagaaccccaggggccgaggaggggcggggaaggtcagccaggtttgccagaaccaccgagccccgcctcccgccccccagggcttctgcaggcttcagccatccacttcaccatccactcggatctctcctgaactcccacgacgctatcccttttagttgaactaacataggtgaacgtgttcaaagccaagcaaaatgcacaccctttttctgtggcaaatcgtctctgtacatgtgtgtacatattagaaagggaagatgttaagatatgtggcctgtgggttacacagggtgcctgcagcggtaatatattttagaaataatatatcaaataactcaactaactccaatttttaatcaattattaatttttttttctttttaaagagaaagcaggcttttctagactttaaagaataaagtctttgggaggtctcacggtgtagagaggagctttgaggccacccgcacaaaattcacccagagggaaatctcgtcggaaggacactcacggcagttctggatcacctgtgtatgtcaacagaagggataccgtctccttgaagaggaaactctgtcactcctcatgcctgtctagctcatacacccatttctctttgcttcacaggttttaaactggttttttgcatactgctatataattctctgtctctctctgtttatctctcccctccctcccctccccttcttctccatctccattcttttgaatttcctcatccctccatctcaatcccgtatctacgcacccccccccccccaggcaaagcagtgctctgagtatcacatcacacaaaaggaacaaaagcgaaacacacaaaccagcctcaacttacacttggttactcaaaagaacaagagtcaatggtacttgtcctagcgttttggaagaggaaaacaggaacccaccaaaccaaccaatcaaccaaacaaagaaaaaattccacaatgaaagaatgtattttgtctttttgcattttggtgtataagccatcaatattcagcaaaatgattcctttctttaaaaaaaaaaaatgtggaggaaagtagaaatttaccaaggttgttggcccagggcgttaaattcacagatttttttaacgagaaaaacacacagaagaagctacctcaggtgtttttacctcagcaccttgctcttgtgtttcccttagagattttgtaaagctgatagttggagcatttttttatttttttaataaaaatgagttggaaaaaaaataagatatcaactgccagcctggagaaggtgacagtccaagtgtgcaacagctgttctgaattgtcttccgctagccaagaacctatatggccttcttttggacaaaccttgaaaatgtttatttaaaaaaaaaaaa

SEQ ID NO: 22574 - DNA, 1671 bp, Artificial Sequence
  derived and/or modified sequence
atgatgaataagctgtacattggaaatctctcccctgcagttactgcggatgatcttcggcagctctttggcgaccggaagctccccctggccggccaggtgctgctgaaatccggatacgcattcgttgactaccctgatcagaactgggccattcgcgccatcgaaactctaagcgggaaagtggagctgcacggaaaaattatggaggtggactatagtgtgtccaaaaagctgcggtctaggaagatacagattaggaacatccccccccatttgcaatgggaggtcttggatggcttgctggctcagtacggtaccgtggaaaacgtggaacaggtaaataccgacacggaaaccgctgtggtcaacgttacttacgcgacgagagaggaagcaaagattgcaatggagaagctgtccggtcatcaattcgagaactacagttttaagatttcttacattcctgatgaagaagtgtcatctccgtctcctcctcagcgggcccaaaggggagaccacagcagcagggagcaaggtcacgcccccgggggaaccagccaggctaggcagatcgacttcccgctccggatcctggttcccactcaattcgtcggcgctattatcggcaaggaggggctgaccataaaaaacatcacaaagcagacccagagtcgggttgacattcatcggaaggaaaactcaggcgccgccgagaaaccagtgaccattcacgccacacccgaggggacctctgaggcctgtaggatgattctcgagattatgcagaaagaggccgacgaaactaaattggccgaggagatacctttaaaaattcttgcccacaatggtctggtcgggcggctgatcggtaaggagggtcggaatttgaagaagatcgaacatgagactggaacaaagataaccatctcctcgctgcaagatctctcaatctataatcccgagcgaacaattacagtcaaaggtacagtggaggcctgcgcatccgctgagatcgagattatgaaaaaacttcgggaggcctttgagaacgatatgctcgccgtgaacacccattcaggctatttctcaagcctgtatccccaccaccagtttggcccgttcccccaccatcatagttatcctgagcaggaaatagtgaatctgttcatcccaactcaggcagtcggtgccattattggtaaaaaaggtgcccacatcaaacagcttgcgaggttcgccggcgccagtatcaaaatcgcccctgctgaggggcccgacgtgagcgagagaatggttatcattaccggaccaccggaggcccagttcaaggcccaggggcgcatcttcggaaagctgaaagaggaaaacttctttaacccaaaggaggaggttaagctggaagctcatatcagagtaccctcaagtactgccgggcgtgtcatcggtaagggcgggaagactgtgaacgagctccagaacctgacatccgctgaagttattgtgccgagagatcagactccggacgaaaacgaagaggtgatcgtgcggataatagggcactttttcgcatcccagacagctcaacgaaagatccgggagatcgtgcagcaggtgaaacagcaagagcaaaagtacccccagggcgtggcatcccagaggagtaaatag

SEQ ID NO: 22575 - DNA, 1671 bp, Artificial Sequence
  derived and/or modified sequence
atgatgaacaagctgtacatcggcaacctgagccctgctgtgacagcagatgacctgcggcagctgtttggagacaggaagctgcccctggccggccaggtgctgctgaagagcggctacgcctttgtggactacccagaccagaactgggccatccgggccatcgagaccctgagcggcaaggtggagctgcacggcaagatcatggaggtggactacagcgtgtccaagaagctgcggagcaggaagatccagatccggaacatccccccccacctgcagtgggaggtgctggatggcctgctggcccagtatggaacagtggagaatgtggagcaggtgaacacagacacagaaacagctgtggtgaatgtgacctacgccacccgggaggaggccaagatcgccatggagaagctgagcggccaccagtttgagaactacagcttcaagatctcctacatcccagatgaggaggtgagcagccccagccccccccagagggcccagagaggagaccacagcagccgggagcagggccacgcccctgggggcaccagccaggcccggcagattgacttccccctgcgcatcctggtgcccacccagtttgtgggcgccatcatcggcaaggagggcctgaccatcaagaacatcaccaagcagacccagagccgggtggacatccacaggaaagaaaattctggagctgctgagaagcctgtgaccatccacgccaccccagagggcaccagcgaggcctgcaggatgatcctggagatcatgcagaaggaggctgatgagaccaagctggccgaggagatccccctgaagatcctggcccacaacggcctggtgggccgcctcatcggcaaggagggcaggaacctgaagaagattgagcacgagaccggcaccaagatcaccatcagcagcctgcaggacctgagcatctacaaccctgagaggaccatcaccgtgaagggcaccgtggaggcctgtgccagcgctgagattgagatcatgaagaagctgcgggaggcctttgaaaatgacatgctggccgtgaacacccacagcggctacttcagcagcctgtacccccaccaccagtttggccccttcccccaccaccacagctacccagagcaggagatcgtgaacctcttcatccccacccaggccgtgggcgccatcatcggcaagaagggggcccacatcaagcagctggccaggtttgctggggccagcatcaagatcgccccagctgagggcccagatgtgtctgagaggatggtgatcatcaccggccccccagaggcccagttcaaggcccagggccgcatctttgggaagctgaaggaggagaacttcttcaaccccaaggaggaggtgaagctggaggcccacatccgggtgcccagcagcacagctggccgggtcatcggcaagggcggcaagacagtgaatgagctgcagaacctgaccagcgctgaggtgattgtgccccgggaccagaccccagatgaaaatgaggaggtgattgtgcgcatcatcggccacttctttgccagccagacagcccagaggaagatccgggagatcgtgcagcaggtgaagcagcaggagcagaagtacccccagggcgtggccagccagaggagcaagtag

SEQ ID NO: 22576 - DNA, 1671 bp, Artificial Sequence
  derived and/or modified sequence
atgatgaacaagctgtacatcggcaacctgagccccgccgtgaccgcggacgatttgagacaactgtttggcgaccgaaaacttccactggcgggacaggtattgctgaagtccggatacgcctttgtcgactatcccgaccagaattgggccattcgtgccatcgagaccttgagtggaaaggtggaactgcatgggaagattatggaagttgactactcggtgagcaagaagttgcgctcacgcaagattcagatcagaaacattcctccccatctgcaatgggaggtactggatggcctcctcgcccagtacggaacagtagaaaatgtggaacaggtgaataccgatactgaaaccgccgtggtaaatgtgacttacgcaacccgggaggaggccaagattgctatggagaaacttagtgggcatcagtttgaaaactattctttcaaaattagttacattcccgatgaagaggtctcatccccttctccccctcaacgcgctcagagaggcgaccattcttcaagggagcagggtcacgctcctggaggaacatcgcaagctaggcagatcgattttcccctacggatcttggtgccaacacagtttgtgggggccattatcggcaaggagggtctgacaattaagaatatcacaaagcagacacagtcgagggttgacattcaccgtaaagaaaacagcggagccgcggagaaacctgtgactatccatgctacacccgagggcacttctgaagcctgccggatgatcctggagatcatgcagaaggaagcagacgaaacaaagttggccgaggagattcccttgaagatcctggctcacaatggcctcgtggggaggctgatcggcaaagaggggaggaatctaaaaaagatcgagcatgagaccggaaccaaaattacgatcagctctctacaagatctgtctatttataatcctgaacgcactattacagtgaagggtacagtagaggcctgtgcctccgccgagatcgaaataatgaaaaagcttcgtgaggcttttgaaaacgatatgctagctgtgaacacacattcaggctatttcagctccctttatccccaccatcagtttggcccctttcctcaccaccacagctatcccgaacaggaaattgtgaacttatttatacccacacaggcagtcggtgctataattggcaaaaagggtgctcatatcaagcagctggctagatttgcaggagcctctattaagattgccccagctgaaggcccagatgtgagcgaacggatggtgattatcacaggacccccggaggcccagttcaaagcacagggacggatctttggcaaactaaaggaggagaacttcttcaatcctaaggaagaagtcaagctcgaggcacacatccgggtccctagctcaaccgccggacgggtgatagggaagggggggaagaccgtgaatgaactgcagaacttgacctccgcagaagtgattgttccccgggaccagaccccagatgagaacgaagaggtgatcgtccggattataggtcatttcttcgccagccaaactgcacaaagaaagatccgcgagatcgtgcagcaggtgaagcagcaagaacagaagtatccccaaggcgtggcttcccagcgttcaaaatag

SEQ ID NO: 22577 - DNA, 1671 bp, Artificial Sequence
  derived and/or modified sequence
atgatgaacaagctgtatatcgggaacctgagccctgctgtgactgcagacgatcttcgccagctgtttggggatagaaaactgcctctggccggacaagtgttgctaaaatctggctacgcatttgtagactaccccgaccagaactgggctattagggccatcgagaccttgtcggggaaagtggaactgcatggcaagattatggaggtcgactattcagtctccaaaaagctccgtagccgaaagatacagatccgcaacattcctccccatttacagtgggaagtgctggacggcttgctggcacagtacggcacagtggaaaatgtggagcaggttaacaccgacaccgagacagcggtggtcaatgtgacgtatgcaacacgcgaggaggccaagatagccatggagaaattgtcaggccatcagttcgaaaactattctttcaagatttcgtacatcccagacgaggaggtgtcttcaccatctccaccccagcgggcacaaaggggcgatcattccagccgagagcagggccacgctccgggagggaccagtcaggctcgccagatcgatttccccctgcgtattttggtccctactcagtttgtaggcgctatcataggtaaggaaggtcttactataaagaatatcactaagcagacccaatctcgcgtagatatacatcggaaggagaacagcggcgctgctgagaaaccagttactattcacgctacacccgaaggcacttcagaagcctgtcgtatgatcctggaaataatgcaaaaggaggctgatgaaacgaaactagcagaagagattcccctgaaaatcctagctcacaacggtctggtcgggagattgatcggaaaagagggcaggaatctcaagaaaattgaacatgagaccggcactaaaatcactataagctcgctccaagacctgtccatctataatcctgagcggacaatcacagtgaagggaacagtcgaggcgtgtgcctctgctgaaatcgagatcatgaaaaagctgagagaggcttttgagaacgacatgctggccgtcaatacacatagcggctacttttcaagtctttatccacaccaccaattcgggccattcccccatcatcacagttatcccgaacaggagatagtgaacctgttcattccgacccaggctgtgggtgcgatcatagggaagaaaggggcacacatcaagcagctggctaggttcgccggagctagcatcaaaatcgcacccgcagaggggccagatgtgagcgagcggatggttatcattaccggacctcccgaggctcagtttaaagcacaggggagaattttcggcaagcttaaggaagagaactttttcaatcctaaggaagaggtgaaactcgaagctcacatcagagtgccctccagtaccgcaggacgggtgatcggcaagggtggtaagacagttaatgagcttcagaacctgaccagtgcagaagtgatcgtgcctcgggaccagacccctgatgaaaacgaggaggtgatagtgcggatcattgggcatttttttgcaagccaaacagctcaaaggaagatccgtgaaatcgtgcagcaagtgaagcagcaggaacagaagtaccctcagggagtggcttcccaaagatcaaagtag

SEQ ID NO: 22578 - DNA, 1671 bp, Artificial Sequence
  derived and/or modified sequence
atgatgaacaagctgtacatcggcaacctgagccccgccgtgaccgccgacgacctgagacagctgttcggcgacagaaagctgcccctggccggccaggtgctgctgaagagcggctacgccttcgtggactaccccgaccagaactgggccatcagagccatcgagaccctgagcggcaaggtggagctgcacggcaagatcatggaggtggactacagcgtgagcaagaagctgagaagcagaaagatccagatcagaaacatccccccccacctgcagtgggaggtgctggacggcctgctggcccagtacggcaccgtggagaacgtggagcaggtgaacaccgacaccgagaccgccgtggtgaacgtgacctacgccaccagagaggaggccaagatcgccatggagaagctgagcggccaccagttcgagaactacagcttcaagatcagctacatccccgacgaggaggtgagcagccccagccccccccagagagcccagagaggcgaccacagcagcagagagcagggccacgcccccggcggcaccagccaggccagacagatcgacttccccctgagaatcctggtgcccacccagttcgtgggcgccatcatcggcaaggagggcctgaccatcaagaacatcaccaagcagacccagagcagagtggacatccacagaaaggagaacagcggcgccgccgagaagcccgtgaccatccacgccacccccgagggcaccagcgaggcctgcagaatgatcctggagatcatgcagaaggaggccgacgagaccaagctggccgaggagatccccctgaagatcctggcccacaacggcctggtgggcagactgatcggcaaggagggcagaaacctgaagaagatcgagcacgagaccggcaccaagatcaccatcagcagcctgcaggacctgagcatctacaaccccgagagaaccatcaccgtgaagggcaccgtggaggcctgcgccagcgccgagatcgagatcatgaagaagctgagagaggccttcgagaacgacatgctggccgtgaacacccacagcggctacttcagcagcctgtacccccaccaccagttcggccccttcccccaccaccacagctaccccgagcaggagatcgtgaacctgttcatccccacccaggccgtgggcgccatcatcggcaagaagggcgcccacatcaagcagctggccagattcgccggcgccagcatcaagatcgcccccgccgagggccccgacgtgagcgagagaatggtgatcatcaccggcccccccgaggcccagttcaaggcccagggcagaatcttcggcaagctgaaggaggagaacttcttcaaccccaaggaggaggtgaagctggaggcccacatcagagtgcccagcagcaccgccggcagagtgatcggcaagggcggcaagaccgtgaacgagctgcagaacctgaccagcgccgaggtgatcgtgcccagagaccagacccccgacgagaacgaggaggtgatcgtgagaatcatcggccacttcttcgccagccagaccgcccagagaaagatcagagagatcgtgcagcaggtgaagcagcaggagcagaagtacccccagggcgtggccagccagagaagcaagtag

SEQ ID NO: 22579 - protein, 646 aa, Artificial Sequence
  derived and/or modified sequence
MSLKLPRNWDFNLKVEAAKIARSRSVMTGEQMAAFHPSSTPNPLERPIKMGWLKKQRSIVKNWQQRYFVLRAQQLYYYKDEEDTKPQGCMYLPGCTIKEIATNPEEAGKFVFEIIPASWDQNRMGQDSYVLMASSQAEMEEWVKFLRRVAGTPCGAVFGQRLDETVAYEQKFGPHLVPILVEKCAEFILEHGRNEEGIFRLPGQDNLVKQLRDAFDAGERPSFDRDTDVHTVASLLKLYLRDLPEPVVPWSQYEGFLLCGQLTNADEAKAQQELMKQLSILPRDNYSLLSYICRFLHEIQLNCAVNKMSVDNLATVIGVNLIRSKVEDPAVIMRGTPQIQRVMTMMIRDHEVLFPKSKDIPLSPPAQKNDPKKAPVARSSVGWDATEDLRISRTDSFSSMTSDSDTTSPTGQQPSDAFPEDSSKVPREKPGDWKMQSRKRTQTLPNRKCFLTSAFQGANSSKMEIFKNEFWSPSSEAKAGEGHRRTMSQDLRQLSDSQRTSTYDNVPSLPGSPGEEASALSSQACDSKGDTLASPNSETGPGKKNSGEEEIDSLQRMVQELRKEIETQKQMYEEQIKNLEKENYDVWAKVVRLNEELEKEKKKSAALEISLRNMERSREDVEKRNKALEEEVKEFVKSMKEPKTEA

SEQ ID NO: 22580 - DNA, 1941 bp, Artificial Sequence
  derived and/or modified sequence
atgagtctgaaactgcctcggaattgggatttcaacctgaaagtggaagctgctaagatagccagatcaaggtctgtgatgacaggcgagcagatggcagcattccatccttcctccacaccaaaccctttagagcggccaatcaaaatgggatggcttaagaagcaacgatccatcgttaaaaactggcagcaacgctatttcgtgcttcgagctcagcagctctactattacaaggatgaagaggacaccaagccccagggctgtatgtatctgcctgggtgcacaattaaggagattgctactaaccccgaggaggccggtaagtttgtgttcgaaattatcccagcatcctgggatcagaataggatgggacaggattcatacgttctgatggctagttcgcaggctgagatggaggaatgggttaaattcctcagaagggtggccggaactccttgcggggccgtgtttggtcagagacttgacgagacggtcgcatacgagcagaagttcggaccccatctggtgccaattctcgtggaaaagtgtgcagagttcattcttgaacacggacggaatgaagaaggcatcttcaggctgccgggtcaggacaatcttgtgaaacaactccgggatgcctttgatgctggcgagcgcccaagctttgaccgtgatacagacgttcacacagtcgcctccctgcttaagttgtacttgagagatttgcccgaacctgtggtaccctggtcccagtatgagggcttccttctttgtgggcaactgacaaacgccgacgaagcgaaggcacagcaggagcttatgaagcagttaagtattctgcccagagacaactatagtcttttgtcctacatctgtaggttcctgcatgagattcagctgaactgtgcagttaacaagatgagtgtcgataacctggctacggtcattggcgtgaatctgatacggagcaaagtggaggatcccgctgtcatcatgcggggcacacctcaaattcagcgtgtgatgaccatgatgattagggatcacgaggtgctgttccccaaaagtaaagatatcccgttatccccaccggctcaaaagaatgacccaaaaaaggctcccgtggcccggtcttccgtgggctgggatgcaaccgaagatctcaggatttcgaggactgactccttttcaagtatgacatcggattcagatacaacctctcccacaggtcagcagccctctgatgcgttcccagaggactcttctaaggtacctcgggagaaaccaggagattggaagatgcagagtcggaagcgcacccagacccttcctaatcgcaagtgcttcctcacatctgcttttcaaggggcaaactcctccaagatggagatatttaagaatgaattttggagcccttccagtgaggcgaaagccggagaggggcatcgacgaaccatgagccaagacttgcgccagctgtccgattctcagcggactagcacttatgacaatgttcctagtctccccggaagtccaggggaggaggccagcgccctctcaagtcaggcttgcgatagcaaaggtgatacattggcctcacccaattctgaaaccggccctgggaaaaaaaactcaggtgaggaagagatcgattcactgcagagaatggtgcaagaacttcgaaaggaaattgagacgcagaaacagatgtatgaagagcaaatcaaaaacttagagaaagagaactacgacgtttgggccaaagtggtcaggctgaacgaggagctcgagaaggagaaaaagaagagcgccgctcttgagatctctctcaggaatatggaacgatctcgagaggatgttgagaagagaaataaagcccttgaagaagaggtgaaagagttcgtgaagagcatgaaggagccaaaaacagaggcttag

SEQ ID NO: 22581 - DNA, 1941 bp, Artificial Sequence
  derived and/or modified sequence
atgagcctgaagctgcccaggaactgggacttcaacctgaaggtggaggccgccaagatcgcccggagccgctctgtgatgaccggggagcagatggccgccttccaccccagcagcacccccaaccccctggagcggcccatcaagatgggctggctgaagaagcagaggagcatcgtgaagaactggcagcagcgctactttgtgctgcgggcccagcagctgtactactacaaggatgaggaggacaccaagccccagggctgcatgtacctgcccggctgcaccatcaaggagatcgccaccaaccctgaggaggccggcaagtttgtgtttgagatcatcccagcctcctgggaccagaacaggatgggccaggacagctatgtgctgatggccagcagccaggccgagatggaggagtgggtgaagttcctgcggcgggtggccggcaccccctgtggggctgtgtttggccagaggctggatgaaacagtggcctatgagcagaagtttggcccccacctggtgcccatcctggtggagaagtgtgccgagttcatcctggagcacggcagaaatgaggagggcatcttccggctgcccggccaggacaacctggtgaagcagctgagagatgcctttgatgctggggagcggcccagctttgaccgggacacagatgtgcacacagtggccagcctgctgaagctgtacctgcgggacctgcctgagcctgtggtgccctggagccagtatgagggcttcctgctgtgtggccagctgaccaatgctgatgaggccaaggcccagcaggagctgatgaagcagctgagcatcctgccccgggacaactacagcctgctgagctacatctgccgcttcctgcacgagatccagctgaactgtgctgtgaacaagatgtctgtggacaacctggccaccgtgattggagtgaacctgatccgcagcaaggtggaggaccctgctgtgatcatgaggggcaccccccagatccagagggtgatgaccatgatgatccgggaccacgaggtgctcttccccaagagcaaggacatccccctgagccccccagcccagaagaatgaccccaagaaggcccctgtggcccggagctctgtgggctgggatgccacagaggacctgcgcatcagcaggacagacagcttcagctccatgaccagtgacagcgacaccaccagccccaccggccagcagcccagtgatgccttccctgaggacagcagcaaggtgccccgggagaagccaggggactggaagatgcagagcaggaagaggacccagaccctgcccaacaggaagtgcttcctgaccagcgccttccagggcgccaacagcagcaagatggagatcttcaagaatgagttctggagccccagcagcgaggccaaggccggggagggccacaggaggaccatgagccaggacctgcggcagctgagtgacagccagaggaccagcacctatgacaacgtgcccagcctgcccggcagccctggagaggaggccagcgccctgagcagccaggcctgtgacagcaagggggacaccctggccagccccaacagcgagactggacctgggaagaagaacagcggggaggaggagattgacagcctgcagaggatggtgcaggagctgaggaaggagattgagacccagaagcagatgtatgaggagcagatcaagaacctggagaaggagaactatgatgtgtgggccaaggtggtgcggctgaatgaggagctggagaaggagaagaagaagtctgctgccctggagatcagcctgaggaacatggagaggagcagagaagatgtggagaagaggaacaaggccctggaggaggaggtgaaggagtttgtgaagtccatgaaggagcccaagacagaggcctag

SEQ ID NO: 22582 - DNA, 1941 bp, Artificial Sequence
  derived and/or modified sequence
atgagcctgaagctgccccggaactgggacttcaacctgaaggtggaggccgccaaaattgccaggtcgagaagcgtcatgactggtgagcagatggcagcctttcaccccagctctacccccaatccgctggaaaggcccatcaaaatggggtggctgaagaaacaacgaagcatcgtcaagaactggcagcagaggtatttcgtgctccgggctcagcagctttactactataaagacgaagaagacactaaaccacaggggtgcatgtacctccccggatgtacaataaaagaaatcgctaccaaccccgaagaggcagggaaattcgtctttgagattattcctgctagttgggaccaaaatagaatgggacaggactcatacgtgctcatggcctccagtcaggcagagatggaggaatgggttaagtttctgaggcgcgtcgcagggacaccctgcggagccgtatttggacagcggcttgatgaaacagtggcgtacgaacagaagttcggtcctcatctagtgcccatccttgtggagaaatgtgcagagttcattctcgagcatgggcgcaatgaagaaggtatctttcggctgcctggccaggacaacctcgtgaagcagttgagagatgccttcgacgctggcgagcgaccaagcttcgatagggatactgacgtacacacagtggcgtccctgctgaagctttacttgcgcgacctccctgaaccagtggtgccatggtctcagtatgaaggattcctgctgtgtggccagctgaccaacgctgatgaagctaaagctcaacaggaactgatgaaacagttgagtattctgcctagggataactactcactcttgtcgtatatttgcagattcctccatgaaatccaattgaattgcgccgtgaacaaaatgtccgtggacaacctcgccaccgtcattggtgtgaatctcattcggtcaaaagtggaagaccctgcggtgatcatgcgtggcaccccacagatacaacgggttatgacaatgatgatcagagaccacgaagtgttgttccccaaatcaaaggacatcccactgagcccaccagctcagaagaacgaccctaagaaggctcccgttgccagaagctctgtaggctgggacgcaaccgaggatctgaggattagcagaacggacagcttttcttccatgacttcggactctgatacaacatctcccaccggtcagcagccaagcgacgcttttcccgaggacagcagcaaagtccccagagaaaagccaggggattggaagatgcagtccaggaaacgcacccaaaccctccccaatcggaagtgttttctgacttctgcttttcagggagccaacagtagcaagatggagatatttaaaaatgaattttggtctccttcctcagaggctaaggctggggaggggcatagacgtaccatgtctcaagatctgaggcaattgtcagactcccagcggactagcacctacgataacgtgcccagcctgcccggtagtcccggcgaggaggccagcgctctcagcagccaagcgtgtgactctaaaggcgatacactcgcctcccccaattcggagacgggacctggtaagaaaaacagcggggaggaggagatcgattcccttcagaggatggttcaagagctgcgcaaggagattgaaacacaaaagcagatgtatgaggaacagatcaaaaatctcgaaaaggaaaattatgacgtctgggccaaggtagtgcgcctcaacgaggagctggaaaaggagaaaaagaaaagcgccgcgctggagatctcccttcgaaacatggagcggtcaagagaggatgtggagaagcgaaataaagcattagaagaggaagtgaaagagttcgtcaagagtatgaaagagcccaagacagaggcttag

SEQ ID NO: 22583 - DNA, 1941 bp, Artificial Sequence
  derived and/or modified sequence
atgagcttgaagttacctcggaattgggactttaatctcaaggtggaggcagccaaaatcgcaaggtctcggtctgtaatgacaggcgagcaaatggccgcattccatcccagctccacccccaatcctctcgaacgtccgataaagatgggctggctcaaaaaacaacggagcatcgtgaagaactggcagcagcggtacttcgtgctgcgagcacagcagctctactattacaaagatgaagaggacacaaaaccacagggatgcatgtatttacccggatgtacaatcaaagagatcgctaccaacccggaggaggctggcaaattcgtgttcgagatcatcccagcttcttgggatcagaaccgtatgggacaagacagctacgtgttgatggcctcaagccaagcggagatggaagagtgggtgaagtttctacgtcgagtggccggtacaccctgtggcgctgtgttcggccagagacttgacgaaactgtggcttatgaacagaaattcggcccacacctagtgcctatcctcgtggagaaatgcgctgaatttattctggaacacgggaggaacgaagaaggcatcttcagactgccgggacaggataacctcgtaaagcagttacgcgacgcatttgacgccggtgaaagaccatctttcgaccgagataccgatgtgcacaccgtagccagtctgcttaaactttacctgagagacttgcccgaaccagtggttccttggtcccaatacgaggggttcctgctgtgtggacagctgaccaatgccgatgaagccaaagctcagcaggaactgatgaaacagctgtctattctccccagagacaactatagccttttatcatacatctgcagattcttgcatgagatccaactgaattgtgctgtaaataagatgtccgtggataatcttgccaccgttattggcgtgaaccttatccgttcaaaagtagaagatccagcagtgatcatgagggggactccgcagatacagcgggttatgaccatgatgatccgggaccacgaggttctgttcccgaaaagcaaggacatccccctgtcacctccagctcaaaagaatgaccccaagaaggcacccgtggccagaagtagcgtcggttgggacgctactgaagacctgcgtatttcacggaccgacagtttcagctccatgacttccgactcagatactacgtcccccaccggtcaacaaccctcagatgcgtttcccgaagattcaagcaaagtgcctagagagaaaccgggagactggaaaatgcagtcccgaaagaggacccagaccctgcctaaccgcaaatgctttttaactagcgcctttcagggggcaaattcctctaagatggagatttttaagaacgaattctggtccccctcctcagaagcgaaagccggtgaggggcacagaaggactatgtcccaggatctcagacagctctccgattcacagcggacgagcacctacgataacgtgccgtccctacccggatcaccgggtgaagaagcctctgcactatcgtctcaagcctgcgacagcaagggagatacactggccagcccgaatagcgagacgggacccggtaagaagaactccggggaagaagagatcgactcgctgcaacgaatggttcaagagctacgcaaagagatcgaaacacagaagcagatgtacgaagagcagatcaaaaatctggaaaaggaaaattatgacgtgtgggccaaggttgtgagattaaatgaagaactggaaaaagagaagaagaaatcagccgctttagaaataagcctcaggaatatggagcggagccgagaagacgtggaaaagcgcaacaaggccctggaggaagaggtcaaggagttcgtaaagtcgatgaaggaaccaaagactgaagcatag

SEQ ID NO: 22584 - DNA, 2945 bp, Artificial Sequence
  derived and/or modified sequence
agtaaggcctgagattctttcgaaaaggagctttgcttcccatgacgcagagggaagtgtcaactgggatatttctggtaaaactgaaagcaagaaaagcagggtgctagcccctgtgggactgagggtggaggctgggggagtttgggtgccatcctccagtgacagatggatggacctttcatctaagagaaaggaggagacacgttggcaaatcagcctcaagcctaagattgcttgtgaagcaatcataaggaggaacaaaaacagacacaaaaacagagggaaagagtgaaaagacaagaagggcgcaaactgtgacagactcaccgcttcactaactactcacttaaactggaagcaaaatgtccctaaaattgccaaggaactgggatttcaacctgaaagtggaggctgcgaaaatagctcggtcaaggagtgtgatgactggcgagcagatggctgccttccatccatcgtccacccccaacccgctggagaggcccatcaagatgggctggctgaagaagcagaggtccatcgtgaagaactggcagcagaggtactttgtgctgagggcgcagcagctctactactacaaggatgaagaggacacgaagccccagggctgcatgtatctaccaggatgtacaatcaaggagatcgccacaaacccagaagaagctgggaagtttgtctttgaaatcattccagcctcatgggaccagaatcgcatgggacaggactcctatgtcctcatggccagctctcaggcggagatggaggagtgggttaaattcctcaggagagttgctggcacaccctgtggagcagtgtttggccagcgcttggatgagactgtggcctatgaacagaaattcggcccccatctggtgcccatcctggtggagaaatgtgcagagttcatcctggagcacggccggaatgaagagggcatcttccgtctgcctgggcaggacaacctggtgaagcagctgagagacgcttttgatgctggggagcggccctcctttgacagagacacagatgtgcacactgtggcttccctgttaaagctctacctccgagacctcccagagcccgtggttccctggagccagtacgaagggttcctgctctgtgggcagctcacgaatgcggatgaggcaaaggctcagcaggagttgatgaagcagctctccatccttcctcgtgacaactatagtctcctgagctacatctgcaggttcctacatgaaatacagctgaactgtgctgttaacaagatgagtgtggacaacctggctactgtgattggtgtgaatctcatcaggtcgaaggtcgaagaccctgccgtgatcatgagagggactcctcagatccaaagagtgatgactatgatgatcagagaccatgaagtcctcttccccaagtccaaggatatacccctgtcaccccctgcccagaaaaatgaccccaagaaagctccagtggcccgaagctctgtaggctgggatgccactgaagacctccgaatttctaggacagacagcttcagtagcatgacaagcgactctgatacaaccagccccaccggacagcagccgagcgatgcgtttccggaggacagcagcaaagtacccagggaaaagccaggagactggaaaatgcaatctcgtaaaaggactcaaacactccctaaccggaaatgtttcttgacatcagcttttcagggtgccaacagcagcaaaatggagatctttaaaaatgaattctggtcgccttcctcagaggctaaggcaggggaagggcacaggagaacgatgtctcaagacttgcgccaactttctgactcccaacggacttccacctacgataacgtcccttccctgccagggtcccctggggaggaagccagtgcactctcttcccaagcctgtgactccaagggagatactcttgccagtccaaactctgaaactgggcctggaaaaaagaactctggagaagaggaaattgattctttgcagaggatggtccaagagctacgaaaggaaatagaaacacagaagcaaatgtatgaggaacagattaaaaaccttgagaaggaaaattatgacgtttgggctaaagtggtgaggctcaatgaagaactggagaaggaaaagaagaagtctgcagccctagagatcagcctccgcaacatggagcgctcccgggaggatgttgagaagaggaacaaggccttggaagaagaagtcaaggaatttgtcaaatccatgaaggaacccaagaccgaggcttaagggtcccaggagtactgcagggacagccccagagaggcccaactctggcccctttctcagtgctatctgatgacggggaaacaaaattattctctgagagggaaaggacatttgagggaaacatcaaatttccccataaataaatgaatggagtttgcaggaaggtgagggtgagcagagatgtgtgtggacatctctgaccatccatcgctgtattcaaatggattgttttattccattctggtctcaggcatgaccacgtccagtgaagacatttgaggcagcacatctcaggacccaggcaatagactggccccaactcaggctggactaaggtgtgattaattctttgttttttgtgtggaacagctcaccttgtcagacagcctcagggcatctctgagacacaggggcagaaaatgacattcatcttttgagtcctcatccatggagtgctgtgtttggggggctgcatctgctgaagcgagaaccccattctgccaccccaccaggatgcccattctccaggacttctccaacttactattagactaaaccagaacaagcaacaaactgtatttatgcaagcaaaattgatgagaaaattatattcaaataaagcaaaaattaaaaaaaaaa

SEQ ID NO: 22585 - DNA, 1227 bp, Artificial Sequence
  derived and/or modified sequence
gtttacctaagctagcctgggcaatggcgggcgcccctcccccagcttctctgcggccttgcagtttgatctcagactgctgtgctagcaatcagcgagactccgcgggcgtaggaccctccgagccagagtctcctgcaatgattcagacttggctttactggcttcttccatagataagcaccagcctaggagctctcaaagttgttccagctaaaggacacactcagcttttggtctacagtgacttccagcctaagtggctctggacactgctggaaccccccgctccatctccctccataaatatgtctctgcagcagctcggtcaaggagtgtgatgactggcgagcagatggctgccttccatccatcgtccacccccaacccgctggagaggcccatcaagatgggctggctgaagaagcagaggtccatcgtgaagaactggcagcagaggtactttgtgctgagggcgcagcagctctactactacaaggatgaagaggacacgaagccccagggctgcatgtatctaccaggatgtacaatcaaggagatcgccacaaacccagaagaagctgggaagtttgtctttgaaatcattccagcctcatgggaccagaatcgcatgggacaggactcctatgtcctcatggccagctctcaggcggagatggaggagtgggttaaattcctcaggagagttgctggcacaccctgtggagcagtgtttggccagcgcttggatgagactgtggcctatgaacagaaattcggcccccatctggtgcccatcctggtggagaaatgtgcagagttcatcctggagcacggccggaatgaagagggcatcttccgtctgcctgggcaggacaacctggtgaagcagctgagagacgcttttgatgctggggagcggccctcctttgacagagacacagatgtgcacactgtggcttccctgttaaagctctacctccgagacctcccagagcccgtggttccctggagccagtacgaagggttcctgctctgtgggcagctcacgaatgcggatgaggcaaagaactacaggaacaggaatgactgccaaagtgttgtttctgcacagatacaccaattctgtcccagggtctccttgctggcacatgggcaggctcatttactggtaaatgatttacttgtgtaaatctcttcccaggctcagcaggagttgatgaagca

SEQ ID NO: 22586 - DNA, 1101 bp, Artificial Sequence
  derived and/or modified sequence
cagagtctcctgcaatgattcagacttggctttactggcttcttccatagataagcaccagcctaggagctctcaaagttgttccagctaaaggacacactcagcttttggtctacagtgacttccagcctaagtggctctggacactgctggaaccccccgctccatctccctccataaatatgtctctgcagcagctcggtcaaggagtgtgatgactggcgagcagatggctgccttccatccatcgtccacccccaacccgctggagaggcccatcaagatgggctggctgaagaagcagaggtccatcgtgaagaactggcagcagaggtactttgtgctgagggcgcagcagctctactactacaaggatgaagaggacacgaagccccagggctgcatgtatctaccaggatgtacaatcaaggagatcgccacaaacccagaagaagctgggaagtttgtctttgaaatcattccagcctcatgggaccagaatcgcatgggacaggactcctatgtcctcatggccagctctcaggcggagatggaggagtgggttaaattcctcaggagagttgctggcacaccctgtggagcagtgtttggccagcgcttggatgagactgtggcctatgaacagaaattcggcccccatctggtgcccatcctggtggagaaatgtgcagagttcatcctggagcacggccggaatgaagagggcatcttccgtctgcctgggcaggacaacctggtgaagcagctgagagacgcttttgatgctggggagcggccctcctttgacagagacacagatgtgcacactgtggcttccctgttaaagctctacctccgagacctcccagagcccgtggttccctggagccagtacgaagggttcctgctctgtgggcagctcacgaatgcggatgaggcaaagaactacaggaacaggaatgactgccaaagtgttgtttctgcacagatacaccaattctgtcccagggtctccttgctggcacatgggcaggctcatttactggtaaatgatttacttgtgtaaatctcttcccaggctcagcaggagttgatgaagca

SEQ ID NO: 22587 - DNA, 1941 bp, Artificial Sequence
  derived and/or modified sequence
atgagcctgaagctgcccagaaactgggacttcaacctgaaggtggaggccgccaagatcgccagaagcagaagcgtgatgaccggcgagcagatggccgccttccaccccagcagcacccccaaccccctggagagacccatcaagatgggctggctgaagaagcagagaagcatcgtgaagaactggcagcagagatacttcgtgctgagagcccagcagctgtactactacaaggacgaggaggacaccaagccccagggctgcatgtacctgcccggctgcaccatcaaggagatcgccaccaaccccgaggaggccggcaagttcgtgttcgagatcatccccgccagctgggaccagaacagaatgggccaggacagctacgtgctgatggccagcagccaggccgagatggaggagtgggtgaagttcctgagaagagtggccggcaccccctgcggcgccgtgttcggccagagactggacgagaccgtggcctacgagcagaagttcggcccccacctggtgcccatcctggtggagaagtgcgccgagttcatcctggagcacggcagaaacgaggagggcatcttcagactgcccggccaggacaacctggtgaagcagctgagagacgccttcgacgccggcgagagacccagcttcgacagagacaccgacgtgcacaccgtggccagcctgctgaagctgtacctgagagacctgcccgagcccgtggtgccctggagccagtacgagggcttcctgctgtgcggccagctgaccaacgccgacgaggccaaggcccagcaggagctgatgaagcagctgagcatcctgcccagagacaactacagcctgctgagctacatctgcagattcctgcacgagatccagctgaactgcgccgtgaacaagatgagcgtggacaacctggccaccgtgatcggcgtgaacctgatcagaagcaaggtggaggaccccgccgtgatcatgagaggcaccccccagatccagagagtgatgaccatgatgatcagagaccacgaggtgctgttccccaagagcaaggacatccccctgagcccccccgcccagaagaacgaccccaagaaggcccccgtggccagaagcagcgtgggctgggacgccaccgaggacctgagaatcagcagaaccgacagcttcagcagcatgaccagcgacagcgacaccaccagccccaccggccagcagcccagcgacgccttccccgaggacagcagcaaggtgcccagagagaagcccggcgactggaagatgcagagcagaaagagaacccagaccctgcccaacagaaagtgcttcctgaccagcgccttccagggcgccaacagcagcaagatggagatcttcaagaacgagttctggagccccagcagcgaggccaaggccggcgagggccacagaagaaccatgagccaggacctgagacagctgagcgacagccagagaaccagcacctacgacaacgtgcccagcctgcccggcagccccggcgaggaggccagcgccctgagcagccaggcctgcgacagcaagggcgacaccctggccagccccaacagcgagaccggccccggcaagaagaacagcggcgaggaggagatcgacagcctgcagagaatggtgcaggagctgagaaaggagatcgagacccagaagcagatgtacgaggagcagatcaagaacctggagaaggagaactacgacgtgtgggccaaggtggtgagactgaacgaggagctggagaaggagaagaagaagagcgccgccctggagatcagcctgagaaacatggagagaagcagagaggacgtggagaagagaaacaaggccctggaggaggaggtgaaggagttcgtgaagagcatgaaggagcccaagaccgaggcctag

SEQ ID NO: 22588 - DNA, 1017 bp, Artificial Sequence
  derived and/or modified sequence
atgctgagcggcggcagcgacggcgtgatcgtgctgtacgacctggagaacagcagcagacagagctactacacctgcaaggccgtgtgcagcatcggcagagaccaccccgacgtgcacagatacagcgtggagaccgtgcagtggtacccccacgacaccggcatgttcaccagcagcagcttcgacaagaccctgaaggtgtgggacaccaacaccctgcagaccgccgacgtgttcaacttcgaggagaccgtgtacagccaccacatgagccccgtgagcaccaagcactgcctggtggccgtgggcaccagaggccccaaggtgcagctgtgcgacctgaagagcggcagctgcagccacatcctgcagggccacagacaggagatcctggccgtgagctggagccccagatacgactacatcctggccaccgccagcgccgacagcagagtgaagctgtgggacgtgagaagagccagcggctgcctgatcaccctggaccagcacaacggcaagaagagccaggccgtggagagcgccaacaccgcccacaacggcaaggtgaacggcctgtgcttcaccagcgacggcctgcacctgctgaccgtgggcaccgacaacagaatgagactgtggaacagcagcaacggcgagaacaccctggtgaactacggcaaggtgtgcaacaacagcaagaagggcctgaagttcaccgtgagctgcggctgcagcagcgagttcgtgttcgtgccctacggcagcaccatcgccgtgtacaccgtgtacagcggcgagcagatcaccatgctgaagggccactacaagaccgtggactgctgcgtgttccagagcaacttccaggagctgtacagcggcagcagagactgcaacatcctggcctgggtgcccagcctgtacgagcccgtgcccgacgacgacgagaccaccaccaagagccagctgaaccccgccttcgaggacgcctggagcagcagcgacgaggagggctag

SEQ ID NO: 22589 - DNA, 1017 bp, Artificial Sequence
  derived and/or modified sequence
atgctgtctggggggtcagatggcgtgattgtactgtacgatctggagaattcaagtcgccaaagctattacacgtgtaaggccgtgtgttccatcggtagagatcaccctgacgtgcatcgctacagcgttgagactgtccagtggtacccccacgacacagggatgttcaccagttccagtttcgacaagacacttaaggtctgggatactaatactctgcagacagcggacgtgttcaattttgaagagactgtctactcacatcacatgagcccagttagcactaaacactgcttggtggcagtaggaacccgtggccctaaggtgcagctgtgtgatctcaagagcggttcctgtagccacattttgcagggccacaggcaggaaatactagccgtgtcttggagccctcgatatgactatatcctagctacagcttctgccgatagccgggtgaagctctgggatgtgagaagagcaagcggctgcttgatcaccttggatcagcataacgggaagaagagccaggccgtggaaagcgctaacacagcacacaacgggaaggtgaacggtctgtgttttacgtccgacggcttgcaccttctgaccgtcggaactgacaatagaatgcgactgtggaactcttctaatggagaaaacactctggtgaattatggaaaagtgtgcaataattccaagaaaggtctcaagtttacagtttcctgcggctgcagcagcgaattcgtgtttgtgccctatggatccaccatagcagtctatacagtttacagtggggaacagatcacaatgctgaaaggtcattataaaaccgtggattgttgcgtttttcagtccaatttccaggaattgtacagtggcagcagggattgcaatatcctagcctgggtgccatcactttacgaacctgttcccgacgatgacgagaccacaactaaaagtcagctgaacccggccttcgaagacgcctggtctagcagtgacgaggaaggctag

SEQ ID NO: 22590 - DNA, 2236 bp, Artificial Sequence
  derived and/or modified sequence
gtcatggcgacgtccagtgctccagccggtgtgaggacacgatatgctggggtttttgtccgcacgccaaacgggtttggaggaccctcttcgccttcggagagcagagtcaacacggagagttttgggactggaattaaataaagacagagatgttgaaagaatccacggcggtggaattaacacccttgacattgaacctgttgaagggagataaaatgaagcttcttatccaagatgctcaaggaaataaaatgtgagtcaaggattttatatccagccaaactgatttcagatacaaaaaggacggataaattgtcaacaacacaagaattcagagactgttgttctcattagccattccttaggaatcaaccagagaatgaaatcattcaaccagaatgacaagagagacagcaacttaaggattgacgcatgttatcaggtggttcagatggtgtgattgtactttatgaccttgagaactccagcagacaatcttattacacatgtaaagcagtgtgttccattggcagagatcatcctgatgttcacagatacagtgtggagactgtacagtggtatcctcatgacactggcatgttcacatcaagctcatttgataaaactctgaaagtatgggatacaaatacattacaaactgcagatgtatttaattttgaggaaacagtttatagtcatcatatgtctccagtctccaccaagcactgtttggtagcagttggtactagaggacccaaagtacaactttgtgacttgaagtctggatcctgttctcacattctacagggtcacagacaagaaatattagcagtttcctggtctccacgttatgactatatcttggcaacagcaagtgctgacagtagagtaaaattatgggatgtgagaagagcatcaggatgtttgattactcttgatcaacataatgggaaaaagtcacaagctgttgaatcagcaaacactgctcataatgggaaagttaatggcttatgttttacaagtgatggacttcacctcctcactgttggtacagataatcgaatgaggctctggaatagttccaatggagaaaacacacttgtgaactatggaaaagtttgtaataacagtaaaaaaggattgaaattcactgtctcctgtggctgcagttcagaatttgtttttgtaccatatggtagcaccattgctgtttatacagtttactcaggagaacagataactatgcttaagggacattataaaactgttgactgctgtgtatttcagtcaaatttccaggaactttatagtggtagcagagactgcaacattctggcttgggttccatccttatatgaaccagttcctgatgatgatgagactacaacaaaatcacaattaaatccggcctttgaagatgcctggagcagcagtgatgaagaaggatgaatatcatctttagtacctttttgtctctgctgaaactttttaaatgagactgtgtttttttcaactgtatggtctattcctgacagctaaattagccctaaatgtgggtaatatttttcctcatgttttaaaatgaggttaatatttgcataaaatcctaaaacagacttctgtatagtttatttagtcaaaatgtgttccttgatcccagatgttgtggcctgggaaagccctcattgctacagtacaagtaacacaagtcgttgtacctcagttgtgaccttcagcagattttatgaactataagatgcagtctcagaggatcagcaagtggaggccatcagtattgactttctcttacttgctgtactatcagcctgctcgtttccacctttaagaatgattttgccaagaatgattatatcaaaaatagtagttgaaatggtaacatcaaaattattttattctttcttcttcatgtattcacatttttcagtggtttcatttaattaaccatgctttatgttaaacattttggggctcaatgtctcctactatccaaaatgtgcatcacaggaggcttttaactttgtgaaaatcccatgtttgctttattttattttaatgtcagaaggcagtttgcgctaatgcttgaactctttttctgtgaaactcattaaggtatgaccaaatcctgcctcattaattcaagcagaaaatatcctggcagggaatctggcttaaacatgaaatgctgtaataaaatttctatgttattgtctcc

SEQ ID NO: 22591 - DNA, 1017 bp, Artificial Sequence
  derived and/or modified sequence
atgctgagcggcggcagtgatggagtcatcgtgctgtatgacctggagaacagcagccggcagagctactacacctgcaaggctgtgtgcagcatcggccgggaccacccagatgtgcaccgctacagcgtggagaccgtgcagtggtacccccatgacaccggcatgttcaccagcagcagctttgacaagaccctgaaggtgtgggacaccaacaccctgcagacagcagatgtgttcaactttgaggagaccgtgtacagccaccacatgagccctgtgtccaccaagcactgcctggtggccgtgggcacccggggccccaaggtgcagctgtgtgacctgaagagcggcagctgcagccacatcctgcagggccaccggcaggagatcctggccgtgtcctggagccccaggtatgactacatcctggccacagccagcgctgacagccgggtgaagctgtgggatgtgagaagagccagcggctgcctgatcaccctggaccagcacaacgggaagaagagccaggccgtggagagcgccaacacagcccacaacgggaaggtgaatggcctgtgcttcaccagtgatggcctgcacctgctgactgtgggcacagacaacaggatgaggctgtggaacagcagcaatggagagaacaccctggtgaactacggcaaggtgtgcaacaacagcaagaagggcctgaagttcaccgtgtcctgtggctgcagcagcgagtttgtgtttgtgccctacggcagcaccatcgctgtgtacacagtgtacagcggggagcagatcaccatgctgaagggccactacaagacagtggactgctgcgtgttccagagcaacttccaggagctgtacagcggcagccgggactgcaacatcctggcctgggtgcccagcctgtatgagcctgtgcctgatgatgatgagaccaccaccaagagccagctgaacccagcctttgaagatgcctggagcagcagtgatgaggagggctag

SEQ ID NO: 22592 - DNA, 1017 bp, Artificial Sequence
  derived and/or modified sequence
atgctgagcggcggcagcgacggcgtgatcgtgctgtacgacctggaaaacagctcccgccaatcatactacacctgcaaggctgtctgttcaattgggagggaccacccggacgtccatcggtactctgtcgagactgtgcagtggtacccgcatgataccgggatgttcactagctcctcattcgataagacactaaaggtgtgggataccaacaccctgcagactgccgatgtgtttaacttcgaagagaccgtctacagccatcatatgagcccagttagcacaaaacattgcctcgtcgcagtgggaaccagagggccaaaagtgcaactctgtgatctgaagagtggctcctgctcacacatactgcagggccatcgccaggaaatcctggccgtgagctggagtcccaggtacgactatattcttgctaccgcgagcgctgatagtagggtgaagctgtgggacgtcaggagggcctcaggctgcctgattaccctcgatcagcataatggcaagaaatcccaggcggttgagtccgccaacactgcacataacgggaaggtgaacggactgtgtttcacctccgacggcctgcacctgctaaccgtcggaaccgacaacagaatgcgactgtggaattccagtaatggcgagaacaccctggtaaattacggtaaagtctgtaataacagtaaaaagggccttaagtttacagtgagttgcggatgttctagcgaatttgtgtttgtgccctacgggtccaccatagctgtgtacactgtctacagcggtgaacagatcactatgcttaagggccactacaaaacagtagattgctgtgtgtttcagagcaacttccaagaactctactcaggatcccgcgattgtaatatcctggcctgggttccctccctgtacgagcctgtgcctgacgatgatgagactacgacaaagtcacaactcaatcctgccttcgaggacgcctggtcatctagcgatgaggagggatag

SEQ ID NO: 22593 - DNA, 1017 bp, Artificial Sequence
  derived and/or modified sequence
atgctgtccggaggcagcgatggtgtcatagtcctttatgatttggagaatagttcccgccagagttactacacttgtaaagcagtgtgctccatcggtcgcgatcatcctgatgtgcacaggtatagcgtcgaaacggtgcaatggtatccccatgacacaggcatgtttacaagcagcagtttcgataagaccctgaaagtgtgggacactaacaccctgcagaccgctgatgtgttcaatttcgaagaaacggtatactcgcatcatatgagcccagtgagcactaagcactgcctcgtggcggttgggacccgcggtccaaaggtccagttgtgtgatctcaaatcggggagttgttcccacattttacagggacatagacaagaaatacttgccgtgtcctggagtccaagatatgactatatcttggccacggcctcagctgatagccgggtgaaactctgggacgtgaggagagcgagtggatgtctgatcactcttgatcagcacaatggcaaaaaaagtcaggcggttgagtcggcgaacacagcgcataacggcaaagtgaatggcctttgttttacaagtgatggcctgcaccttctgactgtgggtacagataatagaatgagactgtggaacagctctaacggtgaaaacacactggtgaattacgggaaggtctgtaataactccaagaaaggccttaagttcacggtctcttgcggttgtagttctgagtttgtttttgttccttatggaagcaccatcgctgtgtatactgtgtattctggtgaacaaatcactatgcttaagggtcactacaagaccgtggactgttgtgtgttccagtctaatttccaggaattgtattccgggagcagggattgcaacattcttgcttgggtgccgtcgctgtacgaaccagttcccgatgacgacgagacaaccacaaagagtcagctgaacccagcatttgaagacgcttggtcctctagcgatgaggaaggctag

SEQ ID NO: 22594 - protein, 543 aa, Artificial Sequence
  derived and/or modified sequence
MNLLPKSSREFGSVDYWEKFFQQRGKKAFEWYGTYLELCGVLHKYIKPREKVLVIGCGNSELSEQLYDVGYRDIVNIDISEVVIKQMKECNATRRPQMSFLKMDMTQMEFPDASFQVVLDKGTLDAVLTDEEEKTLQQVDRMLAEVGRVLQGRETEWLFGMDEGRKQLAASAGFRRLITVALHRGQQYESMDHIQAELSARVMELAPAGMPTQQQVPFLSVGGDIGVRTVQHQDCSPLSGDYVIEDVQGDDKRYFRRLIFLSNRNVVQSEARLLKDVSHKAQKKRKKDRKKQRPADAEDLPAAPGQSIDKSYLCCEHHKAMIAGLALLRNPELLLEIPLALLVVGLGGGSLPLFVHDHFPKSCIDAVEIDPSMLEVATQWFGFSQSDRMKVHIADGLDYIASLAGGGEARPCYDVIMFDVDSKDPTLGMSCPPPAFVEQSFLQKVKSILTPEGVFILNLVCRDLGLKDSVLAGLKAVFPLLYVRRIEGEVNEILFCQLHPEQKLATPELLETAQALERTLRKPGRGWDDTYVLSDMLKTVKIV

SEQ ID NO: 22595 - DNA, 1632 bp, Artificial Sequence
  derived and/or modified sequence
atgaacctgctgcccaagagcagcagagagttcggcagcgtggactactgggagaagttcttccagcagagaggcaagaaggccttcgagtggtacggcacctacctggagctgtgcggcgtgctgcacaagtacatcaagcccagagagaaggtgctggtgatcggctgcggcaacagcgagctgagcgagcagctgtacgacgtgggctacagagacatcgtgaacatcgacatcagcgaggtggtgatcaagcagatgaaggagtgcaacgccaccagaagaccccagatgagcttcctgaagatggacatgacccagatggagttccccgacgccagcttccaggtggtgctggacaagggcaccctggacgccgtgctgaccgacgaggaggagaagaccctgcagcaggtggacagaatgctggccgaggtgggcagagtgctgcagggcagagagaccgagtggctgttcggcatggacgagggcagaaagcagctggccgccagcgccggcttcagaagactgatcaccgtggccctgcacagaggccagcagtacgagagcatggaccacatccaggccgagctgagcgccagagtgatggagctggcccccgccggcatgcccacccagcagcaggtgcccttcctgagcgtgggcggcgacatcggcgtgagaaccgtgcagcaccaggactgcagccccctgagcggcgactacgtgatcgaggacgtgcagggcgacgacaagagatacttcagaagactgatcttcctgagcaacagaaacgtggtgcagagcgaggccagactgctgaaggacgtgagccacaaggcccagaagaagagaaagaaggacagaaagaagcagagacccgccgacgccgaggacctgcccgccgcccccggccagagcatcgacaagagctacctgtgctgcgagcaccacaaggccatgatcgccggcctggccctgctgagaaaccccgagctgctgctggagatccccctggccctgctggtggtgggcctgggcggcggcagcctgcccctgttcgtgcacgaccacttccccaagagctgcatcgacgccgtggagatcgaccccagcatgctggaggtggccacccagtggttcggcttcagccagagcgacagaatgaaggtgcacatcgccgacggcctggactacatcgccagcctggccggcggcggcgaggccagaccctgctacgacgtgatcatgttcgacgtggacagcaaggaccccaccctgggcatgagctgccccccccccgccttcgtggagcagagcttcctgcagaaggtgaagagcatcctgacccccgagggcgtgttcatcctgaacctggtgtgcagagacctgggcctgaaggacagcgtgctggccggcctgaaggccgtgttccccctgctgtacgtgagaagaatcgagggcgaggtgaacgagatcctgttctgccagctgcaccccgagcagaagctggccacccccgagctgctggagaccgcccaggccctggagagaaccctgagaaagcccggcagaggctgggacgacacctacgtgctgagcgacatgctgaagaccgtgaagatcgtgtag

SEQ ID NO: 22596 - DNA, 1632 bp, Artificial Sequence
  derived and/or modified sequence
atgaatctccttccaaagtccagtcgggagttcgggtcagttgattattgggaaaagtttttccaacagcgcggcaagaaggcctttgaatggtatgggacctatctggaactttgtggggtcctgcacaagtatatcaagccaagggaaaaagtactggtcattgggtgcgggaactccgaactgtcagagcagttgtacgatgtaggctaccgggacatcgtcaacatagatattagtgaggttgtaatcaagcaaatgaaggagtgtaacgccacaagacggccgcagatgtccttcctgaagatggatatgactcagatggaattccccgatgcttcctttcaagtggtgttagacaaggggactcttgatgccgtccttacggacgaggaagagaaaactctgcagcaggtggatcgaatgttagcagaggtggggagggtactgcagggacgcgagacggaatggcttttcgggatggatgagggacgaaagcagcttgccgcttccgcagggttcagacgccttattactgtggctttgcatcgtggacaacagtatgagtcaatggaccatattcaggccgagctgtctgccagggtgatggaactggcacctgccgggatgcctacacagcaacaggtcccattcttgtccgtcggtggggacattggagtgcggacagtgcaacaccaagactgctccccactgagtggggattatgtaattgaggatgtgcaaggcgatgacaagcgctattttaggcgtctcatctttctctcaaatagaaatgtggtgcagtccgaagcgagactgctcaaggacgtgagtcacaaagcccagaaaaagaggaagaaggaccgcaagaaacaacggcctgctgatgccgaagatttgcccgcggcacccgggcagagcatagataagtcctacctctgttgcgaacaccacaaagccatgatcgcagggctggccttgctgcgaaaccccgagctgttgctggagatcccactggctttgctcgtggtcggcctggggggaggctcccttcccctgttcgtgcatgatcattttcctaaatcttgcattgatgccgtggaaattgacccaagtatgctcgaagttgctacccagtggttcggcttttctcagagtgataggatgaaagttcacattgccgatggactcgactatattgccagcttagccgggggaggcgaggcacggccctgttacgacgttatcatgttcgatgtggactccaaggaccccacactaggtatgagctgtcctcctcctgcattcgtcgagcagtccttcctgcagaaggttaagtccatcctcacacccgaaggtgtctttatcttgaacctggtttgtagagatctcggtttgaaagacagcgtgctcgctggccttaaagcagtattcccattgctgtacgttcgccgcatcgagggcgaggtgaacgagattctgttctgtcagctgcatcctgaacagaagttggccaccccagaacttttagaaactgctcaagctctggagcgcacgttgagaaaaccaggtagagggtgggatgacacttatgtcttatcagacatgttgaaaacggtgaaaatagtgtag

SEQ ID NO: 22597 - DNA, 1632 bp, Artificial Sequence
  derived and/or modified sequence
atgaacctgctgcccaagagcagccgggagtttggatctgtggactactgggagaagttcttccagcagaggggcaagaaggcctttgagtggtacggcacctacctggagctgtgtggggtgctgcacaagtacatcaagccccgggagaaggtgctggtgattggctgcggcaacagcgagctgtctgagcagctgtatgatgtgggctacagagacatcgtgaacatcgacatcagcgaggtggtgatcaagcagatgaaggaatgtaatgccacccggcggccccagatgtccttcctgaagatggacatgacccagatggagttcccagatgccagcttccaggtggtgctggacaagggcaccctggatgctgtgctgacagatgaggaggagaagaccctgcagcaggtggacaggatgctggccgaggtgggccgggtgctgcagggccgggagacagagtggctgtttggcatggatgagggcaggaagcagctggccgccagcgctggcttcagaagactcatcaccgtggccctgcaccggggccagcagtatgagagcatggaccacatccaggccgagctgagcgcccgggtgatggagctggccccagctggcatgcccacccagcagcaggtgcccttcctgtctgtgggcggggacattggagtgaggacagtgcagcaccaggactgcagccccctgagcggggactatgtgattgaagatgtgcagggagatgacaagcgctacttccggcggctcatcttcctgagcaacagaaatgtggtgcagagcgaggcccggctgctgaaggatgtgagccacaaggcccagaagaagaggaagaaggacaggaagaagcagaggcctgcagatgctgaggacctgcctgctgcccctggccagagcattgacaagagctacctgtgctgtgagcaccacaaggccatgattgctggcctggccctgctgagaaatcctgagctgctgctggagatccccctggccctgctggtggtgggcctgggcggcggcagcctgcccctgtttgtgcatgaccacttccccaagagctgcattgatgctgtggagattgaccccagcatgctggaggtggccacccagtggtttggcttcagccagagcgacaggatgaaggtgcacatcgcagatggcctggactacatcgccagcctggccggcggcggggaggcccggccctgctatgatgtgatcatgtttgatgtggacagcaaggaccccaccctgggcatgagctgccccccaccagcctttgtggagcagagcttcctgcagaaggtgaagagcatcctgaccccagagggcgtcttcatcctgaacctggtgtgccgggacctgggcctgaaggacagcgtgctggccggcctgaaggctgtgttccccctgctgtatgtgcggcgcatcgagggggaggtgaatgagatcctcttctgccagctgcaccctgagcagaagctggccaccccagagctgctggagacagcccaggccctggagaggaccctgaggaagccaggccggggctgggatgacacctacgtgctgagtgacatgctgaagacagtgaagatcgtgtag

SEQ ID NO: 22598 - DNA, 1632 bp, Artificial Sequence
  derived and/or modified sequence
atgaacctgctgcccaagagcagccgggagttcggcagcgtggactattgggaaaagttcttccaacagcgcggcaaaaaggcttttgagtggtacggaacatatctggaactttgtggcgtgctgcacaagtacattaaaccacgggagaaggtgctcgttatcgggtgtggcaacagcgaactcagcgagcagttatacgacgtggggtatagagacatcgtgaacattgatatctctgaagtagtcatcaagcaaatgaaggaatgcaatgccactcgccggcctcagatgtcttttctgaaaatggatatgacacagatggagttccccgacgcatcattccaggtcgttttagataaggggactttggacgcggtcctgactgatgaggaagagaagacactgcagcaggtggaccgcatgttggccgaagttgggagagttctgcagggtcgggaaacagaatggttgtttggcatggacgaaggccgaaaacagctggcagcttccgctgggttccgtagattgattacagtcgcgttacaccggggacaacagtacgagtccatggatcatatacaggctgagctgagtgcccgcgtaatggaactggccccggcgggcatgccaacccagcaacaggtgccattcctctccgtcgggggagatattggggttcgtactgttcagcatcaagactgttccccgctgtccggcgactacgtgatcgaggatgttcagggagatgataagaggtactttcggcgccttatctttctttcaaacagaaatgtcgtccagtcggaggcaagactcctaaaggatgtctcccacaaggcccaaaagaagagaaagaaggaccgaaagaaacagaggcccgccgacgctgaggatctgccagccgccccaggacagtcgatagataaatcatacctgtgctgcgaacaccacaaagcaatgatcgcgggcctggcgctgcttcgtaacccggagttgctgcttgaaattcctttggcccttcttgttgtggggctgggggggggttcactgcccctgtttgtccatgatcattttcccaagtcttgcattgatgccgtcgagattgatcccagtatgctggaggtggccacccagtggttcggttttagtcagtctgaccgtatgaaagttcatattgcagatggactggattatatcgcttcactagccggcgggggcgaggctcgcccgtgttatgacgttatcatgtttgacgtggattccaaagacccaaccctaggaatgagttgccctccacccgcctttgtggaacagagcttcctacagaaagtcaagtccatactcacaccggagggcgttttcatcttaaatctggtgtgtagagacctaggattgaaagactcagtacttgctggtctgaaggccgtatttccactgctgtatgtgcggcggatcgaaggcgaggttaatgagattctgttttgccagctgcaccccgaacagaaactcgccacacctgagcttctggagaccgcccaggctcttgaaaggactctgcgcaaacccgggagggggtgggatgacacctacgttctttcagacatgctgaaaaccgtgaagatagtatag

SEQ ID NO: 22599 - DNA, 2865 bp, Artificial Sequence
  derived and/or modified sequence
ggaaaagtgtgaggggctcttcacgtggggaaggaacagcaggcgcggaggagggggcaagcgtgtgtgagattcagtggtccatgcgtgcgtttgtcgtgtaagggtcattcctggggtttggagtgggggaacaaatcaatgtggctgtttttccgtggaaagaattcccactgcagtgtcccggagcctgcgtgtggtgggcaagctcctcaaatggtatctcacagggaataggggagtcttgaaaacgcagcttcggcagtaggaacatgaacctcttacctaaaagttccagggagtttggctccgttgactattgggagaagttcttccagcagcgaggaaagaaagctttcgagtggtatggaacctacctggaactgtgcggggtgctacataaatatatcaagcccagggaaaaggtgctggtgattgggtgtggcaactcagaactgagtgagcaactgtatgatgtgggctatcgggatatagtgaacatcgacatcagtgaggttgtcatcaagcaaatgaaggaatgtaatgccacccgacggccccagatgagcttcttgaagatggacatgacgcagatggagtttcctgatgcctcgttccaggtggtgttggacaagggcaccctggatgctgtcctgacagatgaggaagagaagaccttacaacaggtggacaggatgctggctgaggttggccgtgtcctgcagggccgggagaccgagtggctctttggcatggatgagggccggaaacagctggcggccagtgctggcttcaggaggttgattacagtggcccttcaccgaggtcagcagtatgaaagcatggaccacatccaagctgagctgtcggctagagtcatggagctggccccagctgggatgcccacccagcagcaggtcccctttctgtctgtgggtggggacattggggtccggaccgttcagcaccaagactgcagccccttgagcggtgactatgtcattgaggatgtgcaaggggatgacaagcgatacttccgtcgactgatcttcctcagcaacaggaatgtggtgcagtccgaagccaggttgctgaaggatgtgtctcacaaagcccagaagaagcggaaaaaggacaggaagaagcagcggcctgctgatgcggaggacctccctgcagccccggggcagtccattgataagagttacctgtgttgtgaacaccacaaagccatgatcgctggccttgccctgctgagaaacccagagctactcctagagatcccactggcattgttggtggtaggcctgggcgggggcagcctccccctctttgtccacgatcattttccaaagtcctgcattgatgctgtggagatcgatccctccatgttggaagtggccacccagtggtttggcttctcccagagtgaccgaatgaaggtccacattgcagatggcctggactatatcgccagcttggcaggaggaggagaagcacggccttgctacgatgtcataatgtttgatgttgacagtaaggacccaacactgggaatgagttgtccgcccccagcatttgtggagcaatcttttctacagaaggttaaaagcatcttgactcctgaaggtgtttttattctcaaccttgtgtgccgagacttggggctaaaagactcagtgctggctgggctcaaggcagtgttccccctcctatatgtccggcgaattgagggtgaagtgaatgagatcctgttctgtcagctgcaccctgagcaaaaacttgccacaccagagctcctagaaacagcccaggctttggagcggaccctgaggaagcctgggaggggttgggatgacacgtatgtcttgtcagatatgctcaagacggtgaaaattgtgtgactgcttaggccaagcagccctcctgcctagactgaccttggactcccagcctgccagagaatgaagaaatacaacgcacagtacttttgaagcttcgtatttttcttggtttcacactcagctacatgtgacctccagcttggtgaggttgcctgaagattagggaaaataaaaatgtccttcccatcttgtcctcttcagtaccacttgggttggtttgtctttgcttcctacaccacgtccttgagtggagttccctgctgaagcccctagcacacactgcatgccttaacaagtgtgtgcaagcccctcagaactcaagacatccaaattttattgcgtctctacttatactggtttgcttttgatttattcctctattagttctataggagtgatctcaagtgagatagcagagcaagatgccaaaagaccataaatagagtaaggtttctatagatgtgagacagatttgagagagcatttactctgtctccctgtggatgaaactgctgctgaaatggttccaatttttaggaatctgcttacccacttcattatttgacagctttccttggtgacccaaaccttgtagcctaagccatttgtctttttctcagtggagggagtgtatggacctggccccatggctttgcatgttagagacctggcagactaaagtctctagtgtttgtttgctcacatttgctgagtgacagctatgtgccagactgcataaagggtggtggcagaagtgaaaatgtttaagaatgaccaaaaacattagtaatgaaagttaatgtgttccaggcattcttctaagtggtttacatgcactgtctcatttaatctgagataaaggatacttaagcccaaactatatctaaacccaaatctcacttggctggaaacatcaatcttaaccatttattcagaaccattaaaccaatgattccaagac

SEQ ID NO: 22600 - DNA, 1632 bp, Artificial Sequence
  derived and/or modified sequence
atgaacctgctcccaaagtccagtcgggaattcggttctgtggactattgggagaagttctttcaacaaaggggtaaaaaagcctttgagtggtacgggacataccttgagctttgcggcgttctccataaatacattaaacccagagaaaaggtgttagttattggatgtggcaacagtgagctaagcgagcagctgtatgatgtaggctatagggacattgttaacattgacatatccgaggtggtcatcaaacagatgaaagagtgcaatgctacacgaaggccccagatgtccttcctcaaaatggatatgactcagatggagtttcctgacgccagctttcaggtggtgctggacaaaggcaccttagacgccgtgctgactgacgaggaagaaaagaccctccaacaggtcgatagaatgctcgcggaagtgggccgagtgctccagggcagggaaaccgaatggctgttcggaatggacgagggacgtaagcagctcgcggctagcgccggatttcggaggttaatcaccgtggccttgcatcggggacaacagtatgagagcatggatcacattcaggcagaacttagcgcaagagttatggagctcgcccctgcaggcatgcctactcagcagcaggtgccatttctctcggttggaggcgacatcggagttcggactgtgcagcaccaggactgttcaccattatcaggagattacgtgatcgaggatgtgcagggggacgataaacggtactttcggaggcttatttttttgtcaaataggaatgtcgtacagtccgaagctcggctcctgaaggatgtgagccacaaagctcagaaaaagcggaagaaagatcgaaagaagcagaggcctgccgacgccgaagatctgcccgctgcccctgggcaatccatcgacaagagctatctttgctgtgaacaccataaagcgatgatcgcgggactcgctttgttaagaaaccctgaactgctgctggaaatcccgctcgcactgctggtggttggcctgggtggaggtagcttacccctcttcgtgcatgaccatttccctaaatcttgtatagacgccgtcgaaattgaccctagcatgcttgaagttgccacgcagtggttcgggttttctcagtccgatcgcatgaaagtgcacatcgctgatggcctcgattatatcgccagtctcgccggagggggtgaagccagaccctgctacgacgttatcatgtttgatgtcgatagcaaagaccctactctgggtatgagttgcccccctcctgccttcgtggagcagtcttttctccaaaaagtaaagagcatcctgacccctgaaggcgttttcatactcaacttggtctgccgggatctgggcctgaaagactctgtgctggccggtctgaaggccgtcttccctttactgtacgtgcgccgaattgaaggggaagtgaacgagattctgttctgccagctgcacccggagcagaaactagccacaccggaactgcttgaaaccgcccaagcacttgagcggaccctgagaaagcctggcagaggatgggatgacacttatgtgctgtctgacatgctgaagacagtgaaaattgtctag

SEQ ID NO: 22601 - protein, 537 aa, Artificial Sequence
  derived and/or modified sequence
MPHLMERMVGSGLLWLALVSCILTQASAVQRGYGNPIEASSYGLDLDCGAPGTPEAHVCFDPCQNYTLLDEPFRSTENSAGSQGCDKNMSGWYRFVGEGGVRMSETCVQVHRCQTDAPMWLNGTHPALGDGITNHTACAHWSGNCCFWKTEVLVKACPGGYHVYRLEGTPWCNLRYCTVPRDPSTVEDKCEKACRPEEECLALNSTWGCFCRQDLNSSDVHSLQPQLDCGPREIKVKVDKCLLGGLGLGEEVIAYLRDPNCSSILQTEERNWVSVTSPVQASACRNILERNQTHAIYKNTLSLVNDFIIRDTILNINFQCAYPLDMKVSLQAALQPIVSSLNVSVDGNGEFIVRMALFQDQNYTNPYEGDAVELSVESVLYVGAILEQGDTSRFNLVLRNCYATPTEDKADLVKYFIIRNSCSNQRDSTIHVEENGQSSESRFSVQMFMFAGHYDLVFLHCEIHLCDSLNEQCQPSCSRSQVRSEVPAIDLARVLDLGPITRRGAQSPGVMNGTPSTAGFLVAWPMVLLTVLLAWLF

SEQ ID NO: 22602 - DNA, 1614 bp, Artificial Sequence
  derived and/or modified sequence
atgccccatctaatggagagaatggttgggtcagggctgctgtggttggctctggtctcttgcatcctgacccaggctagcgccgtacagcgaggatacggcaaccccatagaggcctctagttatggacttgatttggactgcggcgcccccggcacgcctgaagcccacgtctgttttgatccctgccaaaactatacccttttggacgagccattccgctctacggaaaatagcgctggttctcagggttgtgacaagaatatgagtggctggtacagattcgtaggagagggcggagtacggatgtctgagacctgtgtccaggtgcacagatgccaaacagacgcaccgatgtggttgaatggcactcatccggcactaggagatggaattaccaatcacacagcatgtgctcattggtctggcaactgttgtttctggaaaacagaggtgcttgtgaaggcctgccctggggggtatcacgtgtaccgcctggaaggtactccatggtgcaacctgagatactgtacagttcctcgggatccatccacggtggaagacaaatgcgaaaaggcatgccggcctgaagaagagtgcctggcactgaacagcacttgggggtgtttctgcaggcaggatctcaattcgtccgacgtccattcactgcaaccacagctggactgcggcccccgtgagatcaaagtgaaggtggacaagtgtttgttggggggactcgggctgggggaagaagtcatagcgtacctcagagacccaaactgtagctccattcttcagactgaagaaagaaactgggtgagtgtaaccagccctgtccaagcttccgcttgtcgtaatatcctggagcgtaaccaaacccatgcaatctacaagaacacactcagcctagtgaatgatttcattatcagggatacaattctcaacatcaatttccagtgtgcctatcccctcgatatgaaggtgagcctgcaggccgctctgcagccaatagtctcttcacttaatgtgagcgtcgatggtaatggagagttcatcgttagaatggccttgtttcaagatcagaattacaccaacccctacgagggcgacgcagttgaacttagcgtagagagcgtgctgtacgtaggggcgatcttggaacagggggataccagcagattcaacttggtgctcagaaactgttacgccacacccactgaggacaaggcggacttggtaaaatacttcataattcggaacagctgttcgaaccaaagagactcaactatccacgttgaggaaaatggacaaagcagcgagtcccgcttctctgttcaaatgttcatgtttgcaggccattatgaccttgtgtttctacactgcgagatccatctctgcgacagtctcaacgagcaatgtcaaccaagctgttctcgctctcaggtccgttcagaagtacctgcaatagacctggctcgagttctcgatctgggacccattacccggcggggagcacaaagcccaggggttatgaatgggacaccctccaccgccgggtttttggtggcttggcccatggtgctcctcaccgtgttactcgcctggctcttttag

SEQ ID NO: 22603 - DNA, 3412 bp, Artificial Sequence
  derived and/or modified sequence
gtgcaccaattgaggagagacacatgggtgggaaattgcaataaaaagacggcccacagcaggctgcattcccatggctggccagaggaggaacgctttgtgttctcatcggagctgcatgggaagtctgcatacagcaaagtgacctgcatgcctcaccttatggaaaggatggtgggctctggcctcctgtggctggccttggtctcctgcattctgacccaggcatctgcagtgcagcgaggttatggaaaccccattgaagccagttcgtatgggctggacctggactgcggagctcctggcaccccagaggctcatgtctgttttgacccctgtcagaattacaccctcctggatgaacccttccgaagcacagagaactcagcagggtcccaggggtgcgataaaaacatgagcggctggtaccgctttgtaggggaaggaggagtaaggatgtcggagacctgtgtccaggtgcaccgatgccagacagacgctcccatgtggctgaatgggacccaccctgcccttggggatggcatcaccaaccacactgcctgtgcccattggagtggcaactgctgtttctggaaaacagaggtgctggtgaaggcctgcccaggcgggtaccatgtgtaccggttggaaggcactccctggtgtaatctgagatactgcacagttccacgagacccatccactgtggaggacaagtgtgagaaggcctgccgccccgaggaggagtgccttgccctcaacagcacctggggctgtttctgcagacaggacctcaatagttctgatgtccacagtttgcagcctcagctagactgtgggcccagggagatcaaggtgaaggtggacaaatgtttgctgggaggcctgggtttgggggaggaggtcattgcctacctgcgagacccaaactgcagcagcatcttgcagacagaggagaggaactgggtatctgtgaccagccccgtccaggctagtgcctgcaggaacattctggagagaaatcaaacccatgccatctacaaaaacaccctctccttggtcaatgatttcatcatcagagacaccatcctcaacatcaacttccaatgtgcctacccactggacatgaaagtcagcctccaagctgccttgcagcccattgtaagttccctgaacgtcagtgtggacgggaatggagagttcattgtcaggatggccctcttccaagaccagaactacacgaatccttacgaaggggatgcagttgaactgtctgttgagtccgtgctgtatgtgggtgccatcttggaacaaggggacacctcccggtttaacctggtgttgaggaactgctatgccacccccactgaagacaaggctgaccttgtgaagtatttcatcatcagaaacagctgctcaaatcaacgtgattccaccatccacgtggaggagaatgggcagtcctcggaaagccggttctcagttcagatgttcatgtttgctggacattatgacctagttttcctgcattgtgagattcatctctgtgattctcttaatgaacagtgccagccttcttgctcaagaagtcaagtccgcagtgaagtaccggccatcgacctagcccgggttctagatttggggcccatcactcggagaggtgcacagtctcccggtgtcatgaatggaacccctagcactgcagggttcctggtggcctggcctatggtcctcctgactgtcctcctggcttggctgttctgagagctccgctgagcatctggccttgaagtttgtgttcttccctctggcaatggctcccttcagcacttctgctttccactccaattcacacaggcttggtattaatagaatcaaggccaagctaggttaggaaaagggaagagctttcaccttctttaaaactctcggctgggcgcagtggctcatgcctgtaatcccagcattttgggaggctgaggcaggtggatcacctgaggtcagcagttcaaaatcagcctggccaaaatgctgaaactccgtctctactaaaaatacaaaaattagccaggcatggtggcaggcgcctgtaatcccagctactcgggaggccaaggcaggagaattgctcgaactcagggggtggaggttgcagtgagttgagattgtgccattgcactccagcctgggcaacagagcaagactctgtctcaggaaaaaaaaaaaaaaaaaagaaaagcaacatagtggggtttctgtcaatctgtcctcggctgcccttctcatttgttgatgggaccttgaaagcaagcttgctaggtgccctctgtggctccagcctttaccggaagtgtggtgcatgtttttaacttcagggaagcggtatcctgtcactggggtatgggatgagcatggagaagaggcaccagccacgattccttcctaagcatctcctgttctgactgctcatgaattgaagaaactgacccttgtgttcactctgcttcctctgattgtttctatcatggtttccaaaaattgccatgggaacatgtcaaagggccacttttggagactctgctccaggaagaactagtccccatagctcccctatcccccaccataccacagacatgctgtgacttagagaactacacaaacatccttgggacctagatgctggaggaatgacttaatttgatgcagaaactccatcacccaagggagtacctctcactgtaaacagtgctgtgcttgctctgaaggattaagcaagaagtcccaacagaagcaatgcaccagtcctgctatgggaatgaaactgcaaagcctaggagatgggtgaagtccctttctggagacctttaatgagtacttcaaagcacccgacacagatgcagcaaatagggcatcacacatacacaggcattaatactcacgggcatatagatgctgacatgtgtacactgacttacgcccttcccacagctacagataaggcctcgcaaagttggcctcagagacacatcaggaaccaaggtggaccagcaggtgccgagcctgtgtatctgcttggaggagacgttccaatgtgctgccttgttcagagatggtgtagttgcaagaaacagaaacccaccacaatttctcaggcaaaaagggagttaattataaggacataagagcacaaagttccagtgcaagagatacatccaggctgcacaagctccgggagtggggcctggcaagccaaaagaaaccaaagtttgtcttgccttctgttcctctttctgaagccacatagccttttatgactgtgtatttttgcatcgcttttgttttctttttatgtctctgaagccagcttttcctgttcactcatcccttgattaaatatggacattctagcttc

SEQ ID NO: 22604 - DNA, 1614 bp, Artificial Sequence
  derived and/or modified sequence
atgccccacctgatggagaggatggtgggcagcggcctgctgtggctggccctggtgtcctgcatcctgacccaggccagcgctgtgcagaggggctacggcaaccccatcgaggccagcagctatggcctggacctggactgtggggcccctggcaccccagaggcccacgtgtgctttgacccctgccagaactacaccctgctggatgagcccttccgcagcacagaaaattctgctggcagccagggctgtgacaagaacatgagcggctggtacagatttgtgggggagggcggcgtgaggatgtctgagacctgtgtgcaggtgcaccgctgccagacagatgcccccatgtggctgaatggcacccacccagccctgggagatggcatcaccaaccacacagcctgtgcccactggagcggcaactgctgcttctggaagacagaggtgctggtgaaggcctgccctgggggctaccacgtgtaccgcctggagggcaccccctggtgcaacctgcgctactgcaccgtgccccgggaccccagcacagtggaggacaagtgtgagaaggcctgcaggcctgaggaggagtgcctggccctgaacagcacctggggctgcttctgccggcaggacctgaacagcagtgatgtgcacagcctgcagccccagctggactgtggcccccgggagatcaaggtgaaggtggacaagtgcctgctgggcggcctgggcctgggggaggaggtgattgcctacctgcgggaccccaactgcagcagcatcctgcagacagaggagaggaactgggtgtctgtgaccagccctgtgcaggccagcgcctgcaggaacatcctggagaggaaccagacccacgccatctacaagaacaccctgagcctggtgaatgacttcatcatccgggacaccatcctgaacatcaacttccagtgtgcctaccccctggacatgaaggtgtccctgcaggccgccctgcagcccatcgtgagcagcctgaatgtgtctgtggatggaaatggagagttcatcgtgaggatggccctcttccaggaccagaactacaccaacccctatgaaggagatgctgtggagctgtctgtggagagcgtgctgtatgtgggcgccatcctggagcagggcgacaccagccgcttcaacctggtgctgaggaactgctacgccacccccacagaggacaaggctgacctggtgaagtacttcatcatccggaacagctgcagcaaccagagggacagcaccatccacgtggaggagaatggccagagcagcgagagccgcttctctgtgcagatgttcatgtttgctggccactatgacctggtgttcctgcactgtgagatccacctgtgtgacagcctgaatgagcagtgccagcccagctgcagccgcagccaggtgcgctctgaggtgcctgccatcgacctggcccgggtgctggacctgggccccatcacccggcggggggcccagagccctggggtgatgaatggcacccccagcacagctggcttcctggtggcctggcccatggtgctgctgactgtgctgctggcctggctgttctag

SEQ ID NO: 22605 - DNA, 1614 bp, Artificial Sequence
  derived and/or modified sequence
atgccccacctgatggagcggatggtgggcagcggcctgctgtggctggccctcgtgtcttgcattttaacacaggcctctgctgttcagcggggttacggaaacccgatagaagctagttcttatggcctcgacctcgactgtggcgctccaggtacgcctgaagcacacgtttgtttcgacccctgtcaaaactacaccctcctcgatgagccctttcgctcaactgaaaactccgccggttcgcagggctgcgataagaacatgtctggctggtaccggtttgttggcgaaggaggggtgagaatgtctgaaacctgtgttcaggtgcaccggtgtcaaacagatgccccaatgtggctgaatggcactcaccccgccttaggcgacggcattaccaaccacacagcctgtgcgcattggagcggaaattgttgcttctggaagaccgaggtactggttaaagcctgtcctgggggatatcatgtataccggctcgaaggaacaccatggtgcaacctgaggtattgcaccgttccgcgtgacccgtcaaccgttgaggataagtgtgaaaaggcatgtcgccccgaggaggagtgtctcgctttgaactctacctgggggtgcttttgtaggcaggatctcaattcctctgatgtgcactccctgcagccgcaactcgattgtggtcccagagagattaaagtgaaggtggacaagtgcctcttgggtggcctaggattgggtgaagaggtcattgcatatcttcgggatcctaactgttcatcaatactgcagacagaggaaagaaactgggtgtcagtgaccagcccagtgcaggctagtgcttgccgcaacatccttgagcggaatcagacccatgcgatctataaaaataccttgagcctagtgaacgattttattatccgcgacactatcctcaacattaactttcaatgtgcctaccccctggatatgaaagtatctcttcaggctgcacttcagcccatagtctcatcgctgaacgtcagtgtggacggcaacggagagttcattgtacgcatggctcttttccaagatcaaaactataccaacccatatgagggcgacgccgttgagctctctgtcgaatcagtcctgtatgttggagccattttagagcagggagatacatcccggtttaacttagtgctgagaaattgttacgcaacaccaactgaggacaaagctgatctcgtcaaatacttcatcattcgtaactcatgctcaaatcagcgggacagcactatccacgtcgaagaaaacggccagtctagcgagtctcggttcagcgtgcagatgtttatgttcgcagggcactacgatctggtattcctgcactgcgaaatacacttgtgcgactctctaaacgagcaatgccagccgtcctgctcacgatcccaagtgcgaagcgaggtccctgcaattgacctcgcaagggttctggatctgggccctattacccgccggggggctcaaagccctggggtgatgaatggcactccatccacagcagggttcttggttgcctggccaatggtgctgctcacggtgctgctcgcctggctgttttag

SEQ ID NO: 22606 - DNA, 1614 bp, Artificial Sequence
  derived and/or modified sequence
atgccgcacctgatggagcgaatggtgggatctggtctgctgtggctagctctggtttcctgcatccttacacaggcctccgctgtccagagagggtatggtaaccctattgaggccagcagttacgggctagacctcgattgtggagcacccggtaccccagaggcccatgtgtgctttgatccatgtcagaactataccctgctggatgagccattcagaagcaccgaaaactctgctggctcccagggatgcgataagaacatgagtggctggtaccgcttcgtaggggagggcggagtcagaatgtccgaaacttgcgtccaagtgcaccgctgccaaaccgacgcgcctatgtggctaaacgggacacatcctgccttgggcgacggtataacaaaccatacggcttgtgcacattggagcggcaattgctgcttttggaagaccgaggtcctcgtcaaagcatgccctggtggttaccacgtctatcgactggaggggactccgtggtgtaatctgcgatactgcactgtgcccagggatccgtccacggtggaagataaatgcgaaaaggcctgcagaccagaagaagagtgtctggcactaaattcaacctggggctgtttctgtaggcaggacctcaactctagcgatgttcactctctgcagccccagctggattgtgggcctagagaaattaaggttaaagtggataagtgtctgttagggggattaggactaggggaggaagttatcgcttacttaagagaccctaattgctccagtatcctccagaccgaggagagaaattgggtgtccgtaacatcccccgtgcaagcctctgcgtgtaggaacatactggaaagaaaccagacccatgccatttacaaaaacacgctgtccctcgtaaacgacttcattataagagataccattttaaatattaacttccagtgtgcctacccacttgacatgaaggtgagcctgcaggcagccctccaaccaattgtctccagcctgaatgtttccgtcgatgggaacggcgaattcatcgtgagaatggcactgtttcaagaccaaaactacaccaacccctatgagggtgacgcggtggagctgtctgtggaaagcgttctttatgtgggcgcaattctcgagcagggagacacctcaaggtttaacttggtcctgcgaaattgttacgccacacccaccgaggacaaggccgacctggtgaagtactttataatccgaaactcttgctcgaatcaacgagattccacgatccatgtcgaggagaatggccagagttcagagagccgattctcagtgcagatgtttatgttcgctgggcattacgaccttgtgttcctacattgtgagatccatctgtgtgacagcctcaacgagcagtgccagccaagctgcagccgatcccaggttcgttccgaggtgcccgctatagatttggcccgagttctcgacttgggacccattaccagacgaggtgctcagtctccaggcgtgatgaatggcactccttcgaccgcgggattcctggtggcctggcccatggtgctcctgaccgtcctattggcatggctgttctag

SEQ ID NO: 22607 - DNA, 1614 bp, Artificial Sequence
  derived and/or modified sequence
atgccccacctgatggagagaatggtgggcagcggcctgctgtggctggccctggtgagctgcatcctgacccaggccagcgccgtgcagagaggctacggcaaccccatcgaggccagcagctacggcctggacctggactgcggcgcccccggcacccccgaggcccacgtgtgcttcgacccctgccagaactacaccctgctggacgagcccttcagaagcaccgagaacagcgccggcagccagggctgcgacaagaacatgagcggctggtacagattcgtgggcgagggcggcgtgagaatgagcgagacctgcgtgcaggtgcacagatgccagaccgacgcccccatgtggctgaacggcacccaccccgccctgggcgacggcatcaccaaccacaccgcctgcgcccactggagcggcaactgctgcttctggaagaccgaggtgctggtgaaggcctgccccggcggctaccacgtgtacagactggagggcaccccctggtgcaacctgagatactgcaccgtgcccagagaccccagcaccgtggaggacaagtgcgagaaggcctgcagacccgaggaggagtgcctggccctgaacagcacctggggctgcttctgcagacaggacctgaacagcagcgacgtgcacagcctgcagccccagctggactgcggccccagagagatcaaggtgaaggtggacaagtgcctgctgggcggcctgggcctgggcgaggaggtgatcgcctacctgagagaccccaactgcagcagcatcctgcagaccgaggagagaaactgggtgagcgtgaccagccccgtgcaggccagcgcctgcagaaacatcctggagagaaaccagacccacgccatctacaagaacaccctgagcctggtgaacgacttcatcatcagagacaccatcctgaacatcaacttccagtgcgcctaccccctggacatgaaggtgagcctgcaggccgccctgcagcccatcgtgagcagcctgaacgtgagcgtggacggcaacggcgagttcatcgtgagaatggccctgttccaggaccagaactacaccaacccctacgagggcgacgccgtggagctgagcgtggagagcgtgctgtacgtgggcgccatcctggagcagggcgacaccagcagattcaacctggtgctgagaaactgctacgccacccccaccgaggacaaggccgacctggtgaagtacttcatcatcagaaacagctgcagcaaccagagagacagcaccatccacgtggaggagaacggccagagcagcgagagcagattcagcgtgcagatgttcatgttcgccggccactacgacctggtgttcctgcactgcgagatccacctgtgcgacagcctgaacgagcagtgccagcccagctgcagcagaagccaggtgagaagcgaggtgcccgccatcgacctggccagagtgctggacctgggccccatcaccagaagaggcgcccagagccccggcgtgatgaacggcacccccagcaccgccggcttcctggtggcctggcccatggtgctgctgaccgtgctgctggcctggctgttctag

SEQ ID NO: 22608 - DNA, 1173 bp, Artificial Sequence
  derived and/or modified sequence
atgccgcatctgatggaacgcatggttggctcggggctcctgtggctggccctcgtatcatgcatcctcacccaggcgagcgcagtccagagggtgcctagagaccctagtacagttgaggataaatgcgaaaaagcctgccggccagaagaggagtgtttggctcttaatagcacctgggggtgcttttgccgtcaagatctcaacagttcagacgttcatagtctgcagccacaactggactgcggtccccgggagattaaagtcaaagtggataaatgcttactaggcggcctcgggttaggcgaggaagtgatagcttatttgcgggaccctaattgctccagcattcttcaaacagaggagcgcaattgggtctcggtgactagtcctgtccaggcaagcgcttgtagaaacattctcgagaggaaccaaacacacgcaatttacaaaaatacattatccttagtcaatgatttcataataagagacaccattttgaacattaatttccaatgcgcttaccctttagacatgaaagtctctctgcaggccgctctgcaacctatcgtctccagcctcaatgtctccgtcgacgggaacggagaattcatcgtccggatggccctcttccaggatcagaactatacgaatccctacgagggagatgcggtcgagctgagcgttgagtctgtgctatatgtgggtgctattctcgagcagggcgatacctccagatttaacctggttctccgaaactgttacgcaactcccactgaggataaggcggatctagtgaagtacttcatcataagaaactcatgctccaaccagagagattccaccatccacgtggaggagaatggtcaatcatcagagtctcgcttctccgtccagatgttcatgtttgccggacactatgatttagtctttctgcattgtgagattcacctttgcgacagtttgaacgagcagtgccagccttcctgctcccggtcacaggttcgaagcgaagtgcccgcaatcgacctggcacgcgtgcttgacttgggccccattacccggcgcggagctcagtctcctggcgttatgaatggcaccccttccacggctgggtttctcgtagcttggccaatggtcctgctgacagttctgttggcatggctcttctag

SEQ ID NO: 22609 - DNA, 1173 bp, Artificial Sequence
  derived and/or modified sequence
atgccccacctgatggagaggatggtgggcagcggcctgctgtggctggccctggtgtcctgcatcctgacccaggccagcgctgtgcagagggtgccccgggaccccagcacagtggaggacaagtgtgagaaggcctgcaggcctgaggaggagtgcctggccctgaacagcacctggggctgcttctgccggcaggacctgaacagcagtgatgtgcacagcctgcagccccagctggactgtggcccccgggagatcaaggtgaaggtggacaagtgcctgctgggcggcctgggcctgggggaggaggtgattgcctacctgcgggaccccaactgcagcagcatcctgcagacagaggagaggaactgggtgtctgtgaccagccctgtgcaggccagcgcctgcaggaacatcctggagaggaaccagacccacgccatctacaagaacaccctgagcctggtgaatgacttcatcatccgggacaccatcctgaacatcaacttccagtgtgcctaccccctggacatgaaggtgtccctgcaggccgccctgcagcccatcgtgagcagcctgaatgtgtctgtggatggaaatggagagttcatcgtgaggatggccctcttccaggaccagaactacaccaacccctatgaaggagatgctgtggagctgtctgtggagagcgtgctgtatgtgggcgccatcctggagcagggcgacaccagccgcttcaacctggtgctgaggaactgctacgccacccccacagaggacaaggctgacctggtgaagtacttcatcatccggaacagctgcagcaaccagagggacagcaccatccacgtggaggagaatggccagagcagcgagagccgcttctctgtgcagatgttcatgtttgctggccactatgacctggtgttcctgcactgtgagatccacctgtgtgacagcctgaatgagcagtgccagcccagctgcagccgcagccaggtgcgctctgaggtgcctgccatcgacctggcccgggtgctggacctgggccccatcaccaggagaggagcccagagccctggggtgatgaatggcacccccagcacagctggcttcctggtggcctggcccatggtgctgctgactgtgctgctggcctggctgttctag

SEQ ID NO: 22610 - DNA, 1173 bp, Artificial Sequence
  derived and/or modified sequence
atgccccacctgatggagcggatggtgggcagcggcctgctgtggctggctctggtatcctgtatcctaacacaagctagcgcggtccagagggtcccccgcgatccaagtaccgtggaggataaatgcgagaaagcttgtcggcccgaggaggagtgcctggccttaaattccacctggggctgtttctgccgccaggacctcaattcaagcgacgttcacagcctgcaaccgcaactggattgcggacctagagagataaaagttaaggttgacaagtgtctcctggggggacttgggctgggtgaggaggttattgcctaccttagggaccctaactgcagttccatcctacagacggaggaacggaattgggtttccgtgacctcccccgtgcaggcatctgcctgtagaaacatcctggaacgaaatcagactcatgcaatctataaaaacacactttctctggtgaacgattttattattcgggatacaatacttaatattaacttccagtgcgcctaccccctggatatgaaggtttctttacaggctgccctgcagcctatcgtcagttcactcaatgtctccgtcgatggaaacggtgaatttattgtccgcatggccctgtttcaggaccagaactatacaaacccttatgagggcgacgccgtggagctctctgtggagtccgtcctctatgtcggcgccatactagagcagggggatacatccaggtttaacctcgtgttgagaaattgctatgccacacccactgaggataaggcagacctcgtcaagtattttattattcgcaacagttgttctaatcaacgcgattctaccattcacgtagaagagaacggacagagtagtgaatcacgtttctccgtccagatgttcatgtttgcgggccactacgatcttgtatttctgcactgcgagatccacctgtgcgacagcctaaatgaacagtgtcagccgtcatgctctcgttctcaggtcaggagcgaggtgcccgctatcgacctggcccgagtgctggacctaggaccaataacacgccggggggctcagagtcccggcgtaatgaatgggactcccagtacagcagggttcctggtggcatggccaatggtactgctcaccgtcctgttggcctggctgttttag

SEQ ID NO: 22611 - DNA, 1173 bp, Artificial Sequence
  derived and/or modified sequence
atgccacatcttatggaacggatggtaggctccgggctgctttggctggcattggtctcatgcattctgacgcaggcttccgctgtccagagggtgcctcgcgacccatcaacggtggaagacaagtgcgaaaaggcctgtagacccgaggaggagtgcctggcactgaattctacttggggctgcttttgtagacaggacctgaattctagcgacgtgcactccctgcaaccacagttggactgtggacccagggagattaaggtcaaggtcgacaagtgcctcttaggagggctcggcttgggggaggaggtcatcgcctaccttagggatcccaattgctcgagcatcctccaaactgaggagcgaaattgggtgtcagtgacttcgccagtgcaggcgtcggcttgtcggaacatactcgagaggaaccaaacacacgcaatctacaaaaacacgctgtccctggtaaacgatttcataatcagggatacgatcttgaatatcaattttcagtgtgcttatcctctcgacatgaaagtgtccctgcaggccgctctacagcccattgtttcttccctgaacgtttctgtggatggcaatggggagttcatagtgcgaatggccctgttccaggaccagaattatactaacccgtacgagggcgatgctgtagagctctctgttgagtcggttctgtacgtcggggcaatcctcgaacagggcgacacatccaggttcaatctagtactgcggaattgctatgcaacaccaacagaggataaagctgacctcgttaaatatttcataatccgcaattcatgttcaaatcagagggactcgaccatacacgtggaagaaaacggtcagtcttctgagagcaggttttccgtccagatgttcatgtttgccggacactacgatctcgttttccttcattgcgagatacacttatgtgattctttgaacgagcagtgccagccttcatgctcccggtctcaggtgagaagtgaggtgcccgctatcgatctcgcaagagtattagatctgggaccaattacgcggagaggcgctcagtcacccggtgtcatgaacggcacaccaagcacagctgggtttctggttgcttggcccatggtgttgctgacagttctcttagcttggctcttctag

SEQ ID NO: 22612 - DNA, 1173 bp, Artificial Sequence
  derived and/or modified sequence
atgccccacctgatggagagaatggtgggcagcggcctgctgtggctggccctggtgagctgcatcctgacccaggccagcgccgtgcagagagtgcccagagaccccagcaccgtggaggacaagtgcgagaaggcctgcagacccgaggaggagtgcctggccctgaacagcacctggggctgcttctgcagacaggacctgaacagcagcgacgtgcacagcctgcagccccagctggactgcggccccagagagatcaaggtgaaggtggacaagtgcctgctgggcggcctgggcctgggcgaggaggtgatcgcctacctgagagaccccaactgcagcagcatcctgcagaccgaggagagaaactgggtgagcgtgaccagccccgtgcaggccagcgcctgcagaaacatcctggagagaaaccagacccacgccatctacaagaacaccctgagcctggtgaacgacttcatcatcagagacaccatcctgaacatcaacttccagtgcgcctaccccctggacatgaaggtgagcctgcaggccgccctgcagcccatcgtgagcagcctgaacgtgagcgtggacggcaacggcgagttcatcgtgagaatggccctgttccaggaccagaactacaccaacccctacgagggcgacgccgtggagctgagcgtggagagcgtgctgtacgtgggcgccatcctggagcagggcgacaccagcagattcaacctggtgctgagaaactgctacgccacccccaccgaggacaaggccgacctggtgaagtacttcatcatcagaaacagctgcagcaaccagagagacagcaccatccacgtggaggagaacggccagagcagcgagagcagattcagcgtgcagatgttcatgttcgccggccactacgacctggtgttcctgcactgcgagatccacctgtgcgacagcctgaacgagcagtgccagcccagctgcagcagaagccaggtgagaagcgaggtgcccgccatcgacctggccagagtgctggacctgggccccatcaccagaagaggcgcccagagccccggcgtgatgaacggcacccccagcaccgccggcttcctggtggcctggcccatggtgctgctgaccgtgctgctggcctggctgttctag

SEQ ID NO: 22613 - protein, 387 aa, Artificial Sequence
  derived and/or modified sequence
MPHLMERMVGSGLLWLALVSCILTQASAVQRDPSTVEDKCEKACRPEEECLALNSTWGCFCRQDLNSSDVHSLQPQLDCGPREIKVKVDKCLLGGLGLGEEVIAYLRDPNCSSILQTEERNWVSVTSPVQASACRNILERNQTHAIYKNTLSLVNDFIIRDTILNINFQCAYPLDMKVSLQAALQPIVSSLNVSVDGNGEFIVRMALFQDQNYTNPYEGDAVELSVESVLYVGAILEQGDTSRFNLVLRNCYATPTEDKADLVKYFIIRNSCSNQRDSTIHVEENGQSSESRFSVQMFMFAGHYDLVFLHCEIHLCDSLNEQCQPSCSRSQVRSEVPAIDLARVLDLGPITRRGAQSPGVMNGTPSTAGFLVAWPMVLLTVLLAWLF

SEQ ID NO: 22614 - DNA, 1164 bp, Artificial Sequence
  derived and/or modified sequence
atgccccacctgatggagagaatggtgggctccggtctgctgtggctcgctcttgtaagctgcatattaacacaggccagcgcagtccaacgcgatcccagcacggtcgaggacaagtgtgagaaggcttgccggcccgaggaggaatgtctggcgctcaacagtacgtggggatgtttctgccgccaggatttaaacagctctgacgtgcattccctacagccccagctcgactgcgggccccgcgaaataaaggtaaaagtggataaatgcttactcggcggactgggtttaggtgaggaggtcattgcctacctccgcgaccccaactgttcctctatacttcaaactgaggagaggaattgggtgtccgtcacgtcaccagtgcaagcctcagcgtgcaggaacattttagaacgtaatcagacccacgctatctacaaaaacacactgtccctggtcaacgacttcataatacgagacacgattctgaatatcaactttcagtgcgcttatccgttggacatgaaggtctccctccaagcagccctgcagcctattgtgtcaagcctcaatgtgagtgtcgatggaaacggagaatttatcgttcgcatggccttattccaggatcaaaattataccaatccttacgagggcgatgctgttgaattgtccgtcgaatctgtcctctatgttggtgccatattagagcaaggggataccagtagattcaacctggtgctgcggaactgttacgcaactcctaccgaggataaagctgatcttgtaaagtacttcattattagaaatagctgctcaaatcagagagactccacaatacatgtggaggaaaacgggcaatcctcagaatcacgcttttccgtccagatgtttatgtttgcaggccactatgacttggtctttctgcactgtgaaatccatctttgtgattcacttaacgagcagtgccagccttcatgctccagatcccaggtacggtcagaagtcccagctatcgacctggcccgagttctggatctggggcccataacccggaggggagcccaatccccgggcgtgatgaacggcacccctagtacagccggatttctagtggcttggccaatggtgctcctgacagtactactggcctggttgttttag

SEQ ID NO: 22615 - DNA, 1164 bp, Artificial Sequence
  derived and/or modified sequence
atgccccacctgatggagaggatggtgggcagcggcctgctgtggctggccctggtgtcctgcatcctgacccaggccagcgctgtgcagagggaccccagcacagtggaggacaagtgtgagaaggcctgcaggcctgaggaggagtgcctggccctgaacagcacctggggctgcttctgccggcaggacctgaacagcagtgatgtgcacagcctgcagccccagctggactgtggcccccgggagatcaaggtgaaggtggacaagtgcctgctgggcggcctgggcctgggggaggaggtgattgcctacctgcgggaccccaactgcagcagcatcctgcagacagaggagaggaactgggtgtctgtgaccagccctgtgcaggccagcgcctgcaggaacatcctggagaggaaccagacccacgccatctacaagaacaccctgagcctggtgaatgacttcatcatccgggacaccatcctgaacatcaacttccagtgtgcctaccccctggacatgaaggtgtccctgcaggccgccctgcagcccatcgtgagcagcctgaatgtgtctgtggatggaaatggagagttcatcgtgaggatggccctcttccaggaccagaactacaccaacccctatgaaggagatgctgtggagctgtctgtggagagcgtgctgtatgtgggcgccatcctggagcagggcgacaccagccgcttcaacctggtgctgaggaactgctacgccacccccacagaggacaaggctgacctggtgaagtacttcatcatccggaacagctgcagcaaccagagggacagcaccatccacgtggaggagaatggccagagcagcgagagccgcttctctgtgcagatgttcatgtttgctggccactatgacctggtgttcctgcactgtgagatccacctgtgtgacagcctgaatgagcagtgccagcccagctgcagccgcagccaggtgcgctctgaggtgcctgccatcgacctggcccgggtgctggacctgggccccatcacccggcggggggcccagagccctggggtgatgaatggcacccccagcacagctggcttcctggtggcctggcccatggtgctgctgactgtgctgctggcctggctgttctag

SEQ ID NO: 22616 - DNA, 1164 bp, Artificial Sequence
  derived and/or modified sequence
atgccccacctgatggagcggatggtgggcagcggcctgctgtggctggcactagttagctgcatcctcacacaggcgtctgctgtacaaagagacccctccaccgtggaggacaagtgcgaaaaggcatgccgaccagaagaagaatgtctcgcactgaacagcacctggggatgtttctgcaggcaggaccttaatagctccgatgtccatagtctccagccccagctcgactgcggacctagggaaatcaaagtgaaagtggataaatgtcttctgggtggtctgggactgggggaggaggtgatagcctacctgcgggatcccaattgtagctcgatcttgcagaccgaagagcggaattgggtgagtgtgactagccctgtgcaagcctcagcgtgccgcaatatcctcgaacgcaatcagacccacgctatctataagaacactctaagccttgtgaacgattttataattagagacaccatcctcaatatcaactttcaatgcgcctatcccctggatatgaaggtcagtctgcaggcggcactgcagcccatcgtgagtagcctcaacgtgagtgtcgacgggaacggcgagtttatcgtccgaatggccctattccaggatcagaattacaccaatccttatgaaggcgacgcggttgagttgagcgtggaaagcgtgctctacgtcggtgccatcctagagcaaggtgacactagtaggtttaaccttgtgctcaggaactgctacgccactccaacagaagataaggctgatctagtgaaatactttataatacgaaatagctgttcaaatcaacgcgattctactatccatgtcgaggaaaatggtcaaagcagcgagtccaggttcagcgtgcagatgtttatgtttgcaggccactacgacctcgtgtttctgcattgtgaaatacatctgtgcgactcactgaatgaacaatgtcagccaagctgttctcgatcacaggttcggtctgaggtccctgccatcgatttggcccgggtgctggatctcgggcccatcacaaggagaggggcccaaagccccggtgttatgaatggcacaccatccacagctggctttttagtcgcctggccaatggtgctcctaaccgtcctgcttgcgtggctcttctag

SEQ ID NO: 22617 - DNA, 1164 bp, Artificial Sequence
  derived and/or modified sequence
atgccacacctgatggagcgaatggtgggcagtggcttactatggctagctctggtgagctgcatcctgacccaagcatccgcggttcagagggacccttcaactgttgaggataagtgtgaaaaggcttgccgtcccgaagaggaatgcttggccttgaatagtacttggggatgcttctgtagacaagacctgaattctagcgacgttcactcactacaaccacaactggattgtgggcctcgcgaaatcaaggtaaaagtggacaaatgccttcttggaggcctaggcctgggcgaagaggtgatcgcatatctgagagacccaaactgctcttccattctgcagacagaagagcgtaactgggtgagcgtaacatcccccgtgcaggccagcgcttgtagaaatatcttggagcggaatcaaactcatgcaatctataagaacacattgtcactcgtgaacgatttcatcatccgtgacactattcttaacattaatttccaatgcgcatatccgctggacatgaaagtgtccctgcaggccgctttgcagcccattgtatcaagcctgaacgtgtctgtggatggaaatggcgaattcattgtccgaatggccctcttccaggaccagaattacacaaacccttacgaaggcgatgccgtggaactgtctgttgagagcgttctgtatgtgggggcaatcctcgagcaaggggatacttcacgcttcaatctggtattgaggaattgctacgcaactcctactgaggataaagctgacctggtaaagtactttatcattcgcaacagttgttcaaatcagcgcgactctaccattcacgttgaggaaaatgggcagagcagcgagtctcgattttcagtgcagatgttcatgttcgccggacattatgaccttgtattcctgcactgtgagattcatctgtgtgatagcctgaatgaacagtgtcagccttcctgcagcaggtctcaggtgagaagcgaggtgcccgcaatagatctcgcgcgagtccttgatctgggacctattaccaggcgcggagctcaaagtccaggagtcatgaacggaactccaagcacggctggcttcctggtggcatggccaatggtcctcttgaccgtgttgctggcttggctgttctag

SEQ ID NO: 22618 - DNA, 1164 bp, Artificial Sequence
  derived and/or modified sequence
atgccccacctgatggagagaatggtgggcagcggcctgctgtggctggccctggtgagctgcatcctgacccaggccagcgccgtgcagagagaccccagcaccgtggaggacaagtgcgagaaggcctgcagacccgaggaggagtgcctggccctgaacagcacctggggctgcttctgcagacaggacctgaacagcagcgacgtgcacagcctgcagccccagctggactgcggccccagagagatcaaggtgaaggtggacaagtgcctgctgggcggcctgggcctgggcgaggaggtgatcgcctacctgagagaccccaactgcagcagcatcctgcagaccgaggagagaaactgggtgagcgtgaccagccccgtgcaggccagcgcctgcagaaacatcctggagagaaaccagacccacgccatctacaagaacaccctgagcctggtgaacgacttcatcatcagagacaccatcctgaacatcaacttccagtgcgcctaccccctggacatgaaggtgagcctgcaggccgccctgcagcccatcgtgagcagcctgaacgtgagcgtggacggcaacggcgagttcatcgtgagaatggccctgttccaggaccagaactacaccaacccctacgagggcgacgccgtggagctgagcgtggagagcgtgctgtacgtgggcgccatcctggagcagggcgacaccagcagattcaacctggtgctgagaaactgctacgccacccccaccgaggacaaggccgacctggtgaagtacttcatcatcagaaacagctgcagcaaccagagagacagcaccatccacgtggaggagaacggccagagcagcgagagcagattcagcgtgcagatgttcatgttcgccggccactacgacctggtgttcctgcactgcgagatccacctgtgcgacagcctgaacgagcagtgccagcccagctgcagcagaagccaggtgagaagcgaggtgcccgccatcgacctggccagagtgctggacctgggccccatcaccagaagaggcgcccagagccccggcgtgatgaacggcacccccagcaccgccggcttcctggtggcctggcccatggtgctgctgaccgtgctgctggcctggctgttctag

SEQ ID NO: 22619 - protein, 451 aa, Artificial Sequence
  derived and/or modified sequence
MPKNKKRNTPHRGSSAGGGGSGAAAATAATAGGQHRNVQPFSDEDASIETMSHCSGYSDPSSFAEDGPEVLDEEGTQEDLEYKLKGLIDLTLDKSAKTRQAALEGIKNALASKMLYEFILERRMTLTDSIERCLKKGKSDEQRAAAALASVLCIQLGPGIESEEILKTLGPILKKIICDGSASMQARQTCATCFGVCCFIATDDITELYSTLECLENIFTKSYLKEKDTTVICSTPNTVLHISSLLAWTLLLTICPINEVKKKLEMHFHKLPSLLSCDDVNMRIAAGESLALLFELARGIESDFFYEDMESLTQMLRALATDGNKHRAKVDKRKQRSVFRDVLRAVEERDFPTETIKFGPERMYIDCWVKKHTYDTFKEVLGSGMQYHLQSNEFLRNVFELGPPVMLDAATLKTMKISRFERHLYNSAAFKARTKARSKCRDKRADVGEFF

SEQ ID NO: 22620 - protein, 401 aa, Artificial Sequence
  derived and/or modified sequence
MSHCSGYSDPSSFAEDGPEVLDEEGTQEDLEYKLKGLIDLTLDKSAKTRQAALEGIKNALASKMLYEFILERRMTLTDSIERCLKKGKSDEQRAAAALASVLCIQLGPGIESEEILKTLGPILKKIICDGSASMQARQTCATCFGVCCFIATDDITELYSTLECLENIFTKSYLKEKDTTVICSTPNTVLHISSLLAWTLLLTICPINEVKKKLEMHFHKLPSLLSCDDVNMRIAAGESLALLFELARGIESDFFYEDMESLTQMLRALATDGNKHRAKVDKRKQRSVFRDVLRAVEERDFPTETIKFGPERMYIDCWVKKHTYDTFKEVLGSGMQYHLQSNEFLRNVFELGPPVMLDAATLKTMKISRFERHLYNSAAFKARTKARSKCRDKRADVGEFF

SEQ ID NO: 22621 - protein, 157 aa, Artificial Sequence
  derived and/or modified sequence
MHFHKLPSLLSCDDVNMRIAAGESLALLFELARGIESDFFYEDMESLTQMLRALATDGNKHRAKVDKRKQRSVFRDVLRAVEERDFPTETIKFGPERMYIDCWVKKHTYDTFKEVLGSGMQYHLQSNEFLRNVFELGPPVMLDAATLKTMKISRFER

SEQ ID NO: 22622 - DNA, 1356 bp, Artificial Sequence
  derived and/or modified sequence
atgcccaagaacaaaaagcgcaatacccctcatcgcggatcatccgctggcggcggaggaagcggtgctgctgcagccacagcggcaactgcgggaggacagcatcgaaacgtccaacccttttctgacgaggatgcctcgatcgaaacaatgtcacactgcagcgggtacagcgatcctagttcattcgcagaagacggacccgaggtactcgacgaggaaggtacacaggaggatttagagtacaaactgaagggacttatcgatctcactttggacaagagcgccaagactcgtcaggctgctttggaaggtatcaaaaatgccctggcgtccaagatgctctatgaattcattctggagcggcgaatgacactcacagacagtattgaacgatgcctcaaaaaaggtaagtcagacgaacagcgcgctgcagcggcactagcctccgtactgtgcattcagctgggtcccgggatcgaatcagaggaaatcctgaagacactgggtcccatcctaaaaaaaataatttgcgacgggtccgccagtatgcaggctagacagacatgtgccacttgtttcggagtgtgctgtttcattgcaaccgacgacattacggaactgtatagtactctggagtgtctggagaatattttcaccaaatcatatttaaaggagaaggatacaacggtcatttgctccaccccaaatactgtattgcatatctcaagtcttttggcctggactctcctcctgacaatttgtcctattaatgaggtgaagaagaagctggagatgcactttcataaactgccgagcttgctgagttgtgacgatgttaatatgaggatcgcagctggcgagtccctcgctctcctcttcgagttggcacggggcatcgaatcagacttcttctatgaagacatggaatctttgactcagatgttgcgcgctctcgccactgatgggaataagcacagagctaaggtggacaaaaggaagcaaagaagcgtttttagggacgttctccgagccgtggaggagcgcgatttccctaccgaaactattaagttcgggcccgaacgcatgtacatcgactgctgggttaaaaaacatacctatgacacttttaaggaagtgctcggtagcggaatgcagtatcacctccagtccaatgagtttctccgaaacgtctttgagttgggccccccggtgatgctcgatgctgcaacactcaagaccatgaagatttcccggtttgaaaggcacctctataacagtgctgcctttaaggctcgcacgaaagcgcgcagcaaatgccgtgataaaagggctgacgtgggtgaatttttttag

SEQ ID NO: 22623 - DNA, 1356 bp, Artificial Sequence
  derived and/or modified sequence
atgccaaaaaataaaaagaggaataccccacacagagggagttctgccgggggtggcggatcaggcgccgcagccgctaccgccgcaaccgcgggcggccagcatcgcaatgtgcagccgttctccgacgaggacgccagtatcgagactatgtcccactgtagcggttactctgaccctagctctttcgccgaagatggcccagaggtgctcgatgaggagggaacgcaggaagatctggagtataagctgaagggccttattgacctaaccttagataaatctgccaaaacacgccaggccgctcttgaaggcatcaagaatgccctagcctctaagatgttgtacgagtttattctagagagaagaatgacactgaccgatagcattgagagatgtctgaaaaagggtaagtcagatgaacagagagccgccgccgcactggcatccgttctctgcattcagcttgggcccggaatcgaaagcgaagagatactgaagacattggggcccatactaaaaaagattatctgcgatggatcagcgagcatgcaggctaggcaaacctgtgccacatgctttggagtttgttgctttatcgcgaccgacgatataaccgaactgtattcaactctcgaatgcctagaaaacatcttcacaaaaagttatttaaaggaaaaggatactactgttatctgttcaacccccaacacagtgctgcatatcagtagtctcctcgcgtggactctcctactgacgatttgccccattaacgaggtgaaaaagaagctggaaatgcattttcacaaattaccctcattactctcctgtgatgatgtcaacatgcggattgccgccggagagtcacttgcactgttgttcgagcttgcccgcggaattgagagtgatttcttctatgaggacatggagtctctgactcaaatgctaagggccttggccacagacggcaacaaacatagagcgaaagttgataagcggaaacagcgctccgtgtttcgggacgtcctcagagccgttgaggaaagagacttcccaacggagacaatcaagttcggaccggaacggatgtacattgactgttgggtaaagaagcacacctacgatacattcaaagaagttctggggtctggcatgcagtaccatctgcaatccaatgaattcttaagaaatgtgtttgaactgggccctcctgtcatgctcgacgcagcaaccctgaaaactatgaaaatcagccggttcgagcggcacctgtacaacagtgctgccttcaaagcccggacaaaggcgcgctccaagtgtcgcgataagcgggctgatgttggcgagtttttttag

SEQ ID NO: 22624 - DNA, 189 bp, Artificial Sequence
  derived and/or modified sequence
atgcctaaaaacaagaaaagaaatacgccacaccgagggtctagtgcgggcggcggcggtagcggagcggcagccgccactgcggccaccgccggtgggcagcacagaaacgtgcagccattcagtgacgaagatgcttcgatcgagactatgagtcactgcagtggctattccgaccccagttcctag

SEQ ID NO: 22625 - DNA, 1834 bp, Artificial Sequence
  derived and/or modified sequence
gttaaaaccagactgcactccttctggctcctggttcattcaaggtctacatagttaaaggttgttccagagggatgtgtgtaattcctcccagtatttgatgttcctttattacttattttcacttgagccaacagcctgaactggtcaggctttgggctgatgccagctgctttatctggtagcactgttacataaaattaacatttattggtgatcactaggtgccaacattatgcgaagaactttacgtggacatcccatttaattctcagaagccgatcacaagctcttcacggggatttctgctgccgccaccgcccactcttacccccgccgcttctcgactctgttgttagccgaagactcgcctctcagccgcccgccgcacagacgcacgagtaaaaagtgcagctccatcggctgatcctcgctaagctccgactctgggcggcaccgggcgtcccacgatgccgaagaacaagaagcggaacactccccaccgcggtagcagtgctggcggcggcgggtcaggagcagccgcagcgacggcggcgacagcaggtggccagcatcgaaatgttcagccttttagtgatgaagatgcatcaattgaaacaatgagccattgcagtggttatagcgatccttccagttttgctgaagatggaccagaagtccttgatgaggaaggaactcaagaagacctagagtacaagttgaagggattaattgacctaaccctggataagagtgcgaagacaaggcaagcagctcttgaaggtattaaaaatgcactggcttcaaaaatgctgtatgaatttattctggaaaggagaatgactttaactgatagcattgaacgctgcctgaaaaaaggtaagagtgatgagcaacgtgcagctgcagcgttagcatctgttctttgtattcagctgggccctggaattgaaagtgaagagattttgaaaactcttggaccaatcctaaagaaaatcatttgtgatgggtcagctagtatgcaggctaggcaaacttgtgcaacttgctttggtgtttgctgttttattgccacagatgacattactgaactatactcaactctggaatgtttggaaaatatcttcactaaatcctatctcaaagagaaagacactactgttatttgcagcactcctaatacagtgcttcatatcagctctcttcttgcatggacactactgctgaccatatgcccaatcaatgaagtgaagaaaaagcttgagatgcatttccataagcttccaagcctcctctcttgtgatgatgtaaacatgagaatagctgctggtgaatctttggcacttctctttgaattggccagaggaatagagagtgactttttttatgaagacatggagtccttgacgcagatgcttagggccttggcaacagatggaaataaacaccgggccaaagtggacaagagaaagcagcggtcagttttcagagatgtcctgagggcagtggaggaacgggattttccaacagaaaccattaaatttggtcctgaacgcatgtatattgattgctgggtaaaaaaacacacctatgacacctttaaggaggttcttggatcagggatgcagtaccacttgcagtcaaatgaattccttcgaaatgtatttgaacttggacccccagtgatgcttgatgctgcaacgcttaaaacgatgaagatttctcgtttcgaaaggcatttatataactctgcagccttcaaagctcgaaccaaagctagaagcaaatgtcgagataagagagcagatgttggagaattcttctagattttcag

SEQ ID NO: 22626 - DNA, 2290 bp, Artificial Sequence
  derived and/or modified sequence
gctacttaaggcgtcgtggcctcccctgccccgccttagctcccgcgctagagagaaacatgtatcgttttcgatcacagctcttcacggggatttctgctgccgccaccgcccactcttacccccgccgcttctcgactctgttgttagccgaagactcgcctctcagccgcccgccgcacagacgcacgagtaaaaagtgcagctccatcggctgatcctcgctaagctccgactctgggcggcaccgggcgtcccacgatgccgaagaacaagaagcggaacactccccaccgcggtagcagtgctggcggcggcgggtcaggagcagccgcagcgacggcggcgacagcaggtggccagcatcgaaatgttcagccttttagtgatgaagatgcatcaattgaaacaatgagccattgcagtggttatagcgatccttccagttttgctgaagatggaccagaagtccttgatgaggaaggaactcaagaagacctagagtacaagttgaagggattaattgacctaaccctggataagagtgcgaagacaaggcaagcagctcttgaaggtattaaaaatgcactggcttcaaaaatgctgtatgaatttattctggaaaggagaatgactttaactgatagcattgaacgctgcctgaaaaaaggtaagagtgatgagcaacgtgcagctgcagcgttagcatctgttctttgtattcagctgggccctggaattgaaagtgaagagattttgaaaactcttggaccaatcctaaagaaaatcatttgtgatgggtcagctagtatgcaggctaggcaaacttgtgcaacttgctttggtgtttgctgttttattgccacagatgacattactgaactatactcaactctggaatgtttggaaaatatcttcactaaatcctatctcaaagagaaagacactactgttatttgcagcactcctaatacagtgcttcatatcagctctcttcttgcatggacactactgctgaccatatgcccaatcaatgaagtgaagaaaaagcttgagatgcatttccataagcttccaagcctcctctcttgtgatgatgtaaacatgagaatagctgctggtgaatctttggcacttctctttgaattggccagaggaatagagagtgactttttttatgaagacatggagtccttgacgcagatgcttagggccttggcaacagatggaaataaacaccgggccaaagtggacaagagaaagcagcggtcagttttcagagatgtcctgagggcagtggaggaacgggattttccaacagaaaccattaaatttggtcctgaacgcatgtatattgattgctgggtaaaaaaacacacctatgacacctttaaggaggttcttggatcagggatgcagtaccacttgcagtcaaatgaattccttcgaaatgtatttgaacttggacccccagtgatgcttgatgctgcaacgcttaaaacgatgaagatttctcgtttcgaaaggcatttatataactctgcagccttcaaagctcgaaccaaagctagaagcaaatgtcgagataagagagcagatgttggagaattcttctagattttcagaacttgaagactattttctaatttctatttttttttctatttcaatgtatttaaactctagacacagtttttatcctggattaacttagataacttttgtagcagtggttatattgcttataatttaatgtacaatactattgaaactggtgagttctgattattaaatattctctgtaaatcagtaaacatgtataaagtatttgtaatgtttggtcataatttatttatgaagacagcaaaagactgatttcatgatggggaaaacaattagccaaagtttaatttcttacactgtggttgtcaagaatactgatttactataatgatatatacatgcaagatatttaacttaatatcttagacaagagttctgggtacaattttgggatctagttcccctggaaaagctgctgtatttttaatttttaatggaatgtagcttttaaaatcctgtcactggcatcaacaaaaggaattataccatgagaccttatagctgtacttaaaagccattcagttcagctattgggagttcatgatgaattagcatatgccagaaaggttgctaaccttaacatctgagagcagtaacactgattttatctgctgtatgagactttgtgcattttactttgaaataaagatttttttccacactgaaa

SEQ ID NO: 22627 - DNA, 429 bp, Artificial Sequence
  derived and/or modified sequence
agttccaaggcgggggcgcgccgaggcaggggtggggtcaccaggagaaaagcaagtgggcagaaaagcccgttgggaagagacggctgggaggaggccccggccccagccttactacgtttcccagaattcagtgaggccacgaagacaggctccctgggcgcggacggaagactggccgcatgggatttgtagctcttcacggggatttctgctgccgccaccgcccactcttacccccgccgcttctcgactctgttgttagccgaagactcgcctctcagccgcccgccgcacagacgcacgagtaaaaagtgcagctccatcggctgatcctcgctaagctccgactctgggcggcaccgggcgtcccacgatgccgaagaacaagaagcggaacactccccaccgcggtagcagtgctggcgg

SEQ ID NO: 22628 - DNA, 574 bp, Artificial Sequence
  derived and/or modified sequence
agctgtaaatgggtcaggagaccagagtggacagagtaggccctggaatgcttgctcggaggcctgccatgaaggatttctgcttgcttccccaccctaccccgggggcaggatgactcagcacttcctattgttgtgaaggccaaccccaggaggccctaccaaggctgactgctgttaaaaccagactgcactccttctggctcctggttcattcaaggtctacatagttaaaggtgccaacattatgcgaagaactttacgtggacatcccatttaattctcagaagccgatcacaagctcttcacggggatttctgctgccgccaccgcccactcttacccccgccgcttctcgactctgttgttagccgaagactcgcctctcagccgcccgccgcacagacgcacgagtaaaaagtgcagctccatcggctgatcctcgctaagctccgactctgggcggcaccgggcgtcccacgatgccgaagaacaagaagcggaacactccccaccgcggtagcagtgctggcggcggcgggtcaggagcagccgcagcgacggcggcgacagc

SEQ ID NO: 22629 - DNA, 570 bp, Artificial Sequence
  derived and/or modified sequence
atagctgccagctggaagccgactctcgtcatagggcatactcgccccactgtgcatcgccggtgcctacctcacccagttccaaggcgggggcgcgccgaggcaggggtggggtcaccaggagaaaagcaagtgggcagaaaagcccgttgggaagagacggctgggaggaggccccggccccagccttactacgtttcccagaattcagtgaggccacgaagacaggctccctgggcgcggacggaagactggccgcatgggatttgtagccgaagactcgcctctcagccgcccgccgcacagacgcacgagtaaaaagtgcagctccatcggctgatcctcgctaagctccgactctgggcggcaccgggcgtcccacgatgccgaagaacaagaagcggaacactccccaccgcggtagcagtgctggcggcggcgggtcaggagcagccgcagcgacggcggcgacagcaggtggccagcatcgaaatgttcagccttttagtgatgaagatgcatcaattgaaacaatgagccattgcagtggttatagcgatccttccagtt

SEQ ID NO: 22630 - DNA, 1597 bp, Artificial Sequence
  derived and/or modified sequence
acaatgctgggacggtgcctggtctgaggatatttcttaccactgtgtttcagcttttcctcatctgaatcaaacatttgaattctttctagaaggtggccagcatcgaaatgttcagccttttagtgatgaagatgcatcaattgaaacaatgagccattgcagtggttatagcgatccttccagttttgctgaagatggaccagaagtccttgatgaggaaggaactcaagaagacctagagtacaagttgaagggattaattgacctaaccctggataagagtgcgaagacaaggcaagcagctcttgaaggtattaaaaatgcactggcttcaaaaatgctgtatgaatttattctggaaaggagaatgactttaactgatagcattgaacgctgcctgaaaaaaggtaagagtgatgagcaacgtgcagctgcagcgttagcatctgttctttgtattcagctgggccctggaattgaaagtgaagagattttgaaaactcttggaccaatcctaaagaaaatcatttgtgatgggtcagctagtatgcaggctaggcaaacttgtgcaacttgctttggtgtttgctgttttattgccacagatgacattactgaactatactcaactctggaatgtttggaaaatatcttcactaaatcctatctcaaagagaaagacactactgttatttgcagcactcctaatacagtgcttcatatcagctctcttcttgcatggacactactgctgaccatatgcccaatcaatgaagtgaagaaaaagcttgagatgcatttccataagcttccaagcctcctctcttgtgatgatgtaaacatgagaatagctgctggtgaatctttggcacttctctttgaattggccagaggaatagagagtgactttttttatgaagacatggagtccttgacgcagatgcttagggccttggcaacagatggaaataaacaccgggccaaagtggacaagagaaagcagcggtcagttttcagagatgtcctgagggcagtggaggaacgggattttccaacagaaaccattaaatttggtcctgaacgcatgtatattgattgctgggtaaaaaaacacacctatgacacctttaaggaggttcttggatcagggatgcagtaccacttgcagtcaaatgaattccttcgaaatgtatttgaacttggacccccagtgatgcttgatgctgcaacgcttaaaacgatgaagatttctcgtttcgaaaggcatttatataactctgcagccttcaaagctcgaaccaaagctagaagcaaatgtcgagataagagagcagatgttggagaattcttctagattttcagaacttgaagactattttctaatttctatttttttttctatttcaatgtatttaaactctagacacagtttttatcctggattaacttagataacttttgtagcagtggttatattgcttataatttaatgtacaatactattgaaactggtgagttctgattattaaatattctctgtaaatcagtaaacatgtataaagtatttgtaatgtttggtcataatttatttatg

SEQ ID NO: 22631 - DNA, 1356 bp, Artificial Sequence
  derived and/or modified sequence
atgcccaagaacaagaagaggaacaccccccaccggggcagcagcgctgggggcggcggcagcggggctgctgctgccacagctgccacagctgggggccagcacagaaatgtgcagcccttcagtgatgaagatgccagcattgagaccatgagccactgcagcggctacagcgaccccagcagctttgctgaagatggccctgaggtgctggatgaggagggcacccaggaggacctggagtacaagctgaagggcctgattgacctgaccctggacaagagcgccaagacccggcaggccgccctggagggcatcaagaatgccctggccagcaagatgctgtatgagttcatcctggagaggaggatgaccctgacagacagcattgagcgctgcctgaagaagggcaagagtgatgagcagagagctgctgctgccctggcctctgtgctgtgcatccagctgggccctggcatcgagagcgaggagatcctgaagaccctgggccccatcctgaagaagatcatctgtgatggcagcgcctccatgcaggcccggcagacctgtgccacctgcttcggcgtgtgctgcttcatcgccacagatgacatcacagagctgtacagcaccctggagtgcctggagaacatcttcaccaagagctacctgaaggagaaggacaccaccgtcatctgcagcacccccaacacagtgctgcacatcagcagcctgctggcctggaccctgctgctgaccatctgccccatcaatgaggtgaagaagaagctggagatgcacttccacaagctgcccagcctgctgagctgtgatgatgtgaacatgagaattgctgctggggagagcctggccctgctgtttgagctggcccggggcatcgagagtgacttcttctatgaggacatggagagcctgacccagatgctgcgggccctggccacagatggcaacaagcaccgggccaaggtggacaagaggaagcagaggtctgtgttcagagatgtgctgcgggctgtggaggagcgggacttccccacagagaccatcaagtttggacctgagaggatgtacatcgactgctgggtgaagaagcacacctatgacaccttcaaggaggtgctgggcagcggcatgcagtaccacctgcagagcaatgagttcctgagaaatgtgtttgagctgggcccccctgtgatgctggatgctgccaccctgaagaccatgaagatcagcagatttgagcggcacctgtacaacagcgctgccttcaaggcccggaccaaggcccggagcaaatgtcgggacaagagagcagatgtgggggagttcttctag

SEQ ID NO: 22632 - DNA, 189 bp, Artificial Sequence
  derived and/or modified sequence
atgcccaagaacaagaagaggaacaccccccaccggggcagcagcgctgggggcggcggcagcggggctgctgctgccacagctgccacagctgggggccagcacagaaatgtgcagcccttcagtgatgaagatgccagcattgagaccatgagccactgcagcggctacagcgaccccagcagctag

SEQ ID NO: 22633 - DNA, 1356 bp, Artificial Sequence
  derived and/or modified sequence
atgcccaagaacaagaagcggaacaccccccaccggggcagcagcgctggggggggtgggtctggagccgctgcggccaccgctgctacagctggagggcaacaccggaacgtgcagcctttttccgatgaagacgccagtattgagaccatgagccattgctctgggtactccgatcccagtagtttcgccgaggacgggcctgaggtgctggacgaggagggaacgcaggaagacctagaatacaaactgaagggcttgattgacctaacactcgataaaagcgccaaaacgaggcaggccgcacttgagggcattaaaaatgctctggctagcaagatgctgtacgaatttattctcgagagaagaatgacgttgactgacagcatagaaagatgcctgaaaaaaggcaaaagcgatgaacagagggcagccgcagcactagccagtgtgctctgcatccagctgggaccaggaattgagtcggaagagatacttaagaccctaggccctatcctgaagaagatcatttgtgacggcagtgccagcatgcaggccagacaaacctgcgctacttgctttggagtgtgctgttttatagcaacagacgatatcaccgagttgtatagtacgctcgaatgcttagaaaatatcttcaccaaaagctatttaaaggagaaagatacaacagtgatttgtagcacccctaacactgtattgcacatttcttccctcttagcgtggaccttactcctgacaatatgcccgatcaatgaggtgaagaaaaaactggagatgcacttccataaattaccaagtctcctaagttgtgatgatgtgaacatgagaattgccgctggtgagagtctcgcgctactgtttgagctggcaagaggaattgagtctgatttcttttatgaggacatggagagtttaacgcagatgctgcgcgccctggccaccgatggaaataagcaccgagcaaaagtagacaaacgcaaacagaggagtgtgtttcgcgatgtactgagagccgtggaagaacgcgactttcccactgaaaccatcaaattcggccccgagaggatgtacattgattgttgggttaagaagcacacatacgacacattcaaagaggttttggggagtgggatgcagtatcatctgcagtcgaacgagttcctgaggaatgtgtttgaactgggtcctccagttatgctggacgcagctaccctgaaaactatgaaaattagtagattcgagcgacacctctacaactcagctgcttttaaggctagaaccaaagcgcggagcaagtgtcgcgacaaaagagcagacgttggagagtttttttag

SEQ ID NO: 22634 - DNA, 1356 bp, Artificial Sequence
  derived and/or modified sequence
atgcccaagaacaagaagcggaacaccccccaccggggcagcagcgcaggaggcggagggtctggcgcagctgccgctactgccgccactgccggcggtcagcacagaaacgtgcaacctttcagcgatgaggatgctagtattgagacgatgagtcactgcagcggttactctgatcctagtagcttcgccgaagacggccccgaagtgcttgatgaagaaggtactcaggaggaccttgagtacaagcttaaagggctgattgatttgaccctcgataagagcgccaagacaaggcaggccgccctggaaggaatcaaaaatgcgctggcttcaaagatgctgtacgagtttattttagaaaggcgaatgacattaaccgactctattgagagatgcttgaaaaaagggaagtcagacgaacagcgagctgcggctgccctggcgtcagtgctgtgcattcagttgggacctggtatcgagtctgaggagatcctgaaaactttgggacctatcctaaaaaaaattatatgcgacggatcggcatctatgcaggcgagacagacctgcgcaacctgctttggagtttgctgctttatcgccaccgacgacataacggagttatactcaaccctcgagtgcctggaaaacatctttactaagagctacttgaaagaaaaagatactaccgtcatttgttcgacccctaatactgttctccacattagcagcctgctagcttggacattactgctgactatctgccccattaatgaggtgaagaaaaaactggagatgcacttccacaagcttccctcgcttctttcatgcgacgacgtgaatatgagaatcgccgccggcgaatcccttgctctgttatttgaattggctaggggaattgaaagcgactttttctatgaagacatggagtcactgacacagatgttaagagcactggcaacggacggtaataagcacagagctaaagtggacaagagaaagcagcgcagtgtattccgagatgtgttgcgggctgtagaggaacgtgattttcctacagagaccatcaagtttggcccagaacgtatgtatatcgactgctgggtgaagaagcatacctacgatacttttaaagaagttctcgggtctggcatgcagtaccatctgcagtcaaacgagttcctccggaacgtgtttgaattaggcccccctgtgatgctggatgcggccactcttaagactatgaagatctcacgctttgaacggcacctttacaactcagcggccttcaaggcccgcacaaaggcacggagcaagtgtcgcgacaaaagggcggatgttggcgaattcttctag

SEQ ID NO: 22635 - DNA, 189 bp, Artificial Sequence
  derived and/or modified sequence
atgcccaagaacaagaagcggaacaccccccaccggggcagcagcgccggcgggggcggttcgggagccgccgcggctacggcagctacggctggaggacagcatcgaaacgttcagccattttctgatgaagacgcatcaatcgagacaatgagtcattgcagtgggtattccgaccctagcagttag

SEQ ID NO: 22636 - DNA, 1356 bp, Artificial Sequence
  derived and/or modified sequence
atgcctaagaataagaagaggaacacaccccacagggggtcctcagctggtggcggtggaagcggggctgccgcagccacagccgcaaccgccggtggccagcaccggaatgtgcaaccattctccgacgaagacgcttctatcgagacaatgtctcactgttctggctactcagatccaagctcatttgccgaagacggccctgaggttttggacgaagaagggactcaggaggacctggaatacaagctcaaaggattaatagacttaaccctcgataaatccgctaagacaagacaagcggctctggaagggatcaaaaacgccttggctagcaagatgctgtacgagttcattctcgagaggcggatgactcttaccgacagcatagagagatgtctgaagaagggaaaatcggatgaacaacgagccgctgctgccttagcttcagtactatgtattcagcttggccctggaattgagtccgaagagatcctcaagacactcggacctatactgaagaagatcatctgcgacggctccgccagtatgcaggccagacaaacttgtgccacttgcttcggcgtgtgctgctttatcgccacagatgacataaccgaattatatagtaccctggagtgcttggagaatatttttaccaaatcatatttgaaagaaaaggataccaccgtcatctgttccacccccaatacggtgctccacatctcctcactgctcgcctggaccctgctgcttactatttgccccataaatgaggtcaagaaaaagctcgaaatgcacttccacaagctgccttccctcctctcttgcgacgatgtcaatatgaggattgccgctggcgaatcactggctctccttttcgaattggctcgcggaatcgaaagcgacttcttttacgaagatatggagtcattaacacagatgttgcgggctctggctacagacggaaataagcatagggccaaggtggataagcgcaagcagcgttcagtgtttcgggacgttctgcgcgctgtggaggagcgcgatttccccacagaaacgatcaagttcggtccagagcgcatgtacatcgattgctgggtgaagaagcacacatacgacacctttaaggaagtgttgggcagcggcatgcagtaccatctgcagtctaatgaattcctgcggaacgtcttcgagctgggccctcctgtcatgctcgacgccgctaccctgaaaacgatgaagataagtaggtttgaaagacatctgtataattcagctgcattcaaggcgagaacaaaggccagatctaagtgccgggacaagagagctgacgtgggtgagttcttctag

SEQ ID NO: 22637 - DNA, 1356 bp, Artificial Sequence
  derived and/or modified sequence
atgccaaaaaacaaaaaacgcaatactcctcacagaggctcctctgcaggaggagggggttcgggtgccgcagcagccactgctgcgactgccggtggacagcacagaaatgtgcagcctttctccgatgaggatgcatcaatcgagactatgtcgcactgttctggttatagcgatccttcctcctttgccgaggacggccctgaagtgctcgacgaggaaggtacacaggaagatttggaatataagctgaaaggactcatcgacctgactttagacaaatctgccaaaacgaggcaggcagccctcgaaggcatcaagaacgcactggctagcaagatgctgtacgagttcattttggagaggcgcatgactcttaccgattcaattgaaagatgcctgaaaaaggggaagtcggatgaacagcgcgctgcagccgctttagcatctgtcctgtgtatccagctgggcccagggattgagagtgaggagatccttaagacgctggggccaatcctcaaaaagatcatctgcgatgggagcgccagcatgcaggcccgacagacatgcgccacctgtttcggagtgtgctgtttcattgcaacagatgacataacggagctatacagtacactagagtgcctggagaacatattcacaaagtcctatctgaaggagaaggacactactgttatctgttctacacccaataccgttctgcatattagctccctgctggcttggactctgcttctcacgatttgccccataaatgaggtcaagaaaaagctggagatgcattttcacaagctgcctagtctgttgtcttgtgacgatgttaacatgcgcattgctgcaggggaaagtctggcactgctgtttgaactggcacggggaatcgaatctgattttttctacgaggatatggaatcactcacacagatgctgagagccctagcaaccgatgggaacaagcatagagccaaggtcgataaacgcaagcagaggtctgtctttcgtgacgttctgcgcgcagtggaagaaagggatttccccaccgaaaccattaaattcggacccgagcggatgtacatagattgctgggtgaagaagcatacttatgatacttttaaggaggtcttaggatctggcatgcagtatcacttgcagtcgaacgagtttctccgaaacgtctttgaactgggtccgcctgttatgctagacgctgccaccctaaagaccatgaaaatcagtcggtttgagagacatttgtataatagcgcagcttttaaagcccgaaccaaagccagatctaaatgcagggataaacgtgcagatgtgggcgaattcttctag

SEQ ID NO: 22638 - DNA, 189 bp, Artificial Sequence
  derived and/or modified sequence
atgcctaaaaataagaagcgtaataccccccaccggggtagtagtgcaggaggcggaggaagcggagcggctgcggcaacggctgcgactgctgggggacaacataggaacgttcaaccattcagtgatgaggacgcaagcattgaaacaatgtcacactgttctggctatagtgatccgagctcttag

SEQ ID NO: 22639 - DNA, 1356 bp, Artificial Sequence
  derived and/or modified sequence
atgccaaaaaacaaaaaacggaatacaccccatagaggttctagtgcggggggcggaggctctggggcagctgccgccacggccgccacagccggcgggcagcacagaaacgtccagccgttttctgacgaggacgcatccatagagactatgtcacactgcagtgggtacagcgatccctcctctttcgccgaagacggacctgaggtgctcgacgaagaggggactcaggaagatctggagtacaagctaaagggcttaattgacctgacactggacaagtccgccaagacccgacaggccgcgctggaaggaatcaagaacgcactcgctagtaagatgctgtacgaattcattctcgaacgccggatgactctcacagattctattgaaagatgtctgaagaaaggtaaaagcgacgaacaaagggcagccgcagctcttgcctcagtcctgtgcattcagttaggtcctggcatcgaaagtgaggaaatcttgaagacgctcgggccgatcctgaagaaaattatatgtgatggatccgcatccatgcaggcccgtcagacttgcgccacttgctttggtgtgtgctgctttatagctacggatgatatcactgagttatatagcaccctggagtgcctggagaacatctttaccaaatcttacttaaaggagaaggataccaccgtgatctgttctactccgaatacggtcctccatatctctagccttctcgcctggactctgctgctcacaatatgccccattaacgaggtcaagaaaaaattagaaatgcattttcacaaactaccctctctgctgagctgtgatgatgtcaacatgaggatagccgccggcgagtctctcgcactgctgtttgaattagctcgcggcattgaatctgactttttctatgaggacatggaatctctgacacagatgttgcgagccttggcaaccgacggaaacaagcaccgagctaaagtggataaacggaagcagaggagcgtgtttcgagacgtgcttcgcgcagtggaagaaagggatttccccacagaaacaattaaattcggaccagaaaggatgtacattgattgctgggtcaaaaaacacacatacgatacattcaaagaagtgctgggctccggaatgcagtatcaccttcagtctaacgagtttcttagaaatgttttcgagttaggccctcccgtgatgttggacgctgctacgttaaagacaatgaaaattagcagatttgaacgccatctctacaattctgccgctttcaaagcgaggaccaaggcccgctctaagtgccgggacaagagagccgacgttggcgaattcttttag

SEQ ID NO: 22640 - DNA, 1356 bp, Artificial Sequence
  derived and/or modified sequence
atgccaaaaaataagaagcgtaatacccctcatcgaggcagctctgcaggaggaggaggatccggagcagcagccgctaccgccgcgaccgccggaggtcaacatagaaatgttcaacccttctctgatgaagacgcctctattgagactatgtctcattgtagtggctacagcgacccatccagctttgccgaggacggtcccgaagtgctggacgaagagggcacacaggaagacctggaatacaagcttaagggactcatcgatcttacccttgacaaatccgctaagacccgacaagctgccctggaaggaataaagaatgccctcgcgagcaagatgttgtacgaattcatcctggagaggagaatgaccctgacggattccatcgaacgatgcctgaaaaagggaaagagtgatgagcaaagagctgccgctgccctcgccagtgtcctgtgcatccagttgggacctggaatagaatccgaggaaatacttaaaaccctgggacctatcttaaagaaaattatctgtgacggttctgctagcatgcaggcacgacaaacatgcgctacgtgttttggagtatgctgtttcattgcaaccgatgatatcactgagctttattctactctggaatgcctggaaaacattttcaccaagtcctatctgaaagagaaagacacaaccgtgatttgtagcacccccaacacagtgctccatatctcttccctactggcctggacactgctcttaacgatttgtcctatcaatgaagtaaaaaaaaagctagagatgcatttccacaagctacctagtctgctgtcctgcgatgacgtgaacatgagaatcgccgccggtgagagcctcgcactgctgtttgagctggcaagaggtatcgaatctgactttttctatgaggacatggaatctctgacacagatgttgcgagccttggcaaccgacggaaacaagcaccgagctaaagtggataaacggaagcagaggagcgtgtttcgagacgtgcttcgcgcagtggaagaaagggatttccccacagaaacaattaaattcggaccagaaaggatgtacattgattgctgggtcaaaaaacacacatacgatacattcaaagaagtgctgggctccggaatgcagtatcaccttcagtctaacgagtttcttagaaatgttttcgagcttggcccccccgtgatgctagatgccgcgactctgaagacgatgaagatcagcagatttgaaagacacttgtacaactcagcagctttcaaagcaagaactaaagcacgttccaagtgccgggacaaaagagcagatgtaggcgaattcttctag

SEQ ID NO: 22641 - DNA, 1356 bp, Artificial Sequence
  derived and/or modified sequence
atgcccaagaacaagaagagaaacaccccccacagaggcagcagcgccggcggcggcggcagcggcgccgccgccgccaccgccgccaccgccggcggccagcacagaaacgtgcagcccttcagcgacgaggacgccagcatcgagaccatgagccactgcagcggctacagcgaccccagcagcttcgccgaggacggccccgaggtgctggacgaggagggcacccaggaggacctggagtacaagctgaagggcctgatcgacctgaccctggacaagagcgccaagaccagacaggccgccctggagggcatcaagaacgccctggccagcaagatgctgtacgagttcatcctggagagaagaatgaccctgaccgacagcatcgagagatgcctgaagaagggcaagagcgacgagcagagagccgccgccgccctggccagcgtgctgtgcatccagctgggccccggcatcgagagcgaggagatcctgaagaccctgggccccatcctgaagaagatcatctgcgacggcagcgccagcatgcaggccagacagacctgcgccacctgcttcggcgtgtgctgcttcatcgccaccgacgacatcaccgagctgtacagcaccctggagtgcctggagaacatcttcaccaagagctacctgaaggagaaggacaccaccgtgatctgcagcacccccaacaccgtgctgcacatcagcagcctgctggcctggaccctgctgctgaccatctgccccatcaacgaggtgaagaagaagctggagatgcacttccacaagctgcccagcctgctgagctgcgacgacgtgaacatgagaatcgccgccggcgagagcctggccctgctgttcgagctggccagaggcatcgagagcgacttcttctacgaggacatggagagcctgacccagatgctgagagccctggccaccgacggcaacaagcacagagccaaggtggacaagagaaagcagagaagcgtgttcagagacgtgctgagagccgtggaggagagagacttccccaccgagaccatcaagttcggccccgagagaatgtacatcgactgctgggtgaagaagcacacctacgacaccttcaaggaggtgctgggcagcggcatgcagtaccacctgcagagcaacgagttcctgagaaacgtgttcgagctgggcccccccgtgatgctggacgccgccaccctgaagaccatgaagatcagcagattcgagagacacctgtacaacagcgccgccttcaaggccagaaccaaggccagaagcaagtgcagagacaagagagccgacgtgggcgagttcttctag

SEQ ID NO: 22642 - DNA, 189 bp, Artificial Sequence
  derived and/or modified sequence
atgcccaagaacaagaagagaaacaccccccacagaggcagcagcgccggcggcggcggcagcggcgccgccgccgccaccgccgccaccgccggcggccagcacagaaacgtgcagcccttcagcgacgaggacgccagcatcgagaccatgagccactgcagcggctacagcgaccccagcagctag

SEQ ID NO: 22643 - protein, 120 aa, Artificial Sequence
  derived and/or modified sequence
MAEPSSARRPVPLIESELYFLIARYLSAGPCRRAAQVLVQELEQYQLLPKRLDWEGNEHNRSYEELVLSNKHVAPDHLLQICQRIGPMLDKEIPPSISRVTSLLGAGRQSLLRTAKGTLI

SEQ ID NO: 22644 - DNA, 363 bp, Artificial Sequence
  derived and/or modified sequence
atggccgagcccagcagcgccagaagacccgtgcccctgatcgagagcgagctgtacttcctgatcgccagatacctgagcgccggcccctgcagaagagccgcccaggtgctggtgcaggagctggagcagtaccagctgctgcccaagagactggactgggagggcaacgagcacaacagaagctacgaggagctggtgctgagcaacaagcacgtggcccccgaccacctgctgcagatctgccagagaatcggccccatgctggacaaggagatcccccccagcatcagcagagtgaccagcctgctgggcgccggcagacagagcctgctgagaaccgccaagggcaccctgatctag

SEQ ID NO: 22645 - DNA, 2495 bp, Artificial Sequence
  derived and/or modified sequence
gcgtcggtccaggcggcgcgcacggtatggcggcggcggcggcggcggcggcgcgcgcctgagaagaggggacgccagcccggtcaggcctcggcgcggcctacacgctccgctcgctcgctcgctcccgcctcccgccccgcgcccggccatggcggagccgtcgtccgcccgacgcccggtgcctctcatcgagtcggagctgtacttccttatcgcccggtacctatcggcgggcccgtgtcggagagcggcccaggtgctggtgcaggagctggagcagtaccagttgttgccgaagagattggactgggagggcaacgagcacaacaggagctacgaggagttggtcttgtccaataagcatgtggctcctgatcatcttttgcaaatctgccagcgcatcggtcctatgttggataaagaaattccacccagtatttcaagagtcacttctttacttggtgcaggaaggcagtctttgctacgtacagcaaaaggtaccttaatttgaagaagtgttctgctttgtattaatagcctaataattattataattgtgaagtaatgtaagcattgtggaagaaaggtgataatgtaactataaatcatgctgtggactataaaattctctgcatttagcatagaacattgaattttattacataagtgtttaatgggtccttctgcattaaaaagttgataaagatatagatgttaagctaaaaagcttgaatttattctgagatgttgtttgaggttttatcaatgtgagttcttaattttccattttgtagctcactcataacttcattgaatgtaattgtatgtgtctaataaactctttaaatgctagaggtatttcatttgatatttagcttctgaaagccctttgttataaagggaagtgattttctaaatttggtagcagcttgaaaacaagcaccacaaatgtaaaactgcatggttctttttttactaatttaatttttttgccaagttatgtgctagcaaaatgtttgaaattgctattctttttctgttagcttggtatatatgacttagactaagtatatgtatgtgatataatatatgtgtacatgtggctaaactgctaatgggcaaagattgttggttcttctgatgctgagtatacatcaagttcatcccatgattattttttattacgagctattgctgatgtgatgctactcttagctgcaccaccagtataaagcttaactgagaaagaacacccctccctcttagttccgtgccagactggtttgttagctttagttgtttcttagtgctctagccatgtcaccctgtggcactaatcaggacactgtttatattcttcctcttctgtgtccctattcactttgtaattattctattttagctggttatatggtagttaattggtagcctgttttcctttgttttctttacttgtgtcaagctccatgtcgttgttttgtgatgagcagtgatttagaactggccagaccttagaagagtcttcagcaagctgccctagggtaggggcgtattctctgtttgttttgtactggtaccccaggaggatgccttgtaactgctctttggtcatgatagtggtaatgaatccattcatgtaaaatgcaatatgtctgttagtttggggcacccgaggctcagtagaggtttagtatgatgccttccctttcttctttgagttatgaagaaactaatttctggcacagtgtgactgcttcaaacctatgttctgctgctatctcctatagaggagggcagacttttttttcttagtgcatttgctggtaggtcaaggagggatggactttgaattagtgttcagagtcacagatcctacgtatgtgctcttcagtagaggattttctgtgatcctacaatgaagggaaagctatataatttattggtacttcctaaagatagagactaaagtcatggtagtattggccaaattaattttaaaactgaacaagtcatgaattttcatataaatcaaagaactttttccttataaaagcttccatttttgaaaagttggatcagttgtaagacctttcatctttagtattgtatgatataattctacattgaaaaataaacacttggcattaaatgggacttggagtcaaaagatctggttttatggtccatcttttaccaatcatttgctgtggatctctttaaaggtcctggaacctttgagcctcagttacctcacttgtaaattggcaaaaatacctacctcacagggttgttgtgaggattcaatgagctaatgtatgttgaaagcactttgtgaattgtaaagtgctacacaaatgttagttgttgttgctgctgtatctgagatgtcttaattttctttttcttcagaaatagtctaataaacctccagggcttttctgttaaagtatactagttggtaaaatgttgaataaacagtttattacaatata

SEQ ID NO: 22646 - DNA, 363 bp, Artificial Sequence
  derived and/or modified sequence
atggctgagccctcctcagcccgacgcccagtgcccttgatcgagtctgaattgtacttcctgatagctcgatacctgtcagccggcccatgcagacgcgcggcacaggtactggtccaggagctggagcagtatcaattactcccaaagcggctggactgggagggcaacgaacataatcggagttacgaagagctagtactgagtaataaacatgttgcccctgaccatctcctacagatttgtcaaagaattggtccaatgctcgataaggagatccctccatctatcagcagggtgacgagtctgcttggcgcaggccgacagagccttctcagaactgcaaaaggcacactaatttag

SEQ ID NO: 22647 - DNA, 363 bp, Artificial Sequence
  derived and/or modified sequence
atggccgagcccagcagcgcccggcggcctgtgcccctcatcgagagcgagctgtacttcctgattgcccgctacctgtctgctggcccctgccggcgggccgcccaggtgctggtgcaggagctggagcagtaccagctgctgcccaagaggctggactgggagggcaatgagcacaacagaagctatgaggagctggtgctgagcaacaagcacgtggccccagaccacctgctgcagatctgccagagaattggccccatgctggacaaggagatcccccccagcatcagccgggtgaccagcctgctgggcgccggccggcagagcctgctgaggacagccaagggcaccctcatctag

SEQ ID NO: 22648 - DNA, 363 bp, Artificial Sequence
  derived and/or modified sequence
atggccgagcccagcagcgcccggcggcccgtgcccctgatcgagtccgagttgtacttcttgatcgccaggtatctaagtgccgggccctgtagaagggcggcacaggtgctggttcaagaactggaacagtatcagctgctgcccaagcgcctggattgggagggcaatgagcacaatagatcctatgaagaattagtgctgtccaacaaacacgtagcaccagaccatcttctgcaaatttgtcaacgaatcggacccatgctcgataaggaaattcctccatcaattagtcgggtgacctctctcttgggtgctgggcgccagtccctgctgagaacggctaagggaaccctaatctag

SEQ ID NO: 22649 - DNA, 363 bp, Artificial Sequence
  derived and/or modified sequence
atggccgaacctagcagcgcacgccgacccgtaccactcatcgagtcagagctatactttctaatcgccagatacctgtccgccggaccctgtcgtcgcgctgctcaagtactagtccaggaactggagcaataccaactgctgccgaagcggttggattgggagggaaatgaacataacaggtcctacgaggaattggtgctctccaataagcacgtcgccccagatcatttactgcagatctgtcagcgaattgggcctatgctggataaggagataccaccctcaatcagtcgcgtgacctcgctgctcggggctgggaggcagagcctcctgaggaccgcaaagggcacactgatatag

SEQ ID NO: 22650 - protein, 604 aa, Artificial Sequence
  derived and/or modified sequence
MLGMNMLLITLFLLLPLSMLKGEPWEGCLHCTHTTWSGNIMTKTLLYHTYYECAGTCLGTCTHNQTTYSVCDPGRGQPYVCYDPKSSPGTWFEIHVGSKEGDLLNQTKVFPSGKDVVSLYFDVCQIVSMGSLFPVIFSSMEYYSSCHKNRYAHPACSTDSPVTTCWDCTTWSTNQQSLGPIMLTKIPLEPDCKTSTCNSVNLTILEPDQPIWTTGLKAPLGARVSGEEIGPGAYVYLYIIKKTRTRSTQQFRVFESFYEHVNQKLPEPPPLASNLFAQLAENIASSLHVASCYVCGGMNMGDQWPWEARELMPQDNFTLTASSLEPAPSSQSIWFLKTSIIGKFCIARWGKAFTDPVGELTCLGQQYYNETLGKTLWRGKSNNSESPHPSPFSRFPSLNHSWYQLEAPNTWQAPSGLYWICGPQAYRQLPAKWSGACVLGTIRPSFFLMPLKQGEALGYPIYDETKRKSKRGITIGDWKDNEWPPERIIQYYGPATWAEDGMWGYRTPVYMLNRIIRLQAVLEIITNETAGALNLLAQQATKMRNVIYQNRLALDYLLAQEEGVCGKFNLTNCCLELDDEGKVIKEITAKIQKLAHIPVQTWKG

SEQ ID NO: 22651 - DNA, 1815 bp, Artificial Sequence
  derived and/or modified sequence
atgctgggcatgaacatgctgctgatcaccctgttcctgctgctgcccctgagcatgctgaagggcgagccctgggagggctgcctgcactgcacccacaccacctggagcggcaacatcatgaccaagaccctgctgtaccacacctactacgagtgcgccggcacctgcctgggcacctgcacccacaaccagaccacctacagcgtgtgcgaccccggcagaggccagccctacgtgtgctacgaccccaagagcagccccggcacctggttcgagatccacgtgggcagcaaggagggcgacctgctgaaccagaccaaggtgttccccagcggcaaggacgtggtgagcctgtacttcgacgtgtgccagatcgtgagcatgggcagcctgttccccgtgatcttcagcagcatggagtactacagcagctgccacaagaacagatacgcccaccccgcctgcagcaccgacagccccgtgaccacctgctgggactgcaccacctggagcaccaaccagcagagcctgggccccatcatgctgaccaagatccccctggagcccgactgcaagaccagcacctgcaacagcgtgaacctgaccatcctggagcccgaccagcccatctggaccaccggcctgaaggcccccctgggcgccagagtgagcggcgaggagatcggccccggcgcctacgtgtacctgtacatcatcaagaagaccagaaccagaagcacccagcagttcagagtgttcgagagcttctacgagcacgtgaaccagaagctgcccgagcccccccccctggccagcaacctgttcgcccagctggccgagaacatcgccagcagcctgcacgtggccagctgctacgtgtgcggcggcatgaacatgggcgaccagtggccctgggaggccagagagctgatgccccaggacaacttcaccctgaccgccagcagcctggagcccgcccccagcagccagagcatctggttcctgaagaccagcatcatcggcaagttctgcatcgccagatggggcaaggccttcaccgaccccgtgggcgagctgacctgcctgggccagcagtactacaacgagaccctgggcaagaccctgtggagaggcaagagcaacaacagcgagagcccccaccccagccccttcagcagattccccagcctgaaccacagctggtaccagctggaggcccccaacacctggcaggcccccagcggcctgtactggatctgcggcccccaggcctacagacagctgcccgccaagtggagcggcgcctgcgtgctgggcaccatcagacccagcttcttcctgatgcccctgaagcagggcgaggccctgggctaccccatctacgacgagaccaagagaaagagcaagagaggcatcaccatcggcgactggaaggacaacgagtggccccccgagagaatcatccagtactacggccccgccacctgggccgaggacggcatgtggggctacagaacccccgtgtacatgctgaacagaatcatcagactgcaggccgtgctggagatcatcaccaacgagaccgccggcgccctgaacctgctggcccagcaggccaccaagatgagaaacgtgatctaccagaacagactggccctggactacctgctggcccaggaggagggcgtgtgcggcaagttcaacctgaccaactgctgcctggagctggacgacgagggcaaggtgatcaaggagatcaccgccaagatccagaagctggcccacatccccgtgcagacctggaagggctag

SEQ ID NO: 22652 - DNA, 1815 bp, Artificial Sequence
  derived and/or modified sequence
atgttgggcatgaacatgcttctcataacactgttcttgttgctccccctgtcaatgcttaaaggtgaaccttgggagggatgtttgcactgcacacacacaacatggagcggtaacatcatgaccaagactttactgtaccatacttattatgagtgcgctggcacctgcctaggcacatgcacccacaaccagacaacctactctgtctgtgatcctggccggggccaaccctacgtgtgctacgatcccaaatcctcacctggaacctggttcgagatccatgtgggttccaaagagggagacctactgaaccagaccaaggtctttccatccggaaaggatgtggtttccctgtactttgatgtctgtcaaatagtgagcatgggctctctctttcccgtgatcttttcatcaatggagtattacagtagttgccacaaaaaccggtacgcccatcccgcttgcagtacggattctcctgtgactacatgttgggactgcaccacctggtcaacgaatcaacagagtctgggccctatcatgctcaccaagatccctctggaaccagattgtaagacaagcacttgcaatagcgtcaacttaactatactggagccagatcaaccgatatggaccaccggtttgaaggcaccactcggtgcccgcgtctcaggcgaagagatcggcccaggagcctacgtctatttgtatatcattaagaaaacacggacacggtcaacccagcagtttagggtatttgaatctttctatgaacatgttaatcagaagttgccagagcccccccctttggcatccaatttattcgcccaactggccgagaacatcgccagttcgctgcacgtcgctagctgctatgtttgcggaggtatgaatatgggcgaccaatggccttgggaggcacgggagttgatgccgcaagacaattttactctcaccgcttctagcttggagcccgcccccagctctcagtccatctggtttctgaagacctctatcattggcaaattttgcattgcccggtggggcaaggccttcaccgatcccgtgggagagctgacctgcctcggtcaacaatactacaacgagacccttggcaagacactctggcggggcaagagtaataattctgaaagtcctcacccatcaccattttcacgctttcccagcttgaaccactcttggtaccaactagaggccccaaacacctggcaggcacccagcggcctgtactggatatgcggccctcaggcgtaccgccagctcccggccaaatggtcgggcgcctgcgtgctcggcacgattagacccagctttttcctgatgcctctgaaacaaggtgaagcgctgggttatccaatttatgacgaaactaagcgcaagagcaagcgcggtatcacgatcggagactggaaagacaatgagtggcccccagagcgcataatccaatattacgggcccgctacatgggccgaggacggtatgtgggggtatcgaacacctgtatacatgttaaatcggatcattcggctgcaggccgttcttgagatcatcaccaacgagaccgccggcgctctgaacctcttggctcaacaagccaccaagatgcggaatgtgatatatcaaaacaggctggctcttgattatcttctggcgcaggaggagggcgtgtgtggaaagtttaacttgactaattgctgtctcgagttggatgacgagggaaaggtcatcaaggagatcaccgctaaaatccagaaactggctcacatacccgtgcaaacctggaaaggatag

SEQ ID NO: 22653 - DNA, 2719 bp, Artificial Sequence
  derived and/or modified sequence
ttcactgctctgtgtcttctgctcctagaggcccagcttctgtggcctcgttacctgcaggtattgggagatccacagctaagacgccaggacccactggaagcctagaaatgttgcaggaattgtgccttggatccatccatccagtcagctgaaaccagcagcccaggacaagtggaccagccaacaggacctagaccatgcaacccagctgatcctacgatggaaccaaggtgccagtgagatgacaacagccctgctctggtcactccggaagctgaccagtccacacacggctgaagcttgaggagacaacagccctgctctagtcaccccagaagctgactagtctatgcacggccgaagcttgagtcatcatcagggaagtaaatgtggttagaaatctgaagtccagtaattttccttgtcatattaattactttgctattaagctgtcactttgcttagccttctccccccaggaaaaagccttttctgtccatgctgggtatgaacatgctactcatcactttgttcttgctactccccttatccatgttaaaaggagaaccctgggagggatgcctccactgcacccacactacgtggtcggggaacatcatgactaaaaccctgttgtatcacacttattatgagtgtgctgggacctgcctaggaacttgtactcacaaccagacaacctactcagtctgtgacccaggaaggggccagccttatgtgtgttatgaccctaagtcttcacctgggacctggtttgaaattcatgtcgggtcaaaggaaggggatcttctaaaccaaaccaaggtatttccctctggcaaggatgtcgtatccttatactttgatgtttgccagatagtatccatgggctcactctttcccgtaatcttcagttccatggagtactatagtagctgccataaaaataggtatgcacaccctgcttgttccaccgattccccagtaacaacttgctgggactgcacaacgtggtccactaaccaacaatcactagggccaattatgcttaccaaaataccattagaaccagattgtaaaacaagcacttgcaattctgtaaatcttaccatcttagagccagatcagcccatatggacaacaggtttaaaagcaccgctaggggcacgagtcagcggtgaagaaattggcccaggagcctatgtctatctatatatcataaagaaaactcggacccgctcaacccaacagttccgagtttttgagtcattctatgagcatgttaaccagaaattgcctgagccccctcccttggccagtaatttattcgcccaactggctgaaaacatagccagcagcctgcacgttgcttcatgttatgtctgtgggggaatgaacatgggagaccaatggccatgggaagcaagggaactaatgccccaagataatttcacactaaccgcctcttccctcgaacctgcaccatcaagtcagagcatctggttcttaaaaacctccattattggaaaattctgtattgctcgctggggaaaggcctttacagacccagtaggagagttaacttgcctaggacaacaatattacaacgagacactaggaaagactttatggaggggcaaaagcaataattctgaatcaccacacccaagcccattctctcgtttcccatctttaaaccattcttggtaccaacttgaagctccaaatacctggcaggcaccctctggcctctactggatctgtgggccacaagcatatcgacaactgccagctaaatggtcaggggcctgtgtactggggacaattaggccgtccttcttcctaatgcccctaaaacagggagaagccttaggataccccatctatgatgaaactaaaaggaaaagcaaaagaggcataactataggagattggaaggacaatgaatggcctcctgaaagaataattcaatattatggcccagccacctgggcagaagatggaatgtggggataccgcaccccagtttacatgcttaaccgcattataagattgcaggcagtactagaaatcattaccaatgaaactgcaggggccttgaatctgcttgcccagcaagccacaaaaatgagaaatgtcatttatcaaaatagactggccttagactacctcctagcccaggaagagggagtatgcggaaagttcaaccttactaactgctgcctggaacttgatgacgaaggaaaggtcatcaaagaaataactgctaaaatccaaaagttagctcacatcccagttcagacttggaaaggatagtctccagattcccttttcagaggttggttctcatcccttggaggatttaaaaccttagtacaaatagtcctagccatattgggagtttgccttatactcccttgtctcttacccctcattgtcaaaaatatccaaacagccatagaggctcttgtggacagacggactaccacacgactaatggccctaactaagtattaacccctgccaagaaaagagctacttcctcttgaagtaaatgaagatagtgatgctttctcttaaactttacttataaaaagcatcaaaggggggaatgaagcaggaaatataaaaggaaaaacaagtaaagggaaaacaagtcctttcctgaccagtctgactcactccaaagtcctgctggagctatgataattatctgcaa

SEQ ID NO: 22654 - DNA, 1815 bp, Artificial Sequence
  derived and/or modified sequence
atgctgggcatgaacatgctgctgatcaccctcttcctgctgctgcccctgtccatgctgaagggggagccctgggagggctgcctgcactgcacccacaccacctggagcggcaacatcatgaccaagaccctgctgtaccacacctactatgaatgtgccggcacctgcctgggcacctgcacccacaaccagaccacctacagcgtgtgtgaccccggccggggccagccctacgtgtgctatgaccccaagagcagccctggcacctggtttgagatccacgtgggcagcaaggagggggacctgctgaaccagaccaaggtgttccccagcggcaaggatgtggtgtccctgtactttgatgtgtgccagatcgtgtccatgggcagcctcttccctgtgatcttcagctccatggagtactacagcagctgccacaagaacagatatgcccacccagcctgcagcacagacagccctgtgaccacctgctgggactgcaccacctggagcaccaaccagcagagcctgggccccatcatgctgaccaagatccccctggagccagactgcaagaccagcacctgcaacagcgtgaacctgaccatcctggagccagaccagcccatctggaccaccggcctgaaggcccccctgggcgcccgggtgtctggagaggagatcggccctggggcctacgtgtacctgtacatcatcaagaagaccaggaccaggagcacccagcagttccgggtgtttgagagcttctatgagcacgtgaaccagaagctgcctgagcccccacccctggccagcaacctgtttgcccagctggctgaaaatattgccagcagcctgcacgtggccagctgctacgtgtgtggcggcatgaacatgggagaccagtggccctgggaggcccgggagctgatgccccaggacaacttcaccctgacagccagcagcctggagcccgcccccagcagccagagcatctggttcctgaagaccagcatcatcggcaagttctgcatcgcccgctggggcaaggccttcacagatcctgtgggggagctgacctgcctgggccagcagtactacaatgagaccctgggcaagaccctgtggaggggcaagagcaacaacagcgagagcccccaccccagccccttcagccgcttccccagcctgaaccacagctggtaccagctggaggcccccaacacctggcaggcccccagcggcctgtactggatctgtggcccccaggcctaccggcagctgcctgccaagtggagcggggcctgtgtgctgggcaccatccggcccagcttcttcctgatgcccctgaagcagggcgaggccctgggctaccccatctatgatgagaccaagaggaagagcaagaggggcatcaccatcggggactggaaggacaatgagtggcccccagagcgcatcatccagtactacggccctgccacctgggccgaggatggcatgtggggctaccgcacccctgtgtacatgctgaaccgcatcatccggctgcaggccgtgctggagatcatcaccaatgaaacagctggggccctgaacctgctggcccagcaggccaccaagatgagaaatgtcatctaccagaaccggctggccctggactacctgctggcccaggaggagggcgtgtgtgggaagttcaacctgaccaactgctgcctggagctggatgatgagggcaaggtgatcaaggagatcacagccaagatccagaagctggcccacatccctgtgcagacctggaagggctag

SEQ ID NO: 22655 - DNA, 1815 bp, Artificial Sequence
  derived and/or modified sequence
atgctgggcatgaacatgctgctgatcaccctgttcctgctgctgcccttatcgatgctaaaaggtgaaccttgggaggggtgtcttcattgcacacatacaacatggagcggcaacattatgaccaaaacattactgtaccacacgtattatgaatgcgctgggacatgcctggggacatgcacacataaccagactacttatagcgtatgcgaccccgggaggggccagccgtacgtgtgctacgacccgaagtcttcccctgggacatggtttgaaattcatgtgggatctaaagaaggggatctcttgaaccaaacaaaggtcttcccaagcggaaaagacgtcgtgagcctgtatttcgatgtgtgccagatcgttagcatgggaagtcttttcccagttatcttttcttctatggaatactacagcagttgtcacaagaataggtacgcccatcccgcctgttccaccgacagcccggtcacaacttgctgggactgcacaacatggtctaccaatcagcagtcgctgggcccgattatgctgaccaagattccactcgagccagattgcaaaacctctacatgcaactcagtcaatctgaccattctcgaacctgaccagcctatttggactactgggttgaaggctccattaggggcaagggtcagcggggaggagatcggccccggggcctacgtatacctatacattatcaagaagacccggactcgctctactcagcagttccgggtcttcgagagtttctacgaacacgtgaatcagaagcttcccgaaccaccacctctcgcatccaatttgtttgcccaactggcggaaaacattgcgagcagccttcacgtagcatcttgttatgtctgtggtggaatgaacatgggggatcagtggccatgggaggccagagaactcatgccccaggataattttacactgaccgccagtagtttggagcccgcgccaagtagccagagtatttggtttctgaagacaagtattatcggtaagttctgtatcgccagatgggggaaagcctttaccgaccccgtcggagagttaacttgcttaggacagcaatattacaacgagaccctgggcaagacactctggcggggcaaatccaataacagcgagagtccccatccatctcctttttcccgtttcccctctcttaatcactcttggtatcagcttgaagccccaaatacttggcaggctccatctggcctgtattggatctgcggacctcaagcctacaggcagctccctgcaaagtggtcaggagcctgtgtgctgggaactatcaggccatcctttttcctgatgcccctgaagcagggagaagcacttggatatcccatctacgacgagaccaagcgaaagtcgaagcgtggcattactatcggggactggaaggataacgagtggccgcccgaaaggattatacagtattatgggcctgcaacgtgggctgaggacggaatgtggggatataggacacctgtctatatgctgaatcgcatcatacgcctccaggcggtgctagagattatcaccaatgaaacagctggcgccttaaatctgcttgctcagcaagctactaaaatgagaaatgtaatataccagaatcggctcgccttagactatctgctggcacaagaggagggtgtctgtggcaagtttaatttaactaattgttgcctggagctggatgacgaaggtaaggtgatcaaggaaatcaccgcaaaaattcagaaactggctcatatccccgtgcagacatggaagggctag

SEQ ID NO: 22656 - DNA, 1815 bp, Artificial Sequence
  derived and/or modified sequence
atgctgggcatgaatatgctccttatcacactctttctcctgcttcccctgagcatgctcaaaggggaaccttgggagggttgcctgcattgtactcatacaacatggagtggcaacatcatgacaaagacgttgctgtaccacacctattatgaatgcgcaggaacttgcttgggcacatgtacccacaaccagaccacatacagcgtttgtgacccaggaaggggacagccctacgtgtgttacgacccaaagtcctctcctggcacctggttcgagatccacgtcgggagtaaagagggagatctgttgaaccagaccaaagtatttccctcaggaaaggatgtggtttctctctacttcgacgtgtgccagatcgtctccatgggcagcctctttcccgtcatcttctcttccatggaatactacagttcttgtcacaaaaaccgttacgcccatcccgcttgctctaccgattcacctgtcaccacctgctgggattgcacgacctggtccaccaaccagcagtcactgggacctataatgttgactaagattccattagaaccagactgcaagacctccacatgtaatagcgtgaatctgacaatcttggagcccgatcaacccatttggacaactggcctgaaggcacccctgggtgccagggttagtggcgaagagatcgggcctggagcttacgtgtacttgtacatcattaaaaagaccaggacccgctctacacaacaattcagagtgttcgaatccttttatgaacacgtgaaccagaagttgcccgagccgccacctttggcttcaaatctctttgcacagcttgctgaaaatatcgcgagttctttgcatgtggcttcttgctatgtttgtggcggaatgaatatgggagaccagtggccctgggaggcgcgagagctgatgccccaggataacttcaccttaacagcctcctcactggagccagccccaagttcacaaagcatctggttcttaaagacctcaattattgggaagttttgtattgctcggtggggcaaagccttcacagaccctgtcggggaattgacttgcctgggccagcagtactacaacgaaaccctggggaagactttatggcgaggtaagtctaataactccgagtcaccacacccttcacccttctctcggttcccttcattgaaccattcctggtatcagctggaggcaccaaacacttggcaagccccaagcggtttatactggatatgcggtcctcaggcctatcggcagctaccagccaaatggtccggggcttgtgtgctgggcacgatccgcccttccttcttcttgatgcccttgaagcagggcgaagcacttggctatccaatctacgacgagactaaacgtaagtccaagaggggaatcacaattggggattggaaggacaatgagtggcccccagagaggattattcaatattacggcccagccacgtgggcagaggacggcatgtggggttacagaactcccgtttacatgctcaacaggattatcaggctgcaagctgtactggagatcatcacgaatgagaccgccggtgcactgaacctcctggctcagcaggccacaaaaatgcggaatgttatctaccaaaacaggctggccctcgactacctgctcgcgcaggaagaaggggtatgcggcaagttcaacttgactaactgttgtcttgagctggatgatgaggggaaggttattaaggagatcaccgcaaaaatccaaaaattggcacacattccggtgcagacatggaagggctag

SEQ ID NO: 22657 - protein, 1324 aa, Artificial Sequence
  derived and/or modified sequence
MLLSPSLLLLLLLGAPRGCAEGVAAALTPERLLEWQDKGIFVIQSESLKKCIQAGKSVLTLENCKQANKHMLWKWVSNHGLFNIGGSGCLGLNFSAPEQPLSLYECDSTLVSLRWRCNRKMITGPLQYSVQVAHDNTVVASRKYIHKWISYGSGGGDICEYLHKDLHTIKGNTHGMPCMFPFQYNHQWHHECTREGREDDLLWCATTSRYERDEKWGFCPDPTSAEVGCDTIWEKDLNSHICYQFNLLSSLSWSEAHSSCQMQGGTLLSITDETEENFIREHMSSKTVEVWMGLNQLDEHAGWQWSDGTPLNYLNWSPEVNFEPFVEDHCGTFSSFMPSAWRSRDCESTLPYICKKYLNHIDHEIVEKDAWKYYATHCEPGWNPYNRNCYKLQKEEKTWHEALRSCQADNSALIDITSLAEVEFLVTLLGDENASETWIGLSSNKIPVSFEWSNDSSVIFTNWHTLEPHIFPNRSQLCVSAEQSEGHWKVKNCEERLFYICKKAGHVLSDAESGCQEGWERHGGFCYKIDTVLRSFDQASSGYYCPPALVTITNRFEQAFITSLISSVVKMKDSYFWIALQDQNDTGEYTWKPVGQKPEPVQYTHWNTHQPRYSGGCVAMRGRHPLGRWEVKHCRHFKAMSLCKQPVENQEKAEYEERWPFHPCYLDWESEPGLASCFKVFHSEKVLMKRTWREAEAFCEEFGAHLASFAHIEEENFVNELLHSKFNWTEERQFWIGFNKRNPLNAGSWEWSDRTPVVSSFLDNTYFGEDARNCAVYKANKTLLPLHCGSKREWICKIPRDVKPKIPFWYQYDVPWLFYQDAEYLFHTFASEWLNFEFVCSWLHSDLLTIHSAHEQEFIHSKIKALSKYGASWWIGLQEERANDEFRWRDGTPVIYQNWDTGRERTVNNQSQRCGFISSITGLWGSEECSVSMPSICKRKKVWLIEKKKDTPKQHGTCPKGWLYFNYKCLLLNIPKDPSSWKNWTHAQHFCAEEGGTLVAIESEVEQAFITMNLFGQTTSVWIGLQNDDYETWLNGKPVVYSNWSPFDIINIPSHNTTEVQKHIPLCALLSSNPNFHFTGKWYFEDCGKEGYGFVCEKMQDTSGHGVNTSDMYPMPNTLEYGNRTYKIINANMTWYAAIKTCLMHKAQLVSITDQYHQSFLTVVLNRLGYAHWIGLFTTDNGLNFDWSDGTKSSFTFWKDEESSLLGDCVFADSNGRWHSTACESFLQGAICHVPPETRQSEHPELCSETSIPWIKFKSNCYSFSTVLDSMSFEAAHEFCKKEGSNLLTIKDEAENAFLLEELFAFGSSVQMVWLNAQFDGNSK

SEQ ID NO: 22658 - DNA, 3975 bp, Artificial Sequence
  derived and/or modified sequence
atgctcctgtcgccaagcctgcttctgctgctactgctcggcgctcccaggggctgcgctgaaggggttgcagctgcccttacacccgagaggctgctggaatggcaagataaaggaatattcgttatacagtcggagagcctgaaaaaatgcatccaggcagggaaatctgtcctgacccttgagaactgtaaacaggcaaacaagcatatgttatggaaatgggtgtctaaccacgggcttttcaacatcggagggtccggctgtctgggcctgaatttcagcgctcccgagcagcctctgtcactatatgagtgtgatagtacactggtgtccctgaggtggagatgcaacaggaagatgattaccggtccgctacaatattccgttcaggtggctcacgacaacacggtggttgcttcccggaaatacattcacaagtggattagctatgggagtggggggggggatatctgcgagtacttgcacaaggacctgcatacaatcaagggcaatacccacggaatgccctgtatgtttccctttcagtataatcatcagtggcaccacgaatgcaccagagagggcagggaggacgacctgctatggtgtgcgaccacaagccggtacgagcgcgacgagaaatggggattctgccctgatccgacaagcgccgaggtgggctgcgatacgatctgggagaaggacctaaacagtcatatctgttaccagttcaatcttctgagcagcttgtcttggtccgaggctcattctagttgccagatgcagggggggaccttactgtccattactgatgaaaccgaagagaattttatcagggaacatatgtcctctaagaccgtcgaagtttggatgggactaaaccagttagatgaacatgcgggttggcagtggagcgacggaaccccactcaactacttaaactggagccctgaggtcaattttgaaccctttgtggaggaccattgcggcacattcagctcgttcatgccaagcgcatggcgcagcagagactgtgaaagtaccttgccctatatttgcaaaaagtatctgaatcatatcgaccacgagattgttgagaaggacgcatggaagtattacgctacccactgcgagcccggatggaacccttacaatcggaattgctacaagctgcagaaggaagaaaaaacatggcatgaggccctccgatcttgccaggctgacaatagcgcactcattgatattacgtctctggcggaagtggagtttctggtgaccctcttgggcgatgagaacgctagtgaaacttggatcggcctttccagtaataagatcccagtcagcttcgagtggtctaatgattcctctgtcatttttacgaactggcacacgctagagcctcacattttccccaatcgcagccagctttgcgtcagtgccgagcagtcggaggggcactggaaagtgaaaaactgtgaagagcgtctattctatatttgtaagaaagcggggcacgtcctttccgatgcagagagtggatgtcaagagggatgggaaagacatggaggattctgctataaaatagataccgttctgcgctctttcgaccaggcctctagcgggtactactgccccccagctctggtgactatcaccaaccgctttgaacaagcgttcatcaccagcctgatctctagcgtggtgaagatgaaggactcctatttctggatcgcactgcaggatcagaacgacaccggcgagtatacttggaagccagtgggccagaagcccgagccagtgcagtacacgcactggaacacgcaccagccacggtattcaggcggctgtgtggcaatgcgtggacggcatcccttggggcgctgggaggtgaaacactgccgtcacttcaaggcgatgtccctctgtaaacagccggttgagaaccaagaaaaagccgaatatgaggagaggtggcctttccatccctgctaccttgattgggaatcagaacctggtcttgctagttgttttaaagtatttcactccgagaaagtgctgatgaaaagaacttggcgggaggcagaagctttctgtgaggaatttggggcccacttggcatcgtttgcacacatcgaagaggagaattttgtgaatgagctgctgcattccaagtttaactggaccgaggaaagacaattttggataggttttaataaacgcaaccccctgaacgctggatcgtgggagtggagtgatcgcactcccgtcgtgtcatcttttctcgacaatacttatttcggcgaagacgcccgcaattgcgccgtctacaaggccaacaagaccctgttgccactccactgtggatctaagcgggagtggatatgcaaaattccgcgcgacgtgaagcctaaaatacccttttggtatcagtacgatgtaccttggttattctaccaggacgcagagtatctgttccatacttttgcaagtgagtggctgaacttcgagttcgtgtgttcctggcttcactccgacctgctaactatccattcagcacacgagcaagaatttatccactctaaaatcaaggctctgagcaaatacggggcaagttggtggatcggcctgcaggaggaacgcgccaacgacgagtttagatggcgtgacggaacacccgtaatctatcagaactgggacacgggacgggaaagaacggtcaataaccagtctcaacgctgtggattcatcagtagcatcacggggctgtggggcagtgaagagtgcagcgtttcaatgcctagcatatgcaagcgcaagaaagtgtggcttatcgagaaaaaaaaagatacacccaagcagcatggtacatgccccaagggatggttgtacttcaactacaagtgcttacttctgaacatacctaaagaccctagcagttggaagaattggacccatgctcagcacttctgtgcagaagagggaggcaccctggtcgctattgaatccgaagtcgagcaggctttcattaccatgaatctctttggacaaacaacgagtgtttggatcgggttgcagaatgatgactacgagacctggttaaatggtaaacctgtagtgtattccaactggtctcccttcgatatcataaacataccttcccataacaccacagaggtacaaaaacacattccgctgtgtgccttgctcagtagcaatcccaattttcatttcacaggcaagtggtatttcgaagactgtggcaaggaaggctatggattcgtgtgcgaaaaaatgcaggatacatccggccatggtgttaacaccagcgacatgtatccgatgcctaatacacttgagtacggcaatcgtacctacaagatcatcaacgccaacatgacctggtatgcggctatcaaaacctgcctgatgcacaaagctcagctagtgtcgattactgatcaatatcaccagtccttcctaacagtggtcttaaatcgacttggatacgctcattggattggcctgtttactaccgacaacgggcttaacttcgactggtcagacggaaccaagtcctccttcacgttttggaaagacgaggagagcagccttcttggtgattgcgtgtttgctgactccaacggacgttggcattcaaccgcttgcgagagctttctccagggcgccatatgccatgtgccaccggagacacgtcagtctgagcacccggagctgtgtagtgaaacatccattccatggatcaagttcaagagcaactgttactcgttctccaccgtgctggactccatgagctttgaggcagcgcatgagttttgcaaaaaagagggctctaatctcctcaccatcaaagatgaagccgagaatgctttcttacttgaagagctttttgctttcgggtcgtccgtgcagatggtttggcttaacgctcagtttgacggcaattctaaatag

SEQ ID NO: 22659 - DNA, 3975 bp, Artificial Sequence
  derived and/or modified sequence
atgctgctgagccccagcctgctgctgctgctgctgctgggcgccccccggggctgtgccgagggcgtggccgccgccctgaccccagagcggctgctggagtggcaggacaagggcatctttgtgatccagagcgagagcctgaagaagtgcatccaggccggcaagtctgtgctgaccctggagaactgcaagcaggccaacaagcacatgctgtggaagtgggtgagcaaccacggcctcttcaacatcggcggcagcggctgcctgggcctgaacttcagcgcccctgagcagcccctgagcctgtatgaatgtgacagcaccctggtgtccctgcgctggcgctgcaacaggaagatgatcaccggccccctgcagtacagcgtgcaggtggcccatgacaacacagtggtggccagcaggaagtacatccacaagtggatctcctatggcagcggcggcggggacatctgtgagtacctgcacaaggacctgcacaccatcaagggcaacacccacggcatgccctgcatgttccccttccagtacaaccaccagtggcaccatgaatgtacccgggagggccgggaggatgacctgctgtggtgtgccaccaccagccgctatgaaagagatgagaagtggggcttctgcccagaccccaccagcgctgaggtgggctgtgacaccatctgggagaaggacctgaacagccacatctgctaccagttcaacctgctgagcagcctgtcctggagcgaggcccacagcagctgccagatgcagggcggcaccctgctgagcatcacagatgaaacagaggagaacttcatccgggagcacatgagcagcaagacagtggaggtgtggatgggcctgaaccagctggatgagcacgccggctggcagtggagcgatggcacccccctgaactacctgaactggagccctgaggtgaactttgagccctttgtggaggaccactgcggcaccttcagcagcttcatgcccagcgcctggaggagccgggactgtgagagcaccctgccctacatctgcaagaagtacctgaaccacatcgaccatgaaattgtggagaaggatgcctggaagtactatgccacccactgtgagcccggctggaacccctacaacagaaactgctacaagctgcagaaggaggagaagacctggcatgaggccctgcggagctgccaggccgacaacagcgccctgattgacatcaccagcctggccgaggtggagttcctggtgaccctgctgggagatgaaaatgccagcgagacctggattggcctgagcagcaacaagatccctgtgtcctttgagtggagcaatgacagcagcgtcatcttcaccaactggcacaccctggagccccacatcttccccaacagaagccagctgtgtgtgtctgctgagcagagcgagggccactggaaggtgaagaactgtgaggagcggctcttctacatctgcaagaaggccggccacgtgctgagtgatgctgagagcggctgccaggagggctgggagcggcacggcggcttctgctacaagattgacacagtgctgcggagctttgaccaggccagcagcggctactactgccccccagccctggtgaccatcaccaacagatttgagcaggccttcatcaccagcctcatcagctctgtggtgaagatgaaggacagctacttctggatcgccctgcaggaccagaatgacaccggggagtacacctggaagcctgtgggccagaagccagagcctgtgcagtacacccactggaacacccaccagccccgctacagcggcggctgtgtggccatgaggggccgccaccccctgggccgctgggaggtgaagcactgccgccacttcaaggccatgagcctgtgcaagcagcctgtggagaaccaggagaaggccgagtatgaggagcgctggcccttccacccctgctacctggactgggagagcgagcccggcctggccagctgcttcaaggtgttccacagcgagaaggtgctgatgaagaggacctggagggaggccgaggccttctgtgaggagtttggagcccacctggccagctttgcccacatcgaggaggagaactttgtgaatgagctgctgcacagcaagttcaactggacagaggagcggcagttctggattggcttcaacaagaggaaccccctgaatgccggctcctgggagtggagcgacaggacccctgtggtgagcagcttcctggacaacacctactttggagaagatgccaggaactgtgctgtgtacaaggccaacaagaccctgctgcccctgcactgcggcagcaagcgggagtggatctgcaagatccccagagatgtgaagcccaagatccccttctggtaccagtatgatgtgccctggctgttctaccaggatgctgagtacctgttccacacctttgccagcgagtggctgaactttgaatttgtgtgctcctggctgcacagcgacctgctgaccatccacagcgcccacgagcaggagttcatccacagcaagatcaaggccctgagcaaatatggagcctcctggtggattggcctgcaggaggagcgggccaatgatgagttccgctggagagatggcacccctgtgatctaccagaactgggacaccggccgggagaggacagtgaacaaccagagccagagatgtggcttcatcagcagcatcaccggcctgtggggcagcgaggagtgcagcgtgtccatgcccagcatctgcaagaggaagaaggtgtggctgattgagaagaagaaggacacccccaagcagcacggcacctgccccaagggctggctgtacttcaactacaagtgcctgctgctgaacatccccaaggaccccagctcctggaagaactggacccacgcccagcacttctgtgccgaggagggcggcaccctggtggccattgaaagtgaggtggagcaggccttcatcaccatgaacctgtttggccagaccacctctgtgtggattggcctgcagaatgatgattatgagacctggctgaatggcaagcctgtggtgtacagcaactggagcccctttgacatcatcaacatccccagccacaacaccacagaggtgcagaagcacatccccctgtgtgccctgctgagcagcaaccccaacttccacttcaccgggaagtggtactttgaggactgtgggaaggagggctacggctttgtgtgtgagaagatgcaggacaccagcggccatggagtgaacaccagtgacatgtaccccatgcccaacaccctggagtatggcaacagaacctacaagatcatcaatgccaacatgacctggtatgctgccatcaagacctgcctgatgcacaaggcccagctggtgtccatcacagaccagtaccaccagagcttcctgactgtggtgctgaaccggctgggctacgcccactggattggcctcttcaccacagacaatggcctgaactttgactggagcgatggcaccaagagcagcttcaccttctggaaggatgaggagagcagcctgctgggggactgtgtgtttgctgacagcaatggccgctggcacagcacagcctgtgagagcttcctgcagggcgccatctgccacgtgcccccagagacccggcagagcgagcaccctgagctgtgcagcgagaccagcatcccctggatcaagttcaagagcaactgctacagcttcagcacagtgctggacagcatgagctttgaagctgcccacgagttctgcaagaaggagggcagcaacctgctgaccatcaaggatgaagcagaaaatgccttcctgctggaggagctgtttgccttcggcagctctgtgcagatggtgtggctgaatgcccagtttgatggcaacagcaagtag

SEQ ID NO: 22660 - DNA, 3975 bp, Artificial Sequence
  derived and/or modified sequence
atgctgctgagccccagcctgctgctgctgctgctgctgggcgcccccaggggctgcgccgagggagtcgccgctgccctgaccccggaacgactgctagagtggcaggataagggcatctttgttattcagtctgaaagcctaaaaaaatgtattcaggccgggaaatccgtgcttacactcgaaaattgcaagcaagccaacaaacatatgctctggaaatgggtaagcaaccatggtctgttcaatattggagggtctggctgtttaggcctcaacttttcggctcctgaacagccgctgagcctctacgaatgtgacagcaccctggtgtctctgaggtggcgctgtaataggaaaatgattactggaccactgcagtattccgtgcaggtcgcccatgacaacacagttgtcgcaagccggaagtacatccataaatggatttcctacggaagcggcggaggcgacatatgtgaatatctgcataaagaccttcacactattaagggaaatacacacggcatgccttgtatgttcccattccaatacaatcaccagtggcaccacgagtgcacacgggaggggcgtgaggacgatctcttatggtgcgccacaacctcgcggtatgaacgtgatgaaaaatgggggttttgtcctgatcccacctcggcggaagtgggatgtgacaccatctgggagaaagatctaaacagccacatatgctaccagtttaatctcctgagctcactcagctggagcgaagcccacagcagttgtcaaatgcagggaggtaccctcttgtcaattaccgacgaaaccgaagagaactttatccgcgagcacatgagttcaaagactgtggaagtgtggatgggcctcaaccaactggacgagcatgccggttggcagtggtcagacggaacgcctctgaattatttaaactggtctccggaagttaatttcgagccgttcgtggaagaccattgcgggacctttagtagcttcatgccctcggcctggagatcaagagactgtgagagtaccctgccctacatttgtaagaaatacctgaaccacattgaccacgagatcgtagagaaagacgcttggaagtattacgctactcattgtgagcctggatggaatccatataatcgcaattgctacaaactgcagaaggaagaaaagacgtggcacgaggcactaaggtcatgccaggcagataactccgctctgatcgacataaccagcctggctgaggtggagtttcttgttactctgttgggcgatgagaatgcttcagagacttggattggcctatcatccaataaaatacccgtgtcgtttgagtggtccaatgattccagtgtgatctttacaaattggcatactctggaaccccatatcttccccaatcggagccaactatgtgtgtctgccgaacaatcggaaggccactggaaggtaaaaaattgcgaggagaggctgttttatatctgtaagaaggcagggcacgtactgtcagatgccgagtctggatgtcaggaaggatgggagcggcatggcggattctgctacaaaattgacaccgtcctgaggtcctttgatcaagcgtcctctggatactattgcccgcctgctctggtcacaattaccaaccgattcgagcaggcctttatcaccagccttatcagcagcgtcgtcaagatgaaagactcatacttttggatcgccctccaagatcaaaatgacacaggagagtacacttggaagcccgtgggccagaaacccgaacccgtgcagtatacacactggaacactcatcagcctcgatatagcggaggctgtgtcgctatgcgcggccgacaccctctcgggcgctgggaggtcaagcactgtcggcactttaaggccatgtctctgtgtaagcagcccgtggaaaaccaggagaaagcagaatacgaagaaagatggccctttcacccatgctacctagactgggagtctgaacctggcctggcatcttgcttcaaggtttttcatagtgagaaggtgctaatgaaacggacttggagggaagcggaagccttttgcgaagaattcggagcacaccttgcttcatttgcgcacatcgaggaggaaaatttcgtgaacgagcttttgcattcaaagttcaattggacagaagagaggcagttttggattggctttaataaacgcaatccccttaacgctggaagctgggaatggtccgacaggactcctgttgtctcatcctttctggacaatacttattttggtgaagacgcaagaaattgtgccgtgtacaaggccaacaagacattgctgcccttgcactgtggtagcaaacgcgagtggatatgcaagattccccgcgacgtgaaacccaagatccccttttggtaccagtacgatgtcccttggctgttctaccaagatgcggaatacctctttcatactttcgccagcgaatggttaaattttgagttcgtgtgctcgtggctgcactccgatctgcttacaatccacagcgcacatgagcaagaattcattcacagcaaaatcaaagccctttccaaatatggggcaagttggtggatcggcctgcaggaagaaagagccaatgacgagtttcgctggcgcgatggcacacctgtgatctatcagaactgggacaccggccgggaacggacggttaataatcagtcacagcggtgtggcttcatatcgagtatcactgggctgtggggtagcgaggagtgttcggtctccatgccatctatttgtaagcggaagaaggtgtggttgattgagaagaagaaggacacgcctaagcagcacgggacctgtcctaaaggatggctttactttaattacaagtgtcttcttttaaatatccccaaagacccctcttcctggaagaactggactcatgcccagcatttttgcgccgaagaggggggcacactggtggccattgagagtgaagtcgagcaggcctttataacaatgaacctgttcggccagaccacctctgtttggatcggcctccagaatgacgactatgaaacctggctaaacgggaaaccggtcgtctactcaaattggagccctttcgatatcattaatattccatcccacaataccacagaggtccaaaaacacatacctttatgcgccctgctgagttccaaccccaattttcactttactggcaaatggtacttcgaagattgtgggaaagagggatacggctttgtgtgcgaaaaaatgcaagacacgagcggccacggcgtcaatacatccgatatgtatcctatgccaaataccttggagtacggcaatcgaacctacaagattatcaatgctaatatgacatggtatgcggcaatcaagacttgcctgatgcataaggctcaacttgtctccattaccgaccaataccatcaaagcttcctgacagttgtgctcaatagactcgggtacgcccactggatcggactttttacaacggacaacggtctgaacttcgattggtccgatggcaccaagagctccttcaccttttggaaggacgaagagagcagtcttctgggggattgtgtgttcgctgacagtaacggccgatggcatagcaccgcctgtgaatcctttctccagggagctatttgtcacgtccccccggagactcgccagtccgaacatcctgagctttgctcagaaacaagcattccttggatcaaattcaagtccaattgctacagtttctcaaccgtactcgattccatgtccttcgaagctgcgcatgagttttgcaaaaaagagggctcaaacctgctgacaatcaaagatgaggccgaaaacgccttcttgcttgaagagttatttgctttcggatcctccgtgcaaatggtgtggctgaacgcccaatttgatggaaatagtaaatag

SEQ ID NO: 22661 - DNA, 5160 bp, Artificial Sequence
  derived and/or modified sequence
cccgagtgtcggttcactgtggagacagcggtggcggagtgggtctccagggctctgggctggcaaggcccccggagggggtggggcgcggaggaggctacggatccgcttccgcgcggcggggccgggtgcttgggacgcggctctgggctcccgggataaggggctcccgggacaaggggctcccggagagcccagtggttagcgatgctgctgtcgccgtcgctgctgctgctgctgctgctgggggcgccgcggggctgcgccgagggtgtggcggcggcgcttacccccgagcggctcctggagtggcaggataaaggaatatttgttatccaaagtgagagtctcaagaaatgcattcaagcaggtaaatcggttctgaccctggagaactgcaagcaagcaaacaagcacatgctgtggaaatgggtttcaaaccatggcctctttaacataggaggcagtggttgcctgggcctgaatttctccgccccagagcagccattaagcttatatgaatgtgactccaccctcgtttccttacggtggcgctgtaacaggaagatgatcacaggcccgctgcagtactctgtccaggtggcgcatgacaacacagtggtggcctcacggaagtatattcataagtggatttcttatgggtcaggtggtggagacatttgtgaatatctacacaaagatttgcatacaatcaaagggaacacccacgggatgccgtgtatgtttcccttccagtataaccatcagtggcatcatgaatgtacccgtgaaggtcgggaagatgacttactgtggtgtgccacgacaagccgttatgaaagagatgaaaagtggggattttgccctgatcccacctctgcagaagtaggttgtgatactatttgggagaaggacctcaattcacacatttgctaccagttcaacctgctttcatctctctcttggagtgaggcacattcttcatgccagatgcaaggaggtacgctgttaagtattacagatgaaactgaagaaaatttcataagggagcacatgagcagtaaaacagtggaggtgtggatgggcctcaatcagctggatgaacacgctggctggcagtggtctgatggaacgccgctcaactatctgaattggagcccagaggtaaattttgagccatttgttgaagatcactgtggaacatttagttcatttatgccaagtgcctggaggagtcgggattgtgagtccaccttgccatatatatgtaaaaaatatctaaaccacattgatcatgaaatagttgaaaaagatgcgtggaaatattatgctacccactgtgagcctggctggaatccctacaatcgtaattgctacaaacttcagaaagaagaaaagacctggcatgaggctctgcgttcttgtcaggctgataacagtgcattaatagacataacctcattagcagaggtggagtttcttgtaaccctccttggagatgaaaatgcatcagaaacatggattggtttgagcagcaataaaattccagtttcctttgaatggtctaatgactcttcagtcatctttactaattggcacacacttgagccccacatttttccaaatagaagccagctgtgtgtctcagcagagcagtctgagggacactggaaagtcaaaaattgtgaagaaagacttttttacatttgtaaaaaagcaggccatgtcctctctgatgctgaatcaggatgtcaagagggatgggagagacatggtggattctgttacaaaattgacacagtccttcgaagctttgaccaagcttccagcggttattactgtcctcctgcacttgtaaccattacaaacaggtttgaacaggcttttattaccagtttgatcagtagtgtggtaaaaatgaaggacagttatttttggatagctcttcaggaccaaaatgatacgggagaatacacttggaagccagtagggcagaaacccgagccggtgcagtacacacactggaacacacaccagccgcgctacagtggtggctgtgttgccatgcgaggaaggcatccacttggtcgctgggaagtgaagcactgtcggcactttaaggcaatgtccttgtgcaagcagccagttgaaaatcaggaaaaagcagagtatgaagagagatggccctttcacccctgctatttggactgggagtcagagcctggtctggccagttgcttcaaggtatttcatagtgaaaaagttctgatgaaaagaacatggagagaagctgaagcattttgcgaagaatttggagctcatcttgcaagctttgcccatattgaggaagagaattttgtgaatgagctcttacattcaaaatttaattggacagaagaaaggcagttctggattggatttaataaaagaaacccactgaatgccggctcatgggagtggtctgatagaactcctgttgtctcttcgtttttagacaacacttattttggagaagatgcaagaaactgtgctgtttataaggcaaacaaaacattgctgcccttacactgtggttccaaacgtgaatggatatgcaaaatcccaagagatgtgaaacccaagattccgttctggtaccagtacgatgtaccctggctcttttatcaggatgcagaatacctttttcatacctttgcctcagaatggttgaactttgagtttgtctgtagctggctgcacagtgatcttctcacaattcattctgcacatgagcaagaattcatccacagcaaaataaaagcgctatcaaagtatggtgcaagttggtggattggacttcaagaagaaagagccaatgatgaatttcgctggagagatggaacaccagtgatataccagaactgggacacaggaagagaaagaactgtgaataatcagagccagagatgtggctttatttcttctataacaggactctggggtagtgaagagtgttcagtttctatgcctagtatctgtaagcgaaaaaaggtttggctcatagagaaaaagaaagatacaccaaaacaacatggaacgtgtcccaaaggatggctatattttaactataagtgccttctgctgaatatccccaaagacccaagcagttggaagaactggacgcatgctcaacatttctgtgctgaagaaggggggaccctggtcgccattgaaagtgaggtggagcaagctttcattactatgaatctttttggccagaccaccagtgtgtggataggtttacaaaatgatgattatgaaacatggctaaatggaaagcctgtggtatattctaactggtctccatttgatataataaatattccaagtcacaataccactgaagttcagaaacacattcctctctgtgccttactctcaagtaatcctaattttcatttcactggaaaatggtattttgaagactgtggaaaggaaggctatgggtttgtttgtgaaaaaatgcaagatacttctggacacggtgtaaatacatctgatatgtatccaatgcccaataccttagaatatggaaacagaacttacaaaataattaatgcaaatatgacttggtatgcagcaataaaaacctgcctgatgcacaaagcacaactggtcagcatcacagaccagtatcaccagtccttcctcactgttgtcctcaaccggctaggatatgcccactggattggactgttcaccacagataatggtcttaattttgactggtctgatggcaccaaatcttctttcactttttggaaagatgaggagtcctccctccttggtgactgcgtttttgccgacagcaacggacgctggcatagcacagcctgcgagtcatttctgcaaggtgccatttgtcatgtgccacctgaaacaagacaatctgaacacccagagttgtgctcagaaacatctattccctggataaaatttaaaagtaattgctacagtttttctacagtcctagacagtatgagttttgaggctgctcatgaattttgcaaaaaggaaggttctaatcttttaacaatcaaggatgaggctgaaaatgcatttctcctagaagagctgtttgcttttggttcttctgtccagatggtttggttgaatgctcaatttgatggtaacagtaagtgatttgggtagaggagaggacataaataaatacatggttgttaaagctgatgataatggcatctgtgagccagaaaactctccttggatacgttttctgagaaaaaatagcatgaagcctaaagccatttcttccaaaaacaacattgcaacccttttctttacccttttgtcttttaaaataatcccagaacaccaaaaataaaaacaaacaataacatgtttatctttacccttagcaggaagatgcttggctggaactttgtgttcacagacttagtcattgcataccaaaaccatatttactggaaaatatcccaggtttctaaatgttataaaagcacaatagagttatggaaatgtttccatgatgaactgtgctgttaggattcttatttgctactcataaaaaccagagtttgtaataaaatggaagcatggtattcttttctttatgtaattgatggttattgaaaggtacttgtgaagaaaattattttaattggtatggagagcttgttacagtggtgtaccaaggttgggggtgagcctaccctttcgaggaggagtattttaatcaccaacattgtttagaatttcaagcagatggtgataataaaaagcagaccaacttttagttagctgtattgttagttttaaattattttcagacaatacactattgcccacacatgggatggactctcctaccgcccctacccccttggtacatggctggcttggtattaaagaaattcactgtaaaatctttttagaaagtgagccattttgtaatgatgaagatgttaggacttcaaaggatttttctttactcgattagttttgtttatcaaatgatttctttaaatcgattatatatatatatggaatatttcaaaattcaaactgtcacattaagaaacatgataacctaaatgacctaaataagaacactgtacctaaaataaagaggcaacttta

SEQ ID NO: 22662 - DNA, 3975 bp, Artificial Sequence
  derived and/or modified sequence
atgctgctttctccaagcctgctcctgctgttgctgctgggtgcccctcggggatgtgccgagggtgtggccgctgccctgactccagagcgactgctcgagtggcaggataagggcattttcgtgatccagtcagaatcactcaagaaatgcatccaagccggaaagtctgtgctgacactggagaattgtaagcaggccaacaaacatatgctgtggaagtgggtgagtaatcacggcctttttaacataggaggcagcggctgtcttggcctcaacttcagcgcccctgagcagccgctgagtctatacgaatgcgacagcaccttggtttcactgagatggagatgtaaccgtaagatgataaccggaccactacagtactccgtgcaagttgcccacgacaacacagtagttgcttctagaaagtacatacacaagtggatttcctatggaagcggcggtggggacatctgcgagtatcttcacaaggaccttcacaccattaagggtaacacacatggcatgccttgtatgtttcccttccagtacaatcaccagtggcatcacgaatgcacaagggaaggtagggaagatgatctgctgtggtgtgccacgacctcccgctatgagcgcgatgaaaagtgggggttttgtcccgacccgacctcagcagaggttggatgcgacaccatctgggagaaggaccttaacagtcatatatgttaccaattcaatctcttgtcaagcctgtcatggagtgaggcccacagctcgtgtcagatgcaaggaggaaccctgctttctatcacagacgagacagaagagaatttcattcgggagcacatgtccagtaagactgtggaggtgtggatggggttgaatcagctcgacgaacacgccggatggcagtggagcgatggtactcccttaaactatttaaattggagcccggaagtgaattttgagccctttgtggaggaccactgtgggacattttcgtcctttatgccctccgcctggcgctcacgggactgcgagtctactctaccctatatttgcaagaagtacttgaatcatatcgaccatgaaatcgtggaaaaggacgcatggaaatattatgccacgcactgtgaaccaggctggaatccttacaaccgtaactgctacaagcttcaaaaagaggaaaagacttggcacgaggccttgcggagctgccaagcagataacagtgcactgatcgatataaccagcttggcagaagtggaattccttgtgacactgctgggggatgagaatgcctcagaaacctggattgggctcagctcaaacaaaattccagtgagcttcgagtggtcaaatgactcgtccgtcatcttcacaaactggcacacccttgaacctcacatctttccgaatagaagtcagctgtgcgtaagtgcagagcagagcgaaggacactggaaagtcaagaactgtgaagaacggctcttttacatctgtaagaaggcgggacacgtcttgtcagatgccgagtctggctgtcaggagggttgggaacgccacggcggattttgttacaaaatagacaccgtgctgcgcagttttgaccaggcaagttctggttattactgtcctcctgctctggtgacgattactaacagatttgaacaggcgtttatcaccagcctgatctcttcggtcgtgaagatgaaggacagctacttctggattgctcttcaggaccaaaatgatacaggagaatatacatggaagccagtgggacagaagccagagcctgtgcagtatacacactggaacacccatcaacctcggtactcaggtggctgcgtggccatgcgaggcaggcatccattggggagatgggaggtcaagcattgccgccattttaaggctatgtccctttgtaagcaacctgttgaaaaccaagaaaaagcagaatatgaggagcgatggccctttcatccctgttacctggattgggaaagcgaacctggattggccagttgcttcaaggtgtttcattcagagaaagtcctcatgaagcggacatggagggaggcagaggctttttgtgaggagtttggggcacacctggcttcatttgcgcacatagaagaagagaactttgtgaacgagctgctccattctaagttcaactggacagaggagagacagttttggattggatttaataagcggaaccccctgaacgcgggttcgtgggagtggtctgatcgcacccccgtggtttcatccttcctggacaacacctatttcggagaagacgccagaaactgcgcagtttacaaggctaataaaactctcctccccctccactgcggctctaagcgcgaatggatttgtaaaatccctagagatgtcaaacccaagattcctttttggtatcaatatgacgtaccttggctattttaccaggacgcagagtatctgtttcatactttcgcctctgaatggttgaactttgagtttgtctgttcctggctccactccgacctgctgaccatccattcagcgcacgaacaggaatttatccatagcaaaatcaaagctctgtctaagtacggagcctcttggtggattggcttacaggaagaaagggccaacgatgagttccgttggagggatgggacaccagtgatttaccagaactgggataccggtcgggaacggacggtgaacaatcagtcccagaggtgcggctttatttcaagtatcaccgggctgtggggatctgaagagtgtagtgtgtccatgccctccatttgcaagcggaaaaaggtctggttgatcgaaaaaaagaaggacactcctaaacagcacggaacgtgcccaaagggatggttgtacttcaactataagtgcctgctcctgaatatccctaaagacccatcatcctggaagaactggactcatgctcagcacttttgtgccgaagaaggcggaaccctcgttgccatagagtcagaggtggagcaagcttttattacgatgaatctgtttggtcaaacaacgagcgtgtggattgggcttcagaatgacgactacgaaacctggctgaacgggaagcccgtcgtgtacagcaattggtctccgttcgatataatcaacataccctcacacaatacaactgaagtccaaaagcacattccactgtgcgccctcctgagttctaatcctaacttccatttcactggcaaatggtactttgaggactgcgggaaggaaggttacggtttcgtgtgcgagaaaatgcaggacacaagtgggcatggggtgaatacctccgatatgtaccccatgccaaacacccttgaatatgggaatcgtacctataaaattatcaacgcaaatatgacgtggtatgccgctatcaagacatgcctgatgcacaaagcccagctggtgagtatcactgatcaataccaccagtcattcctgacggttgtgctcaatcggctgggctacgcccattggatcgggttgtttacaacagataacgggctaaacttcgactggagcgacgggactaaatcttccttcaccttttggaaggatgaggagtcttccttactaggggactgtgtgttcgcggactccaacggcaggtggcactccactgcatgcgagagctttctgcaaggagcaatctgtcatgttccaccagagacacgtcaatccgagcatcctgaactgtgttcagaaacatccatcccatggataaagttcaagtcgaactgctactccttctctacggtgctggactctatgagcttcgaggccgctcacgagttctgtaagaaagagggtagcaatctgctcactatcaaagatgaagctgagaacgcctttcttctggaggaactgttcgcttttggttcatctgtccagatggtctggttaaatgcacagtttgacggaaactctaaatag

SEQ ID NO: 22663 - DNA, 3975 bp, Artificial Sequence
  derived and/or modified sequence
atgctgctgagccccagcctgctgctgctgctgctgctgggcgcccccagaggctgcgccgagggcgtggccgccgccctgacccccgagagactgctggagtggcaggacaagggcatcttcgtgatccagagcgagagcctgaagaagtgcatccaggccggcaagagcgtgctgaccctggagaactgcaagcaggccaacaagcacatgctgtggaagtgggtgagcaaccacggcctgttcaacatcggcggcagcggctgcctgggcctgaacttcagcgcccccgagcagcccctgagcctgtacgagtgcgacagcaccctggtgagcctgagatggagatgcaacagaaagatgatcaccggccccctgcagtacagcgtgcaggtggcccacgacaacaccgtggtggccagcagaaagtacatccacaagtggatcagctacggcagcggcggcggcgacatctgcgagtacctgcacaaggacctgcacaccatcaagggcaacacccacggcatgccctgcatgttccccttccagtacaaccaccagtggcaccacgagtgcaccagagagggcagagaggacgacctgctgtggtgcgccaccaccagcagatacgagagagacgagaagtggggcttctgccccgaccccaccagcgccgaggtgggctgcgacaccatctgggagaaggacctgaacagccacatctgctaccagttcaacctgctgagcagcctgagctggagcgaggcccacagcagctgccagatgcagggcggcaccctgctgagcatcaccgacgagaccgaggagaacttcatcagagagcacatgagcagcaagaccgtggaggtgtggatgggcctgaaccagctggacgagcacgccggctggcagtggagcgacggcacccccctgaactacctgaactggagccccgaggtgaacttcgagcccttcgtggaggaccactgcggcaccttcagcagcttcatgcccagcgcctggagaagcagagactgcgagagcaccctgccctacatctgcaagaagtacctgaaccacatcgaccacgagatcgtggagaaggacgcctggaagtactacgccacccactgcgagcccggctggaacccctacaacagaaactgctacaagctgcagaaggaggagaagacctggcacgaggccctgagaagctgccaggccgacaacagcgccctgatcgacatcaccagcctggccgaggtggagttcctggtgaccctgctgggcgacgagaacgccagcgagacctggatcggcctgagcagcaacaagatccccgtgagcttcgagtggagcaacgacagcagcgtgatcttcaccaactggcacaccctggagccccacatcttccccaacagaagccagctgtgcgtgagcgccgagcagagcgagggccactggaaggtgaagaactgcgaggagagactgttctacatctgcaagaaggccggccacgtgctgagcgacgccgagagcggctgccaggagggctgggagagacacggcggcttctgctacaagatcgacaccgtgctgagaagcttcgaccaggccagcagcggctactactgcccccccgccctggtgaccatcaccaacagattcgagcaggccttcatcaccagcctgatcagcagcgtggtgaagatgaaggacagctacttctggatcgccctgcaggaccagaacgacaccggcgagtacacctggaagcccgtgggccagaagcccgagcccgtgcagtacacccactggaacacccaccagcccagatacagcggcggctgcgtggccatgagaggcagacaccccctgggcagatgggaggtgaagcactgcagacacttcaaggccatgagcctgtgcaagcagcccgtggagaaccaggagaaggccgagtacgaggagagatggcccttccacccctgctacctggactgggagagcgagcccggcctggccagctgcttcaaggtgttccacagcgagaaggtgctgatgaagagaacctggagagaggccgaggccttctgcgaggagttcggcgcccacctggccagcttcgcccacatcgaggaggagaacttcgtgaacgagctgctgcacagcaagttcaactggaccgaggagagacagttctggatcggcttcaacaagagaaaccccctgaacgccggcagctgggagtggagcgacagaacccccgtggtgagcagcttcctggacaacacctacttcggcgaggacgccagaaactgcgccgtgtacaaggccaacaagaccctgctgcccctgcactgcggcagcaagagagagtggatctgcaagatccccagagacgtgaagcccaagatccccttctggtaccagtacgacgtgccctggctgttctaccaggacgccgagtacctgttccacaccttcgccagcgagtggctgaacttcgagttcgtgtgcagctggctgcacagcgacctgctgaccatccacagcgcccacgagcaggagttcatccacagcaagatcaaggccctgagcaagtacggcgccagctggtggatcggcctgcaggaggagagagccaacgacgagttcagatggagagacggcacccccgtgatctaccagaactgggacaccggcagagagagaaccgtgaacaaccagagccagagatgcggcttcatcagcagcatcaccggcctgtggggcagcgaggagtgcagcgtgagcatgcccagcatctgcaagagaaagaaggtgtggctgatcgagaagaagaaggacacccccaagcagcacggcacctgccccaagggctggctgtacttcaactacaagtgcctgctgctgaacatccccaaggaccccagcagctggaagaactggacccacgcccagcacttctgcgccgaggagggcggcaccctggtggccatcgagagcgaggtggagcaggccttcatcaccatgaacctgttcggccagaccaccagcgtgtggatcggcctgcagaacgacgactacgagacctggctgaacggcaagcccgtggtgtacagcaactggagccccttcgacatcatcaacatccccagccacaacaccaccgaggtgcagaagcacatccccctgtgcgccctgctgagcagcaaccccaacttccacttcaccggcaagtggtacttcgaggactgcggcaaggagggctacggcttcgtgtgcgagaagatgcaggacaccagcggccacggcgtgaacaccagcgacatgtaccccatgcccaacaccctggagtacggcaacagaacctacaagatcatcaacgccaacatgacctggtacgccgccatcaagacctgcctgatgcacaaggcccagctggtgagcatcaccgaccagtaccaccagagcttcctgaccgtggtgctgaacagactgggctacgcccactggatcggcctgttcaccaccgacaacggcctgaacttcgactggagcgacggcaccaagagcagcttcaccttctggaaggacgaggagagcagcctgctgggcgactgcgtgttcgccgacagcaacggcagatggcacagcaccgcctgcgagagcttcctgcagggcgccatctgccacgtgccccccgagaccagacagagcgagcaccccgagctgtgcagcgagaccagcatcccctggatcaagttcaagagcaactgctacagcttcagcaccgtgctggacagcatgagcttcgaggccgcccacgagttctgcaagaaggagggcagcaacctgctgaccatcaaggacgaggccgagaacgccttcctgctggaggagctgttcgccttcggcagcagcgtgcagatggtgtggctgaacgcccagttcgacggcaacagcaagtag

SEQ ID NO: 22664 - protein, 188 aa, Artificial Sequence
  derived and/or modified sequence
MAETSLPELGGEDKATPCPSILELEELLRAGKSSCSRVDEVWPNLFIGDAATANNRFELWKLGITHVLNAAHKGLYCQGGPDFYGSSVSYLGVPAHDLPDFDISAYFSSAADFIHRALNTPGAKVLVHCVVGVSRSATLVLAYLMLHQRLSLRQAVITVRQHRWVFPNRGFLHQLCRLDQQLRGAGQS

SEQ ID NO: 22665 - DNA, 567 bp, Artificial Sequence
  derived and/or modified sequence
atggccgaaacctcattaccagagctcggcggagaagataaggcaacaccttgcccatccattctagagctcgaggagttgctcagagctgggaaaagcagctgtagtagagtcgatgaggtatggcctaatttattcattggtgatgctgcaactgcaaacaaccgattcgaactctggaaattgggcatcacccatgtgctgaatgctgcccataagggtctctactgtcaaggcggccccgacttttatggtagttcggtgtcttacctgggggtgcctgcccacgacctgccggactttgatatatctgcttatttttcgtcagccgccgattttatccaccgtgcactgaacaccccaggggcgaaggtacttgttcattgtgtagtgggggtctctagaagtgccaccctagtgcttgcatacctgatgctgcatcagagactgagcctgcgccaggctgttataacagttagacaacatagatgggtctttccaaacaggggattcctacaccaattgtgtcgcctggatcagcagctgcgcggcgctggccagtcctag

SEQ ID NO: 22666 - DNA, 567 bp, Artificial Sequence
  derived and/or modified sequence
atggccgagaccagcctgcctgagctgggcggggaggacaaggccaccccctgccccagcatcctggagctggaggagctgctgcgggccggcaagagcagctgcagccgggtggatgaggtgtggcccaacctcttcatcggagatgctgccacagccaacaacagatttgagctgtggaagctgggcatcacccacgtgctgaatgctgcccacaagggcctgtactgccagggcggccctgacttctacggcagctctgtgtcctacctgggcgtgcctgcccatgacctgcctgactttgacatcagcgcctacttcagcagcgctgctgacttcatccaccgggccctgaacacccctggggccaaggtgctggtgcactgtgtggtgggcgtgagccgcagcgccaccctggtgctggcctacctgatgctgcaccagaggctgagcctgcggcaggccgtcatcaccgtgcggcagcaccgctgggtgttccccaacagaggcttcctgcaccagctgtgccgcctggaccagcagctgcggggagctggccagagctag

SEQ ID NO: 22667 - DNA, 567 bp, Artificial Sequence
  derived and/or modified sequence
atggccgagaccagcctgcccgagctgggcggcgaggacaaggccaccccttgtccttctatcctggaattggaggaattgctacgggccggcaaaagctcctgcagcagggttgatgaagtctggcctaacctattcattggtgacgcagccaccgcaaacaatcgttttgagctgtggaaattgggaatcactcatgtcctgaacgctgcccataaaggactgtactgccaaggaggacccgacttttacggttcttctgtgtcctatctcggagtccccgctcacgacttacctgactttgatatctcagcctatttttcaagcgccgctgattttattcaccgtgcgctcaacacccccggggctaaggtgctagttcactgtgtggtgggtgtcagccgtagtgccacgctggtgctcgcatacttaatgcttcaccagcgattgtctctccggcaggccgtaataacggtcaggcaacataggtgggttttccctaaccgaggctttctccaccagctgtgtcgcctagatcagcagctacggggggctggacagtcttag

SEQ ID NO: 22668 - DNA, 567 bp, Artificial Sequence
  derived and/or modified sequence
atggccgagacctcacttccggagctcggcggtgaggacaaagccaccccctgtcccagcattcttgaactggaggaactgctccgcgctggaaagagctcgtgctctagagtggatgaggtgtggccgaatctgtttatcggagacgcggcaacagctaataatcgctttgaactgtggaaacttggaattactcacgtactcaacgccgcacataaaggactgtattgtcagggagggcctgacttctacggatcaagcgtgtcgtacctgggagtacccgctcatgacctgcctgatttcgatataagcgcctacttttccagcgcagcggatttcatccacagggccctgaatacccccggagccaaagtcttagtacattgtgttgtgggagtgtctcgatcagctacactggtgctcgcctatctcatgctccaccagaggctgtccttacgacaggctgtgatcaccgtccggcaacacaggtgggtctttccaaatcggggattcttacaccagctgtgcaggctcgaccagcaactcagaggcgctgggcagtcctag

SEQ ID NO: 22669 - DNA, 567 bp, Artificial Sequence
  derived and/or modified sequence
atggccgagaccagcctgcccgagctgggcggcgaggacaaggccaccccctgccccagcatcctggagctggaggagctgctgagagccggcaagagcagctgcagcagagtggacgaggtgtggcccaacctgttcatcggcgacgccgccaccgccaacaacagattcgagctgtggaagctgggcatcacccacgtgctgaacgccgcccacaagggcctgtactgccagggcggccccgacttctacggcagcagcgtgagctacctgggcgtgcccgcccacgacctgcccgacttcgacatcagcgcctacttcagcagcgccgccgacttcatccacagagccctgaacacccccggcgccaaggtgctggtgcactgcgtggtgggcgtgagcagaagcgccaccctggtgctggcctacctgatgctgcaccagagactgagcctgagacaggccgtgatcaccgtgagacagcacagatgggtgttccccaacagaggcttcctgcaccagctgtgcagactggaccagcagctgagaggcgccggccagagctag

SEQ ID NO: 22670 - protein, 198 aa, Artificial Sequence
  derived and/or modified sequence
MDSLQKQDLRRPKIHGAVQASPYQPPTLASLQRLLWVRQAATLNHIDEVWPSLFLGDAYAARDKSKLIQLGITHVVNAAAGKFQVDTGAKFYRGMSLEYYGIEADDNPFFDLSVYFLPVARYIRAALSVPQGRVLVHCAMGVSRSATLVLAFLMICENMTLVEAIQTVQAHRNICPNSGFLRQLQVLDNRLGRETGRF

SEQ ID NO: 22671 - protein, 248 aa, Artificial Sequence
  derived and/or modified sequence
MAETSLPELGGEDKATPCPSILELEELLRAGKSSCSRVDEVWPNLFIGDAMDSLQKQDLRRPKIHGAVQASPYQPPTLASLQRLLWVRQAATLNHIDEVWPSLFLGDAYAARDKSKLIQLGITHVVNAAAGKFQVDTGAKFYRGMSLEYYGIEADDNPFFDLSVYFLPVARYIRAALSVPQGRVLVHCAMGVSRSATLVLAFLMICENMTLVEAIQTVQAHRNICPNSGFLRQLQVLDNRLGRETGRF

SEQ ID NO: 22672 - DNA, 747 bp, Artificial Sequence
  derived and/or modified sequence
atggcagagacaagcttgccggaattaggaggagaagacaaagccaccccctgtcctagcatcctggagctggaggaactattgagggccgggaaatctagctgctctagagtagatgaggtgtggccaaacctctttattggagatgcgatggattcgctgcagaaacaagatctgcgtcgtcctaagatccacggcgctgttcaggcatccccctaccagcctccaacccttgccagccttcagaggcttttatgggtgcggcaggctgctaccctcaaccatatcgacgaggtgtggcctagtttgtttctcggcgacgcctatgccgcaagagataaatctaaactgatacagcttggtattactcacgttgtgaacgccgcagcggggaaatttcaggtagatacgggggccaagttctaccgggggatgagcctggagtattatggcatcgaggccgacgataacccatttttcgacctctccgtatatttcctgcctgtggcacgatatattagggccgctctgagtgttccacaggggcgcgtgcttgtccactgcgcaatgggtgtctcccgtagcgctacactcgtgctggctttcctcatgatttgcgagaatatgactctggtcgaggctattcaaacagttcaggcgcacaggaacatttgtccaaactcagggttcttgcgccagctgcaagtgctggacaaccgactaggccgtgagaccgggaggttttag

SEQ ID NO: 22673 - DNA, 747 bp, Artificial Sequence
  derived and/or modified sequence
atggccgagaccagcctgcctgagctgggcggggaggacaaggccaccccctgccccagcatcctggagctggaggagctgctgcgggccggcaagagcagctgcagccgggtggatgaggtgtggcccaacctcttcatcggagatgccatggacagcctgcagaagcaggacctgcggcggcccaagatccatggagctgtgcaggccagcccctaccagccccccaccctggccagcctgcagaggctgctgtgggtgcggcaggccgccaccctgaaccacattgatgaggtgtggcccagcctcttcctgggagatgcctatgctgcccgggacaagagcaagctgatccagctgggcatcacccacgtggtgaatgctgctgctgggaagttccaggtggacacaggagccaagttctaccggggcatgagcctggagtactacggcatcgaggctgatgacaaccccttctttgacctgtctgtgtacttcctgcctgtggcccgctacatccgggccgccctgtctgtgccccagggccgggtgctggtgcactgtgccatgggcgtgagccgcagcgccaccctggtgctggccttcctgatgatctgtgagaacatgaccctggtggaggccatccagacagtgcaggcccacaggaacatctgccccaacagcggcttcctgcggcagctgcaggtgctggacaaccggctgggccgggagaccggccgcttctag

SEQ ID NO: 22674 - DNA, 747 bp, Artificial Sequence
  derived and/or modified sequence
atggccgagaccagcctgcccgagctgggcggcgaggacaaggccacaccctgcccgtccatcttggagcttgaggaactcttgagagccgggaaatcttcttgtagcagggtcgacgaagtttggccgaacctgtttatcggagacgctatggatagcctgcagaaacaggatctcaggagacctaaaatccacggagccgtacaggcctcaccctaccaaccacccaccctggcaagcctccagaggctcctgtgggtccggcaagccgctactcttaaccacattgatgaggtgtggccctccctgttcctgggggacgcctacgcagcccgggataaatctaaactgattcagctgggcattacacatgtggtgaatgctgctgcaggcaagtttcaggtagataccggcgccaaattctaccgcggcatgtccctggagtactatggtatcgaggctgacgataaccccttcttcgacctgtccgtctatttcttacctgtggcccgctacattcgcgccgccctttccgtgcctcaggggcgagtgctggttcactgcgctatgggtgtcagccgctctgcaacgctggttctggcctttctgatgatctgcgaaaacatgacattggtggaggccatccagaccgtacaagctcataggaacatttgccctaattcaggcttcctgagacagttgcaagtccttgacaatagattggggcgcgaaacagggcggttctag

SEQ ID NO: 22675 - DNA, 747 bp, Artificial Sequence
  derived and/or modified sequence
atggctgaaacatcactgccagagctgggcggtgaggataaagccaccccatgcccctccatactggaacttgaggagctgcttcgcgctgggaagagcagctgctcaagggtggatgaagtttggccaaatctcttcatcggcgatgccatggattctctgcagaagcaagacttgcggcgtcctaagatccacggtgctgtccaagcctcgccctaccagcctcctactctcgcatctttgcagcgactgctgtgggttcggcaggcagcaactcttaaccatatcgacgaagtgtggcctagtttgttcctcggagacgcttacgcagctcgggataagtcgaaattaattcagctcggaataacccatgttgtcaacgctgccgcaggtaaatttcaggtcgatactggagccaagttctaccgaggaatgtcactggagtattacggcattgaagcagatgacaatcccttcttcgacctttcggtgtatttcctccctgtggcgagatatatcagggccgcacttagtgtaccccaaggacgggttttggtccactgcgctatgggcgtcagcagaagtgccactctggtcctcgcgtttctcatgatttgcgagaacatgacactggttgaggccatccagactgtgcaggctcaccgtaacatttgccccaactccggctttcttcggcaattgcaggtcctcgacaataggctagggagagagactggaaggttttag

SEQ ID NO: 22676 - DNA, 747 bp, Artificial Sequence
  derived and/or modified sequence
atggccgagaccagcctgcccgagctgggcggcgaggacaaggccaccccctgccccagcatcctggagctggaggagctgctgagagccggcaagagcagctgcagcagagtggacgaggtgtggcccaacctgttcatcggcgacgccatggacagcctgcagaagcaggacctgagaagacccaagatccacggcgccgtgcaggccagcccctaccagccccccaccctggccagcctgcagagactgctgtgggtgagacaggccgccaccctgaaccacatcgacgaggtgtggcccagcctgttcctgggcgacgcctacgccgccagagacaagagcaagctgatccagctgggcatcacccacgtggtgaacgccgccgccggcaagttccaggtggacaccggcgccaagttctacagaggcatgagcctggagtactacggcatcgaggccgacgacaaccccttcttcgacctgagcgtgtacttcctgcccgtggccagatacatcagagccgccctgagcgtgccccagggcagagtgctggtgcactgcgccatgggcgtgagcagaagcgccaccctggtgctggccttcctgatgatctgcgagaacatgaccctggtggaggccatccagaccgtgcaggcccacagaaacatctgccccaacagcggcttcctgagacagctgcaggtgctggacaacagactgggcagagagaccggcagattctag

SEQ ID NO: 22677 - DNA, 747 bp, Artificial Sequence
  derived and/or modified sequence
atggctgagacctctctcccagagctggggggagaggacaaagccacgccttgccccagcatcctggagctggaggagctcctgcgggcagggaagtcttcttgcagccgtgtggacgaagtttggcccaaccttttcataggagatgcgatggactcactgcagaagcaggacctccggaggcccaagatccatggggcagtccaggcatctccctaccagccgcccacattggcttcgctgcagcgcttgctgtgggtccgtcaggctgccacactgaaccatatcgatgaggtctggcccagcctcttcctgggagatgcgtacgcagcccgggacaagagcaagctgatccagctgggaatcacccacgttgtgaatgccgctgcaggcaagttccaggtggacacaggtgccaaattctaccgtggaatgtccctggagtactatggcatcgaggcggacgacaaccccttcttcgacctcagtgtctactttctgcctgttgctcgatacatccgagctgccctcagtgttccccaaggccgcgtgctggtacactgtgccatgggggtaagccgctctgccacacttgtcctggccttcctcatgatctgtgagaacatgacgctggtagaggccatccagacggtgcaggcccaccgcaatatctgccctaactcaggcttcctccggcagctccaggttctggacaaccgactggggcgggagacggggcggttctga

SEQ ID NO: 22678 - protein, 291 aa, Artificial Sequence
  derived and/or modified sequence
MGLCHFATLALILLVLLEALAQADTQKMVEAQRGVGPRACYSIWLLLAPTPPLSHCLQSPQKQHQVCGDRRLKASSTNCPSEKCTAWARYSHRMDSLQKQDLRRPKIHGAVQASPYQPPTLASLQRLLWVRQAATLNHIDEVWPSLFLGDAYAARDKSKLIQLGITHVVNAAAGKFQVDTGAKFYRGMSLEYYGIEADDNPFFDLSVYFLPVARYIRAALSVPQGRVLVHCAMGVSRSATLVLAFLMICENMTLVEAIQTVQAHRNICPNSGFLRQLQVLDNRLGRETGRF

SEQ ID NO: 22679 - DNA, 876 bp, Artificial Sequence
  derived and/or modified sequence
atgggactgtgtcattttgcaaccttggccctcattttgctggtgctactggaagcgcttgctcaggcagatacgcaaaagatggtcgaagcccagcggggcgtagggcctcgcgcatgctactcaatctggctgctgctcgcacccacccctcctctctcccactgcctgcagagcccgcagaagcagcaccaagtatgcggagaccgcaggttaaaagccagtagcactaactgccccagtgagaagtgtacagcttgggcgaggtatagccatcgcatggactcactgcaaaagcaggacctgcgcaggccgaaaatccacggcgccgtacaagcgtctccttaccaaccccctactctcgcatccttgcagcggctcctgtgggtcaggcaagcggctacactcaatcacattgatgaagtatggccctcgctgttcctaggagacgcttatgccgcaagggacaagtcaaaacttatacagctgggcataacccacgtggtgaatgcagcagccgggaagttccaagtggacactggagcaaagttttacaggggcatgtctctagaatactatggcatcgaggccgacgataaccctttctttgacctgagcgtgtacttcctccccgtggcccggtatatccgtgccgccctgagtgtgcctcaaggacgcgtactcgtacactgcgccatgggcgtgtcccgcagcgccactctggtgctggcattcctgatgatttgcgaaaatatgaccctggtggaggccatacagaccgtgcaggctcatagaaatatatgtcccaacagcggtttcctgcgacagttgcaggtcctggataatcgtctcggacgcgaaacaggacgattttag

SEQ ID NO: 22680 - DNA, 876 bp, Artificial Sequence
  derived and/or modified sequence
atgggcctgtgccactttgccaccctggccctgatcctgctggtgctgctggaggccctggcccaggccgacacccagaagatggtggaggcccagaggggcgtgggcccccgggcctgctacagcatctggctgctgctggcccccaccccacccctgagccactgcctgcagagcccccagaagcagcaccaggtgtgtggggaccggcggctgaaggccagcagcaccaactgccccagcgagaagtgcacagcctgggcccgctacagccacaggatggacagcctgcagaagcaggacctgcggcggcccaagatccacggggctgtgcaggccagcccctaccagccccccaccctggccagcctgcagaggctgctgtgggtgcggcaggccgccaccctgaaccacattgatgaggtgtggcccagcctcttcctgggagatgcctatgctgcccgggacaagagcaagctgatccagctgggcatcacccacgtggtgaatgctgctgctgggaagttccaggtggacaccggggccaagttctaccggggcatgagcctggagtactatggaattgaagcagatgacaaccccttctttgacctgtctgtgtacttcctgcctgtggcccgctacatccgggccgccctgtctgtgccccagggccgggtgctggtgcactgtgccatgggcgtgagccgcagcgccaccctggtgctggccttcctgatgatctgtgagaacatgaccctggtggaggccatccagacagtgcaggcccacaggaacatctgccccaacagcggcttcctgcggcagctgcaggtgctggacaaccggctgggccgggagaccggccgcttctag

SEQ ID NO: 22681 - DNA, 876 bp, Artificial Sequence
  derived and/or modified sequence
atgggcctgtgccacttcgccaccctggccctgatcctgctggtgctcctggaagcactggcacaggcagatacacagaagatggtggaagcccagcggggcgtgggccctcgcgcctgttactcaatatggctactcctggcacctacaccgccactgagccactgcctccagtctcctcagaaacagcaccaggtgtgtggcgaccggcggctgaaggcgtcatctacaaattgccccagcgagaaatgcaccgcttgggccagatactctcacagaatggattctctgcagaaacaagacctccgcaggcctaagatacacggggccgtacaagcttccccttaccagcctccaaccctcgcctcgttacagagactgttgtgggttagacaagccgccacccttaatcacattgatgaagtctggccatcactcttcctcggcgatgcatacgcggccagggacaaaagcaagttgatccagctcgggattactcatgtggtgaatgcggcagcaggtaagtttcaggtcgatacgggcgctaaattctatagaggcatgtccctggagtactacggcatcgaggccgacgacaaccctttcttcgacctcagcgtttactttctgccagtggcccggtacattagggccgccctttctgtcccacagggccgggttctcgtccactgtgcaatgggagtgtccaggtctgcaacattggtgcttgcctttttgatgatttgcgaaaatatgacgctcgtcgaggccatccaaacagtgcaagcccaccgcaatatctgtcctaattccggattcttgcgccagcttcaggtcctggacaatcgcctgggacgagagaccggtcgcttctag

SEQ ID NO: 22682 - DNA, 876 bp, Artificial Sequence
  derived and/or modified sequence
atgggcttgtgccatttcgccacattggctctcatactgttggtactcttggaggccttagcccaggcagacacccagaagatggttgaagcacagaggggggtgggcccaagggcctgctacagcatctggctcctgctcgctccaacgccccctctatcccattgtctgcagagtcctcagaagcagcatcaggtttgtggcgatcgccgtcttaaagcctctagcacaaattgcccgtctgaaaagtgcactgcttgggccagatacagtcaccgtatggactcactgcagaagcaggaccttcgccgacccaagattcacggcgcagtccaggctagcccatatcaaccacccactctagcgtccctccagaggctgctatgggtgcgccaagccgcaactctgaaccacattgatgaggtctggccatctctcttcctgggagacgcttatgccgcacgagataaatcaaagctcatccagttagggataactcacgttgtaaacgcagccgcaggcaagttccaggtggacacgggcgctaaattctatagagggatgtcattggaatattatggcatcgaggcagatgacaaccccttctttgacctgtcagtgtattttctgcccgtagctcgctatattagagccgcactctctgtccctcagggccgtgtgttggtgcactgcgcgatgggagtctcaagatctgctacacttgtactcgccttcctcatgatctgtgagaacatgacacttgttgaggctattcaaaccgttcaggcacatagaaatatttgtcccaatagtggttttcttcgtcaactgcaggtgctggataataggctgggaagggagaccggcaggttttag

SEQ ID NO: 22683 - DNA, 876 bp, Artificial Sequence
  derived and/or modified sequence
atgggcctgtgccacttcgccaccctggccctgatcctgctggtgctgctggaggccctggcccaggccgacacccagaagatggtggaggcccagagaggcgtgggccccagagcctgctacagcatctggctgctgctggcccccaccccccccctgagccactgcctgcagagcccccagaagcagcaccaggtgtgcggcgacagaagactgaaggccagcagcaccaactgccccagcgagaagtgcaccgcctgggccagatacagccacagaatggacagcctgcagaagcaggacctgagaagacccaagatccacggcgccgtgcaggccagcccctaccagccccccaccctggccagcctgcagagactgctgtgggtgagacaggccgccaccctgaaccacatcgacgaggtgtggcccagcctgttcctgggcgacgcctacgccgccagagacaagagcaagctgatccagctgggcatcacccacgtggtgaacgccgccgccggcaagttccaggtggacaccggcgccaagttctacagaggcatgagcctggagtactacggcatcgaggccgacgacaaccccttcttcgacctgagcgtgtacttcctgcccgtggccagatacatcagagccgccctgagcgtgccccagggcagagtgctggtgcactgcgccatgggcgtgagcagaagcgccaccctggtgctggccttcctgatgatctgcgagaacatgaccctggtggaggccatccagaccgtgcaggcccacagaaacatctgccccaacagcggcttcctgagacagctgcaggtgctggacaacagactgggcagagagaccggcagattctag

SEQ ID NO: 22684 - DNA, 1114 bp, Artificial Sequence
  derived and/or modified sequence
agaggcagaggggtgggcgggctggcccatggctgagacctctctcccagagctggggggagaggacaaagccacgccttgccccagcatcctggagctggaggagctcctgcgggcagggaagtcttcttgcagccgtgtggacgaagtttggcccaaccttttcataggagatgcaaacagcatcaagtgtgcggagacaggcggctgaaagccagcagcacgaactgcccgtcagagaagtgcacagcctgggccagatactcccacaggatggactcactgcagaagcaggacctccggaggcccaagatccatggggcagtccaggcatctccctaccagccgcccacattggcttcgctgcagcgcttgctgtgggtccgtcaggctgccacactgaaccatatcgatgaggtctggcccagcctcttcctgggagatgcgtacgcagcccgggacaagagcaagctgatccagctgggaatcacccacgttgtgaatgccgctgcaggcaagttccaggtggacacaggtgccaaattctaccgtggaatgtccctggagtactatggcatcgaggcggacgacaaccccttcttcgacctcagtgtctactttctgcctgttgctcgatacatccgagctgccctcagtgttccccaaggccgcgtgctggtacactgtgccatgggggtaagccgctctgccacacttgtcctggccttcctcatgatctgtgagaacatgacgctggtagaggccatccagacggtgcaggcccaccgcaatatctgccctaactcaggcttcctccggcagctccaggttctggacaaccgactggggcgggagacggggcggttctgatctggcaggcagccaggatccctgacccttggcccaaccccaccagcctggccctgggaacagcaggctctgctgtttctagtgaccctgagatgtaaacagcaagtgggggctgaggcagaggcagggatagctgggtggtgacctcttagcgggtggatttccctgacccaattcagagattctttatgcaaaagtgagttcagtccatctctataataaaatattcatcgtcataaagaca

SEQ ID NO: 22685 - protein, 410 aa, Artificial Sequence
  derived and/or modified sequence
MDVMELLEEDLTCPICCSLFDDPRVLPCSHNFCKKCLEGILEGSVRNSLWRPAPFKCPTCRKETSATGINSLQVNYSLKGIVEKYNKIKISPKMPVCKGHLGQPLNIFCLTDMQLICGICATRGEHTKHVFCSIEDAYAQERDAFESLFQSFETWRRGDALSRLDTLETSKRKSLQLLTKDSDKVKEFFEKLQHTLDQKKNEILSDFETMKLAVMQAYDPEINKLNTILQEQRMAFNIAEAFKDVSEPIVFLQQMQEFREKIKVIKETPLPPSNLPASPLMKNFDTSQWEDIKLVDVDKLSLPQDTGTFISKIPWSFYKLFLLILLLGLVIVFGPTMFLEWSLFDDLATWKGCLSNFSSYLTKTADFIEQSVFYWEQVTDGFFIFNERFKNFTLVVLNNVAEFVCKYKLL

SEQ ID NO: 22686 - protein, 407 aa, Artificial Sequence
  derived and/or modified sequence
MELLEEDLTCPICCSLFDDPRVLPCSHNFCKKCLEGILEGSVRNSLWRPAPFKCPTCRKETSATGINSLQVNYSLKGIVEKYNKIKISPKMPVCKGHLGQPLNIFCLTDMQLICGICATRGEHTKHVFCSIEDAYAQERDAFESLFQSFETWRRGDALSRLDTLETSKRKSLQLLTKDSDKVKEFFEKLQHTLDQKKNEILSDFETMKLAVMQAYDPEINKLNTILQEQRMAFNIAEAFKDVSEPIVFLQQMQEFREKIKVIKETPLPPSNLPASPLMKNFDTSQWEDIKLVDVDKLSLPQDTGTFISKIPWSFYKLFLLILLLGLVIVFGPTMFLEWSLFDDLATWKGCLSNFSSYLTKTADFIEQSVFYWEQVTDGFFIFNERFKNFTLVVLNNVAEFVCKYKLL

SEQ ID NO: 22687 - protein, 266 aa, Artificial Sequence
  derived and/or modified sequence
MELLEEDLTCPICCSLFDDPRVLPCSHNFCKKCLEGILEGSVRNSLWRPAPFKCPTCRKETSATGINSLQVNYSLKGIVEKYNKIKISPKMPVCKGHLGQPLNIFCLTDMQLICGICATRGEHTKHVFCSIEDAYAQERDAFESLFQSFETWRRGDALSRLDTLETSKRKSLQLLTKDSDKVKEFFEKLQHTLDQKKNEILSDFETMKLAVMQAYDPEINKLNTILQEQRMAFNIAEAFKDVSEPIVFLQQMQEFREKIKVIKETP

SEQ ID NO: 22688 - protein, 129 aa, Artificial Sequence
  derived and/or modified sequence
MELLEEDLTCPICCSLFDDPRVLPCSHNFCKKCLEGILEGSVRNSLWRPAPFKCPTCRKETSATGINSLQVNYSLKGIVEKYNKIKISPKMPVCKGHLGQPLNIFCLTDMQLICGICATRGEHTKHVFC

SEQ ID NO: 22689 - DNA, 6975 bp, Artificial Sequence
  derived and/or modified sequence
gggagagggaagggggcggagctagccggagccgcgagtccattttggggctgtgcttggcgcgtaccgtgcggtccctgtagttggaggacgggcggtcgcgcggcctttcccactagccggaggtcggagataagtacccgccgcccggctcctctcgggaaagcggggtggtcctcgaaccttcagcgagggtggggagttgcccagtagcctctagttcgttagtcaaaacgtgaaaaaaaagacctgctttgccctgggaaatagtaaccctgccaaatacatcagcttgtaggagacagagaataacagcacctggccgggtgcagtggctcaggcctgtaatcgcagcactttgggaggctgaggtgggcggatcacctgaggtcaggagctcgagaccagcctggccaaaatggatgtgatggagctgcttgaagaagatctcacatgccctatttgttgtagtctgtttgatgatccacgggttttgccttgctcccacaacttctgcaaaaaatgcttagaaggtatcttagaagggagtgtgcggaattccttgtggagaccagctccattcaagtgtcctacatgccgtaaggaaacttcagctactggaattaatagcctgcaggttaattactccctgaagggtattgtggaaaagtataacaagatcaagatctctcccaaaatgccagtatgcaaaggacacttggggcagcctctcaacattttctgcctgactgatatgcagctgatttgtgggatctgtgctactcgtggggagcacaccaaacatgtcttctgttctattgaagatgcctatgctcaggaaagggatgcctttgagtccctcttccagagctttgagacctggcgtcggggagatgctctttctcgcttggataccttggaaactagtaagaggaaatccctacagttactgactaaagattcagataaagtgaaggaattttttgagaagttacaacacacactggatcaaaagaagaatgaaattctgtctgactttgagaccatgaaacttgctgttatgcaagcatatgacccagagatcaacaaactcaacaccatcttgcaggagcaacggatggcctttaacattgctgaggctttcaaagatgtgtcagaacccattgtatttctgcaacagatgcaggagtttagagagaaaatcaaagtaatcaaggaaactcctttacctccctctaatttgcctgcaagccctttaatgaagaactttgataccagtcagtgggaagacataaaactagtcgatgtggataaactttctttgcctcaagacactggcacattcattagcaagattccctggagcttttataagttatttttgctaatccttctgcttggccttgtcattgtctttggtcctaccatgttcctagaatggtcattatttgatgacctggcaacttggaaaggctgtctttcaaacttcagttcctatctgactaaaacagccgatttcatagaacaatcagttttttactgggaacaggtgacagatgggtttttcattttcaatgaaagattcaagaattttactttggtggtactgaacaatgtggcagaatttgtgtgcaaatataaactattataaaatctgtttcaagtatgcagttttcttttgttagaaattgttagagaatagagagtggtaattcagatttggtcaacgattctagtcacatattttcctccaaaagtattccttccaaaaataatctatacatgttcaaattaggtagcataaagataaaagtgaaatttagtagtataggcctgaacctttttttgtttaaaagagtgcttttgaaataagcatccaccccaaatgttggttgtatttatgctgtgataaaaataggtgagagatcatatgatctaatattgtattgatggaagtataggtagtatagtagtgattgttcttcaagcatgcagtaaagatcacttttttttttttttttttttttgagatggagtcttgctctgtcgcccaggctggagtgcagtgatgcaatcttggctcactgcagcctctacctcccaggttcaagtgattatcctgccttagcctcctgagtagctgggattacaggcgcgtgccaccacgcccagctaattttttgtatttttagttgagacagggtttcactgtcccttaagaccatcctgttagccaagatggtcttgatctcctgacctcgtgatccgcctgcctcggcctcccaaagtgctgggattacaggtgtgagccaccgtgcccagccaaagactgctcttaaagcacctttttgacagtgaacatggtctaaaaaagggaagatattgtagaagatttcacacacacacgcgtgtgtgggagacaactaaaggtattgaaggtactaattaattagatttccaaaattttctacagagagttaattatcaccaaaatgtgaatggtacatacaaaacctggcattttcttgtgataagtttacatttttaggagagtggagctttcaatctgcccttttctcctttgtttttgtagttttcaccaaagatgatcaactagaaatgttaagtggctatgcaagcaaaagcatagataggttaaaaaaaaggatcagctggctgggcagggtggctcatgtctataatctcagcattctaggacagtgatgtgggaggattatttgaggctaggagttccagttcgaaaccagcttcgtaaacatagcaagacccagtctctaccaaaaaaaaaaaaaaaaaaaaaaaaaaaaaaaatatatatatatatatacacacacacacacacatatgtacacatacatatatatacatatatatgtatatatagaacacatggcaagagcaggaaatgggaagactaccttttttctggcagctatgtgttgttttgttcgaaagatggcaagtgtacaaccaaaccaatccacttgcttacagaaagaatgtttagtgtagttaagactaatttgacaacagataaaacagtctgtcagctattacaaagtaatcagctgaacactaatgctgttctgtctgctcacaagagataaagataccctctcatggaataaacaccttgcttagaattcatataacaaagaagtaaccttataactgctctctagtctgccttatttgtgtcatagagtaagatattccttgaaagcccattaagtggaatagactttctgaaaataagagttctttacctcagtcctcctctaatttggttgagaggaggtaatgaaaatggggacaggataaaaggtggcaactaaatttaaagcacagaagaaatgatttccttctagctatgagaatagtcaaattgagcttgccaggctgtctcattcctaacatgtaattcatgatttagccactaaatttctaaggagatcataagaaattaagaaaaacgtttaagtctagcctctgcgtggtagacaggtatggggagggagaatgcttttcccctcccagtaataaaaaaaaaaaaaaaaaaaatatatatatatatatatatatatatatatatatatatatatatatatatatatatagttttactaggttttcatggataagtttttaaatgtaagacaggaaagggatctatttgatgtctatcttcagatatattggcagttttccttaagctatttagttcctcatctgttgctttttcattttgtatactgcaagttcccaggcaactcgaatttgcaaacacagccatggatacactatttaccttacagtagtttcctgggaatctaagtctggtttttgttattcttccctcccctccactgcataatcatgtataactagcaacatttatggttataggttgatttcctaagtgtggctgatggtagcctctagtttgaagtgagggaagaatgagtagtcaggaactggtcactttgaatgtgggagggaagatattcacgacaaggttttctacgataaagcagtttcctgcttctcgtttggcacgcatgttagatggcagagaccaagaattcaagatggttggtggccagatttttgtagacagagatggtgatttgtttagtttcatcttagattttttgagaactcaccagcttttattacccactgaattttcagactatcttaggcttcagagagaggctcttttctatgaacttcgttctctagttgatctcttaaacccatacctgctacagccaagacctgctcttgtggaggtacatttcctaagccggaacactcaagcttttttcagggtgtttggctcttgcagcaaaacaattgagatgctaacagggaggattacagtgtttacagaacaaccttcagcgccgacctggaatggtaactttttccctcctcagatgaccttacttccactgcctccacaaagaccttcttaccatgacctggttttccagtgtggttctgacagcactactgataaccaaactggagtcaggtattttgtactttgcagtatttctcttgtataccagtttgtgatgttttctctaaaaacttgaagttcctcaggcctgtaacttctggaaaagatgattattcaaaataatgttttggggtaaccagtggagttgggtagaatgaccaaataattattttccaaactgggatactttttagagtgaaaggggctattattaggtgggacaaaaggaataaatgaagactgcccagaaaaaactgagactatggacattcaaatcatgggagaaaataattttgtagattatgttccattgctaatgaatttgacttagaaaagaattgccttatttttaagagattgtttcagtggttcacataaaggctcgctcactggtttctcttgagttccttacacactatataagttgttctttcagttttatgattcaactactgtttttccttcagctgactttatttttaaacacccttaaagacagatatatctcatggcaaatttggtatcctgttacagccttggctcttaaacaactcaaaatattgggataggctgtcagtatgttaaggatagttgctcctgagtcaattcttcacttactccctctgttgttcttggctggatcctaacgctgatttccactctgctgtcacaaacatttttccccccgtaaaatgtcttaatgctgtcctaccattattttaccaactgtgaaagctggctttaatttttaggaggaaaagaaaagcctgcatgtgttctttattggtatcatttaaaatatacttttttttttttttttggtaaaggtaggcgtattttaagatattttcttaacttgagcagtagccaacaggaaggataccagtgtctctctctcttagcgacacactccttggtcttgcttaccaactggaggacactaggtagaataaccgagtatgacaattcttaattgtttacattttataacttcctgtccttcaaaagagtttgaaatgtcattttgggaaaagagagccagtcaagctagtaggctgattgtgaagaaaatctaataccttatctttatctcaaacctctgtacaactttattttcattgatgggatactttaacaaaaatgaaattttttttggtttttaaaatatgagtgattatgacctctttggggatcatgcttcaaaaagtcagaaacctagagacaaaactgtcattgatttttaagaagaaacacactaggtcaaaagaagatgtcctggaaatatgaagtactctttaaaaaccatgcatttggagaaagtaattgtttccttgaaaaacatgattaaaaactaaaactgggatgttcctgtgtgtacacagtgccaaatggttttccctttttatgttgtgttttagaaacagcacgaaagttttttccattttaaagtgagaaaacattatatttagacttccataattccaaaatcagaagctatttttaaaattagcattttcttgcatcaccaaatggtattcaattgtttgaagctcaaaatttttaccattccataaatgtttgtgaatttttagacagtgccaatttaaaagtagagatagccaatctgaatacggtgaaattatggggatctctggtgattgggatgaaaactctggccttaaaaggtccacttttagtatataattgcctaattagcaatcatttttattttttgctcactccctggtctgaatctatctgtctattcagatattttttggtaggtttggaaaatggagaagtgagcctaattggtgcctaattgtctggtgtatcattcactttattcagtttgttctatcaatatgatttacccctcaaggttaacctagcaggttgctcagttattatctctcaaggtcacagtactagaaatacttggcttgcatctttcagatgccattcatgttatcaagctcaaattatagttggtcacaggattctaaagtctttatttgacttctcctttttgaactggctcaaatggaaaagtgtagttgcttttaaatgttaaaaataagtttaaactttatatttcccattggtttcccctattttgtcctttctttgtgtgcttgaaatattttatttttcagtttgtcctcatagggaatcaagtattttagctaggtgatgtcttgcaagtacgttccactttgttacaatctactatctgtatatactatttgtatcttaattcttttatgagatgttctgtaacatttttctcactttgacaaatgtttttagactgtacagtcaagatctggcgcttgggggtaagtggaatgatttgctaatattgagaatctgttgtatcaaacataataaactttttttgagatgtgaaaaaaaaaaaaaaaaaaaaa

SEQ ID NO: 22690 - DNA, 6861 bp, Artificial Sequence
  derived and/or modified sequence
gggagagggaagggggcggagctagccggagccgcgagtccattttggggctgtgcttggcgcgtaccgtgcggtccctgtagttggaggacgggcggtcgcgcggcctttcccactagccggaggtcggagataagtacccgccgcccggctcctctcgggaaagcggggtggtcctcgaaccttcagcgagggtggggagttgcccagtagcctctagttcgttagtcaaaacgtgaaaaaaaagacctgctttgccctgggaaatagtaaccctgccaaatacatcagcttgtaggagacagaggatgtgatggagctgcttgaagaagatctcacatgccctatttgttgtagtctgtttgatgatccacgggttttgccttgctcccacaacttctgcaaaaaatgcttagaaggtatcttagaagggagtgtgcggaattccttgtggagaccagctccattcaagtgtcctacatgccgtaaggaaacttcagctactggaattaatagcctgcaggttaattactccctgaagggtattgtggaaaagtataacaagatcaagatctctcccaaaatgccagtatgcaaaggacacttggggcagcctctcaacattttctgcctgactgatatgcagctgatttgtgggatctgtgctactcgtggggagcacaccaaacatgtcttctgttctattgaagatgcctatgctcaggaaagggatgcctttgagtccctcttccagagctttgagacctggcgtcggggagatgctctttctcgcttggataccttggaaactagtaagaggaaatccctacagttactgactaaagattcagataaagtgaaggaattttttgagaagttacaacacacactggatcaaaagaagaatgaaattctgtctgactttgagaccatgaaacttgctgttatgcaagcatatgacccagagatcaacaaactcaacaccatcttgcaggagcaacggatggcctttaacattgctgaggctttcaaagatgtgtcagaacccattgtatttctgcaacagatgcaggagtttagagagaaaatcaaagtaatcaaggaaactcctttacctccctctaatttgcctgcaagccctttaatgaagaactttgataccagtcagtgggaagacataaaactagtcgatgtggataaactttctttgcctcaagacactggcacattcattagcaagattccctggagcttttataagttatttttgctaatccttctgcttggccttgtcattgtctttggtcctaccatgttcctagaatggtcattatttgatgacctggcaacttggaaaggctgtctttcaaacttcagttcctatctgactaaaacagccgatttcatagaacaatcagttttttactgggaacaggtgacagatgggtttttcattttcaatgaaagattcaagaattttactttggtggtactgaacaatgtggcagaatttgtgtgcaaatataaactattataaaatctgtttcaagtatgcagttttcttttgttagaaattgttagagaatagagagtggtaattcagatttggtcaacgattctagtcacatattttcctccaaaagtattccttccaaaaataatctatacatgttcaaattaggtagcataaagataaaagtgaaatttagtagtataggcctgaacctttttttgtttaaaagagtgcttttgaaataagcatccaccccaaatgttggttgtatttatgctgtgataaaaataggtgagagatcatatgatctaatattgtattgatggaagtataggtagtatagtagtgattgttcttcaagcatgcagtaaagatcacttttttttttttttttttttttgagatggagtcttgctctgtcgcccaggctggagtgcagtgatgcaatcttggctcactgcagcctctacctcccaggttcaagtgattatcctgccttagcctcctgagtagctgggattacaggcgcgtgccaccacgcccagctaattttttgtatttttagttgagacagggtttcactgtcccttaagaccatcctgttagccaagatggtcttgatctcctgacctcgtgatccgcctgcctcggcctcccaaagtgctgggattacaggtgtgagccaccgtgcccagccaaagactgctcttaaagcacctttttgacagtgaacatggtctaaaaaagggaagatattgtagaagatttcacacacacacgcgtgtgtgggagacaactaaaggtattgaaggtactaattaattagatttccaaaattttctacagagagttaattatcaccaaaatgtgaatggtacatacaaaacctggcattttcttgtgataagtttacatttttaggagagtggagctttcaatctgcccttttctcctttgtttttgtagttttcaccaaagatgatcaactagaaatgttaagtggctatgcaagcaaaagcatagataggttaaaaaaaaggatcagctggctgggcagggtggctcatgtctataatctcagcattctaggacagtgatgtgggaggattatttgaggctaggagttccagttcgaaaccagcttcgtaaacatagcaagacccagtctctaccaaaaaaaaaaaaaaaaaaaaaaaaaaaaaaaatatatatatatatatacacacacacacacacatatgtacacatacatatatatacatatatatgtatatatagaacacatggcaagagcaggaaatgggaagactaccttttttctggcagctatgtgttgttttgttcgaaagatggcaagtgtacaaccaaaccaatccacttgcttacagaaagaatgtttagtgtagttaagactaatttgacaacagataaaacagtctgtcagctattacaaagtaatcagctgaacactaatgctgttctgtctgctcacaagagataaagataccctctcatggaataaacaccttgcttagaattcatataacaaagaagtaaccttataactgctctctagtctgccttatttgtgtcatagagtaagatattccttgaaagcccattaagtggaatagactttctgaaaataagagttctttacctcagtcctcctctaatttggttgagaggaggtaatgaaaatggggacaggataaaaggtggcaactaaatttaaagcacagaagaaatgatttccttctagctatgagaatagtcaaattgagcttgccaggctgtctcattcctaacatgtaattcatgatttagccactaaatttctaaggagatcataagaaattaagaaaaacgtttaagtctagcctctgcgtggtagacaggtatggggagggagaatgcttttcccctcccagtaataaaaaaaaaaaaaaaaaaaatatatatatatatatatatatatatatatatatatatatatatatatatatatatagttttactaggttttcatggataagtttttaaatgtaagacaggaaagggatctatttgatgtctatcttcagatatattggcagttttccttaagctatttagttcctcatctgttgctttttcattttgtatactgcaagttcccaggcaactcgaatttgcaaacacagccatggatacactatttaccttacagtagtttcctgggaatctaagtctggtttttgttattcttccctcccctccactgcataatcatgtataactagcaacatttatggttataggttgatttcctaagtgtggctgatggtagcctctagtttgaagtgagggaagaatgagtagtcaggaactggtcactttgaatgtgggagggaagatattcacgacaaggttttctacgataaagcagtttcctgcttctcgtttggcacgcatgttagatggcagagaccaagaattcaagatggttggtggccagatttttgtagacagagatggtgatttgtttagtttcatcttagattttttgagaactcaccagcttttattacccactgaattttcagactatcttaggcttcagagagaggctcttttctatgaacttcgttctctagttgatctcttaaacccatacctgctacagccaagacctgctcttgtggaggtacatttcctaagccggaacactcaagcttttttcagggtgtttggctcttgcagcaaaacaattgagatgctaacagggaggattacagtgtttacagaacaaccttcagcgccgacctggaatggtaactttttccctcctcagatgaccttacttccactgcctccacaaagaccttcttaccatgacctggttttccagtgtggttctgacagcactactgataaccaaactggagtcaggtattttgtactttgcagtatttctcttgtataccagtttgtgatgttttctctaaaaacttgaagttcctcaggcctgtaacttctggaaaagatgattattcaaaataatgttttggggtaaccagtggagttgggtagaatgaccaaataattattttccaaactgggatactttttagagtgaaaggggctattattaggtgggacaaaaggaataaatgaagactgcccagaaaaaactgagactatggacattcaaatcatgggagaaaataattttgtagattatgttccattgctaatgaatttgacttagaaaagaattgccttatttttaagagattgtttcagtggttcacataaaggctcgctcactggtttctcttgagttccttacacactatataagttgttctttcagttttatgattcaactactgtttttccttcagctgactttatttttaaacacccttaaagacagatatatctcatggcaaatttggtatcctgttacagccttggctcttaaacaactcaaaatattgggataggctgtcagtatgttaaggatagttgctcctgagtcaattcttcacttactccctctgttgttcttggctggatcctaacgctgatttccactctgctgtcacaaacatttttccccccgtaaaatgtcttaatgctgtcctaccattattttaccaactgtgaaagctggctttaatttttaggaggaaaagaaaagcctgcatgtgttctttattggtatcatttaaaatatacttttttttttttttttggtaaaggtaggcgtattttaagatattttcttaacttgagcagtagccaacaggaaggataccagtgtctctctctcttagcgacacactccttggtcttgcttaccaactggaggacactaggtagaataaccgagtatgacaattcttaattgtttacattttataacttcctgtccttcaaaagagtttgaaatgtcattttgggaaaagagagccagtcaagctagtaggctgattgtgaagaaaatctaataccttatctttatctcaaacctctgtacaactttattttcattgatgggatactttaacaaaaatgaaattttttttggtttttaaaatatgagtgattatgacctctttggggatcatgcttcaaaaagtcagaaacctagagacaaaactgtcattgatttttaagaagaaacacactaggtcaaaagaagatgtcctggaaatatgaagtactctttaaaaaccatgcatttggagaaagtaattgtttccttgaaaaacatgattaaaaactaaaactgggatgttcctgtgtgtacacagtgccaaatggttttccctttttatgttgtgttttagaaacagcacgaaagttttttccattttaaagtgagaaaacattatatttagacttccataattccaaaatcagaagctatttttaaaattagcattttcttgcatcaccaaatggtattcaattgtttgaagctcaaaatttttaccattccataaatgtttgtgaatttttagacagtgccaatttaaaagtagagatagccaatctgaatacggtgaaattatggggatctctggtgattgggatgaaaactctggccttaaaaggtccacttttagtatataattgcctaattagcaatcatttttattttttgctcactccctggtctgaatctatctgtctattcagatattttttggtaggtttggaaaatggagaagtgagcctaattggtgcctaattgtctggtgtatcattcactttattcagtttgttctatcaatatgatttacccctcaaggttaacctagcaggttgctcagttattatctctcaaggtcacagtactagaaatacttggcttgcatctttcagatgccattcatgttatcaagctcaaattatagttggtcacaggattctaaagtctttatttgacttctcctttttgaactggctcaaatggaaaagtgtagttgcttttaaatgttaaaaataagtttaaactttatatttcccattggtttcccctattttgtcctttctttgtgtgcttgaaatattttatttttcagtttgtcctcatagggaatcaagtattttagctaggtgatgtcttgcaagtacgttccactttgttacaatctactatctgtatatactatttgtatcttaattcttttatgagatgttctgtaacatttttctcactttgacaaatgtttttagactgtacagtcaagatctggcgcttgggggtaagtggaatgatttgctaatattgagaatctgttgtatcaaacataataaactttttttgagatgtgaaaaaaaaaaaaaaaaaaaaa

SEQ ID NO: 22691 - DNA, 7311 bp, Artificial Sequence
  derived and/or modified sequence
gggagagggaagggggcggagctagccggagccgcgagtccattttggggctgtgcttggcgcgtaccgtgcggtccctgtagttggaggacgggcggtcgcgcggcctttcccactagccggaggtcggagataagtacccgccgcccggctcctctcgggaaagcggggtggtcctcgaaccttcagcgagggtggggagttgcccaggtcagcagggatctgcgtgggttgggggggctggcgaaggccgtctgagctccagtccggcagcgcggcagaaaccagcggggcactgtcatgggcctggggaggagcggcctgcggagggcgccggggcagtgtgtctgtggtccagaaaacctgctccgtccggagccttcctggccccgctaccagcgtctccacatcccctagaaaagaaaagacgggtgtgggccttaggttacagcgcgccgccagcgtttggttgcatggcgccgggggagggcgccctaaccgagaagctgcttaatacaaagagctccaggctcctggcggttcaccaggtctaaacagccgggctttatttgtgggggcgattgaaaaaattgagggtcaagattggggtgctgtgcaaataaatgcgttaatactgttctttttcttctttctttgcagtagcctctagttcgttagtcaaaacgtgaaaaaaaagacctgctttgccctgggaaatagtaaccctgccaaatacatcagcttgtaggagacagaggatgtgatggagctgcttgaagaagatctcacatgccctatttgttgtagtctgtttgatgatccacgggttttgccttgctcccacaacttctgcaaaaaatgcttagaaggtatcttagaagggagtgtgcggaattccttgtggagaccagctccattcaagtgtcctacatgccgtaaggaaacttcagctactggaattaatagcctgcaggttaattactccctgaagggtattgtggaaaagtataacaagatcaagatctctcccaaaatgccagtatgcaaaggacacttggggcagcctctcaacattttctgcctgactgatatgcagctgatttgtgggatctgtgctactcgtggggagcacaccaaacatgtcttctgttctattgaagatgcctatgctcaggaaagggatgcctttgagtccctcttccagagctttgagacctggcgtcggggagatgctctttctcgcttggataccttggaaactagtaagaggaaatccctacagttactgactaaagattcagataaagtgaaggaattttttgagaagttacaacacacactggatcaaaagaagaatgaaattctgtctgactttgagaccatgaaacttgctgttatgcaagcatatgacccagagatcaacaaactcaacaccatcttgcaggagcaacggatggcctttaacattgctgaggctttcaaagatgtgtcagaacccattgtatttctgcaacagatgcaggagtttagagagaaaatcaaagtaatcaaggaaactcctttacctccctctaatttgcctgcaagccctttaatgaagaactttgataccagtcagtgggaagacataaaactagtcgatgtggataaactttctttgcctcaagacactggcacattcattagcaagattccctggagcttttataagttatttttgctaatccttctgcttggccttgtcattgtctttggtcctaccatgttcctagaatggtcattatttgatgacctggcaacttggaaaggctgtctttcaaacttcagttcctatctgactaaaacagccgatttcatagaacaatcagttttttactgggaacaggtgacagatgggtttttcattttcaatgaaagattcaagaattttactttggtggtactgaacaatgtggcagaatttgtgtgcaaatataaactattataaaatctgtttcaagtatgcagttttcttttgttagaaattgttagagaatagagagtggtaattcagatttggtcaacgattctagtcacatattttcctccaaaagtattccttccaaaaataatctatacatgttcaaattaggtagcataaagataaaagtgaaatttagtagtataggcctgaacctttttttgtttaaaagagtgcttttgaaataagcatccaccccaaatgttggttgtatttatgctgtgataaaaataggtgagagatcatatgatctaatattgtattgatggaagtataggtagtatagtagtgattgttcttcaagcatgcagtaaagatcacttttttttttttttttttttttgagatggagtcttgctctgtcgcccaggctggagtgcagtgatgcaatcttggctcactgcagcctctacctcccaggttcaagtgattatcctgccttagcctcctgagtagctgggattacaggcgcgtgccaccacgcccagctaattttttgtatttttagttgagacagggtttcactgtcccttaagaccatcctgttagccaagatggtcttgatctcctgacctcgtgatccgcctgcctcggcctcccaaagtgctgggattacaggtgtgagccaccgtgcccagccaaagactgctcttaaagcacctttttgacagtgaacatggtctaaaaaagggaagatattgtagaagatttcacacacacacgcgtgtgtgggagacaactaaaggtattgaaggtactaattaattagatttccaaaattttctacagagagttaattatcaccaaaatgtgaatggtacatacaaaacctggcattttcttgtgataagtttacatttttaggagagtggagctttcaatctgcccttttctcctttgtttttgtagttttcaccaaagatgatcaactagaaatgttaagtggctatgcaagcaaaagcatagataggttaaaaaaaaggatcagctggctgggcagggtggctcatgtctataatctcagcattctaggacagtgatgtgggaggattatttgaggctaggagttccagttcgaaaccagcttcgtaaacatagcaagacccagtctctaccaaaaaaaaaaaaaaaaaaaaaaaaaaaaaaaatatatatatatatatacacacacacacacacatatgtacacatacatatatatacatatatatgtatatatagaacacatggcaagagcaggaaatgggaagactaccttttttctggcagctatgtgttgttttgttcgaaagatggcaagtgtacaaccaaaccaatccacttgcttacagaaagaatgtttagtgtagttaagactaatttgacaacagataaaacagtctgtcagctattacaaagtaatcagctgaacactaatgctgttctgtctgctcacaagagataaagataccctctcatggaataaacaccttgcttagaattcatataacaaagaagtaaccttataactgctctctagtctgccttatttgtgtcatagagtaagatattccttgaaagcccattaagtggaatagactttctgaaaataagagttctttacctcagtcctcctctaatttggttgagaggaggtaatgaaaatggggacaggataaaaggtggcaactaaatttaaagcacagaagaaatgatttccttctagctatgagaatagtcaaattgagcttgccaggctgtctcattcctaacatgtaattcatgatttagccactaaatttctaaggagatcataagaaattaagaaaaacgtttaagtctagcctctgcgtggtagacaggtatggggagggagaatgcttttcccctcccagtaataaaaaaaaaaaaaaaaaaaatatatatatatatatatatatatatatatatatatatatatatatatatatatatagttttactaggttttcatggataagtttttaaatgtaagacaggaaagggatctatttgatgtctatcttcagatatattggcagttttccttaagctatttagttcctcatctgttgctttttcattttgtatactgcaagttcccaggcaactcgaatttgcaaacacagccatggatacactatttaccttacagtagtttcctgggaatctaagtctggtttttgttattcttccctcccctccactgcataatcatgtataactagcaacatttatggttataggttgatttcctaagtgtggctgatggtagcctctagtttgaagtgagggaagaatgagtagtcaggaactggtcactttgaatgtgggagggaagatattcacgacaaggttttctacgataaagcagtttcctgcttctcgtttggcacgcatgttagatggcagagaccaagaattcaagatggttggtggccagatttttgtagacagagatggtgatttgtttagtttcatcttagattttttgagaactcaccagcttttattacccactgaattttcagactatcttaggcttcagagagaggctcttttctatgaacttcgttctctagttgatctcttaaacccatacctgctacagccaagacctgctcttgtggaggtacatttcctaagccggaacactcaagcttttttcagggtgtttggctcttgcagcaaaacaattgagatgctaacagggaggattacagtgtttacagaacaaccttcagcgccgacctggaatggtaactttttccctcctcagatgaccttacttccactgcctccacaaagaccttcttaccatgacctggttttccagtgtggttctgacagcactactgataaccaaactggagtcaggtattttgtactttgcagtatttctcttgtataccagtttgtgatgttttctctaaaaacttgaagttcctcaggcctgtaacttctggaaaagatgattattcaaaataatgttttggggtaaccagtggagttgggtagaatgaccaaataattattttccaaactgggatactttttagagtgaaaggggctattattaggtgggacaaaaggaataaatgaagactgcccagaaaaaactgagactatggacattcaaatcatgggagaaaataattttgtagattatgttccattgctaatgaatttgacttagaaaagaattgccttatttttaagagattgtttcagtggttcacataaaggctcgctcactggtttctcttgagttccttacacactatataagttgttctttcagttttatgattcaactactgtttttccttcagctgactttatttttaaacacccttaaagacagatatatctcatggcaaatttggtatcctgttacagccttggctcttaaacaactcaaaatattgggataggctgtcagtatgttaaggatagttgctcctgagtcaattcttcacttactccctctgttgttcttggctggatcctaacgctgatttccactctgctgtcacaaacatttttccccccgtaaaatgtcttaatgctgtcctaccattattttaccaactgtgaaagctggctttaatttttaggaggaaaagaaaagcctgcatgtgttctttattggtatcatttaaaatatacttttttttttttttttggtaaaggtaggcgtattttaagatattttcttaacttgagcagtagccaacaggaaggataccagtgtctctctctcttagcgacacactccttggtcttgcttaccaactggaggacactaggtagaataaccgagtatgacaattcttaattgtttacattttataacttcctgtccttcaaaagagtttgaaatgtcattttgggaaaagagagccagtcaagctagtaggctgattgtgaagaaaatctaataccttatctttatctcaaacctctgtacaactttattttcattgatgggatactttaacaaaaatgaaattttttttggtttttaaaatatgagtgattatgacctctttggggatcatgcttcaaaaagtcagaaacctagagacaaaactgtcattgatttttaagaagaaacacactaggtcaaaagaagatgtcctggaaatatgaagtactctttaaaaaccatgcatttggagaaagtaattgtttccttgaaaaacatgattaaaaactaaaactgggatgttcctgtgtgtacacagtgccaaatggttttccctttttatgttgtgttttagaaacagcacgaaagttttttccattttaaagtgagaaaacattatatttagacttccataattccaaaatcagaagctatttttaaaattagcattttcttgcatcaccaaatggtattcaattgtttgaagctcaaaatttttaccattccataaatgtttgtgaatttttagacagtgccaatttaaaagtagagatagccaatctgaatacggtgaaattatggggatctctggtgattgggatgaaaactctggccttaaaaggtccacttttagtatataattgcctaattagcaatcatttttattttttgctcactccctggtctgaatctatctgtctattcagatattttttggtaggtttggaaaatggagaagtgagcctaattggtgcctaattgtctggtgtatcattcactttattcagtttgttctatcaatatgatttacccctcaaggttaacctagcaggttgctcagttattatctctcaaggtcacagtactagaaatacttggcttgcatctttcagatgccattcatgttatcaagctcaaattatagttggtcacaggattctaaagtctttatttgacttctcctttttgaactggctcaaatggaaaagtgtagttgcttttaaatgttaaaaataagtttaaactttatatttcccattggtttcccctattttgtcctttctttgtgtgcttgaaatattttatttttcagtttgtcctcatagggaatcaagtattttagctaggtgatgtcttgcaagtacgttccactttgttacaatctactatctgtatatactatttgtatcttaattcttttatgagatgttctgtaacatttttctcactttgacaaatgtttttagactgtacagtcaagatctggcgcttgggggtaagtggaatgatttgctaatattgagaatctgttgtatcaaacataataaactttttttgagatgtgaaaaaaaaaaaaaaaaaaaaa

SEQ ID NO: 22692 - DNA, 6776 bp, Artificial Sequence
  derived and/or modified sequence
gggagagggaagggggcggagctagccggagccgcgagtccattttggggctgtgcttggcgcgtaccgtgcggtccctgtagttggaggacgggcggtcgcgcggcctttcccactagccggagtagcctctagttcgttagtcaaaacgtgaaaaaaaagacctgctttgccctgggaaatagtaaccctgccaaatacatcagcttgtaggagacagaggatgtgatggagctgcttgaagaagatctcacatgccctatttgttgtagtctgtttgatgatccacgggttttgccttgctcccacaacttctgcaaaaaatgcttagaaggtatcttagaagggagtgtgcggaattccttgtggagaccagctccattcaagtgtcctacatgccgtaaggaaacttcagctactggaattaatagcctgcaggttaattactccctgaagggtattgtggaaaagtataacaagatcaagatctctcccaaaatgccagtatgcaaaggacacttggggcagcctctcaacattttctgcctgactgatatgcagctgatttgtgggatctgtgctactcgtggggagcacaccaaacatgtcttctgttctattgaagatgcctatgctcaggaaagggatgcctttgagtccctcttccagagctttgagacctggcgtcggggagatgctctttctcgcttggataccttggaaactagtaagaggaaatccctacagttactgactaaagattcagataaagtgaaggaattttttgagaagttacaacacacactggatcaaaagaagaatgaaattctgtctgactttgagaccatgaaacttgctgttatgcaagcatatgacccagagatcaacaaactcaacaccatcttgcaggagcaacggatggcctttaacattgctgaggctttcaaagatgtgtcagaacccattgtatttctgcaacagatgcaggagtttagagagaaaatcaaagtaatcaaggaaactcctttacctccctctaatttgcctgcaagccctttaatgaagaactttgataccagtcagtgggaagacataaaactagtcgatgtggataaactttctttgcctcaagacactggcacattcattagcaagattccctggagcttttataagttatttttgctaatccttctgcttggccttgtcattgtctttggtcctaccatgttcctagaatggtcattatttgatgacctggcaacttggaaaggctgtctttcaaacttcagttcctatctgactaaaacagccgatttcatagaacaatcagttttttactgggaacaggtgacagatgggtttttcattttcaatgaaagattcaagaattttactttggtggtactgaacaatgtggcagaatttgtgtgcaaatataaactattataaaatctgtttcaagtatgcagttttcttttgttagaaattgttagagaatagagagtggtaattcagatttggtcaacgattctagtcacatattttcctccaaaagtattccttccaaaaataatctatacatgttcaaattaggtagcataaagataaaagtgaaatttagtagtataggcctgaacctttttttgtttaaaagagtgcttttgaaataagcatccaccccaaatgttggttgtatttatgctgtgataaaaataggtgagagatcatatgatctaatattgtattgatggaagtataggtagtatagtagtgattgttcttcaagcatgcagtaaagatcacttttttttttttttttttttttgagatggagtcttgctctgtcgcccaggctggagtgcagtgatgcaatcttggctcactgcagcctctacctcccaggttcaagtgattatcctgccttagcctcctgagtagctgggattacaggcgcgtgccaccacgcccagctaattttttgtatttttagttgagacagggtttcactgtcccttaagaccatcctgttagccaagatggtcttgatctcctgacctcgtgatccgcctgcctcggcctcccaaagtgctgggattacaggtgtgagccaccgtgcccagccaaagactgctcttaaagcacctttttgacagtgaacatggtctaaaaaagggaagatattgtagaagatttcacacacacacgcgtgtgtgggagacaactaaaggtattgaaggtactaattaattagatttccaaaattttctacagagagttaattatcaccaaaatgtgaatggtacatacaaaacctggcattttcttgtgataagtttacatttttaggagagtggagctttcaatctgcccttttctcctttgtttttgtagttttcaccaaagatgatcaactagaaatgttaagtggctatgcaagcaaaagcatagataggttaaaaaaaaggatcagctggctgggcagggtggctcatgtctataatctcagcattctaggacagtgatgtgggaggattatttgaggctaggagttccagttcgaaaccagcttcgtaaacatagcaagacccagtctctaccaaaaaaaaaaaaaaaaaaaaaaaaaaaaaaaatatatatatatatatacacacacacacacacatatgtacacatacatatatatacatatatatgtatatatagaacacatggcaagagcaggaaatgggaagactaccttttttctggcagctatgtgttgttttgttcgaaagatggcaagtgtacaaccaaaccaatccacttgcttacagaaagaatgtttagtgtagttaagactaatttgacaacagataaaacagtctgtcagctattacaaagtaatcagctgaacactaatgctgttctgtctgctcacaagagataaagataccctctcatggaataaacaccttgcttagaattcatataacaaagaagtaaccttataactgctctctagtctgccttatttgtgtcatagagtaagatattccttgaaagcccattaagtggaatagactttctgaaaataagagttctttacctcagtcctcctctaatttggttgagaggaggtaatgaaaatggggacaggataaaaggtggcaactaaatttaaagcacagaagaaatgatttccttctagctatgagaatagtcaaattgagcttgccaggctgtctcattcctaacatgtaattcatgatttagccactaaatttctaaggagatcataagaaattaagaaaaacgtttaagtctagcctctgcgtggtagacaggtatggggagggagaatgcttttcccctcccagtaataaaaaaaaaaaaaaaaaaaatatatatatatatatatatatatatatatatatatatatatatatatatatatatagttttactaggttttcatggataagtttttaaatgtaagacaggaaagggatctatttgatgtctatcttcagatatattggcagttttccttaagctatttagttcctcatctgttgctttttcattttgtatactgcaagttcccaggcaactcgaatttgcaaacacagccatggatacactatttaccttacagtagtttcctgggaatctaagtctggtttttgttattcttccctcccctccactgcataatcatgtataactagcaacatttatggttataggttgatttcctaagtgtggctgatggtagcctctagtttgaagtgagggaagaatgagtagtcaggaactggtcactttgaatgtgggagggaagatattcacgacaaggttttctacgataaagcagtttcctgcttctcgtttggcacgcatgttagatggcagagaccaagaattcaagatggttggtggccagatttttgtagacagagatggtgatttgtttagtttcatcttagattttttgagaactcaccagcttttattacccactgaattttcagactatcttaggcttcagagagaggctcttttctatgaacttcgttctctagttgatctcttaaacccatacctgctacagccaagacctgctcttgtggaggtacatttcctaagccggaacactcaagcttttttcagggtgtttggctcttgcagcaaaacaattgagatgctaacagggaggattacagtgtttacagaacaaccttcagcgccgacctggaatggtaactttttccctcctcagatgaccttacttccactgcctccacaaagaccttcttaccatgacctggttttccagtgtggttctgacagcactactgataaccaaactggagtcaggtattttgtactttgcagtatttctcttgtataccagtttgtgatgttttctctaaaaacttgaagttcctcaggcctgtaacttctggaaaagatgattattcaaaataatgttttggggtaaccagtggagttgggtagaatgaccaaataattattttccaaactgggatactttttagagtgaaaggggctattattaggtgggacaaaaggaataaatgaagactgcccagaaaaaactgagactatggacattcaaatcatgggagaaaataattttgtagattatgttccattgctaatgaatttgacttagaaaagaattgccttatttttaagagattgtttcagtggttcacataaaggctcgctcactggtttctcttgagttccttacacactatataagttgttctttcagttttatgattcaactactgtttttccttcagctgactttatttttaaacacccttaaagacagatatatctcatggcaaatttggtatcctgttacagccttggctcttaaacaactcaaaatattgggataggctgtcagtatgttaaggatagttgctcctgagtcaattcttcacttactccctctgttgttcttggctggatcctaacgctgatttccactctgctgtcacaaacatttttccccccgtaaaatgtcttaatgctgtcctaccattattttaccaactgtgaaagctggctttaatttttaggaggaaaagaaaagcctgcatgtgttctttattggtatcatttaaaatatacttttttttttttttttggtaaaggtaggcgtattttaagatattttcttaacttgagcagtagccaacaggaaggataccagtgtctctctctcttagcgacacactccttggtcttgcttaccaactggaggacactaggtagaataaccgagtatgacaattcttaattgtttacattttataacttcctgtccttcaaaagagtttgaaatgtcattttgggaaaagagagccagtcaagctagtaggctgattgtgaagaaaatctaataccttatctttatctcaaacctctgtacaactttattttcattgatgggatactttaacaaaaatgaaattttttttggtttttaaaatatgagtgattatgacctctttggggatcatgcttcaaaaagtcagaaacctagagacaaaactgtcattgatttttaagaagaaacacactaggtcaaaagaagatgtcctggaaatatgaagtactctttaaaaaccatgcatttggagaaagtaattgtttccttgaaaaacatgattaaaaactaaaactgggatgttcctgtgtgtacacagtgccaaatggttttccctttttatgttgtgttttagaaacagcacgaaagttttttccattttaaagtgagaaaacattatatttagacttccataattccaaaatcagaagctatttttaaaattagcattttcttgcatcaccaaatggtattcaattgtttgaagctcaaaatttttaccattccataaatgtttgtgaatttttagacagtgccaatttaaaagtagagatagccaatctgaatacggtgaaattatggggatctctggtgattgggatgaaaactctggccttaaaaggtccacttttagtatataattgcctaattagcaatcatttttattttttgctcactccctggtctgaatctatctgtctattcagatattttttggtaggtttggaaaatggagaagtgagcctaattggtgcctaattgtctggtgtatcattcactttattcagtttgttctatcaatatgatttacccctcaaggttaacctagcaggttgctcagttattatctctcaaggtcacagtactagaaatacttggcttgcatctttcagatgccattcatgttatcaagctcaaattatagttggtcacaggattctaaagtctttatttgacttctcctttttgaactggctcaaatggaaaagtgtagttgcttttaaatgttaaaaataagtttaaactttatatttcccattggtttcccctattttgtcctttctttgtgtgcttgaaatattttatttttcagtttgtcctcatagggaatcaagtattttagctaggtgatgtcttgcaagtacgttccactttgttacaatctactatctgtatatactatttgtatcttaattcttttatgagatgttctgtaacatttttctcactttgacaaatgtttttagactgtacagtcaagatctggcgcttgggggtaagtggaatgatttgctaatattgagaatctgttgtatcaaacataataaactttttttgagatgtgaaaaaaaaaaaaaaaaaaaaa

SEQ ID NO: 22693 - DNA, 1233 bp, Artificial Sequence
  derived and/or modified sequence
atggacgtgatggagctgctggaggaggacctgacctgccccatctgctgcagcctgttcgacgaccccagagtgctgccctgcagccacaacttctgcaagaagtgcctggagggcatcctggagggcagcgtgagaaacagcctgtggagacccgcccccttcaagtgccccacctgcagaaaggagaccagcgccaccggcatcaacagcctgcaggtgaactacagcctgaagggcatcgtggagaagtacaacaagatcaagatcagccccaagatgcccgtgtgcaagggccacctgggccagcccctgaacatcttctgcctgaccgacatgcagctgatctgcggcatctgcgccaccagaggcgagcacaccaagcacgtgttctgcagcatcgaggacgcctacgcccaggagagagacgccttcgagagcctgttccagagcttcgagacctggagaagaggcgacgccctgagcagactggacaccctggagaccagcaagagaaagagcctgcagctgctgaccaaggacagcgacaaggtgaaggagttcttcgagaagctgcagcacaccctggaccagaagaagaacgagatcctgagcgacttcgagaccatgaagctggccgtgatgcaggcctacgaccccgagatcaacaagctgaacaccatcctgcaggagcagagaatggccttcaacatcgccgaggccttcaaggacgtgagcgagcccatcgtgttcctgcagcagatgcaggagttcagagagaagatcaaggtgatcaaggagacccccctgccccccagcaacctgcccgccagccccctgatgaagaacttcgacaccagccagtgggaggacatcaagctggtggacgtggacaagctgagcctgccccaggacaccggcaccttcatcagcaagatcccctggagcttctacaagctgttcctgctgatcctgctgctgggcctggtgatcgtgttcggccccaccatgttcctggagtggagcctgttcgacgacctggccacctggaagggctgcctgagcaacttcagcagctacctgaccaagaccgccgacttcatcgagcagagcgtgttctactgggagcaggtgaccgacggcttcttcatcttcaacgagagattcaagaacttcaccctggtggtgctgaacaacgtggccgagttcgtgtgcaagtacaagctgctgtag

SEQ ID NO: 22694 - DNA, 1233 bp, Artificial Sequence
  derived and/or modified sequence
atggatgtcatggaattgctggaagaggacctgacctgccccatctgctgctctctgttcgatgacccccgagtcctgccatgctcacacaatttctgtaagaaatgcctggaggggatactcgaaggttcagtgcggaactctctctggagacctgcgccattcaaatgtcccacatgtcggaaggaaacgagcgcaactggtataaactctcttcaggtaaattatagtctgaaaggcatcgtggaaaagtacaacaaaatcaagatcagcccaaagatgcccgtgtgcaaaggccacctgggacagcctttaaacatcttttgcctgaccgacatgcaacttatttgtggcatttgtgccactcgcggcgagcacacaaagcacgtgttctgttcgatcgaagacgcctacgctcaggagcgggatgccttcgaaagcctgtttcagagcttcgaaacttggcggaggggtgatgccctgtcaaggctggacactctcgagacttccaaacgtaaatcacttcagctgctgaccaaggattctgacaaagtgaaggaattcttcgaaaagctgcaacacacactggaccagaagaagaatgagatactatcagacttcgaaaccatgaagttggcagtgatgcaggcatacgacccagaaataaataagttgaacaccattctccaagagcaacgaatggcttttaatattgctgaggcattcaaggacgtcagcgagccaatcgtatttctgcagcagatgcaggaatttcgtgaaaagatcaaagtaatcaaggagacacccctccccccatctaatctccctgcgtctccgttaatgaagaattttgacacttctcagtgggaagacatcaagctggtggatgtggacaagctgagcctaccccaggatacaggcacattcatctccaagataccatggtccttctacaaattgtttctactgattcttctgttggggctggtgattgtattcggcccaactatgtttctcgaatggagcttatttgacgatctggctacatggaagggatgcctgagcaatttctctagttacctgaccaaaaccgctgattttattgaacagtccgtcttctattgggaacaagtgacggacgggtttttcattttcaatgagaggtttaaaaacttcacactggtagttctgaacaatgtagcagagtttgtttgtaaatacaagctgctctag

SEQ ID NO: 22695 - DNA, 1233 bp, Artificial Sequence
  derived and/or modified sequence
atggacgttatggagctccttgaggaggatctgacttgtcccatctgctgctcacttttcgatgatccgcgggttctcccctgttctcacaacttctgtaagaaatgtcttgagggaatccttgaagggagcgtgagaaactctctgtggcgtccggcaccatttaagtgtccaacttgcagaaaggagacctctgccacgggcatcaatagcctgcaagtgaactactccttaaaaggaatcgtggaaaagtacaataaaattaagatatcgcccaagatgccagtgtgtaaaggccatctcggacagcccctgaacattttttgcctcaccgatatgcagcttatctgcgggatatgcgccactagaggcgagcacaccaaacacgtgttttgctcaattgaggacgcttatgctcaggaaagggacgcctttgagtccctcttccagagcttcgagacatggaggcgcggcgacgctctgtcaagattggatacgcttgaaacgtctaaacggaaatctcttcagctgcttactaaagacagcgacaaagttaaggaattcttcgagaagctgcagcacactctggaccagaagaagaatgagattctgtcagatttcgaaacgatgaagctagctgttatgcaggcttatgacccggagattaacaagttgaacaccatactccaggaacaacgaatggcctttaatattgccgaagcttttaaggacgtgtccgagccgattgtgttcttgcagcaaatgcaagagttccgcgaaaagattaaggtgattaaggaaaccccattgccccctagtaatctacccgcatccccactgatgaagaattttgatacatcgcagtgggaagacattaaattagtggatgtcgacaaactgagtctcccacaggacaccggcacttttatttctaagattccttggtctttctacaaactgttcttgctgatcctccttcttggcctagtgatagtatttgggccgaccatgttcctggaatggagtttgtttgatgacctagcgacttggaagggctgtctgagcaactttagtagctacctcactaagacagcggattttattgagcaatccgtattctactgggagcaggtgaccgacggtttcttcatcttcaatgaaaggtttaagaattttactttagtggtgctgaacaacgttgcagaatttgtgtgcaaatacaaactgctgtag

SEQ ID NO: 22696 - DNA, 1233 bp, Artificial Sequence
  derived and/or modified sequence
atggatgtgatggagctgctggaggaggacctgacctgccccatctgctgcagcctgtttgatgacccccgggtgctgccctgcagccacaacttctgcaagaagtgcctggagggcatcctggagggctctgtgaggaacagcctgtggaggcctgcccccttcaagtgccccacctgcaggaaggagaccagcgccaccggcatcaacagcctgcaggtgaactacagcctgaagggcatcgtggagaagtacaacaagatcaagatcagccccaagatgcctgtgtgcaagggccacctgggccagcccctgaacatcttctgcctgacagacatgcagctgatctgtggcatctgtgccaccagaggagagcacaccaagcacgtgttctgcagcattgaagatgcctatgcccaggagagagatgcctttgagagcctcttccagagctttgagacctggaggagaggagatgccctgagccggctggacaccctggagaccagcaagaggaagagcctgcagctgctgaccaaggacagcgacaaggtgaaggagttctttgagaagctgcagcacaccctggaccagaagaagaatgagatcctgagtgactttgagaccatgaagctggccgtgatgcaggcctatgaccctgagatcaacaagctgaacaccatcctgcaggagcagaggatggccttcaacattgctgaggccttcaaggatgtgtctgagcccatcgtgttcctgcagcagatgcaggagttccgggagaagatcaaggtgatcaaggagacccccctgccccccagcaacctgcctgccagccccctgatgaagaactttgacaccagccagtgggaggacatcaagctggtggatgtggacaagctgagcctgccccaggacaccggcaccttcatcagcaagatcccctggagcttctacaagctgttcctgctgatcctgctgctgggcctggtgattgtgtttggccccaccatgttcctggagtggagcctgtttgatgacctggccacctggaagggctgcctgagcaacttcagcagctacctgaccaagacagctgacttcatcgagcagagcgtcttctactgggagcaggtgacagatggcttcttcatcttcaatgaacgcttcaagaacttcaccctggtggtgctgaacaacgtggccgagtttgtgtgcaagtacaagctgctgtag

SEQ ID NO: 22697 - DNA, 1233 bp, Artificial Sequence
  derived and/or modified sequence
atggacgtgatggagctgctggaggaggacctgacctgccccatctgctgtagcttgttcgacgatcctagggtgctcccctgctcccataatttttgcaaaaagtgtttggaaggaattttagaagggagcgttcggaatagcctatggcgtcctgccccattcaagtgccctacatgccgaaaagaaacctccgccactggcataaattctctccaggtcaactatagcctaaagggcatagtggagaagtataacaagattaagatctcaccgaaaatgccagtgtgtaagggacatctggggcagcctctgaacatcttctgcttaactgacatgcagctgatttgtggaatctgcgctaccagaggcgaacataccaaacacgttttctgcagcattgaagatgcctatgctcaggagcgcgacgcattcgagtccctattccagtcttttgagacctggcgccggggggacgcactgtcaagactggatacactggagacctcaaagagaaaaagcctgcagttactgacaaaggattccgataaggtcaaggaattcttcgaaaagctgcagcacaccttagatcagaagaaaaacgagattcttagcgatttcgaaacgatgaaactggcagtaatgcaggcctatgatcctgagatcaataagttgaataccatcctccaggaacagaggatggccttcaatattgccgaagcctttaaggatgtgtctgagcccatcgtgttcctgcaacagatgcaggaattcagagagaagatcaaggttattaaggagacccctctgccgccctcaaaccttccagctagccccctcatgaagaatttcgacacaagccaatgggaagatattaagctggttgatgtggacaagttgtctctgccacaggataccgggacattcatttcaaagattccctggtcattctacaagctgttcctgcttatcctgctgttaggattggtaatagtgtttggccctactatgttcctggaatggtcactattcgacgacctggcaacttggaaagggtgtctgagcaacttctcctcttatctgaccaaaacagccgacttcattgagcagtcagtgttttactgggaacaagtgacagatggtttctttatctttaatgaacgattcaagaactttacgctggtggtcttgaacaacgtggctgaatttgtatgtaagtataagcttctgtag

SEQ ID NO: 22698 - DNA, 1233 bp, Artificial Sequence
  derived and/or modified sequence
atggacgtgatggagctgctggaggaggacctgacctgccccatctgttgtagcttgttcgatgatccacgcgttcttccttgcagccacaacttttgtaagaagtgcctggagggtattctcgaggggtctgtgaggaacagtctgtggcgcccggcaccctttaagtgtcctacatgccgaaaagaaacaagtgctacaggcatcaactcgctgcaggtgaactacagcctgaaagggattgtcgagaaatacaataagattaaaatttcacccaaaatgcctgtatgtaaggggcacctaggccaaccactgaatatattttgtttgaccgacatgcagctgatttgtgggatatgcgcaacccgtggcgagcacaccaagcacgtgttttgcagcatcgaagacgcctacgcccaggaacgagacgcctttgaaagtctgtttcagtcattcgagacctggaggaggggagatgcactgtcccggctcgacactctcgaaacatcaaaacgtaagtctctgcagctgctaactaaggacagcgacaaagtgaaggaattctttgagaagcttcagcatacactggatcagaaaaagaacgagattctctctgactttgagaccatgaaactagccgttatgcaggcctatgatcctgagatcaataaactgaatactattctgcaagaacaaaggatggcttttaacatcgccgaagccttcaaagatgtgagcgagccaatagtgtttttacagcagatgcaggaatttcgtgagaagatcaaagtgatcaaggaaacccctttacctcccagcaatctccctgcaagccctctgatgaagaactttgacacgagtcaatgggaggacattaagttggttgatgtggacaaattatctttacctcaagataccgggactttcatctctaagattccatggagtttctataaacttttcctgctgatcctgttacttgggctggtgattgtgtttggccctacaatgtttttggagtggtccctctttgacgatcttgcgacctggaagggatgtctaagcaattttagctcttatctgactaagacagcagacttcatcgagcaatcagtgttctactgggaacaagttacagacggatttttcatcttcaacgagcgctttaagaactttactttagtagtcttaaataacgtggctgaatttgtgtgcaaatacaagctgctctag

SEQ ID NO: 22699 - DNA, 1233 bp, Artificial Sequence
  derived and/or modified sequence
atggatgtgatggaactgttggaggaggatttaacgtgtcccatatgctgctctctgttcgatgatcccagagtcctaccgtgctcccacaacttttgtaaaaaatgccttgaaggtattttagaaggctctgtgcggaatagcctgtggaggccggctcctttcaagtgcccgacttgcagaaaggagaccagtgccacagggattaacagcctccaagttaactattccctcaagggcatcgtggaaaagtacaacaagatcaagatctctcccaagatgcccgtatgcaagggacacttaggccagcctttgaatatcttctgtttaactgatatgcagctgatttgcggcatctgtgccacgaggggagaacatactaaacatgtcttctgctcgatcgaggacgcgtatgcccaggaacgggatgcattcgaaagtctttttcagtctttcgagacctggaggcgaggcgatgccctgtcacgactcgacaccctggaaacaagtaagagaaagtcactacagcttctgactaaagattctgacaaagtgaaagagttcttcgagaaactccagcataccctcgaccagaagaagaacgagatcttgtctgactttgagacgatgaaactcgctgtaatgcaggcctatgacccggagattaataaactcaatactatcctgcaggaacagaggatggccttcaatattgccgaagcctttaaagatgtctcagagcccattgtgtttctccaacagatgcaggagttccgagagaagataaaagtcatcaaggagacaccgttgccaccaagcaaccttcccgcttccccgctgatgaaaaatttcgatacttctcagtgggaagacattaaactggttgatgtggataaattatccctgccacaagataccggtacctttatttccaagattccttggtctttctataaactgtttctgctgattttactcctcgggctggtgatcgtgttcgggccaacaatgtttcttgagtggtcgctcttcgatgaccttgccacctggaaggggtgcctgagtaatttttcttcttacctcacgaagactgctgacttcattgagcagtcagtcttttattgggaacaggttactgatggtttcttcattttcaatgagcgatttaagaactttacgcttgtagtgttaaacaacgttgccgagttcgtttgtaagtacaaactcctgtag

SEQ ID NO: 22700 - DNA, 1233 bp, Artificial Sequence
  derived and/or modified sequence
atggacgtaatggaattactcgaggaggatctcacatgtccaatctgctgctctctcttcgacgaccctcgggtgctgccttgttcccacaacttctgtaaaaaatgtcttgagggaatcttagaggggtcagtccgcaattctctgtggagacccgctccattcaagtgccctacctgccgaaaagagacatcagccacagggatcaattcactgcaagtcaattacagcttgaagggaattgtggaaaagtacaataagattaaaatcagtcctaaaatgccggtctgtaagggtcatctgggccaaccacttaatatcttttgtctgaccgatatgcagttgatatgtggaatctgcgccacccgaggggagcacaccaaacatgtgttctgcagtatcgaggacgcctatgctcaggagcgcgacgcatttgagagtttgttccagtcgttcgagacttggaggaggggcgatgcattgagccgactcgacacattagagaccagcaagcgaaagagcctgcaacttctgactaaagattctgataaagtcaaggaattctttgagaaactgcagcacaccctggaccagaaaaagaacgaaatattatccgattttgaaactatgaaactagcagttatgcaagcatatgatcctgagatcaataagctgaacacaattctccaggaacagagaatggcatttaacattgctgaggcctttaaagatgtgtcagagcccattgtgttcttgcagcagatgcaagagttcagggagaagataaaagtgattaaagaaactcccctaccgccatcaaacctgcctgcatcaccactgatgaagaactttgacacaagccagtgggaggacatcaagctcgtcgacgtagacaaattgtcccttccccaggacaccgggacattcatatccaagatcccttggtcattttacaaactgttcctcttgatccttttacttgggctagtcatcgtcttcggtcccaccatgtttctcgaatggagtctgttcgatgatttagccacatggaagggctgtctctccaatttcagctcctatctgaccaagactgccgattttattgagcaatctgtcttttattgggaacaagtgactgatgggttcttcatcttcaatgagcgattcaagaatttcacactagtggtgctgaataatgtcgccgagtttgtgtgtaaatacaagctgttgtag

SEQ ID NO: 22701 - DNA, 1238 bp, Artificial Sequence
  derived and/or modified sequence
atggatgtgatggagctgcttgaagaagatctcacatgccctatttgttgtagtctgtttgatgatccacgggttttgccttgctcccacaacttctgcaaaaaatgcttagaaggtatcttagaagggagtgtgcggaattccttgtggagaccagctccattcaagtgtcctacatgccgtaaggaaacttcagctactggaattaatagcctgcaggttaattactccctgaagggtattgtggaaaagtataacaagatcaagatctctcccaaaatgccagtatgcaaaggacacttggggcagcctctcaacattttctgcctgactgatatgcagctgatttgtgggatctgtgctactcgtggggagcacaccaaacatgtcttctgttctattgaagatgcctatgctcaggaaagggatgcctttgagtccctcttccagagctttgagacctggcgtcggggagatgctctttctcgcttggataccttggaaactagtaagaggaaatccctacagttactgactaaagattcagataaagtgaaggaattttttgagaagttacaacacacactggatcaaaagaagaatgaaattctgtctgactttgagaccatgaaacttgctgttatgcaagcatatgacccagagatcaacaaactcaacaccatcttgcaggagcaacggatggcctttaacattgctgaggctttcaaagatgtgtcagaacccattgtatttctgcaacagatgcaggagtttagagagaaaatcaaagtaatcaaggaaactcctttacctccctctaatttgcctgcaagccctttaatgaagaactttgataccagtcagtgggaagacataaaactagtcgatgtggataaactttctttgcctcaagacactggcacattcattagcaagattccctggagcttttataagttatttttgctaatccttctgcttggccttgtcattgtctttggtcctaccatgttcctagaatggtcattatttgatgacctggcaacttggaaaggctgtctttcaaacttcagttcctatctgactaaaacagccgatttcatagaacaatcagttttttactgggaacaggtgacagatgggtttttcattttcaatgaaagattcaagaattttactttggtggtactgaacaatgtggcagaatttgtgtgcaaatataaactattataaaatct

SEQ ID NO: 22702 - DNA, 1637 bp, Artificial Sequence
  derived and/or modified sequence
gccgcgagtccattttggggctgtgcttggcgcgtaccgtgcggtccctgtagttggaggacgggcggtcgcgcggcctttcccactagccggaggtcggagataagtacccgccgcccggctcctctcgggaaagcggggtggtcctcgaaccttcagcgagggtggggagttgcccagtagcctctagttcgttagtcaaaacgtgaaaaaaaagacctgctttgccctgggaaatagtaaccctgccaaatacatcagcttgtaggagacagagaataacagcacctggccgggtgcagtggctcaggcctgtaatcgcagcactttgggaggctgaggtgggcggatcacctgaggtcaggagctcgagaccagcctggccaaaatggatgtgatggagctgcttgaagaagatctcacatgccctatttgttgtagtctgtttgatgatccacgggttttgccttgctcccacaacttctgcaaaaaatgcttagaaggtatcttagaagggagtgtgcggaattccttgtggagaccagctccattcaagtgtcctacatgccgtaaggaaacttcagctactggaattaatagcctgcaggttaattactccctgaagggtattgtggaaaagtataacaagatcaagatctctcccaaaatgccagtatgcaaaggacacttggggcagcctctcaacattttctgcctgactgatatgcagctgatttgtgggatctgtgctactcgtggggagcacaccaaacatgtcttctgttctattgaagatgcctatgctcaggaaagggatgcctttgagtccctcttccagagctttgagacctggcgtcggggagatgctctttctcgcttggataccttggaaactagtaagaggaaatccctacagttactgactaaagattcagataaagtgaaggaattttttgagaagttacaacacacactggatcaaaagaagaatgaaattctgtctgactttgagaccatgaaacttgctgttatgcaagcatatgacccagagatcaacaaactcaacaccatcttgcaggagcaacggatggcctttaacattgctgaggctttcaaagatgtgtcagaacccattgtatttctgcaacagatgcaggagtttagagagaaaatcaaagtaatcaaggaaactcctttacctccctctaatttgcctgcaagccctttaatgaagaactttgataccagtcagtgggaagacataaaactagtcgatgtggataaactttctttgcctcaagacactggcacattcattagcaagattccctggagcttttataagttatttttgctaatccttctgcttggccttgtcattgtctttggtcctaccatgttcctagaatggtcattatttgatgacctggcaacttggaaaggctgtctttcaaacttcagttcctatctgactaaaacagccgatttcatagaacaatcagttttttactgggaacaggtgacagatgggtttttcattttcaatgaaagattcaagaattttactttggtggtactgaacaatgtggcagaatttgtgtgcaaatataaactattataaaatctgtttcaagtat

SEQ ID NO: 22703 - DNA, 7249 bp, Artificial Sequence
  derived and/or modified sequence
ccggagccgcgagtccattttggggctgtgcttggcgcgtaccgtgcggtccctgtagttggaggacgggcggtcgcgcggcctttcccactagccggaggtcggagataagtacccgccgcccggctcctctcgggaaagcggggtggtcctcgaaccttcagcgagggtggggagttgcccaggtcagcagggatctgcgtgggttgggggggctggcgaaggccgtctgagctccagtccggcagcgcggcagaaaccagcggggcactgtcatgggcctggggaggagcggcctgcggagggcgccggggcagtgtgtctgtggtccagaaaacctgctccgtccggagccttcctggccccgctaccagcgtctccacatcccctagaaaagaaaagacgggtgtgggccttaggttacagcgcgccgccagcgtttggttgcatggcgccgggggagggcgccctaaccgagaagctgcttaatacaaagagctccaggctcctggcggttcaccaggtctaaacagccgggctttatttgtgggggcgattgaaaaaattgagggtcaagattggggtgctgtgcaaataaatgcgttaatactgttctttttcttctttctttgcagtagcctctagttcgttagtcaaaacgtgaaaaaaaagacctgctttgccctgggaaatagtaaccctgccaaatacatcagcttgtaggagacagaggatgtgatggagctgcttgaagaagatctcacatgccctatttgttgtagtctgtttgatgatccacgggttttgccttgctcccacaacttctgcaaaaaatgcttagaaggtatcttagaagggagtgtgcggaattccttgtggagaccagctccattcaagtgtcctacatgccgtaaggaaacttcagctactggaattaatagcctgcaggttaattactccctgaagggtattgtggaaaagtataacaagatcaagatctctcccaaaatgccagtatgcaaaggacacttggggcagcctctcaacattttctgcctgactgatatgcagctgatttgtgggatctgtgctactcgtggggagcacaccaaacatgtcttctgttctattgaagatgcctatgctcaggaaagggatgcctttgagtccctcttccagagctttgagacctggcgtcggggagatgctctttctcgcttggataccttggaaactagtaagaggaaatccctacagttactgactaaagattcagataaagtgaaggaattttttgagaagttacaacacacactggatcaaaagaagaatgaaattctgtctgactttgagaccatgaaacttgctgttatgcaagcatatgacccagagatcaacaaactcaacaccatcttgcaggagcaacggatggcctttaacattgctgaggctttcaaagatgtgtcagaacccattgtatttctgcaacagatgcaggagtttagagagaaaatcaaagtaatcaaggaaactcctttacctccctctaatttgcctgcaagccctttaatgaagaactttgataccagtcagtgggaagacataaaactagtcgatgtggataaactttctttgcctcaagacactggcacattcattagcaagattccctggagcttttataagttatttttgctaatccttctgcttggccttgtcattgtctttggtcctaccatgttcctagaatggtcattatttgatgacctggcaacttggaaaggctgtctttcaaacttcagttcctatctgactaaaacagccgatttcatagaacaatcagttttttactgggaacaggtgacagatgggtttttcattttcaatgaaagattcaagaattttactttggtggtactgaacaatgtggcagaatttgtgtgcaaatataaactattataaaatctgtttcaagtatgcagttttcttttgttagaaattgttagagaatagagagtggtaattcagatttggtcaacgattctagtcacatattttcctccaaaagtattccttccaaaaataatctatacatgttcaaattaggtagcataaagataaaagtgaaatttagtagtataggcctgaacctttttttgtttaaaagagtgcttttgaaataagcatccaccccaaatgttggttgtatttatgctgtgataaaaataggtgagagatcatatgatctaatattgtattgatggaagtataggtagtatagtagtgattgttcttcaagcatgcagtaaagatcacttttttttttttttttttttttgagatggagtcttgctctgtcgcccaggctggagtgcagtgatgcaatcttggctcactgcagcctctacctcccaggttcaagtgattatcctgccttagcctcctgagtagctgggattacaggcgcgtgccaccacgcccagctaattttttgtatttttagttgagacagggtttcactgtcccttaagaccatcctgttagccaagatggtcttgatctcctgacctcgtgatccgcctgcctcggcctcccaaagtgctgggattacaggtgtgagccaccgtgcccagccaaagactgctcttaaagcacctttttgacagtgaacatggtctaaaaaagggaagatattgtagaagatttcacacacacacgcgtgtgtgggagacaactaaaggtattgaaggtactaattaattagatttccaaaattttctacagagagttaattatcaccaaaatgtgaatggtacatacaaaacctggcattttcttgtgataagtttacatttttaggagagtggagctttcaatctgcccttttctcctttgtttttgtagttttcaccaaagatgatcaactagaaatgttaagtggctatgcaagcaaaagcatagataggttaaaaaaaaggatcagctggctgggcagggtggctcatgtctataatctcagcattctaggacagtgatgtgggaggattatttgaggctaggagttccagttcgaaaccagcttcgtaaacatagcaagacccagtctctaccaaaaaaaaaaaaaaaaaaaaaaaaaaaaaaaatatatatatatatatacacacacacacacacatatgtacacatacatatatatacatatatatgtatatatagaacacatggcaagagcaggaaatgggaagactaccttttttctggcagctatgtgttgttttgttcgaaagatggcaagtgtacaaccaaaccaatccacttgcttacagaaagaatgtttagtgtagttaagactaatttgacaacagataaaacagtctgtcagctattacaaagtaatcagctgaacactaatgctgttctgtctgctcacaagagataaagataccctctcatggaataaacaccttgcttagaattcatataacaaagaagtaaccttataactgctctctagtctgccttatttgtgtcatagagtaagatattccttgaaagcccattaagtggaatagactttctgaaaataagagttctttacctcagtcctcctctaatttggttgagaggaggtaatgaaaatggggacaggataaaaggtggcaactaaatttaaagcacagaagaaatgatttccttctagctatgagaatagtcaaattgagcttgccaggctgtctcattcctaacatgtaattcatgatttagccactaaatttctaaggagatcataagaaattaagaaaaacgtttaagtctagcctctgcgtggtagacaggtatggggagggagaatgcttttcccctcccagtaataaaaaaaaaaaaaaaaaaaatatatatatatatatatatatatatatatatatatatatatatatatatatatatagttttactaggttttcatggataagtttttaaatgtaagacaggaaagggatctatttgatgtctatcttcagatatattggcagttttccttaagctatttagttcctcatctgttgctttttcattttgtatactgcaagttcccaggcaactcgaatttgcaaacacagccatggatacactatttaccttacagtagtttcctgggaatctaagtctggtttttgttattcttccctcccctccactgcataatcatgtataactagcaacatttatggttataggttgatttcctaagtgtggctgatggtagcctctagtttgaagtgagggaagaatgagtagtcaggaactggtcactttgaatgtgggagggaagatattcacgacaaggttttctacgataaagcagtttcctgcttctcgtttggcacgcatgttagatggcagagaccaagaattcaagatggttggtggccagatttttgtagacagagatggtgatttgtttagtttcatcttagattttttgagaactcaccagcttttattacccactgaattttcagactatcttaggcttcagagagaggctcttttctatgaacttcgttctctagttgatctcttaaacccatacctgctacagccaagacctgctcttgtggaggtacatttcctaagccggaacactcaagcttttttcagggtgtttggctcttgcagcaaaacaattgagatgctaacagggaggattacagtgtttacagaacaaccttcagcgccgacctggaatggtaactttttccctcctcagatgaccttacttccactgcctccacaaagaccttcttaccatgacctggttttccagtgtggttctgacagcactactgataaccaaactggagtcaggtattttgtactttgcagtatttctcttgtataccagtttgtgatgttttctctaaaaacttgaagttcctcaggcctgtaacttctggaaaagatgattattcaaaataatgttttggggtaaccagtggagttgggtagaatgaccaaataattattttccaaactgggatactttttagagtgaaaggggctattattaggtgggacaaaaggaataaatgaagactgcccagaaaaaactgagactatggacattcaaatcatgggagaaaataattttgtagattatgttccattgctaatgaatttgacttagaaaagaattgccttatttttaagagattgtttcagtggttcacataaaggctcgctcactggtttctcttgagttccttacacactatataagttgttctttcagttttatgattcaactactgtttttccttcagctgactttatttttaaacacccttaaagacagatatatctcatggcaaatttggtatcctgttacagccttggctcttaaacaactcaaaatattgggataggctgtcagtatgttaaggatagttgctcctgagtcaattcttcacttactccctctgttgttcttggctggatcctaacgctgatttccactctgctgtcacaaacatttttccccccgtaaaatgtcttaatgctgtcctaccattattttaccaactgtgaaagctggctttaatttttaggaggaaaagaaaagcctgcatgtgttctttattggtatcatttaaaatatacttttttttttttttttggtaaaggtaggcgtattttaagatattttcttaacttgagcagtagccaacaggaaggataccagtgtctctctctcttagcgacacactccttggtcttgcttaccaactggaggacactaggtagaataaccgagtatgacaattcttaattgtttacattttataacttcctgtccttcaaaagagtttgaaatgtcattttgggaaaagagagccagtcaagctagtaggctgattgtgaagaaaatctaataccttatctttatctcaaacctctgtacaactttattttcattgatgggatactttaacaaaaatgaaattttttttggtttttaaaatatgagtgattatgacctctttggggatcatgcttcaaaaagtcagaaacctagagacaaaactgtcattgatttttaagaagaaacacactaggtcaaaagaagatgtcctggaaatatgaagtactctttaaaaaccatgcatttggagaaagtaattgtttccttgaaaaacatgattaaaaactaaaactgggatgttcctgtgtgtacacagtgccaaatggttttccctttttatgttgtgttttagaaacagcacgaaagttttttccattttaaagtgagaaaacattatatttagacttccataattccaaaatcagaagctatttttaaaattagcattttcttgcatcaccaaatggtattcaattgtttgaagctcaaaatttttaccattccataaatgtttgtgaatttttagacagtgccaatttaaaagtagagatagccaatctgaatacggtgaaattatggggatctctggtgattgggatgaaaactctggccttaaaaggtccacttttagtatataattgcctaattagcaatcatttttattttttgctcactccctggtctgaatctatctgtctattcagatattttttggtaggtttggaaaatggagaagtgagcctaattggtgcctaattgtctggtgtatcattcactttattcagtttgttctatcaatatgatttacccctcaaggttaacctagcaggttgctcagttattatctctcaaggtcacagtactagaaatacttggcttgcatctttcagatgccattcatgttatcaagctcaaattatagttggtcacaggattctaaagtctttatttgacttctcctttttgaactggctcaaatggaaaagtgtagttgcttttaaatgttaaaaataagtttaaactttatatttcccattggtttcccctattttgtcctttctttgtgtgcttgaaatattttatttttcagtttgtcctcatagggaatcaagtattttagctaggtgatgtcttgcaagtacgttccactttgttacaatctactatctgtatatactatttgtatcttaattcttttatgagatgttctgtaacatttttctcactttgacaaatgtttttagactgtacagtcaagatctggcgcttgggggtaagtggaatgatttgctaatattgagaatctgttgtatcaaacataataaa

SEQ ID NO: 22704 - DNA, 1251 bp, Artificial Sequence
  derived and/or modified sequence
cttaattgcacggcagcttaactgggagactttcttcccgggcggccccacccgggaccgcgccgcttcagtcgagcccaccgtctgggcaaacggcgtccacttcccggagccgctgcccagcctctgcgggggggctttgggcgggcgcaggactctggaagggagaaaagcccgcagcccggccctccccgtcccaggcggcccgcgcgggtggacggcgggagcaggcggcggttggagacgccggaaggaacgcggtctcaccacccggctccctccgccaaggcgaggcgcggccggggaggcgggacacaggcgaagcgggacggggaggcggggccggagtagcctctagttcgttagtcaaaacgtgaaaaaaaagacctgctttgccctgggaaatagtaaccctgccaaatacatcagcttgtaggagacagaggatgtgatggagctgcttgaagaagatctcacatgccctatttgttgtagtctgtttgatgatccacgggttttgccttgctcccacaacttctgcaaaaaatgcttagaaggtatcttagaagggagtgtgcggaattccttgtggagaccagctccattcaagtgtcctacatgccgtaaggaaacttcagctactggaattaatagcctgcaggttaattactccctgaagggtattgtggaaaagtataacaagatcaagatctctcccaaaatgccagtatgcaaaggacacttggggcagcctctcaacattttctgcctgactgatatgcagctgatttgtgggatctgtgctactcgtggggagcacaccaaacatgtcttctgttctattgaagatgcctatgctcaggaaagggatgcctttgagtccctcttccagagctttgagacctggcgtcggggagatgctctttctcgcttggataccttggaaactagtaagaggaaatccctacagttactgactaaagattcagataaagtgaaggaattttttgagaagttacaacacacactggatcaaaagaagaatgaaattctgtctgactttgagaccatgaaacttgctgttatgcaagcatatgacccagagatcaacaaactcaacaccatcttgcaggagcaacggatggcctttaacattgctgaggctttcaaagatgtgtcagaacccattgtatttctgcaacagatgcaggagtttagagagaaaatcaaagtaatcaaggaaactccttt

SEQ ID NO: 22705 - DNA, 2607 bp, Artificial Sequence
  derived and/or modified sequence
ggggcggagctagccggagccgcgagtccattttggggctgtgcttggcgcgtaccgtgcggtccctgtagttggaggacgggcggtcgcgcggcctttcccactagccggagtagcctctagttcgttagtcaaaacgtgaaaaaaaagacctgctttgccctgggaaatagtaaccctgccaaatacatcagcttgtaggagacagaggatgtgatggagctgcttgaagaagatctcacatgccctatttgttgtagtctgtttgatgatccacgggttttgccttgctcccacaacttctgcaaaaaatgcttagaaggtatcttagaagggagtgtgcggaattccttgtggagaccagctccattcaagtgtcctacatgccgtaaggaaacttcagctactggaattaatagcctgcaggttaattactccctgaagggtattgtggaaaagtataacaagatcaagatctctcccaaaatgccagtatgcaaaggacacttggggcagcctctcaacattttctgcctgactgatatgcagctgatttgtgggatctgtgctactcgtggggagcacaccaaacatgtcttctgttctattgaagatgcctatgctcaggaaagggatgcctttgagtccctcttccagagctttgagacctggcgtcggggagatgctctttctcgcttggataccttggaaactagtaagaggaaatccctacagttactgactaaagattcagataaagtgaaggaattttttgagaagttacaacacacactggatcaaaagaagaatgaaattctgtctgactttgagaccatgaaacttgctgttatgcaagcatatgacccagagatcaacaaactcaacaccatcttgcaggagcaacggatggcctttaacattgctgaggctttcaaagatgtgtcagaacccattgtatttctgcaacagatgcaggagtttagagagaaaatcaaagtaatcaaggaaactcctttacctccctctaatttgcctgcaagccctttaatgaagaactttgataccagtcagtgggaagacataaaactagtcgatgtggataaactttctttgcctcaagacactggcacattcattagcaagattccctggagcttttataagttatttttgctaatccttctgcttggccttgtcattgtctttggtcctaccatgttcctagaatggtcattatttgatgacctggcaacttggaaaggctgtctttcaaacttcagttcctatctgactaaaacagccgatttcatagaacaatcagttttttactgggaacaggtgacagatgggtttttcattttcaatgaaagattcaagaattttactttggtggtactgaacaatgtggcagaatttgtgtgcaaatataaactattataaaatctgtttcaagtatgcagttttcttttgttagaaattgttagagaatagagagtggtaattcagatttggtcaacgattctagtcacatattttcctccaaaagtattccttccaaaaataatctatacatgttcaaattaggtagcataaagataaaagtgaaatttagtagtataggcctgaacctttttttgtttaaaagagtgcttttgaaataagcatccaccccaaatgttggttgtatttatgctgtgataaaaataggtgagagatcatatgatctaatattgtattgatggaagtataggtagtatagtagtgattgttcttcaagcatgcagtaaagatcacttttttttttttttttttttttgagatggagtcttgctctgtcgcccaggctggagtgcagtgatgcaatcttggctcactgcagcctctacctcccaggttcaagtgattatcctgccttagcctcctgagtagctgggattacaggcgcgtgccaccacgcccagctaattttttgtatttttagttgagacagggtttcactgtcccttaagaccatcctgttagccaagatggtcttgatctcctgacctcgtgatccgcctgcctcggcctcccaaagtgctgggattacaggtgtgagccaccgtgcccagccaaagactgctcttaaagcacctttttgacagtgaacatggtctaaaaaagggaagatattgtagaagatttcacacacacacgcgtgtgtgggagacaactaaaggtattgaaggtactaattaattagatttccaaaattttctacagagagttaattatcaccaaaatgtgaatggtacatacaaaacctggcattttcttgtgataagtttacatttttaggagagtggagctttcaatctgcccttttctcctttgtttttgtagttttcaccaaagatgatcaactagaaatgttaagtggctatgcaagcaaaagcatagataggttaaaaaaaaggatcagctggctgggcagggtggctcatgtctataatctcagcattctaggacagtgatgtgggaggattatttgaggctaggagttccagttcgaaaccagcttcgtaaacatagcaagacccagtctctaccaaaaaaaaaaaaaaaaaa

SEQ ID NO: 22706 - DNA, 692 bp, Artificial Sequence
  derived and/or modified sequence
acttctcccaagatcgtaaattctggaggagccattccttcatcatccatgtttgcatccttcacaccgttcactggttaagtgcttatagcctctagttcgttagtcaaaacgtgaaaaaaaagacctgctttgccctgggaaatagtaaccctgccaaatacatcagcttgtaggagacagagaataacagcacctggccgggtgcagtggctcaggcctgtaatcgcagcactttgggaggctgaggtgggcggatcacctgaggtcaggagctcgagaccagcctggccaaaatggatgtgatggagctgcttgaagaagatctcacatgccctatttgttgtagtctgtttgatgatccacgggttttgccttgctcccacaacttctgcaaaaaatgcttagaaggtatcttagaagggagtgtgcggaattccttgtggagaccagctccattcaagtgtcctacatgccgtaaggaaacttcagctactggaattaatagcctgcaggttaattactccctgaagggtattgtggaaaagtataacaagatcaagatctctcccaaaatgccagtatgcaaaggacacttggggcagcctctcaacattttctgcctgactgatatgcagctgatttgtgggatctgtgctactcgtggggagcacaccaaacatgtcttctgt

SEQ ID NO: 22707 - DNA, 1489 bp, Artificial Sequence
  derived and/or modified sequence
gtgcttggcgcgtaccgtgcggtccctgtagttggaggacgggcggtcgcgcggcctttcccactagccggaggtcggagataagtacccgccgcccggctcctctcgggaaagcggggtggtcctcgaaccttcagcgagggtggggagttgcccagtagcctctagttcgttagtcaaaacgtgaaaaaaaagacctgctttgccctgggaaatagtaaccctgccaaatacatcagcttgtaggagacagaggatgtgatggagctgcttgaagaagatctcacatgccctatttgttgtagtctgtttgatgatccacgggttttgccttgctcccacaacttctgcaaaaaatgcttagaaggtatcttagaagggagtgtgcggaattccttgtggagaccagctccattcaagtgtcctacatgccgtaaggaaacttcagctactggaattaatagcctgcaggttaattactccctgaagggtattgtggaaaagtataacaagatcaagatctctcccaaaatgccagtatgcaaaggacacttggggcagcctctcaacattttctgcctgactgatatgcagctgatttgtgggatctgtgctactcgtggggagcacaccaaacatgtcttctgttctattgaagatgcctatgctcaggaaagggatgcctttgagtccctcttccagagctttgagacctggcgtcggggagatgctctttctcgcttggataccttggaaactagtaagaggaaatccctacagttactgactaaagattcagataaagtgaaggaattttttgagaagttacaacacacactggatcaaaagaagaatgaaattctgtctgactttgagaccatgaaacttgctgttatgcaagcatatgacccagagatcaacaaactcaacaccatcttgcaggagcaacggatggcctttaacattgctgaggctttcaaagatgtgtcagaacccattgtatttctgcaacagatgcaggagtttagagagaaaatcaaagtaatcaaggaaactcctttacctccctctaatttgcctgcaagccctttaatgaagaactttgataccagtcagtgggaagacataaaactagtcgatgtggataaactttctttgcctcaagacactggcacattcattagcaagattccctggagcttttataagttatttttgctaatccttctgcttggccttgtcattgtctttggtcctaccatgttcctagaatggtcattatttgatgacctggcaacttggaaaggctgtctttcaaacttcagttcctatctgactaaaacagccgatttcatagaacaatcagttttttactgggaacaggtgacagatgggtttttcattttcaatgaaagattcaagaattttactttggtggtactgaacaatgtggcagaatttgtgtgcaaatataaactattataaaatc

SEQ ID NO: 22708 - DNA, 2037 bp, Artificial Sequence
  derived and/or modified sequence
atgtacgccgccgtggagcacggccccgtgctgtgcagcgacagcaacatcctgtgcctgagctggaagggcagagtgcccaagagcgagaaggagaagcccgtgtgcagaagaagatactacgaggagggctggctggccaccggcaacggcagaggcgtggtgggcgtgaccttcaccagcagccactgcagaagagacagaagcaccccccagagaatcaacttcaacctgagaggccacaacagcgaggtggtgctggtgagatggaacgagccctaccagaagctggccacctgcgacgccgacggcggcatcttcgtgtggatccagtacgagggcagatggagcgtggagctggtgaacgacagaggcgcccaggtgagcgacttcacctggagccacgacggcacccaggccctgatcagctacagagacggcttcgtgctggtgggcagcgtgagcggccagagacactggagcagcgagatcaacctggagagccagatcacctgcggcatctggacccccgacgaccagcaggtgctgttcggcaccgccgacggccaggtgatcgtgatggactgccacggcagaatgctggcccacgtgctgctgcacgagagcgacggcgtgctgggcatgagctggaactaccccatcttcctggtggaggacagcagcgagagcgacaccgacagcgacgactacgcccccccccaggacggccccgccgcctaccccatccccgtgcagaacatcaagcccctgctgaccgtgagcttcaccagcggcgacatcagcctgatgaacaactacgacgacctgagccccaccgtgatcagaagcggcctgaaggaggtggtggcccagtggtgcacccagggcgacctgctggccgtggccggcatggagagacagacccagctgggcgagctgcccaacggccccctgctgaagagcgccatggtgaagttctacaacgtgagaggcgagcacatcttcaccctggacaccctggtgcagagacccatcatcagcatctgctggggccacagagacagcagactgctgatggccagcggccccgccctgtacgtggtgagagtggagcacagagtgagcagcctgcagctgctgtgccagcaggccatcgccagcaccctgagagaggacaaggacgtgagcaagctgaccctgccccccagactgtgcagctacctgagcaccgccttcatccccaccatcaagccccccatccccgaccccaacaacatgagagacttcgtgagctaccccagcgccggcaacgagagactgcactgcaccatgaagagaaccgaggacgaccccgaggtgggcggcccctgctacaccctgtacctggagtacctgggcggcctggtgcccatcctgaagggcagaagaatcagcaagctgagacccgagttcgtgatcatggaccccagaaccgacagcaagcccgacgagatctacggcaacagcctgatcagcaccgtgatcgacagctgcaactgcagcgacagcagcgacatcgagctgagcgacgactgggccgccaagaagagccccaagatcagcagagccagcaagagccccaagctgcccagaatcagcatcgaggccagaaagagccccaagctgcccagagccgcccaggagctgagcagaagccccagactgcccctgagaaagcccagcgtgggcagccccagcctgaccagaagagagttccccttcgaggacatcacccagcacaactacctggcccaggtgaccagcaacatctggggcaccaagttcaagatcgtgggcctggccgccttcctgcccaccaacctgggcgccgtgatctacaagaccagcctgctgcacctgcagcccagacagatgaccatctacctgcccgaggtgagaaagatcagcatggactacatcaacctgcccgtgttcaaccccaacgtgttcagcgaggacgaggacgacctgcccggcgacgccgtgtggaccgactag

SEQ ID NO: 22709 - DNA, 2037 bp, Artificial Sequence
  derived and/or modified sequence
atgtatgccgcagtggaacacggcccggtcctgtgctccgatagcaacatcctgtgtttgtcctggaaaggacgggtccctaaatccgagaaggagaaacctgtgtgtcgtcggcgctactatgaggagggttggctggcaacaggcaatgggcggggggtggtgggtgttactttcacttcgagtcactgccgcagggatagatcaaccccgcagcgcattaattttaacttgagggggcataatagtgaggttgtgctggtcagatggaatgaaccatatcagaagctcgcaacatgcgacgccgacggtggcatctttgtgtggattcagtatgaagggcgctggtctgtggagctagtgaacgacagaggcgcacaggtctcggactttacctggtctcatgacggaacccaagcacttatcagttatcgcgacggttttgtgttggtaggtagcgtgagcgggcagaggcactggagttcagaaatcaatctcgagagccagataacctgcggcatatggacgcccgacgaccagcaggttctctttggcaccgctgacggacaagtcattgtgatggattgccacgggcgtatgcttgcccatgtgctcctgcatgagtctgacggtgtgctcggaatgagttggaactacccaatattcctggtggaagactccagcgagagcgatactgatagcgacgactatgctcctccacaggatgggcccgccgcatatcctattcctgtgcaaaatattaagcctctgctgaccgtctcattcaccagtggagatattagcctgatgaacaactatgatgacctgtctcctacggtaatccggagtggcttgaaagaagtggtggcccagtggtgtacccaaggcgacctcctggccgtggccggaatggaacggcagacgcagctcggagaattgcccaatggtccactgctcaaatctgctatggtaaaattttataacgtgaggggagagcacatattcactctggatacgttggtgcagcgacctattatttccatatgctgggggcatcgagactctcggctactcatggcttccgggccggccctctatgtcgtcagggtcgaacatagagtatcttccctccagctgctttgtcagcaggcaatcgctagtacgctcagggaagataaagacgtctccaagctgacgctgccaccacgcctgtgttcctatctgtctactgcattcatccctactatcaaaccaccaattccagaccccaataacatgcgtgatttcgtgtcatacccaagcgccgggaacgaacggctccactgtacaatgaaacggactgaggatgaccctgaggtgggtggaccttgctatactctttatttggaatatttaggaggcctggtccctatactcaaaggacgcaggataagtaaattacgaccagaatttgtcattatggatcctcgtacggactctaagcctgatgaaatttacggcaacagcctaatcagcaccgttatcgactcctgtaactgctctgattcctctgatatcgagctgtccgatgactgggccgccaaaaaaagtccaaaaatctctagagcgtcgaagtcccctaaactcccccgaatctccatagaagccagaaagagtccgaaactcccccgcgcagcccaggaactgagccgttcacccagactgcctctgcggaaacccagcgtcgggtcacccagtctcactcgccgggagtttccctttgaggacatcactcagcataattatctggcccaggtaacatccaatatatggggaaccaagtttaaaatcgtggggcttgcagcgtttttacctaccaacctcggggctgtgatctataaaacctctttactccacttgcagccccgccagatgacgatttacctccctgaagtaagaaagatctccatggactacattaacttacctgtgtttaatcccaatgtgtttagcgaagacgaagatgacctgccaggagacgccgtttggacagattag

SEQ ID NO: 22710 - DNA, 5170 bp, Artificial Sequence
  derived and/or modified sequence
gaaattttaatttattattcccccccttttttcctgcatctataggataatattgtaaaatagcaattgaaaccaataattattaaataaatatcaaggaaaatccaagcaaagctttctttttgttggactagtggtgtggtgtttggagacagtctctgaatgtgaacaggaaagcacccatcagcaaaacactatcactctctagggagacagctgggggaatctgactctggcttctgcttttgttttaagggattaacttccctgtcaagtccaagaagacttgcgtatgagaagattacctgatggacttaattctaagattagcttttttcatcaagatggaaaaagatctttaggagcagaaaaggggagtgctaactgggggagcgagaagggagacgagcaaaagaaacaaaatcttgccacgtggctctgttttgtcagcaagaggatttaagactcacccagggcaaacactgggaccactgtaagagcgctggaacattctgcctcttgagtgaaggggccttctttctagcctctatggcactgaggggtgcgccggctggtggaggagcagtccgatggagccctgcgttccccggggacacagggccaagctttgaggtggaaagtttctggttctgaaacaacaaggagagagtctgtttttcttcctaaaatttggactcttgtctgcacaaactctggtctgttttgcacggtttgtgtgcctttttttccctttatgcaatctttttcagctttagcagcagaaatttgtctagttcaggaaacatgctagagggtggcttcagaaggaagatgatcctgtgtattctgtctctgcatccgaacttttgaagagaaaaattcgagctagagggattcttaaagccttaagttacttgaaatctatgtatttgcaaccctttgtctctggaatcatattacactaaactggaatctcaggctgaatgagaataaccaagtggagtaaaaagaagaaaaccgtttcttgatcaccacttaattaacgatgctctttctccaaaggatcagcacgttcttcctctgagaacttgaaaatacaaatggaccccatgtttttttaagcattaccttttcttagaagactgccatcatcttttatagaggaattttttcactatgcattcggtggatctttataaaatactgaccttctaattagattcaggtcagtcttaattaaagggggaaaaaagcaacgcaagccaaccacaaaaacacatataccaatgaaagaaattggtttaaatttcacagcattaacattactttttaagtaaaacagttcattgaagaaagtatgtatgcagcagtggaacatgggcctgtgctttgcagcgattccaacatcctgtgcctgtcctggaaggggcgtgtccccaagagtgagaaggagaagcctgtgtgcaggagacgctactatgaggaaggctggctggccacgggcaacgggcgaggagtggttggggtgactttcacctctagtcactgtcgcagggacaggagtactccacagaggataaatttcaacctccggggccacaatagcgaggttgtgctggtgaggtggaatgagccctaccagaaactggccacgtgcgatgcggacggaggcatattcgtgtggattcagtacgagggcaggtggtctgtggagctggtcaacgaccgcggggcgcaggtgagtgatttcacgtggagccatgatggaactcaagcacttatttcctatcgagatgggtttgtcctggttgggtctgtcagtggacaaagacactggtcatccgaaatcaacttggaaagtcaaattacgtgtggcatatggactcctgacgaccaacaggtgctgtttggcacggccgatgggcaggtgattgtcatggattgccacggcagaatgctggcccacgtcctcttgcacgagtcagacggtgtcctcggcatgtcctggaactacccgatcttcctggtggaggacagcagcgagagcgacacggactcagatgactacgcccctccccaagatggtccggcagcatatcccatcccagtgcagaacatcaagcctctgctcaccgtcagcttcacctcgggagacatcagcttaatgaacaactacgatgacttgtctcccacggtcatccgctcagggctgaaagaggtggtagcccagtggtgcacacagggggacttgctggcagtcgctgggatggaacggcagacccagcttggtgagcttcccaatggtccccttctgaagagtgccatggtcaagttctacaatgttcgtggggagcacatcttcacactggacactctcgtgcagcgccccatcatctccatctgctggggtcaccgggattcgaggctgttgatggcatcaggaccagccctgtacgtggtgcgtgtggagcaccgggtgtccagcctgcagctgctgtgccagcaggccatcgccagcaccttgcgtgaggacaaggacgtcagcaagctgactctgcccccccgcctctgctcctacctctccactgccttcatccccaccatcaagcccccaattccagatccgaacaacatgagagactttgtcagctacccatcagccggcaacgagcggctgcactgcaccatgaagcgcacagaggacgacccggaggtgggcggcccgtgctacacgctctacctggagtacctgggcgggcttgtgcccatcctcaaagggcggcgcatcagcaagctgcggccagagttcgtcatcatggacccgcggacagatagcaaaccagatgaaatctatgggaacagcttgatttctactgtgatcgacagctgcaactgctcagactccagtgacattgagctgagtgatgactgggctgccaagaaatctcccaaaatctccagagctagcaaatcacccaaactcccaaggatcagcattgaggcccgcaagtcacccaagctgccccgggctgctcaggagctctcccggtccccacggttgcccctgcgcaagccctctgtgggctcgcccagcctgactcggagagagtttccttttgaagacatcactcagcacaactatcttgctcaggtcacgtctaatatctggggaaccaaatttaagattgtgggcttggctgctttcctgccaaccaacctcggtgcagtaatctataaaaccagcctcctgcatctccagccgcggcagatgaccatttatctcccagaagttcggaaaatttccatggactatattaatttacctgtcttcaacccaaatgttttcagtgaagatgaagatgatttaccaggtgatgcagtttggacggattgatggcagtgcgtacattctagacttccagtatccgttctcagccgtgcaggcctttgcagttgccctggccaacgtgactcagcgcctcaaatgaagagactggtgtggggaggagagagatgcagagagcctttggaagaggtcttcggagatgccagaggagccctctaggggtccgatgcctgggaggaccagaagccaacagcaaaactggaaaagcccggcaggcccaggagagggcgctgacctgtggtcgtcatttatttggttgggttttattaccttttattgtctgttcttcttttcttctttcatttcagtggcatttggaagcaaagagtgctaggcacctgctgttctttcaggaaacagcttggctgtggtaatgctctactgggcccttcagaatgaagacagtctgccttagagcctgctattcttttagacatagggaggatgcattatcctgtattctcctccaacatcaccactagcgtaaaagcaaaaagcttttacaaaacacagccaaaaattctcaagatgcaggttcttggggaatgggatggggacagcatttgatttacactgattatgttactccccaaaaggtgacttaattaataaagggcatttgggcagacacactgtgttggaccaacaaagtaggctctttacaggggtgttctcaccaggtagaaatgcgatttgctcactgaggatgttggggaagggacgaagggtaaagaagaaactgcacgtatacacaggttcacatcactctgcagacagcaatgtgactcagcgtgtgacttgtagcagcagtacgagggctacactcctctgctgaggatgtctacattgaaagcctccactagtttcatcgtttgtcaaagttccgtaggatcagtgatggtcattcagcatgactggttctgggagaaggtgagagacaaaaatggaaagatcctggcctgtggtagtggtagcagttttctcaaataatgtggtgacagtcactagatcctcacatgctgagaaacagcctctactctctctgccccttttactttttaatctggaatgcattactgtaaacatgatctttcccatgagataccatgttctatgccttcccattctaaaagtgtggacaacgcttgatttgaaaccactccttttctcctcttggctacattaaaattcagttgactacaaatgctttctatcaaattagaaatgtaaccaaaaaaatgttaagtgttcaccagggtattaaaatacagaggagtatggtcaaatctttgacaaaattttcatgatcttctctaacaaaaaaagttgtttattaactgtacagactgtttactaaggagctaaaccactgagaaaacgttattaaaattgtaatacctaggtagttggttgatcacagtttgttaattgtataaaaaaaaattacctagaatatctcttcccacttcctcgtcctcgtgagaacctgtgggcagtattcaagccctgatgacaaaacccagtgttttttgttgttgttttttgttgttgttttttgtttttgtttttgtttttctcagtcttacctgtgatgttgtttaggatcaggcccctctcctgggcctgctgtgcaggagcacaggaactatctgctggcgttgggttccaaatttgcattttatttggaaacagacaagtagaagatgctacagaaaagtattttcaaatttaaacgttttttaatcccctgttttagttaaaaaa

SEQ ID NO: 22711 - DNA, 2037 bp, Artificial Sequence
  derived and/or modified sequence
atgtatgctgctgtggagcacggccctgtgctgtgcagcgacagcaacatcctgtgcctgtcctggaagggccgggtgcccaagtctgagaaggagaagcctgtgtgcagaagacgctactatgaggagggctggctggccactggaaatggccggggcgtggtgggcgtgaccttcaccagcagccactgcagaagagacaggagcaccccccagaggatcaacttcaacctgcggggccacaacagcgaggtggtgctggtgcgctggaatgagccctaccagaagctggccacctgtgatgctgatggcggcatctttgtgtggatccagtatgagggccgctggagcgtggagctggtgaatgacagaggagcccaggtgtctgacttcacctggagccatgatggcacccaggccctgatctcctacagagatggctttgtgctggtgggctctgtgtctggccagaggcactggagcagcgagatcaacctggagagccagatcacctgtggcatctggaccccagatgaccagcaggtgctgtttggaacagcagatggccaggtgattgtgatggactgccacggccgcatgctggcccacgtgctgctgcatgaaagtgatggagtgctgggcatgtcctggaactaccccatcttcctggtggaggacagcagcgagagtgacacagacagtgatgattatgccccaccccaggacggccctgctgcctaccccatccctgtgcagaacatcaagcccctgctgactgtgtccttcaccagcggggacatcagcctgatgaacaactatgatgacctgagccccaccgtcatccgcagcggcctgaaggaggtggtggcccagtggtgcacccagggcgacctgctggccgtggccggcatggagcggcagacccagctgggggagctgcccaacggccccctgctgaagagcgccatggtgaagttctacaacgtgcggggggagcacatcttcaccctggacaccctggtgcagaggcccatcatcagcatctgctggggccaccgggacagccggctgctgatggccagcggccctgccctgtatgtggtgcgggtggagcaccgggtgagcagcctgcagctgctgtgccagcaggccatcgccagcaccctgcgggaggacaaggatgtgtccaagctgaccctgcccccccggctgtgcagctacctgagcacagccttcatccccaccatcaagccacccatcccagaccccaacaacatgagggactttgtgtcctaccccagcgctggaaatgaaaggctgcactgcaccatgaagaggacagaagatgatcctgaggtgggcggcccctgctacaccctgtacctggagtacctgggcggcctggtgcccatcctgaagggccgccgcatcagcaagctgcggcctgagtttgtgatcatggaccccaggacagacagcaagccagatgagatctacggcaacagcctcatcagcaccgtcatcgacagctgcaactgcagcgacagcagtgacatcgagctgagtgatgactgggccgccaagaagagccccaagatcagccgggccagcaagagccccaagctgccccgcatcagcattgaggccaggaagagccccaagctgccccgggccgcccaggagctgagccgcagcccccggctgcccctgaggaagcccagcgtgggcagccccagcctgacccggcgggagttcccctttgaggacatcacccagcacaactacctggcccaggtgaccagcaacatctggggcaccaagttcaagatcgtgggcctggccgccttcctgcccaccaacctgggcgctgtgatctacaagaccagcctgctgcacctgcagccccggcagatgaccatctacctgcctgaggtgaggaagatctccatggactacatcaacctgcccgtcttcaaccccaacgtgttttctgaagatgaagatgacctgcctggagatgctgtgtggacagactag

SEQ ID NO: 22712 - DNA, 2037 bp, Artificial Sequence
  derived and/or modified sequence
atgtacgccgccgtggagcacggccccgtgctgtgcagcgacagcaatattctgtgtttgtcctggaaggggagagtcccaaagagcgaaaaggagaagccggtctgcagaagacggtactacgaggaaggttggttagcaactggaaacgggcgaggcgtggtcggggtcacattcacctcctcccattgcaggagagatagatccacacctcaacgcattaacttcaacttaagaggacataactctgaggtggttttagtgcggtggaacgaaccatatcagaagctggcaacgtgcgatgctgatggcgggatctttgtttggatccagtacgagggacgctggtcggtggaactagttaatgacaggggagcccaagtcagcgactttacctggtcccacgacgggacacaggcactgatcagttacagggacgggttcgttttagtcggaagcgtatctggccaacggcactggagctctgagattaatttagagtcgcagatcacttgcggtatctggacccctgatgaccaacaagtccttttcgggactgccgatggtcaggttatcgttatggactgtcatgggagaatgttggcccatgtactgctacatgaatcagacggagtacttgggatgtcctggaactaccctatattccttgtggaggatagctccgagagcgacaccgactctgatgactacgccccacctcaggacggaccggccgcttatccgatacctgtgcagaatataaaacctctgctgactgtttcttttactagcggcgacattagccttatgaataattatgacgacctcagcccaacagtgattaggtcagggttgaaagaggttgtcgcccagtggtgcacacagggcgatctactggccgtggcaggcatggagcgacaaactcagctcggtgaactgcctaacgggccccttctgaagtctgccatggtgaaattttataatgttcgtggtgagcacatattcacgctggacaccttagtacagaggcctatcatttcgatctgttggggacacagagacagccgattgctcatggcatccggccctgcgctgtatgtggtgcgcgtcgagcacagagtatcgtcattgcagctgttgtgtcagcaggccatagcctctacattaagggaggataaagacgtctcaaaactcacccttcctccaaggctttgcagctacctctccacagcattcatccccacgatcaaacccccaattccggatcctaacaatatgagagatttcgtgagctatccttcagcagggaacgagcgactccattgcacaatgaagcgtactgaggacgatccggaggtgggtggcccatgctataccttgtacctggaatatctcggcggcctcgtccctatcctgaagggccgacgtattagcaagctgcggcccgagttcgtgattatggatcctcggaccgattccaaaccagacgagatctatgggaacagcctaatatctacagttatagacagctgtaactgttccgactcatccgatattgaactctccgatgattgggccgcaaagaaatctcctaagatctctagagctagcaaatcccctaaactaccgcgcatttctattgaggctcggaaaagtccaaagctgcccagagcggcccaggagctctcacgctccccaagactgcctcttaggaaaccgtcagtaggctcaccaagcctaactagacgagagttcccatttgaggacatcacccagcacaattatctggctcaagtgacatctaacatctggggcaccaagttcaagatcgtgggcctggcagccttcctcccgaccaacttgggcgcagtgatctataagaccagtctgctacacctgcagcctcgtcagatgacgatttacctccccgaggttcgcaagatttccatggactacattaacttacccgtattcaacccaaacgtgttcagtgaagatgaagacgacctccctggtgatgccgtgtggacagactag

SEQ ID NO: 22713 - DNA, 2037 bp, Artificial Sequence
  derived and/or modified sequence
atgtacgctgctgtggaacacggcccagtactgtgctctgatagcaacatcctatgtctttcgtggaaaggtcgagtccctaagtcggaaaaggagaagcccgtttgccggaggcgctattatgaagagggctggctcgcgaccgggaacggccgtggagtggtgggcgtgacttttacgagctcacactgccggagagatcgctccacgccccagagaatcaatttcaatctacggggtcacaacagtgaggtggtgttagtgagatggaacgagccttatcagaagctggcaacgtgtgatgctgatggtgggattttcgtgtggattcaatatgaggggagatggtctgttgagctggtgaatgatcgtggggcacaggtatctgatttcacttggagtcacgacggtacccaggcgctaatcagctacagagacggcttcgtactggtgggtagtgtctctggccagaggcactggagcagtgaaatcaacttggaaagccagattacctgtggcatttggacccccgacgatcagcaggttttatttggcacagcagatggacaggtcatagtgatggactgccacgggagaatgcttgctcacgtgctccttcacgagtctgatggcgtcctgggtatgtcgtggaattatccaattttcttagtagaggatagttctgagtcggacacagattccgacgattacgctccccctcaagatgggcctgccgcataccctattcctgtccagaacattaagccactgctgacggtgagctttacatccggagatatttcattaatgaacaattatgatgacctctctcctactgtgatccggtccggcctgaaagaagtggtggctcagtggtgcacacaaggcgatttacttgcggtcgctgggatggagagacagacccagctcggggagctccctaatgggcctctgctgaaatctgctatggtaaaattttacaatgtaaggggcgagcatatctttacactggatactctagtgcagcggcctattatctcaatttgctggggccatcgtgattctcgactgttaatggcgagtggcccagccttatatgtagtcagagtcgaacaccgtgtgtcctcactacagttactttgtcagcaggcaatcgcgtccactttgcgcgaggacaaggacgtgtcgaaattaacactgccacctaggctgtgttcctacctgtccacggcttttataccaacgattaaacctcctatccccgatccaaacaatatgcgggatttcgtgagctatccttcggccggtaatgaaagactgcattgtactatgaaacgtactgaggatgatcccgaggtgggagggccatgttacacactgtacctagagtatctggggggactcgtgcccatcttgaaaggaagacgtatttccaagctgagacccgaattcgtgataatggatcctcggacggactcgaagcctgacgaaatatatggcaacagcctgatttcaactgtgatcgactcgtgcaactgcagcgacagttctgatatcgaattatccgacgactgggctgccaaaaagtccccgaagatctcccgagcttctaagtctccaaaactccctaggatctccatagaggcccgaaaatcgcctaagttacccagggccgcacaggaactgagcaggagtcccagactgcctctgcgcaaaccatccgtgggcagcccgtcccttactaggagagagttcccctttgaagatattacccagcacaattatcttgcacaggtcacatctaacatctggggtaccaagtttaagattgtaggtctcgccgctttcctgcccacaaatctgggggcagtcatttacaaaacttcccttttgcatctccagccaaggcagatgaccatctatctgcctgaagtccgcaaaattagcatggattatattaatctgcccgtcttcaatccaaatgttttctccgaggacgaagacgacctcccgggtgacgccgtttggacagattag

SEQ ID NO: 22714 - protein, 1242 aa, Artificial Sequence
  derived and/or modified sequence
MKNLLTEKCISSHNFHQKVIKQRMEKKVDSRYFKDGAVKKPYSAKTLSNKKSSASFGIRRELPSTSHLVQYRGTHTCTRQGRLRELRIRCVARKFLYLWIRMTFGRVFPSKARFYYEQRLLRKVFEEWKEEWWVFQHEWKLCVRADCHYRYYLYNLMFQTWKTYVRQQQEMRNKYIRAEVHDAKQKMRQAWKSWLIYVVVRRTKLQMQTTALEFRQRIILRVWWSTWRQRLGQVRVSRALHASALKHRALSLQVQAWSQWREQLLYVQKEKQKVVSAVKHHQHWQKRRFLKAWLEYLQVRRVKRQQNEMAERFHHVTVLQIYFCDWQQAWERRESLYAHHAQVEKLARKMALRRAFTHWKHYMLLCAEEAAQFEMAEEHHRHSQLYFCFRALKDNVTHAHLQQIRRNLAHQQHGVTLLHRFWNLWRSQIEQKKERELLPLLHAAWDHYRIALLCKCIELWLQYTQKRRYKQLLQARADGHFQQRALPAAFHTWNRLWRWRHQENVLSARATRFHRETLEKQVFSLWRQKMFQHRENRLAERMAILHAERQLLYRSWFMWHQQAAARHQEQEWQTVACAHHRHGRLKKAFCLWRESAQGLRTERTGRVRAAEFHMAQLLRWAWSQWRECLALRGAERQKLMRADLHHQHSVLHRALQAWVTYQGRVRSILREVAARESQHNRQLLRGALRRWKENTMARVDEAKKTFQASTHYRRTICSKVLVQWREAVSVQMYYRQQEDCAIWEAQKVLDRGCLRTWFQRWWDCSRRSAQQRLQLERAVQHHHRQLLLEGLARWKTHHLQCVRKRLLHRQSTQLLAQRLSRTCFRQWRQQLAARRQEQRATVRALWFWAFSLQAKVWATWLAFVLERRRKKARLQWALQAYQGQLLQEGATRLLRFAASMKASRQQLQAQQQVQAAHSLHRAVRRCATLWKQKVLGRGGKPQPLAAIAPSRKVTFEGPLLNRIAAGAGDGTLETKRPQASRPLGALGRLAAEEPHALELNTAHSARKQPRRPHFLLEPAQSQRPQKPQEHGLGMAQPAAPSLTRPFLAEAPTALVPHSPLPGALSSAPGPKQPPTASTGPELLLLPLSSFMPCGAAAPARVSAQRATPRDKPPVPSSLASVPDPHLLLPGDFSATRAGPGLSTAGSLDLEAELEEIQQQLLHYQTTKQNLWSCRRQASSLRRWLELNREEPGPEDQEVEQQVQKELEQVEMQIQLLAEELQAQRQPIGACVARIQALRQALC

SEQ ID NO: 22715 - DNA, 3729 bp, Artificial Sequence
  derived and/or modified sequence
atgaagaacctgcttaccgagaagtgcatttcatctcataattttcaccaaaaagtcatcaagcagcgaatggagaaaaaagtggactctcgttactttaaggatggtgctgtgaagaagccttactctgccaaaactctctccaacaagaaatcatcagcctcctttggaatacgcagagaactgccatctacctctcacctcgtccagtatcgcgggacgcacacctgtaccagacagggacggctcagggaactgaggatcagatgcgttgctcgtaaatttctctacctctggattcggatgacgttcggcagggtgttccccagcaaagctcggttttactacgaacagcggctactaagaaaagtatttgaagaatggaaagaagaatggtgggtcttccagcatgagtggaaactctgtgtcagggccgattgccactaccgttactacctgtataatctcatgttccagacttggaaaacctatgttcggcagcagcaagagatgcgcaataagtacattcgcgccgaagttcatgacgccaagcagaagatgaggcaggcctggaaatcctggctgatctacgttgtcgtgcgcaggacgaaactccagatgcagaccacggcactcgaatttagacagcgcattattttaagagtgtggtggagcacatggcgccagagactcggacaggtgagagttagtcgcgcacttcacgctagcgccttaaagcatagggccctttccctccaagtccaagcatggagccagtggagggagcagctcttgtatgttcagaaagaaaaacagaaggtggtgagtgccgtaaaacatcatcagcactggcagaaaagacgcttcctcaaagcatggctggagtacctgcaggtccggcgcgtgaagcggcagcagaacgaaatggccgagcggtttcatcatgtgacggtcttgcagatctacttctgcgattggcagcaggcctgggagcgccgagagtcactctacgcccaccacgcccaagtcgaaaagttagcacggaagatggcgctgagacgagcattcacccattggaagcattatatgctgctgtgtgcagaagaggccgcacaatttgagatggctgaggagcaccacaggcactcgcagctgtacttttgctttcgcgctttgaaagataatgtgacacacgcgcacctgcaacagattcggagaaatctcgcacaccagcagcatggcgttactcttctacatcgattttggaatctctggcgttcgcagatcgaacaaaagaaggagagagagctgttaccgcttttacacgccgcctgggaccactacagaatcgcgctgctgtgcaagtgtatcgagctgtggctgcagtatacccagaaacgaagatataaacaactgctccaagcacgcgccgacggccatttccagcagagagcactgccggccgctttccacacgtggaatagattatggcgatggcggcaccaggagaacgtgctgtcggcaagagcaacacgcttccatagagaaacactggaaaagcaagtgtttagcctgtggcgccaaaaaatgttccagcatagagaaaataggcttgcggagcgcatggcaattctgcatgcggaaaggcagttgctgtatcgcagttggtttatgtggcaccagcaggcagccgcaaggcaccaggagcaggagtggcagacagtcgcgtgcgcacatcataggcatggacgactaaagaaggcattctgcctgtggagagagtcagcccagggcctcaggaccgagcggacagggcgcgtgagagccgcagagttccacatggcccagctcctccgatgggcgtggtcacagtggagagagtgcctcgcattgagaggagctgaacgccaaaaactgatgagagcggacctgcaccaccagcatagcgtcctgcaccgcgccttgcaggcctgggttacctatcagggtagagtgaggtctatactacgagaggtcgcagccagggagtcccagcacaaccgccaactgctgaggggcgcattgcgaagatggaaggagaacaccatggcccgcgtcgacgaggcaaagaagacatttcaagcctcgactcactatcgcaggacgatttgctcaaaggtactcgttcaatggcgtgaggctgtcagcgtacagatgtactataggcaacaggaagattgtgctatttgggaggctcagaaagtgctagatcgaggctgcctgcgcacttggttccaacgttggtgggactgttctcgcagaagcgcccagcagcgattgcagctagaacgcgcagttcagcaccaccaccgccaactactgctggagggcctggcgcggtggaagacacatcacttgcagtgcgtacgaaaaagactcctccaccgtcagagcacccagctattggctcaaaggcttagtagaacttgttttcgccagtggaggcagcagctcgctgcaagacggcaggaacagcgggccaccgtacgagcactttggttttgggccttctctctccaggccaaggtatgggctacctggctggcatttgtgttggagcgtcggagaaaaaaagcaaggttgcaatgggccctacaagcctaccaagggcagctgttgcaagaaggcgccacgagattgctgcgattcgccgcctcaatgaaggcctctcgtcagcagctgcaagcccaacagcaggtacaggcggcgcactccctgcacagggctgttagacggtgcgctacactctggaagcagaaagtcctgggccggggagggaagccccaaccactggcggccattgcaccttcacgcaaggtcacctttgaagggcctctgttgaatagaattgccgcaggagcgggggatggaactctcgagaccaaacgcccacaggctagccggcccctcggcgcccttgggcggctcgctgcagaggagccacacgccctcgagctcaataccgcccactctgcacggaaacagcctcgtaggccccatttccttttggaaccagcacaaagccagagacctcagaaaccacaagagcacggacttggcatggctcagcctgcagcccctagcctcacaagacccttcttggctgaggcccctacggcgctggtcccacactctcctcttcccggcgcactgtcttcagcccctggtcccaagcagccaccgacggcctcaacgggtccagaactgttgctcctcccactgtctagttttatgccttgcggagcagctgccccggcccgcgtgagcgcacaaagagccaccccccgggacaaaccccccgttccttcgtctttggccagtgtacccgatccccacctgttgctgcccggggacttctcggctacaagagctggcccaggcttgtcaacagcagggagcttagacctggaggccgagctagaagaaatacagcagcagcttcttcactaccagactacaaagcagaacctctggagttgtaggagacaggccagttccttgcgtcgctggctggagctcaacagggaagagcccggtcccgaggatcaagaggtagagcagcaggtccagaaggagttggaacaggtcgaaatgcagatacagctgctggctgaagagttacaggctcaaaggcaaccaattggtgcctgcgtggcccggattcaagctctgcgccaggcactgtgctag

SEQ ID NO: 22716 - DNA, 3096 bp, Artificial Sequence
  derived and/or modified sequence
atgaagaacttgctgaccgagaaatgtattagctcacacaattttcatcaaaaagtcataaaacagcgcatggagaagaaggtcgatagcaggttttactatgagcagcgcctcctgagaaaagtgttcgaggaatggaaggaggagtggtgggtattccagcacgagtggaaactctgtgtccgagctgattgccactacagggtttggtggtccacctggaggcagcggctgggtcaggtgagagtgtctagggccttacacgcttcagcgttaaaacaccgggctttgtctctgcaggtccaggcttggtcgcagtggcgcgagcagttactgtatgtgcaaaaagaaaagcagaaggtggtgagtgcggttaagcatcaccagcactggcagaagaggaggttcctcaaagcttggctggaatatctgcaagtgagaagggtaaagcggcaacaaaatgagatggcggaacgattccaccatgttactgttctgcagatttatttttgtgattggcaacaggcctgggaacgccgggaatctttgtacgcacaccacgctcaggtcgagaaactcgcccgcaaaatggccctcagacgagcattcacccactggaagcactatatgttactctgtgccgaggaagccgctcagtttgaaatggctgaagaacaccatagacattcgcagctgtatttctgtttccgtgcacttaaagacaatgtgacccacgcccatcttcaacaaatcaggaggaatctagctcatcagcagcacggcgttacactcctccaccgattctggaatctgtggcggagtcagatagagcagaagaaagagcgggagctcctgccgctcctgcacgcagcctgggatcactacaggattgctctcttatgtaaatgcattgagctgtggttgcagtacacacagaaacgcaggtacaaacagctcctgcaggccagagcagacgggcactttcaacagcgagcacttcctgccgcgtttcatacctggaaccgcctctggcgctggcggcatcaagaaaacgtcctgtccgcaagagcaaccaggtttcatagagagacgctggagaagcaagtcttctcgctctggagacagaagatgtttcagcatcgggagaaccggttagctgagcgcatggccattctacatgctgaacgacagctcctgtatcgctcttggttcatgtggcaccagcaggcagccgcccgccatcaggagcaggagtggcagaccgtagcctgcgctcatcaccgtcacggacggctgaagaaggctttctgcttatggcgggagagtgcgcaggggctgcggactgaaagaactggccgagtcagagcagctgaattccacatggcccaactgctacgctgggcctggagtcagtggcgtgagtgcctcgccttacgcggtgcggaaagacagaaactcatgcgagccgacttgcaccatcagcacagtgttctacatcgggccctgcaagcatgggttacttatcagggccgcgtcagaagcattctgagggaggtggctgcccgagagagtcaacacaatcgtcaactactgagaggagctctcaggaggtggaaggagaacacaatggcccgggttgacgaggcgaagaaaacattccaagcatccacccattacagacgaactatctgtagcaaagtgcttgtgcagtggagggaagctgtgtcggtgcagatgtactatcgtcagcaggaagactgtgctatatgggaagcgcagaaggtcttagaccgcggttgcctacggacctggtttcagcgatggtgggattgttctaggcgctctgcgcagcaacgcttgcaactagagcgggccgtccaacaccaccatagacagctgcttctcgaaggcctggctcgctggaagacgcaccatttgcagtgcgtccgtaaaagactactgcacagacagtctacccagttactggcacaaaggctctcacgcacgtgttttagacaatggaggcagcagctggccgcccgtcgtcaggaacagagagccacggtgcgcgcactgtggttctgggccttcagtcttcaggctaaggtatgggcgacctggctcgcgttcgtcctggagcgccgcagaaagaaggccagacttcagtgggccctacaagcgtaccagggtcagctcttacaggaaggcgcaacacgtctcctcaggttcgccgctagcatgaaggcctctcggcagcagcttcaggctcaacagcaagtgcaggctgcccatagtctccatagagcggtccgccgctgtgcaaccttgtggaaacagaaggtcctggggaggggaggcaaaccccaaccattagctgccatcgccccttctcggaaagtcacctttgaagggcctctgctgaacaggatcgccgctggtgcgggcgatggtaccctcgaaactaagaggccacaagctagcaggccccttggggccctgggacggctggcagccgaggaacctcacgcattggaacttaacacggcccactcagcgcgtaagcagcctagacgaccacacttccttcttgagcccgcacagtcccagaggccccaaaaaccgcaggagcatggcttgggaatggcacagcctgccgccccctctttgacacggcctttcctggccgaggctcctacagcattagtcccacatagcccgttaccaggagcactcagtagcgctcccggacccaagcagccgccaacggcctcaaccggacctgaactgcttctgcttcccctgagttcatttatgccttgtggcgcggcggcacccgcaagagtgagcgcccagcgtgccaccccacgtgacaagcctccagtcccatcaagcctggcgagcgtcccagacccacacttacttctccccggggattttagcgccacaagggccggtccaggattgtctacggccgcttggacgcttaggctgaacttaagaaggtcatcatccaattactgcactacccgccctccatcgaggacatcaggtcctgtaggaggaaagcgagcagcgtgtgcaggtggatggtcttag

SEQ ID NO: 22717 - DNA, 3729 bp, Artificial Sequence
  derived and/or modified sequence
atgaagaacctgctgacagagaagtgcatcagcagccacaacttccaccagaaggtgatcaagcagaggatggagaagaaggtggacagccgctacttcaaggatggagctgtgaagaagccctacagcgccaagaccctgagcaacaagaagagcagcgccagctttggcatcagaagagagctgcccagcaccagccacctggtgcagtaccggggcacccacacctgcacccggcagggccgcctgcgggagctgcgcatccgctgtgtggccaggaagttcctgtacctgtggatccgcatgaccttcggccgggtcttccccagcaaggcccgcttctactatgagcagaggctgctgaggaaggtgtttgaggagtggaaggaggagtggtgggtgttccagcacgagtggaagctgtgtgtgcgggctgactgccactaccgctactacctgtacaacctgatgttccagacctggaagacctacgtgcggcagcagcaggagatgaggaacaagtacatccgggcagaggtgcatgatgccaagcagaagatgaggcaggcctggaagtcctggctgatctacgtggtggtgcggaggaccaagctgcagatgcagaccacagccctggagttccggcagaggatcatcctgcgggtgtggtggagcacctggaggcagaggctgggccaggtgcgggtgtcccgggccctgcacgccagcgccctgaagcaccgggccctgagcctgcaggtgcaggcctggagccagtggagggagcagctgctgtatgtgcagaaggagaagcagaaggtggtgtctgctgtgaagcaccaccagcactggcagaagaggcgcttcctgaaggcctggctggagtacctgcaggtgcggcgggtgaagaggcagcagaatgagatggccgagcgcttccaccacgtgacagtgctgcagatctacttctgtgactggcagcaggcctgggagcggcgggagagcctgtatgcccaccacgcccaggtggagaagctggccaggaagatggccctgcggcgggccttcacccactggaagcactacatgctgctgtgtgccgaggaggccgcccagtttgagatggccgaggagcaccaccgccacagccagctgtacttctgcttccgggccctgaaggacaacgtgacccacgcccacctgcagcagatcagaagaaacctggcccaccagcagcacggcgtgaccctgctgcaccgcttctggaacctgtggaggagccagatcgagcagaagaaggagcgggagctgctgcccctgctgcatgctgcctgggaccactaccgcatcgccctgctgtgcaagtgcatcgagctgtggctgcagtacacccagaagaggcgctacaagcagctgctgcaggcccgggcagatggccacttccagcagagggccctgcctgctgccttccacacctggaaccggctgtggcgctggaggcaccaggagaatgtgctgagcgcccgggccacccgcttccaccgggagaccctggagaagcaggtgttcagcctgtggaggcagaagatgttccagcacagagaaaatcggctggccgagaggatggccatcctgcatgctgagcggcagctgctgtaccgctcctggttcatgtggcaccagcaggccgccgcccggcaccaggagcaggagtggcagacagtggcctgtgcccaccaccgccacggccgcctgaagaaggccttctgcctgtggagggagagcgcccagggcctgaggacagagaggacaggccgggtgcgggctgctgagttccacatggcccagctgctgcgctgggcctggagccagtggagagaatgtctggccctgcggggagctgagcggcagaagctgatgagagctgacctgcaccaccagcacagcgtgctgcaccgggccctgcaggcctgggtgacctaccagggccgggtgcgcagcatcctgcgggaggtggccgcccgggagagccagcacaaccggcagctgctgcggggggccctgcggcgctggaaggagaacaccatggcccgggtggatgaggccaagaagaccttccaggccagcacccactacagaaggaccatctgcagcaaggtgctggtgcagtggagggaggccgtgtctgtgcagatgtactaccggcagcaggaggactgtgccatctgggaggcccagaaggtgctggaccggggctgcctgcggacctggttccagcgctggtgggactgcagccgccgcagcgcccagcagaggctgcagctggagagagctgtgcagcaccaccaccggcagctgctgctggagggcctggcccgctggaagacccaccacctgcagtgtgtgaggaagaggctgctgcaccggcagagcacccagctgctggcccagaggctgagcaggacctgcttccggcagtggaggcagcagctggccgcccggcggcaggagcagagggccaccgtgcgggccctgtggttctgggccttcagcctgcaggccaaggtgtgggccacctggctggcctttgtgctggagaggaggaggaagaaggcccggctgcagtgggccctgcaggcctaccagggccagctgctgcaggagggcgccacccggctgctgcgctttgctgcctccatgaaggccagccggcagcagctgcaggcccagcagcaggtgcaggccgcccacagcctgcacagagctgtgcggcgctgtgccaccctgtggaagcagaaggtgctgggccggggcggcaagccccagcccctggccgccatcgcccccagcaggaaggtgacctttgagggccccctgctgaacagaattgctgctggagctggagatggcaccctggagaccaagaggccccaggccagccggcccctgggcgccctgggccgcctggccgctgaggagccccacgccctggagctgaacacagcccacagcgccaggaagcagccccggcggccccacttcctgctggagcccgcccagagccagaggccccagaagccccaggagcacggcctgggcatggcccagcctgctgcccccagcctgacccggcccttcctggccgaggcccccacagccctggtgccccacagccccctgcccggggccctgagcagcgcccctggccccaagcagcccccaacagccagcacaggccctgagctgctgctgctgcccctgagcagcttcatgccctgtggggccgccgccccagcccgggtgtctgcccagagggccaccccccgggacaagccccctgtgcccagcagcctggcctctgtgcctgacccccacctgctgctgcccggggacttcagcgccaccagggctggccctggcctgagcacagctggcagcctggacctggaggccgagctggaggagatccagcagcagctgctgcactaccagaccaccaagcagaacctgtggagctgccggcggcaggccagcagcctgcggcgctggctggagctgaaccgggaggagcccggccctgaggaccaggaggtggagcagcaggtgcagaaggagctggagcaggtggagatgcagatccagctgctggccgaggagctgcaggcccagaggcagcccatcggggcctgtgtggcccgcatccaggccctgcggcaggccctgtgctag

SEQ ID NO: 22718 - DNA, 3096 bp, Artificial Sequence
  derived and/or modified sequence
atgaagaacctgctgacagagaagtgcatcagcagccacaacttccaccagaaggtgatcaagcagaggatggagaagaaggtggacagccgcttctactatgagcagaggctgctgaggaaggtgtttgaggagtggaaggaggagtggtgggtgttccagcacgagtggaagctgtgtgtgcgggctgactgccactacagagtgtggtggagcacctggaggcagaggctgggccaggtgcgggtgtcccgggccctgcacgccagcgccctgaagcaccgggccctgagcctgcaggtgcaggcctggagccagtggagggagcagctgctgtatgtgcagaaggagaagcagaaggtggtgtctgctgtgaagcaccaccagcactggcagaagaggcgcttcctgaaggcctggctggagtacctgcaggtgagaagagtgaagaggcagcagaatgagatggccgagcgcttccaccacgtgacagtgctgcagatctacttctgtgactggcagcaggcctgggagcggcgggagagcctgtatgcccaccacgcccaggtggagaagctggccaggaagatggccctgcggcgggccttcacccactggaagcactacatgctgctgtgtgccgaggaggccgcccagtttgagatggccgaggagcaccaccgccacagccagctgtacttctgcttccgggccctgaaggacaacgtgacccacgcccacctgcagcagatcagaagaaacctggcccaccagcagcacggcgtgaccctgctgcaccgcttctggaacctgtggaggagccagatcgagcagaagaaggagcgggagctgctgcccctgctgcacgccgcctgggaccactacagaattgccctgctgtgcaagtgcatcgagctgtggctgcagtacacccagaagaggcgctacaagcagctgctgcaggcccgggcagatggccacttccagcagagggccctgcctgctgccttccacacctggaaccggctgtggcgctggaggcaccaggagaatgtgctgagcgcccgggccacccgcttccaccgggagaccctggagaagcaggtgttcagcctgtggaggcagaagatgttccagcaccgggagaaccggctggccgagaggatggccatcctgcacgccgagcggcagctgctgtaccgctcctggttcatgtggcaccagcaggccgccgcccggcaccaggagcaggagtggcagacagtggcctgtgcccaccacagacatggccgcctgaagaaggccttctgcctgtggagggagagcgcccagggcctgaggacagagaggacaggccgggtgcgggctgctgagttccacatggcccagctgctgcgctgggcctggagccagtggagggagtgcctggccctgcggggagctgagcggcagaagctgatgagagctgacctgcaccaccagcacagcgtgctgcaccgggccctgcaggcctgggtgacctaccagggccgggtgcgcagcatcctgcgggaggtggccgcccgggagagccagcacaaccggcagctgctgcggggggccctgcggcgctggaaggagaacaccatggcccgggtggatgaggccaagaagaccttccaggccagcacccactacagaaggaccatctgcagcaaggtgctggtgcagtggagggaggccgtgtctgtgcagatgtactaccggcagcaggaggactgtgccatctgggaggcccagaaggtgctggaccggggctgcctgcggacctggttccagcgctggtgggactgcagcagaagaagtgcccagcagaggctgcagctggagagagctgtgcagcaccaccaccggcagctgctgctggagggcctggcccgctggaagacccaccacctgcagtgtgtgaggaagaggctgctgcaccggcagagcacccagctgctggcccagaggctgagcaggacctgcttccggcagtggaggcagcagctggccgcccggcggcaggagcagagggccaccgtgcgggccctgtggttctgggccttcagcctgcaggccaaggtgtgggccacctggctggcctttgtgctggagaggaggaggaagaaggcccggctgcagtgggccctgcaggcctaccagggccagctgctgcaggagggcgccacccggctgctgcgctttgctgcctccatgaaggccagccggcagcagctgcaggcccagcagcaggtgcaggccgcccacagcctgcacagagctgtgagaagatgtgccaccctgtggaagcagaaggtgctgggccggggcggcaagccccagcccctggccgccatcgcccccagcaggaaggtgacctttgagggccccctgctgaacagaattgctgctggagctggagatggcaccctggagaccaagaggccccaggccagccggcccctgggcgccctgggccgcctggccgctgaggagccccacgccctggagctgaacacagcccacagcgccaggaagcagccccggcggccccacttcctgctggagcccgcccagagccagaggccccagaagccccaggagcacggcctgggcatggcccagcctgctgcccccagcctgacccggcccttcctggccgaggcccccacagccctggtgccccacagccccctgcccggggccctgagcagcgcccctggccccaagcagcccccaacagccagcactggacctgagctgctgctgctgcccctgagcagcttcatgccctgtggggctgctgccccagcccgggtgtctgcccagagggccaccccccgggacaagccccctgtgcccagcagcctggcctctgtgcctgacccccacctgctgctgcccggggacttcagcgccacccgggccggccctggcctgagcacagctgcctggaccctgcggctgaacctgcggcgcagcagcagcaactactgcaccaccaggcctcccagcaggaccagcggccctgtgggcggcaagagagctgcctgtgccggcggctggagctag

SEQ ID NO: 22719 - DNA, 3729 bp, Artificial Sequence
  derived and/or modified sequence
atgaagaacctgctgaccgagaagtgcatcagcagccacaacttccaccaaaaagtgatcaagcagcggatggaaaagaaggttgactctaggtattttaaagacggggccgtaaagaaaccttacagcgctaaaaccctctctaataagaagagcagtgcaagctttggcatccgtagggaacttccaagtactagtcatctggttcagtatcgaggaactcatacatgcacaagacagggtcgcttgcgagagttgcggatccgatgcgtcgcccggaaatttttgtacctgtggattaggatgacatttgggagagtttttccctccaaggccagattttactacgagcagagactgcttcgcaaggtgttcgaagagtggaaagaggagtggtgggtcttccaacacgagtggaagctgtgcgtacgggccgattgccactacaggtattacctgtacaacctcatgttccaaacctggaagacctacgtgcgacagcaacaagaaatgcggaacaagtacattagggccgaagtgcacgacgcaaagcaaaagatgcggcaggcatggaagagctggctgatctacgtggtggtccgaaggaccaaactccagatgcaaacaaccgcactggaattcagacagcgcatcatcctgcgggtgtggtggagtacctggcggcagcggctcggtcaggtgagggtaagccgcgccctccatgcttcagctctgaagcaccgggccctctccttacaggtccaggcctggtcccagtggcgcgaacagttgctgtatgtgcaaaaggagaaacagaaggtcgttagcgccgtgaagcatcatcaacattggcaaaagcgacgctttctgaaagcgtggctggagtatctgcaggttagaagagtgaagcgtcagcaaaatgagatggctgagagatttcatcatgtgaccgtactgcagatttatttctgcgattggcaacaagcttgggaacgccgggaatcactatatgctcaccacgcccaagtcgagaagcttgctcgcaaaatggcgttgcgacgagctttcacacactggaaacactacatgctgctgtgcgcagaagaagcagcccagttcgaaatggctgaagagcatcacagacattcacagctgtacttttgctttcgcgcacttaaggataacgtgacacacgcccatcttcaacagattaggcgtaacttggctcaccagcagcatggggtgacgttgctacaccgcttctggaatctttggcggagtcagatagagcagaaaaaagaaagagagttgctccccttactccacgcagcttgggatcactacaggatagcacttctgtgcaaatgtattgagctctggctgcagtacacccagaagcggaggtataagcagcttctgcaagctagagctgacggccatttccagcagagagctctcccggcagccttccacacatggaatcgcctttggaggtggcgtcatcaggaaaacgtactgagtgctcgcgctaccaggttccaccgtgaaacgttggaaaagcaggtgttttctttatggagacagaagatgtttcagcaccgggagaataggttagctgaaagaatggctatcctgcacgcagaaagacagttactctatcgcagctggtttatgtggcaccaacaggccgctgctaggcatcaggaacaggaatggcagaccgtggcatgcgctcaccacaggcatggccggttgaagaaggcattttgcctgtggcgcgaaagtgcccagggtctgaggaccgagcgcacgggtagggttcgcgcagcagagttccatatggcccaactgctgagatgggcctggtctcaatggagagagtgccttgcgttacggggcgccgaacggcagaaactgatgcgcgcggacctgcatcaccagcactctgttttacatcgtgccttgcaggcctgggtgacctatcaaggtagggttcggagtattctaagggaggtggcagcacgggaaagtcaacataataggcagctgctgcgaggcgctctccgcaggtggaaggagaataccatggctagggtggacgaggccaaaaagacgttccaggcctccacccattatcgaagaactatttgctccaaagttctggtccagtggagggaagccgtgtcagtgcagatgtactatagacaacaggaggactgtgccatttgggaagcacagaaggtgcttgaccgtggatgcctccggacttggtttcagaggtggtgggactgtagccgacgttcagcccagcagagactccaattagaacgggcagttcagcaccatcaccgccagctgctgttggagggcttagccagatggaagacccatcacctgcaatgcgtgcggaagcgacttttgcaccgccagtccactcagctgctggcacagagattgagtcgtacctgcttccgccagtggagacagcagctcgcagcgagaagacaagaacagcgtgccaccgtacgggccctctggttctgggccttctctttgcaggccaaagtatgggcaacgtggctggcattcgtactggagcggcggcgaaagaaagctcgcttacagtgggcactccaggcctatcagggacagttgttgcaggagggcgctaccaggctgttgagatttgctgcatccatgaaagcatcccgtcagcagctgcaggctcaacaacaggtgcaagctgctcactccctgcacagagccgtgcggcgatgcgccaccctgtggaaacagaaagtcctgggcaggggggggaagccacagccccttgctgcgatcgccccttccagaaaggtcacctttgagggtccacttttgaatcggatcgcggccggtgccggcgatggaactttagaaacgaaaagacctcaagcgtcccgcccactgggggccctggggcggctcgccgccgaagagcctcacgcattagagctgaacactgctcactcagcgaggaagcagcctcggcgcccacacttcttgctcgaaccagcgcagagtcagagaccccagaaaccgcaagagcacggtttaggaatggcccagcctgcagccccctctctgaccagacccttcctagcagaggccccaactgccttagtgccgcactccccccttcctggcgctctgtcaagtgctcctggccctaagcagccacccactgcctccaccggccctgagctcctcctgctgccactttcctcctttatgccatgtggcgcagctgcacctgctcgcgtctctgcccagagggcaacaccaagagataaaccgcccgtgccatctagcctcgcctcagttcctgatcctcatttactgctgcctggagacttctcagctacaagggctggccccgggctgtctactgcagggagtcttgacttggaggctgagcttgaggagatccagcagcagctattgcactaccaaactactaaacagaacctctggagctgcaggagacaggcgtcatccctcaggaggtggctagagctgaacagggaagagcctggccctgaggatcaggaagttgagcagcaggtgcagaaagagctggagcaggtggagatgcagattcagcttcttgccgaggaactgcaagcacagcggcaaccaatcggcgcctgtgtagcccgcatacaggctctccgtcaggctttatgttag

SEQ ID NO: 22720 - DNA, 3096 bp, Artificial Sequence
  derived and/or modified sequence
atgaagaacctgctgaccgagaagtgcatcagcagccacaacttccaccagaaggttataaagcagcgcatggaaaagaaagtggactctcgcttctattatgagcagaggctgctccggaaagtatttgaagaatggaaggaggagtggtgggtattccagcacgagtggaaactctgcgtgagagcggattgccactaccgagtctggtggagcacctggaggcagaggctcgggcaggttagagttagccgggcgctccatgcctcagcattaaagcaccgagccttgtcccttcaggttcaagcatggagccagtggcgggaacagttactgtatgttcagaaggagaagcagaaggtcgtgtctgctgtgaagcatcatcaacactggcagaagagacgcttcctgaaggcctggctggagtacctgcaggtaaggagagtaaaaaggcagcagaacgaaatggcagaacggttccaccacgttactgtattgcagatctatttctgtgattggcaacaggcgtgggagcgcagggagtccctgtacgcccaccacgcccaggtggagaagctcgcacgcaagatggctttgcgcagagcgttcacccattggaagcactacatgttactgtgcgccgaagaggctgcccagtttgaaatggccgaggagcaccatcgccattcacagctctatttttgtttccgagcactgaaggataatgttacccatgcacatctccagcagataaggaggaacctcgcacaccagcagcacggtgtcactctcttgcacagattttggaatctgtggcgcagccagatcgaacaaaagaaggaaagagagctactcccactactgcacgccgcgtgggaccattaccggatcgctctcttgtgtaagtgtattgaactgtggctgcagtacacccagaagcgtcggtacaagcagctcctgcaggcccgcgctgacggccacttccagcagcgcgcgcttcccgccgcattccacacatggaaccgtctgtggcgttggcgccatcaggagaatgtgctgtcagctcgcgccacccgcttccaccgtgaaaccttggagaagcaggttttctcattatggaggcaaaagatgtttcagcatagagagaataggctggcggagagaatggccatcttgcatgcagagcgacagttgctgtataggagctggtttatgtggcaccagcaggcagcagcacgccatcaagaacaggaatggcagactgtcgcctgcgcacatcatcgacacgggcgcttaaaaaaggcattttgcctctggagagagagcgcccagggtctgcgaacagagcggaccggaagggtccgggcagcagagtttcacatggcacagcttctcaggtgggcctggagtcagtggagagagtgtctcgccctacgcggagctgaacggcagaagctcatgcgtgccgacctgcaccatcagcactccgtgctccatcgcgctctccaagcgtgggtgacctaccaaggcagggtgcgatcaattctgcgtgaagtggcagcaagggagtcccagcacaacagacaactcttgcgaggcgctctaagaagatggaaagaaaatacaatggcccgcgtcgatgaggcaaagaagacctttcaagctagcacacactacagaagaaccatctgtagcaaggtgctcgtgcagtggcgcgaggccgtgtctgttcagatgtactacaggcaacaagaggattgcgctatttgggaagctcagaaggtgctggaccgcggatgtctccgcacgtggttccagagatggtgggactgctccagacgatctgcccagcagaggctgcaattggaaagagccgtccagcaccaccatcgacaattgctgctggaggggctcgcaaggtggaaaacacatcacctgcaatgtgtgagaaagaggctgttgcatcggcagagcacccagttactggctcaacggctgtcccgaacctgcttccgtcaatggcggcagcaacttgcagcgcggcgccaggaacaacgtgctacggtgcgggccctgtggttctgggctttctctctacaggcaaaggtgtgggccacatggctggcattcgtactggaacgccgacgtaaaaaagcccgcctccagtgggccctgcaggcctatcaaggacagctccttcaggaaggcgctacacgcttgttgagatttgccgccagcatgaaggcctcgcgtcaacaactgcaggctcagcagcaggtccaggccgctcattctctgcaccgagccgtgaggagatgcgccacattgtggaagcagaaagtcctaggaagaggtggcaagcctcagcccttggcagccattgccccctctaggaaggtgaccttcgagggccctttgctcaataggattgcggcaggagctggggatggcacgctcgaaactaagcgtccacaggcttctagacccctcggcgccctcggcagactggctgctgaggaaccacacgctttggaattaaatacggcacatagcgcgcggaagcagccaagacgcccgcatttcctgttggagccggcccagagtcagcgcccccagaagccacaggagcatggattggggatggcccagcccgcggctccctcactcacccgccccttcctcgctgaggcacccaccgccctcgtcccccactcccccctaccaggcgccctcagctctgcaccaggtccaaagcagccccccactgcctcaaccgggcccgagctcctcctgcttcccctgagctcgttcatgccttgcggcgccgccgcacctgcacgcgtgagcgctcagagagccacgccccgagataaacccccagtgccgtcctcactagcaagcgtacccgatcctcatctcctgttgcccggagacttcagcgccacaagggctggccctggactgtccacagcagcatggaccctgcggctcaatctccgtcggagctcatctaactattgtacaacacgacccccgtcccgtactagcggccctgttggtggcaagagagctgcctgtgccggcggctggtcctag

SEQ ID NO: 22721 - DNA, 3729 bp, Artificial Sequence
  derived and/or modified sequence
atgaaaaatctgcttactgaaaagtgcatctctagtcataattttcaccagaaggtgataaagcagcgaatggaaaaaaaggtggactctagatacttcaaagatggagcggtgaaaaagccctactcagccaagacattatctaataagaaaagttcagcttctttcggcatcaggcgcgaactaccaagcacctcccatctggtgcagtataggggcacccacacctgcacacgccagggacgtctgagagaactcagaattaggtgtgtagctcggaaatttctgtacctctggatccggatgacattcggtagagtatttcccagcaaagcacgattctactatgagcagaggctattgaggaaggtctttgaggagtggaaagaggagtggtgggtgtttcagcatgagtggaaactatgtgtgcgagcagattgccactacaggtactacctttataacttgatgttccaaacctggaaaacctacgtgcggcagcagcaggaaatgcggaacaaatacatcagggcagaggtacatgacgctaagcagaaaatgcgccaggcttggaagtcctggctgatatacgtcgttgttcggaggaccaagctccagatgcagactaccgctttggagtttaggcagagaattattctccgggtttggtggtctacttggaggcagcgcctcggacaagtccgcgtgtccagagctttgcatgctagcgctctgaaacacagagctctctcattacaggtgcaagcctggtcccagtggcgcgagcagctcttgtatgtacagaaagagaaacaaaaggtggtgtccgctgtgaaacaccatcagcactggcaaaagaggaggtttctgaaggcgtggttggaatacttgcaggttagaagagtcaagcgccagcaaaatgagatggcggagcggtttcaccatgtgaccgtgctgcagatctatttttgcgactggcaacaggcgtgggagcgcagggaatcactgtatgctcatcacgctcaggtggaaaaactggctcggaagatggctctacgcagagcgtttacccactggaagcattacatgttactgtgcgccgaggaggccgctcagtttgaaatggccgaagaacaccatcgacatagtcagctctacttctgcttccgggctttgaaggacaacgtgacacacgcgcatttgcaacagattcgccgtaacctagcgcaccagcagcatggggttacgttgttacaccgtttttggaatttgtggagatctcagattgaacaaaagaaagagagagagctcctgcccctcctgcatgccgcatgggatcactacaggattgccctactttgtaaatgtattgagctctggctccagtacactcagaagaggaggtacaaacagctccttcaggctagagccgatgggcacttccagcagcgggctctgcctgcagcattccacacatggaatcgactgtggcgctggcggcatcaggaaaacgtcctctctgctcgcgctacgcggttccacagggagaccctcgaaaagcaggtcttttccctgtggcgccagaagatgtttcaacatcgggagaaccgtcttgccgagaggatggccatcttgcacgctgaacgccagctactgtataggagctggttcatgtggcaccagcaggccgcagccagacaccaggagcaggaatggcaaacagtcgcatgtgcccatcaccgccacggcagactgaaaaaagccttctgtctctggagggagagtgcccaggggcttcggaccgagagaaccgggcgagtccgagcagctgaatttcacatggcgcagctgctccgctgggcatggtctcagtggagggagtgtctggccctgcggggagccgagcgccaaaaattgatgagggctgacctgcatcaccaacactcggtgctgcaccgcgcacttcaggcttgggtgacctaccaggggcgtgtgagaagtattttaagggaagtggccgcacgagagtcacagcacaatagacagctactgaggggcgctctgaggaggtggaaggaaaacaccatggcccgtgtggacgaggcaaaaaagacattccaggcatcaacacactatagacggacaatttgctccaaggtgctagtgcagtggcgcgaagctgtgagcgtccagatgtactacagacagcaggaagattgcgcaatttgggaggctcagaaggtgctcgacagggggtgccttcggacctggtttcagcggtggtgggactgcagccgcagatcagctcaacaacgccttcagctagagagagccgtgcagcatcaccacaggcaattgctgctcgagggcctggccaggtggaaaacacatcacctgcagtgcgtacggaagcgcctgttacacaggcaaagtactcagttattagcacaaagactgagccggacctgtttcagacaatggcgccagcagctcgcagcacgtcggcaggagcagcgcgctaccgttagggccctatggttctgggctttcagccttcaagccaaagtgtgggcgacatggttagccttcgtgcttgaaaggcgaaggaaaaaggccaggcttcagtgggcactgcaggcatatcagggccaactcttgcaggagggggctacaagactgcttcgcttcgctgcaagtatgaaggcgagtagacagcagcttcaggctcaacagcaggtccaggccgctcacagcctccacagggctgtccggaggtgtgcgacattatggaagcagaaagttcttggccgaggtggaaagccgcaaccgcttgctgccattgcgccttccaggaaggtcactttcgaaggccctctgcttaaccgcatcgcagccggagccggagatggaacactcgaaacaaaaagacctcaggcaagccgtcccctcggcgctctcggaaggctggccgcagaagaacctcatgctcttgagctgaacaccgcccatagcgccagaaagcagcctcgcagaccccactttttgcttgagccagcccagagccagagaccccaaaagccgcaggaacacgggttgggcatggctcagccagcagccccaagcctgactagacctttccttgccgaggctcccaccgcactggtcccgcactccccattacctggtgccctcagttctgcaccgggtcctaagcagccgccaacagccagcactgggcctgaactccttttgctccctttgtcctctttcatgccctgtggagccgcagcccctgctagagtctctgcccagcgcgcaactcccagagataaacccccagtgcccagctccctcgcttcagttcctgatccacacctgttgctaccaggagacttctcggctacaagggccggtccagggctctcaactgccggatcacttgacctggaagctgaattggaagagatccagcagcaattactccattaccagaccaccaagcagaacctttggtcatgtcgaagacaagcttctagcctccgtcggtggcttgaattaaacagagaggaaccgggacccgaggaccaagaggttgaacagcaagtgcaaaaagaactagagcaggttgaaatgcaaatccagttattagccgaagagcttcaggcccagcggcagcccatcggggcatgtgtggcgagaatccaggctctgcgccaggccctgtgctag

SEQ ID NO: 22722 - DNA, 3096 bp, Artificial Sequence
  derived and/or modified sequence
atgaagaaccttttgacggagaagtgcatttcttctcacaacttccatcagaaggtaataaagcagaggatggagaaaaaagtggattctaggttctactatgagcagaggctactgcgtaaagtgtttgaagagtggaaggaggagtggtgggtgttccagcacgaatggaagttatgcgttcgagccgactgccactatcgggtttggtggtctacctggcgccaaagactcggtcaggtacgcgtgagcagagcactccatgctagcgcactgaaacatcgagcgcttagcctccaggtgcaggcctggagtcagtggagggaacagctgctgtatgtacagaaagagaagcagaaggtggtgtctgctgttaaacatcatcaacattggcagaagcgtagattcctgaaagcgtggctcgaatacctccaggtccggagggtcaaacgccagcagaatgaaatggctgagcgcttccatcacgtcactgtgctccagatttacttttgtgattggcagcaggcatgggagcgtcgtgagtcgttatatgcccatcacgcccaagtcgagaaactagctagaaaaatggccctgcgcagggcttttacacactggaagcactacatgttgttgtgtgctgaggaagccgcacagtttgagatggcagaagaacaccatcggcactcccaattatacttctgcttcagggcacttaaagacaatgtcacccacgctcacctccagcaaatcaggaggaacctagcccatcagcagcatggagtgaccttattacacaggttttggaatctgtggaggtcacagattgaacagaaaaaagagcgcgaactgctgccattgctccatgcggcttgggaccactaccgcattgcactgctttgtaaatgcattgagctttggttgcagtacacacaaaagcgaagatataagcaactgctacaagcgagagctgacggtcacttccaacagcgagctctgcctgccgcattccatacatggaatcggctctggagatggcgacaccaggaaaacgtgctgagtgcgagggctaccagatttcaccgcgagacactggagaagcaggtattctcgctgtggcgccagaagatgtttcagcaccgagaaaatagactcgcagaacgtatggccattcttcacgcagagcggcagctgctctacaggtcttggtttatgtggcaccagcaggcagctgcccgacatcaggaacaagagtggcaaactgtcgcttgtgcacatcatagacacggtaggcttaaaaaagctttttgcctgtggcgggagtccgcgcagggtttgagaactgagcggaccgggagggtgagagccgctgagtttcacatggcgcagctactcaggtgggcttggtcccagtggcgcgagtgcctggctctgaggggggcagaaaggcagaagctaatgcgagccgacctccatcaccagcactccgtgctccatcgggctctgcaggcgtgggtcacgtaccagggcagggttagaagcattctgcgcgaggtggcagcccgagagagccaacataaccgccagctgctcagaggagctcttcggcgttggaaggaaaacaccatggcaagggtggacgaagcaaagaaaaccttccaagcgagcactcactatcgaagaaccatatgcagcaaggtgttggtacagtggcgcgaggcggtgtctgttcaaatgtattataggcagcaagaggattgcgctatttgggaagcccagaaggttctggatcgcggatgtttaaggacttggtttcaacgctggtgggattgtagtagacggtcagctcagcagcggctccagttggagagggccgtgcagcatcaccaccggcaactgctactggagggactggctcgctggaagacgcaccatttacagtgcgtcaggaagcggctcttgcaccggcagtctacccagcttcttgctcaaagacttagcaggacctgttttcgccagtggaggcagcaactagcggcaaggagacaggagcagcgggcaacggttagagccctgtggttctgggccttcagcctccaggctaaggtttgggcaacatggttggcattcgtgctggagagaaggcgcaagaaagccaggcttcaatgggctcttcaagcttatcagggccagttacttcaagaaggggctacaaggctgctccgcttcgcagccagcatgaaggcctctaggcagcagttgcaggcccagcagcaggtgcaagccgctcactccttgcatagagctgtccgaaggtgtgctaccttgtggaagcagaaagtccttgggaggggcggaaaaccccagccacttgccgcaatcgccccaagtcggaaggtaaccttcgagggtccgctgttgaacaggatcgcggctggcgctggagacgggaccctggaaacaaagagaccgcaggcaagcagaccacttggggcactgggacgactagcagccgaagagccccacgcattggaattaaatactgctcacagtgcaagaaaacagccaaggagaccgcactttctgctggagcctgcacaatcacaacgacctcagaagccccaagagcatgggttgggaatggcacagcctgcagcgccaagtctgacaaggccttttcttgctgaagcacccacagctttagtccctcatagccctttacctggagccctgtcaagcgcaccaggtcccaagcagccccctaccgcgtcaaccggtcccgagctcctcctgcttccactttctagttttatgccatgcggcgctgcagcccctgccagggtgagtgcacagagagccacccctagagataagccacccgtgccatcctccctcgcatccgtgcccgacccacacctgctgttaccaggcgacttctcagccacgcgcgcaggaccaggattgtccaccgcagcttggaccctcagactgaacctgagacgcagtagcagcaattattgcacaactcgcccaccctctcgaacgtcggggcctgtgggcggaaagagggcagcctgcgcaggaggctggtcctag

SEQ ID NO: 22723 - DNA, 4002 bp, Artificial Sequence
  derived and/or modified sequence
aagaagcaggtcccggatcgccgtataccgccgggttttctcccaacgtcaggcccgatggctcggcttccccagttagaaggggaagataaaagactttgattcatgaagaatctgctcactgagaagtgtatatcaagccacaatttccatcaaaaagtgattaagcagagaatggagaagaaggttgattccaggtattttaaggatggtgcagttaagaaaccttattctgcaaagacactgtccaacaagaagtcttctgcatcctttgggatccggagggagttacctagtaccagtcatctagtgcagtatcgtggcacacatacttgtacccgacagggccggttaagagaactgcgcatcagatgcgtggccagaaagttcttatatttatggattcgaatgacttttggaagagtatttccctctaaagccagattttactatgagcagcgattactacggaaggtcttcgaagaatggaaagaggagtggtgggttttccagcacgagtggaaactctgtgttcgagctgactgtcactacaggtattacctgtacaacctgatgttccagacgtggaagacctatgtgcgtcagcagcaggagatgaggaacaagtacattagagccgaggttcatgatgcaaagcaaaagatgcgacaggcctggaagtcctggttgatctacgtggttgttcgtaggaccaaacttcagatgcagactacagctctggagtttaggcaacggattatcttacgggtgtggtggagcacgtggaggcagcgactaggacaggtccgtgtgagccgtgccctccatgcctctgctttgaagcacagggccctgagcctccaggtgcaggcttggtcacagtggcgggaacagctcctgtatgtccagaaggagaaacaaaaggttgtctctgcagtgaaacatcatcagcactggcaaaaacggagatttctaaaggcctggcttgaatacctgcaagtccgcagagtgaagagacagcagaatgagatggctgagcgattccatcatgtcactgtgctccagatatacttctgtgactggcagcaggcctgggagcggagggagagcttgtacgctcaccatgcccaggtggagaaactggccaggaagatggccctgcggcgcgcctttactcactggaaacactacatgctgctgtgtgcagaagaagctgcccagtttgagatggcagaagagcaccacaggcacagccagctgtatttttgctttagagccctaaaagacaatgtgacccacgctcatctccagcaaataagaaggaatcttgctcaccagcagcatggtgtcacgctgctgcacaggttctggaacctctggcggtctcagattgagcagaaaaaggaaagagagctgctccccttactgcatgctgcctgggaccactacagaatagcactgctgtgcaaatgtatcgaattgtggctacagtatactcagaagaggcggtacaagcagctgctacaggccagagcggatggtcatttccagcagagagccctgcctgctgccttccacacatggaacagactctggcgatggcgccaccaggaaaatgtcctcagtgcaagagcaacacgtttccacagggagacattagagaagcaagtattttctctctggaggcagaagatgtttcagcatcgagaaaaccgcctggcagagagaatggccatccttcacgcagagcgacagcttctgtataggtcttggttcatgtggcaccagcaggcagcagcacgtcaccaggagcaggagtggcaaacagtggcctgtgcccaccaccgccacgggcggctcaagaaagctttctgcctctggagggaaagtgcccaagggctcagaacagagaggacgggcagggtgcgggcagcagaattccacatggcccagctcctgcgttgggcctggagccagtggagggagtgcctggccctgcggggagcggagcggcagaagctgatgcgagcagacctgcaccaccagcacagcgtgctgcacagggcgctgcaggcatgggtgacttaccagggcagggtgcgaagcatcctccgggaggtggcagccagggagagccagcacaacaggcagctgctgcgcggggcattacgtcgctggaaagagaacaccatggcccgagtggatgaagccaaaaaaacctttcaagcaagtactcattacagaaggaccatatgttccaaggtcctggtccagtggcgggaagctgtgtcagtgcagatgtattaccgacagcaggaggactgtgccatctgggaggcccagaaggtgctggacaggggctgtctgcggacctggtttcagcgctggtgggactgcagccggaggtcagcccagcagagactgcagctggagagggcagtgcaacaccaccaccggcagctgctgctggaggggctggcccggtggaagacgcaccatctgcagtgtgtcaggaagaggctcctgcacaggcagagcacccaactgctggcacagagactcagccggacctgcttccgccagtggagacaacagctggcagccaggaggcaggagcagcgggcgacagtgcgggccctgtggttctgggccttctcgctgcaggcaaaggtgtgggccacgtggctggcctttgtactggaaaggaggagaaagaaggcgcggctgcagtgggcgctccaggcctaccaggggcagctcctccaggagggtgccacgcggctcctgcgctttgcagccagcatgaaggcctcccggcagcagctgcaggcccagcagcaggtccaggcggctcacagtctccatcgtgccgtccgccgctgtgccacgctctggaaacagaaagtgctgggccggggcgggaagcctcagcccctggcagccatcgcacccagcaggaaagtgacgtttgagggtccccttctcaaccgcattgctgctggggctggggatggcacccttgagaccaagaggccacaggcttctcggcctctgggagctctgggccgcctggctgctgaggagccccacgccctggagctcaacactgcccactcagcgaggaagcagccgcgacgcccacacttcctgttggagcctgcgcagagccagaggcctcagaagccacaggaacatggcctaggcatggctcagccagcagccccctccctgacgcggcccttcctggcagaggccccgacagcactggtcccacacagccccctgcctggggccctgtcaagcgcccctggcccgaagcagcccccgacggcaagcacaggcccggagctgctgctgctgcctctttcctccttcatgccctgcggggcggctgcaccagccagggtgtcagcacagcgggctactcctagggataagcccccggtcccctcatccctggccagtgtccctgacccccatctactccttcctggggacttctcagccaccagggctgggcctggactttcaactgcaggcagcctggaccttgaggctgaacttgaggagatccagcagcaactactgcactaccagaccaccaagcagaacctctggtcctgtcggcggcaagcgagcagcctgcgcaggtggctggagctgaacagagaggagccggggcctgaggaccaggaagtagagcagcaggtgcagaaagagctggaacaggtggaaatgcagatccagctgctggcagaggagctccaggctcagcgccagcccattggcgcctgcgttgcccgcatccaggccctgcggcaggccctgtgctagcgtgttcgcaccaggaacgcaggtgctgggctgtcggggaggcctcaggccacctccaggaacagaacacagttttaagtttgattttttttatttcaaaatgctttgcaattaaatgaattactgttcagaagtctcccacttttcatacaaaaatactgtgctact

SEQ ID NO: 22724 - DNA, 3788 bp, Artificial Sequence
  derived and/or modified sequence
agcaagctgagctcagagcgaagctggcgagccaaggagataaagaaccctcggtggggatgcccagagggtgcatgctccacgcccctcgaaaccgattctcattgctgctgctgcaaagcaacccgaagtgcgccacctacccgactgaggctgcgcaagccccggggtctgggcggggtggtcctcgtgcgcgccgcgtcgccgtggagacgagggcgggcccgcgcgagactggcgtctagaggcgcgcgaagcgctgaggcgggcgtggaccgcgcgggagttaagaagcaggtcccggatcgccgtataccgccgggttttctcccaacgtcaggcccgatggctcggcttccccagttagaaggggaagataaaagactttgattcatgaagaatctgctcactgagaagtgtatatcaagccacaatttccatcaaaaagtgattaagcagagaatggagaagaaggttgattccagattttactatgagcagcgattactacggaaggtcttcgaagaatggaaagaggagtggtgggttttccagcacgagtggaaactctgtgttcgagctgactgtcactacagggtgtggtggagcacgtggaggcagcgactaggacaggtccgtgtgagccgtgccctccatgcctctgctttgaagcacagggccctgagcctccaggtgcaggcttggtcacagtggcgggaacagctcctgtatgtccagaaggagaaacaaaaggttgtctctgcagtgaaacatcatcagcactggcaaaaacggagatttctaaaggcctggcttgaatacctgcaagtccgcagagtgaagagacagcagaatgagatggctgagcgattccatcatgtcactgtgctccagatatacttctgtgactggcagcaggcctgggagcggagggagagcttgtacgctcaccatgcccaggtggagaaactggccaggaagatggccctgcggcgcgcctttactcactggaaacactacatgctgctgtgtgcagaagaagctgcccagtttgagatggcagaagagcaccacaggcacagccagctgtatttttgctttagagccctaaaagacaatgtgacccacgctcatctccagcaaataagaaggaatcttgctcaccagcagcatggtgtcacgctgctgcacaggttctggaacctctggcggtctcagattgagcagaaaaaggaaagagagctgctccccttactgcatgctgcctgggaccactacagaatagcactgctgtgcaaatgtatcgaattgtggctacagtatactcagaagaggcggtacaagcagctgctacaggccagagcggatggtcatttccagcagagagccctgcctgctgccttccacacatggaacagactctggcgatggcgccaccaggaaaatgtcctcagtgcaagagcaacacgtttccacagggagacattagagaagcaagtattttctctctggaggcagaagatgtttcagcatcgagaaaaccgcctggcagagagaatggccatccttcacgcagagcgacagcttctgtataggtcttggttcatgtggcaccagcaggcagcagcacgtcaccaggagcaggagtggcaaacagtggcctgtgcccaccaccgccacgggcggctcaagaaagctttctgcctctggagggaaagtgcccaagggctcagaacagagaggacgggcagggtgcgggcagcagaattccacatggcccagctcctgcgttgggcctggagccagtggagggagtgcctggccctgcggggagcggagcggcagaagctgatgcgagcagacctgcaccaccagcacagcgtgctgcacagggcgctgcaggcatgggtgacttaccagggcagggtgcgaagcatcctccgggaggtggcagccagggagagccagcacaacaggcagctgctgcgcggggcattacgtcgctggaaagagaacaccatggcccgagtggatgaagccaaaaaaacctttcaagcaagtactcattacagaaggaccatatgttccaaggtcctggtccagtggcgggaagctgtgtcagtgcagatgtattaccgacagcaggaggactgtgccatctgggaggcccagaaggtgctggacaggggctgtctgcggacctggtttcagcgctggtgggactgcagccggaggtcagcccagcagagactgcagctggagagggcagtgcaacaccaccaccggcagctgctgctggaggggctggcccggtggaagacgcaccatctgcagtgtgtcaggaagaggctcctgcacaggcagagcacccaactgctggcacagagactcagccggacctgcttccgccagtggagacaacagctggcagccaggaggcaggagcagcgggcgacagtgcgggccctgtggttctgggccttctcgctgcaggcaaaggtgtgggccacgtggctggcctttgtactggaaaggaggagaaagaaggcgcggctgcagtgggcgctccaggcctaccaggggcagctcctccaggagggtgccacgcggctcctgcgctttgcagccagcatgaaggcctcccggcagcagctgcaggcccagcagcaggtccaggcggctcacagtctccatcgtgccgtccgccgctgtgccacgctctggaaacagaaagtgctgggccggggcgggaagcctcagcccctggcagccatcgcacccagcaggaaagtgacgtttgagggtccccttctcaaccgcattgctgctggggctggggatggcacccttgagaccaagaggccacaggcttctcggcctctgggagctctgggccgcctggctgctgaggagccccacgccctggagctcaacactgcccactcagcgaggaagcagccgcgacgcccacacttcctgttggagcctgcgcagagccagaggcctcagaagccacaggaacatggcctaggcatggctcagccagcagccccctccctgacgcggcccttcctggcagaggccccgacagcactggtcccacacagccccctgcctggggccctgtcaagcgcccctggcccgaagcagcccccgacggcaagcacaggcccggagctgctgctgctgcctctttcctccttcatgccctgcggggcggctgcaccagccagggtgtcagcacagcgggctactcctagggataagcccccggtcccctcatccctggccagtgtccctgacccccatctactccttcctggggacttctcagccaccagggctgggcctggactttcaactgcagcctggaccttgaggctgaacttgaggagatccagcagcaactactgcactaccagaccaccaagcagaacctctggtcctgtcggcggcaagcgagcagcctgcgcaggtggctggagctgaacagagaggagccggggcctgaggaccaggaagtagagcagcaggtgcagaaagagctggaacaggtggaaatgcagatccagctgctggcagaggagctccaggctcagcgccagcccattggcgcctgcgttgcccgcatccaggccctgcggcaggccctgtgctagcgtgttcgcaccaggaacgcaggtgctgggctgtcggggaggcctcaggccacctccaggaacagaacacagttttaagtttgattttttttatttcaaaatgctttgcaattaaatgaattactgttc

SEQ ID NO: 22725 - DNA, 3729 bp, Artificial Sequence
  derived and/or modified sequence
atgaagaacctgctgaccgagaagtgcatcagcagccacaacttccaccagaaggtgatcaagcagagaatggagaagaaggtggacagcagatacttcaaggacggcgccgtgaagaagccctacagcgccaagaccctgagcaacaagaagagcagcgccagcttcggcatcagaagagagctgcccagcaccagccacctggtgcagtacagaggcacccacacctgcaccagacagggcagactgagagagctgagaatcagatgcgtggccagaaagttcctgtacctgtggatcagaatgaccttcggcagagtgttccccagcaaggccagattctactacgagcagagactgctgagaaaggtgttcgaggagtggaaggaggagtggtgggtgttccagcacgagtggaagctgtgcgtgagagccgactgccactacagatactacctgtacaacctgatgttccagacctggaagacctacgtgagacagcagcaggagatgagaaacaagtacatcagagccgaggtgcacgacgccaagcagaagatgagacaggcctggaagagctggctgatctacgtggtggtgagaagaaccaagctgcagatgcagaccaccgccctggagttcagacagagaatcatcctgagagtgtggtggagcacctggagacagagactgggccaggtgagagtgagcagagccctgcacgccagcgccctgaagcacagagccctgagcctgcaggtgcaggcctggagccagtggagagagcagctgctgtacgtgcagaaggagaagcagaaggtggtgagcgccgtgaagcaccaccagcactggcagaagagaagattcctgaaggcctggctggagtacctgcaggtgagaagagtgaagagacagcagaacgagatggccgagagattccaccacgtgaccgtgctgcagatctacttctgcgactggcagcaggcctgggagagaagagagagcctgtacgcccaccacgcccaggtggagaagctggccagaaagatggccctgagaagagccttcacccactggaagcactacatgctgctgtgcgccgaggaggccgcccagttcgagatggccgaggagcaccacagacacagccagctgtacttctgcttcagagccctgaaggacaacgtgacccacgcccacctgcagcagatcagaagaaacctggcccaccagcagcacggcgtgaccctgctgcacagattctggaacctgtggagaagccagatcgagcagaagaaggagagagagctgctgcccctgctgcacgccgcctgggaccactacagaatcgccctgctgtgcaagtgcatcgagctgtggctgcagtacacccagaagagaagatacaagcagctgctgcaggccagagccgacggccacttccagcagagagccctgcccgccgccttccacacctggaacagactgtggagatggagacaccaggagaacgtgctgagcgccagagccaccagattccacagagagaccctggagaagcaggtgttcagcctgtggagacagaagatgttccagcacagagagaacagactggccgagagaatggccatcctgcacgccgagagacagctgctgtacagaagctggttcatgtggcaccagcaggccgccgccagacaccaggagcaggagtggcagaccgtggcctgcgcccaccacagacacggcagactgaagaaggccttctgcctgtggagagagagcgcccagggcctgagaaccgagagaaccggcagagtgagagccgccgagttccacatggcccagctgctgagatgggcctggagccagtggagagagtgcctggccctgagaggcgccgagagacagaagctgatgagagccgacctgcaccaccagcacagcgtgctgcacagagccctgcaggcctgggtgacctaccagggcagagtgagaagcatcctgagagaggtggccgccagagagagccagcacaacagacagctgctgagaggcgccctgagaagatggaaggagaacaccatggccagagtggacgaggccaagaagaccttccaggccagcacccactacagaagaaccatctgcagcaaggtgctggtgcagtggagagaggccgtgagcgtgcagatgtactacagacagcaggaggactgcgccatctgggaggcccagaaggtgctggacagaggctgcctgagaacctggttccagagatggtgggactgcagcagaagaagcgcccagcagagactgcagctggagagagccgtgcagcaccaccacagacagctgctgctggagggcctggccagatggaagacccaccacctgcagtgcgtgagaaagagactgctgcacagacagagcacccagctgctggcccagagactgagcagaacctgcttcagacagtggagacagcagctggccgccagaagacaggagcagagagccaccgtgagagccctgtggttctgggccttcagcctgcaggccaaggtgtgggccacctggctggccttcgtgctggagagaagaagaaagaaggccagactgcagtgggccctgcaggcctaccagggccagctgctgcaggagggcgccaccagactgctgagattcgccgccagcatgaaggccagcagacagcagctgcaggcccagcagcaggtgcaggccgcccacagcctgcacagagccgtgagaagatgcgccaccctgtggaagcagaaggtgctgggcagaggcggcaagccccagcccctggccgccatcgcccccagcagaaaggtgaccttcgagggccccctgctgaacagaatcgccgccggcgccggcgacggcaccctggagaccaagagaccccaggccagcagacccctgggcgccctgggcagactggccgccgaggagccccacgccctggagctgaacaccgcccacagcgccagaaagcagcccagaagaccccacttcctgctggagcccgcccagagccagagaccccagaagccccaggagcacggcctgggcatggcccagcccgccgcccccagcctgaccagacccttcctggccgaggcccccaccgccctggtgccccacagccccctgcccggcgccctgagcagcgcccccggccccaagcagccccccaccgccagcaccggccccgagctgctgctgctgcccctgagcagcttcatgccctgcggcgccgccgcccccgccagagtgagcgcccagagagccacccccagagacaagccccccgtgcccagcagcctggccagcgtgcccgacccccacctgctgctgcccggcgacttcagcgccaccagagccggccccggcctgagcaccgccggcagcctggacctggaggccgagctggaggagatccagcagcagctgctgcactaccagaccaccaagcagaacctgtggagctgcagaagacaggccagcagcctgagaagatggctggagctgaacagagaggagcccggccccgaggaccaggaggtggagcagcaggtgcagaaggagctggagcaggtggagatgcagatccagctgctggccgaggagctgcaggcccagagacagcccatcggcgcctgcgtggccagaatccaggccctgagacaggccctgtgctag

SEQ ID NO: 22726 - DNA, 3096 bp, Artificial Sequence
  derived and/or modified sequence
atgaagaacctgctgaccgagaagtgcatcagcagccacaacttccaccagaaggtgatcaagcagagaatggagaagaaggtggacagcagattctactacgagcagagactgctgagaaaggtgttcgaggagtggaaggaggagtggtgggtgttccagcacgagtggaagctgtgcgtgagagccgactgccactacagagtgtggtggagcacctggagacagagactgggccaggtgagagtgagcagagccctgcacgccagcgccctgaagcacagagccctgagcctgcaggtgcaggcctggagccagtggagagagcagctgctgtacgtgcagaaggagaagcagaaggtggtgagcgccgtgaagcaccaccagcactggcagaagagaagattcctgaaggcctggctggagtacctgcaggtgagaagagtgaagagacagcagaacgagatggccgagagattccaccacgtgaccgtgctgcagatctacttctgcgactggcagcaggcctgggagagaagagagagcctgtacgcccaccacgcccaggtggagaagctggccagaaagatggccctgagaagagccttcacccactggaagcactacatgctgctgtgcgccgaggaggccgcccagttcgagatggccgaggagcaccacagacacagccagctgtacttctgcttcagagccctgaaggacaacgtgacccacgcccacctgcagcagatcagaagaaacctggcccaccagcagcacggcgtgaccctgctgcacagattctggaacctgtggagaagccagatcgagcagaagaaggagagagagctgctgcccctgctgcacgccgcctgggaccactacagaatcgccctgctgtgcaagtgcatcgagctgtggctgcagtacacccagaagagaagatacaagcagctgctgcaggccagagccgacggccacttccagcagagagccctgcccgccgccttccacacctggaacagactgtggagatggagacaccaggagaacgtgctgagcgccagagccaccagattccacagagagaccctggagaagcaggtgttcagcctgtggagacagaagatgttccagcacagagagaacagactggccgagagaatggccatcctgcacgccgagagacagctgctgtacagaagctggttcatgtggcaccagcaggccgccgccagacaccaggagcaggagtggcagaccgtggcctgcgcccaccacagacacggcagactgaagaaggccttctgcctgtggagagagagcgcccagggcctgagaaccgagagaaccggcagagtgagagccgccgagttccacatggcccagctgctgagatgggcctggagccagtggagagagtgcctggccctgagaggcgccgagagacagaagctgatgagagccgacctgcaccaccagcacagcgtgctgcacagagccctgcaggcctgggtgacctaccagggcagagtgagaagcatcctgagagaggtggccgccagagagagccagcacaacagacagctgctgagaggcgccctgagaagatggaaggagaacaccatggccagagtggacgaggccaagaagaccttccaggccagcacccactacagaagaaccatctgcagcaaggtgctggtgcagtggagagaggccgtgagcgtgcagatgtactacagacagcaggaggactgcgccatctgggaggcccagaaggtgctggacagaggctgcctgagaacctggttccagagatggtgggactgcagcagaagaagcgcccagcagagactgcagctggagagagccgtgcagcaccaccacagacagctgctgctggagggcctggccagatggaagacccaccacctgcagtgcgtgagaaagagactgctgcacagacagagcacccagctgctggcccagagactgagcagaacctgcttcagacagtggagacagcagctggccgccagaagacaggagcagagagccaccgtgagagccctgtggttctgggccttcagcctgcaggccaaggtgtgggccacctggctggccttcgtgctggagagaagaagaaagaaggccagactgcagtgggccctgcaggcctaccagggccagctgctgcaggagggcgccaccagactgctgagattcgccgccagcatgaaggccagcagacagcagctgcaggcccagcagcaggtgcaggccgcccacagcctgcacagagccgtgagaagatgcgccaccctgtggaagcagaaggtgctgggcagaggcggcaagccccagcccctggccgccatcgcccccagcagaaaggtgaccttcgagggccccctgctgaacagaatcgccgccggcgccggcgacggcaccctggagaccaagagaccccaggccagcagacccctgggcgccctgggcagactggccgccgaggagccccacgccctggagctgaacaccgcccacagcgccagaaagcagcccagaagaccccacttcctgctggagcccgcccagagccagagaccccagaagccccaggagcacggcctgggcatggcccagcccgccgcccccagcctgaccagacccttcctggccgaggcccccaccgccctggtgccccacagccccctgcccggcgccctgagcagcgcccccggccccaagcagccccccaccgccagcaccggccccgagctgctgctgctgcccctgagcagcttcatgccctgcggcgccgccgcccccgccagagtgagcgcccagagagccacccccagagacaagccccccgtgcccagcagcctggccagcgtgcccgacccccacctgctgctgcccggcgacttcagcgccaccagagccggccccggcctgagcaccgccgcctggaccctgagactgaacctgagaagaagcagcagcaactactgcaccaccagaccccccagcagaaccagcggccccgtgggcggcaagagagccgcctgcgccggcggctggagctag

SEQ ID NO: 22727 - protein, 376 aa, Artificial Sequence
  derived and/or modified sequence
MMMMALSKTFGQKPVKFQLEDDGEFYMIGSEVGNYLRMFRGSLYKRYPSLWRRLATVEERKKIVASSHDHGYTTLATSVTLLKASEVEEILDGNDEKYKAVSISTEPPTYLREQKAKRNSQWVPTLPNSSHHLDAVPCSTTINRNRMGRDKKRTFPLCFDDHDPAVIHENASQPEVLVPIRLDMEIDGQKLRDAFTWNMNEKLMTPEMFSEILCDDLDLNPLTFVPAIASAIRQQIESYPTDSILEDQSDQRVIIKLNIHVGNISLVDQFEWDMSEKENSPEKFALKLCSELGLGGEFVTTIAYSIRGQLSWHQKTYAFSENPLPTVEIAIRNTGDADQWCPLLETLTDAEMEKKIRDQDRNTRRMRRLANTAPAW

SEQ ID NO: 22728 - DNA, 1131 bp, Artificial Sequence
  derived and/or modified sequence
atgatgatgatggccctgagcaagaccttcggccagaagcccgtgaagttccagctggaggacgacggcgagttctacatgatcggcagcgaggtgggcaactacctgagaatgttcagaggcagcctgtacaagagataccccagcctgtggagaagactggccaccgtggaggagagaaagaagatcgtggccagcagccacgaccacggctacaccaccctggccaccagcgtgaccctgctgaaggccagcgaggtggaggagatcctggacggcaacgacgagaagtacaaggccgtgagcatcagcaccgagccccccacctacctgagagagcagaaggccaagagaaacagccagtgggtgcccaccctgcccaacagcagccaccacctggacgccgtgccctgcagcaccaccatcaacagaaacagaatgggcagagacaagaagagaaccttccccctgtgcttcgacgaccacgaccccgccgtgatccacgagaacgccagccagcccgaggtgctggtgcccatcagactggacatggagatcgacggccagaagctgagagacgccttcacctggaacatgaacgagaagctgatgacccccgagatgttcagcgagatcctgtgcgacgacctggacctgaaccccctgaccttcgtgcccgccatcgccagcgccatcagacagcagatcgagagctaccccaccgacagcatcctggaggaccagagcgaccagagagtgatcatcaagctgaacatccacgtgggcaacatcagcctggtggaccagttcgagtgggacatgagcgagaaggagaacagccccgagaagttcgccctgaagctgtgcagcgagctgggcctgggcggcgagttcgtgaccaccatcgcctacagcatcagaggccagctgagctggcaccagaagacctacgccttcagcgagaaccccctgcccaccgtggagatcgccatcagaaacaccggcgacgccgaccagtggtgccccctgctggagaccctgaccgacgccgagatggagaagaagatcagagaccaggacagaaacaccagaagaatgagaagactggccaacaccgcccccgcctggtag

SEQ ID NO: 22729 - DNA, 1131 bp, Artificial Sequence
  derived and/or modified sequence
atgatgatgatggctctgagcaaaactttcgggcaaaaacctgtgaaatttcagctggaggatgacggggagttctatatgatcggaagtgaggtgggaaattatctgaggatgttcaggggctcactgtacaaaaggtatccctcactctggcggaggcttgcaacagtggaagaacgcaagaaaattgttgcctcatctcatgaccacggctacaccactctggcaacaagtgtgacattgctcaaggcgagcgaggtcgaagaaatcctcgatggcaatgacgagaagtataaggccgtgtccatttctaccgagccccccacataccttcgagagcagaaggccaagaggaattcacagtgggtcccaacactgcccaactccagtcatcatctggacgccgtgccttgtagcacaacgatcaacaggaacagaatggggagggacaaaaagaggacctttccgctctgttttgatgatcacgatcccgccgtcattcacgaaaatgcctcccaaccagaagtcctggtcccgatcaggctggatatggagatcgacggacagaagctgcgggacgcatttacctggaacatgaatgagaaattgatgactccagagatgttcagtgagatcctttgcgacgacttggatctgaacccactgactttcgttccagccatcgcttcagcaatccgccagcagattgagtcataccccacggattccatactggaggatcaatcagaccagagagtaatcatcaagttaaacattcacgtcggaaatattagtctggtggatcagttcgagtgggatatgtctgagaaggaaaatagccctgagaagttcgccctaaaactttgtagcgagcttggacttgggggagaattcgtcacgacaatcgcctactcgatcaggggccagctgtcatggcaccagaagacatacgctttcagcgagaaccctctccctaccgtggagattgcgatcaggaatacaggtgatgctgaccagtggtgtccactgctggaaaccctcacagatgcggagatggaaaagaagatcagagaccaggatagaaacacaagacggatgagacggctagctaataccgcgcccgcatggtag

SEQ ID NO: 22730 - DNA, 1131 bp, Artificial Sequence
  derived and/or modified sequence
atgatgatgatggccctgagcaagaccttcggccagaagcctgtgaagttccagctggaggatgatggagagttctacatgattggcagcgaggtgggcaactacctgaggatgttccggggcagcctgtacaagcgctaccccagcctgtggaggcggctggccaccgtggaggagaggaagaagatcgtggccagcagccatgaccacggctacaccaccctggccacctctgtgaccctgctgaaggccagcgaggtggaggagatcctggatggaaatgatgagaagtacaaggctgtgtccatcagcacagagccccccacctacctgcgggagcagaaggccaagaggaacagccagtgggtgcccaccctgcccaacagcagccaccacctggatgctgtgccctgcagcaccaccatcaacagaaacaggatgggccgggacaagaagaggaccttccccctgtgctttgatgaccatgaccctgctgtgattcatgaaaatgccagccagcctgaggtgctggtgcccatccggctggacatggagattgatggccagaagctgagagatgccttcacctggaacatgaatgagaagctgatgaccccagagatgttcagcgagatcctgtgtgatgacctggacctgaaccccctgacctttgtgcctgccatcgccagcgccatccggcagcagatcgagagctaccccacagacagcatcctggaggaccagagcgaccagagggtcatcatcaagctgaacatccacgtgggcaacatcagcctggtggaccagtttgagtgggacatgtctgagaaggagaacagccctgagaagtttgccctgaagctgtgcagcgagctgggcctgggcggggagtttgtgaccaccatcgcctacagcatccggggccagctgtcctggcaccagaagacctacgccttcagcgagaaccccctgcccaccgtggagatcgccatccggaacacaggagatgctgaccagtggtgccccctgctggagaccctgacagatgctgagatggagaagaagatccgggaccaggacaggaacaccaggaggatgaggcggctggccaacacagccccagcctggtag

SEQ ID NO: 22731 - DNA, 1131 bp, Artificial Sequence
  derived and/or modified sequence
atgatgatgatggccctgagcaagaccttcggccagaagcccgtgaagttccaattggaagatgacggtgagttttatatgattgggagcgaagtaggaaactacctccgaatgtttcgagggagtctgtacaaacgctacccctccctgtggcgaaggctggcgaccgttgaggagcggaagaaaattgtggccagctcacacgaccatggatacaccaccctcgccaccagcgtaacattactgaaggcgagcgaggtggaagagatcctcgatggtaatgatgagaagtacaaagcagtctctatctctacagagcctcccacttatctgcgggagcagaaggcaaagcggaattcacagtgggttccaactcttccaaactctagtcaccacctcgatgcagtgccttgttctaccaccatcaatcgcaatcgcatgggtcgagataaaaagcgaaccttccccctctgttttgacgatcatgacccggccgttattcatgaaaatgcatcccagccagaagtcctcgtccctatccggttggatatggaaattgatggacagaaacttagggatgcgtttacgtggaatatgaacgagaaattaatgaccccagaaatgttttctgagatactgtgcgacgatctggatctgaatcccttgaccttcgtcccggctatcgctagcgcaatcagacagcagatagaatcttatcccactgattccatcctggaggaccagtctgaccaacgcgtcatcatcaagctgaacatccacgttgggaatattagtcttgtggaccagtttgagtgggatatgtctgagaaagaaaattcccctgaaaagtttgctttaaagttatgtagtgaactggggctgggaggcgagtttgtcactaccattgcttattcgatacggggccagctttcctggcaccaaaagacctatgctttctcagagaaccctcttcccactgttgagatcgccattaggaatacaggagacgcggatcagtggtgtcccctgctggagaccctgacagacgccgagatggaaaagaaaatacgagaccaggacaggaataccaggaggatgcggaggctggcgaacacagccccggcatggtag

SEQ ID NO: 22732 - DNA, 1131 bp, Artificial Sequence
  derived and/or modified sequence
atgatgatgatggctttgagcaaaaccttcgggcagaaacctgtgaagtttcagctcgaggatgacggggaattctatatgattggctcagaagtgggaaactatctccgtatgtttagaggctccctctataaacgctatccctcactgtggagacggctggcaactgttgaagagcgaaagaaaatagtggcgagcagccatgatcatggctataccacacttgccaccagcgttactctcttgaaggcgagtgaggtggaggaaatcctggatggaaatgatgagaaatacaaggccgtatccatcagtactgaaccccctacttatctgagggagcaaaaagcaaaaagaaattcacaatgggtgccgaccctgcctaactcttcgcaccacttagatgccgtaccctgctcaactacaatcaaccgaaaccgaatgggaagggacaaaaagagaacatttccgctctgcttcgacgatcacgatcccgctgtgatccatgagaatgccagccagcctgaggtgttggttccaatccgcttggacatggaaatagacggtcagaagcttagggacgcctttacctggaacatgaatgaaaagctgatgactcctgaaatgttctcggagattctgtgcgacgacctggatctgaaccccctgaccttcgtccctgccatagcctccgctatcaggcagcaaattgaaagctacccaaccgattctatccttgaagatcagtctgaccagagggttattataaagctcaacatccacgtcggtaatatatcacttgtggatcagttcgaatgggacatgagcgagaaggagaacagcccagaaaagttcgccctgaaactgtgcagtgagctcgggctcgggggtgagtttgtgaccaccattgcttacagcatccggggacaattgtcttggcaccagaagacgtacgcgttcagtgagaaccctctgcctacggtggagatagccatccgcaacactggggacgccgaccagtggtgccccctgctggagaccctcaccgacgccgagatggagaaaaaaatacgagaccaggatcgcaataccagaaggatgcggagacttgctaatacagccccagcttggtag

SEQ ID NO: 22733 - DNA, 1643 bp, Artificial Sequence
  derived and/or modified sequence
ggtcgtcgtctgcggcggcggcggcggctgaggagcccggctgaggcgccagtacccggcccggtccgcatttcgccttccggcttcggtttccctcggcccagcacgccccggccccgccccagccctcctgatccctcgcagcccggctccggccgcccgcctctgccgccgcaatgatgatgatggcgctgagcaagaccttcgggcagaagcccgtgaagttccagctggaggacgacggcgagttctacatgatcggctccgaggtgggaaactacctccgtatgttccgaggttctctgtacaagagatacccctcactctggaggcgactagccactgtggaagagaggaagaaaatagttgcatcgtcacatgatcacggatacacgactctagccaccagtgtgaccctgttaaaagcctcggaagtggaagagattctggatggcaacgatgagaagtacaaggctgtgtccatcagcacagagccccccacctacctcagggaacagaaggccaagaggaacagccagtgggtacccaccctgcccaacagctcccaccacttagatgccgtgccatgctccacaaccatcaacaggaaccgcatgggccgagacaagaagagaaccttccccctttgctttgatgaccatgacccagctgtgatccatgagaacgcatctcagcccgaggtgctggtccccatccggctggacatggagatcgatgggcagaagctgcgagacgccttcacctggaacatgaatgagaagttgatgacgcctgagatgttttcagaaatcctctgtgacgatctggatttgaacccgctgacgtttgtgccagccatcgcctctgccatcagacagcagatcgagtcctaccccacggacagcatcctggaggaccagtcagaccagcgcgtcatcatcaagctgaacatccatgtgggaaacatttccctggtggaccagtttgagtgggacatgtcagagaaggagaactcaccagagaagtttgccctgaagctgtgctcggagctggggttgggcggggagtttgtcaccaccatcgcatacagcatccggggacagctgagctggcatcagaagacctacgccttcagcgagaaccctctgcccacagtggagattgccatccggaacacgggcgatgcggaccagtggtgcccactgctggagactctgacagacgctgagatggagaagaagatccgcgaccaggacaggaacacgaggcggatgaggcgtcttgccaacacggccccggcctggtaaccagcccatcagcacacggctcccacggagcatctcagaagattgggccgcctctcctccatcttctggcaaggacagaggcgaggggacagcccagcgccatcctgaggatcgggtgggggtggagtgggggcttccaggtggcccttcccggcacacattccatttgttgagccccagtcctgccccccaccccaccctccctacccctccccagtctctggggtcaggaagaaaccttattttaggttgtgttttgtttttgtataggagccccaggcagggctagtaacagtttttaaataaaaggcaacaggtcatgttcaatttcttcaa

SEQ ID NO: 22734 - DNA, 191 bp, Artificial Sequence
  derived and/or modified sequence
tggaggcgactagccactgtggaagagaggaagaaaatagttgcatcgtcacatgctttgatgaccatgacccagctgtgatccatgagaacgcatctcagcccgaggtgctggtccccatccggctggacatggagatcgatgggcagggctagtaacagtttttaaataaaaggcaacaggtcatgttc

SEQ ID NO: 22735 - protein, 92 aa, Artificial Sequence
  derived and/or modified sequence
MIHLGHILFLLLLPVAAAQTTPGERSSLPAFYPGTSGSCSGCGSLSLPLLAGLVAADAVASLLIVGAVFLCARPRRSPAQDGKVYINMPGRG

SEQ ID NO: 22736 - DNA, 279 bp, Artificial Sequence
  derived and/or modified sequence
atgatccacctgggccacatcctgttcctgctgctgctgcccgtggccgccgcccagaccacccccggcgagagaagcagcctgcccgccttctaccccggcaccagcggcagctgcagcggctgcggcagcctgagcctgcccctgctggccggcctggtggccgccgacgccgtggccagcctgctgatcgtgggcgccgtgttcctgtgcgccagacccagaagaagccccgcccaggacggcaaggtgtacatcaacatgcccggcagaggctag

SEQ ID NO: 22737 - DNA, 279 bp, Artificial Sequence
  derived and/or modified sequence
atgattcacctgggacacattcttttcctgcttctgctgcccgtagcggctgctcagaccaccccaggcgagcgaagcagcctgccagccttttatccgggcacaagcggcagctgtagcggatgtggctccctctctttacctcttctcgccggactggttgcggcggatgccgttgccagtctgctcatcgttggtgctgttttcctgtgtgcaaggccgcgcagaagccccgcacaggacggtaaagtctacattaacatgccgggacgaggatag

SEQ ID NO: 22738 - DNA, 504 bp, Artificial Sequence
  derived and/or modified sequence
cttgacaccagcagggtgacatccgctattgctacttctctgctcccccacagttcctctggacttctctggaccacagtcctctgccagacccctgccagaccccagtccaccatgatccatctgggtcacatcctcttcctgcttttgctcccagtggctgcagctcagacgactccaggagagagatcatcactccctgccttttaccctggcacttcaggctcttgttccggatgtgggtccctctctctgccgctcctggcaggcctcgtggctgctgatgcggtggcatcgctgctcatcgtgggggcggtgttcctgtgcgcacgcccacgccgcagccccgcccaagatggcaaagtctacatcaacatgccaggcaggggctgaccctcctgcagcttggacctttgacttctgaccctctcatcctggatggtgtgtggtggcacaggaacccccgccccaacttttggattgtaataaaacaattgaaacacc

SEQ ID NO: 22739 - DNA, 279 bp, Artificial Sequence
  derived and/or modified sequence
atgatccacctgggccacatcctcttcctgctgctgctgcctgtggccgccgcccagaccaccccaggagagaggagcagcctgcctgccttctacccaggcaccagcggcagctgcagcggctgcggcagcctgagcctgcccctgctggccggcctggtggccgcagatgctgtggccagcctgctgattgtgggcgctgtgttcctgtgtgcccggcccaggaggagccctgcccaggacggcaaggtgtacatcaacatgcctggccggggctag

SEQ ID NO: 22740 - DNA, 279 bp, Artificial Sequence
  derived and/or modified sequence
atgatccacctgggccacatcctgttcctgctgctgctgcccgtggctgctgcccagaccactcccggggagaggtcatcgctgccagcattctaccctggaacctcagggtcttgctctggttgcggcagcctgagcctgcccctgctggccggcctggtcgccgctgatgcggtcgcctcgctgctgatagtcggcgctgtatttctgtgcgcgaggcctaggcggtcccccgctcaggacggcaaggtttatatcaacatgcctgggaggggatag

SEQ ID NO: 22741 - DNA, 279 bp, Artificial Sequence
  derived and/or modified sequence
atgattcaccttggacacatcctgtttttgcttctgctgcccgtggcagccgctcaaactacacctggtgagcggtcatctttgcctgccttctatcccggtacttccggttcctgcagcggatgcggttctctttcgctgccattgctggccggactcgtcgctgccgacgcagtcgcctctctcctgattgtgggcgctgtgttcctgtgcgctcgccctaggcgctcaccagcccaagatggtaaagtatacattaatatgcccggaagggggtag

SEQ ID NO: 22742 - protein, 1707 aa, Artificial Sequence
  derived and/or modified sequence
MPEPWGTVYFLGIAQVFSFLFSWWNLEGVMNQADAPRPLNWTIRKLCHAAFLPSVRLLKAQKSWIERAFYKRECVHIIPSTKDPHRCCCGRLIGQHVGLTPSISVLQNEKNESRLSRNDIQSEKWSISKHTQLSPTDAFGTIEFQGGGHSNKAMYVRVSFDTKPDLLLHLMTKEWQLELPKLLISVHGGLQNFELQPKLKQVFGKGLIKAAMTTGAWIFTGGVNTGVIRHVGDALKDHASKSRGKICTIGIAPWGIVENQEDLIGRDVVRPYQTMSNPMSKLTVLNSMHSHFILADNGTTGKYGAEVKLRRQLEKHISLQKINTRIGQGVPVVALIVEGGPNVISIVLEYLRDTPPVPVVVCDGSGRASDILAFGHKYSEEGGLINESLRDQLLVTIQKTFTYTRTQAQHLFIILMECMKKKELITVFRMGSEGHQDIDLAILTALLKGANASAPDQLSLALAWNRVDIARSQIFIYGQQWPVGSLEQAMLDALVLDRVDFVKLLIENGVSMHRFLTISRLEELYNTRHGPSNTLYHLVRDVKKGNLPPDYRISLIDIGLVIEYLMGGAYRCNYTRKRFRTLYHNLFGPKRPKALKLLGMEDDIPLRRGRKTTKKREEEVDIDLDDPEINHFPFPFHELMVWAVLMKRQKMALFFWQHGEEAMAKALVACKLCKAMAHEASENDMVDDISQELNHNSRDFGQLAVELLDQSYKQDEQLAMKLLTYELKNWSNATCLQLAVAAKHRDFIAHTCSQMLLTDMWMGRLRMRKNSGLKVILGILLPPSILSLEFKNKDDMPYMSQAQEIHLQEKEAEEPEKPTKEKEEEDMELTAMLGRNNGESSRKKDEEEVQSKHRLIPLGRKIYEFYNAPIVKFWFYTLAYIGYLMLFNYIVLVKMERWPSTQEWIVISYIFTLGIEKMREILMSEPGKLLQKVKVWLQEYWNVTDLIAILLFSVGMILRLQDQPFRSDGRVIYCVNIIYWYIRLLDIFGVNKYLGPYVMMIGKMMIDMMYFVIIMLVVLMSFGVARQAILFPNEEPSWKLAKNIFYMPYWMIYGEVFADQIDPPCGQNETREDGKIIQLPPCKTGAWIVPAIMACYLLVANILLVNLLIAVFNNTFFEVKSISNQVWKFQRYQLIMTFHERPVLPPPLIIFSHMTMIFQHLCCRWRKHESDPDERDYGLKLFITDDELKKVHDFEEQCIEEYFREKDDRFNSSNDERIRVTSERVENMSMRLEEVNEREHSMKASLQTVDIRLAQLEDLIGRMATALERLTGLERAESNKIRSRTSSDCTDAAYIVRQSSFNSQEGNTFKLQESIDPAGEETMSPTSPTLMPRMRSHSFYSVNMKDKGGIEKLESIFKERSLSLHRATSSHSVAKEPKAPAAPANTLAIVPDSRRPSSCIDIYVSAMDELHCDIDPLDNSVNILGLGEPSFSTPVPSTAPSSSAYATLAPTDRPPSRSIDFEDITSMDTRSFSSDYTHLPECQNPWDSEPPMYHTIERSKSSRYLATTPFLLEEAPIVKSHSFMFSPSRSYYANFGVPVKTAEYTSITDCIDTRCVNAPQAIADRAAFPGGLGDKVEDLTCCHPEREAELSHPSSDSEENEAKGRRATIAISSQEGDNSERTLSNNITVPKIERANSYSAEEPSAPYAHTRKSFSISDKLDRQRNTASLRNPFQRSKSSKPEGRGDSLSMRRLSRTSAFQSFESKHN

SEQ ID NO: 22743 - DNA, 5124 bp, Artificial Sequence
  derived and/or modified sequence
atgcccgagccctggggcaccgtgtacttcctgggcatcgcccaggtgttcagcttcctgttcagctggtggaacctggagggcgtgatgaaccaggccgacgcccccagacccctgaactggaccatcagaaagctgtgccacgccgccttcctgcccagcgtgagactgctgaaggcccagaagagctggatcgagagagccttctacaagagagagtgcgtgcacatcatccccagcaccaaggacccccacagatgctgctgcggcagactgatcggccagcacgtgggcctgacccccagcatcagcgtgctgcagaacgagaagaacgagagcagactgagcagaaacgacatccagagcgagaagtggagcatcagcaagcacacccagctgagccccaccgacgccttcggcaccatcgagttccagggcggcggccacagcaacaaggccatgtacgtgagagtgagcttcgacaccaagcccgacctgctgctgcacctgatgaccaaggagtggcagctggagctgcccaagctgctgatcagcgtgcacggcggcctgcagaacttcgagctgcagcccaagctgaagcaggtgttcggcaagggcctgatcaaggccgccatgaccaccggcgcctggatcttcaccggcggcgtgaacaccggcgtgatcagacacgtgggcgacgccctgaaggaccacgccagcaagagcagaggcaagatctgcaccatcggcatcgccccctggggcatcgtggagaaccaggaggacctgatcggcagagacgtggtgagaccctaccagaccatgagcaaccccatgagcaagctgaccgtgctgaacagcatgcacagccacttcatcctggccgacaacggcaccaccggcaagtacggcgccgaggtgaagctgagaagacagctggagaagcacatcagcctgcagaagatcaacaccagaatcggccagggcgtgcccgtggtggccctgatcgtggagggcggccccaacgtgatcagcatcgtgctggagtacctgagagacaccccccccgtgcccgtggtggtgtgcgacggcagcggcagagccagcgacatcctggccttcggccacaagtacagcgaggagggcggcctgatcaacgagagcctgagagaccagctgctggtgaccatccagaagaccttcacctacaccagaacccaggcccagcacctgttcatcatcctgatggagtgcatgaagaagaaggagctgatcaccgtgttcagaatgggcagcgagggccaccaggacatcgacctggccatcctgaccgccctgctgaagggcgccaacgccagcgcccccgaccagctgagcctggccctggcctggaacagagtggacatcgccagaagccagatcttcatctacggccagcagtggcccgtgggcagcctggagcaggccatgctggacgccctggtgctggacagagtggacttcgtgaagctgctgatcgagaacggcgtgagcatgcacagattcctgaccatcagcagactggaggagctgtacaacaccagacacggccccagcaacaccctgtaccacctggtgagagacgtgaagaagggcaacctgccccccgactacagaatcagcctgatcgacatcggcctggtgatcgagtacctgatgggcggcgcctacagatgcaactacaccagaaagagattcagaaccctgtaccacaacctgttcggccccaagagacccaaggccctgaagctgctgggcatggaggacgacatccccctgagaagaggcagaaagaccaccaagaagagagaggaggaggtggacatcgacctggacgaccccgagatcaaccacttccccttccccttccacgagctgatggtgtgggccgtgctgatgaagagacagaagatggccctgttcttctggcagcacggcgaggaggccatggccaaggccctggtggcctgcaagctgtgcaaggccatggcccacgaggccagcgagaacgacatggtggacgacatcagccaggagctgaaccacaacagcagagacttcggccagctggccgtggagctgctggaccagagctacaagcaggacgagcagctggccatgaagctgctgacctacgagctgaagaactggagcaacgccacctgcctgcagctggccgtggccgccaagcacagagacttcatcgcccacacctgcagccagatgctgctgaccgacatgtggatgggcagactgagaatgagaaagaacagcggcctgaaggtgatcctgggcatcctgctgccccccagcatcctgagcctggagttcaagaacaaggacgacatgccctacatgagccaggcccaggagatccacctgcaggagaaggaggccgaggagcccgagaagcccaccaaggagaaggaggaggaggacatggagctgaccgccatgctgggcagaaacaacggcgagagcagcagaaagaaggacgaggaggaggtgcagagcaagcacagactgatccccctgggcagaaagatctacgagttctacaacgcccccatcgtgaagttctggttctacaccctggcctacatcggctacctgatgctgttcaactacatcgtgctggtgaagatggagagatggcccagcacccaggagtggatcgtgatcagctacatcttcaccctgggcatcgagaagatgagagagatcctgatgagcgagcccggcaagctgctgcagaaggtgaaggtgtggctgcaggagtactggaacgtgaccgacctgatcgccatcctgctgttcagcgtgggcatgatcctgagactgcaggaccagcccttcagaagcgacggcagagtgatctactgcgtgaacatcatctactggtacatcagactgctggacatcttcggcgtgaacaagtacctgggcccctacgtgatgatgatcggcaagatgatgatcgacatgatgtacttcgtgatcatcatgctggtggtgctgatgagcttcggcgtggccagacaggccatcctgttccccaacgaggagcccagctggaagctggccaagaacatcttctacatgccctactggatgatctacggcgaggtgttcgccgaccagatcgaccccccctgcggccagaacgagaccagagaggacggcaagatcatccagctgcccccctgcaagaccggcgcctggatcgtgcccgccatcatggcctgctacctgctggtggccaacatcctgctggtgaacctgctgatcgccgtgttcaacaacaccttcttcgaggtgaagagcatcagcaaccaggtgtggaagttccagagataccagctgatcatgaccttccacgagagacccgtgctgcccccccccctgatcatcttcagccacatgaccatgatcttccagcacctgtgctgcagatggagaaagcacgagagcgaccccgacgagagagactacggcctgaagctgttcatcaccgacgacgagctgaagaaggtgcacgacttcgaggagcagtgcatcgaggagtacttcagagagaaggacgacagattcaacagcagcaacgacgagagaatcagagtgaccagcgagagagtggagaacatgagcatgagactggaggaggtgaacgagagagagcacagcatgaaggccagcctgcagaccgtggacatcagactggcccagctggaggacctgatcggcagaatggccaccgccctggagagactgaccggcctggagagagccgagagcaacaagatcagaagcagaaccagcagcgactgcaccgacgccgcctacatcgtgagacagagcagcttcaacagccaggagggcaacaccttcaagctgcaggagagcatcgaccccgccggcgaggagaccatgagccccaccagccccaccctgatgcccagaatgagaagccacagcttctacagcgtgaacatgaaggacaagggcggcatcgagaagctggagagcatcttcaaggagagaagcctgagcctgcacagagccaccagcagccacagcgtggccaaggagcccaaggcccccgccgcccccgccaacaccctggccatcgtgcccgacagcagaagacccagcagctgcatcgacatctacgtgagcgccatggacgagctgcactgcgacatcgaccccctggacaacagcgtgaacatcctgggcctgggcgagcccagcttcagcacccccgtgcccagcaccgcccccagcagcagcgcctacgccaccctggcccccaccgacagaccccccagcagaagcatcgacttcgaggacatcaccagcatggacaccagaagcttcagcagcgactacacccacctgcccgagtgccagaacccctgggacagcgagccccccatgtaccacaccatcgagagaagcaagagcagcagatacctggccaccacccccttcctgctggaggaggcccccatcgtgaagagccacagcttcatgttcagccccagcagaagctactacgccaacttcggcgtgcccgtgaagaccgccgagtacaccagcatcaccgactgcatcgacaccagatgcgtgaacgccccccaggccatcgccgacagagccgccttccccggcggcctgggcgacaaggtggaggacctgacctgctgccaccccgagagagaggccgagctgagccaccccagcagcgacagcgaggagaacgaggccaagggcagaagagccaccatcgccatcagcagccaggagggcgacaacagcgagagaaccctgagcaacaacatcaccgtgcccaagatcgagagagccaacagctacagcgccgaggagcccagcgccccctacgcccacaccagaaagagcttcagcatcagcgacaagctggacagacagagaaacaccgccagcctgagaaaccccttccagagaagcaagagcagcaagcccgagggcagaggcgacagcctgagcatgagaagactgagcagaaccagcgccttccagagcttcgagagcaagcacaactag

SEQ ID NO: 22744 - DNA, 5124 bp, Artificial Sequence
  derived and/or modified sequence
atgccagagccatgggggactgtctatttccttgggatcgctcaagtcttctcgttcctgttttcctggtggaacttggaaggtgttatgaatcaagccgacgcccctagaccacttaattggactatccgcaagctatgtcacgcggccttcctgccgtctgtgcgcctcctgaaggctcagaaatcctggattgaacgggctttctataagagggagtgtgtgcacatcatcccgagcacgaaggatccacaccggtgctgttgcggacggctgatcggacagcacgtcgggttgactccgtccatctccgtgctgcaaaacgagaaaaatgaatcccgcctgagtcggaatgatattcagagtgagaaatggtccatctcaaagcacactcaactgagcccaactgatgcatttggtaccatcgaattccaggggggaggccattctaataaagcaatgtacgtgagagtatctttcgacacaaagcccgacctgctcctgcacctgatgaccaaggaatggcagctggagcttcccaagctgctcattagtgtccacggaggtctgcagaatttcgagctgcagcctaagttgaagcaggtatttggcaagggactgatcaaggccgcaatgacgactggcgcctggatatttactgggggagtgaacacaggagtgatcagacacgttggggatgccctcaaagatcacgctagtaagtctcgcggcaagatttgtacgattggaattgctccttgggggatcgtggaaaatcaagaagatcttattggcagggatgtagtgcggccataccagaccatgagcaatcctatgtccaagttgacggtgctgaacagcatgcatagtcatttcattttggccgacaatggcaccaccgggaagtacggtgcagaagtcaagcttagacgccagttggagaagcacatcagccttcagaagatcaacactcgaatcggccagggggtgccggtcgttgcactgatcgtagagggcggccccaatgttatcagcatagtgctggagtacttgcgcgatactccgcctgtgcctgtggtcgtttgtgacgggagcggtcgggctagtgacattttagcattcggccacaagtatagcgaagaaggagggttgatcaatgaatccctccgagaccagctactggtgactattcagaaaacttttacctacactagaacccaggctcagcatctgttcatcatcctaatggagtgtatgaaaaaaaaggaactgatcaccgtgttcagaatgggctcagaaggccaccaggatattgatctcgccattctcactgctttattaaaaggcgctaatgcctcggccccagatcagttgtctctggcgctggcctggaacagagtggacattgctcgtagccagatttttatctacggacaacaatggcccgtggggtccctagaacaggcaatgctcgacgcgcttgttctggaccgtgttgactttgtcaagctcctaatcgagaacggcgtgtcaatgcataggtttttgaccatctccaggctcgaagagctttataataccagacacggaccctcgaacaccctttaccacttggtgcgggatgtcaagaagggcaatctgcctcctgactaccggatctcattgatcgacatcggtctagtgatcgagtacctaatggggggggcctatcggtgcaactatacaagaaaacgatttcgcacgctataccacaacctctttggcccgaagagacctaaggcccttaagcttctgggcatggaagatgacatcccattacggcggggccgaaagacaacaaagaaaagagaagaagaagtcgacattgacctcgatgatccggagattaaccacttccccttcccatttcatgagctgatggtgtgggccgtcctcatgaaacgccagaaaatggccctttttttctggcaacatggcgaagaagccatggccaaagccttggtggcctgcaaactgtgcaaggctatggctcacgaggccagcgagaacgatatggttgatgatataagccaggagcttaatcataacagccgcgactttggtcagttggccgtcgagttgcttgaccagtcatacaagcaggacgaacagctggccatgaaactcctgacttatgaactgaaaaactggtcaaatgccacatgtctacagctggccgtcgctgccaagcaccgggactttatcgcgcacacatgctcacagatgctgctgactgacatgtggatgggacggctccgcatgcgcaagaactccgggctaaaagtgatactcggaattctgctaccaccgtcaatcctgtccctggagttcaagaacaaggacgatatgccgtacatgtcacaggcgcaggaaattcatcttcaggaaaaagaggcagaggagccagaaaagcccacaaaagaaaaagaagaagaggacatggagctaactgcgatgctcggccggaataacggagagtcgtccagaaagaaagacgaggaggaagtgcaatcgaagcaccgcctgatccccttaggacggaagatttacgagttttataacgctcctatcgtcaagttttggttttacaccctggcctatatcggctacctcatgctgttcaattacattgtcttggtaaaaatggagagatggccctctactcaggaatggattgtgattagctatatcttcactcttggtatcgaaaagatgagagagattttgatgtctgaaccgggtaagctgctccaaaaggtgaaggtgtggctacaggagtactggaacgtcactgacctcatagccatactcctcttcagcgtgggaatgattttaaggcttcaagatcaacctttccgctccgacgggagagtgatttactgtgtcaatattatttactggtacattcggctcctggacatctttggtgtgaataaatacctgggcccctacgtaatgatgattggaaagatgatgatagatatgatgtattttgtgattataatgttagtggtcctgatgagcttcggggtggctcgacaagctatactgttcccaaacgaagaaccgtcttggaagctggctaagaatatcttctacatgccgtactggatgatttacggagaagtctttgctgaccagatagaccccccttgcggccagaacgagacacgagaggatgggaagattatccagttgcctccatgcaaaaccggcgcctggatcgtgccagctatcatggcatgttacctgctggttgccaacatccttctcgtaaatctgctcatagccgtctttaacaacacattcttcgaagtaaagtccatcagcaatcaagtctggaagttccagcggtatcaattgatcatgactttccacgaacggcctgtactccctcccccattaatcatattctctcatatgaccatgatatttcagcacctttgttgtcggtggcgcaaacacgagtctgatcctgacgagcgcgactacgggctcaaacttttcattacggatgatgaattgaaaaaggtgcacgatttcgaagaacagtgcattgaggagtactttcgcgaaaaggacgatagatttaactcttctaacgatgagagaatacgggtgacatctgagagagtcgagaacatgtccatgagactggaggaagtgaacgaacgggagcattcaatgaaagcatcccttcagacagtcgacatcagactggcccagctagaggatctaattggacggatggcaacagcgctcgaacgcctcaccggcctcgagagagccgagtccaataagatacgtagccgcacatcgtcggattgcacagatgctgcctacatcgtgcgccagtcaagctttaatagccaggagggtaacaccttcaagctgcaggaaagcatcgaccctgccggggaagaaaccatgagtcccacaagtcccactttgatgcccagaatgagaagtcattccttctattccgtcaacatgaaagataagggcggcatagaaaagctcgagtcaatctttaaagagaggagcctttcactccatcgtgctactagcagccattctgtcgccaaggagcccaaggctccagctgcacccgctaatactcttgcaatcgtacccgactctaggcgcccttcttcatgtattgacatttacgtttcagctatggatgaactgcattgtgatatcgatccccttgataactctgtgaatatactcggactgggcgaaccaagcttctctacaccagttccctcaaccgcgccatcctctagtgcgtacgctactttagcccccacggaccgccccccttcacgcagcatagatttcgaggacatcacctcgatggatactcgatccttcagctcagactacacgcatctcccagagtgccagaacccctgggactcagagcctcctatgtatcacacaattgagcggagcaagtcttcccgctaccttgctaccacgccgttcctgctagaggaagcccctattgttaaaagccattcgtttatgttcagcccatcccgctcctattatgctaattttggagtgcctgtgaaaaccgcagagtacacaagcattactgactgcattgacacacggtgtgtgaatgcccctcaggccatcgccgaccgagccgcattcccaggaggcctcggggacaaagtggaagatttaacctgctgtcaccctgagcgcgaggccgaactgtctcaccccagctctgatagtgaagagaacgaggcaaaggggcgccgcgctaccatcgccatttccagtcaggaaggtgacaacagcgagcgcactctgtctaataatataaccgtgccaaagattgagagagcaaacagttactccgctgaagaacccagtgctccctacgcccacacgagaaaatcattcagcattagtgacaaactcgacaggcaaaggaacaccgccagtttgcgcaatcctttccagagatcaaagagttctaagcctgaaggtcgaggggattccttatctatgagacggctgtcgcggacatctgcctttcaatcttttgagtctaaacataactag

SEQ ID NO: 22745 - DNA, 5124 bp, Artificial Sequence
  derived and/or modified sequence
atgcctgagccctggggcaccgtgtacttcctgggcatcgcccaggtgttctccttcctgttctcctggtggaacctggagggcgtgatgaaccaggctgatgccccccggcccctgaactggaccatcaggaagctgtgccacgccgccttcctgcccagcgtgcggctgctgaaggcccagaagtcctggattgagcgggccttctacaagagagaatgtgtgcacatcatccccagcaccaaggacccccaccgctgctgctgcggccgcctgattggccagcacgtgggcctgacccccagcatctctgtgctgcagaatgagaagaatgaaagccggctgagcagaaatgacatccagagcgagaagtggagcatcagcaagcacacccagctgagccccacagatgccttcggcaccatcgagttccagggcggcggccacagcaacaaggccatgtatgtgcgggtgtcctttgacaccaagccagacctgctgctgcacctgatgaccaaggagtggcagctggagctgcccaagctgctgatctctgtgcatggaggcctgcagaactttgagctgcagcccaagctgaagcaggtgtttgggaagggcctcatcaaggccgccatgaccaccggggcctggatcttcaccggcggcgtgaacacaggagtcatccgccacgtgggagatgccctgaaggaccacgccagcaagagccggggcaagatctgcaccatcggcatcgccccctggggcatcgtggagaaccaggaggacctgattggaagagatgtggtgcggccctaccagaccatgagcaaccccatgagcaagctgactgtgctgaacagcatgcacagccacttcatcctggccgacaatggcaccaccgggaagtatggagctgaggtgaagctgcggcggcagctggagaagcacatcagcctgcagaagatcaacacccgcatcggccagggcgtgcctgtggtggccctgattgtggagggcggccccaacgtcatcagcatcgtgctggagtacctgcgggacaccccacctgtgcctgtggtggtgtgtgatggcagcggccgggccagtgacatcctggccttcggccacaagtacagcgaggagggcggcctcatcaatgaaagcctgcgggaccagctgctggtgaccatccagaagaccttcacctacaccaggacccaggcccagcacctgttcatcatcctgatggagtgcatgaagaagaaggagctgatcaccgtcttcaggatgggcagcgagggccaccaggacatcgacctggccatcctgacagccctgctgaagggggccaatgccagcgccccagaccagctgagcctggccctggcctggaacagagtggacatcgcccggagccagatcttcatctacggccagcagtggcctgtgggcagcctggagcaggccatgctggatgccctggtgctggacagagtggactttgtgaagctgctgattgaaaatggagtgtccatgcaccgcttcctgaccatcagccggctggaggagctgtacaacaccaggcatggccccagcaacaccctgtaccacctggtgagagatgtgaagaagggcaacctgcccccagactaccgcatcagcctgattgacatcggcctggtgattgagtacctgatgggcggggcctaccgctgcaactacaccaggaagcgcttccgcaccctgtaccacaacctgtttggccccaagaggcccaaggccctgaagctgctgggcatggaggatgacatccccctgcggcggggcaggaagaccaccaagaagcgggaggaggaggtggacatcgacctggatgatcctgagatcaaccacttccccttccccttccacgagctgatggtgtgggccgtgctgatgaagaggcagaagatggccctcttcttctggcagcacggggaggaggccatggccaaggccctggtggcctgcaagctgtgcaaggccatggcccacgaggcctctgaaaatgacatggtggatgacatcagccaggagctgaaccacaacagccgggactttggccagctggccgtggagctgctggaccagagctacaagcaggatgagcagctggccatgaagctgctgacctatgagctgaagaactggagcaatgccacctgcctgcagctggccgtggccgccaagcaccgggacttcatcgcccacacctgcagccagatgctgctgacagacatgtggatgggccgcctgaggatgaggaagaacagcggcctgaaggtgatcctgggcatcctgctgccccccagcatcctgagcctggagttcaagaacaaggatgacatgccctacatgagccaggcccaggagatccacctgcaggagaaggaggccgaggagcctgagaagcccaccaaggagaaggaggaggaggacatggagctgacagccatgctgggcagaaataatggagagagcagcaggaagaaggatgaggaggaggtgcagagcaagcacaggctcatccccctgggcaggaagatctatgagttctacaatgcccccatcgtgaagttctggttctacaccctggcctacatcggctacctgatgctgttcaactacatcgtgctggtgaagatggagcgctggcccagcacccaggagtggatcgtcatctcctacatcttcaccctgggcatcgagaagatgagggagatcctgatgtctgagcccgggaagctgctgcagaaggtgaaggtgtggctgcaggagtactggaatgtgacagacctgattgccatcctgctcttctctgtgggcatgatcctgcggctgcaggaccagcccttcagaagtgatggccgggtcatctactgtgtgaacatcatctactggtacatccggctgctggacatcttcggcgtgaacaagtacctgggcccctacgtgatgatgattggcaagatgatgattgacatgatgtactttgtgatcatcatgctggtggtgctgatgagctttggagtggcccggcaggccatcctcttccccaatgaggagcccagctggaagctggccaagaacatcttctacatgccctactggatgatctatggagaggtgtttgctgaccagattgatcctccctgtggccagaatgagacccgggaggatggcaagatcatccagctgcccccctgcaagacaggagcctggatcgtgcctgccatcatggcctgctacctgctggtggccaacatcctgctggtgaacctgctgattgctgtgttcaacaacaccttctttgaggtgaagagcatcagcaaccaggtgtggaagttccagcgctaccagctgatcatgaccttccacgagaggcctgtgctgcccccacccctcatcatcttcagccacatgaccatgatcttccagcacctgtgctgccgctggaggaagcatgaaagtgaccctgatgagcgggactatggcctgaagctgttcatcacagatgatgagctgaagaaggtgcatgactttgaggagcagtgcatcgaggagtacttccgggagaaggatgaccgcttcaacagcagcaatgatgagcgcatccgggtgaccagcgagcgggtggagaacatgtccatgaggctggaggaggtgaatgaaagagagcacagcatgaaggccagcctgcagacagtggacatccggctggcccagctggaggacctgattggccgcatggccacagccctggagcggctgaccggcctggagcgggcagagagcaacaagatccgcagcaggaccagcagtgactgcacagatgctgcctacatcgtgcggcagagcagcttcaacagccaggagggcaacaccttcaagctgcaggagagcattgatcctgctggggaggagaccatgagccccaccagccccaccctgatgcccaggatgaggagccacagcttctacagcgtgaacatgaaggacaagggcggcatcgagaagctggagagcatcttcaaggagaggagcctgagcctgcaccgggccaccagcagccacagcgtggccaaggagcccaaggccccagctgccccagccaacaccctggccatcgtgcctgacagccggcggcccagcagctgcatcgacatctacgtgtctgccatggatgagctgcactgtgacatcgaccccctggacaacagcgtgaacatcctgggcctgggggagcccagcttcagcacccctgtgcccagcacagcccccagcagcagcgcctatgccaccctggcccccacagaccggccccccagccgcagcattgactttgaggacatcacctccatggacaccaggagcttcagcagtgactacacccacctgcctgagtgccagaacccctgggacagcgagccccccatgtaccacaccatcgagaggagcaagagcagccgctacctggccaccacccccttcctgctggaggaggcccccatcgtgaagagccacagcttcatgttcagccccagccgcagctactatgccaactttggagtgcctgtgaagacagctgagtacaccagcatcacagactgcatcgacacccgctgtgtgaatgccccccaggccatcgctgaccgggccgccttccctgggggcctgggggacaaggtggaggacctgacctgctgccaccctgagcgggaggccgagctgagccaccccagcagtgacagtgaagaaaatgaggccaagggcagaagagccaccatcgccatcagcagccaggagggggacaacagcgagaggaccctgagcaacaacatcaccgtgcccaagattgaaagagccaacagctacagcgctgaggagcccagcgccccctatgcccacaccaggaagagcttcagcatcagtgacaagctggaccggcagaggaacacagccagcctgaggaaccccttccagaggagcaagagcagcaagccagagggccgcggggacagcctgtccatgaggcggctgagcaggaccagcgccttccagagctttgagagcaagcacaactag

SEQ ID NO: 22746 - DNA, 5124 bp, Artificial Sequence
  derived and/or modified sequence
atgcccgagccctggggcaccgtgtacttcctgggcatcgcccaggtcttcagcttcctgttctcttggtggaatctagagggggtcatgaaccaagccgacgcccctcgccccctgaactggaccatcagaaagctatgtcatgctgccttcctccctagcgtgagactgctcaaagcacaaaagagttggatcgagcgtgccttttataaacgggagtgcgtgcacatcattccaagcactaaagacccccatcgctgctgttgtggcaggctgatagggcaacatgtaggccttaccccctctatttcagttttgcagaacgagaaaaatgagagtaggctgagccgtaatgatatccagtcggagaagtggtcaattagcaagcatacacagctgagtcctacggatgcttttggtacaatcgaatttcaaggtggaggtcacagtaataaagcgatgtacgtgagggtgtcatttgacacaaaaccagatctcttactgcatctgatgactaaagaatggcagctggagctgcccaagctcctaattagcgtccacggcggactgcagaattttgaactacagcctaaactgaaacaggtattcggcaagggactgattaaggctgctatgactaccggcgcttggattttcaccggcggggtgaatacaggagtgatccgccatgttggagacgcgctgaaggatcatgcttccaaatccagagggaagatctgtaccattgggattgctccctggggcattgttgagaaccaggaagatttaataggccgagatgtcgttcggccatatcaaaccatgagcaacccgatgtccaaactgaccgtgcttaatagtatgcacagccacttcatcctggccgataatggaacaacagggaagtatggcgcggaggtcaagctgcgtcgccagctcgagaagcacatttcactacagaaaataaacacccgcattgggcagggcgtgcccgtcgtggcactgatcgttgagggaggacccaacgtgatatcaatcgttcttgagtaccttcgagacaccccgccagtgcctgtcgtggtctgcgatggaagcggcagagccagcgatattctggccttcggacacaagtatagcgaagagggggggctaataaatgaatccctgagggaccagctgttggtgactatccaaaagaccttcacttatacaaggacccaggcacagcatctgttcatcatccttatggaatgcatgaaaaagaaggaactgatcactgtgttcagaatggggtcagaaggacatcaggatatcgatctcgctattttaacagcacttctcaagggggcaaacgcttctgcacctgatcagttaagcctggccttggcttggaacagggttgacatagccaggtctcaaatcttcatttacggccaacagtggccagtggggtccttagaacaagctatgcttgacgcactcgtactagaccgcgtggatttcgtgaaattgttgattgaaaatggcgtttcaatgcaccggttcttgaccatctcccggctcgaggagctctataacacccgccatggaccgagtaacacactgtatcacctggtccgagacgtaaagaaagggaacctgccacctgattacagaatctctctcattgatatcggccttgttattgagtatcttatggggggcgcctatcgctgcaattatacccgaaagcggtttcgaaccctctaccataacctttttggacccaaaaggccaaaggctcttaagctgctgggcatggaggacgatattcccctgcgccgcggaagaaaaaccactaagaaaagagaggaggaagtagatatcgatctggacgacccagagatcaaccattttcctttcccattccatgagctgatggtttgggctgttctcatgaaacgtcagaagatggcactcttcttttggcagcacggggaggaggcgatggcaaaggccctggtggcctgtaagttatgtaaagcaatggcgcacgaagcttcggagaacgatatggtggacgatattagtcaggagctgaatcacaattcacgtgattttggccaacttgcagtcgagctcttggatcagtcttataagcaggacgagcagctcgcgatgaaactgctgacgtatgaactaaagaattggagcaacgccacctgcctacagctcgcagtagccgctaaacacagagatttcatcgcccacacatgctcccagatgttgctgactgacatgtggatggggcggctgcgaatgaggaagaattcaggcctgaaggtcatcttaggcattctgttgcccccctcaattctcagtctggagttcaagaacaaggatgacatgccctacatgtcccaggcacaggagatccacttacaggaaaaagaagccgaggagccagagaagccaactaaggaaaaagaggaggaggacatggagttaacggctatgctggggagaaacaatggggagtctagccgaaaaaaggacgaagaggaagtccaaagcaagcaccgcttaatcccactgggccgaaaaatctatgagttctacaacgccccaatcgtgaagttttggttctacactctcgcatatatcgggtacttgatgctatttaactatattgttctcgtgaaaatggaacgatggccgagtacgcaggagtggatcgttatttcatacatttttactttgggaatagagaagatgcgggagatcctaatgtccgagccgggcaagctgctgcaaaaagttaaggtatggctccaggaatattggaatgtgaccgatctgattgccattctgttattctccgtcggaatgatcttgcgacttcaggaccaaccctttcgatctgacgggcgggtcatttattgcgtgaatataatttattggtacattcggcttctggatatttttggagtcaacaaatacttggggccttacgttatgatgataggaaagatgatgattgacatgatgtactttgtcattatcatgctggtggtactgatgtcgttcggggtggcgcgccaggctatcctcttccccaatgaggaaccatcctggaaacttgctaagaacattttttacatgccctattggatgatctatggagaggtgtttgctgatcagatagacccgccctgcggacagaatgagacaagagaggacggaaaaatcatacagctgcccccatgcaagactggggcatggattgtccccgccatcatggcatgctacctcctggtggcaaatatcctgctggtgaatttgcttattgcagtctttaataatactttcttcgaagtgaaatctataagcaaccaggtgtggaagtttcagcgttaccaattaatcatgacgttccatgaacgacccgtgcttccgccacctctgattatttttagccacatgacaatgatttttcaacacctttgttgtcggtggcgcaaacatgagagtgatccggatgaacgggactatggtctgaagctgtttattacagatgacgagttaaaaaaggttcacgattttgaggagcagtgcatcgaagagtattttcgcgagaaagatgataggtttaactctagcaacgatgagcggatccgagttacctctgagcgcgtggaaaatatgagcatgaggttggaagaggtaaacgagagggaacatagtatgaaggcatcactgcagactgtcgatatcaggctggcacagctcgaagatttgattgggcgcatggctaccgctctcgaacgtctgaccggactggagcgtgctgagtcaaacaagattagatctcgtacttcgagtgactgcactgacgcagcctatatcgtgcgccagtccagctttaatagtcaggagggcaacacatttaagctgcaggaatctattgacccagctggcgaggaaacaatgtccccaacatcaccgacattgatgcccaggatgcgttcccatagcttctattctgtgaatatgaaagacaaaggcgggattgaaaaactggaatccatcttcaaagagcgctcactctctctccaccgcgctacgagtagtcactccgtagctaaggagccaaaggcacctgcggctcctgccaataccctggccatcgtacccgattctcggaggccaagtagctgcatagacatttacgtatcggctatggatgagctacactgcgacattgaccctctagacaactccgtgaacattctgggtctgggcgagccatcattctcgactccggtgcccagtactgccccctctagcagtgcctacgccacattggctccaaccgataggccaccctccagatcaatcgacttcgaagacattacgagtatggacaccaggtctttttcaagcgactatactcatctgcctgaatgtcagaacccctgggactcagagccccctatgtatcacactattgaacgtagcaagtcctcacgttatcttgcaaccacaccgtttttgctggaggaagcccctattgtcaagagtcatagtttcatgtttagcccttctaggtcctactacgcaaatttcggtgtccccgtgaagacggcagaatatacctcaatcaccgattgtatcgatacacgatgtgtgaatgcgccccaagcaatcgcagaccgggctgcctttccgggcggattgggagacaaggtagaggatctgacatgttgtcatccagaacgcgaggctgaactcagccatccgtcaagcgacagtgaggagaacgaggctaaggggagacgcgccacgattgccatctcctctcaggagggagacaattcggagaggacactgtcgaataacatcacagtgccaaaaatcgaaagagcaaactcctatagtgccgaagaacctagcgccccctacgcccacactcgtaagtctttttctatctctgataagctcgaccgtcagagaaacacggcatcacttcgaaacccttttcagaggagcaaaagctcgaaacctgagggacgaggtgactctctgagcatgcggagactgtctcgcactagtgcattccaaagttttgaaagcaagcacaactag

SEQ ID NO: 22747 - DNA, 5123 bp, Artificial Sequence
  derived and/or modified sequence
atgcccgagccttgggggactgtttacttcctcggaatcgctcaggtcttctctttcctgttctcctggtggaacctggaaggggtgatgaaccaagcggacgctcctagaccacttaactggactattcggaagttgtgtcacgccgcatttctgccctccgttcggctcctcaaagcccagaagtcctggattgaaagggccttttacaaacgagaatgtgtgcacatcattccatcaacaaaagatccccatcgatgctgctgcggacgactgattgggcaacatgtgggcctaacaccttcgatcagcgtcttgcaaaacgagaaaaatgagagtcgtttgagccggaacgatatccagagcgagaaatggagcatctccaaacacacgcagttgtcgcccacagatgccttcggcactattgaattccagggagggggacactctaataaggcgatgtatgtccgggtttcattcgatactaaacccgatttacttctccacctgatgaccaaggagtggcagttagagttgcctaagttactcattagtgtgcatggtggattgcagaatttcgagctgcagcctaagctgaaacaggtgtttgggaaaggacttatcaaagcggcaatgaccactggcgcttggatttttactgggggagtcaataccggcgttatcagacatgttggcgatgctctgaaggatcacgcttctaagagtcggggaaaaatctgtacaattgggattgctccttggggaatagtggaaaatcaggaggatttgatcggccgagacgtggtaagaccatatcagaccatgtctaaccccatgtcaaagctgaccgttctcaactccatgcattcccactttattttggccgataacggaacaacgggcaagtacggggcagaagttaaactgcggaggcaactggagaaacatataagtcttcagaaaattaacacacgcatcggacagggagtccccgttgtggcactgattgtcgaggggggacccaatgtgatttctatcgtgctagagtacttgcgggatacccccccagtgccagtggtagtgtgtgatggctccgggagggccagtgatattttggcatttggacataaatattccgaagaaggcggactcataaatgaaagcctgagggaccaattgctcgtgaccattcagaagacctttacatacactaggacacaggcacagcatcttttcattatcctaatggaatgcatgaaaaaaaaagagctgataaccgtgttccgtatgggcagcgaaggccaccaggacattgacctcgcaatcttaaccgccttactcaaaggcgcaaatgcttctgccccagatcagctttcactggccctcgcctggaatcgggtggacattgctaggagtcagatcttcatctacggccagcagtggcctgtggggtcactggagcaggcgatgttagacgccctggtcctggaccgcgttgactttgtcaaactgctgatagaaaatggcgtgagtatgcatcggttcctcacaattagccgcctcgaggagttgtacaataccaggcatgggccaagcaatacactttaccacctggttcgcgacgtgaagaagggtaatctcccacccgattacaggatcagtctgatagatatagggctcgtgatagaatatctgatgggtggggcttatcgctgtaattacaccaggaaaaggttccggactctgtatcataacctgttcggacctaaaaggccaaaagccctcaaattgttgggaatggaggacgacatacccctccgacgcggtcgcaagactaccaaaaagcgagaggaggaagtcgacattgatttggatgaccccgagataaaccatttccccttcccttttcacgaactgatggtctgggctgtgctaatgaagaggcagaagatggcactgtttttctggcagcacggagaagaggcaatggcaaaggcactggtcgcttgcaagctttgcaaggcgatggcccacgaagcctccgaaaacgatatggtagacgacattagtcaagagctgaaccataatagccgcgatttcgggcaattggccgttgagctcctcgaccagagttataagcaggatgagcagcttgccatgaagcttttgacgtacgagctgaaaaactggtccaatgcaacttgtctccagctggccgtcgcggctaaacaccgagacttcatagcgcatacttgctctcagatgctgctgactgatatgtggatgggcaggctgcgaatgagaaagaacagcggccttaaggttattctcggtatcctccttccccctagtattttgtccctcgagtttaaaaataaagacgatatgccctacatgtctcaagcacaggagatacacctacaagagaaagaagcggaggagccagaaaagcccactaaagaaaaggaagaggaagatatggagctaacggcaatgctgggcaggaataatggagagtctagccgcaagaaagatgaggaggaggtgcagtctaagcatcgcctgattccactgggcaggaagatctatgagttttacaatgccccaatcgtgaaattctggttctacactttagcgtatataggctacctgatgctgttcaattacatagtgctggtgaagatggagaggtggccttcaacccaagagtggatcgttattagttacattttcaccctgggcatagagaaaatgcgcgagatcctgatgagcgagcccggaaaacttctccaaaaggtcaaagtgtggttacaggaatactggaacgtgacagatctcatcgccattttactatttagcgtcggcatgatcctgcgcttacaggaccagccgttcaggtctgacggccgagttatctactgcgtgaatataatctactggtacattagattgttagacatttttggagtcaacaagtatcttggcccatacgtgatgatgatcggcaagatgatgatcgacatgatgtactttgtgattattatgctggtagtgttaatgtcgttcggagttgccaggcaagctattctcttcccaaacgaggagccttcttggaaacttgccaagaacattttctatatgccctattggatgatctatggagaagtgtttgccgatcagatagaccccccatgcgggcagaatgaaaccagggaagatgggaaaattattcagctcccaccctgcaaaacaggtgcttggatcgtccctgccataatggcatgttacctgctggttgccaatatcctgctggtgaacctgcttatcgcagtctttaataatacgttctttgaagttaagagtatctctaatcaggtgtggaagttccagcgataccaactgatcatgacatttcatgaacgtcctgtgctgccccctccactgatcattttttctcacatgaccatgatatttcagcatctgtgctgcagatggagaaaacacgagagtgatcccgatgaacgggactacggcctgaaactatttattactgatgacgagcttaaaaaggttcacgatttcgaggaacagtgtattgaggaatattttagggaaaaagacgaccgattcaactcctccaatgacgagagaattcgtgtcacgagcgagcgggttgaaaatatgtctatgcggctggaggaggtgaacgaacgggagcatagcatgaaggccagtctgcaaactgtcgacatccgccttgcccagctggaggacctgattggccgtatggctaccgcgctggagagactgacaggcctagagcgagccgaaagcaataagatccgcagtagaacctcctcagactgtactgacgccgcttatattgtgagacagagctcatttaactcccaggagggtaacaccttcaaactgcaagaatcaattgatcctgcgggagaggaaaccatgtcacccacgtcccctacattgatgcctcgaatgaggtctcacagcttctactcggtcaatatgaaggacaaagggggaatcgagaaactcgaatcaatcttcaaggagcgaagtctgtctcttcacagagctacttctagccactctgtggctaaggaaccaaaagcaccagctgcgcctgccaacaccctggctatagtacctgactcccgacgccctagttcatgtatcgatatttacgtgagcgccatggatgagctgcattgcgacattgacccattggataacagcgtgaatattctcggcctcggcgagccatcattctctacacctgtgccttccacggcaccatctagctctgcatatgctacgctcgcccctaccgacaggccccctagtcggagcattgatttcgaggacatcacgtctatggacacgaggtcatttagttccgactatacacacctgcccgagtgtcaaaacccctgggactctgagccacccatgtaccatacgatcgagagatccaagtcatcccgataccttgctaccactccatttttgttagaggaagcaccgatcgttaagagccactcattcatgttctcacctagtcgaagctactacgccaacttcggggttcctgtgaagaccgccgagtatacctcaatcacagattgtatcgacactcggtgtgtcaacgcaccccaagccatagcagatcgtgcggcatttccaggtggcctgggcgacaaagtcgaggacctgacgtgttgccaccctgaacgtgaggccgaactgtcacacccctcatctgatagcgaggagaacgaggccaagggcaggagagccaccattgccatcagctcccaagaaggcgataatagtgagaggactctgtcaaataacatcacagtccctaaaatcgaaagagcgaattcgtacagcgccgaggaaccttctgcaccatacgcccatacccgaaaaagcttttccatttccgacaaactggacaggcagaggaacaccgcctccttgaggaaccccttccagcgaagcaaaagttctaaacccgaggggcgaggagattccctgagtatgcgaaggctgagtcggacaagtgcctttcagtcgtttgaatcgaagcataatta

SEQ ID NO: 22748 - DNA, 6269 bp, Artificial Sequence
  derived and/or modified sequence
tccgaccacaggctgttttgtgcaggctgtccctcttcttcaaaatcgtgcatcccctccccgaagcagcaggcagtgtgcctccattcagccacatttggtatgcatgagcacggctgcagagagaggggaggtggctgttttaagaaggttcaggggctcaggcaaggctacttgactagtcttccaagttccaggaagcctctgccctaatggaatttgcaggtgtggagatgaccatgggatgccagagccgtgggggaccgtttattttctaggcattgctcaggttttcagtttcttgttttcctggtggaatttggaaggggtcatgaatcaggctgatgctcctcgacccctaaactggaccatccggaagctgtgccacgcagcctttcttccatctgtcagacttctgaaggctcagaaatcctggatagaaagagcattttataaaagagaatgtgtccacatcatacccagcaccaaagacccccataggtgttgctgtgggcgtctgataggccagcatgttggcctcacccccagtatctccgtgcttcagaatgagaaaaatgaaagtcgcctctcccgaaatgacatccagtctgaaaagtggtccatcagcaaacacactcaactcagccctacggatgcttttgggaccattgagttccaaggaggtggccattccaacaaagccatgtatgtgcgagtatcttttgatacaaaacctgatctcctcttacacctgatgaccaaggaatggcagttggagcttcccaagcttctcatctctgtccatgggggcctgcagaactttgaactccagccaaaactcaagcaagtctttgggaaagggctcatcaaagcagcaatgacaactggagcgtggatattcactggaggggttaacacaggtgttattcgtcatgttggcgatgccttgaaggatcatgcctctaagtctcgaggaaagatatgcaccataggtattgccccctggggaattgtggaaaaccaggaggacctcattggaagagatgttgtccggccataccagaccatgtccaatcccatgagcaagctcactgttctcaacagcatgcattcccacttcattctggctgacaacgggaccactggaaaatatggagcagaggtgaaacttcgaagacaactggaaaagcatatttcactccagaagataaacacaagaatcggtcaaggtgttcctgtggtggcactcatagtggaaggaggacccaatgtgatctcgattgttttggagtaccttcgagacacccctcccgtgccagtggttgtctgtgatgggagtggacgggcatcggacatcctggcctttgggcataaatactcagaagaaggcggactgataaatgaatctttgagggaccagctgttggtgactatacagaagactttcacatacactcgaacccaagctcagcatctgttcatcatcctcatggagtgcatgaagaagaaggaattgattacggtatttcggatgggatcagaaggacaccaggacattgatttggctatcctgacagctttactcaaaggagccaatgcctcggccccagaccaactgagcttagctttagcctggaacagagtcgacatcgctcgcagccagatctttatttacgggcaacagtggccggtgggatctctggagcaagccatgttggatgccttagttctggacagagtggattttgtgaaattactcatagagaatggagtaagcatgcaccgttttctcaccatctccagactagaggaattgtacaatacgagacatgggccctcaaatacattgtaccacttggtcagggatgtcaaaaaggggaacctgcccccagactacagaatcagcctgattgacatcggcctggtgatcgagtacctgatgggcggggcttatcgctgcaactacacgcgcaagcgcttccggaccctctaccacaacctcttcggccccaagaggcccaaagccttgaaactgctgggaatggaggatgatattcccttgaggcgaggaagaaagacaaccaagaaacgtgaagaagaggtggacattgacttggatgatcctgagatcaaccacttccccttccctttccatgagctcatggtgtgggctgttctcatgaagcggcagaagatggccctgttcttctggcagcacggtgaggaggccatggccaaggccctggtggcctgcaagctctgcaaagccatggctcatgaggcctctgagaacgacatggttgacgacatttcccaggagctgaatcacaattccagagactttggccagctggctgtggagctcctggaccagtcctacaagcaggacgaacagctggccatgaaactgctgacgtatgagctgaagaactggagcaacgccacgtgcctgcagcttgccgtggctgccaaacaccgcgacttcatcgcgcacacgtgcagccagatgctgctcaccgacatgtggatgggccggctccgcatgcgcaagaactcaggcctcaaggtaattctgggaattctacttcctccttcaattctcagcttggagttcaagaacaaagacgacatgccctatatgtctcaggcccaggaaatccacctccaagagaaggaggcagaagaaccagagaagcccacaaaggaaaaagaggaagaggacatggagctcacagcaatgttgggacgaaacaacggggagtcctccaggaagaaggatgaagaggaagttcagagcaagcaccggttaatccccctcggcagaaaaatctatgaattctacaatgcacccatcgtgaagttctggttctacacactggcgtatatcggatacctgatgctcttcaactatatcgtgttagtgaagatggaacgctggccgtccacccaggaatggatcgtaatctcctatattttcaccctgggaatagaaaagatgagagagattctgatgtcagagccagggaagttgctacagaaagtgaaggtatggctgcaggagtactggaatgtcacggacctcatcgccatccttctgttttctgtcggaatgatccttcgtctccaagaccagcccttcaggagtgacgggagggtcatctactgcgtgaacatcatttactggtatatccgtctcctagacatcttcggcgtgaacaagtatttgggcccgtatgtaatgatgattggaaaaatgatgatagacatgatgtactttgtcatcattatgctggtggttctgatgagctttggggtcgccaggcaagccatcctttttcccaatgaggagccatcatggaaactggccaagaacatcttctacatgccctattggatgatttatggggaagtgtttgcggaccagatagaccctccctgtggacagaatgagacccgagaggatggtaaaataatccagctgcctccctgcaagacaggagcttggatcgtgccggccatcatggcctgctacctcttagtggcaaacatcttgctggtcaacctcctcattgctgtctttaacaatacattttttgaagtaaaatcgatatccaaccaagtctggaagtttcagaggtatcagctcatcatgactttccatgaaaggccagttctgcccccaccactgatcatcttcagccacatgaccatgatattccagcacctgtgctgccgatggaggaaacacgagagcgacccggatgaaagggactacggcctgaaactcttcataaccgatgatgagctcaagaaagtacatgactttgaagagcaatgcatagaagaatacttcagagaaaaggatgatcggttcaactcatctaatgatgagaggatacgggtgacttcagaaagggtggagaacatgtctatgcggctggaggaagtcaacgagagagagcactccatgaaggcttcactccagaccgtggacatccggctggcgcagctggaagaccttatcgggcgcatggccacggccctggagcgcctgacaggtctggagcgggccgagtccaacaaaatccgctcgaggacctcgtcagactgcacggacgccgcctacattgtccgtcagagcagcttcaacagccaggaagggaacaccttcaagctccaagagagtatagaccctgcaggtgaggagaccatgtccccaacttctccaaccttaatgccccgtatgcgaagccattctttctattcggtcaatatgaaagacaaaggtggtatagaaaagttggaaagtatttttaaagaaaggtccctgagcctacaccgggctactagttcccactctgtagcaaaagaacccaaagctcctgcagcccctgccaacaccttggccattgttcctgattccagaagaccatcatcgtgtatagacatctatgtctctgctatggatgagctccactgtgatatagaccctctggacaattccgtgaacatccttgggctgggcgagccaagcttttcaactccagtaccttccacagccccttcaagtagtgcctatgcaacacttgcacccacagacagacctccaagccggagcattgattttgaggacatcacctccatggacactagatctttttcttcagactacacccacctcccagaatgccaaaacccctgggactcagagcctccgatgtaccacaccattgagcgttccaaaagtagccgctacctagccaccacaccctttcttctagaagaggctcccattgtgaaatctcatagctttatgttttccccctcaaggagctattatgccaactttggggtgcctgtaaaaacagcagaatacacaagtattacagactgtattgacacaaggtgtgtcaatgcccctcaagcaattgcggacagagctgccttccctggaggtcttggagacaaagtggaggacttaacttgctgccatccagagcgagaagcagaactgagtcaccccagctctgacagtgaggagaatgaggccaaaggccgcagagccaccattgcaatatcctcccaggagggtgataactcagagagaaccctgtccaacaacatcactgttcccaagatagagcgcgccaacagctactcggcagaggagccaagtgcgccatatgcacacaccaggaagagcttctccatcagtgacaaactcgacaggcagcggaacacagcaagcctgcgaaatcccttccagagaagcaagtcctccaagccggagggccgaggggacagcctgtccatgaggagactgtccagaacatcggctttccaaagctttgaaagcaagcacaactaaaccttcttaatatccgccacagaaggctcaagaatccagccctaaaattctctccaactccagtttttcccctttccttgaatcatacctgctttattcttagctgagcaaaacaagcaatgctttgggaggtgttaactcaaaggtgacttctgggccacagatcaagaaagcatttgatctgacccagtgccagacacaggggatttaaggcatgttcacacttgctgggcagggagggggaagagagggagaaggaagggttagagatgaatgtgtatccgcagtcacagcagaaagccatgagagcaggggaaacaaggggcttcgagcacgctccatgccaggaggcatctgttgatttctgaccattatcaagagttgtaggatgcagggctaaattgcaaaataaaataaaatagccagcgtacacaatgagatattctaaacttccattctgttttcttttcacattggctccatcactggtgactgatgaagagcatcctctttattcagtataagccggcagcaagcagttctacctaacgtcccacatccttctcatgccaacacttctgtaattgatcattataaagaaaaaacaaggtaacagtcatagttcacctgtctcttatctattcacttctggtgccacaactgtttatccttttttgaagaaaataagggaacagaaatgcctttttgtattgcaatcgaaatgaaagaagagttgatgttaaaaaaacaaaagtcaagtgatttattatatacagtgggcgttcaagtctagtcgagcaagctcaggagaatgtaattaaataattttatattttttaatttattttgtatctcacctgtcatggatgaattcattcactgaatatgtaatattgaactt

SEQ ID NO: 22749 - protein, 1432 aa, Artificial Sequence
  derived and/or modified sequence
MQRGKPCRALPTLKCQTFCQRHGLMFEVVDLRWGIRNIEATDHLTTELCLEEVDRCWKTSIGPAFVALIGDQYGPCLIPSRIDEKEWEVLRDHLTARPSDLELVARYFQRDENAFPPTYVLQAPGTGEACEPEEATLTSVLRSGAQEARRLGLITQEQWQHYHRSVIEWEIERSLLSSEDREQGATVFLREIQDLHKHILEDCALRMVDRLADGCLDADAQNLLSSLKSHITDMHPGVLKTHRLPWSRDLVNPKNKTHACYLKELGEQFVVRANHQVLTRLRELDTAGQELAWLYQEIRHHLWQSSEVIQTFCGRQELLARLGQQLRHDDSKQHTPLVLFGPPGIGKTALMCKLAEQMPRLLGHKTVTVLRLLGTSQMSSDARGLLKSICFQVCLAYGLPLPPAQVLDAHTRVVQFFHTLLHTVSCRNFESLVLLLDAMDDLDSVRHARRVPWLPLNCPPRVHLILSACSGALGVLDTLQRVLLDPEAYWEVKPLSGNQGQQMIQLLLAAARRTLSPVHTDLLWASLPECGNPGRLRLAFEEARKWASFTVPVPLATTAEEATHQLCTRLEQTHGQLLVAHVLGYIVSSRHGLSEAELKDVLSLDDEVLQDVYRDWTPPSKELLRFPPLLWVRLRRDLGYYLARRPVDGFTLLAIAHRQLVEVVRERYLSGSERAKRHGVLADFFSGTWSQGTKKLITLPLVGKPLNLDRKVAPQPLWFSHTVANLRKLKELPYHLLHSGRLEELKQEVLGSMSWISCRGISGGIEDLLDDFDLCAPHLDSPEVGLVREALQLCRPAVELRGMERSLLYTELLARLHFFATSHPALVGQLCQQAQSWFQLCAHPVLVPLGGFLQPPGGPLRATLSGCHKGITAMAWGVEEKLLVIGTQDGIMAVWDMEEQHVIHMLTGHTGEVRCVKIFAKGTLANSASKDYTLHLWNLLSGQEKFTIWDGGSKNPAEPQIWNLHVDEAHKVVYSASGSKINAWNLETAEPVFHILGDASDPWMCMAVLASQATLLTVSRDGVVSLWSSATGKLQGKQHMSSIKEETPTCAVSVQKQGKLVTGFSNGSISLVSSKGDRLLEKLPDAVRFLVVSEDESLLAAGFGRSVRIFLADSRGFRRFMAMDLEHEDMVETAVFGTENNLIITGSLDALIQVWSLSEQGTLLDILEGVGAPVSLLARGGALVASASPQSSSFKVWDLSDAHRSRVPAPFLDRTGLTAVSHNGSYVYFPKIGDKNKVTIWDLAEGEEQDSLDTSSEIRCLEVAEQRKLLFTGLVSGVVLVFPLNSRQDVICIPPPEARKAINCMSLSKCEDRLAIAYDNIVLVLDITSGDPCPVIDGPRYTFYTQLPETLSSVAILTDYRVVYSMTNGDLFLYECATSKAFPLETHRSRVACVEVSHKEQLVVSGSEDALLCLWDLQARKWKFEMSYTAPC

SEQ ID NO: 22750 - DNA, 4299 bp, Artificial Sequence
  derived and/or modified sequence
atgcagagaggcaagccctgcagagccctgcccaccctgaagtgccagaccttctgccagagacacggcctgatgttcgaggtggtggacctgagatggggcatcagaaacatcgaggccaccgaccacctgaccaccgagctgtgcctggaggaggtggacagatgctggaagaccagcatcggccccgccttcgtggccctgatcggcgaccagtacggcccctgcctgatccccagcagaatcgacgagaaggagtgggaggtgctgagagaccacctgaccgccagacccagcgacctggagctggtggccagatacttccagagagacgagaacgccttcccccccacctacgtgctgcaggcccccggcaccggcgaggcctgcgagcccgaggaggccaccctgaccagcgtgctgagaagcggcgcccaggaggccagaagactgggcctgatcacccaggagcagtggcagcactaccacagaagcgtgatcgagtgggagatcgagagaagcctgctgagcagcgaggacagagagcagggcgccaccgtgttcctgagagagatccaggacctgcacaagcacatcctggaggactgcgccctgagaatggtggacagactggccgacggctgcctggacgccgacgcccagaacctgctgagcagcctgaagagccacatcaccgacatgcaccccggcgtgctgaagacccacagactgccctggagcagagacctggtgaaccccaagaacaagacccacgcctgctacctgaaggagctgggcgagcagttcgtggtgagagccaaccaccaggtgctgaccagactgagagagctggacaccgccggccaggagctggcctggctgtaccaggagatcagacaccacctgtggcagagcagcgaggtgatccagaccttctgcggcagacaggagctgctggccagactgggccagcagctgagacacgacgacagcaagcagcacacccccctggtgctgttcggcccccccggcatcggcaagaccgccctgatgtgcaagctggccgagcagatgcccagactgctgggccacaagaccgtgaccgtgctgagactgctgggcaccagccagatgagcagcgacgccagaggcctgctgaagagcatctgcttccaggtgtgcctggcctacggcctgcccctgccccccgcccaggtgctggacgcccacaccagagtggtgcagttcttccacaccctgctgcacaccgtgagctgcagaaacttcgagagcctggtgctgctgctggacgccatggacgacctggacagcgtgagacacgccagaagagtgccctggctgcccctgaactgcccccccagagtgcacctgatcctgagcgcctgcagcggcgccctgggcgtgctggacaccctgcagagagtgctgctggaccccgaggcctactgggaggtgaagcccctgagcggcaaccagggccagcagatgatccagctgctgctggccgccgccagaagaaccctgagccccgtgcacaccgacctgctgtgggccagcctgcccgagtgcggcaaccccggcagactgagactggccttcgaggaggccagaaagtgggccagcttcaccgtgcccgtgcccctggccaccaccgccgaggaggccacccaccagctgtgcaccagactggagcagacccacggccagctgctggtggcccacgtgctgggctacatcgtgagcagcagacacggcctgagcgaggccgagctgaaggacgtgctgagcctggacgacgaggtgctgcaggacgtgtacagagactggaccccccccagcaaggagctgctgagattcccccccctgctgtgggtgagactgagaagagacctgggctactacctggccagaagacccgtggacggcttcaccctgctggccatcgcccacagacagctggtggaggtggtgagagagagatacctgagcggcagcgagagagccaagagacacggcgtgctggccgacttcttcagcggcacctggagccagggcaccaagaagctgatcaccctgcccctggtgggcaagcccctgaacctggacagaaaggtggccccccagcccctgtggttcagccacaccgtggccaacctgagaaagctgaaggagctgccctaccacctgctgcacagcggcagactggaggagctgaagcaggaggtgctgggcagcatgagctggatcagctgcagaggcatcagcggcggcatcgaggacctgctggacgacttcgacctgtgcgccccccacctggacagccccgaggtgggcctggtgagagaggccctgcagctgtgcagacccgccgtggagctgagaggcatggagagaagcctgctgtacaccgagctgctggccagactgcacttcttcgccaccagccaccccgccctggtgggccagctgtgccagcaggcccagagctggttccagctgtgcgcccaccccgtgctggtgcccctgggcggcttcctgcagccccccggcggccccctgagagccaccctgagcggctgccacaagggcatcaccgccatggcctggggcgtggaggagaagctgctggtgatcggcacccaggacggcatcatggccgtgtgggacatggaggagcagcacgtgatccacatgctgaccggccacaccggcgaggtgagatgcgtgaagatcttcgccaagggcaccctggccaacagcgccagcaaggactacaccctgcacctgtggaacctgctgagcggccaggagaagttcaccatctgggacggcggcagcaagaaccccgccgagccccagatctggaacctgcacgtggacgaggcccacaaggtggtgtacagcgccagcggcagcaagatcaacgcctggaacctggagaccgccgagcccgtgttccacatcctgggcgacgccagcgacccctggatgtgcatggccgtgctggccagccaggccaccctgctgaccgtgagcagagacggcgtggtgagcctgtggagcagcgccaccggcaagctgcagggcaagcagcacatgagcagcatcaaggaggagacccccacctgcgccgtgagcgtgcagaagcagggcaagctggtgaccggcttcagcaacggcagcatcagcctggtgagcagcaagggcgacagactgctggagaagctgcccgacgccgtgagattcctggtggtgagcgaggacgagagcctgctggccgccggcttcggcagaagcgtgagaatcttcctggccgacagcagaggcttcagaagattcatggccatggacctggagcacgaggacatggtggagaccgccgtgttcggcaccgagaacaacctgatcatcaccggcagcctggacgccctgatccaggtgtggagcctgagcgagcagggcaccctgctggacatcctggagggcgtgggcgcccccgtgagcctgctggccagaggcggcgccctggtggccagcgccagcccccagagcagcagcttcaaggtgtgggacctgagcgacgcccacagaagcagagtgcccgcccccttcctggacagaaccggcctgaccgccgtgagccacaacggcagctacgtgtacttccccaagatcggcgacaagaacaaggtgaccatctgggacctggccgagggcgaggagcaggacagcctggacaccagcagcgagatcagatgcctggaggtggccgagcagagaaagctgctgttcaccggcctggtgagcggcgtggtgctggtgttccccctgaacagcagacaggacgtgatctgcatccccccccccgaggccagaaaggccatcaactgcatgagcctgagcaagtgcgaggacagactggccatcgcctacgacaacatcgtgctggtgctggacatcaccagcggcgacccctgccccgtgatcgacggccccagatacaccttctacacccagctgcccgagaccctgagcagcgtggccatcctgaccgactacagagtggtgtacagcatgaccaacggcgacctgttcctgtacgagtgcgccaccagcaaggccttccccctggagacccacagaagcagagtggcctgcgtggaggtgagccacaaggagcagctggtggtgagcggcagcgaggacgccctgctgtgcctgtgggacctgcaggccagaaagtggaagttcgagatgagctacaccgccccctgctag

SEQ ID NO: 22751 - DNA, 4299 bp, Artificial Sequence
  derived and/or modified sequence
atgcaaaggggcaagccttgtagagccctgcctacacttaagtgtcagactttttgtcagcgacatggtctcatgtttgaagtcgtcgatctccggtggggcatccggaatatagaagcaactgaccacctgactacggaactctgtctggaggaggtggatcggtgctggaaaacaagcattggacctgccttcgtagccctcatcggggaccagtacggcccttgccttatcccctcccggattgacgaaaaggagtgggaggtcttacgggatcacctgacggcccgcccaagcgatctggaactggtagcacgatacttccagagagacgagaacgcttttccacccacctatgtcttgcaagccccagggactggggaggcctgcgaacctgaagaagcaacccttacctccgttctgcgctccggcgcccaggaggctcgccgcttaggactgatcacacaggaacagtggcagcactaccaccgtagcgtcatcgagtgggagatcgagcggtcattacttagcagcgaggaccgcgagcagggtgctaccgtttttttgagggagatccaagatctacataaacatattctcgaggattgcgcattgagaatggtggaccgcttggcggacggctgtctcgatgccgatgcccaaaacctcttgtcgtctctgaagtcccatattaccgacatgcaccctggcgtccttaagacacacagacttccttggtcccgggaccttgtgaaccccaagaataagacacatgcttgctatcttaaggagctgggagagcagtttgtggtccgggctaaccaccaggttctcactcggctcagggagctggatactgctggtcaggagttagcatggctctaccaggagatccgacaccacctttggcagtcatccgaggttattcaaaccttttgtggtaggcaagagttgctggcacgacttggccaacagctacgccacgacgatagtaagcaacacacacccctcgtactcttcgggcccccagggattggcaagacagccctgatgtgcaagctggccgaacagatgccacgcctcctaggccataagaccgtcactgtgctgcgcctgctcgggactagccagatgtcaagtgacgcaaggggattgctaaagtcgatctgcttccaggtctgcctggcatacgggttgcccctcccaccggcgcaggtactcgatgcacacaccagagtcgtgcagttttttcacactttactgcacacagtgtcttgccgaaacttcgaaagcctcgtgttactgctggatgcaatggatgacttggactcagtaaggcacgcaaggcgtgttccatggctgcctttgaattgcccccctagggtgcacctgattttatccgcatgttcgggagccctgggagtattggataccttgcagagggtgttactggatcccgaagcttattgggaagtaaaacccttgagtggtaaccaaggacagcaaatgatacagctgctgttggcagccgctcgacgcacattgagtcccgtgcataccgacctcctgtgggcgtcattacctgagtgcggcaaccccgggcgcttgagactagctttcgaagaggcccggaaatgggcttctttcaccgtacctgttccgctggccacaacggccgaagaggctactcatcagttgtgcacaagactggagcagacccatggacagctcctggttgcccatgtccttggatacattgtgtcttcacgccacggcctgagcgaggcagaactgaaggatgttctgtccttagatgacgaggtactgcaggacgtctaccgcgactggacaccaccaagcaaggaactgctgcggtttcctcccctgctttgggtgcggctaaggagggatctgggatactatttagctcggcgaccagtggacggttttaccttgctcgctattgctcatcggcagctggtagaggtggtcagagaacgatacctatctgggtccgagcgagctaagcgccatggagtcctcgccgacttcttttccggcacctggtctcaaggcacaaagaaactgatcacactcccactcgtgggtaaacccctgaacttggatcgcaaggttgccccacagccactgtggttttcccacactgtagcaaatctcagaaaacttaaagaactgccataccatttgctgcactccggcagattggaagagctcaaacaggaggtacttgggagcatgagttggattagttgcaggggcatttccgggggcatcgaagacttgttagacgatttcgatctttgtgctcctcatctcgatagtcccgaggtggggctggtccgggaagcattgcagctctgcagaccagctgtggagctccggggtatggagcgcagcttgctctatacggaattattggcgagactgcacttcttcgctactagccacccagcattggtcggccaactgtgtcagcaggcccagtcttggttccagctgtgtgcacaccccgtcctagttccactgggagggttcctacaacctcctggtgggccactgcgcgccactttatcaggctgtcacaagggcattaccgccatggcatggggcgtggaggaaaaactactcgttatcggtacccaggatggaatcatggccgtgtgggacatggaagaacagcacgtgatacacatgcttactggtcatacgggtgaagtaagatgcgtgaaaatattcgccaaggggacactggctaacagtgcatctaaagactatactctgcatttgtggaacctgctgtccggccaggagaaatttaccatttgggatgggggctctaagaatccagctgaacctcaaatctggaatctccacgtggatgaggctcacaaggtcgtgtattctgctagtggctctaaaattaatgcttggaatctcgagactgccgagcctgtgttccacatcctgggagatgcttctgatccgtggatgtgcatggctgtacttgctagccaggctacactcctgacagttagcagagacggggtggtgagcttgtggtcctctgccactggtaaattgcagggtaagcagcacatgagcagcataaaggaagaaactcccacctgcgccgttagtgttcagaagcaggggaaacttgttaccgggttttcaaacggttccattagcctcgtcagtagcaaaggagataggcttcttgaaaagctacctgacgcggtgaggtttctggttgtcagcgaggatgaatcactgctggcagccggcttcggtcggtcagtgaggattttcctggccgattcgaggggcttccggcggtttatggctatggatctagagcacgaggatatggtcgaaacagccgtcttcggtacagaaaacaacctgatcattactggctccctggacgccctgatccaagtgtggtcactttcggagcagggaaccttgctcgacatactggagggcgttggagcccctgtctcactactcgctcgcggcggcgccctggttgcctccgcatcaccacagtcttcctcgttcaaagtgtgggacctaagcgatgctcacaggtcccgcgtgccggctcccttcttggacaggacgggacttaccgctgttagccacaacgggagttatgtgtacttcccaaaaatcggcgacaaaaacaaagtcacaatctgggacctggccgaaggagaggaacaggatagtctggacacctctagcgaaattcgctgcctcgaggtggcggaacagagaaagctgctcttcaccggcttggtgtcaggcgtggtccttgtcttccccttgaacagcagacaggatgtgatctgcatcccaccacctgaagcaagaaaggctattaattgtatgagtctgtcaaagtgtgaagatcgcctggccattgcctacgacaatatcgtgttagtgctggatatcacttcaggagatccttgcccagtcattgatggccccaggtacacattctacacccagctccctgagactttgtcatcagtcgcaattcttactgactatagagtggtgtattcaatgaccaatggtgacttgttcttatacgaatgtgcgaccagcaaagctttccctctggaaacccaccgctccagagtagcttgcgtggaggtgtctcataaagagcaattggttgtgtccggctcagaagacgcactactgtgcctttgggacctgcaggctaggaaatggaagtttgagatgtcctataccgccccctgctag

SEQ ID NO: 22752 - DNA, 4299 bp, Artificial Sequence
  derived and/or modified sequence
atgcagcgaggaaagccgtgtcgcgctctgcctacattgaagtgccaaacgttctgccagaggcacggtctaatgttcgaggtagtagatctgcggtggggcatcaggaatatcgaggcaactgatcacttgacgacagaactgtgcctggaggaagtcgacaggtgttggaagacctctattggacccgcctttgtggctcttataggggaccagtacggtccttgcttaatacctagcagaatagacgaaaaggaatgggaggtgctgagagatcacctcactgcacgtccatccgatctggaactggtggctcgttatttccagcgagatgaaaacgctttcccccctacctacgtactgcaggcacctggaacgggtgaggcttgtgaaccagaggaagccacattgactagcgtgttgcggtcaggagcccaggaggcgcggaggttgggcctgattactcaggagcagtggcaacattaccatcgctcagtcatcgaatgggagattgaacgttctctcctgtcctccgaagatagggagcagggcgcaactgttttcctgcgggagatccaggatctccacaaacacatcttggaggactgtgccctgcgtatggtggaccggcttgctgacggttgtctggatgccgatgcccaaaaccttctgagctcccttaaatcgcacatcactgatatgcaccccggagttctgaaaactcacagactgccctggtcacgcgacctggttaacccaaagaataagacccacgcatgctatttgaaagagctcggcgaacagtttgtggtgagagctaaccaccaagtcctgaccagactcagggagctcgatacagccggacaggaacttgcttggttgtaccaggaaataaggcaccacctctggcagtcctctgaagttattcagaccttctgtggaagacaggagctcctagcccgattgggccaacaactccgccacgatgacagtaagcagcataccccactggttttatttggccccccagggataggcaagaccgcgctcatgtgcaaactcgctgaacagatgccccggctgctggggcacaaaaccgtgacagtcctgagactgctaggaaccagccagatgtcgtccgatgcaagaggcttgcttaagtccatttgcttccaggtatgtctggcctatgggctccctcttccgcccgcgcaggtgcttgacgctcacacgcgggtagtccagttctttcacaccttgttgcacacggtctcttgcagaaatttcgagtctctagtgttgctacttgacgccatggatgatctggattcagtgcgccacgcccgacgtgtgccttggctgccgctcaactgcccaccaagggtgcatctgatcttgtccgcatgttccggcgccttaggagtactggatactcttcaaagggtgttgctagacccggaagcatattgggaggtgaagcctctgagtggaaatcaggggcagcaaatgatccagctgctactggctgccgcacggaggactctgtctcccgtgcatactgacctactctgggcatccctgccagagtgcggcaatcccggcaggcttagacttgctttcgaggaggcaaggaaatgggctagcttcacggtgcccgtacctttggccaccaccgccgaagaagcaacgcatcagctatgcacccgcttagaacagacgcacgggcagctgctcgtcgcccacgtgctcggttacatagtgagcagcaggcacgggctgagtgaggctgagctcaaagacgtcctgagcctggacgatgaggtcttgcaagatgtgtaccgggactggactccccctagcaaagagttgctccggtttcccccgctcctatgggtgcgcctgcgacgagatctgggctattacctagctcgcagacctgttgacgggttcacactgctggcaatagcccacaggcagctcgtagaggtagtgagggagcgatacctgtctggaagtgaacgggctaaaagacacggggtgcttgcggattttttctctgggacctggtcccaagggacaaagaaactcatcacactgcctttggtcgggaagcctttgaacctggatcggaaagtggccccacaacccctgtggtttagtcacacagtcgctaatctgcgcaagctgaaggagttaccataccacctgttgcatagcggacggttagaggagcttaaacaggaggtgttaggttccatgtcatggatctcctgccgaggtatcagcggtggtatcgaggaccttcttgacgatttcgatctatgtgcacctcacctcgatagtcccgaggtaggcctggtgcgggaggcgctccagctgtgtagaccagctgtcgagttaagaggcatggagcgtagtcttctgtacactgagctgctcgcgcgtttgcattttttcgctacttctcatccagctctcgtcggacagctctgccagcaggcccaaagttggttccagctttgcgcgcaccccgtacttgtccctctaggaggttttctccaaccccctggggggcccctccgcgccacgctaagtggctgccataaaggcatcaccgcaatggcatggggagtggaggaaaaactccttgtgattgggacacaggatggcataatggcagtgtgggatatggaggaacaacacgttatccacatgctgacaggccacactggggaggtgagatgcgtaaaaattttcgccaaggggacactggcaaattcagcctccaaagactatacactgcacctctggaatctgctgtccggtcaggagaagttcacaatttgggatggggggagtaagaaccctgcagaacctcagatatggaatctgcatgtggatgaagcccacaaggtggtgtactcagccagcggttccaagattaacgcctggaacctggaaacagcggaaccggtgtttcatattctcggggacgcaagtgatccatggatgtgcatggccgtgctcgcttcccaggccaccctgctcaccgtgtctcgtgacggggtagtttcgctgtggtcatccgctaccgggaaactgcaggggaaacagcatatgtcctccatcaaggaggagacaccgacatgtgcagtgtctgttcagaagcagggtaaattggtgacgggcttctcgaatggatccatctccctggtgagtagcaaaggcgatcggctcctggaaaaactgcctgacgctgtcagattcctggttgtgagtgaggacgagtctctgctggctgccggtttcggacgaagtgtgcggatttttttagcagattcccggggcttcaggagattcatggctatggacttggagcacgaagacatggtagagactgctgtctttggaacagagaacaacctcattatcacaggatcattagatgccctcattcaagtgtggtctttgtcagagcagggtacgctgctggacatcctggagggtgtaggagctccggttagtctgctggcccgaggtggggccttggttgcctctgccagtcctcagtcttctagtttcaaggtctgggatctgtccgacgcgcatcgctcccgcgtacccgccccgttcctggaccggacaggcctcacagccgtcagccacaatggttcttatgtgtactttccaaaaataggcgataaaaataaggtgaccatctgggatcttgccgagggggaggaacaggactcactggacacttccagcgaaattcgctgcctggaggtagccgagcagagaaagttgctgtttactgggctagtctcgggagtggtgttagtgtttccactgaactccaggcaagacgtcatttgcattcccccacccgaggcgaggaaggcgatcaattgcatgtccttgtcgaaatgtgaagatagactggccatcgcttatgataatatagtgctagtgctggacatcacttccggagacccatgtccggtgattgacggccccagatacacattctatacacagctccctgagaccctttcatccgtcgcgatcttaacagactaccgcgtcgtctactcaatgaccaatggagacctgtttctctatgaatgcgcaacaagcaaagcttttcccttggaaacccataggagtagagttgcctgcgttgaggtgagtcataaagagcagttagtcgtctcaggcagtgaagacgctctgctctgcttatgggatttacaggcccgcaaatggaagttcgaaatgagctatacagctccctgctag

SEQ ID NO: 22753 - DNA, 4299 bp, Artificial Sequence
  derived and/or modified sequence
atgcagaggggcaagccctgccgggccctgcccaccctgaagtgccagaccttctgccagagacatggcctgatgtttgaggtggtggacctgcgctggggcatccggaacatcgaggccacagaccacctgaccacagagctgtgcctggaggaggtggaccgctgctggaagaccagcatcggccctgcctttgtggccctgattggagaccagtatggcccctgcctgatccccagcagaattgatgagaaggagtgggaggtgctgcgggaccacctgacagcccggcccagcgacctggagctggtggcccgctacttccagagagatgaaaatgccttcccccccacctacgtgctgcaggcccctggcaccggggaggcctgtgagcctgaggaggccaccctgacctctgtgctgcggagcggggcccaggaggcccggcggctgggcctcatcacccaggagcagtggcagcactaccacaggtctgtgattgagtgggagattgaaagaagcctgctgagcagtgaagatcgggagcagggcgccaccgtcttcctgcgggagatccaggacctgcacaagcacatcctggaggactgtgccctgaggatggtggaccggctggctgatggctgcctggatgctgatgcccagaacctgctgagcagcctgaagagccacatcacagacatgcaccctggggtgctgaagacccaccggctgccctggagccgggacctggtgaaccccaagaacaagacccacgcctgctacctgaaggagctgggggagcagtttgtggtgcgggccaaccaccaggtgctgacccggctgcgggagctggacacagctggccaggagctggcctggctgtaccaggagatccgccaccacctgtggcagagcagcgaggtgatccagaccttctgtggccggcaggagctgctggcccggctgggccagcagctgcggcatgatgacagcaagcagcacacccccctggtgctgtttggccccccaggcatcggcaagacagccctgatgtgcaagctggccgagcagatgccccggctgctgggccacaagacagtgacagtgctgcggctgctgggcaccagccagatgagcagtgatgcccggggcctgctgaagagcatctgcttccaggtgtgcctggcctacggcctgcccctgcccccagcccaggtgctggatgcccacaccagggtggtgcagttcttccacaccctgctgcacacagtgtcctgcaggaactttgagagcctggtgctgctgctggatgccatggatgacctggacagcgtgagacatgccaggagagtgccctggctgcccctgaactgccccccccgggtgcacctgatcctgagcgcctgcagcggggccctgggcgtgctggacaccctgcagagggtgctgctggaccctgaggcctactgggaggtgaagcccctgagcggcaaccagggccagcagatgatccagctgctgctggccgccgcccggaggaccctgagccctgtgcacacagacctgctgtgggccagcctgcctgaatgtggcaaccctggccgcctgcggctggcctttgaggaggccaggaagtgggccagcttcaccgtgcctgtgcccctggccaccacagctgaggaggccacccaccagctgtgcacccggctggagcagacccacggccagctgctggtggcccacgtgctgggctacatcgtgagcagcagacatggcctgtctgaggccgagctgaaggatgtgctgagcctggatgatgaggtgctgcaggatgtgtacagagactggaccccacccagcaaggagctgctgcgcttcccccccctgctgtgggtgcggctgcggcgggacctgggctactacctggcccggcggcctgtggatggcttcaccctgctggccatcgcccaccggcagctggtggaggtggtgcgggagcgctacctgagcggcagcgagcgggccaagagacatggagtgctggccgacttcttcagcggcacctggagccagggcaccaagaagctgatcaccctgcccctggtgggcaagcccctgaacctggacaggaaggtggccccccagcccctgtggttcagccacacagtggccaacctgaggaagctgaaggagctgccctaccacctgctgcacagcggccgcctggaggagctgaagcaggaggtgctgggctccatgtcctggatcagctgccggggcatcagcggcggcatcgaggacctgctggatgactttgacctgtgtgccccccacctggacagccctgaggtgggcctggtgcgggaggccctgcagctgtgcaggcctgctgtggagctgcggggcatggagaggagcctgctgtacacagagctgctggcccggctgcacttctttgccaccagccacccagccctggtgggccagctgtgccagcaggcccagagctggttccagctgtgtgcccaccctgtgctggtgcccctgggcggcttcctgcagcccccaggcggccccctgcgggccaccctgagcggctgccacaagggcatcacagccatggcctggggcgtggaggagaagctgctggtgattggcacccaggacggcatcatggctgtgtgggacatggaggagcagcacgtgatccacatgctgaccggccacactggagaggtgcgctgtgtgaagatctttgccaagggcaccctggccaacagcgccagcaaggactacaccctgcacctgtggaacctgctgagcggccaggagaagttcaccatctgggatggcggcagcaagaacccagctgagccccagatctggaacctgcacgtggatgaggcccacaaggtggtgtacagcgccagcggcagcaagatcaatgcctggaacctggagacagctgagcctgtgttccacatcctgggagatgccagtgacccctggatgtgcatggctgtgctggccagccaggccaccctgctgactgtgtccagagatggagtggtgtccctgtggagcagcgccaccgggaagctgcagggcaagcagcacatgagcagcatcaaggaggagacccccacctgtgctgtgtctgtgcagaagcagggcaagctggtgacaggcttcagcaatggcagcatcagcctggtgagcagcaaaggagaccggctgctggagaagctgcctgatgctgtgcgcttcctggtggtgtctgaagatgagagcctgctggccgccggcttcggccgctctgtgcgcatcttcctggccgacagccggggcttccgccgcttcatggccatggacctggagcacgaggacatggtggagacagctgtgtttggaacagagaacaacctgatcatcaccggcagcctggatgccctgatccaggtgtggagcctgtctgagcagggcaccctgctggacatcctggagggcgtgggcgcccctgtgtccctgctggcccggggcggggccctggtggccagcgccagcccccagagcagcagcttcaaggtgtgggacctgagtgatgcccacaggagccgggtgcctgcccccttcctggacagaacaggcctgacagctgtgagccacaacggcagctatgtgtacttccccaagatcggggacaagaacaaggtgaccatctgggacctggccgagggggaggagcaggacagcctggacaccagcagcgagatccgctgcctggaggtggccgagcagaggaagctgctcttcaccggcctggtgtctggagtggtgctggtgttccccctgaacagccggcaggatgtgatctgcatccccccacctgaggccaggaaggccatcaactgcatgagcctgagcaaatgtgaagatcggctggccatcgcctatgacaacatcgtgctggtgctggacatcaccagcggggacccctgccctgtgattgatggcccccgctacaccttctacacccagctgcctgagaccctgagctctgtggccatcctgacagactacagagtggtgtacagcatgaccaacggggacctcttcctgtatgaatgtgccaccagcaaggccttccccctggagacccacaggagccgggtggcctgtgtggaggtgagccacaaggagcagctggtggtgtctggctctgaagatgccctgctgtgcctgtgggacctgcaggccaggaagtggaagtttgagatgagctacacagccccctgctag

SEQ ID NO: 22754 - DNA, 4299 bp, Artificial Sequence
  derived and/or modified sequence
atgcagcggggcaagccctgccgggccctgcccaccctgaagtgccagactttctgccaaagacacggattaatgttcgaagtggtggatcttcgttggggtattcgaaacatcgaggctacagaccatctgaccaccgagttgtgtctcgaggaagtggaccgctgctggaaaacctccattggacctgctttcgtcgcccttatcggggatcagtacggcccctgtctaattccatctagaattgacgagaaggagtgggaagttttgagagaccatctcactgcccggccgtcggacctggagttggtggctagatatttccagcgggacgagaacgccttccctcctacgtacgtcctgcaagcacctgggactggagaggcctgcgaaccggaggaagccacccttacatcggtactgcgcagtggcgcgcaggaggctcgcaggctgggactaattacacaggaacagtggcagcattatcatcgttcggtgatcgagtgggagatcgagcgtagtctgctgtcctctgaggatagagaacaaggggctactgtgttcctgcgagagatacaggatctccataagcacattctggaagactgtgccctcagaatggtggaccggctggcagatggttgcctcgatgccgacgcccagaacctccttagtagcctcaagtcacacattactgacatgcatcccggcgtgctgaaaacgcaccggttaccgtggagccgcgatctcgtgaatcctaaaaacaagacccatgcttgttacctcaaagaattgggggagcagtttgtggtccgcgccaaccatcaggtgttgacgcggttacgggagctggacacggccgggcaggagctggcttggttgtaccaggagattcggcaccatctttggcaaagtagcgaagtcattcaaaccttctgtggcaggcaggaactactcgcaagactcggacagcagcttcgacacgacgattcaaagcagcacactcctctggtgctgtttggtcctccgggcatcggaaaaacagcgctaatgtgcaagttggcagagcagatgccaagactgctgggccacaaaactgtcacagtgctaagactgctgggcacctcccagatgagtagcgatgctcggggccttctcaaatcaatttgcttccaagtctgccttgcctacggcctgcctctgcccccagcacaagtgctggatgcccataccagggtggtccagttcttccacaccctcctgcacacagtaagctgccgaaactttgaaagtctggttttactcctggatgcgatggatgatctggacagtgtcaggcatgctcgtcgcgtgccctggcttcctctcaattgcccccctcgagttcacttgatcttatccgcttgcagcggggctctgggagtgctggacaccttgcaaagagtcctgcttgatccagaggcttactgggaagtgaagccgctgtccgggaatcagggccagcagatgatccagctgctccttgccgctgcccgcagaaccctctcccctgtccacaccgatctgctctgggcctctttgcctgagtgtggaaatcctggcaggctccgcctggcctttgaagaggctaggaaatgggccagtttcaccgttccagtcccactggccacgaccgccgaggaggcaacacaccagctgtgcacgaggctcgagcagacccacggacaacttctggttgcacacgtgctcggctatattgtgtcttctaggcacggactgtctgaggctgagttaaaagatgtgctgagcttggatgatgaagtgctacaggacgtatacagagactggacaccaccaagtaaagagctgctgcgtttccctccattactgtgggtgagactgcgcagggacctgggctactacttggctcgcaggccagtcgatggctttactctgttggctatagcccatcgccagctggtggaagtggtcagggagcgctacttgtccggttccgagagggccaagcggcacggagttctggcagatttctttagcggcacatggagccaaggaactaaaaagctgatcaccctccctctggtgggaaaaccactgaatctggatagaaaggtggctccccagcctctctggtttagccataccgttgctaatttgagaaagctgaaagaattgccatatcacctgctgcattcaggcaggcttgaggaactaaaacaggaggtgttgggatcaatgtcttggatatcctgccgtggaatctctggagggattgaggatttgctggacgactttgatctctgcgcgcctcacctggacagcccagaagtcgggctcgtacgggaggccttgcagctgtgccgacccgctgtggagctgcgaggtatggaacgttctctcttatacacagagctcttagcgcgcctgcacttttttgctacttctcatcccgctctggtgggacagctttgccaacaggcccaaagttggtttcagctgtgcgctcatccggtgttagtccccctgggcgggttcctccagccaccgggcggacctctgcgggccacattgtctggatgccacaaaggtataaccgcaatggcatggggcgttgaggagaagctgcttgtaatcggcactcaagatggcatcatggctgtgtgggatatggaagagcagcatgtgattcatatgctgacaggccatacgggcgaagtccgctgtgtgaaaatctttgcaaaaggcacgttagcaaattctgccagcaaggactataccctgcacctttggaatttactgagtggacaggaaaagtttactatatgggacggtggctccaaaaaccctgcagagccccagatttggaacctgcacgtcgatgaagcgcacaaggtcgtctactccgctagcggaagcaaaataaacgcttggaacttagagacagccgaacccgtctttcacatcttgggcgacgcttcggacccctggatgtgtatggctgtgcttgcctcacaggctaccctgctcacagtgagtagggacggtgtggtgtcgctgtggagcagcgcaaccggcaagctccaaggaaaacagcatatgtccagtataaaagaggagacacccacgtgcgccgtcagcgtgcagaagcagggcaagctggtcaccggattttctaatggaagcatttcactggtctcatcaaagggggatcgcctcctggagaagctgcccgacgcagtccggtttctggttgtctcagaggatgagtcactcctcgccgccgggtttggtcgcagtgtaagaatttttctggccgatagtaggggcttccgccgctttatggcaatggatctggaacacgaggacatggtggaaacagctgtgttcggaacagagaacaatctgataatcaccggatctctggacgctctaattcaggtgtggagtctctctgagcaaggcaccctgctggacatcctggaaggcgtcggcgctcccgtatcactcttagcccggggcggcgctctagtggctagcgcctcaccacagagttcctctttcaaggtgtgggacttgtcagatgcccatcgtagtcgcgtgcccgccccctttctggatcgcacaggattaaccgctgtatcgcataatggcagttatgtttactttcctaaaataggagataagaataaggtgacaatttgggacctcgccgagggagaagagcaggatagtcttgacactagcagtgagattagatgccttgaggtggcggagcagcgcaaactgttattcaccgggcttgtctcaggcgttgtcctggtatttcccctcaatagtaggcaggatgtgatctgcattcctcctccggaggccagaaaggcgatcaattgcatgtccttaagtaaatgtgaagatagactggctattgcctatgataacatcgttctggttctggacatcacaagtggcgacccctgccccgtgattgatgggccgagatataccttctatacacagttgcccgagacgctgagcagcgtggcaattctcacagattacagggttgtgtattcaatgactaatggcgacctgttcctgtatgaatgcgccacgagcaaggcttttcctctggagacccatcgcagtcgtgtagcttgtgtggaagttagccacaaggagcagcttgtggtttctggttccgaggacgcgctgctgtgtctgtgggatttgcaagcacgaaaatggaaatttgagatgtcgtatactgctccttgttag

SEQ ID NO: 22755 - DNA, 4299 bp, Artificial Sequence
  derived and/or modified sequence
atgcagcggggcaagccctgccgggccctgcccaccctgaagtgccagacgttctgccagcgacacgggctcatgtttgaagtggtcgacctgagatggggtattaggaatattgaagccaccgaccacctgacaaccgaactgtgtctggaggaagttgacaggtgctggaaaacgtccataggtccggccttcgttgccttaataggtgatcagtacggcccttgccttattccatccagaatagacgagaaggagtgggaggtgttgcgggaccaccttaccgcaaggcctagtgacttggagctggtcgctcgttacttccagagggacgaaaatgcatttcctcccacatatgtgctccaggcgcctggaaccggggaggcctgcgagcctgaggaagccacgctgacctctgtacttcgttccggagcccaggaagcacgccgtctggggctgatcacacaggagcaatggcagcactatcacaggtccgttatcgaatgggagatagaacggtcgctgctgtcgagcgaagatcgcgaacagggggcaacagtgttcctgagagaaattcaagatctgcataaacacatcctggaagattgtgccctgcgcatggtggaccgcctggccgatgggtgtttagatgccgacgctcagaatcttctcagcagtctgaagagccatatcactgatatgcacccaggagtcttgaaaacccaccgactgccctggtcaagggatctggtaaacccgaagaacaagacacacgcttgctatttgaaagagctgggggaacagttcgtggttagagcgaatcaccaggtccttacaaggctacgagaactagacaccgctggccaggaactggcatggttgtatcaggagatcagacatcatctgtggcagtcttcagaggtcattcagactttctgcggcaggcaggaactgctggcaaggcttggccagcagctaagacacgatgattcaaaacagcacaccccgcttgtcttgtttggacctcccggtataggtaaaacggccctgatgtgtaaactggcagagcagatgccacggcttctcggacacaagacggttacagtgttaagactgctgggtacttctcagatgagctccgatgcgcggggcctgctcaaatccatttgcttccaggtttgcttggcatacggtttgccactgccaccagcccaagtgctggacgcccacacaagagttgtccaattcttccacacactgctccacaccgtgagctgtcgaaatttcgagtcacttgttctccttctagacgccatggatgatctggacagtgtccggcacgcgcgccgcgtgccctggcttcctctgaactgtcctcccagagtgcatttaatcttgtccgcctgtagcggggcattgggcgtgttagacaccttacaacgggtgttactggatcccgaggcctactgggaggtgaagcctctatctggaaaccaaggacaacagatgatacaacttctgttagccgccgcacgtaggacactgtcccccgtgcacaccgacttactatgggctagtctccccgaatgtggcaatcctggtaggcttcgcttggcttttgaagaggcccggaagtgggctagctttactgttccggtccccttggctacaaccgccgaagaggcaactcatcagctctgcacacggcttgagcagacacatggccagctgctggtggcccatgttctcgggtatatcgtcagcagccgccacggcttgagcgaggctgaactgaaggacgtcctctcacttgatgacgaagtgctccaggacgtgtaccgggactggacccccccatctaaagaacttttaagatttcctccactgctgtgggtgagactgagacgagacctcggttattacctggcgcgccggccggtggacgggttcacacttctggctatcgctcatagacagcttgtcgaagtcgtgagggagagatacctgtccgggagtgagagagctaaaagacacggggtcttggctgactttttctctggcacctggtcacaagggactaagaagttaataacactcccactagttgggaaacctcttaatttggatagaaaggtcgccccgcaaccattgtggtttagccatactgtggctaacctccggaaactaaaggagttgccctaccatctactgcactccggacgtctggaggagcttaaacaagaggtgctcggcagcatgagctggatatcctgtcgcggtatatcaggcggtatcgaggatcttctggatgatttcgacctatgtgccccacacctcgactctcccgaagtggggttggtgcgggaagcattgcagctgtgtagaccggccgtggaacttaggggcatggaacggtcccttctgtacaccgagctcctggcccggctccactttttcgcaaccagccatccagctctggtgggccagctatgccaacaggctcagtcctggttccagctgtgtgctcaccctgtccttgtccctctaggcgggtttcttcagcctccaggcggacctctgcgcgctacactctccgggtgtcataagggaattaccgctatggcatggggagttgaagagaagctgttggttattgggacccaagacgggataatggcagtgtgggacatggaggagcagcacgtcatccatatgttgaccggacacacaggtgaggtcagatgcgttaaaattttcgcgaaaggaaccctggctaattcagcttctaaggattacacactgcacctctggaacttgctgagcggccaagaaaagtttacaatctgggatggcgggtccaagaatccggccgaaccacagatctggaatctccacgtagacgaagcacacaaggtggtctactccgcaagcgggtcaaagattaatgcctggaaccttgagacagccgagccagtgtttcacatcctgggcgacgcttccgatccttggatgtgcatggccgttctcgcctcccaagccactttgctgacagtgagccgggacggagtggttagtctgtggagcagtgccaccggaaagttacagggaaaacagcatatgagctccatcaaggaggaaacgcccacctgtgccgtaagcgtccagaagcagggaaagctggtcaccggtttctctaacggctccataagcctagtgtcaagtaagggggaccggctactggagaaactgcctgacgccgtgcgttttctggtggtgtccgaggacgagagcctgcttgccgctggatttggccgatcagtacgcatcttcctggccgacagccggggctttcggagatttatggcaatggacctcgaacatgaggacatggtggaaacggcagtgttcgggaccgagaataacttgattattactggatcacttgacgctctaatccaggtttggagcttgtcggagcagggaactctgctggacatcctagagggggtgggggctcccgttagcctactggccagagggggagccttagttgcgtcggcttcgccccagtcttcttctttcaaagtttgggacttatccgacgctcacagatcccgcgtccccgcaccattcctggaccgcactggcctgacagcagtgtctcacaacggaagctatgtttactttcccaagatcggcgacaaaaacaaagttactatctgggatctggcggagggggaagaacaggacagcctggacacctcgtccgagatccgctgcttggaggtggccgaacagcggaagctgttgttcacaggccttgtgagtggtgtcgttcttgtcttccccctcaatagtcggcaggatgtaatctgcatccccccccctgaagctagaaaggcaattaattgtatgtccctttccaagtgcgaagatcggctcgcaattgcttatgacaacatcgtgcttgtgctcgatattactagcggagacccttgcccagtaatcgacggcccacgctacaccttctatacccagctgcctgagacattaagtagtgtggccatcctgacagattacagagtggtttactccatgactaacggcgatctgttcctgtatgagtgcgccactagcaaagccttccccctcgagacacaccgcagcagagtcgcttgtgtggaggtctcccataaagaacaacttgtagtgtctggctcagaggacgcactgctttgcctgtgggacctgcaggctcgcaaatggaagttcgagatgtcatacaccgctccttgttag

SEQ ID NO: 22756 - DNA, 5989 bp, Artificial Sequence
  derived and/or modified sequence
tggatgcagagagggaagccctgcagagcactgcctaccctgaagtgccagaccttctgccagaggcacggcttgatgtttgaggtcgttgatctgaggtggggtattcggaacattgaagccactgaccacttgaccacagaactctgcttggaggaggttgaccggtgttggaaaacatccatagggccagcttttgttgccctcatcggtgatcagtacggcccctgtctgattccctcgcggatcgatgagaaggagtgggaggtattgagggaccatctgactgccaggccaagtgacctggagctggtggcacgatacttccagagggacgagaatgcgtttcctcccacctacgtcctgcaggcaccaggtactggggaggcctgtgaaccagaggaggccaccttaacttctgtcctacgctctggagcccaggaggcccggaggctggggctcatcacccaggagcagtggcagcactaccaccggtcagtcattgagtgggagatagagcggagcctgctgagctcagaggaccgggaacagggagccaccgtcttccttagagagatccaagacctccacaaacacatccttgaagactgcgcccttaggatggtggaccggctcgcggatggctgcctggacgctgatgcccagaaccttctcagcagcctcaaaagtcacatcactgacatgcacccaggggtcctcaagacccaccgcctgccgtggagccgcgacttggtgaaccccaagaacaagactcacgcctgctacctgaaggagctgggtgagcagtttgtggtgagggccaatcaccaggtcctcacacgcctccgtgagctggatacggccggacaggagttggcgtggctctaccaagagatccgccaccacctttggcagagctcggaggtcattcagaccttctgcggacgccaggaactcctggcccggcttgggcagcagctcaggcacgatgacagcaagcagcacacccccctggtactctttgggcccccaggcattggaaagacagccctgatgtgcaagctggctgagcagatgccaaggctgctggggcacaagacagtgaccgtcctgcggctgctggggacgtcacaaatgagctcagatgcccgtggcctgctgaagagcatctgcttccaggtgtgcctggcctatgggctgcccttgccccctgcccaggttctggacgcccacaccagggtggtccagtttttccataccctcctccacactgtctcttgcagaaacttcgagtctctcgtgctcctgctggatgctatggatgacctggactctgtccgccatgctcggagggttccctggctgcctctcaactgccccccgagggtgcacctcatcctctcagcttgctcgggggcactgggggttttggacaccttgcagcgggtgctcctggacccggaggcctactgggaggtgaagcccctttccggaaaccaaggccagcagatgatccaactcctgctggcagctgcaaggaggacgctgagcccggtgcacacagatttgctctgggccagcctcccagagtgtgggaacccagggcggctgaggctggcgtttgaggaagcccggaaatgggcctctttcaccgtgcctgtcccgctggccaccaccgcagaggaagccacgcaccaactctgcacccgcctggagcagacacacgggcagctcctcgtggcccacgtgctgggctacattgtgtcttcccgacacggtctctcggaggcggagctgaaggatgttttgtccctggacgacgaggtcctgcaggatgtgtaccgagattggaccccgcccagcaaggagctgctgcgcttcccgcccctgctgtgggtgcggcttcgtcgggatctgggatactacttggcccggcggcccgtggatggcttcaccctcctggccattgcccacagacagctggtcgaggtggtccgtgagcgctacctgtcaggatccgagagagccaagaggcatggcgtcctggccgacttcttctcagggacctggagccagggtaccaagaagctcatcactctgccacttgtggggaaaccactgaacttggaccgaaaggtggccccgcagcctctgtggttctcacatacggttgcaaacctgcggaagctgaaggagttgccctatcacctgcttcactcgggccgcctggaggagctgaaacaggaggttctgggcagcatgagctggatttcctgccggggcatctctgggggcattgaagacctgctggatgactttgacctgtgtgcccctcacctggactcccctgaggttggcctggtccgtgaagccctccagctctgccgccctgctgtggagctccgaggcatggagaggagcctcctgtacacagaactgctggccagactccatttcttcgccacctcacatccagcactggtgggacagctatgccaacaggcccagagctggttccagttgtgcgcacaccctgtgctggtgcccctcggaggattcctccagcccccgggaggacccctccgggcaactctcagcggctgtcacaaaggcatcaccgccatggcatggggtgtggaggagaagctgctggtgattggcacccaggatggcatcatggctgtgtgggacatggaagagcagcatgtgatccacatgctaactggacacacaggagaggtgaggtgtgtgaaaatatttgccaaagggaccctcgccaactctgcttcaaaggattacacgctgcacttgtggaacttactctctggccaggagaaatttaccatttgggatggaggctcaaaaaatcccgctgaacctcagatctggaaccttcatgtggatgaggcacacaaagttgtgtattcagcatctggctcaaagatcaatgcttggaatctggaaactgcagagccggtattccatatcctgggagatgcctctgatccttggatgtgcatggccgtgctggcctcccaggccacactgctgacagtgtccagggatggtgtggtcagtctgtggagctcagctacgggaaaacttcaggggaagcaacatatgtccagcatcaaagaagaaacacctacctgtgccgtctcagtccagaagcaaggaaagcttgttaccgggtttagcaatggctccatctctttggtttcctccaaaggggacagattgctggagaagcttccagatgctgtgaggttcctggtggtctctgaagatgagtccctcctcgccgcaggctttggaagatcggtgcggatattcttggcggactcgaggggctttcgccgattcatggccatggatctggaacatgaagacatggtggagacggctgtttttggtactgagaacaacctgatcatcacggggtcccttgatgcgctcattcaggtgtggagtctgtcagaacaggggacccttctggacatcctggaaggcgtcggggcccccgtgagcctgctggcccgcggcggggctttggtggcatctgcttccccacagtcctcatctttcaaggtctgggatctcagcgatgctcataggtcccgggtgcctgcaccatttctggaccgcaccggcctcaccgcagtgtcccacaatggaagctacgtctacttccccaaaattggggacaaaaacaaagtcactatttgggacttggcagaaggcgaggaacaagattccctggacacctccagtgagatcaggtgtctggaggttgctgagcagcgcaagctcctatttacgggcctcgtgtcgggggtcgtccttgtgttccccctgaattccaggcaggacgtgatatgcattccccctcccgaggcccggaaagcaatcaactgcatgtccctgagcaagtgcgaggaccgcctggccatcgcctatgacaacatcgtcctggtgctggacatcacctccggggacccctgcccggtcatcgatgggccaagatacaccttttacactcagctgcccgagaccctctccagcgtggccattctgacggactaccgcgtggtctacagcatgaccaatggggacctctttctttacgagtgtgcaacttccaaagcgtttcccttggagacccacaggagccgagttgcctgtgtggaggtcagccacaaggagcagctggtggtcagcgggtctgaggatgccctgctgtgtctctgggacctgcaggcacgcaagtggaaattcgagatgagctacacggcaccctgctgacagtccagtttgtccatgctgtggtaaacagaatcatcccaaccaccagtggcttcattgcccccaccaggcatggttatctgatccgagagaatttccagtgcctttcagcaaaagcctcaccgcaggaccctcttaagaacttcaagaaggcaatgtggatggtcaaatccaggcagagagaggagctagttgcagctgcaggagctccccaggacttggagtcagaaagtgcccagggaaatgaaaccaaatcaaacaaatgctcacaagtgtgcctgatagtgtaaaaaaataaaaataaaaaaaccctgtgggggtatggggctccagtgagttagccccatttaatctagttaaagcaaaaagaatacgtttgctggtgtatatctggacccatggcttcagattatggcttcagaccttgtctcttctcatctttccattattctttcctctttttcattttcattctcagacttgccacccccaggttagcaacatggtggccaatatgctgctgtctccaatttcaatagaaaagagagcttctctttcccaacagtcctagcctcaactctactggtcccaattggcccatacgcctagccctaaaccaattattatatctgggagaatgcagagctctaatcggctagactgatccaatgtccaccactgggactgagaatagaagagattactcctgagatgcaaactggagttctggtaccagatgaagggggaacggatgaatgtgagatacagcaaatcactgatgtggaccacagaacctcacagtttataaagctgtaggtgctgtcatctgatcctcatcacaactcatactttagggagggcaggagtttctgtatctattttacagatgaggaaactgagccttgcggaagtagttataatttgattcaggtcacaagtccaaggtgcaagagctctgagagtgagccttctgtcccattcctgttagacctcactccaatttcagtctgcagagcacaaccatctcttccacaggcaccacactcaaatgctcacaggagctagtgactaatctagacacttccatgcacctgggtgagcagcagggagagacagagactggacatgtggaaggcagagattgtgtctagggtgggtatgagcagcctgactgtagcccagaatcaccatggccaaacaagcccactgctgtcagtgcttccagttgtaataagcaaagccagaaatccagacttttatgcaaaaatgttctgacttttaaagttggcgattggttgaatttatatctatagtgcatttggcatgtgcgtctttggttaatgagctgacttcaggactcacgctggcagtaaaacaatcaacatgttatagttcatccctctctattccttggctcccaaacttttgggataaagatgtgggtttttaatcttaaaaactggaggctcttggaagtagaaagagctgctgatctctccctgctttgcttttgaactgtctgccttgtgcaagttcaacagtcaaactgttttcattccacttaagtggatctttcttctttgcccacagccttctaaaagcccttctcagtcttctcaggcttttactttaatgctaggatagtctaaatcttcaaggtggctatcccttctcccctccgtggaat

SEQ ID NO: 22757 - DNA, 7641 bp, Artificial Sequence
  derived and/or modified sequence
agtctaaattggtcgttcaactaccagcaaaggctaaagagaggctggagcccccaggacagccagaacgctgacactgcaaagggcctctgtccttactggggaagcccagtcctgctcagctgtcttcttcagcaacaaacagaagtccagaaagagaaacagttgtggaggaagctgttgtgatgataatttactgagcacctactatgtgccaggcacgccagccttaccagacaagatccttgggctcatggaattcactttctcgtgggacagacaaacaataacatgtagaaacatatcagctgttgaccatgcggccgatgccctgggagggagaccacttgcttaagtcctccaggagggcgatggaggagccggcattccaaccaggctcacggatgccaagatatggatgcagagagggaagccctgcagagcactgcctaccctgaagtgccagaccttctgccagaggcacggcttgatgtttgaggtcgttgatctgaggtggggtattcggaacattgaagccactgaccacttgaccacagaactctgcttggaggaggttgaccggtgttggaaaacatccatagggccagcttttgttgccctcatcggtgatcagtacggcccctgtctgattccctcgcggatcgatgagaaggagtgggaggtattgagggaccatctgactgccaggccaagtgacctggagctggtggcacgatacttccagagggacgagaatgcgtttcctcccacctacgtcctgcaggcaccaggtactggggaggcctgtgaaccagaggaggccaccttaacttctgtcctacgctctggagcccaggaggcccggaggctggggctcatcacccaggagcagtggcagcactaccaccggtcagtcattgagtgggagatagagcggagcctgctgagctcagaggaccgggaacagggagccaccgtcttccttagagagatccaagacctccacaaacacatccttgaagactgcgcccttaggatggtggaccggctcgcggatggctgcctggacgctgatgcccagaaccttctcagcagcctcaaaagtcacatcactgacatgcacccaggggtcctcaagacccaccgcctgccgtggagccgcgacttggtgaaccccaagaacaagactcacgcctgctacctgaaggagctgggtgagcagtttgtggtgagggccaatcaccaggtcctcacacgcctccgtgagctggatacggccggacaggagttggcgtggctctaccaagagatccgccaccacctttggcagagctcggaggtcattcagaccttctgcggacgccaggaactcctggcccggcttgggcagcagctcaggcacgatgacagcaagcagcacacccccctggtactctttgggcccccaggcattggaaagacagccctgatgtgcaagctggctgagcagatgccaaggctgctggggcacaagacagtgaccgtcctgcggctgctggggacgtcacaaatgagctcagatgcccgtggcctgctgaagagcatctgcttccaggtgtgcctggcctatgggctgcccttgccccctgcccaggttctggacgcccacaccagggtggtccagtttttccataccctcctccacactgtctcttgcagaaacttcgagtctctcgtgctcctgctggatgctatggatgacctggactctgtccgccatgctcggagggttccctggctgcctctcaactgccccccgagggtgcacctcatcctctcagcttgctcgggggcactgggggttttggacaccttgcagcgggtgctcctggacccggaggcctactgggaggtgaagcccctttccggaaaccaaggccagcagatgatccaactcctgctggcagctgcaaggaggacgctgagcccggtgcacacagatttgctctgggccagcctcccagagtgtgggaacccagggcggctgaggctggcgtttgaggaagcccggaaatgggcctctttcaccgtgcctgtcccgctggccaccaccgcagaggaagccacgcaccaactctgcacccgcctggagcagacacacgggcagctcctcgtggcccacgtgctgggctacattgtgtcttcccgacacggtctctcggaggcggagctgaaggatgttttgtccctggacgacgaggtcctgcaggatgtgtaccgagattggaccccgcccagcaaggagctgctgcgcttcccgcccctgctgtgggtgcggcttcgtcgggatctgggatactacttggcccggcggcccgtggatggcttcaccctcctggccattgcccacagacagctggtcgaggtggtccgtgagcgctacctgtcaggatccgagagagccaagaggcatggcgtcctggccgacttcttctcagggacctggagccagggtaccaagaagctcatcactctgccacttgtggggaaaccactgaacttggaccgaaaggtggccccgcagcctctgtggttctcacatacggttgcaaacctgcggaagctgaaggagttgccctatcacctgcttcactcgggccgcctggaggagctgaaacaggaggttctgggcagcatgagctggatttcctgccggggcatctctgggggcattgaagacctgctggatgactttgacctgtgtgcccctcacctggactcccctgaggttggcctggtccgtgaagccctccagctctgccgccctgctgtggagctccgaggcatggagaggagcctcctgtacacagaactgctggccagactccatttcttcgccacctcacatccagcactggtgggacagctatgccaacaggcccagagctggttccagttgtgcgcacaccctgtgctggtgcccctcggaggattcctccagcccccgggaggacccctccgggcaactctcagcggctgtcacaaaggcatcaccgccatggcatggggtgtggaggagaagctgctggtgattggcacccaggatggcatcatggctgtgtgggacatggaagagcagcatgtgatccacatgctaactggacacacaggagaggtgaggtgtgtgaaaatatttgccaaagggaccctcgccaactctgcttcaaaggattacacgctgcacttgtggaacttactctctggccaggagaaatttaccatttgggatggaggctcaaaaaatcccgctgaacctcagatctggaaccttcatgtggatgaggcacacaaagttgtgtattcagcatctggctcaaagatcaatgcttggaatctggaaactgcagagccggtattccatatcctgggagatgcctctgatccttggatgtgcatggccgtgctggcctcccaggccacactgctgacagtgtccagggatggtgtggtcagtctgtggagctcagctacgggaaaacttcaggggaagcaacatatgtccagcatcaaagaagaaacacctacctgtgccgtctcagtccagaagcaaggaaagcttgttaccgggtttagcaatggctccatctctttggtttcctccaaaggggacagattgctggagaagcttccagatgctgtgaggttcctggtggtctctgaagatgagtccctcctcgccgcaggctttggaagatcggtgcggatattcttggcggactcgaggggctttcgccgattcatggccatggatctggaacatgaagacatggtggagacggctgtttttggtactgagaacaacctgatcatcacggggtcccttgatgcgctcattcaggtgtggagtctgtcagaacaggggacccttctggacatcctggaaggcgtcggggcccccgtgagcctgctggcccgcggcggggctttggtggcatctgcttccccacagtcctcatctttcaaggtctgggatctcagcgatgctcataggtcccgggtgcctgcaccatttctggaccgcaccggcctcaccgcagtgtcccacaatggaagctacgtctacttccccaaaattggggacaaaaacaaagtcactatttgggacttggcagaaggcgaggaacaagattccctggacacctccagtgagatcaggtgtctggaggttgctgagcagcgcaagctcctatttacgggcctcgtgtcgggggtcgtccttgtgttccccctgaattccaggcaggacgtgatatgcattccccctcccgaggcccggaaagcaatcaactgcatgtccctgagcaagtgcgaggaccgcctggccatcgcctatgacaacatcgtcctggtgctggacatcacctccggggacccctgcccggtcatcgatgggccaagatacaccttttacactcagctgcccgagaccctctccagcgtggccattctgacggactaccgcgtggtctacagcatgaccaatggggacctctttctttacgagtgtgcaacttccaaagcgtttcccttggagacccacaggagccgagttgcctgtgtggaggtcagccacaaggagcagctggtggtcagcgggtctgaggatgccctgctgtgtctctgggacctgcaggcacgcaagtggaaattcgagatgagctacacggcaccctgctgacagtccagtttgtccatgctgtggtaaacagaatcatcccaaccaccagtggcttcattgcccccaccaggcatggttatctgatccgagagaatttccagtgcctttcagcaaaagcctcaccgcaggaccctcttaagaacttcaagaaggcaatgtggatggtcaaatccaggcagagagaggagctagttgcagctgcaggagctccccaggacttggagtcagaaagtgcccagggaaatgaaaccaaatcaaacaaatgctcacaagtgtgcctgatagtgtaaaaaaataaaaataaaaaaaccctgtgggggtatggggctccagtgagttagccccatttaatctagttaaagcaaaaagaatacgtttgctggtgtatatctggacccatggcttcagattatggcttcagaccttgtctcttctcatctttccattattctttcctctttttcattttcattctcagacttgccacccccaggttagcaacatggtggccaatatgctgctgtctccaatttcaatagaaaagagagcttctctttcccaacagtcctagcctcaactctactggtcccaattggcccatacgcctagccctaaaccaattattatatctgggagaatgcagagctctaatcggctagactgatccaatgtccaccactgggactgagaatagaagagattactcctgagatgcaaactggagttctggtaccagatgaagggggaacggatgaatgtgagatacagcaaatcactgatgtggaccacagaacctcacagtttataaagctgtaggtgctgtcatctgatcctcatcacaactcatactttagggagggcaggagtttctgtatctattttacagatgaggaaactgagccttgcggaagtagttataatttgattcaggtcacaagtccaaggtgcaagagctctgagagtgagccttctgtcccattcctgttagacctcactccaatttcagtctgcagagcacaaccatctcttccacaggcaccacactcaaatgctcacaggagctagtgactaatctagacacttccatgcacctgggtgagcagcagggagagacagagactggacatgtggaaggcagagattgtgtctagggtgggtatgagcagcctgactgtagcccagaatcaccatggccaaacaagcccactgctgtcagtgcttccagttgtaataagcaaagccagaaatccagacttttatgcaaaaatgttctgacttttaaagttggcgattggttgaatttatatctatagtgcatttggcatgtgcgtctttggttaatgagctgacttcaggactcacgctggcagtaaaacaatcaacatgttatagttcatccctctctattccttggctcccaaacttttgggataaagatgtgggtttttaatcttaaaaactggaggctcttggaagtagaaagagctgctgatctctccctgctttgcttttgaactgtctgccttgtgcaagttcaacagtcaaactgttttcattccacttaagtggatctttcttctttgcccacagccttctaaaagcccttctcagtcttctcaggcttttactttaatgctaggatagtctaaatcttcaaggtggctatcccttctcccctccgtggaattcctgatagagtctcaataaaagcaaccttagaaacagaggcttttgagctgaacaagaccctactgctgtcttattcatccattttccaaaccagttttccaaggcaggttttggtagttctgcaaatgttagtgtcaaatttcatttaaaaatattttaaactgtaattttaagatgtatgcttggatgtattgggcagcagcttctaaggtgttgaagattactaaggttggtgcaaaaagtaactgtggttttcgccattaaaaatattaaaaataatggcaaaaactggctgggcacagtggctcacacctgtggtcccagctctttggaaggccgaggcaggtggatcacctgaggtcaggagtttgagaccagcctggacaacatggtgaaacccttctctactaaaaatacaaaaatcagccaggcatggtggtgagtgcctgtaatctcagttactcaggaggctgagtcaggagaatcacttgaacccgggaggcggaggttgcagtgagctgagattgtgccactgcactccagcctgggtgacagagcaagactccatctcataataataataataatggcaaaagcctcggtggctcacgcctgtaatcccagcactttgggaggctgaggcgggtggatcacttgaggccaggtgttcaagagcagcctggtcaacatggtgaaactctgtctctactcaaaaatacaaaaattagcctggtgtggtgacgtacacctgtaattccagctacttgggaggctgaggcaggagaatggcttgaacccgggaggcggaggttgcagtgagccgagatcgcaccactgcactccagcatgagtgacagagactctgtctccaaaaaaaaaaaaaaaaaaaagtaatggcaaaaaccacaattaattttgcatcaacctaataatttaggattcttctgccattttcatttaactgatttaactgaagagcccaattaaattgtgaagggagccctgaaaaaattagctactctttgccactgcttctctgtgaatcaagggcttacccaatgcagaaataaagtagatgttgagaccaattaagatttcacctacaaattctgattttaaatgcctgtgtccatctccacagcctcagtgagaattgattgttttgtagataaatcctaatttaaacattggaaatgcctttttactaataaaatgctacaacaaattattgctta

SEQ ID NO: 22758 - DNA, 4299 bp, Artificial Sequence
  derived and/or modified sequence
atgcaacgtgggaaaccctgtagagccctgcccaccctcaagtgccaaaccttctgccagagacatggtctaatgttcgaggttgtggacctgcggtggggcatcagaaacattgaggccacggaccacctaactacagagctctgtctagaggaagttgatcgttgttggaaaacgagtatcggtccagccttcgtggcgctgatcggcgatcaatacggtccctgtctgatcccctcacgaattgacgagaaagagtgggaagtacttcgagaccatttgacagcaaggccatcagatttggagttggtggcgagatacttccagagggatgagaatgctttccctccaacctacgtgctccaagctccagggacgggcgaagcgtgcgagccagaagaagcaaccctcacttctgtgctgaggagtggtgcacaggaggcacgtaggttggggttgattactcaggaacagtggcagcactatcaccgaagcgtcatcgagtgggagatcgaacggagcctgctgtccagtgaggacagagaacagggcgctacagtgtttctgagggagatccaagacctgcacaagcatattcttgaggattgtgctctgagaatggttgatagactcgctgacggctgtttagacgccgacgcacagaacctgctgagcagcctaaagagccacatcacagacatgcaccccggagtgctcaagacacatagactgccatggagtcgcgatctggtcaacccaaagaacaagacgcatgcatgttacctgaaggagttgggcgagcagtttgtcgttcgggcaaatcaccaggtgctgaccagactgcgggagctggataccgctggacaagaacttgcctggttataccaggaaattagacatcacttgtggcagtcttcggaggtgatacagacattttgtggcaggcaggagctcctagcaaggttggggcagcagcttaggcatgatgactccaagcagcatacccccctcgtgctgtttggacccccaggtattggtaagacagcacttatgtgcaaacttgcagaacagatgcctcgcttgctggggcacaagaccgtgaccgttttacgattactcggaactagccagatgagcagcgacgcccgtggtctgctgaagtctatttgtttccaggtgtgtctcgcttatggcctgccattgccacctgcccaagtgttggacgcccacacgcgggtggtgcagttcttccacactctcctgcacaccgtcagctgtaggaacttcgagagtctggtactgctccttgacgctatggatgatctggatagcgtccggcatgccagacgtgtcccctggctgccactgaattgcccacctcgcgtacatctgatcctgtcagcctgctctggggctctgggtgtgttagacacacttcaacgggtcctgttagatcctgaagcctattgggaagtgaaacccctcagcgggaatcagggtcaacaaatgatccagttgctgctggcagccgctagacgcaccctaagccccgtgcacactgatttactttgggcctccctgcccgaatgtggtaaccccggtcgccttcgcttggcgtttgaggaggccagaaagtgggcctcatttaccgtgcccgttccgctggccaccaccgccgaggaggctacccaccagttgtgcacaagattggagcagactcacggacaactactcgtggctcacgtgctgggttatatcgtctcatctcggcacggtctcagcgaagcagagcttaaagacgttctctccctggatgatgaggtcctccaggatgtgtacagagattggacccctccatcgaaggaactcctccgcttcccccctctcttgtgggtaagattacggcgtgacctggggtattacttggcacggagacccgtggacgggttcaccctgctggctatcgctcatagacaactagtggaagtcgttcgtgaacgatacttgtcaggaagcgagcgggcaaagaggcatggggttctcgctgacttcttctccgggacgtggagtcaaggcacaaaaaagctaattacgttaccgcttgtcggcaagccccttaatctcgatcggaaagttgcgccacagccgctgtggttctcccacacagtggcaaaccttaggaaactaaaagagctgccctatcacctgctgcactctggcagactcgaagaactgaaacaagaggttctgggctccatgagttggatctcatgccgaggcatctctggcggaattgaagacctgttggacgacttcgacttatgcgctccccatctggactcgcctgaagtcggacttgtgcgggaagcccttcagttatgcagaccagctgttgaactcagagggatggagaggtcccttctatacacggaacttctcgcaagacttcactttttcgcaacatcgcaccctgctctggtgggacagctttgccagcaggcccaaagctggttccagctctgcgctcacccagtactggtgcccctcggcggattcctacagccacccggagggcctctgagagctaccctcagcggatgccacaaaggaatcactgctatggcgtggggcgtggaggagaagctactggtgataggtacacaggatggaataatggctgtgtgggacatggaggaacagcatgttatacacatgcttacgggacacaccggagaggtgcgctgcgtgaagattttcgccaagggtaccctcgctaattccgccagcaaagactatacactgcatttgtggaacctgctgtctggtcaggagaagttcacaatttgggatgggggttcaaagaacccagcagaaccacagatttggaacttacatgtggacgaggcacataaggtcgtgtatagcgcttctgggagtaagattaatgcttggaacttggagactgccgaacctgtctttcatatcctaggagacgctagtgacccatggatgtgcatggccgtgctggcctcacaagccactcttctgactgtcagtcgagatggagtggtgtccctttggtctagcgctaccggaaaactgcaggggaagcagcacatgtcctccatcaaagaagagaccccgacttgtgctgtgtctgtgcagaagcagggaaaactcgtaactggtttcagtaatggtagtatatccctggtttcgtccaagggcgacagattgctggagaaactgcccgatgccgtgagatttctggtagtgtctgaagatgaatcgctgctcgccgcaggctttggcaggtcggtacggattttcctagccgactccaggggattcaggcgctttatggccatggatttagagcacgaagatatggtggaaacagccgtgtttggtactgaaaataatctaattattaccggatctttagacgcactgattcaggtctggtccctgagcgagcagggaacactccttgatatcctcgagggggtgggggctcccgtctcactgcttgcgagagggggagcattggtggccagtgcatcaccgcagtcttcgtcattcaaggtttgggacctgtccgatgcccatagaagccgtgtacctgcccctttcttggataggacgggcctgaccgcagttagccacaacggaagttacgtttatttccccaagatcggggataaaaataaggttaccatctgggaccttgccgagggagaagaacaggattccctcgatacatcttccgagatcagatgtcttgaagttgctgagcagcggaaactgctgttcactgggctggtctctggggtggttttagttttcccactcaatagtagacaggacgtgatctgtatcccacctccagaggcaaggaaggctatcaactgtatgtctctgtccaagtgcgaggacagactggccattgcttacgacaacattgttctcgtactggatataaccagcggagacccttgccctgtcatcgatggtcctcggtacactttttatacacagctgccggagactttgagtagcgtggctatcttgacggactaccgagtggtgtactcaatgaccaacggtgacttattcctgtatgaatgcgccacctccaaggcatttccactggagacccatcggagccgcgtggcatgtgtggaggtctcgcataaggaacagcttgtagtgtcaggatccgaggatgctttactgtgcctgtgggatctgcaagctcgcaagtggaaattcgaaatgtcttataccgccccatgctag

SEQ ID NO: 22759 - DNA, 4299 bp, Artificial Sequence
  derived and/or modified sequence
atgcagcggggtaaaccctgtcgggctctgccaacactgaaatgccagacattctgccaaagacatggactgatgtttgaagtggtagatctacgttgggggatccgtaacattgaggcaacagaccacttgactacagaactgtgccttgaagaggtcgacaggtgttggaaaacctccattggacctgctttcgtggccctcattggcgaccagtacggtccctgcttgatcccgtccaggattgacgaaaaggaatgggaggtcctacgcgatcacctgaccgcacgaccatccgacctggagcttgtcgccaggtactttcagcgggacgagaacgcctttccccctacctacgtcctgcaagcaccagggaccggggaagcttgtgaaccagaggaggcgactctaacctccgtactacggagcggagctcaggaggctagacgcctcggattaatcactcaggaacagtggcagcattatcatcggtccgtcatagaatgggagattgagaggtctctgctatcaagcgaggatcgggaacagggagctactgtgttcctcagagagattcaagacctccacaagcatattctcgaggactgtgccctgaggatggtggatcgacttgcagacgggtgcctggacgcggacgcacagaacctcctctccagccttaagtcccatatcaccgacatgcatcctggcgttctcaaaacccaccggctcccatggtctagagatctagtcaatccaaaaaacaaaacgcatgcctgttatcttaaagaactaggggagcagtttgtggtgcgcgcaaaccaccaggtgctcacgaggctgcgagagctggataccgccggtcaggagctggcgtggttgtatcaggaaatccgtcatcacttgtggcagtcctcagaagttattcagaccttctgtggcaggcaggagctgctggcccgtctgggccagcagctgcggcatgatgactctaagcaacatacgccgttagtgctgttcggaccgccagggatcggaaaaaccgctttgatgtgcaagctcgcagagcagatgccaaggttactgggccacaagaccgtcacagttttacgcttgctcggcacctcccagatgtcatcagacgccagagggctgctgaaaagtatctgctttcaagtctgccttgcttatggactccctcttcccccagctcaagtcctggatgcccatactagagtggttcagtttttccatacactgctccacacagtgagttgtagaaactttgagtctctcgtgctgctattggacgctatggacgacttggatagcgtacggcacgcgaggcgggtgccttggctccccctcaattgcccaccacgggtgcacctaatcctgtccgcatgttccggggcactgggggtcctggacacactccagagggtcttgctggatcctgaagcgtattgggaagttaagccactttccggaaatcagggccaacaaatgatacaattactgctcgccgcagcccgaagaactctgtctcctgttcacacagaccttctgtgggcatccctgccagagtgcggtaatcccggacggttaaggttggcctttgaagaagctcgtaaatgggcttctttcactgttcccgttccgctggcaactactgccgaggaggctacacaccagctttgcaccagactggagcaaacccacggacagctcctggtggcccatgtcctcggttacatcgtttctagcagacacgggctctcagaagccgagttaaaagacgttctttctctagatgatgaggtgctgcaggatgtgtatagggactggacacccccttcgaaggagctgttgcgttttcctcccttgctgtgggttcgactgcggagggatctgggctactaccttgcccgtcgacccgttgacggctttactctgttagctatcgcccatagacagttagtggaggtggtccgagaaaggtacctttcagggtccgagagggcaaaaagacacggcgtgttggctgactttttctcagggacctggtcccagggtaccaagaagctcatcaccctcccactggttggcaagcctctgaatctggaccggaaggtagcccctcagccattgtggttcagtcacaccgtcgctaaccttcggaaacttaaagaactgccctaccatctgttacactctggtcgactcgaggaactcaaacaagaagtgctggggtcaatgtcatggatcagttgcaggggtatatctggcggaatcgaagacctcctcgacgacttcgacctgtgtgcccctcatcttgactcacccgaggtagggctcgtaagggaagctttgcaactctgccggccagcagttgagctgcggggaatggaaaggagcctgctttatacggagctgctggctcgacttcacttttttgcaacatctcaccccgctcttgtgggccagttgtgtcaacaggctcagtcctggtttcagctctgcgcgcaccccgtactggtccccttaggtggctttcttcagccacctggtggaccgttgcgcgcaactctttccggttgccataaggggattactgctatggcctggggcgtcgaggaaaagttgttggttatagggacccaggatggcatcatggccgtatgggatatggaagagcagcacgtgattcatatgcttaccgggcatactggcgaggttcgatgcgtcaaaatctttgccaagggtacgctggccaactctgccagcaaagactacaccttgcacctgtggaatctgctcagcggacaggaaaaattcaccatttgggatggcggttctaaaaatcctgccgagccccagatttggaaccttcacgtggacgaagctcacaaggtggtttatagcgcctccggaagcaaaattaacgcctggaaccttgaaactgcggagcccgtgttccacattctgggcgatgccagtgatccttggatgtgtatggctgttctcgcttcgcaggcaacccttctgactgtgtcacgggatggcgttgtatctttgtggtcttcggccacaggcaagttacagggaaaacagcatatgtcaagcattaaggaagagacccccacctgcgctgtgtcagtccagaagcaagggaagctggtgactggcttctccaatgggagcatttctctggtaagctccaagggcgaccgactgcttgagaaattgcctgacgccgtcagattcctagttgtgagcgaggatgagtcactactcgccgctggatttggacggtccgtgagaatctttcttgctgattcccgcggattccggaggttcatggcaatggacttagagcatgaggatatggttgagactgccgtctttggcaccgagaacaatctaatcataaccggatcgctggatgcattaatacaggtgtggtccctgtccgagcagggaaccctgctggacatcctcgagggggtgggtgcccctgtgtccctgctggccaggggcggtgcattggttgcgtctgctagccctcagagttcctcattcaaagtatgggatttatctgatgcccaccggtccagggtcccagctccttttctggatcggacggggttgaccgccgtatcgcacaacggatcatacgtttacttccctaagataggggacaaaaataaggtcactatctgggacctcgcggagggggaggaacaagattcactcgacactagctctgaaattcggtgtcttgaagtggcggaacagcggaaactgctgtttacagggctcgtcagcggggtggttttggtatttcctttgaactctcgccaggacgtcatctgtattcccccacctgaggcgcgaaaagctataaattgtatgtcgctgtcgaaatgcgaagatcgactggctatcgcttacgacaacattgttctggtcttggacattacaagcggcgacccctgtccagttatagatggaccccgttacacattctacactcaactccctgagacactctccagtgttgctattctcactgattaccgcgtggtgtactcaatgaccaacggcgatctatttctctatgaatgtgccacaagcaaggcattccctttagaaacacaccgttcccgcgtcgcctgcgtagaagtcagccataaagagcagctagttgtttctggctctgaggacgcgctgctttgtctctgggatctccaggctcgtaagtggaagtttgagatgagctacacagcgccttgctag

SEQ ID NO: 22760 - protein, 695 aa, Artificial Sequence
  derived and/or modified sequence
MSGAALGLEIVFVFFLALFLLHRYGDFKKQHRLVIIGTLLAWYLCFLIVFILPLDVSTTIYNRCKHAAANSSPPENSNITGLYATANPVPSQHPCFKPWSYIPDGIMPIFWRVVYWTSQFLTWILLPFMQSYARSGGFSITGKIKTALIENAIYYGTYLLIFGAFLIYVAVNPHLHLEWNQLQTIGIAAANTWGLFLLVLLLGYGLVEIPRSYWNGAKRGYLLMKTYFKAAKLMTEKADAEENLEDAMEEVRKVNESIKYNHPLRKCVDTILKKCPTEYQEKMGRNMDDYEDFDEKHSIYPSEKSLVKLHKQVIYSVQRHRRTQVQWQILLEQAFYLEDVAKNETSATHQFVHTFQSPEPENRFIQYFYNPTFEWYWECLLRPWFYKILAVVLSIFSVIVVWSECTFFSTTPVLSLFAVFIQLAEKTYNYIYIEIACFLSIFFLSICVYSTVFRIRVFNYYYLASHHQTDAYSLLFSGMLFCRLTPPLCLNFLGLTHMDSSISHKNTQPTAYTSIMGSMKVLSFIADGFYIYYPMLVVILCIATYFSLGTRCLNLLGFQQFMGDDDMTSDLVNEGKELIRKEKRKRQRQEEGENRRREWKERYGHNREDSTRNRNIHTDPKESNFSDVNTNRSAFKYTRANNRTERDRIELLQDAEPLDFNAETFTDDPLESESGRYQPGGRYLSMSRSDIFNDV

SEQ ID NO: 22761 - protein, 589 aa, Artificial Sequence
  derived and/or modified sequence
MPIFWRVVYWTSQFLTWILLPFMQSYARSGGFSITGKIKTALIENAIYYGTYLLIFGAFLIYVAVNPHLHLEWNQLQTIGIAAANTWGLFLLVLLLGYGLVEIPRSYWNGAKRGYLLMKTYFKAAKLMTEKADAEENLEDAMEEVRKVNESIKYNHPLRKCVDTILKKCPTEYQEKMGRNMDDYEDFDEKHSIYPSEKSLVKLHKQVIYSVQRHRRTQVQWQILLEQAFYLEDVAKNETSATHQFVHTFQSPEPENRFIQYFYNPTFEWYWECLLRPWFYKILAVVLSIFSVIVVWSECTFFSTTPVLSLFAVFIQLAEKTYNYIYIEIACFLSIFFLSICVYSTVFRIRVFNYYYLASHHQTDAYSLLFSGMLFCRLTPPLCLNFLGLTHMDSSISHKNTQPTAYTSIMGSMKVLSFIADGFYIYYPMLVVILCIATYFSLGTRCLNLLGFQQFMGDDDMTSDLVNEGKELIRKEKRKRQRQEEGENRRREWKERYGHNREDSTRNRNIHTDPKESNFSDVNTNRSAFKYTRANNRTERDRIELLQDAEPLDFNAETFTDDPLESESGRYQPGGRYLSMSRSDIFNDV

SEQ ID NO: 22762 - DNA, 2088 bp, Artificial Sequence
  derived and/or modified sequence
atgagcggcgccgccctgggcctggagatcgtgttcgtgttcttcctggccctgttcctgctgcacagatacggcgacttcaagaagcagcacagactggtgatcatcggcaccctgctggcctggtacctgtgcttcctgatcgtgttcatcctgcccctggacgtgagcaccaccatctacaacagatgcaagcacgccgccgccaacagcagcccccccgagaacagcaacatcaccggcctgtacgccaccgccaaccccgtgcccagccagcacccctgcttcaagccctggagctacatccccgacggcatcatgcccatcttctggagagtggtgtactggaccagccagttcctgacctggatcctgctgcccttcatgcagagctacgccagaagcggcggcttcagcatcaccggcaagatcaagaccgccctgatcgagaacgccatctactacggcacctacctgctgatcttcggcgccttcctgatctacgtggccgtgaacccccacctgcacctggagtggaaccagctgcagaccatcggcatcgccgccgccaacacctggggcctgttcctgctggtgctgctgctgggctacggcctggtggagatccccagaagctactggaacggcgccaagagaggctacctgctgatgaagacctacttcaaggccgccaagctgatgaccgagaaggccgacgccgaggagaacctggaggacgccatggaggaggtgagaaaggtgaacgagagcatcaagtacaaccaccccctgagaaagtgcgtggacaccatcctgaagaagtgccccaccgagtaccaggagaagatgggcagaaacatggacgactacgaggacttcgacgagaagcacagcatctaccccagcgagaagagcctggtgaagctgcacaagcaggtgatctacagcgtgcagagacacagaagaacccaggtgcagtggcagatcctgctggagcaggccttctacctggaggacgtggccaagaacgagaccagcgccacccaccagttcgtgcacaccttccagagccccgagcccgagaacagattcatccagtacttctacaaccccaccttcgagtggtactgggagtgcctgctgagaccctggttctacaagatcctggccgtggtgctgagcatcttcagcgtgatcgtggtgtggagcgagtgcaccttcttcagcaccacccccgtgctgagcctgttcgccgtgttcatccagctggccgagaagacctacaactacatctacatcgagatcgcctgcttcctgagcatcttcttcctgagcatctgcgtgtacagcaccgtgttcagaatcagagtgttcaactactactacctggccagccaccaccagaccgacgcctacagcctgctgttcagcggcatgctgttctgcagactgaccccccccctgtgcctgaacttcctgggcctgacccacatggacagcagcatcagccacaagaacacccagcccaccgcctacaccagcatcatgggcagcatgaaggtgctgagcttcatcgccgacggcttctacatctactaccccatgctggtggtgatcctgtgcatcgccacctacttcagcctgggcaccagatgcctgaacctgctgggcttccagcagttcatgggcgacgacgacatgaccagcgacctggtgaacgagggcaaggagctgatcagaaaggagaagagaaagagacagagacaggaggagggcgagaacagaagaagagagtggaaggagagatacggccacaacagagaggacagcaccagaaacagaaacatccacaccgaccccaaggagagcaacttcagcgacgtgaacaccaacagaagcgccttcaagtacaccagagccaacaacagaaccgagagagacagaatcgagctgctgcaggacgccgagcccctggacttcaacgccgagaccttcaccgacgaccccctggagagcgagagcggcagataccagcccggcggcagatacctgagcatgagcagaagcgacatcttcaacgacgtgtag

SEQ ID NO: 22763 - DNA, 1770 bp, Artificial Sequence
  derived and/or modified sequence
atgcccatcttctggagagtggtgtactggaccagccagttcctgacctggatcctgctgcccttcatgcagagctacgccagaagcggcggcttcagcatcaccggcaagatcaagaccgccctgatcgagaacgccatctactacggcacctacctgctgatcttcggcgccttcctgatctacgtggccgtgaacccccacctgcacctggagtggaaccagctgcagaccatcggcatcgccgccgccaacacctggggcctgttcctgctggtgctgctgctgggctacggcctggtggagatccccagaagctactggaacggcgccaagagaggctacctgctgatgaagacctacttcaaggccgccaagctgatgaccgagaaggccgacgccgaggagaacctggaggacgccatggaggaggtgagaaaggtgaacgagagcatcaagtacaaccaccccctgagaaagtgcgtggacaccatcctgaagaagtgccccaccgagtaccaggagaagatgggcagaaacatggacgactacgaggacttcgacgagaagcacagcatctaccccagcgagaagagcctggtgaagctgcacaagcaggtgatctacagcgtgcagagacacagaagaacccaggtgcagtggcagatcctgctggagcaggccttctacctggaggacgtggccaagaacgagaccagcgccacccaccagttcgtgcacaccttccagagccccgagcccgagaacagattcatccagtacttctacaaccccaccttcgagtggtactgggagtgcctgctgagaccctggttctacaagatcctggccgtggtgctgagcatcttcagcgtgatcgtggtgtggagcgagtgcaccttcttcagcaccacccccgtgctgagcctgttcgccgtgttcatccagctggccgagaagacctacaactacatctacatcgagatcgcctgcttcctgagcatcttcttcctgagcatctgcgtgtacagcaccgtgttcagaatcagagtgttcaactactactacctggccagccaccaccagaccgacgcctacagcctgctgttcagcggcatgctgttctgcagactgaccccccccctgtgcctgaacttcctgggcctgacccacatggacagcagcatcagccacaagaacacccagcccaccgcctacaccagcatcatgggcagcatgaaggtgctgagcttcatcgccgacggcttctacatctactaccccatgctggtggtgatcctgtgcatcgccacctacttcagcctgggcaccagatgcctgaacctgctgggcttccagcagttcatgggcgacgacgacatgaccagcgacctggtgaacgagggcaaggagctgatcagaaaggagaagagaaagagacagagacaggaggagggcgagaacagaagaagagagtggaaggagagatacggccacaacagagaggacagcaccagaaacagaaacatccacaccgaccccaaggagagcaacttcagcgacgtgaacaccaacagaagcgccttcaagtacaccagagccaacaacagaaccgagagagacagaatcgagctgctgcaggacgccgagcccctggacttcaacgccgagaccttcaccgacgaccccctggagagcgagagcggcagataccagcccggcggcagatacctgagcatgagcagaagcgacatcttcaacgacgtgtag

SEQ ID NO: 22764 - DNA, 2088 bp, Artificial Sequence
  derived and/or modified sequence
atgtccggcgcagcactgggactagagattgtttttgttttttttcttgcgctcttcttgctccatcgctatggcgactttaagaagcagcaccgccttgtaatcatcggtaccctgttagcatggtatctgtgtttcctgatagtattcattctgccactggatgtctccactaccatatacaatcggtgtaaacacgcagccgccaactcctctccaccagagaattctaatataaccggtctctacgccaccgcaaatcctgtcccatctcagcacccctgttttaagccatggagctacatccccgatgggattatgccgatcttttggcgtgtggtctactggacctctcagtttctcacctggatccttttaccttttatgcagagttacgcgcggtccggcggcttttccattactggaaaaatcaaaacagccctcatcgagaacgccatctactatgggacctatctacttatcttcggggcttttttgatttacgtggccgtgaacccccacttgcacctcgagtggaaccagctgcagacaattggaatagctgccgccaatacttgggggctcttcctgctggtgctgctcctcggatacgggctggtggagatcccacggtcatactggaatggagcaaagcggggttacctgctgatgaagacctactttaaggctgctaagctcatgacggaaaaggctgatgcggaagaaaacttggaggatgcaatggaggaagtgcgaaaggtcaacgagagcatcaagtacaatcatcccttacgtaaatgcgtagacacaattttaaaaaagtgcccaacagaataccaggagaagatgggccgaaatatggatgactatgaagacttcgatgagaagcattccatttacccatccgaaaagagcctggtgaaactgcataaacaagtgatttattctgttcaacgacaccgacggacccaggtgcagtggcagatccttctcgagcaagccttttatctggaggacgtggctaagaacgaaactagtgcaactcaccaattcgtccacacatttcagagtcccgaacccgagaacaggttcattcagtacttttataaccctactttcgagtggtattgggaatgtctgctgaggccctggttctataagatcctcgcagtggttttgtctatattctctgttatagtggtttggagtgagtgtacattcttttccaccacccccgtcctgtcacttttcgctgtgttcattcagttagctgagaaaacttataactacatctatatagagattgcctgctttttatctatattctttttatcgatctgtgtctatagcaccgtatttcggataagggtgtttaattattactatctcgcttctcatcaccagacagatgcttattctcttctgttctccgggatgttgttttgccgactgacaccacctctctgccttaatttcttagggctgactcacatggacagttcaattagccataaaaatacacagcccactgcgtacacctcgattatgggctctatgaaggtactttcttttatcgctgacggattctacatttattaccccatgttggtggtcatactctgtattgcaacttacttctccttgggaacaaggtgcctcaatctactcggatttcaacaattcatgggggatgatgatatgacatctgacctggttaatgagggaaaggagttgataagaaaagagaagcggaagcgtcaacgacaagaggagggggagaatcggagaagggagtggaaggagcgttacggtcataacagagaagactccacccgcaaccgcaacatccacaccgaccccaaggagtctaacttcagtgatgtcaacaccaataggagcgccttcaagtataccagagcaaataatcggacggagagagacaggattgaactcctacaggatgccgaacctctggacttcaacgccgagacctttactgacgatcccctggaaagcgaatctggacggtaccagccaggggggcgctatctgtctatgagtcgctctgatatcttcaatgatgtctag

SEQ ID NO: 22765 - DNA, 1770 bp, Artificial Sequence
  derived and/or modified sequence
atgccaatcttttggagagtggtctattggacctctcaatttctcacttggattctgctcccctttatgcaatcctacgctcgatctggaggtttttctattacgggcaaaattaaaaccgcgctcattgaaaacgcaatctactatggcacgtacctgctaattttcggcgcatttctcatttatgtagcagtcaatcctcatctgcacttggaatggaatcagctccagacaatcggtattgccgccgctaacacctgggggctgttcttgctggtgcttctgctgggatacggtctggtcgagatccctcgcagctactggaacggcgccaaaagggggtatttactcatgaaaacctattttaaagcagccaagctcatgactgagaaggctgatgctgaggaaaatttagaagatgcaatggaggaggtgaggaaggtcaatgagtctatcaaatacaatcatccactgagaaaatgtgtggacactatcctgaaaaaatgccctaccgaatatcaggagaaaatgggtcgcaatatggacgattacgaggacttcgatgaaaaacactctatatacccatccgaaaagagcctcgttaaattacacaagcaggttatctattctgtgcagcgccaccgtagaacgcaggtgcaatggcaaatcctgctcgagcaggcattctatctcgaagatgttgctaagaatgagacatccgccacccaccagtttgtgcataccttccaaagccccgaacctgaaaaccggtttattcagtatttctataaccccacctttgaatggtactgggagtgcctactaagaccgtggttctacaaaatactggctgtagtgcttagtatctttagcgtgatcgtggtttggagtgagtgcacatttttctccacaaccccggtgctctctttgttcgcagttttcattcaactggccgagaaaacttacaattacatttacatcgagattgcttgtttcctgtctattttctttttatctatctgtgtatactccactgtgtttcgcatacgggtgtttaattactactatctggcatctcatcatcagacggacgcatatagcctgctgttctctggtatgctgttctgccggctgacccctcccctgtgcctgaatttcctaggtcttacacatatggattcctccatttcacacaagaatacccagcctaccgcatacacttcaattatggggtcaatgaaggtcctctctttcattgccgatgggttttacatctactatccaatgctggtggtgattttatgcatcgccacctactttagcctcggcactaggtgcctcaacctgctgggtttccagcagttcatgggagatgatgatatgacttccgatctagtgaacgagggaaaagagctgatcaggaaggaaaaacgaaagaggcaaaggcaggaagagggagagaacagacgacgcgaatggaaggagcggtacgggcataatcgagaggactcaacacgaaacagaaatattcacaccgaccccaaggagagtaacttctcagacgtgaatactaaccggagcgcattcaagtatacaagggctaacaaccggacggagcgggaccggatagagcttcttcaggatgcagagccattagatttcaatgcggagactttcactgatgaccccctcgaatctgagtccggaagataccagcctggcgggaggtatctatcaatgtcgagatccgacatcttcaacgacgtatag

SEQ ID NO: 22766 - DNA, 8185 bp, Artificial Sequence
  derived and/or modified sequence
acaaccccccgcgggagcgggactggtcggcccacggggtaggcggggaggcggaagcgggcggcgctacggctgactgggaaatgtcagccgctggactgtagacggattttcctttctcgggagcccgcaggccttctggtgatcgccagcgctgtcgtctctgagcgtggatcccagaacctggacagctgtggcggccgccgtttcccggtcccgtccagacgctgtctggcgagatcggacggtgagcctaaggcggaacgcgtgaggcgcttttgagtctggggtccggggccgagagcaggcggaaagagaggggacccggcagaccccgagtggccgccgctgcggggcccaagtccttggctgctgagtggtgacagtagcccagcccgccggccagatatggtccagacctgtacatgaataactttggttagtcagagtgaaatattcaataatgagtggtgcagctttgggacttgagattgtttttgtcttttttctggcattatttctgcttcatcgatatggagactttaagaaacagcatagacttgtgattattggaacactgcttgcttggtatctctgctttcttattgtcttcatactgcctctggatgttagtacgacaatatacaaccggtgcaagcatgctgctgcaaattcaagccctcctgagaatagcaacattacaggattgtacgcaactgctaaccctgttccaagccagcatccttgtttcaagccatggagttacattcctgatggaatcatgccaattttctggagggtagtgtattggacgtcacaatttttaacatggattctcttaccttttatgcagtcatatgcaagatcaggagggttttccatcactggaaagatcaaaactgcactaattgagaatgcaatctactatggcacctatttgctgatttttggagcatttttaatttatgtagctgtaaacccacatttacatttagaatggaaccagcttcagacaattgggatagctgctgcaaatacatggggtctgtttcttcttgtgttgttgttggggtatggcttggtggaaattcctcgatcatactggaatggagcaaaaaggggttatctacttatgaaaacgtattttaaggcagccaaactgatgacagagaaagcagatgcagaagagaatttggaagatgccatggaggaggttcgtaaagtgaatgaaagcatcaagtataatcacccattgagaaaatgtgttgatacaatacttaaaaagtgccctacagagtatcaggaaaaaatgggtaggaacatggatgattatgaagattttgatgaaaagcatagtatctatccaagtgaaaaaagtctggtaaaactgcataaacaggtgatttattcagttcagagacaccgtcgaactcaagtacaatggcagattcttttggaacaagcattttatctagaagatgtagcaaaaaatgaaactagtgctactcatcagtttgttcacacctttcaatcgccagagccagaaaatcgatttatccaatatttttataatcctacatttgaatggtactgggaatgtcttttgcgaccatggttttacaagatacttgctgtggttctgtccatcttctctgtgattgttgtgtggtcagagtgcacattctttagcactactcctgtcttatccctctttgcggtcttcatacagctggcagaaaaaacatataattatatttatatcgagattgcctgcttcctttccatcttcttcctaagtatctgtgtttattctactgtgttcaggattcgtgtatttaactattattatttggcctcacatcaccagactgatgcttatagccttcttttcagtggcatgctattttgccgtttgacacctcctttatgtcttaatttcttgggtttgacccatatggattcatctatctctcacaagaatactcaaccaactgcttatacatctattatgggttccatgaaagttttatcctttattgcagatggattctatatatattatcctatgttggtggtaattctctgcattgctacttattttagtttgggaacccgttgtttgaatctgctcggtttccagcagtttatgggagatgatgatatgacatcagacttagttaatgaaggaaaagaattaatcagaaaagagaagagaaaaaggcaaaggcaagaagaaggtgaaaatcgaagaagagaatggaaagaacgttatggacacaatagagaagattccactaggaacagaaatattcatactgaccccaaagagtcaaacttctcagatgttaataccaaccgttctgcattcaaatataccagggctaataacaggactgaaagggaccggatagaacttctccaagatgcagaacctttggattttaatgcagaaacattcactgatgatcctcttgaatctgaatcaggaaggtatcagcctggtggacgatatctctcgatgtctcgcagtgacatatttaatgatgtttaaagtctgaaaaagtttgtgggaccactaaccaaggtcaacacatcagttcagtcttgatgaacatctgtgtaccctagaatttcctctatacacagtgaaaagtgtcaagataacaaaaaaggcactgagaattaattatatcttaggaataatagtttaatgtgcattgaatagagtatcacctttttcaacaagatttattacatatcatttcctaagcatctgccttagaaatacagttacagtggaaggactttaagaaagatcaacatatgttaagaacatgcagttcagtttgtttcagattaattttttttcaagagagttattttaaagattcaaggaagccataagtcatactaaataatattatatacagttttgttattgtgacttacatttttgttacttctaaaaagtatattcaacctgtatttcccaaagaaatgtaagtgaatggagacctcaaataataactgtattcataaaactcgtgtcttaaaacaaggcttacttactagacataactgaatgtaaaaagtgctttttcaaatctgtttgcaaactcgtgggggatttttgcatgtataagattaagattatacttcaagtgatgcgtgtctgtgtatttagcatgtgtactataatcaggtgatatagtattccttcagtctttgtagtaactggatttttttatgcttctggtattgctttataaaagattttcatttcagaaagctatgttcacatttatcatttaacatattgatttaaatgttgattatgatattcaaggataaatcctaggcattaatgaaaaatagtttttttttaagtagtcaaagagtccaacaaaatccttcagtatttaaaggtacctgcttatactttttgagaaaaaaactggttattcaaaggtaaaaagtgaatccatttactgttattactgatacttaaatcgtggtttatagaaaacaaaactatattagaatggaaatgtgtaataacttgttggttaaacattcttactaaatagactgtttttaacctttgtgtttaagataaatttatgtattatattttaaagcactagtgttttattgaaaagtgaacatgtttgattgcagcatgcttgcagagagttttcttatgtccctagaatatttgcaactcttactgaatccatgctacatttggtgaccatacttcagcttgcctaatacagtctcagtgtaacacctagtatcctgtttattactagtgattactttcaccctcaagtatcccacccagtttgaagatgaattatatggttcccctaacttgaagttaatctttccccaagacataaatttaaaatttttatttttatttttaataaatattatcatgtaagtttttttttaaaacacagctctatgcagatattgaaaggaatagagcatcatcctcattatctgaaaattttgatctttgagtttttatgatctttgcaattagatcccttttaaaataattatcagtggatagacttactctgaattgaaggtcatatagactacacttaagaacacacacatacagtcttttcatgtgaagtgtggccagaaagcaataagccaggagcagagataatttgatcctctttgtaatttaatgattgactaattgaatacctttggcaaatcatgtagctcttcagtgcctcaagtgcttcattctgcactttcatttgcagaatgaagatgatacttgctatttacctgctgatctaccttacaaagccattgtgaggaagttgaattggtgtttatgtactggagtttataactgtgctatttttcctagtgatacttgaaggtattggatggggaaatgatcatcccagaaatgggtccagtttcttattattacagaaaagtttacaagtacttaaagcaaaaacgcttttggactaattcatcaaaagtcctgtgaaagtagtgttgttttatttagtctttgggtttactttggaataatttcttaagtataatgtttctcatcaggttttgtcatgaaattaagatgctgttgttgaaacagaagcagaaaaggaaaagaaattagccaattacttttataactaacttttataatgccctaagataaattggtaggaacgtgtaaggtaatgttaccactttcctttagtattaaattttttatggttataataattgaagtgtatacgtgcatacacttcacaaccggtatagattcctttatgactttcaagttatatttaaaatatttggttgtttcagtgattcagaatattcaactttaagcagaatttgtcttacagaatgttatatacaatcatataaaaatgttattttgttggataaatttgagttcagaaggcaatgacttgaccctggaagactcagtttattgctggggaaccaagttaatatttgtcaagccaccctgtgtaaaaaactgtaatgggtagaagttttctcttttgagaagcttattgaaatataatgacatctactgcaaaataggactactaaatacatatactttacatgcaaagtacatttcttaaagaattatttctggtaatttttgatgactttattacttgataataagtattagtttaaaattttccaaattattctttaaatagttgttaggtaagaatattcagtaagccagtaattcagaataactattgtagaaaataataataatctattaatttaatgaatcacctctaaattactaattaacttcttttacaacataaataacttgttatcaatagagcatttttgtaaaaaacaaaagaaagaataagtttaattattaaaatttgctctcttaccaaatgaatacaagggcttttgaataatctcattgcataagaggccctcatttcacagaaatggtaagaactaaatcaaaagattcaagggttttccctttataaagaatagatcagaaaatttgacaatccagacattcaaaaaaacattctgccagttgatttttttggactactatttgattagatgatcagttctgaaatttaagctgcatgtatgcccaaattaaattagcataggaaagtcaatgtgtgtggttttttaaaagtatattttagcatattaatggagcaatttaatttacattcagttacaaacctcattcttattaataggtttagggaatgttcttgctggtgtgctgattaccatattagagaaaaaataaactctccatattataattcacctgtttagtaaggtgagtttcttacttgtgatttgagtggattatgcctaaaaattacaagtatatttgcactaagcgacaaaatatgtccctgaaaaatcttagcgtacttgaatcatcaaatgtaatggattgtattgaattctaaatgttaagaagtaagtggatttagggttttgtctttcttttcttatgtcctctctcattcctttatacctttcttcctttctgaggcctatgtttatagcatgacttttaatgtgctgaaagattttccttctgttttgtgtacagagttgtttttgatgagtggtacgctcagaaggaactagttctgactacaaatcccactacttgaaatagcaatattgtacctaaagtagtcaaacagattttgctagacaactaagcaacatctgaatacaaatgtaaagtatgctggctcagtgtatcttttaggtcactaaagaggacacatcagtaaataaattgttttcagtgtaatatttttacataaaaatagatttcccccccaaaatttaagatttatttagattcttgagacatctttttatgaaaaggaattaataacatacatcatcaaaacttttcttaggagcgttgaaacaatataagaaggttacagaaggccttctaaaatatgaattcccatctgtatgaggtacttctttccaactcagtgactttttgcccagagacttggaagactgggcaatgttttctttcccctttcccaactcctggagacaaggccctaggagcaatttcctccagtagggcaggccgtagtcctgctctgtcttacttcccactgcagcaggaacatgtcctcgcctctgattccttctgtaccaagccattggtccattgaggtcaattgaggactcactgtaaattttaaatctgttaataaagcaaggatattggcatgttcctcttctcatcaatatcctaaaagacatttattttttacacactccttgggaaaaattaactttttttcactgaaaatatttccttttttggttatcttgatctcagattattttgtgaaagaattttactgtacttagttcaaaagagtagaaagaatgatttactattgcagacatatgtagggtaaaatcataatttatttaaactgactgtacaacaccatttagagttgatattgacataaatgttattagcctactaatttggaactgcatttctcaacaatgctggcaagcatcttccgtacttagcataccaagttgtaggggagagactgtgtatatattttttaaaagcaatccaatggatttgtttttgttcatattttgaaaacaactcgaaggatttttcttattttagaaggtagaaaatatgtggacctgtgttttaaattaatatgtatttataaattataacattgaatgatacaacagagctctaatattgatgttctcactttctgatatttaatttttataaatgtttttgtaagtaactaattgtagtattgcttttaaatagttttaaaatctatctcaaataagttctgcccagacctatttccttaggacagtattctaaagttcagtagtccagtgtgagcttgaaatactcctagatcccgtcagtgatttttatatataccaatacacaagcaaattattaatataccaaaaacctaatttctgcattgcattaataaaatacttgttattttgcctttatccaattcagttgattaggtgaaatagaaaattaatcttttcaaatgtgcatatgatcataatttttcaaaatgttactgtggtcatttttggtgcatgatgccaagtttatctttagttagccattgccacctgatatgtaatgacaaatgttttactatctgatcattgggttgtagattaaactattttttttctctgtagattctcactacattttcaaatatgtacttggaaaaagctgcaaagtgctacctataagcaaattagtaactttggccttatctatgcatagtgttcgctcagtttggttttgataaattgattgacttgcagttcctttgtagtattttaacttattgtgatgtaatgaattttttgaaatgtttatttgattagctgttaaaatataggaaagaatgtagctttgcatgaaataaattacatttctacaagttaataagaattttgctgattgtttatatattttacttcatttgagattaaggttcttttaagtagattcaggcgttctttgttccttatcaatttattagcaaatatgacaaatgttttaaaataaatatgtgtactttagttttca

SEQ ID NO: 22767 - DNA, 2441 bp, Artificial Sequence
  derived and/or modified sequence
ggaagcgggcggcgctacggctgactgggaaatgtcagccgctggactgtagacggattttcctttctcgggagcccgcaggccttctggtgatcgccagcgctgtcgtctctgagcgtggatcccagaacctggacagctgtggcggccgccgtttcccggtcccgtccagacgctgtctggcgagatcggacggtgagcctaaggcggaacgcgtgaggcgcttttgagtctggggtccggggccgagagcaggcggaaagagaggggacccggcagaccccgagtggccgccgctgcggggcccaagtccttggctgctgagtggtgacagtagcccagcccgccggccagatatggtccagacctgtacatgaataactttggttagtcagagtgaaatattcaataatgagtggtgcagctttgggacttgagattgtttttgtcttttttctggcattatttctgcttcatactgcctctggatgttagtacgacaatatacaaccggtgcaagcatgctgctgcaaattcaagccctcctgagaatagcaacattacaggattgtacgcaactgctaaccctgttccaagccagcatccttgtttcaagccatggagttacattcctgatggaatcatgccaattttctggagggtagtgtattggacgtcacaatttttaacatggattctcttaccttttatgcagtcatatgcaagatcaggagggttttccatcactggaaagatcaaaactgcactaattgagaatgcaatctactatggcacctatttgctgatttttggagcatttttaatttatgtagctgtaaacccacatttacatttagaatggaaccagcttcagacaattgggatagctgctgcaaatacatggggtctgtttcttcttgtgttgttgttggggtatggcttggtggaaattcctcgatcatactggaatggagcaaaaaggggttatctacttatgaaaacgtattttaaggcagccaaactgatgacagagaaagcagatgcagaagagaatttggaagatgccatggaggaggttcgtaaagtgaatgaaagcatcaagtataatcacccattgagaaaatgtgttgatacaatacttaaaaagtgccctacagagtatcaggaaaaaatgggtaggaacatggatgattatgaagattttgatgaaaagcatagtatctatccaagtgaaaaaagtctggtaaaactgcataaacaggtgatttattcagttcagagacaccgtcgaactcaagtacaatggcagattcttttggaacaagcattttatctagaagatgtagcaaaaaatgaaactagtgctactcatcagtttgttcacacctttcaatcgccagagccagaaaatcgatttatccaatatttttataatcctacatttgaatggtactgggaatgtcttttgcgaccatggttttacaagatacttgctgtggttctgtccatcttctctgtgattgttgtgtggtcagagtgcacattctttagcactactcctgtcttatccctctttgcggtcttcatacagctggcagaaaaaacatataattatatttatatcgagattgcctgcttcctttccatcttcttcctaagtatctgtgtttattctactgtgttcaggattcgtgtatttaactattattatttggcctcacatcaccagactgatgcttatagccttcttttcagtggcatgctattttgccgtttgacacctcctttatgtcttaatttcttgggtttgacccatatggattcatctatctctcacaagaatactcaaccaactgcttatacatctattatgggttccatgaaagttttatcctttattgcagatggattctatatatattatcctatgttggtggtaattctctgcattgctacttattttagtttgggaacccgttgtttgaatctgctcggtttccagcagtttatgggagatgatgatatgacatcagacttagttaatgaaggaaaagaattaatcagaaaagagaagagaaaaaggcaaaggcaagaagaaggtgaaaatcgaagaagagaatggaaagaacgttatggacacaatagagaagattccactaggaacagaaatattcatactgaccccaaagagtcaaacttctcagatgttaataccaaccgttctgcattcaaatataccagggctaataacaggactgaaagggaccggatagaacttctccaagatgcagaacctttggattttaatgcagaaacattcactgatgatcctcttgaatctgaatcaggaaggtatcagcctggtggacgatatctctcgatgtctcgcagtgacatatttaatgatgtttaaagtctgaaaaagtttgtgggaccactaa

SEQ ID NO: 22768 - DNA, 2088 bp, Artificial Sequence
  derived and/or modified sequence
atgtctggggccgccctgggcctggagatcgtgtttgtgttcttcctggccctcttcctgctgcaccgctacggggacttcaagaagcagcaccggctggtgatcatcggcaccctgctggcctggtacctgtgcttcctgattgtgttcatcctgcccctggatgtgtccaccaccatctacaaccgctgcaagcatgctgctgccaacagcagccccccagagaacagcaacatcaccggcctgtatgccacagccaaccctgtgcccagccagcacccctgcttcaagccctggagctacatcccagatggcatcatgcccatcttctggagggtggtgtactggaccagccagttcctgacctggatcctgctgcccttcatgcagagctatgcccggagcggcggcttcagcatcaccgggaagatcaagacagccctgattgaaaatgccatctactacggcacctacctgctgatctttggagccttcctgatctacgtggccgtgaacccccacctgcacctggagtggaaccagctgcagaccatcggcattgctgctgccaacacctggggcctcttcctgctggtgctgctgctgggctacggcctggtggagatccccaggagctactggaatggagccaagaggggctacctgctgatgaagacctacttcaaggccgccaagctgatgacagagaaggcagatgctgaggagaacctggaggatgccatggaggaggtgaggaaggtgaatgaaagcatcaagtacaaccaccccctgaggaaatgtgtggacaccatcctgaagaagtgccccacagagtaccaggagaagatgggcaggaacatggatgattatgaagattttgatgagaagcacagcatctaccccagcgagaagagcctggtgaagctgcacaagcaggtgatctacagcgtgcagaggcacaggaggacccaggtgcagtggcagatcctgctggagcaggccttctacctggaggatgtggccaagaatgagaccagcgccacccaccagtttgtgcacaccttccagagccctgagccagaaaatcgcttcatccagtacttctacaaccccacctttgagtggtactgggagtgcctgctgcggccctggttctacaagatcctggccgtggtgctgagcatcttctctgtgattgtggtgtggagcgagtgcaccttcttcagcaccacccctgtgctgagcctgtttgctgtgttcatccagctggccgagaagacctacaactacatctacattgaaattgcctgcttcctgagcatcttcttcctgagcatctgtgtgtacagcacagtgttccgcatccgggtcttcaactactactacctggccagccaccaccagacagatgcctacagcctgctcttcagcggcatgctgttctgccgcctgaccccacccctgtgcctgaacttcctgggcctgacccacatggacagcagcatcagccacaagaacacccagcccacagcctacaccagcatcatgggctccatgaaggtgctgtccttcatcgcagatggcttctacatctactaccccatgctggtggtgatcctgtgcatcgccacctacttcagcctgggcacccgctgcctgaacctgctgggcttccagcagttcatgggagatgatgacatgaccagtgacctggtgaatgaaggcaaggagctgatcaggaaggagaagaggaagaggcagaggcaggaggagggagaaaatagaagaagagagtggaaggagagatatggccacaaccgggaggacagcaccaggaacagaaacatccacacagaccccaaggagagcaacttcagtgatgtgaacaccaacagaagtgccttcaagtacacccgggccaacaacagaacagagcgggacagaattgagctgctgcaggatgctgagcccctggacttcaatgctgagaccttcacagatgaccccctggagagcgagagcggccgctaccagcccggcggccgctacctgtccatgagcagaagtgacatcttcaatgatgtgtag

SEQ ID NO: 22769 - DNA, 1770 bp, Artificial Sequence
  derived and/or modified sequence
atgcccatcttctggagggtggtgtactggaccagccagttcctgacctggatcctgctgcccttcatgcagagctatgcccggagcggcggcttcagcatcaccgggaagatcaagacagccctgattgaaaatgccatctactacggcacctacctgctgatctttggagccttcctgatctacgtggccgtgaacccccacctgcacctggagtggaaccagctgcagaccatcggcattgctgctgccaacacctggggcctcttcctgctggtgctgctgctgggctacggcctggtggagatccccaggagctactggaatggagccaagaggggctacctgctgatgaagacctacttcaaggccgccaagctgatgacagagaaggcagatgctgaggagaacctggaggatgccatggaggaggtgaggaaggtgaatgaaagcatcaagtacaaccaccccctgaggaaatgtgtggacaccatcctgaagaagtgccccacagagtaccaggagaagatgggcaggaacatggatgattatgaagattttgatgagaagcacagcatctaccccagcgagaagagcctggtgaagctgcacaagcaggtgatctacagcgtgcagaggcacaggaggacccaggtgcagtggcagatcctgctggagcaggccttctacctggaggatgtggccaagaatgagaccagcgccacccaccagtttgtgcacaccttccagagccctgagccagaaaatcgcttcatccagtacttctacaaccccacctttgagtggtactgggagtgcctgctgcggccctggttctacaagatcctggccgtggtgctgagcatcttctctgtgattgtggtgtggagcgagtgcaccttcttcagcaccacccctgtgctgagcctgtttgctgtgttcatccagctggccgagaagacctacaactacatctacattgaaattgcctgcttcctgagcatcttcttcctgagcatctgtgtgtacagcacagtgttccgcatccgggtcttcaactactactacctggccagccaccaccagacagatgcctacagcctgctcttcagcggcatgctgttctgccgcctgaccccacccctgtgcctgaacttcctgggcctgacccacatggacagcagcatcagccacaagaacacccagcccacagcctacaccagcatcatgggctccatgaaggtgctgtccttcatcgcagatggcttctacatctactaccccatgctggtggtgatcctgtgcatcgccacctacttcagcctgggcacccgctgcctgaacctgctgggcttccagcagttcatgggagatgatgacatgaccagtgacctggtgaatgaaggcaaggagctgatcaggaaggagaagaggaagaggcagaggcaggaggagggagaaaatagaagaagagagtggaaggagagatatggccacaaccgggaggacagcaccaggaacagaaacatccacacagaccccaaggagagcaacttcagtgatgtgaacaccaacagaagtgccttcaagtacacccgggccaacaacagaacagagcgggacagaattgagctgctgcaggatgctgagcccctggacttcaatgctgagaccttcacagatgaccccctggagagcgagagcggccgctaccagcccggcggccgctacctgtccatgagcagaagtgacatcttcaatgatgtgtag

SEQ ID NO: 22770 - DNA, 2088 bp, Artificial Sequence
  derived and/or modified sequence
atgagcggcgccgccctgggcctggagatcgtgttcgtgttcttcctcgcactctttctgcttcacagatacggtgatttcaagaaacagcaccgactcgttattattggaacattgctcgcgtggtatttgtgctttctcatcgtatttatcctccctttggacgtctccacaacaatctacaatcgctgtaagcacgcagccgcaaactccagcccccctgaaaacagtaacatcaccggactgtatgcaaccgccaatcccgtcccctctcaacacccctgtttcaagccctggagttacattcccgacggaattatgcctatcttctggagagtggtgtactggacttcccagttcctcacatggattctcctcccgttcatgcaaagttacgctagatccggcgggttctcgattaccggcaagatcaagacagctctcatcgagaacgccatctactatggaacgtaccttctgatatttggggcatttctgatctacgtggccgttaatccccaccttcatctggagtggaatcaattgcaaaccataggcatcgcagccgccaacacatggggactctttcttcttgtgttgctcctgggctatggcctggtagagatcccacgaagttattggaacggagcaaaacggggctatctccttatgaagacctatttcaaagctgccaagctgatgacagagaaagccgacgccgaagagaatttagaagatgcgatggaggaagtccgcaaagtaaacgaatccataaagtacaatcatcccctgaggaaatgcgtggataccatattgaagaagtgccccaccgaataccaggaaaagatgggaaggaacatggacgattacgaggacttcgacgaaaaacactcaatctatccttcagaaaaaagcttggtcaaattgcataaacaggttatatactccgtccaacgtcacaggcgcacacaggttcagtggcagatcctccttgagcaggcattttatctggaagatgtcgcaaagaatgagacatccgctacacaccagtttgttcacaccttccagtcaccggagccagaaaatcgcttcatacagtacttctacaatcctacctttgagtggtattgggaatgcctgctgagaccctggttttataaaatcttagcagttgtgctatccatatttagcgttattgtagtgtggtcagagtgtacttttttttccacaacgcctgtgctttccctctttgccgtcttcatccagctcgccgagaaaacatataactatatctacatcgaaatcgcttgctttctctcaattttcttcctttccatatgcgtctactcaacagttttccggattcgggtgttcaactactactacctggccagccatcaccagacagatgcctattcattgctcttttctggaatgctcttttgccggctgaccccccctctgtgcttgaatttcctgggcctgacccatatggacagtagtatcagccacaaaaatacccagcccacagcctatacatctatcatgggaagcatgaaggtgctttccttcattgccgatgggttctacatctactaccccatgctggtcgtgattctgtgtattgcgacttacttctctctcggtacgcggtgcctcaatcttttgggattccagcagtttatgggagatgacgatatgacttccgacttggtgaacgagggtaaagaattaattcgcaaagagaagcgcaaacggcaacgccaggaggaaggcgagaacagacgaagggagtggaaggagcgatacggccacaatagggaggacagcacacggaaccggaacatccatacggaccccaaagagtccaactttagcgacgtaaataccaaccgcagcgccttcaaatacacacgtgctaacaaccgcactgagcgggataggatcgagctccttcaggacgctgagccactcgattttaacgccgaaaccttcactgacgacccccttgagtcggaaagcggacggtatcaaccaggaggtcgatatctcagtatgagccgctccgatattttcaatgacgtgtag

SEQ ID NO: 22771 - DNA, 1770 bp, Artificial Sequence
  derived and/or modified sequence
atgcccatcttctggcgggtggtgtactggaccagccagttcctgacttggatacttctgccttttatgcaaagctacgcaagatcaggcggcttctccattaccggcaagatcaaaacagctctgatcgagaacgccatatattatggtacctatcttttgatctttggtgcttttctgatctacgtggccgttaatccccatttgcacctcgagtggaatcagctgcagacaatagggattgccgcagccaatacttggggcctcttcctgctcgttcttcttttaggatacggattggtagaaatcccgcggagctattggaacggagcaaagaggggctacctcttgatgaaaacctacttcaaagccgcgaagttgatgaccgagaaagcagatgccgaagagaacctggaagatgctatggaggaggtgcgaaaggtgaacgagtcaatcaagtacaaccatccactacgtaagtgtgtggacactatacttaagaagtgtccaacagaataccaggagaagatgggtcgaaatatggacgactatgaggactttgatgagaagcactcgatctatccttctgagaagtcgcttgtcaagcttcacaaacaggtgatttactctgtgcagcgccatcgccgcacccaggtgcagtggcagatactactcgagcaggccttttatttggaggatgtggccaagaacgagacttctgctacgcatcagttcgtacacacattccagtcccccgagcctgagaataggtttattcaatacttctacaaccctacctttgaatggtattgggagtgccttctgaggccctggttttataagattctggctgtggtgttgtctattttctccgtcatcgtggtgtggagtgaatgtacatttttctcaaccacccccgtgctgagtctgttcgccgtctttatccagttggccgagaagacctataattatatctacattgagatcgcgtgttttctgtctatcttcttcctgtcaatatgcgtgtacagcacggtcttcagaataagagtattcaactattactatcttgcttcccaccatcagaccgacgcatattccctgctgttttccgggatgctcttttgtcggcttactccacctctctgcttgaatttcctgggccttacgcacatggactcaagcatctctcacaagaacacacaacctacagcctacacatcaatcatgggatccatgaaggttctgagttttatcgctgacggattctacatttactaccccatgcttgtggtgatactatgtattgcaacctacttcagcctggggacccgctgtctgaacctcctcggtttccaacaatttatgggtgatgatgacatgacatccgatttggtaaacgagggtaaagaattaatccgcaaagagaaacgcaaaaggcagagacaggaggagggcgaaaaccgaaggcgggaatggaaggagaggtacggacacaacagagaggattctactaggaatagaaacatccacacagatccgaaggaatcaaatttcagcgacgttaatacgaatcgtagcgctttcaaatataccagagccaataaccgcacagagagagacagaatcgaacttttacaggacgcagagcctctggattttaacgccgagaccttcactgatgatcctctggaaagtgaaagtggtagataccaacctgggggccggtacctcagcatgtctcgatctgatatctttaacgacgtttag

SEQ ID NO: 22772 - DNA, 2088 bp, Artificial Sequence
  derived and/or modified sequence
atgtccggcgctgccctgggtttagaaattgtatttgtgttttttttggctttatttcttctgcaccggtatggtgattttaagaaacagcatcggctggtgataattggcacactcctcgcctggtacttgtgcttcctgattgtcttcatccttccactggacgtgtcgactacaatctacaaccgatgtaagcacgctgcagcgaattcttccccccctgagaattccaatattacggggctctacgcgactgcaaacccggtgccatcccagcacccttgctttaagccttggagctatatccccgacggtatcatgccgatcttttggcgtgttgtctattggacatcacagttcctgacgtggatcctcctgcccttcatgcagagctacgcgagatcggggggtttttccattacaggcaagatcaagactgcgctcatagagaatgcgatttattatggaacttacttgcttatcttcggggcattcctgatttacgtggccgtcaatcctcaccttcatcttgaatggaaccagttacagactattggcattgccgctgctaacacctggggtctattcttgcttgttctccttctaggctatggtctcgtcgagataccacggtcttactggaacggcgctaagcgcggttatctgctaatgaagacatatttcaaggctgcaaagctaatgacagagaaggcagacgctgaagagaaccttgaggatgcgatggaagaagtgcgaaaagtcaacgagagcattaaatacaatcatcctctgaggaaatgtgttgatacaattctcaaaaagtgtcccactgagtatcaggaaaaaatgggacggaacatggacgactatgaggacttcgacgaaaagcattcaatctatccctctgagaaatctctggttaagctccataaacaggtgatctattctgtccagagacatagaagaacacaagttcagtggcaaattttgctggaacaagctttttatctcgaagacgtcgctaagaatgaaacctccgccacccaccagttcgtgcacaccttccagtctccagagcctgaaaacaggtttattcagtacttctacaatcctacgttcgaatggtattgggagtgcctgctgcgcccttggttttacaaaatcttagcggtagtccttagcatcttttctgttattgtcgtctggagtgaatgtacgttcttctcaacaacccccgtacttagcttgttcgccgtgttcatccagctagccgagaagacctacaactacatttatatagaaatagcttgttttctgagcatcttcttcctctctatttgcgtctatagcaccgtgttcaggatccgggtgttcaattactactacctggccagccatcaccagacagacgcctatagtctcctgttttcgggaatgcttttctgcagactgacccctcctttgtgtctcaatttccttggtctgacgcatatggactcaagcatctcccacaagaacacccagccaactgcatacacatcaatcatgggctccatgaaggtgttgagctttattgccgacggattttatatttactatccaatgctcgtcgtaattttatgcattgctacctacttctcactagggacaaggtgcctgaatctccttggatttcagcaatttatgggcgacgatgatatgacatcagacctggtcaatgagggaaaagaactgattagaaaggaaaagagaaaaagacaacgtcaagaagagggcgaaaaccgcaggcgtgagtggaaagagcggtatggacacaatagagaagacagcacacggaaccggaacattcatacggatccaaaggagagtaactttagtgacgttaacaccaataggtccgcttttaagtacaccagagctaataacaggaccgagagggaccggatcgagctcctgcaagatgccgagccactggactttaacgcagagactttcaccgacgacccacttgagtctgagtccggacgatatcaaccgggaggacgttacctgagcatgtccaggtccgacatcttcaatgatgtctag

SEQ ID NO: 22773 - DNA, 1770 bp, Artificial Sequence
  derived and/or modified sequence
atgcctatcttctggcgagtggtgtattggacgagccaatttctaacctggatcttattgcctttcatgcagagctatgctaggagcggcggattttccataaccggtaagataaagactgcgcttatcgaaaacgctatctattatggcacctacctcctaatatttggggcatttctgatttatgtagccgtaaatcctcacctccatctagagtggaaccagctgcaaaccatcggaatagccgctgcaaacacttggggcctgtttttgctggtactgctgctgggatacggtctggtcgaaatacccagatcttactggaacggagcaaagagaggctatctcctgatgaagacttacttcaaggcagctaaactgatgaccgaaaaagctgatgctgaggaaaacttagaagatgccatggaggaagtcaggaaggtgaacgaaagtattaagtacaaccaccctctgcggaagtgcgtggatacgatcctcaagaagtgccccactgagtatcaggagaagatgggcaggaacatggacgattatgaggattttgatgagaagcactccatttatccatctgaaaagtccttggtcaagctgcacaagcaggtgatatattccgtacaacggcaccgccgaacacaggttcagtggcagatactcttagaacaggccttttatttggaagacgtcgctaagaacgaaaccagcgcaacacaccaatttgtccacacatttcagtctccagagccagagaatcgcttcatccaatacttttacaaccccacctttgagtggtactgggagtgcctcctccgtccctggttttacaagatcctcgctgtggttctctcaatctttagtgtcattgttgtatggagtgagtgtacatttttcagtacaacccctgttctcagcctattcgcagtttttatccagctggcggaaaagacatataactacatatatatcgagattgcatgcttccttagcatatttttcctcagcatctgtgtctactccacagtttttcgaatccgtgtatttaattattactacctggcatcacatcatcagacagatgcttacagcctcctgtttagtggcatgctgttttgccgcttgacgcctcctctttgcctgaattttcttggacttactcatatggactctagtatctcacataagaacacacaacccaccgcctatacctctatcatgggatctatgaaggttctgagctttatcgcagatgggttctatatttattatcccatgcttgtggtgatcctttgcatcgccacctacttctcactcgggacgcggtgcctgaatctgcttgggttccagcagttcatgggagatgatgacatgacatcggatctcgttaatgaaggaaaggagctgatcaggaaggagaagcggaaaaggcagcggcaggaggaaggagagaatagacggagagaatggaaggagcggtacggtcataacagagaagatagtactagaaaccggaatattcacactgatcctaaggaatctaacttcagcgatgtcaacacaaataggagcgcattcaagtacacccgggctaacaaccgcactgagcgcgatagaatcgaattgttacaagatgctgagcctcttgactttaatgccgagacctttacggacgatcctctcgagtcagagtccgggcgatatcagccaggcggacggtacttaagcatgtcacggagcgatatcttcaacgatgtatag

SEQ ID NO: 22774 - protein, 128 aa, Artificial Sequence
  derived and/or modified sequence
MSEGGGQVSCIFAAPTRLCRWPALIECGVNLTQPLCEWMIQVARDRTLSLAWEVASLLTLSSSEVGLEGVGTIWPSSYSSEESSRNGAEQGRQLSIEGPFQGQNCPSHPAAALPLPMRGESQATSCQV

SEQ ID NO: 22775 - DNA, 387 bp, Artificial Sequence
  derived and/or modified sequence
atgtccgagggggggggccaggtcagttgtattttcgcagctccaacacggctttgtcgctggccagccctgatcgagtgtggggtcaatctcacccagccactgtgtgagtggatgatccaggttgcgcgcgatagaacactctcactggcctgggaagtcgcctctctcctgaccttgtccagttctgaggtgggccttgaaggggtgggaaccatttggccaagcagttactcatcagaagagtccagcagaaacggtgccgaacagggcaggcagctgagtatcgaaggaccttttcaggggcagaattgcccaagccatccagccgccgcactccctctaccaatgcgcggggaatcccaagccactagctgccaggtctag

SEQ ID NO: 22776 - DNA, 387 bp, Artificial Sequence
  derived and/or modified sequence
atgtctgagggcggcggccaggtgtcctgcatctttgctgcccccacccggctgtgccgctggccagccctgattgaatgtggggtgaacctgacccagcccctgtgtgagtggatgatccaggtggcccgggacaggaccctgagcctggcctgggaggtggccagcctgctgaccctgagcagcagcgaggtgggcctggagggcgtgggcaccatctggcccagcagctacagcagcgaggagagcagcagaaatggagctgagcagggccggcagctgagcattgagggccccttccagggccagaactgccccagccaccctgctgctgccctgcccctgcccatgagaggagagagccaggccaccagctgccaggtgtag

SEQ ID NO: 22777 - DNA, 387 bp, Artificial Sequence
  derived and/or modified sequence
atgagcgagggcggcggccaggtgagctgcatcttcgccgcccccacaaggctgtgcagatggcccgctttaattgaatgcggggttaatcttacccagcccctgtgtgagtggatgatccaggttgcacgagaccgcaccctcagtcttgcttgggaagttgcaagccttctgacactctcatccagcgaagtggggctcgaaggcgtagggaccatttggccctcgtcctacagttcggaggagtctagccgtaacggcgctgagcaggggcggcagctgagcatcgaaggcccatttcagggacaaaattgcccgagccacccagccgccgccctaccattgcccatgcggggtgaatcacaggctacctcatgccaggtttag

SEQ ID NO: 22778 - DNA, 387 bp, Artificial Sequence
  derived and/or modified sequence
atgtccgagggcggtggccaggttagctgcatcttcgcagccccaacccggctttgccgctggcccgctttaatagaatgtggtgtcaacctcacacagcctttgtgtgaatggatgattcaagtcgcacgcgatcgaacactctctctagcctgggaggtagcctccctgctcacactgtcttccagtgaggtcggcttagagggagtcggcactatctggccttcatcctattcgtcagaagagtcttctaggaacggagccgagcaggggagacaactttctattgagggacctttccagggacagaactgtcccagccatccagcagcagccttgccccttcctatgaggggagaatctcaggccacttcttgtcaggtatag

SEQ ID NO: 22779 - DNA, 445 bp, Artificial Sequence
  derived and/or modified sequence
gcatgtgtctgctgctccctagtctgggccatgagtgagggtggaggccaagtctcatgcatttttgcagcccccacaagactgtgcaggtggccggccctcattgaatgcggggttaatttaactcagcctctgtgtgagtggatgattcaggttgccagagacagaaccctcagcttagcatgggaagtagcttccctgttgaccctgagttcatctgaggttggcttggaaggtgtgggcaccatttggcccagttcttacagctctgaagagagcagcaggaatggggctgagcagggaagacaactttccattgaaggcccctttcagggccagaactgtccctcccaccctgcagctgccctgcctctgcccatgaggggtgagagtcaggcgacctcatgccaagtgtagaaaggggcagatgggagccccaggttat

SEQ ID NO: 22780 - DNA, 387 bp, Artificial Sequence
  derived and/or modified sequence
atgagcgagggcggcggccaggtgagctgcatcttcgccgcccccaccagactgtgcagatggcccgccctgatcgagtgcggcgtgaacctgacccagcccctgtgcgagtggatgatccaggtggccagagacagaaccctgagcctggcctgggaggtggccagcctgctgaccctgagcagcagcgaggtgggcctggagggcgtgggcaccatctggcccagcagctacagcagcgaggagagcagcagaaacggcgccgagcagggcagacagctgagcatcgagggccccttccagggccagaactgccccagccaccccgccgccgccctgcccctgcccatgagaggcgagagccaggccaccagctgccaggtgtag

SEQ ID NO: 22781 - protein, 242 aa, Artificial Sequence
  derived and/or modified sequence
MGTGASEKQAEQKVRRAFEASEEAHGTLAASTPWVAMGSAYGSCTCLGAQPVTDLALWPVIYSCMGFSPQAYPAFWAYPWVLYGGYLWMGYPPPAALVPSVWLYWRGASSFDPLIGSPYLAALAPNLFPFPMKFPPTYSLASPTLGGATSSHCPQVGCWTPASSAPRAAVEGPSRGAPYLKTCKAPPSEWASRFGIWAPLPCCSSELRPLPPSPIEDSQLDPGCSRSSSRSPCRARRRLFEC

SEQ ID NO: 22782 - DNA, 1737 bp, Artificial Sequence
  derived and/or modified sequence
agtggtctcctgccgccacctggaccggggacagtaacgcctagggagccccaagacctcttgagagagcatttcagctctgttgacaaacctcaaccacttgagggacttcgctggaaagaaacgttctagaaagaccaagtggataccaggagccccgtgaggtgcgtgtggcctcagcttgcagaggagtgcacttgccagacacttcggggctttgaagagcacagctcatctaagatgggcacaggtgcatcagagaaacaagcagagcagaaggtccgccgtgccttcgaggcctccgaggaagcccacgggactctggcagcctcaaccccctgggtggccatgggctctgcctatggttcctgtacctgcttgggagcccagcctgtaactgacctggccctctggcctgtcatctactcctgcatgggattttccccacaagcttacccagccttctgggcttacccgtgggtgctctatggtgggtatctctggatgggttatccccctccagctgccttggtgccttcagtgtggctgtattggaggggcgcctccagctttgaccccctcataggaagtccgtatctggctgccttggcccccaacctatttcctttccccatgaaattcccacccacctactccttggcttctcccactctgggcggggccacctccagccactgtccccaggtgggatgctggactccagccagctcagcccccagggctgccgtagaggggccatccagaggagctccctacttgaagacatgcaaagcccctccctcagaatgggcctccaggttcggtatttgggcacctttgccctgctgcagttcagagctccgccctctgcccccttcccccattgaagattctcagctggacccgggctgctcccgctcctcctcccggtcaccctgcagggcccgccgccgcctctttgagtgctaatcagccctctagacccagacccacccaacaatcagagacatgtctggtggagcccagccagctgtggactttaagtttttggaagagtctcagatgtaggttgtttactattcttcagtacagagtacacctcctggactcatgcaaggcccctctatttgctatttctctttactttgtttttctgtttgcccttcaaccctgatactggcaccttttctcctccccagactgtcctgggcccgccctctagtagatttgctgtgagtcctcaaacatgcatgcatgcaaccttgtaaaatgagcttatttaagctcaatccaacctgtagaagcgctcagttagaataggcctccaggtttggtatttgggcacctgtgccaccctccagcccaggactctctctgcccctcctcagcaaagaccctcagcaggatccccgcatccctggccaccctgtggggcctgctgctgtctcttccagcattggtgtgtcctccagggaaccacacactcaagcactttggaacccatggaatccagtgagcacgtgctgtgggctctgcctagaagcttccaaaacctgtttgttccagtggacacagagtaggaaatgctgactcgttcagagcgctagtgcccttgggtccttgcgggtgtgctcttctcactcctcaccccatcagcaccttctggggtaatgcacacaccagtaaaatgtacagtgcatgcttttaaaaatttttaaataaatgatactatgctat

SEQ ID NO: 22783 - DNA, 729 bp, Artificial Sequence
  derived and/or modified sequence
atgggcaccggcgccagcgagaagcaggccgagcagaaggtgagaagagccttcgaggccagcgaggaggcccacggcaccctggccgccagcaccccctgggtggccatgggcagcgcctacggcagctgcacctgcctgggcgcccagcccgtgaccgacctggccctgtggcccgtgatctacagctgcatgggcttcagcccccaggcctaccccgccttctgggcctacccctgggtgctgtacggcggctacctgtggatgggctaccccccccccgccgccctggtgcccagcgtgtggctgtactggagaggcgccagcagcttcgaccccctgatcggcagcccctacctggccgccctggcccccaacctgttccccttccccatgaagttcccccccacctacagcctggccagccccaccctgggcggcgccaccagcagccactgcccccaggtgggctgctggacccccgccagcagcgcccccagagccgccgtggagggccccagcagaggcgccccctacctgaagacctgcaaggccccccccagcgagtgggccagcagattcggcatctgggcccccctgccctgctgcagcagcgagctgagacccctgccccccagccccatcgaggacagccagctggaccccggctgcagcagaagcagcagcagaagcccctgcagagccagaagaagactgttcgagtgctag

SEQ ID NO: 22784 - DNA, 729 bp, Artificial Sequence
  derived and/or modified sequence
atgggaaccggcgccagcgagaagcaggctgagcaaaaagtgagacgggctttcgaggcgtcagaagaggcgcatggcaccctcgctgcatctactccatgggtcgctatggggagtgcttatggcagctgtacgtgtctaggagcccagcctgttacggatctcgcgctgtggcccgtgatttactcatgtatggggttctccccccaggcatatccagccttttgggcctacccttgggtgctctatggggggtacctgtggatgggctaccccccacccgctgccctggtgcccagtgtgtggttatactggcgcggcgcaagctctttcgatccccttatcgggagcccatacctggccgccctggcccccaacctgttcccgtttccgatgaaattccctccaacctattcactggcctcgcctacacttggcggggccacttcttctcactgtccacaggtgggctgctggacccccgccagttccgctcctagagctgcggttgaaggaccttctagaggggccccgtatctcaagacttgtaaggcgccgccttctgagtgggcctcacggtttggaatctgggctcctttgccctgctgctcatcagaactcaggcctctgccaccctcacccatcgaggactcacagctggatccaggctgcagtaggagctcatccagatctccctgccgggccagacgcagactgtttgaatgttag

SEQ ID NO: 22785 - DNA, 729 bp, Artificial Sequence
  derived and/or modified sequence
atgggcactggagccagcgagaagcaggccgagcagaaggtgagaagagcctttgaggccagcgaggaggcccacggcaccctggccgccagcaccccctgggtggccatgggcagcgcctacggcagctgcacctgcctgggcgcccagcctgtgacagacctggccctgtggcctgtgatctacagctgcatgggcttcagcccccaggcctacccagccttctgggcctacccctgggtgctgtatggaggctacctgtggatgggctacccacctcctgctgccctggtgcccagcgtgtggctgtactggaggggggccagcagctttgaccccctgattggcagcccctacctggccgccctggcccccaacctcttccccttccccatgaagtttcctcccacctacagcctggccagccccaccctgggcggggccaccagcagccactgcccccaggtgggctgctggaccccagccagcagcgcccccagggctgctgtggagggccccagcagaggagccccctacctgaagacctgcaaggccccacccagcgagtgggccagccgcttcggcatctgggcccccctgccctgctgcagcagcgagctgcggcccctgccccccagccccatcgaggacagccagctggaccccggctgcagccgcagcagcagccgcagcccctgccgggccaggagaagactctttgaatgttag

SEQ ID NO: 22786 - DNA, 729 bp, Artificial Sequence
  derived and/or modified sequence
atgggcaccggcgccagcgagaagcaggccgagcagaaggtgcggcgggcttttgaggcatctgaagaggctcacggcaccttggcagcaagcacgccctgggtagccatgggctccgcctatgggagttgcacctgtctgggcgcgcaacccgtgaccgacttagccctatggcctgtgatatacagctgcatgggcttcagcccgcaggcatatccagccttttgggcttacccatgggttctttatggggggtacctgtggatggggtaccctcctccagcagccctggtacccagtgtgtggctgtattggcggggtgccagcagctttgatccccttattgggtccccttatctggcagctcttgctcctaacctcttcccgtttcccatgaagttccccccaacttactcactggctagcccgacgctggggggggccacgagctcgcattgcccacaggtggggtgctggacacctgcatcctctgccccgcgtgcggcggttgagggcccatctagaggagctccatatctgaagacatgcaaagcacccccatccgagtgggccagtagattcggcatttgggccccattaccctgttgcagttcggagctccgacccttgccaccctcacctatagaggattcacagctggatcccggatgcagtcgcagctcttctaggtccccatgccgcgctagaaggcggctgtttgaatgttag

SEQ ID NO: 22787 - DNA, 729 bp, Artificial Sequence
  derived and/or modified sequence
atggggacaggggcaagcgaaaaacaggcagaacagaaagtccgtagagcctttgaagcatcagaggaggcccacggaacactggctgcgtcaacgccatgggtcgcaatgggtagcgcatacggatcttgcacgtgtctgggcgctcagcctgtaacagacttagctctatggcctgtaatatacagttgtatgggtttttccccacaggcctatccagctttttgggcatacccttgggtcctgtacgggggttatctttggatgggatatccgccacctgctgctctggtgccgtctgtctggctgtattggcgtggcgcttcctcatttgatccccttatcggtagcccctaccttgccgctctggccccaaacctcttccccttcccaatgaaatttcccccaacctacagtctggcctcacctacactgggaggcgcaaccagcagccattgcccccaggtagggtgctggaccccagcgagctcagcgccacgcgctgctgtagaaggtccctcccgcggtgccccttatttgaaaacctgcaaagcgccacccagtgaatgggcaagtcgcttcggcatctgggcccctctgccttgctgcagctccgagctgagaccacttcctccgtcaccgatcgaagatagccaactggacccaggatgcagcaggagcagctcccgatctccttgccgggctaggcgaagactttttgaatgctag

SEQ ID NO: 22788 - protein, 295 aa, Artificial Sequence
  derived and/or modified sequence
MWGARRSSVSSSWNAASLLQLLLAALLAAGARASGEYCHGWLDAQGVWRIGFQCPERFDGGDATICCGSCALRYCCSSAEARLDQGGCDNDRQQGAGEPGRADKDGPDGSAVPIYVPFLIVGSVFVAFIILGSLVAACCCRCLRPKQDPQQSRAPGGNRLMETIPMIPSASTSRGSSSRQSSTAASSSSSANSGARAPPTRSQTNCCLPEGTMNNVYVNMPTNFSVLNCQQATQIVPHQGQYLHPPYVGYTVQHDSVPMTAVPPFMDGLQPGYRQIQSPFPHTNSEQKMYPAVTV

SEQ ID NO: 22789 - DNA, 888 bp, Artificial Sequence
  derived and/or modified sequence
atgtggggcgccagaagaagcagcgtgagcagcagctggaacgccgccagcctgctgcagctgctgctggccgccctgctggccgccggcgccagagccagcggcgagtactgccacggctggctggacgcccagggcgtgtggagaatcggcttccagtgccccgagagattcgacggcggcgacgccaccatctgctgcggcagctgcgccctgagatactgctgcagcagcgccgaggccagactggaccagggcggctgcgacaacgacagacagcagggcgccggcgagcccggcagagccgacaaggacggccccgacggcagcgccgtgcccatctacgtgcccttcctgatcgtgggcagcgtgttcgtggccttcatcatcctgggcagcctggtggccgcctgctgctgcagatgcctgagacccaagcaggacccccagcagagcagagcccccggcggcaacagactgatggagaccatccccatgatccccagcgccagcaccagcagaggcagcagcagcagacagagcagcaccgccgccagcagcagcagcagcgccaacagcggcgccagagccccccccaccagaagccagaccaactgctgcctgcccgagggcaccatgaacaacgtgtacgtgaacatgcccaccaacttcagcgtgctgaactgccagcaggccacccagatcgtgccccaccagggccagtacctgcaccccccctacgtgggctacaccgtgcagcacgacagcgtgcccatgaccgccgtgccccccttcatggacggcctgcagcccggctacagacagatccagagccccttcccccacaccaacagcgagcagaagatgtaccccgccgtgaccgtgtag

SEQ ID NO: 22790 - DNA, 888 bp, Artificial Sequence
  derived and/or modified sequence
atgtggggggccaggcggtcctcagtgagtagcagttggaacgccgcatcattgcttcagttgctcctggccgcattgctggcagccggtgctagggcgtctggggagtactgccacggttggctggatgctcagggcgtgtggcggattggttttcaatgtccagaacggtttgatgggggcgatgccaccatctgttgcggtagttgtgcactcagatattgttgcagcagtgcggaagctcgtctggaccagggtgggtgcgataatgaccgccagcagggagccggcgagcctggaagggctgataaggatggcccggatggtagcgcagtgccaatctacgtgcctttcctcatagtaggcagcgtgtttgtcgccttcattattttgggatccctagtagcagcatgttgttgcagatgtcttagacccaagcaggacccacaacagtctcgggctccaggggggaatagactgatggagacaataccaatgatcccgagcgccagcacatccaggggctcatcatccagacagtctagcacggccgcatcctcctcgtcaagtgcgaacagcggcgcccgagccccgccaactcggtcgcagacaaactgctgtcttcctgagggaacaatgaacaacgtctacgtgaatatgcctaccaactttagcgtccttaactgtcagcaggcaacccagattgtgccacaccagggccagtaccttcaccccccctacgtaggctatactgtccagcacgattctgttcccatgacagcagtgcctccattcatggatggcctacaaccagggtaccggcagattcaatcccctttccctcatacaaacagtgagcagaagatgtaccccgcggtcactgtgtag

SEQ ID NO: 22791 - DNA, 888 bp, Artificial Sequence
  derived and/or modified sequence
atgtggggcgcccggcgcagctctgtgagcagctcctggaatgctgccagcctgctgcagctgctgctggccgccctgctggccgccggggcccgggccagcggggagtactgccacggctggctggatgcccagggcgtgtggagaattggcttccagtgcccagagagatttgatggaggagatgccaccatctgctgcggcagctgtgccctgcgctactgctgcagcagcgctgaggcccggctggaccagggcggctgtgacaatgaccggcagcagggcgctggggagcccggccgggctgacaaggatggcccagatggcagcgctgtgcccatctacgtgcccttcctgattgtgggctctgtgtttgtggccttcatcatcctgggcagcctggtggccgcctgctgctgccgctgcctgcggcccaagcaggacccccagcagagccgggcccctgggggcaaccggctgatggagaccatccccatgatccccagcgccagcaccagccggggcagcagcagccggcagagcagcacagctgccagcagcagcagcagcgccaacagcggggcccgggccccacccaccaggagccagaccaactgctgcctgcctgagggcaccatgaacaacgtgtatgtgaacatgcccaccaacttctctgtgctgaactgccagcaggccacccagatcgtgccccaccagggccagtacctgcaccccccctacgtgggctacacagtgcagcacgacagcgtgcccatgacagctgtgccccccttcatggatggcctgcagcccggctaccggcagatccagagccccttcccccacaccaacagcgagcagaagatgtacccagctgtgacagtgtag

SEQ ID NO: 22792 - DNA, 888 bp, Artificial Sequence
  derived and/or modified sequence
atgtggggcgcccggcggagcagcgtgagcagcagctggaacgccgcctctctcctgcagcttctacttgcagcactgctggccgcaggagcccgagcctccggtgaatactgccacggttggttggacgcccagggggtttggagaatcgggtttcagtgtcctgagcgattcgatggcggcgacgccaccatttgctgcggatcatgcgctctacgctattgctgttcgtccgccgaggcccgcctggaccagggtgggtgcgacaacgatcgccagcagggtgcaggagagccggggagagctgataaagacggccctgacgggtccgctgtcccaatttacgttccgttccttatcgtgggaagcgtgtttgtggctttcatcatcctcggcagtctcgtcgccgcgtgttgctgccgttgccttcgcccaaaacaggatccacagcagagtagagcacctggaggcaaccgccttatggaaaccattcccatgataccttccgcctccacctctaggggtagctctagtagacagtcctccactgccgcgagcagctcgagctctgccaattcaggggcaagagccccccccaccagatcccagactaattgttgcctgcctgaggggactatgaacaatgtctacgttaacatgcccactaactttagcgtgttaaactgtcagcaagccacacaaattgtgccgcaccagggccaatatcttcatccaccttacgttgggtataccgtgcagcatgactctgtgcccatgaccgctgtgcctcccttcatggacggtttgcagcctgggtataggcagatccagtctcctttcccccatactaacagcgaacagaagatgtatcccgccgttaccgtgtag

SEQ ID NO: 22793 - DNA, 888 bp, Artificial Sequence
  derived and/or modified sequence
atgtggggggcaaggaggtcatctgtttccagttcgtggaacgctgcatctcttttgcagctgctgttggccgctctgctggctgctggagcgagagcaagcggcgagtactgccatggctggctggatgcacagggagtctggagaattggattccagtgtcccgagcggttcgacggtggagatgccactatctgttgcggctcctgtgccctaaggtactgttgctcatcagccgaagcaaggctcgatcagggtggttgtgacaatgaccggcagcagggcgctggggagccgggtagagctgataaagatggaccagatggctccgccgtgccgatatatgtgccatttctgatcgttgggagcgtattcgtggcctttattatcttgggttctctcgtggccgcatgttgctgtcggtgtctgaggcccaagcaagatcctcaacagagccgtgcgccaggcggtaatcgcctcatggagactatcccaatgattccaagcgcttctacaagtcgcggatcttcttctaggcagtccagtaccgctgcctcgagttcgtcctctgccaactctggcgctcgcgcacctccaacacgttcccaaactaactgttgcttgcctgagggcactatgaacaacgtgtatgtgaacatgccaacgaatttcagcgtcctcaattgtcagcaggctactcagatagtcccacatcagggccagtaccttcacccaccctatgtggggtacacagtgcagcatgatagcgtgcctatgacagccgtgcccccattcatggatgggctgcaacccggatacaggcagatacagtctccgtttccacacactaactcagagcagaagatgtatcccgcagtgacagtgtag

SEQ ID NO: 22794 - DNA, 2889 bp, Artificial Sequence
  derived and/or modified sequence
aggcccgggggtcgccggggccacgacttctcggagaccgtcctgcgctctctggagacgcgctgtccgcgcccagggtggtgccatgtggggcgctcgccgctcgtccgtctcctcatcctggaacgccgcttcgctcctgcagctgctgctggctgcgctgctggcggcgggggcgagggccagcggcgagtactgccacggctggctggacgcgcagggcgtctggcgcatcggcttccagtgtcccgagcgcttcgacggcggcgacgccaccatctgctgcggcagctgcgcgttgcgctactgctgctccagcgccgaggcgcgcctggaccagggcggctgcgacaatgaccgccagcagggcgctggcgagcctggccgggcggacaaagacggccccgacggctcggcagtgcccatctacgtgccgttcctcattgttggctccgtgtttgtcgcctttatcatcttggggtccctggtggcagcctgttgctgcagatgtctccggcctaagcaggatccccagcagagccgagccccagggggtaaccgcttgatggagaccatccccatgatccccagtgccagcacctcccgggggtcgtcctcacgccagtccagcacagctgccagttccagctccagcgccaactcaggggcccgggcgcccccaacaaggtcacagaccaactgttgcttgccggaagggaccatgaacaacgtgtatgtcaacatgcccacgaatttctctgtgctgaactgtcagcaggccacccagattgtgccacatcaagggcagtatctgcatcccccatacgtggggtacacggtgcagcacgactctgtgcccatgacagctgtgccacctttcatggacggcctgcagcctggctacaggcagattcagtcccccttccctcacaccaacagtgaacagaagatgtacccagcggtgactgtataaccgagagtcactggtgggttcctttactgaagggagacgaaggcaggggtggattctcgaggtggaagtccgcacatgtcggtggtatttatggcacgattcctttggatggcttcatttgcccccagactgtatgaaaacatctccgaattagcatttctggatatgtttcatccagggtatcattgatttatgatggaaaaccggcctcagctggagatgactgtgatgttgctgatgggtgtataacaaatgcttgagtccgaagtgcccttgagatatggttgacgaaagaattttataaactgataaattaaggatttttattatgttgttattattatttcttttttgttgttgactgcacaggatcaaaatgcctgttatctcccttttacctgggactttttttttttttttttttttttttaatcagacagggtcttgctctgttgcccaggctggagtgcagtggtgcgatctcggctcactgcaacttcagcctcctggattcaggcaacactcctgcctcagcctcccacgtggctgggattacaggtgcctgcccccatggctaattttttgtattttttgtagagatggggtttcaccatgttggctgggctggtctcactctcctgacctcaagcaatctgcctgtctcagcctcccaaagtgctgggattacaggcgtgagccaccgcccccagcctgagcctttttttttttctaatgcatccaaggttaaggggaagacgcaaataacaggactattctaaaaggaaacctgtttgaactctgtgagatcagtcatcagtctcagtattccacaggcacaccttaatttcattgtaaaaagatatatatattttgtctatttttgtgcttttgggggcctattttgtgcttttttaccttatgtagagatcttattacaaagtgattttctacattaaaaagagactgaaataaattgtatagttacttaactaatgaagacatttcagaactctgggatgattttaatcttgaagtagtaggtggtatagtcataaaaccattcatccccttcttgattgtatcttaattttctggctttaaggtgacatctgagaggtaatgcattcttttttatattgaaatcataaactatcacccgctgcttctctgagttacttttaattttgccttgtggttatggtttggcgtttccttctgtttggttttcagagccccatgtctatatagtcctgagtgcaagtaattactatacttgtaaatgaagatcagtatttctgcctagatctgataaaaaaattttcttgtcttagttataaaaattcaaagaaatgtgttacaaagatacttagtatagctcctcagccataacctgagacttgggatgaaatttaaaccagatacgatttactttgcagatcataaggctttttatactcttgttatcaaaatggcttatttttcaggcactaaggattgttaagagaaaagcttttcaacgaaggattgcctttcttctcccacactgttcttgatttcctctctctttcaggcctcaacaggcactgtattcattgccaatgttccaaattatcaaattcaagtgaatttatttgtgtgttctttacttatataaaaaaagataactttaaggatgtgcaagtacatttccaactgctagcacaaccagtattttgtaattaaacaaatcgctgtatggtatggtcttctacacatttatgtctatagatatctatcgatcatctttctattctgtttcatgactgaataatgtaaaaccagtgttggcaattggtatcatcaatgatactcattttttaataaccaaaggcaggggaaaatcattttacttattaataaatattttatgatgtgaa

SEQ ID NO: 22795 - protein, 418 aa, Artificial Sequence
  derived and/or modified sequence
MSVAFAAPRQRGKGEITPAAIQKMLDDNNHLIQCIMDSQNKGKTSECSQYQQMLHTNLVYLATIADSNQNMQSLLPAPPTQNMPMGPGGMNQSGPPPPPRSHNMPSDGMVGGGPPAPHMQNQMNGQMPGPNHMPMQGPGPNQLNMTNSSMNMPSSSHGSMGGYNHSVPSSQSMPVQNQMTMSQGQPMGNYGPRPNMSMQPNQGPMMHQQPPSQQYNMPQGGGQHYQGQQPPMGMMGQVNQGNHMMGQRQIPPYRPPQQGPPQQYSGQEDYYGDQYSHGGQGPPEGMNQQYYPDGHNDYGYQQPSYPEQGYDRPYEDSSQHYYEGGNSQYGQQQDAYQGPPPQQGYPPQQQQYPGQQGYPGQQQGYGPSQGGPGPQYPNYPQGQGQQYGGYRPTQPGPPQPPQQRPYGYDQGQYGNYQQ

SEQ ID NO: 22796 - protein, 421 aa, Artificial Sequence
  derived and/or modified sequence
GGNMSVAFAAPRQRGKGEITPAAIQKMLDDNNHLIQCIMDSQNKGKTSECSQYQQMLHTNLVYLATIADSNQNMQSLLPAPPTQNMPMGPGGMNQSGPPPPPRSHNMPSDGMVGGGPPAPHMQNQMNGQMPGPNHMPMQGPGPNQLNMTNSSMNMPSSSHGSMGGYNHSVPSSQSMPVQNQMTMSQGQPMGNYGPRPNMSMQPNQGPMMHQQPPSQQYNMPQGGGQHYQGQQPPMGMMGQVNQGNHMMGQRQIPPYRPPQQGPPQQYSGQEDYYGDQYSHGGQGPPEGMNQQYYPDGHNDYGYQQPSYPEQGYDRPYEDSSQHYYEGGNSQYGQQQDAYQGPPPQQGYPPQQQQYPGQQGYPGQQQGYGPSQGGPGPQYPNYPQGQGQQYGGYRPTQPGPPQPPQQRPYGYDQGQYGNYQQ

SEQ ID NO: 22797 - protein, 132 aa, Artificial Sequence
  derived and/or modified sequence
MNQQYYPDGHNDYGYQQPSYPEQGYDRPYEDSSQHYYEGGNSQYGQQQDAYQGPPPQQGYPPQQQQYPGQQGYPGQQQGYGPSQGGPGPQYPNYPQGQGQQYGGYRPTQPGPPQPPQQRPYGYDQNSRWTVC

SEQ ID NO: 22798 - protein, 336 aa, Artificial Sequence
  derived and/or modified sequence
MPMGPGGMNQSGPPPPPRSHNMPSDGMVGGGPPAPHMQNQMNGQMPGPNHMPMQGPGPNQLNMTNSSMNMPSSSHGSMGGYNHSVPSSQSMPVQNQMTMSQGQPMGNYGPRPNMSMQPNQGPMMHQQPPSQQYNMPQGGGQHYQGQQPPMGMMGQVNQGNHMMGQRQIPPYRPPQQGPPQQYSGQEDYYGDQYSHGGQGPPEGMNQQYYPDGHNDYGYQQPSYPEQGYDRPYEDSSQHYYEGGNSQYGQQQDAYQGPPPQQGYPPQQQQYPGQQGYPGQQQGYGPSQGGPGPQYPNYPQGQGQQYGGYRPTQPGPPQPPQQRPYGYDQGQYGNYQQ

SEQ ID NO: 22799 - protein, 395 aa, Artificial Sequence
  derived and/or modified sequence
MLDDNNHLIQCIMDSQNKGKTSECSQYQQMLHTNLVYLATIADSNQNMQSLLPAPPTQNMPMGPGGMNQSGPPPPPRSHNMPSDGMVGGGPPAPHMQNQMNGQMPGPNHMPMQGPGPNQLNMTNSSMNMPSSSHGSMGGYNHSVPSSQSMPVQNQMTMSQGQPMGNYGPRPNMSMQPNQGPMMHQQPPSQQYNMPQGGGQHYQGQQPPMGMMGQVNQGNHMMGQRQIPPYRPPQQGPPQQYSGQEDYYGDQYSHGGQGPPEGMNQQYYPDGHNDYGYQQPSYPEQGYDRPYEDSSQHYYEGGNSQYGQQQDAYQGPPPQQGYPPQQQQYPGQQGYPGQQQGYGPSQGGPGPQYPNYPQGQGQQYGGYRPTQPGPPQPPQQRPYGYDQGQYGNYQQ

SEQ ID NO: 22800 - DNA, 1257 bp, Artificial Sequence
  derived and/or modified sequence
atgagcgtggccttcgccgcccccagacagagaggcaagggcgagatcacccccgccgccatccagaagatgctggacgacaacaaccacctgatccagtgcatcatggacagccagaacaagggcaagaccagcgagtgcagccagtaccagcagatgctgcacaccaacctggtgtacctggccaccatcgccgacagcaaccagaacatgcagagcctgctgcccgccccccccacccagaacatgcccatgggccccggcggcatgaaccagagcggccccccccccccccccagaagccacaacatgcccagcgacggcatggtgggcggcggcccccccgccccccacatgcagaaccagatgaacggccagatgcccggccccaaccacatgcccatgcagggccccggccccaaccagctgaacatgaccaacagcagcatgaacatgcccagcagcagccacggcagcatgggcggctacaaccacagcgtgcccagcagccagagcatgcccgtgcagaaccagatgaccatgagccagggccagcccatgggcaactacggccccagacccaacatgagcatgcagcccaaccagggccccatgatgcaccagcagccccccagccagcagtacaacatgccccagggcggcggccagcactaccagggccagcagccccccatgggcatgatgggccaggtgaaccagggcaaccacatgatgggccagagacagatccccccctacagacccccccagcagggccccccccagcagtacagcggccaggaggactactacggcgaccagtacagccacggcggccagggcccccccgagggcatgaaccagcagtactaccccgacggccacaacgactacggctaccagcagcccagctaccccgagcagggctacgacagaccctacgaggacagcagccagcactactacgagggcggcaacagccagtacggccagcagcaggacgcctaccagggcccccccccccagcagggctaccccccccagcagcagcagtaccccggccagcagggctaccccggccagcagcagggctacggccccagccagggcggccccggcccccagtaccccaactacccccagggccagggccagcagtacggcggctacagacccacccagcccggccccccccagcccccccagcagagaccctacggctacgaccagggccagtacggcaactaccagcagtag

SEQ ID NO: 22801 - DNA, 1266 bp, Artificial Sequence
  derived and/or modified sequence
ggcggcaacatgagcgtggccttcgccgcccccagacagagaggcaagggcgagatcacccccgccgccatccagaagatgctggacgacaacaaccacctgatccagtgcatcatggacagccagaacaagggcaagaccagcgagtgcagccagtaccagcagatgctgcacaccaacctggtgtacctggccaccatcgccgacagcaaccagaacatgcagagcctgctgcccgccccccccacccagaacatgcccatgggccccggcggcatgaaccagagcggccccccccccccccccagaagccacaacatgcccagcgacggcatggtgggcggcggcccccccgccccccacatgcagaaccagatgaacggccagatgcccggccccaaccacatgcccatgcagggccccggccccaaccagctgaacatgaccaacagcagcatgaacatgcccagcagcagccacggcagcatgggcggctacaaccacagcgtgcccagcagccagagcatgcccgtgcagaaccagatgaccatgagccagggccagcccatgggcaactacggccccagacccaacatgagcatgcagcccaaccagggccccatgatgcaccagcagccccccagccagcagtacaacatgccccagggcggcggccagcactaccagggccagcagccccccatgggcatgatgggccaggtgaaccagggcaaccacatgatgggccagagacagatccccccctacagacccccccagcagggccccccccagcagtacagcggccaggaggactactacggcgaccagtacagccacggcggccagggcccccccgagggcatgaaccagcagtactaccccgacggccacaacgactacggctaccagcagcccagctaccccgagcagggctacgacagaccctacgaggacagcagccagcactactacgagggcggcaacagccagtacggccagcagcaggacgcctaccagggcccccccccccagcagggctaccccccccagcagcagcagtaccccggccagcagggctaccccggccagcagcagggctacggccccagccagggcggccccggcccccagtaccccaactacccccagggccagggccagcagtacggcggctacagacccacccagcccggccccccccagcccccccagcagagaccctacggctacgaccagggccagtacggcaactaccagcagtag

SEQ ID NO: 22802 - DNA, 1257 bp, Artificial Sequence
  derived and/or modified sequence
atgtctgtggctttcgccgccccacgccagaggggtaaaggagaaattacacctgcagctatacagaagatgttagacgacaacaatcacctaatacagtgtattatggactctcagaataagggtaagacttcagaatgctctcaatatcagcaaatgcttcacacaaacctggtttacctcgccacaattgctgattctaaccagaatatgcagtcgctgctgcccgctccccctacccagaacatgcccatgggacctggagggatgaaccagtcggggcctccacccccaccacgatctcacaacatgcctagcgacggaatggtcggcggtggccccccagccccccatatgcagaatcagatgaatggtcagatgcctgggccgaatcatatgcctatgcagggaccagggccgaatcagttaaacatgaccaacagttctatgaacatgccttcatccagtcatggcagcatgggaggatataaccatagcgtgcctagttcgcagagcatgcccgtgcagaaccaaatgaccatgtcacaagggcagcctatgggcaactacggcccccgccctaatatgtctatgcagcccaatcagggcccaatgatgcatcagcagccaccgtctcagcagtacaacatgccccagggcggcgggcagcactaccaggggcagcagcctcccatggggatgatgggacaggtcaaccagggaaatcatatgatgggacagagacaaatacctccatacaggccccctcagcaagggccgccccagcaatactctggacaggaagactattacggcgaccaatactcccacggtggtcagggaccccccgagggcatgaaccagcagtattaccctgacggtcataacgactatgggtaccagcaaccttcatacccagagcagggatatgatcggccttacgaggactccagccaacattattacgagggagggaacagtcagtacggccagcagcaggatgcctaccagggacccccccctcagcaaggataccctccacagcagcagcagtaccccgggcagcagggatacccaggacagcagcagggctatgggcctagccagggagggccgggaccgcagtatcccaattaccctcagggacaagggcagcaatacggaggatacagacccactcagcctgggcccccccagcctccgcaacagcggccatatggttatgatcaagggcagtatggtaattatcagcagtag

SEQ ID NO: 22803 - DNA, 1266 bp, Artificial Sequence
  derived and/or modified sequence
ggcggaaatatgagtgtcgccttcgcggctccgagacagaggggaaaaggtgagatcacccccgccgctattcagaagatgctggacgacaataatcacttaattcagtgtattatggacagccagaacaaaggaaagacatctgagtgtagtcagtatcagcaaatgttgcataccaatctggtctatctcgctacaatcgctgacagtaaccagaatatgcagagcctactgcccgccccacctacacaaaatatgcctatgggacctggtgggatgaaccagagtggaccgccccctcctcctagatcacataacatgccgagcgatggtatggtgggtggcggacctcccgctcctcatatgcaaaatcagatgaacgggcagatgccaggccccaaccacatgcccatgcagggacctggccctaatcagctgaatatgactaatagtagcatgaacatgcctagctcaagccatgggagcatgggcggatataaccactctgtgcctagctcccagtctatgcctgtacaaaatcaaatgacgatgtctcaaggtcagcccatggggaactacggccctcgccctaacatgtccatgcagcccaaccaggggccaatgatgcaccagcaacctccatcacaacagtacaacatgccccaggggggcggccagcactaccagggccagcaacctcccatgggaatgatgggacaagttaaccaagggaatcacatgatggggcagcggcagatacctccctacagacccccacagcagggcccgccacagcagtactccggccaagaggattactacggcgaccagtactcccatggcggccagggcccccccgaggggatgaaccagcagtattatccagacggccacaacgactacggctaccagcagccaagttacccggaacaggggtatgatcgcccctatgaggattcttcccagcattactacgaagggggaaacagccagtatggacagcaacaagatgcttatcagggaccccctccacaacagggatatcccccccagcagcaacagtaccccggccagcagggctacccaggccaacaacaggggtacgggccgagccaggggggacctggtccgcaatacccaaactacccccaggggcagggtcagcaatatggaggctaccgtcccacgcagcccgggcctccgcaaccccctcagcagcggccctacgggtacgaccaaggacagtacgggaattaccagcaatag

SEQ ID NO: 22804 - DNA, 1257 bp, Artificial Sequence
  derived and/or modified sequence
atgtctgtggcctttgctgccccccggcagagaggaaaaggagagatcaccccagctgccatccagaagatgctggatgacaacaaccacctgatccagtgcatcatggacagccagaacaagggcaagaccagcgagtgcagccagtaccagcagatgctgcacaccaacctggtgtacctggccaccatcgctgacagcaaccagaacatgcagagcctgctgcctgccccacccacccagaacatgcccatgggccctgggggcatgaaccagagcggccccccacctccacccaggagccacaacatgcccagtgatggcatggtgggcggcggccccccagccccccacatgcagaaccagatgaatggccagatgcctggccccaaccacatgcccatgcagggccctggccccaaccagctgaacatgaccaacagctccatgaacatgcccagcagcagccacggctccatgggcggctacaaccacagcgtgcccagcagccagagcatgcctgtgcagaaccagatgaccatgagccagggccagcccatgggcaactacggcccccggcccaacatgtccatgcagcccaaccagggccccatgatgcaccagcagccccccagccagcagtacaacatgccccagggcggcggccagcactaccagggccagcagccccccatgggcatgatgggccaggtgaaccagggcaaccacatgatgggccagaggcagatccccccctacagaccaccccagcagggccccccccagcagtacagcggccaggaggactactatggagaccagtacagccatggaggccagggccccccagagggcatgaaccagcagtactacccagatggccacaatgactatggctaccagcagcccagctacccagagcagggctatgaccggccctatgaggacagcagccagcactactatgagggcggcaacagccagtatggccagcagcaggatgcctaccagggccccccaccccagcagggctacccaccccagcagcagcagtacccaggccagcagggctacccaggccagcagcagggctacggccccagccagggcggccctggcccccagtaccccaactacccccagggccagggccagcagtatggaggctaccggcccacccagcccggccccccccagcccccccagcagaggccctacggctatgaccagggccagtatggcaactaccagcagtag

SEQ ID NO: 22805 - DNA, 1266 bp, Artificial Sequence
  derived and/or modified sequence
gggggcaacatgtctgtggcctttgctgccccccggcagaggggcaagggggagatcaccccagctgccatccagaagatgctggatgacaacaaccacctgatccagtgcatcatggacagccagaacaagggcaagaccagtgaatgttcccagtaccagcagatgctgcacaccaacctggtgtacctggccaccatcgctgacagcaaccagaacatgcagagcctgctgcctgccccacccacccagaacatgcccatgggccctgggggcatgaaccagagcggccccccacctccacccaggagccacaacatgcccagtgatggcatggtgggcggcggccccccagccccccacatgcagaaccagatgaatggccagatgcctggccccaaccacatgcccatgcagggccctggccccaaccagctgaacatgaccaacagctccatgaacatgcccagcagcagccacggctccatgggcggctacaaccacagcgtgcccagcagccagagcatgcctgtgcagaaccagatgaccatgagccagggccagcccatgggcaactacggcccccggcccaacatgtccatgcagcccaaccagggccccatgatgcaccagcagccccccagccagcagtacaacatgccccagggcggcggccagcactaccagggccagcagccccccatgggcatgatgggccaggtgaaccagggcaaccacatgatgggccagaggcagatccccccctaccggcccccccagcagggccccccccagcagtacagcggccaggaggactactacggggaccagtacagccacggcggccagggccccccagagggcatgaaccagcagtactacccagatggccacaatgactatggctaccagcagcccagctacccagagcagggctatgaccggccctatgaggacagcagccagcactactatgaaggaggcaacagccagtatggccagcagcaggatgcctaccagggccccccaccccagcagggctacccaccccagcagcagcagtacccaggccagcagggctacccaggccagcagcagggctacggccccagccagggcggccctggcccccagtaccccaactacccccagggccagggccagcagtatggaggctaccggcccacccagcccggccccccccagcccccccagcagaggccctacggctatgaccagggccagtatggcaactaccagcagtag

SEQ ID NO: 22806 - DNA, 1257 bp, Artificial Sequence
  derived and/or modified sequence
atgagcgtggccttcgccgccccccggcagcggggcaagggcgagattacccccgcggcaatccaaaagatgctggatgataacaaccacctcattcaatgtatcatggacagtcagaacaagggcaagacgagcgagtgctcacagtaccagcaaatgctacacaccaatctcgtgtacctcgcgactattgctgactccaatcaaaatatgcaaagtctactgccagctcctcctacacagaacatgcccatggggcccggcggcatgaatcagtccggcccgcccccccctccccggtctcacaacatgcccagcgacggcatggtcggcggcggccctcccgctcctcatatgcagaatcagatgaatggccagatgccaggacccaatcacatgccaatgcaagggcccggcccaaatcagttgaacatgaccaactcttcgatgaatatgccatccagcagccacggtagtatggggggatacaaccattctgtgccttcgtcgcagtcgatgccggtgcagaaccaaatgacaatgagccaggggcagccaatgggaaattacgggcctcgtcctaacatgtccatgcagcccaatcaaggaccgatgatgcatcagcagcccccatcccagcagtataatatgcctcagggggggggtcaacactaccagggacaacagcctccaatgggaatgatggggcaggtgaatcaggggaaccacatgatgggccagagacagatcccgccctataggccaccccagcaaggaccccctcaacagtacagcggccaagaagattactacggagaccagtactcccacggcggacagggcccccctgaaggtatgaaccagcagtactaccccgatggtcataatgattacgggtaccagcaacctagctaccccgagcagggatatgatcggccgtacgaagactccagccagcactattacgaaggcggtaacagtcagtacggacaacagcaagatgcctaccagggcccccccccccagcagggatatcctccgcagcagcagcaataccctgggcagcagggatacccgggccagcagcaaggctatggaccctcacaaggcggccccggacctcagtatcccaattacccccagggccaaggacagcaatacggtggctacagaccaacgcagccaggaccacctcagccacctcagcagcggccatacggctacgaccagggccagtatggcaattaccagcagtag

SEQ ID NO: 22807 - DNA, 1266 bp, Artificial Sequence
  derived and/or modified sequence
ggcggcaacatgagcgtggccttcgccgccccccggcagcggggcaaaggtgaaatcacaccggccgcaatccagaagatgctcgacgataacaaccacttaatacaatgcatcatggatagccagaataagggcaaaacatcggaatgcagccagtaccagcagatgctgcacaccaatttggtgtatttagccacgattgccgattcaaaccaaaacatgcagtcattattaccagcccctcctacccagaacatgcccatgggccccggggggatgaatcagagtgggccaccacctccacctagatctcacaatatgccctccgatgggatggtcggcggcgggcccccagcacctcacatgcagaaccagatgaacggacagatgcccgggccgaaccacatgccaatgcaagggccagggcccaaccaacttaacatgaccaacagctctatgaacatgcctagtagctctcatggaagtatggggggttacaatcactcagtgccatcgagtcagagcatgcctgttcaaaatcagatgactatgagccaaggccagcccatgggcaattacggtcccaggccgaatatgtccatgcaacctaaccaaggacctatgatgcaccagcagccaccatcgcaacaatataatatgccccagggcggcggccaacattaccagggccagcagcccccaatgggcatgatgggtcaagtcaatcagggaaaccacatgatggggcagaggcaaatacccccgtaccggcctccccaacagggacccccgcagcagtattctggtcaggaagattactacggggaccagtactcccacggtgggcaaggcccacccgaagggatgaatcagcagtactatccggatggtcataacgattacggatatcagcagcctagctaccccgagcaggggtacgataggccctacgaagacagttcacagcattattatgagggagggaattctcagtacgggcagcagcaagatgcgtatcagggccctccacctcagcagggctacccgccacagcagcagcagtacccaggtcaacagggctaccctggccaacaacaaggttacgggcccagtcaaggaggccccggcccccagtacccaaactaccctcagggccagggacagcagtacggaggatatagacccacccaacctggacctcctcagccgcctcagcaacggccttatgggtacgaccaggggcagtatggcaactatcagcagtag

SEQ ID NO: 22808 - DNA, 1257 bp, Artificial Sequence
  derived and/or modified sequence
atgagcgtcgcatttgcagcaccacgccagagaggaaagggcgaaatcacccccgctgcaatccagaagatgcttgacgataacaatcatcttatccagtgcatcatggacagtcaaaacaaggggaagacgagcgagtgttcccagtatcagcagatgctacacacgaatctggtctacttggcaactatcgcagatagcaaccaaaatatgcaaagcttgttgccagcgcctccgacgcaaaatatgccaatgggccctggcggaatgaatcagagcgggcctccacccccacccagatcacataatatgccttctgatggaatggttggcggtggtccgccagctcctcatatgcagaaccagatgaacggtcagatgcctggccctaaccatatgcccatgcagggtcccggacccaaccagttgaacatgacaaactccagcatgaatatgccttcatcgagccatggatccatgggcggatataatcactccgtcccatcaagtcagagtatgcctgtccaaaatcagatgactatgtcccaggggcagcccatgggaaactatggacctcgccctaacatgtcaatgcagccgaatcagggccctatgatgcatcagcagccacctagtcagcagtataacatgccgcagggaggtggacagcactaccagggacagcagcccccaatgggtatgatgggccaggtcaatcaggggaaccatatgatggggcagcgccagattcctccctatagaccaccacagcagggtcccccacaacaatacagtggtcaggaggactactacggagaccaatactcccacgggggacaagggcctccagagggcatgaaccagcaatattacccagatggccacaatgattacggataccagcagccctcataccctgagcagggctatgataggccttacgaagatagcagccaacactattacgagggcggtaactcccagtatggccaacagcaagatgcgtaccaggggccacctcctcagcaaggatatccacctcagcagcagcagtaccctgggcaacaggggtaccccggacaacagcaaggatatggaccaagccagggaggtccaggccctcaatacccaaattaccctcagggtcaggggcaacaatacggtggctaccgaccaactcagcccggaccgcctcagcccccacagcagcgaccttacgggtacgatcagggacagtatggcaattaccagcagtag

SEQ ID NO: 22809 - DNA, 1266 bp, Artificial Sequence
  derived and/or modified sequence
ggaggaaacatgagcgtggctttcgcagcaccacggcagcgcggaaaaggagaaattacaccagcagccatccagaagatgcttgacgacaataaccatttaattcagtgcatcatggacagtcaaaacaaaggcaagaccagcgaatgcagccagtatcagcaaatgctgcacaccaatttggtttacctcgcgactattgccgactccaatcagaatatgcagtccttgctacccgctcccccaacccagaacatgcccatgggacccggtgggatgaaccagtcagggccacccccaccaccacggtcgcataacatgcctagtgacgggatggtcggtggcggaccccctgccccacacatgcagaaccagatgaacggacagatgcctggccctaatcacatgccaatgcagggcccaggcccaaatcagcttaacatgacaaactcgtccatgaatatgccctccagcagccatgggtcgatgggaggctataaccattctgtaccaagctcacagtctatgcctgtgcagaatcagatgactatgtctcagggtcagccgatgggaaactacggccctcggcctaatatgtctatgcagccgaaccaagggccaatgatgcatcagcagcctccctcacagcagtataatatgccgcagggcggaggccaacactatcaggggcaacaaccacccatgggaatgatgggacaggtaaatcagggcaatcacatgatgggacagaggcagatacctccttatcgcccaccccaacagggtccgccacagcaatactcagggcaggaagattactacggtgaccaatactcccacgggggacagggccctccagagggaatgaatcagcagtactatccggacgggcacaacgactacgggtatcagcagcccagctatcccgaacaaggctatgaccgaccctacgaagattcttcgcagcattattacgagggagggaattcacagtacgggcagcagcaagacgcttaccaagggcctcctcctcagcagggctaccctccgcaacagcagcagtatccagggcagcaggggtatcccggacaacaacaaggatacggccctagccaggggggacccggtcctcagtacccaaattatcctcagggtcaaggtcagcagtacggtgggtacaggccgacccagcccggaccaccacaacctcctcagcagaggccttacggatacgatcaggggcagtacgggaattaccaacagtag

SEQ ID NO: 22810 - DNA, 3434 bp, Artificial Sequence
  derived and/or modified sequence
gagaggccggcgtctctcccccagtttgccgttcacccggagcgctcgggacttgccgatagtggtgacggcggcaacatgtctgtggctttcgcggccccgaggcagcgaggcaagggggagatcactcccgctgcgattcagaagatgttggatgacaataaccatcttattcagtgtataatggactctcagaataaaggaaagacctcagagtgttctcagtatcagcagatgttgcacacaaacttggtataccttgctacaatagcagattctaatcaaaatatgcagtctcttttaccagcaccacccacacagaatatgcctatgggtcctggagggatgaatcagagcggccctcccccacctccacgctctcacaacatgccttcagatggaatggtaggtgggggtcctcctgcaccgcacatgcagaaccagatgaacggccagatgcctgggcctaaccatatgcctatgcagggacctggacccaatcaactcaatatgacaaacagttccatgaatatgccttcaagtagccatggatccatgggaggttacaaccattctgtgccatcatcacagagcatgccagtacagaatcagatgacaatgagtcagggacaaccaatgggaaactatggtcccagaccaaatatgagtatgcagccaaaccaaggtccaatgatgcatcagcagcctccttctcagcaatacaatatgccacagggaggcggacagcattaccaaggacagcagccacctatgggaatgatgggtcaagttaaccaaggcaatcatatgatgggtcagagacagattcctccctatagacctcctcaacagggcccaccacagcagtactcaggccaggaagactattacggggaccaatacagtcatggtggacaaggtcctccagaaggcatgaaccagcaatattaccctgatggtcataatgattacggttatcagcaaccgtcgtatcctgaacaaggctacgataggccttatgaggattcctcacaacattactacgaaggaggaaattcacagtatggccaacagcaagatgcataccagggaccacctccacaacagggatatccaccccagcagcagcagtacccagggcagcaaggttacccaggacagcagcagggctacggtccttcacagggtggtccaggtcctcagtatcctaactacccacagggacaaggtcagcagtatggaggatatagaccaacacagcctggaccaccacagccaccccagcagaggccttatggatatgaccagggacagtatggaaattaccagcagtgaaaaagtacttacattccagtagccagtatctattagcagccatattgtcacctcagcactgtggacacctccctgtgaagagatccttccattccatctagtttttggaaaaaccttgtggataagtggctgtttcatcagtaagcagcctttgtggtttagttataaaaggctttagtagctcaaaaatactcttgatttcacatttctactctagatggcaacattggacagaaaatgcaatgacataaccaatttgtaatgattttggaactgtgtttcaaatggactgttacagactgaaaggtgtgaacagctttgtatgtttatgaagggtaagggaatttaatacttttccacagatttttttgtaaggggaagagggaaatgtacactttttacagcagcaatattttgtatattatgtttatttcatgtggtgaatatgcaaggcggtacactacgcactggacagcatcagaaatcctctgttaatgtggactggaacatggtagatgcttgattgttttggtctcaaaatggtgtgctataaagataaaggtgaggggaagacaaagcacaccatatgtccactgttctgttctcatagaggaaattcaaatcccttttatctattagataatcaagggcactgtgatacagttttgagtaaaaagacattttttaaaagccttccagttttgtggattaaacctttttataaagatcatttataatactgttttaaaatgtgaggcaataagaattactttgtgttggatctgaggaggctttggtaaaacagtttcatctaaatgaaagtggtaatcctcttctaaaatagcaataactgaaaatgaaagtgttaattttaccttgtttgagttatcagggaacttagtaagtaatatcaaagcattttataaatgatatcaaagaagagtcaacattgatccagtcattttattttgtaatattgagggataattggttattaaactgaatagttcaggagactttacaaacctttgtttcaactttcttatctggaaataatatcatttataaagggacacttttatgtttttcccttttttatgttggttgatataacacaaagagatatttaggaaaatgcttattgatgaggtttattctatctgtttttaaagcaccgaggttgcattctagataaccttgtttattagcatggcatattttaatcattatttgagactgtcctgtgcctgattattttagctaaattcagggagattgcgtggggcaggaaagcatgcattgaaaaatttctaaccacggttatttaagcataatctgaaaacatctagcccaaaggtaagttgctattttcatcacagttgcctatgcccagggaataagatgtattctttataattgaattggtttttcccacgtctaactggaaacaaaacagaaggggcgtcataaatttgaataagcagaacatactgttctcaacatactgtaatcaaaaggaggaatttcagtgggtctctgtgtgtgtatgagagagagagtgtgtgtttgtgtgtttcaaggtcagaacaggtttttttgtttttgttttttgttctttgtttttttttttgagatggagtcttgctcttgtcgcccaggctggagtgcagtggcgcaatctcagctcactgcaacctccgcctcccaggttcaagcagttctcctgcctcagcctcctgagtagctgggatgacaggcacccgccaccacacccagctaatttttgtacttttagtagagacgaggtttcgccatgttggccaggctggtctcgaactcctgacctcaggtgatccacccgcctcggccttccaaagtgctgggattacaggcgtgagccaccgtgcctggccagaataggttttttctttcaacttgatcagtagaaaatggacatcaagtttgaacagataaatcatggacagccttattgtgattgaaatgcttgtaggttctgtgccaattttccaccactgtgtactttgttgctatttaaaactgtatcaactctaacggaagaataaattatttgtgatttt

SEQ ID NO: 22811 - DNA, 1307 bp, Artificial Sequence
  derived and/or modified sequence
agtttgccgttcacccggagcgctcgggacttgccgatagtggtgacggcggcaacatgtctgtggctttcgcggccccgaggcagcgaggcaagggggagatcactcccgctgcgattcagaagatgttggatgacaataaccatcttattcagtgtataatggactctcagaataaaggaaagacctcagagtgttctcagtatcagcagatgttgcacacaaacttggtataccttgctacaatagcagattctaatcaaaatatgcagtctcttttaccagcaccacccacacagaatatgcctatgggtcctggagggatgaatcagagcggccctcccccacctccacgctctcacaacatgccttcagatggaatggtaggtgggggtcctcctgcaccgcacatgcagaaccagatgaacggccagatgcctgggcctaaccatatgcctatgcagggacctggacccaatcaactcaatatgacaaacagttccatgaatatgccttcaagtagccatggatccatgggaggttacaaccattctgtgccatcatcacagagcatgccagtacagaatcagatgacaatgagtcagggacaaccaatgggaaactatggtcccagaccaaatatgagtatgcagccaaaccaaggtccaatgatgcatcagcagcctccttctcagcaatacaatatgccacagggaggcggacagcattaccaaggacagcagccacctatgggaatgatgggtcaagttaaccaaggcaatcatatgatgggtcagagacagattcctccctatagacctcctcaacagggcccaccacagcagtactcaggccaggaagactattacggggaccaatacagtcatggtggacaaggtcctccagaaggcatgaaccagcaatattaccctgatggtcataatgattacggttatcagcaaccgtcgtatcctgaacaaggctacgataggccttatgaggattcctcacaacattactacgaaggaggaaattcacagtatggccaacagcaagatgcataccagggaccacctccacaacagggatatccaccccagcagcagcagtacccagggcagcaaggttacccaggacagcagcagggctacggtccttcacagggtggtccaggtcctcagtatcctaactacccacagggacaaggtcagcagtatggaggatatagaccaacacagcctggaccaccacagccaccccagcagaggccttatggatatgaccagaattctaggtggacagtttgt

SEQ ID NO: 22812 - protein, 278 aa, Artificial Sequence
  derived and/or modified sequence
MPRLSLLLPLLLLLLLPLLPPLSPSLGIRDVGGRRPKCGPCRPEGCPAPAPCPAPGISALDECGCCARCLGAEGASCGGRAGGRCGPGLVCASQAAGAAPEGTGLCVCAQRGTVCGSDGRSYPSVCALRLRARHTPRAHPGHLHKARDGPCEFAPVVVVPPRSVHNVTGAQVGLSCEVRAVPTPVITWRKVTKSPEGTQALEELPGDHVNIAVQVRGGPSDHEATAWILINPLRKEDEGVYQCHAANMVGEAESHSTVTVLDLSKYRSFHFPAPDDRM

SEQ ID NO: 22813 - DNA, 837 bp, Artificial Sequence
  derived and/or modified sequence
atgcccagactgagcctgctgctgcccctgctgctgctgctgctgctgcccctgctgccccccctgagccccagcctgggcatcagagacgtgggcggcagaagacccaagtgcggcccctgcagacccgagggctgccccgcccccgccccctgccccgcccccggcatcagcgccctggacgagtgcggctgctgcgccagatgcctgggcgccgagggcgccagctgcggcggcagagccggcggcagatgcggccccggcctggtgtgcgccagccaggccgccggcgccgcccccgagggcaccggcctgtgcgtgtgcgcccagagaggcaccgtgtgcggcagcgacggcagaagctaccccagcgtgtgcgccctgagactgagagccagacacacccccagagcccaccccggccacctgcacaaggccagagacggcccctgcgagttcgcccccgtggtggtggtgccccccagaagcgtgcacaacgtgaccggcgcccaggtgggcctgagctgcgaggtgagagccgtgcccacccccgtgatcacctggagaaaggtgaccaagagccccgagggcacccaggccctggaggagctgcccggcgaccacgtgaacatcgccgtgcaggtgagaggcggccccagcgaccacgaggccaccgcctggatcctgatcaaccccctgagaaaggaggacgagggcgtgtaccagtgccacgccgccaacatggtgggcgaggccgagagccacagcaccgtgaccgtgctggacctgagcaagtacagaagcttccacttccccgcccccgacgacagaatgtag
